United States Patent Application Publication US 2008/0113351 A1 - sequence listing, part 13

SEQ ID NO: 302992 - DNA, 19 bp, Homo sapiens
  siRNA target sequence for LOC57795 (NM_021165.1,1299-1317).
ctcacaaccggcagtttga

SEQ ID NO: 302993 - DNA, 19 bp, Homo sapiens
  siRNA target sequence for LOC57795 (NM_021165.1,1799-1817).
gccgagtccctggaaaact

SEQ ID NO: 302994 - DNA, 19 bp, Homo sapiens
  siRNA target sequence for LOC57795 (NM_021165.1,1889-1907).
gaggtacactccatcttca

SEQ ID NO: 302995 - DNA, 19 bp, Homo sapiens
  siRNA target sequence for LOC57795 (NM_021165.1,1892-1910).
gtacactccatcttcatca

SEQ ID NO: 302996 - DNA, 19 bp, Homo sapiens
  siRNA target sequence for LOC57795 (NM_021165.1,2233-2251).
gacagttcatgtttaccta

SEQ ID NO: 302997 - DNA, 19 bp, Homo sapiens
  siRNA target sequence for LOC57795 (NM_021165.1,2249-2267).
ctacggagccgaatcaagt

SEQ ID NO: 302998 - DNA, 19 bp, Homo sapiens
  siRNA target sequence for LOC57795 (NM_021165.1,2280-2298).
gctccaatgagacaatcta

SEQ ID NO: 302999 - DNA, 19 bp, Homo sapiens
  siRNA target sequence for LOC57795 (NM_021165.1,2283-2301).
ccaatgagacaatctacta

SEQ ID NO: 303000 - DNA, 19 bp, Homo sapiens
  siRNA target sequence for LOC57795 (NM_021165.1,2284-2302).
caatgagacaatctactat

SEQ ID NO: 303001 - DNA, 19 bp, Homo sapiens
  siRNA target sequence for LOC57795 (NM_021165.1,2317-2335).
gactgatccctctaagaat

SEQ ID NO: 303002 - DNA, 19 bp, Homo sapiens
  siRNA target sequence for LOC57795 (NM_021165.1,2396-2414).
gatgctatccgggacttaa

SEQ ID NO: 303003 - DNA, 19 bp, Homo sapiens
  siRNA target sequence for LOC57795 (NM_021165.1,2519-2537).
gtccgacttgaccttttct

SEQ ID NO: 303004 - DNA, 19 bp, Homo sapiens
  siRNA target sequence for LOC57795 (NM_021165.1,2599-2617).
cctgagggctttcaattct

SEQ ID NO: 303005 - DNA, 19 bp, Homo sapiens
  siRNA target sequence for LOC57795 (NM_021165.1,2600-2618).
ctgagggctttcaattcta

SEQ ID NO: 303006 - DNA, 19 bp, Homo sapiens
  siRNA target sequence for LOC57795 (NM_021165.1,2625-2643).
caaaccctgtggaatatga

SEQ ID NO: 303007 - DNA, 19 bp, Homo sapiens
  siRNA target sequence for PPIL6 (NM_173672.1,378-396).
gggatatagttgacattaa

SEQ ID NO: 303008 - DNA, 19 bp, Homo sapiens
  siRNA target sequence for PPIL6 (NM_173672.1,415-433).
cgcactcactgaggatttt

SEQ ID NO: 303009 - DNA, 19 bp, Homo sapiens
  siRNA target sequence for PPIL6 (NM_173672.1,416-434).
gcactcactgaggattttt

SEQ ID NO: 303010 - DNA, 19 bp, Homo sapiens
  siRNA target sequence for PPIL6 (NM_173672.1,428-446).
gatttttccgctaagttct

SEQ ID NO: 303011 - DNA, 19 bp, Homo sapiens
  siRNA target sequence for PPIL6 (NM_173672.1,435-453).
ccgctaagttcttaagaga

SEQ ID NO: 303012 - DNA, 19 bp, Homo sapiens
  siRNA target sequence for PPIL6 (NM_173672.1,450-468).
gagacaccaagcatgattt

SEQ ID NO: 303013 - DNA, 19 bp, Homo sapiens
  siRNA target sequence for PPIL6 (NM_173672.1,495-513).
cttctccaattggaagatt

SEQ ID NO: 303014 - DNA, 19 bp, Homo sapiens
  siRNA target sequence for PPIL6 (NM_173672.1,498-516).
ctccaattggaagattgat

SEQ ID NO: 303015 - DNA, 19 bp, Homo sapiens
  siRNA target sequence for PPIL6 (NM_173672.1,594-612).
ctcaacgtggcataagact

SEQ ID NO: 303016 - DNA, 19 bp, Homo sapiens
  siRNA target sequence for PPIL6 (NM_173672.1,599-617).
cgtggcataagactacatt

SEQ ID NO: 303017 - DNA, 19 bp, Homo sapiens
  siRNA target sequence for PPIL6 (NM_173672.1,600-618).
gtggcataagactacatta

SEQ ID NO: 303018 - DNA, 19 bp, Homo sapiens
  siRNA target sequence for PPIL6 (NM_173672.1,604-622).
cataagactacattacaaa

SEQ ID NO: 303019 - DNA, 19 bp, Homo sapiens
  siRNA target sequence for PPIL6 (NM_173672.1,628-646).
catttttcatcgaatagta

SEQ ID NO: 303020 - DNA, 19 bp, Homo sapiens
  siRNA target sequence for PPIL6 (NM_173672.1,658-676).
gatacaaggaggggatata

SEQ ID NO: 303021 - DNA, 19 bp, Homo sapiens
  siRNA target sequence for PPIL6 (NM_173672.1,662-680).
caaggaggggatatagtgt

SEQ ID NO: 303022 - DNA, 19 bp, Homo sapiens
  siRNA target sequence for PPIL6 (NM_173672.1,692-710).
gataatggagagtcgattt

SEQ ID NO: 303023 - DNA, 19 bp, Homo sapiens
  siRNA target sequence for PPIL6 (NM_173672.1,791-809).
cacagcaacgggtcacaat

SEQ ID NO: 303024 - DNA, 19 bp, Homo sapiens
  siRNA target sequence for PPIL6 (NM_173672.1,795-813).
gcaacgggtcacaattcta

SEQ ID NO: 303025 - DNA, 19 bp, Homo sapiens
  siRNA target sequence for PPIL6 (NM_173672.1,796-814).
caacgggtcacaattctat

SEQ ID NO: 303026 - DNA, 19 bp, Homo sapiens
  siRNA target sequence for PPIL6 (NM_173672.1,800-818).
gggtcacaattctatatca

SEQ ID NO: 303027 - DNA, 19 bp, Homo sapiens
  siRNA target sequence for PPIL6 (NM_173672.1,802-820).
gtcacaattctatatcaca

SEQ ID NO: 303028 - DNA, 19 bp, Homo sapiens
  siRNA target sequence for PPIL6 (NM_173672.1,827-845).
gcaactccttatctagata

SEQ ID NO: 303029 - DNA, 19 bp, Homo sapiens
  siRNA target sequence for PPIL6 (NM_173672.1,831-849).
ctccttatctagatagaaa

SEQ ID NO: 303030 - DNA, 19 bp, Homo sapiens
  siRNA target sequence for PPIL6 (NM_173672.1,858-876).
cttttgggcaactgattga

SEQ ID NO: 303031 - DNA, 19 bp, Homo sapiens
  siRNA target sequence for PPIL6 (NM_173672.1,887-905).
gtgcttaaacaactagaat

SEQ ID NO: 303032 - DNA, 19 bp, Homo sapiens
  siRNA target sequence for PPIL6 (NM_173672.1,955-973).
cagtggagatccttatgct

SEQ ID NO: 303033 - DNA, 19 bp, Homo sapiens
  siRNA target sequence for STUB1 (NM_005861.1,225-243).
ccgctggtggccgtgtatt

SEQ ID NO: 303034 - DNA, 19 bp, Homo sapiens
  siRNA target sequence for STUB1 (NM_005861.1,226-244).
cgctggtggccgtgtatta

SEQ ID NO: 303035 - DNA, 19 bp, Homo sapiens
  siRNA target sequence for STUB1 (NM_005861.1,228-246).
ctggtggccgtgtattaca

SEQ ID NO: 303036 - DNA, 19 bp, Homo sapiens
  siRNA target sequence for STUB1 (NM_005861.1,334-352).
ctgtgaaggcgcacttctt

SEQ ID NO: 303037 - DNA, 19 bp, Homo sapiens
  siRNA target sequence for STUB1 (NM_005861.1,471-489).
cttcgaatcgcgaagaaga

SEQ ID NO: 303038 - DNA, 19 bp, Homo sapiens
  siRNA target sequence for STUB1 (NM_005861.1,921-939).
gttattgacgcattcatct

SEQ ID NO: 303039 - DNA, 19 bp, Homo sapiens
  siRNA target sequence for LECT1 (NM_007015.1,5-23).
cagagaactccgacaaagt

SEQ ID NO: 303040 - DNA, 19 bp, Homo sapiens
  siRNA target sequence for LECT1 (NM_007015.1,198-216).
ggggagcgacagtcacatt

SEQ ID NO: 303041 - DNA, 19 bp, Homo sapiens
  siRNA target sequence for LECT1 (NM_007015.1,200-218).
ggagcgacagtcacattta

SEQ ID NO: 303042 - DNA, 19 bp, Homo sapiens
  siRNA target sequence for LECT1 (NM_007015.1,203-221).
gcgacagtcacatttacaa

SEQ ID NO: 303043 - DNA, 19 bp, Homo sapiens
  siRNA target sequence for LECT1 (NM_007015.1,226-244).
cattacaccatgagtatca

SEQ ID NO: 303044 - DNA, 19 bp, Homo sapiens
  siRNA target sequence for LECT1 (NM_007015.1,351-369).
gaatggcatcacaggaatt

SEQ ID NO: 303045 - DNA, 19 bp, Homo sapiens
  siRNA target sequence for LECT1 (NM_007015.1,355-373).
ggcatcacaggaattcgtt

SEQ ID NO: 303046 - DNA, 19 bp, Homo sapiens
  siRNA target sequence for LECT1 (NM_007015.1,383-401).
gagagaagtgctacattaa

SEQ ID NO: 303047 - DNA, 19 bp, Homo sapiens
  siRNA target sequence for LECT1 (NM_007015.1,477-495).
gatcatgccagtcaaatat

SEQ ID NO: 303048 - DNA, 19 bp, Homo sapiens
  siRNA target sequence for LECT1 (NM_007015.1,483-501).
gccagtcaaatatgaagaa

SEQ ID NO: 303049 - DNA, 19 bp, Homo sapiens
  siRNA target sequence for LECT1 (NM_007015.1,555-573).
gagttctaaggtgttagaa

SEQ ID NO: 303050 - DNA, 19 bp, Homo sapiens
  siRNA target sequence for LECT1 (NM_007015.1,557-575).
gttctaaggtgttagaact

SEQ ID NO: 303051 - DNA, 19 bp, Homo sapiens
  siRNA target sequence for LECT1 (NM_007015.1,576-594).
ctgcggtgaccttcctatt

SEQ ID NO: 303052 - DNA, 19 bp, Homo sapiens
  siRNA target sequence for LECT1 (NM_007015.1,661-679).
gttccaactaccacaaaaa

SEQ ID NO: 303053 - DNA, 19 bp, Homo sapiens
  siRNA target sequence for LECT1 (NM_007015.1,713-731).
ctggaagactgaataatga

SEQ ID NO: 303054 - DNA, 19 bp, Homo sapiens
  siRNA target sequence for LECT1 (NM_007015.1,753-771).
ggactcacaagccttcaat

SEQ ID NO: 303055 - DNA, 19 bp, Homo sapiens
  siRNA target sequence for LECT1 (NM_007015.1,765-783).
cttcaatcctgataatcct

SEQ ID NO: 303056 - DNA, 19 bp, Homo sapiens
  siRNA target sequence for LECT1 (NM_007015.1,773-791).
ctgataatccttatcatca

SEQ ID NO: 303057 - DNA, 19 bp, Homo sapiens
  siRNA target sequence for LECT1 (NM_007015.1,828-846).
ggatcacgaaggaatctgt

SEQ ID NO: 303058 - DNA, 19 bp, Homo sapiens
  siRNA target sequence for LECT1 (NM_007015.1,829-847).
gatcacgaaggaatctgtt

SEQ ID NO: 303059 - DNA, 19 bp, Homo sapiens
  siRNA target sequence for LECT1 (NM_007015.1,832-850).
cacgaaggaatctgttgta

SEQ ID NO: 303060 - DNA, 19 bp, Homo sapiens
  siRNA target sequence for LECT1 (NM_007015.1,914-932).
catggccttataattatca

SEQ ID NO: 303061 - DNA, 19 bp, Homo sapiens
  siRNA target sequence for LECT1 (NM_007015.1,944-962).
cggcctgcagagtcatcat

SEQ ID NO: 303062 - DNA, 19 bp, Homo sapiens
  siRNA target sequence for COLQ (NM_005677.2,133-151).
gtcctgaatccaatgactt

SEQ ID NO: 303063 - DNA, 19 bp, Homo sapiens
  siRNA target sequence for COLQ (NM_005677.2,147-165).
gactttgggaatttatctt

SEQ ID NO: 303064 - DNA, 19 bp, Homo sapiens
  siRNA target sequence for COLQ (NM_005677.2,191-209).
ctcagccgactttcatcaa

SEQ ID NO: 303065 - DNA, 19 bp, Homo sapiens
  siRNA target sequence for COLQ (NM_005677.2,193-211).
cagccgactttcatcaaca

SEQ ID NO: 303066 - DNA, 19 bp, Homo sapiens
  siRNA target sequence for COLQ (NM_005677.2,210-228).
cagcgttcttccaatctca

SEQ ID NO: 303067 - DNA, 19 bp, Homo sapiens
  siRNA target sequence for COLQ (NM_005677.2,934-952).
cctgcaggacaacttataa

SEQ ID NO: 303068 - DNA, 19 bp, Homo sapiens
  siRNA target sequence for COLQ (NM_005677.2,935-953).
ctgcaggacaacttataat

SEQ ID NO: 303069 - DNA, 19 bp, Homo sapiens
  siRNA target sequence for COLQ (NM_005677.2,1000-1018).
ctttgtggacccactatga

SEQ ID NO: 303070 - DNA, 19 bp, Homo sapiens
  siRNA target sequence for COLQ (NM_005677.2,1009-1027).
cccactatgaatgtgaata

SEQ ID NO: 303071 - DNA, 19 bp, Homo sapiens
  siRNA target sequence for COLQ (NM_080538.1,32-50).
cgctcatctgctcatcatt

SEQ ID NO: 303072 - DNA, 19 bp, Homo sapiens
  siRNA target sequence for COLQ (NM_080540.1,335-353).
gccgaagtccggacatgaa

SEQ ID NO: 303073 - DNA, 19 bp, Homo sapiens
  siRNA target sequence for COLQ (NM_080540.1,337-355).
cgaagtccggacatgaaga

SEQ ID NO: 303074 - DNA, 19 bp, Homo sapiens
  siRNA target sequence for COLQ (NM_080540.1,338-356).
gaagtccggacatgaagaa

SEQ ID NO: 303075 - DNA, 19 bp, Homo sapiens
  siRNA target sequence for COLQ (NM_080540.1,341-359).
gtccggacatgaagaatct

SEQ ID NO: 303076 - DNA, 19 bp, Homo sapiens
  siRNA target sequence for COLQ (NM_080542.1,703-721).
gacctgggtcccaaaagtt

SEQ ID NO: 303077 - DNA, 19 bp, Homo sapiens
  siRNA target sequence for COLQ (NM_080542.1,705-723).
cctgggtcccaaaagttca

SEQ ID NO: 303078 - DNA, 19 bp, Homo sapiens
  siRNA target sequence for COLQ (NM_080542.1,706-724).
ctgggtcccaaaagttcaa

SEQ ID NO: 303079 - DNA, 19 bp, Homo sapiens
  siRNA target sequence for COLQ (NM_080542.1,821-839).
gcctgctccccagatttga

SEQ ID NO: 303080 - DNA, 19 bp, Homo sapiens
  siRNA target sequence for COLQ (NM_080542.1,830-848).
ccagatttgaggaagatta

SEQ ID NO: 303081 - DNA, 19 bp, Homo sapiens
  siRNA target sequence for COLQ (NM_080542.1,840-858).
ggaagattacatttcatca

SEQ ID NO: 303082 - DNA, 19 bp, Homo sapiens
  siRNA target sequence for COLQ (NM_080544.1,929-947).
ccccacctgcaggtcatat

SEQ ID NO: 303083 - DNA, 19 bp, Homo sapiens
  siRNA target sequence for PTDSS2 (NM_030783.1,370-388).
ccttaaccgtgctcttcat

SEQ ID NO: 303084 - DNA, 19 bp, Homo sapiens
  siRNA target sequence for PTDSS2 (NM_030783.1,471-489).
gccagtattttggttttct

SEQ ID NO: 303085 - DNA, 19 bp, Homo sapiens
  siRNA target sequence for PTDSS2 (NM_030783.1,510-528).
gctaaagacgggccatttt

SEQ ID NO: 303086 - DNA, 19 bp, Homo sapiens
  siRNA target sequence for PTDSS2 (NM_030783.1,540-558).
ccagcttactggaggtttt

SEQ ID NO: 303087 - DNA, 19 bp, Homo sapiens
  siRNA target sequence for PTDSS2 (NM_030783.1,576-594).
gtctacgagctgtttctca

SEQ ID NO: 303088 - DNA, 19 bp, Homo sapiens
  siRNA target sequence for PTDSS2 (NM_030783.1,581-599).
cgagctgtttctcatcttt

SEQ ID NO: 303089 - DNA, 19 bp, Homo sapiens
  siRNA target sequence for PTDSS2 (NM_030783.1,628-646).
ggcagtttctaaagtatgt

SEQ ID NO: 303090 - DNA, 19 bp, Homo sapiens
  siRNA target sequence for PTDSS2 (NM_030783.1,749-767).
caagttggatggctttgtt

SEQ ID NO: 303091 - DNA, 19 bp, Homo sapiens
  siRNA target sequence for PTDSS2 (NM_030783.1,817-835).
ggtggatgtgcatgatcat

SEQ ID NO: 303092 - DNA, 19 bp, Homo sapiens
  siRNA target sequence for PTDSS2 (NM_030783.1,1264-1282).
gtgagatctacgacttcat

SEQ ID NO: 303093 - DNA, 19 bp, Homo sapiens
  siRNA target sequence for PTDSS2 (NM_030783.1,1473-1491).
ctgcgggacatcacattga

SEQ ID NO: 303094 - DNA, 19 bp, Homo sapiens
  siRNA target sequence for ELOVL1 (NM_022821.1,122-140).
gaggctgttgtgaacttgt

SEQ ID NO: 303095 - DNA, 19 bp, Homo sapiens
  siRNA target sequence for ELOVL1 (NM_022821.1,194-212).
gggtcccccttgctaatga

SEQ ID NO: 303096 - DNA, 19 bp, Homo sapiens
  siRNA target sequence for ELOVL1 (NM_022821.1,289-307).
gctccgtggcttcatgatt

SEQ ID NO: 303097 - DNA, 19 bp, Homo sapiens
  siRNA target sequence for ELOVL1 (NM_022821.1,293-311).
cgtggcttcatgattgtct

SEQ ID NO: 303098 - DNA, 19 bp, Homo sapiens
  siRNA target sequence for ELOVL1 (NM_022821.1,368-386).
ggctggctgagcacctata

SEQ ID NO: 303099 - DNA, 19 bp, Homo sapiens
  siRNA target sequence for ELOVL1 (NM_022821.1,574-592).
gtggtggggggtaaagatt

SEQ ID NO: 303100 - DNA, 19 bp, Homo sapiens
  siRNA target sequence for ELOVL1 (NM_022821.1,610-628).
ctctttccatgccatgata

SEQ ID NO: 303101 - DNA, 19 bp, Homo sapiens
  siRNA target sequence for ELOVL1 (NM_022821.1,631-649).
ctcttccgtgcatgtcata

SEQ ID NO: 303102 - DNA, 19 bp, Homo sapiens
  siRNA target sequence for ELOVL1 (NM_022821.1,633-651).
cttccgtgcatgtcataat

SEQ ID NO: 303103 - DNA, 19 bp, Homo sapiens
  siRNA target sequence for ELOVL1 (NM_022821.1,636-654).
ccgtgcatgtcataatgta

SEQ ID NO: 303104 - DNA, 19 bp, Homo sapiens
  siRNA target sequence for ELOVL1 (NM_022821.1,655-673).
cctgtactacggattatct

SEQ ID NO: 303105 - DNA, 19 bp, Homo sapiens
  siRNA target sequence for ELOVL1 (NM_022821.1,761-779).
cacatctcccagtactact

SEQ ID NO: 303106 - DNA, 19 bp, Homo sapiens
  siRNA target sequence for ELOVL1 (NM_022821.1,796-814).
ctaccagtacccagtcatt

SEQ ID NO: 303107 - DNA, 19 bp, Homo sapiens
  siRNA target sequence for ELOVL1 (NM_022821.1,799-817).
ccagtacccagtcattatt

SEQ ID NO: 303108 - DNA, 19 bp, Homo sapiens
  siRNA target sequence for ELOVL1 (NM_022821.1,865-883).
cttctggtatcactcttat

SEQ ID NO: 303109 - DNA, 19 bp, Homo sapiens
  siRNA target sequence for ELOVL1 (NM_022821.1,870-888).
ggtatcactcttataccaa

SEQ ID NO: 303110 - DNA, 19 bp, Homo sapiens
  siRNA target sequence for ELOVL3 (NM_152310.1,167-185).
gtcacagccatgaatgtct

SEQ ID NO: 303111 - DNA, 19 bp, Homo sapiens
  siRNA target sequence for ELOVL3 (NM_152310.1,175-193).
catgaatgtctcacatgaa

SEQ ID NO: 303112 - DNA, 19 bp, Homo sapiens
  siRNA target sequence for ELOVL3 (NM_152310.1,245-263).
ccctttttcgaggagtatt

SEQ ID NO: 303113 - DNA, 19 bp, Homo sapiens
  siRNA target sequence for ELOVL3 (NM_152310.1,309-327).
ctgtggggcagaactacat

SEQ ID NO: 303114 - DNA, 19 bp, Homo sapiens
  siRNA target sequence for ELOVL3 (NM_152310.1,372-390).
ggtccttctgccttgcaat

SEQ ID NO: 303115 - DNA, 19 bp, Homo sapiens
  siRNA target sequence for ELOVL3 (NM_152310.1,375-393).
ccttctgccttgcaatctt

SEQ ID NO: 303116 - DNA, 19 bp, Homo sapiens
  siRNA target sequence for ELOVL3 (NM_152310.1,461-479).
caaaccgtgtgcttcatca

SEQ ID NO: 303117 - DNA, 19 bp, Homo sapiens
  siRNA target sequence for ELOVL3 (NM_152310.1,475-493).
catcaacttcatcgataat

SEQ ID NO: 303118 - DNA, 19 bp, Homo sapiens
  siRNA target sequence for ELOVL3 (NM_152310.1,510-528).
ggtcctgggtctttcttct

SEQ ID NO: 303119 - DNA, 19 bp, Homo sapiens
  siRNA target sequence for ELOVL3 (NM_152310.1,573-591).
gtaagcggccactcatctt

SEQ ID NO: 303120 - DNA, 19 bp, Homo sapiens
  siRNA target sequence for ELOVL3 (NM_152310.1,579-597).
ggccactcatctttattca

SEQ ID NO: 303121 - DNA, 19 bp, Homo sapiens
  siRNA target sequence for ELOVL3 (NM_152310.1,619-637).
gctcgtgtacacaagcttt

SEQ ID NO: 303122 - DNA, 19 bp, Homo sapiens
  siRNA target sequence for ELOVL3 (NM_152310.1,623-641).
gtgtacacaagctttggat

SEQ ID NO: 303123 - DNA, 19 bp, Homo sapiens
  siRNA target sequence for ELOVL3 (NM_152310.1,669-687).
ggttcgtcaccatgaactt

SEQ ID NO: 303124 - DNA, 19 bp, Homo sapiens
  siRNA target sequence for ELOVL3 (NM_152310.1,670-688).
gttcgtcaccatgaacttt

SEQ ID NO: 303125 - DNA, 19 bp, Homo sapiens
  siRNA target sequence for ELOVL3 (NM_152310.1,689-707).
ggtgttcatgccatcatgt

SEQ ID NO: 303126 - DNA, 19 bp, Homo sapiens
  siRNA target sequence for ELOVL3 (NM_152310.1,690-708).
gtgttcatgccatcatgta

SEQ ID NO: 303127 - DNA, 19 bp, Homo sapiens
  siRNA target sequence for ELOVL3 (NM_152310.1,692-710).
gttcatgccatcatgtaca

SEQ ID NO: 303128 - DNA, 19 bp, Homo sapiens
  siRNA target sequence for ELOVL3 (NM_152310.1,853-871).
caccacgatggaacactta

SEQ ID NO: 303129 - DNA, 19 bp, Homo sapiens
  siRNA target sequence for PRKAB1 (NM_006253.4,326-344).
cggcatggtggccataaga

SEQ ID NO: 303130 - DNA, 19 bp, Homo sapiens
  siRNA target sequence for PRKAB1 (NM_006253.4,485-503).
gatctggaagtgaatgata

SEQ ID NO: 303131 - DNA, 19 bp, Homo sapiens
  siRNA target sequence for PRKAB1 (NM_006253.4,521-539).
cggccaacggtgtttcgat

SEQ ID NO: 303132 - DNA, 19 bp, Homo sapiens
  siRNA target sequence for PRKAB1 (NM_006253.4,549-567).
gcggaaaggaagtttactt

SEQ ID NO: 303133 - DNA, 19 bp, Homo sapiens
  siRNA target sequence for PRKAB1 (NM_006253.4,577-595).
cttcaacaactggagtaaa

SEQ ID NO: 303134 - DNA, 19 bp, Homo sapiens
  siRNA target sequence for PRKAB1 (NM_006253.4,609-627).
gaagccacaataactttgt

SEQ ID NO: 303135 - DNA, 19 bp, Homo sapiens
  siRNA target sequence for PRKAB1 (NM_006253.4,697-715).
cccttccgagcccatagta

SEQ ID NO: 303136 - DNA, 19 bp, Homo sapiens
  siRNA target sequence for PRKAB1 (NM_006253.4,698-716).
ccttccgagcccatagtaa

SEQ ID NO: 303137 - DNA, 19 bp, Homo sapiens
  siRNA target sequence for PRKAB1 (NM_006253.4,725-743).
cttggcacagttaacaaca

SEQ ID NO: 303138 - DNA, 19 bp, Homo sapiens
  siRNA target sequence for PRKAB1 (NM_006253.4,1069-1087).
gtacgtcaccaccttgtta

SEQ ID NO: 303139 - DNA, 19 bp, Homo sapiens
  siRNA target sequence for C1orf17 (NM_015101.1,638-656).
cagccactgatcacaatgt

SEQ ID NO: 303140 - DNA, 19 bp, Homo sapiens
  siRNA target sequence for C1orf17 (NM_015101.1,651-669).
caatgtggataatacaaca

SEQ ID NO: 303141 - DNA, 19 bp, Homo sapiens
  siRNA target sequence for C1orf17 (NM_015101.1,697-715).
gtacagagactctatcact

SEQ ID NO: 303142 - DNA, 19 bp, Homo sapiens
  siRNA target sequence for C1orf17 (NM_015101.1,747-765).
gtcttaccctgatgaaatt

SEQ ID NO: 303143 - DNA, 19 bp, Homo sapiens
  siRNA target sequence for C1orf17 (NM_015101.1,829-847).
cgaactgcgagggaaaaat

SEQ ID NO: 303144 - DNA, 19 bp, Homo sapiens
  siRNA target sequence for C1orf17 (NM_015101.1,848-866).
ggtcagactacattctgtt

SEQ ID NO: 303145 - DNA, 19 bp, Homo sapiens
  siRNA target sequence for C1orf17 (NM_015101.1,855-873).
ctacattctgttcatagat

SEQ ID NO: 303146 - DNA, 19 bp, Homo sapiens
  siRNA target sequence for C1orf17 (NM_015101.1,896-914).
cacagaccctcaatctact

SEQ ID NO: 303147 - DNA, 19 bp, Homo sapiens
  siRNA target sequence for C1orf17 (NM_015101.1,1016-1034).
ccccagactacgttcagat

SEQ ID NO: 303148 - DNA, 19 bp, Homo sapiens
  siRNA target sequence for C1orf17 (NM_015101.1,1112-1130).
cctcggacaagctgacttt

SEQ ID NO: 303149 - DNA, 19 bp, Homo sapiens
  siRNA target sequence for C1orf17 (NM_015101.1,1115-1133).
cggacaagctgactttcta

SEQ ID NO: 303150 - DNA, 19 bp, Homo sapiens
  siRNA target sequence for C1orf17 (NM_015101.1,1299-1317).
catccatgtgcagattgaa

SEQ ID NO: 303151 - DNA, 19 bp, Homo sapiens
  siRNA target sequence for C1orf17 (NM_015101.1,1370-1388).
ctaaatatccagacaagat

SEQ ID NO: 303152 - DNA, 19 bp, Homo sapiens
  siRNA target sequence for C1orf17 (NM_015101.1,1600-1618).
gaaatcggctgctttctca

SEQ ID NO: 303153 - DNA, 19 bp, Homo sapiens
  siRNA target sequence for C1orf17 (NM_015101.1,1657-1675).
ctagagaagactcttgtaa

SEQ ID NO: 303154 - DNA, 19 bp, Homo sapiens
  siRNA target sequence for C1orf17 (NM_015101.1,1662-1680).
gaagactcttgtaattgaa

SEQ ID NO: 303155 - DNA, 19 bp, Homo sapiens
  siRNA target sequence for C1orf17 (NM_015101.1,1689-1707).
gcgttttgagcatcagttt

SEQ ID NO: 303156 - DNA, 19 bp, Homo sapiens
  siRNA target sequence for C1orf17 (NM_015101.1,1690-1708).
cgttttgagcatcagttta

SEQ ID NO: 303157 - DNA, 19 bp, Homo sapiens
  siRNA target sequence for C1orf17 (NM_015101.1,1755-1773).
ggactgggaactgatttat

SEQ ID NO: 303158 - DNA, 19 bp, Homo sapiens
  siRNA target sequence for C1orf17 (NM_015101.1,1756-1774).
gactgggaactgatttata

SEQ ID NO: 303159 - DNA, 19 bp, Homo sapiens
  siRNA target sequence for C1orf17 (NM_015101.1,1762-1780).
gaactgatttatattggta

SEQ ID NO: 303160 - DNA, 19 bp, Homo sapiens
  siRNA target sequence for C1orf17 (NM_015101.1,1902-1920).
ggttggagccaatcctttt

SEQ ID NO: 303161 - DNA, 19 bp, Homo sapiens
  siRNA target sequence for C1orf17 (NM_015101.1,1929-1947).
gctgccagtggatgagttt

SEQ ID NO: 303162 - DNA, 19 bp, Homo sapiens
  siRNA target sequence for C1orf17 (NM_015101.1,1979-1997).
ccgagtacaaggagtatta

SEQ ID NO: 303163 - DNA, 19 bp, Homo sapiens
  siRNA target sequence for C1orf17 (NM_015101.1,1980-1998).
cgagtacaaggagtattat

SEQ ID NO: 303164 - DNA, 19 bp, Homo sapiens
  siRNA target sequence for CEECAM1 (NM_016174.3,295-313).
ggctgtgggcgatgactat

SEQ ID NO: 303165 - DNA, 19 bp, Homo sapiens
  siRNA target sequence for CEECAM1 (NM_016174.3,346-364).
caggttctacccagatgaa

SEQ ID NO: 303166 - DNA, 19 bp, Homo sapiens
  siRNA target sequence for CEECAM1 (NM_016174.3,348-366).
ggttctacccagatgaaga

SEQ ID NO: 303167 - DNA, 19 bp, Homo sapiens
  siRNA target sequence for CEECAM1 (NM_016174.3,373-391).
caagcactggaccaaagaa

SEQ ID NO: 303168 - DNA, 19 bp, Homo sapiens
  siRNA target sequence for CEECAM1 (NM_016174.3,759-777).
ggcctttcgacgacatcat

SEQ ID NO: 303169 - DNA, 19 bp, Homo sapiens
  siRNA target sequence for CEECAM1 (NM_016174.3,833-851).
caccgttatgggtacatga

SEQ ID NO: 303170 - DNA, 19 bp, Homo sapiens
  siRNA target sequence for CEECAM1 (NM_016174.3,835-853).
ccgttatgggtacatgaat

SEQ ID NO: 303171 - DNA, 19 bp, Homo sapiens
  siRNA target sequence for CEECAM1 (NM_016174.3,959-977).
gtgactcggccctctaaga

SEQ ID NO: 303172 - DNA, 19 bp, Homo sapiens
  siRNA target sequence for CEECAM1 (NM_016174.3,993-1011).
ggtttgacgaggtctttgt

SEQ ID NO: 303173 - DNA, 19 bp, Homo sapiens
  siRNA target sequence for FLJ22329 (NM_024656.2,283-301).
gaccacaacatggataaca

SEQ ID NO: 303174 - DNA, 19 bp, Homo sapiens
  siRNA target sequence for FLJ22329 (NM_024656.2,334-352).
gtgaagagtttgtaccatt

SEQ ID NO: 303175 - DNA, 19 bp, Homo sapiens
  siRNA target sequence for FLJ22329 (NM_024656.2,397-415).
gaggaaggcccgaaacact

SEQ ID NO: 303176 - DNA, 19 bp, Homo sapiens
  siRNA target sequence for FLJ22329 (NM_024656.2,425-443).
cacgctacgagcatgtcat

SEQ ID NO: 303177 - DNA, 19 bp, Homo sapiens
  siRNA target sequence for FLJ22329 (NM_024656.2,550-568).
ctcatcgctgagaacaaga

SEQ ID NO: 303178 - DNA, 19 bp, Homo sapiens
  siRNA target sequence for FLJ22329 (NM_024656.2,598-616).
gctgcgtactccaacttct

SEQ ID NO: 303179 - DNA, 19 bp, Homo sapiens
  siRNA target sequence for FLJ22329 (NM_024656.2,612-630).
cttctggtgtggaatgact

SEQ ID NO: 303180 - DNA, 19 bp, Homo sapiens
  siRNA target sequence for FLJ22329 (NM_024656.2,629-647).
cttcccagggctactacaa

SEQ ID NO: 303181 - DNA, 19 bp, Homo sapiens
  siRNA target sequence for FLJ22329 (NM_024656.2,1033-1051).
gacgaggtcttcatgatca

SEQ ID NO: 303182 - DNA, 19 bp, Homo sapiens
  siRNA target sequence for FLJ22329 (NM_024656.2,1324-1342).
ctgcgttttgagatcttct

SEQ ID NO: 303183 - DNA, 19 bp, Homo sapiens
  siRNA target sequence for FLJ22329 (NM_024656.2,1327-1345).
cgttttgagatcttcttca

SEQ ID NO: 303184 - DNA, 19 bp, Homo sapiens
  siRNA target sequence for FLJ22329 (NM_024656.2,1328-1346).
gttttgagatcttcttcaa

SEQ ID NO: 303185 - DNA, 19 bp, Homo sapiens
  siRNA target sequence for FLJ22329 (NM_024656.2,1589-1607).
ccgtcatgttcgacaaaca

SEQ ID NO: 303186 - DNA, 19 bp, Homo sapiens
  siRNA target sequence for FLJ22329 (NM_024656.2,1699-1717).
ggagacgatggctatgtga

SEQ ID NO: 303187 - DNA, 19 bp, Homo sapiens
  siRNA target sequence for FLJ22329 (NM_024656.2,1731-1749).
ctcagtcgtatggaacaat

SEQ ID NO: 303188 - DNA, 19 bp, Homo sapiens
  siRNA target sequence for FLJ22329 (NM_024656.2,1733-1751).
cagtcgtatggaacaatga

SEQ ID NO: 303189 - DNA, 19 bp, Homo sapiens
  siRNA target sequence for COQ7 (NM_016138.3,120-138).
gcggtccctctcagcttat

SEQ ID NO: 303190 - DNA, 19 bp, Homo sapiens
  siRNA target sequence for COQ7 (NM_016138.3,123-141).
gtccctctcagcttatgga

SEQ ID NO: 303191 - DNA, 19 bp, Homo sapiens
  siRNA target sequence for COQ7 (NM_016138.3,163-181).
cgcagttcaggaatgactt

SEQ ID NO: 303192 - DNA, 19 bp, Homo sapiens
  siRNA target sequence for COQ7 (NM_016138.3,167-185).
gttcaggaatgactttaga

SEQ ID NO: 303193 - DNA, 19 bp, Homo sapiens
  siRNA target sequence for COQ7 (NM_016138.3,197-215).
gggcagctgtggatcgaat

SEQ ID NO: 303194 - DNA, 19 bp, Homo sapiens
  siRNA target sequence for COQ7 (NM_016138.3,291-309).
cagcgtcgggccagtcatt

SEQ ID NO: 303195 - DNA, 19 bp, Homo sapiens
  siRNA target sequence for COQ7 (NM_016138.3,293-311).
gcgtcgggccagtcattca

SEQ ID NO: 303196 - DNA, 19 bp, Homo sapiens
  siRNA target sequence for COQ7 (NM_016138.3,295-313).
gtcgggccagtcattcaga

SEQ ID NO: 303197 - DNA, 19 bp, Homo sapiens
  siRNA target sequence for COQ7 (NM_016138.3,312-330).
gaaaatgtgggatcaagaa

SEQ ID NO: 303198 - DNA, 19 bp, Homo sapiens
  siRNA target sequence for COQ7 (NM_016138.3,372-390).
cagggtccggccaacagtt

SEQ ID NO: 303199 - DNA, 19 bp, Homo sapiens
  siRNA target sequence for COQ7 (NM_016138.3,556-574).
gaacttcttcagctgataa

SEQ ID NO: 303200 - DNA, 19 bp, Homo sapiens
  siRNA target sequence for COQ7 (NM_016138.3,594-612).
gcttgagcaccatgacata

SEQ ID NO: 303201 - DNA, 19 bp, Homo sapiens
  siRNA target sequence for COQ7 (NM_016138.3,649-667).
gccgtcctgaagagcatta

SEQ ID NO: 303202 - DNA, 19 bp, Homo sapiens
  siRNA target sequence for COQ7 (NM_016138.3,650-668).
ccgtcctgaagagcattat

SEQ ID NO: 303203 - DNA, 19 bp, Homo sapiens
  siRNA target sequence for COQ7 (NM_016138.3,677-695).
gatgcagagtggcgatata

SEQ ID NO: 303204 - DNA, 19 bp, Homo sapiens
  siRNA target sequence for COQ7 (NM_016138.3,680-698).
gcagagtggcgatatattt

SEQ ID NO: 303205 - DNA, 19 bp, Homo sapiens
  siRNA target sequence for COQ7 (NM_016138.3,681-699).
cagagtggcgatatattta

SEQ ID NO: 303206 - DNA, 19 bp, Homo sapiens
  siRNA target sequence for COQ7 (NM_016138.3,687-705).
ggcgatatatttatcagaa

SEQ ID NO: 303207 - DNA, 19 bp, Homo sapiens
  siRNA target sequence for COQ4 (NM_016035.1,523-541).
cgacatggtcgcagttcta

SEQ ID NO: 303208 - DNA, 19 bp, Homo sapiens
  siRNA target sequence for COQ4 (NM_016035.1,623-641).
gagcgtccccggatttcga

SEQ ID NO: 303209 - DNA, 19 bp, Homo sapiens
  siRNA target sequence for COQ4 (NM_016035.1,687-705).
ccctcggtcgcgagtatct

SEQ ID NO: 303210 - DNA, 19 bp, Homo sapiens
  siRNA target sequence for COQ4 (NM_016035.1,854-872).
ggggagatcgtggtgaaat

SEQ ID NO: 303211 - DNA, 19 bp, Homo sapiens
  siRNA target sequence for COQ4 (NM_016035.1,1014-1032).
gtgtcctcaacctgtacta

SEQ ID NO: 303212 - DNA, 19 bp, Homo sapiens
  siRNA target sequence for MATP (NM_016180.2,113-131).
gatgatggcccctttgact

SEQ ID NO: 303213 - DNA, 19 bp, Homo sapiens
  siRNA target sequence for MATP (NM_016180.2,212-230).
gtggaggcagcgtatgtga

SEQ ID NO: 303214 - DNA, 19 bp, Homo sapiens
  siRNA target sequence for MATP (NM_016180.2,421-439).
cctcaatggggctactgtt

SEQ ID NO: 303215 - DNA, 19 bp, Homo sapiens
  siRNA target sequence for MATP (NM_016180.2,440-458).
gtagcagctttgattgcta

SEQ ID NO: 303216 - DNA, 19 bp, Homo sapiens
  siRNA target sequence for MATP (NM_016180.2,472-490).
gctggtttgggccataagt

SEQ ID NO: 303217 - DNA, 19 bp, Homo sapiens
  siRNA target sequence for MATP (NM_016180.2,499-517).
gataggtgtcgttctcttt

SEQ ID NO: 303218 - DNA, 19 bp, Homo sapiens
  siRNA target sequence for MATP (NM_016180.2,503-521).
ggtgtcgttctctttgatt

SEQ ID NO: 303219 - DNA, 19 bp, Homo sapiens
  siRNA target sequence for MATP (NM_016180.2,504-522).
gtgtcgttctctttgattt

SEQ ID NO: 303220 - DNA, 19 bp, Homo sapiens
  siRNA target sequence for MATP (NM_016180.2,508-526).
cgttctctttgattttgct

SEQ ID NO: 303221 - DNA, 19 bp, Homo sapiens
  siRNA target sequence for MATP (NM_016180.2,535-553).
cattgatgggcccatcaaa

SEQ ID NO: 303222 - DNA, 19 bp, Homo sapiens
  siRNA target sequence for MATP (NM_016180.2,632-650).
ggtgccctgggttaccttt

SEQ ID NO: 303223 - DNA, 19 bp, Homo sapiens
  siRNA target sequence for MATP (NM_016180.2,647-665).
cttttgggtgctatagact

SEQ ID NO: 303224 - DNA, 19 bp, Homo sapiens
  siRNA target sequence for MATP (NM_016180.2,726-744).
ctgcattggtgctcacttt

SEQ ID NO: 303225 - DNA, 19 bp, Homo sapiens
  siRNA target sequence for MATP (NM_016180.2,851-869).
ggaatgtacgagtatggtt

SEQ ID NO: 303226 - DNA, 19 bp, Homo sapiens
  siRNA target sequence for MATP (NM_016180.2,881-899).
gttaaaaatggttacgtaa

SEQ ID NO: 303227 - DNA, 19 bp, Homo sapiens
  siRNA target sequence for MATP (NM_016180.2,953-971).
cgcagggcaatgacattaa

SEQ ID NO: 303228 - DNA, 19 bp, Homo sapiens
  siRNA target sequence for MATP (NM_016180.2,1235-1253).
gtatcctacattggattaa

SEQ ID NO: 303229 - DNA, 19 bp, Homo sapiens
  siRNA target sequence for MATP (NM_016180.2,1247-1265).
ggattaaagggtctttact

SEQ ID NO: 303230 - DNA, 19 bp, Homo sapiens
  siRNA target sequence for MATP (NM_016180.2,1259-1277).
ctttacttcacgggatatt

SEQ ID NO: 303231 - DNA, 19 bp, Homo sapiens
  siRNA target sequence for MATP (NM_016180.2,1287-1305).
gcctggggacgggatttat

SEQ ID NO: 303232 - DNA, 19 bp, Homo sapiens
  siRNA target sequence for MATP (NM_016180.2,1288-1306).
cctggggacgggatttatt

SEQ ID NO: 303233 - DNA, 19 bp, Homo sapiens
  siRNA target sequence for MATP (NM_016180.2,1307-1325).
gggctcttcccgaatgtct

SEQ ID NO: 303234 - DNA, 19 bp, Homo sapiens
  siRNA target sequence for MATP (NM_016180.2,1308-1326).
ggctcttcccgaatgtcta

SEQ ID NO: 303235 - DNA, 19 bp, Homo sapiens
  siRNA target sequence for MATP (NM_016180.2,1620-1638).
gctttgtcgctctctttgt

SEQ ID NO: 303236 - DNA, 19 bp, Homo sapiens
  siRNA target sequence for MATP (NM_016180.2,1625-1643).
gtcgctctctttgttagat

SEQ ID NO: 303237 - DNA, 19 bp, Homo sapiens
  siRNA target sequence for MATP (NM_016180.2,1627-1645).
cgctctctttgttagatat

SEQ ID NO: 303238 - DNA, 19 bp, Homo sapiens
  siRNA target sequence for MATP (NM_016180.2,1629-1647).
ctctctttgttagatatgt

SEQ ID NO: 303239 - DNA, 19 bp, Homo sapiens
  siRNA target sequence for SILV (NM_006928.2,4-22).
gatctggtgctaaaaagat

SEQ ID NO: 303240 - DNA, 19 bp, Homo sapiens
  siRNA target sequence for SILV (NM_006928.2,198-216).
gtccctcaaggtcagtaat

SEQ ID NO: 303241 - DNA, 19 bp, Homo sapiens
  siRNA target sequence for SILV (NM_006928.2,303-321).
ggttatctgggtcaacaat

SEQ ID NO: 303242 - DNA, 19 bp, Homo sapiens
  siRNA target sequence for SILV (NM_006928.2,304-322).
gttatctgggtcaacaata

SEQ ID NO: 303243 - DNA, 19 bp, Homo sapiens
  siRNA target sequence for SILV (NM_006928.2,470-488).
gccaatactggcaagttct

SEQ ID NO: 303244 - DNA, 19 bp, Homo sapiens
  siRNA target sequence for SILV (NM_006928.2,471-489).
ccaatactggcaagttcta

SEQ ID NO: 303245 - DNA, 19 bp, Homo sapiens
  siRNA target sequence for SILV (NM_006928.2,612-630).
ctcagccttcaccattact

SEQ ID NO: 303246 - DNA, 19 bp, Homo sapiens
  siRNA target sequence for SILV (NM_006928.2,614-632).
cagccttcaccattactga

SEQ ID NO: 303247 - DNA, 19 bp, Homo sapiens
  siRNA target sequence for SILV (NM_006928.2,1205-1223).
ctgcagaggtatcaattgt

SEQ ID NO: 303248 - DNA, 19 bp, Homo sapiens
  siRNA target sequence for SILV (NM_006928.2,1243-1261).
gctgcacaggtaacaacta

SEQ ID NO: 303249 - DNA, 19 bp, Homo sapiens
  siRNA target sequence for SILV (NM_006928.2,1280-1298).
cagctagagagctacctat

SEQ ID NO: 303250 - DNA, 19 bp, Homo sapiens
  siRNA target sequence for SILV (NM_006928.2,1315-1333).
ccagatgccagctcaatca

SEQ ID NO: 303251 - DNA, 19 bp, Homo sapiens
  siRNA target sequence for SILV (NM_006928.2,1335-1353).
gtctacggaaagtattaca

SEQ ID NO: 303252 - DNA, 19 bp, Homo sapiens
  siRNA target sequence for SILV (NM_006928.2,1375-1393).
gatggtacagccaccttaa

SEQ ID NO: 303253 - DNA, 19 bp, Homo sapiens
  siRNA target sequence for SILV (NM_006928.2,1415-1433).
ccctggattgtgttctgta

SEQ ID NO: 303254 - DNA, 19 bp, Homo sapiens
  siRNA target sequence for SILV (NM_006928.2,1420-1438).
gattgtgttctgtatcgat

SEQ ID NO: 303255 - DNA, 19 bp, Homo sapiens
  siRNA target sequence for SILV (NM_006928.2,1431-1449).
gtatcgatatggttccttt

SEQ ID NO: 303256 - DNA, 19 bp, Homo sapiens
  siRNA target sequence for SILV (NM_006928.2,1464-1482).
cattgtccagggtattgaa

SEQ ID NO: 303257 - DNA, 19 bp, Homo sapiens
  siRNA target sequence for SILV (NM_006928.2,1512-1530).
cggtgagggggatgcattt

SEQ ID NO: 303258 - DNA, 19 bp, Homo sapiens
  siRNA target sequence for SILV (NM_006928.2,1915-1933).
cgtctaccccgcatcttct

SEQ ID NO: 303259 - DNA, 19 bp, Homo sapiens
  siRNA target sequence for GCHFR (NM_005258.2,144-162).
ctatggtgggcgatgaaca

SEQ ID NO: 303260 - DNA, 19 bp, Homo sapiens
  siRNA target sequence for GCHFR (NM_005258.2,214-232).
gggaaacaacttttatgaa

SEQ ID NO: 303261 - DNA, 19 bp, Homo sapiens
  siRNA target sequence for FLJ31978 (NM_144669.1,135-153).
ggcacgtgtgcgttttgaa

SEQ ID NO: 303262 - DNA, 19 bp, Homo sapiens
  siRNA target sequence for FLJ31978 (NM_144669.1,174-192).
gccgatctgagattgcaaa

SEQ ID NO: 303263 - DNA, 19 bp, Homo sapiens
  siRNA target sequence for FLJ31978 (NM_144669.1,265-283).
ccaccgaatcccttttgga

SEQ ID NO: 303264 - DNA, 19 bp, Homo sapiens
  siRNA target sequence for FLJ31978 (NM_144669.1,289-307).
ctttggtggaactgatgta

SEQ ID NO: 303265 - DNA, 19 bp, Homo sapiens
  siRNA target sequence for FLJ31978 (NM_144669.1,380-398).
gctttcacagagtcaatga

SEQ ID NO: 303266 - DNA, 19 bp, Homo sapiens
  siRNA target sequence for FLJ31978 (NM_144669.1,418-436).
gtgggtcgatccagtgttt

SEQ ID NO: 303267 - DNA, 19 bp, Homo sapiens
  siRNA target sequence for FLJ31978 (NM_144669.1,433-451).
gtttacaagggaagtgaaa

SEQ ID NO: 303268 - DNA, 19 bp, Homo sapiens
  siRNA target sequence for FLJ31978 (NM_144669.1,465-483).
gagccgctggggtacgatt

SEQ ID NO: 303269 - DNA, 19 bp, Homo sapiens
  siRNA target sequence for FLJ31978 (NM_144669.1,468-486).
ccgctggggtacgattgat

SEQ ID NO: 303270 - DNA, 19 bp, Homo sapiens
  siRNA target sequence for FLJ31978 (NM_144669.1,469-487).
cgctggggtacgattgatt

SEQ ID NO: 303271 - DNA, 19 bp, Homo sapiens
  siRNA target sequence for FLJ31978 (NM_144669.1,511-529).
gcacgcggtggtgaagaat

SEQ ID NO: 303272 - DNA, 19 bp, Homo sapiens
  siRNA target sequence for FLJ31978 (NM_144669.1,512-530).
cacgcggtggtgaagaatt

SEQ ID NO: 303273 - DNA, 19 bp, Homo sapiens
  siRNA target sequence for FLJ31978 (NM_144669.1,563-581).
ggcatgtcagctgcaattt

SEQ ID NO: 303274 - DNA, 19 bp, Homo sapiens
  siRNA target sequence for FLJ31978 (NM_144669.1,712-730).
ggttagtgatcctgcatta

SEQ ID NO: 303275 - DNA, 19 bp, Homo sapiens
  siRNA target sequence for FLJ31978 (NM_144669.1,726-744).
cattagaaaaggaaatcgt

SEQ ID NO: 303276 - DNA, 19 bp, Homo sapiens
  siRNA target sequence for FLJ31978 (NM_144669.1,753-771).
gaagggaatacgtgagaat

SEQ ID NO: 303277 - DNA, 19 bp, Homo sapiens
  siRNA target sequence for FLJ31978 (NM_144669.1,763-781).
cgtgagaatgtatcattca

SEQ ID NO: 303278 - DNA, 19 bp, Homo sapiens
  siRNA target sequence for MGC35274 (NM_153374.1,792-810).
caataaactgtttaccaat

SEQ ID NO: 303279 - DNA, 19 bp, Homo sapiens
  siRNA target sequence for MGC35274 (NM_153374.1,806-824).
ccaatgattgtatatttct

SEQ ID NO: 303280 - DNA, 19 bp, Homo sapiens
  siRNA target sequence for MGC35274 (NM_153374.1,833-851).
ctttgaacatcccagttat

SEQ ID NO: 303281 - DNA, 19 bp, Homo sapiens
  siRNA target sequence for MGC35274 (NM_153374.1,861-879).
gcctttgttgtttaatgga

SEQ ID NO: 303282 - DNA, 19 bp, Homo sapiens
  siRNA target sequence for MGC35274 (NM_153374.1,1123-1141).
gcaacttccctctatcaca

SEQ ID NO: 303283 - DNA, 19 bp, Homo sapiens
  siRNA target sequence for NCOA7 (NM_181782.1,188-206).
ggaacggaaacaaagttat

SEQ ID NO: 303284 - DNA, 19 bp, Homo sapiens
  siRNA target sequence for NCOA7 (NM_181782.1,189-207).
gaacggaaacaaagttatt

SEQ ID NO: 303285 - DNA, 19 bp, Homo sapiens
  siRNA target sequence for NCOA7 (NM_181782.1,210-228).
gctcgactgaaaaagaaaa

SEQ ID NO: 303286 - DNA, 19 bp, Homo sapiens
  siRNA target sequence for NCOA7 (NM_181782.1,264-282).
gtagctacaaggactcata

SEQ ID NO: 303287 - DNA, 19 bp, Homo sapiens
  siRNA target sequence for NCOA7 (NM_181782.1,317-335).
gccagacaagtgcaacatt

SEQ ID NO: 303288 - DNA, 19 bp, Homo sapiens
  siRNA target sequence for NCOA7 (NM_181782.1,398-416).
gatcaggcgtacagaacta

SEQ ID NO: 303289 - DNA, 19 bp, Homo sapiens
  siRNA target sequence for NCOA7 (NM_181782.1,404-422).
gcgtacagaactaaagaga

SEQ ID NO: 303290 - DNA, 19 bp, Homo sapiens
  siRNA target sequence for NCOA7 (NM_181782.1,405-423).
cgtacagaactaaagagat

SEQ ID NO: 303291 - DNA, 19 bp, Homo sapiens
  siRNA target sequence for NCOA7 (NM_181782.1,406-424).
gtacagaactaaagagata

SEQ ID NO: 303292 - DNA, 19 bp, Homo sapiens
  siRNA target sequence for NCOA7 (NM_181782.1,430-448).
gtattgatgacaatcaaaa

SEQ ID NO: 303293 - DNA, 19 bp, Homo sapiens
  siRNA target sequence for NCOA7 (NM_181782.1,491-509).
gccccatgggactatggaa

SEQ ID NO: 303294 - DNA, 19 bp, Homo sapiens
  siRNA target sequence for NCOA7 (NM_181782.1,492-510).
ccccatgggactatggaat

SEQ ID NO: 303295 - DNA, 19 bp, Homo sapiens
  siRNA target sequence for NCOA7 (NM_181782.1,493-511).
cccatgggactatggaata

SEQ ID NO: 303296 - DNA, 19 bp, Homo sapiens
  siRNA target sequence for NCOA7 (NM_181782.1,495-513).
catgggactatggaataca

SEQ ID NO: 303297 - DNA, 19 bp, Homo sapiens
  siRNA target sequence for NCOA7 (NM_181782.1,541-559).
ccatagcactgaaatttaa

SEQ ID NO: 303298 - DNA, 19 bp, Homo sapiens
  siRNA target sequence for NCOA7 (NM_181782.1,579-597).
gtggaactgaataaacttt

SEQ ID NO: 303299 - DNA, 19 bp, Homo sapiens
  siRNA target sequence for NCOA7 (NM_181782.1,616-634).
caggccaggtcctttttgt

SEQ ID NO: 303300 - DNA, 19 bp, Homo sapiens
  siRNA target sequence for NCOA7 (NM_181782.1,768-786).
cccattgaaagagtcttat

SEQ ID NO: 303301 - DNA, 19 bp, Homo sapiens
  siRNA target sequence for NCOA7 (NM_181782.1,782-800).
cttatcgtctacttctgaa

SEQ ID NO: 303302 - DNA, 19 bp, Homo sapiens
  siRNA target sequence for NCOA7 (NM_181782.1,844-862).
gatacttcaccgatggaaa

SEQ ID NO: 303303 - DNA, 19 bp, Homo sapiens
  siRNA target sequence for NCOA7 (NM_181782.1,865-883).
gtgtggttggcggtgttat

SEQ ID NO: 303304 - DNA, 19 bp, Homo sapiens
  siRNA target sequence for NCOA7 (NM_181782.1,867-885).
gtggttggcggtgttatga

SEQ ID NO: 303305 - DNA, 19 bp, Homo sapiens
  siRNA target sequence for NCOA7 (NM_181782.1,869-887).
ggttggcggtgttatgata

SEQ ID NO: 303306 - DNA, 19 bp, Homo sapiens
  siRNA target sequence for NCOA7 (NM_181782.1,873-891).
ggcggtgttatgatagtga

SEQ ID NO: 303307 - DNA, 19 bp, Homo sapiens
  siRNA target sequence for NCOA7 (NM_181782.1,888-906).
gtgactcctaacaacatca

SEQ ID NO: 303308 - DNA, 19 bp, Homo sapiens
  siRNA target sequence for NCOA7 (NM_181782.1,895-913).
ctaacaacatcatgtttga

SEQ ID NO: 303309 - DNA, 19 bp, Homo sapiens
  siRNA target sequence for NCOA7 (NM_181782.1,908-926).
gtttgaccctcataaatct

SEQ ID NO: 303310 - DNA, 19 bp, Homo sapiens
  siRNA target sequence for NCOA7 (NM_181782.1,925-943).
ctgatcctctggttattga

SEQ ID NO: 303311 - DNA, 19 bp, Homo sapiens
  siRNA target sequence for NCOA7 (NM_181782.1,994-1012).
ccattgcgctctacaatga

SEQ ID NO: 303312 - DNA, 19 bp, Homo sapiens
  siRNA target sequence for NCOA7 (NM_181782.1,999-1017).
gcgctctacaatgacattt

SEQ ID NO: 303313 - DNA, 19 bp, Homo sapiens
  siRNA target sequence for NCOA7 (NM_181782.1,1124-1142).
cccattcagtaagttcaaa

SEQ ID NO: 303314 - DNA, 19 bp, Homo sapiens
  siRNA target sequence for NCOA7 (NM_181782.1,1198-1216).
ccagaccaatagtaccttt

SEQ ID NO: 303315 - DNA, 19 bp, Homo sapiens
  siRNA target sequence for NCOA7 (NM_181782.1,1228-1246).
caggacatacacctacaaa

SEQ ID NO: 303316 - DNA, 19 bp, Homo sapiens
  siRNA target sequence for NCOA7 (NM_181782.1,1312-1330).
gttctcccacagtgactaa

SEQ ID NO: 303317 - DNA, 19 bp, Homo sapiens
  siRNA target sequence for NCOA7 (NM_181782.1,1413-1431).
gttgacttggaagaacttt

SEQ ID NO: 303318 - DNA, 19 bp, Homo sapiens
  siRNA target sequence for NCOA7 (NM_181782.1,1443-1461).
ggtggtggaatgcacaaaa

SEQ ID NO: 303319 - DNA, 19 bp, Homo sapiens
  siRNA target sequence for NCOA7 (NM_181782.1,1444-1462).
gtggtggaatgcacaaaaa

SEQ ID NO: 303320 - DNA, 19 bp, Homo sapiens
  siRNA target sequence for NCOA7 (NM_181782.1,1449-1467).
ggaatgcacaaaaaagaca

SEQ ID NO: 303321 - DNA, 19 bp, Homo sapiens
  siRNA target sequence for NCOA7 (NM_181782.1,1493-1511).
cccagaggaacgaaagaaa

SEQ ID NO: 303322 - DNA, 19 bp, Homo sapiens
  siRNA target sequence for NCOA7 (NM_181782.1,1670-1688).
gccagaaagccgagtagaa

SEQ ID NO: 303323 - DNA, 19 bp, Homo sapiens
  siRNA target sequence for NCOA7 (NM_181782.1,1700-1718).
catacatgaagatttagat

SEQ ID NO: 303324 - DNA, 19 bp, Homo sapiens
  siRNA target sequence for NCOA7 (NM_181782.1,1734-1752).
gaatattacctgactaaga

SEQ ID NO: 303325 - DNA, 19 bp, Homo sapiens
  siRNA target sequence for NCOA7 (NM_181782.1,1821-1839).
ccagggggaatagacatta

SEQ ID NO: 303326 - DNA, 19 bp, Homo sapiens
  siRNA target sequence for NCOA7 (NM_181782.1,1833-1851).
gacattacccttagtagtt

SEQ ID NO: 303327 - DNA, 19 bp, Homo sapiens
  siRNA target sequence for NCOA7 (NM_181782.1,1835-1853).
cattacccttagtagttct

SEQ ID NO: 303328 - DNA, 19 bp, Homo sapiens
  siRNA target sequence for NCOA7 (NM_181782.1,1862-1880).
ggcgggtgatcccataact

SEQ ID NO: 303329 - DNA, 19 bp, Homo sapiens
  siRNA target sequence for NCOA7 (NM_181782.1,1864-1882).
cgggtgatcccataactga

SEQ ID NO: 303330 - DNA, 19 bp, Homo sapiens
  siRNA target sequence for NCOA7 (NM_181782.1,1926-1944).
cccctcccggtaaaactga

SEQ ID NO: 303331 - DNA, 19 bp, Homo sapiens
  siRNA target sequence for NCOA7 (NM_181782.1,1927-1945).
ccctcccggtaaaactgaa

SEQ ID NO: 303332 - DNA, 19 bp, Homo sapiens
  siRNA target sequence for NCOA7 (NM_181782.1,2019-2037).
caaggtgcacaaatggata

SEQ ID NO: 303333 - DNA, 19 bp, Homo sapiens
  siRNA target sequence for NCOA7 (NM_181782.1,2022-2040).
ggtgcacaaatggataata

SEQ ID NO: 303334 - DNA, 19 bp, Homo sapiens
  siRNA target sequence for NCOA7 (NM_181782.1,2059-2077).
ggctgttaaagagaattca

SEQ ID NO: 303335 - DNA, 19 bp, Homo sapiens
  siRNA target sequence for NCOA7 (NM_181782.1,2078-2096).
ggtacccattgaagatata

SEQ ID NO: 303336 - DNA, 19 bp, Homo sapiens
  siRNA target sequence for NCOA7 (NM_181782.1,2256-2274).
gagagggtggatcatttgt

SEQ ID NO: 303337 - DNA, 19 bp, Homo sapiens
  siRNA target sequence for NCOA7 (NM_181782.1,2262-2280).
gtggatcatttgtacacat

SEQ ID NO: 303338 - DNA, 19 bp, Homo sapiens
  siRNA target sequence for NCOA7 (NM_181782.1,2291-2309).
gtggtctcccgatgtctat

SEQ ID NO: 303339 - DNA, 19 bp, Homo sapiens
  siRNA target sequence for NCOA7 (NM_181782.1,2296-2314).
ctcccgatgtctatggaaa

SEQ ID NO: 303340 - DNA, 19 bp, Homo sapiens
  siRNA target sequence for NCOA7 (NM_181782.1,2299-2317).
ccgatgtctatggaaaaga

SEQ ID NO: 303341 - DNA, 19 bp, Homo sapiens
  siRNA target sequence for NCOA7 (NM_181782.1,2351-2369).
ggaagaactgaacatgatt

SEQ ID NO: 303342 - DNA, 19 bp, Homo sapiens
  siRNA target sequence for NCOA7 (NM_181782.1,2355-2373).
gaactgaacatgattgaca

SEQ ID NO: 303343 - DNA, 19 bp, Homo sapiens
  siRNA target sequence for NCOA7 (NM_181782.1,2443-2461).
gcacatgcagctactatga

SEQ ID NO: 303344 - DNA, 19 bp, Homo sapiens
  siRNA target sequence for NCOA7 (NM_181782.1,2444-2462).
cacatgcagctactatgaa

SEQ ID NO: 303345 - DNA, 19 bp, Homo sapiens
  siRNA target sequence for NCOA7 (NM_181782.1,2446-2464).
catgcagctactatgaaga

SEQ ID NO: 303346 - DNA, 19 bp, Homo sapiens
  siRNA target sequence for NCOA7 (NM_181782.1,2503-2521).
gcgcgctcctggagaatat

SEQ ID NO: 303347 - DNA, 19 bp, Homo sapiens
  siRNA target sequence for NCOA7 (NM_181782.1,2598-2616).
gagcacgggaccagcttaa

SEQ ID NO: 303348 - DNA, 19 bp, Homo sapiens
  siRNA target sequence for NCOA7 (NM_181782.1,2627-2645).
ccggaaatcggcatcacta

SEQ ID NO: 303349 - DNA, 19 bp, Homo sapiens
  siRNA target sequence for NCOA7 (NM_181782.1,2653-2671).
ctgtcctattggtcatcaa

SEQ ID NO: 303350 - DNA, 19 bp, Homo sapiens
  siRNA target sequence for NCOA7 (NM_181782.1,2663-2681).
ggtcatcaaagatatggat

SEQ ID NO: 303351 - DNA, 19 bp, Homo sapiens
  siRNA target sequence for NCOA7 (NM_181782.1,2678-2696).
ggataatcagatttttgga

SEQ ID NO: 303352 - DNA, 19 bp, Homo sapiens
  siRNA target sequence for NCOA7 (NM_181782.1,2740-2758).
gcacaggcgaaacttttct

SEQ ID NO: 303353 - DNA, 19 bp, Homo sapiens
  siRNA target sequence for NCOA7 (NM_181782.1,2819-2837).
caatggagacataagttct

SEQ ID NO: 303354 - DNA, 19 bp, Homo sapiens
  siRNA target sequence for NCOA7 (NM_181782.1,2828-2846).
cataagttctttagaactt

SEQ ID NO: 303355 - DNA, 19 bp, Homo sapiens
  siRNA target sequence for NCOA7 (NM_181782.1,2853-2871).
ggagggggacgatttggtt

SEQ ID NO: 303356 - DNA, 19 bp, Homo sapiens
  siRNA target sequence for NCOA7 (NM_181782.1,2854-2872).
gagggggacgatttggttt

SEQ ID NO: 303357 - DNA, 19 bp, Homo sapiens
  siRNA target sequence for NCOA7 (NM_181782.1,2856-2874).
gggggacgatttggtttat

SEQ ID NO: 303358 - DNA, 19 bp, Homo sapiens
  siRNA target sequence for NCOA7 (NM_181782.1,2911-2929).
cttgcagcactttcaataa

SEQ ID NO: 303359 - DNA, 19 bp, Homo sapiens
  siRNA target sequence for OSBP2 (NM_030758.1,498-516).
gggagcgcgacctttctca

SEQ ID NO: 303360 - DNA, 19 bp, Homo sapiens
  siRNA target sequence for OSBP2 (NM_030758.1,529-547).
gatcgctgccagcgttaaa

SEQ ID NO: 303361 - DNA, 19 bp, Homo sapiens
  siRNA target sequence for OSBP2 (NM_030758.1,729-747).
ggtttgctctcttactaca

SEQ ID NO: 303362 - DNA, 19 bp, Homo sapiens
  siRNA target sequence for OSBP2 (NM_030758.1,930-948).
gctgtccgcgtgatgaaca

SEQ ID NO: 303363 - DNA, 19 bp, Homo sapiens
  siRNA target sequence for OSBP2 (NM_030758.1,938-956).
cgtgatgaacactcattca

SEQ ID NO: 303364 - DNA, 19 bp, Homo sapiens
  siRNA target sequence for OSBP2 (NM_030758.1,1564-1582).
ggagctcagcagacaatgt

SEQ ID NO: 303365 - DNA, 19 bp, Homo sapiens
  siRNA target sequence for OSBP2 (NM_030758.1,1565-1583).
gagctcagcagacaatgta

SEQ ID NO: 303366 - DNA, 19 bp, Homo sapiens
  siRNA target sequence for OSBP2 (NM_030758.1,1567-1585).
gctcagcagacaatgtact

SEQ ID NO: 303367 - DNA, 19 bp, Homo sapiens
  siRNA target sequence for OSBP2 (NM_030758.1,1568-1586).
ctcagcagacaatgtacta

SEQ ID NO: 303368 - DNA, 19 bp, Homo sapiens
  siRNA target sequence for OSBP2 (NM_030758.1,2056-2074).
gcaagttccggggaaaata

SEQ ID NO: 303369 - DNA, 19 bp, Homo sapiens
  siRNA target sequence for OSBP2 (NM_030758.1,2144-2162).
gaagagcacctcaactgtt

SEQ ID NO: 303370 - DNA, 19 bp, Homo sapiens
  siRNA target sequence for OSBP2 (NM_030758.1,2200-2218).
caggggacatcgagattgt

SEQ ID NO: 303371 - DNA, 19 bp, Homo sapiens
  siRNA target sequence for OSBP2 (NM_030758.1,2203-2221).
gggacatcgagattgtgaa

SEQ ID NO: 303372 - DNA, 19 bp, Homo sapiens
  siRNA target sequence for OSBP2 (NM_030758.1,2211-2229).
gagattgtgaaccataaga

SEQ ID NO: 303373 - DNA, 19 bp, Homo sapiens
  siRNA target sequence for OSBP2 (NM_030758.1,2344-2362).
ccggctcgtgggatgaaca

SEQ ID NO: 303374 - DNA, 19 bp, Homo sapiens
  siRNA target sequence for OSBP2 (NM_030758.1,2345-2363).
cggctcgtgggatgaacaa

SEQ ID NO: 303375 - DNA, 19 bp, Homo sapiens
  siRNA target sequence for OSBP2 (NM_030758.1,2346-2364).
ggctcgtgggatgaacaaa

SEQ ID NO: 303376 - DNA, 19 bp, Homo sapiens
  siRNA target sequence for OSBP2 (NM_030758.1,2347-2365).
gctcgtgggatgaacaaat

SEQ ID NO: 303377 - DNA, 19 bp, Homo sapiens
  siRNA target sequence for OSBP2 (NM_030758.1,2479-2497).
cggagaacgcggagaacat

SEQ ID NO: 303378 - DNA, 19 bp, Homo sapiens
  siRNA target sequence for OSBP2 (NM_030758.1,2481-2499).
gagaacgcggagaacatgt

SEQ ID NO: 303379 - DNA, 19 bp, Homo sapiens
  siRNA target sequence for OSBP2 (NM_030758.1,2734-2752).
cgccactgtggtttgagaa

SEQ ID NO: 303380 - DNA, 19 bp, Homo sapiens
  siRNA target sequence for OSBP2 (NM_030758.1,2832-2850).
catatgtgccccaacatct

SEQ ID NO: 303381 - DNA, 19 bp, Homo sapiens
  siRNA target sequence for OSBPL10 (NM_017784.3,613-631).
gagggcgtgctcagcaaat

SEQ ID NO: 303382 - DNA, 19 bp, Homo sapiens
  siRNA target sequence for OSBPL10 (NM_017784.3,734-752).
ctcgaggagtcctgtcttt

SEQ ID NO: 303383 - DNA, 19 bp, Homo sapiens
  siRNA target sequence for OSBPL10 (NM_017784.3,736-754).
cgaggagtcctgtctttat

SEQ ID NO: 303384 - DNA, 19 bp, Homo sapiens
  siRNA target sequence for OSBPL10 (NM_017784.3,798-816).
ggtggtgtactctgctaat

SEQ ID NO: 303385 - DNA, 19 bp, Homo sapiens
  siRNA target sequence for OSBPL10 (NM_017784.3,801-819).
ggtgtactctgctaatgga

SEQ ID NO: 303386 - DNA, 19 bp, Homo sapiens
  siRNA target sequence for OSBPL10 (NM_017784.3,811-829).
gctaatggagagatgttta

SEQ ID NO: 303387 - DNA, 19 bp, Homo sapiens
  siRNA target sequence for OSBPL10 (NM_017784.3,812-830).
ctaatggagagatgtttaa

SEQ ID NO: 303388 - DNA, 19 bp, Homo sapiens
  siRNA target sequence for OSBPL10 (NM_017784.3,1144-1162).
cttgtgcacgccattgagt

SEQ ID NO: 303389 - DNA, 19 bp, Homo sapiens
  siRNA target sequence for OSBPL10 (NM_017784.3,1250-1268).
gggagtgcctcaacttgtt

SEQ ID NO: 303390 - DNA, 19 bp, Homo sapiens
  siRNA target sequence for OSBPL10 (NM_017784.3,1251-1269).
ggagtgcctcaacttgtta

SEQ ID NO: 303391 - DNA, 19 bp, Homo sapiens
  siRNA target sequence for OSBPL10 (NM_017784.3,1310-1328).
caggagcctcggaaaacat

SEQ ID NO: 303392 - DNA, 19 bp, Homo sapiens
  siRNA target sequence for OSBPL10 (NM_017784.3,1339-1357).
cacgggtccaagtcacatt

SEQ ID NO: 303393 - DNA, 19 bp, Homo sapiens
  siRNA target sequence for OSBPL10 (NM_017784.3,1413-1431).
cataacctgggcaatttta

SEQ ID NO: 303394 - DNA, 19 bp, Homo sapiens
  siRNA target sequence for OSBPL10 (NM_017784.3,1422-1440).
ggcaattttaccaaactct

SEQ ID NO: 303395 - DNA, 19 bp, Homo sapiens
  siRNA target sequence for OSBPL10 (NM_017784.3,1478-1496).
caaactcaggctctgaatt

SEQ ID NO: 303396 - DNA, 19 bp, Homo sapiens
  siRNA target sequence for OSBPL10 (NM_017784.3,1486-1504).
ggctctgaattggttttgt

SEQ ID NO: 303397 - DNA, 19 bp, Homo sapiens
  siRNA target sequence for OSBPL10 (NM_017784.3,1488-1506).
ctctgaattggttttgtct

SEQ ID NO: 303398 - DNA, 19 bp, Homo sapiens
  siRNA target sequence for OSBPL10 (NM_017784.3,1560-1578).
ggaggatcagcgtagtata

SEQ ID NO: 303399 - DNA, 19 bp, Homo sapiens
  siRNA target sequence for OSBPL10 (NM_017784.3,1561-1579).
gaggatcagcgtagtataa

SEQ ID NO: 303400 - DNA, 19 bp, Homo sapiens
  siRNA target sequence for OSBPL10 (NM_017784.3,1563-1581).
ggatcagcgtagtataatt

SEQ ID NO: 303401 - DNA, 19 bp, Homo sapiens
  siRNA target sequence for OSBPL10 (NM_017784.3,1569-1587).
gcgtagtataattcttcat

SEQ ID NO: 303402 - DNA, 19 bp, Homo sapiens
  siRNA target sequence for OSBPL10 (NM_017784.3,1590-1608).
catttcacaactcaaactt

SEQ ID NO: 303403 - DNA, 19 bp, Homo sapiens
  siRNA target sequence for OSBPL10 (NM_017784.3,1600-1618).
ctcaaacttggaatggatt

SEQ ID NO: 303404 - DNA, 19 bp, Homo sapiens
  siRNA target sequence for OSBPL10 (NM_017784.3,1669-1687).
gagatgtatgcagatttca

SEQ ID NO: 303405 - DNA, 19 bp, Homo sapiens
  siRNA target sequence for OSBPL10 (NM_017784.3,1735-1753).
gaggagagagtcatttgct

SEQ ID NO: 303406 - DNA, 19 bp, Homo sapiens
  siRNA target sequence for OSBPL10 (NM_017784.3,1824-1842).
catcataggcgagacattt

SEQ ID NO: 303407 - DNA, 19 bp, Homo sapiens
  siRNA target sequence for OSBPL10 (NM_017784.3,1929-1947).
ggccgatgacccttccaaa

SEQ ID NO: 303408 - DNA, 19 bp, Homo sapiens
  siRNA target sequence for OSBPL10 (NM_017784.3,2034-2052).
gtgcgtcaacactcatgta

SEQ ID NO: 303409 - DNA, 19 bp, Homo sapiens
  siRNA target sequence for OSBPL10 (NM_017784.3,2054-2072).
ggaccaaaagcaagttcat

SEQ ID NO: 303410 - DNA, 19 bp, Homo sapiens
  siRNA target sequence for OSBPL10 (NM_017784.3,2081-2099).
ccgtgggggtctctatgat

SEQ ID NO: 303411 - DNA, 19 bp, Homo sapiens
  siRNA target sequence for OSBPL10 (NM_017784.3,2082-2100).
cgtgggggtctctatgata

SEQ ID NO: 303412 - DNA, 19 bp, Homo sapiens
  siRNA target sequence for OSBPL10 (NM_017784.3,2128-2146).
cacggggaggagtacgtat

SEQ ID NO: 303413 - DNA, 19 bp, Homo sapiens
  siRNA target sequence for OSBPL10 (NM_017784.3,2131-2149).
ggggaggagtacgtattca

SEQ ID NO: 303414 - DNA, 19 bp, Homo sapiens
  siRNA target sequence for OSBPL10 (NM_017784.3,2197-2215).
gagctcggaggaaaagtca

SEQ ID NO: 303415 - DNA, 19 bp, Homo sapiens
  siRNA target sequence for OSBPL10 (NM_017784.3,2238-2256).
gtactcagcgacagtgata

SEQ ID NO: 303416 - DNA, 19 bp, Homo sapiens
  siRNA target sequence for OSBPL10 (NM_017784.3,2319-2337).
cccaaccaacaccattgtt

SEQ ID NO: 303417 - DNA, 19 bp, Homo sapiens
  siRNA target sequence for OSBPL10 (NM_017784.3,2357-2375).
ggaatggtactttagagtt

SEQ ID NO: 303418 - DNA, 19 bp, Homo sapiens
  siRNA target sequence for OSBPL10 (NM_017784.3,2600-2618).
caccatggaagcccaaata

SEQ ID NO: 303419 - DNA, 19 bp, Homo sapiens
  siRNA target sequence for OSBPL10 (NM_017784.3,2632-2650).
ggcgatggctgggtatact

SEQ ID NO: 303420 - DNA, 19 bp, Homo sapiens
  siRNA target sequence for OSBPL10 (NM_017784.3,2633-2651).
gcgatggctgggtatactt

SEQ ID NO: 303421 - DNA, 19 bp, Homo sapiens
  siRNA target sequence for OSBPL11 (NM_022776.3,378-396).
gcggtgaccccgaacaaga

SEQ ID NO: 303422 - DNA, 19 bp, Homo sapiens
  siRNA target sequence for OSBPL11 (NM_022776.3,379-397).
cggtgaccccgaacaagaa

SEQ ID NO: 303423 - DNA, 19 bp, Homo sapiens
  siRNA target sequence for OSBPL11 (NM_022776.3,486-504).
gtgtatggctatttaatga

SEQ ID NO: 303424 - DNA, 19 bp, Homo sapiens
  siRNA target sequence for OSBPL11 (NM_022776.3,492-510).
ggctatttaatgaagtata

SEQ ID NO: 303425 - DNA, 19 bp, Homo sapiens
  siRNA target sequence for OSBPL11 (NM_022776.3,562-580).
ctgggctgttggagtactt

SEQ ID NO: 303426 - DNA, 19 bp, Homo sapiens
  siRNA target sequence for OSBPL11 (NM_022776.3,584-602).
gaatgaacagtctagaaat

SEQ ID NO: 303427 - DNA, 19 bp, Homo sapiens
  siRNA target sequence for OSBPL11 (NM_022776.3,626-644).
gcttgcaggagctgtaata

SEQ ID NO: 303428 - DNA, 19 bp, Homo sapiens
  siRNA target sequence for OSBPL11 (NM_022776.3,627-645).
cttgcaggagctgtaatat

SEQ ID NO: 303429 - DNA, 19 bp, Homo sapiens
  siRNA target sequence for OSBPL11 (NM_022776.3,688-706).
ccagtggggaacaatataa

SEQ ID NO: 303430 - DNA, 19 bp, Homo sapiens
  siRNA target sequence for OSBPL11 (NM_022776.3,689-707).
cagtggggaacaatataaa

SEQ ID NO: 303431 - DNA, 19 bp, Homo sapiens
  siRNA target sequence for OSBPL11 (NM_022776.3,742-760).
gggttagcagacttcagat

SEQ ID NO: 303432 - DNA, 19 bp, Homo sapiens
  siRNA target sequence for OSBPL11 (NM_022776.3,743-761).
ggttagcagacttcagata

SEQ ID NO: 303433 - DNA, 19 bp, Homo sapiens
  siRNA target sequence for OSBPL11 (NM_022776.3,770-788).
gcatcatactgaagctatt

SEQ ID NO: 303434 - DNA, 19 bp, Homo sapiens
  siRNA target sequence for OSBPL11 (NM_022776.3,774-792).
catactgaagctattggaa

SEQ ID NO: 303435 - DNA, 19 bp, Homo sapiens
  siRNA target sequence for OSBPL11 (NM_022776.3,826-844).
cacttgcatctagtagtaa

SEQ ID NO: 303436 - DNA, 19 bp, Homo sapiens
  siRNA target sequence for OSBPL11 (NM_022776.3,860-878).
gaggagaccaagtcaaaat

SEQ ID NO: 303437 - DNA, 19 bp, Homo sapiens
  siRNA target sequence for OSBPL11 (NM_022776.3,914-932).
gcaatcactgagcaaaaga

SEQ ID NO: 303438 - DNA, 19 bp, Homo sapiens
  siRNA target sequence for OSBPL11 (NM_022776.3,919-937).
cactgagcaaaagaactaa

SEQ ID NO: 303439 - DNA, 19 bp, Homo sapiens
  siRNA target sequence for OSBPL11 (NM_022776.3,926-944).
caaaagaactaatttacct

SEQ ID NO: 303440 - DNA, 19 bp, Homo sapiens
  siRNA target sequence for OSBPL11 (NM_022776.3,991-1009).
gacaacaaagagacttaat

SEQ ID NO: 303441 - DNA, 19 bp, Homo sapiens
  siRNA target sequence for OSBPL11 (NM_022776.3,1004-1022).
cttaattagacgaattgaa

SEQ ID NO: 303442 - DNA, 19 bp, Homo sapiens
  siRNA target sequence for OSBPL11 (NM_022776.3,1029-1047).
cctacttctggccatctta

SEQ ID NO: 303443 - DNA, 19 bp, Homo sapiens
  siRNA target sequence for OSBPL11 (NM_022776.3,1065-1083).
ctcttaatgctcaaagcta

SEQ ID NO: 303444 - DNA, 19 bp, Homo sapiens
  siRNA target sequence for OSBPL11 (NM_022776.3,1093-1111).
caactatgaactgcttaaa

SEQ ID NO: 303445 - DNA, 19 bp, Homo sapiens
  siRNA target sequence for OSBPL11 (NM_022776.3,1178-1196).
gacaatcgagtggttagaa

SEQ ID NO: 303446 - DNA, 19 bp, Homo sapiens
  siRNA target sequence for OSBPL11 (NM_022776.3,1198-1216).
caaagatatctttatcaaa

SEQ ID NO: 303447 - DNA, 19 bp, Homo sapiens
  siRNA target sequence for OSBPL11 (NM_022776.3,1207-1225).
ctttatcaaaccactataa

SEQ ID NO: 303448 - DNA, 19 bp, Homo sapiens
  siRNA target sequence for OSBPL11 (NM_022776.3,1238-1256).
ccagccctttgcaactgat

SEQ ID NO: 303449 - DNA, 19 bp, Homo sapiens
  siRNA target sequence for OSBPL11 (NM_022776.3,1434-1452).
cttaagctgggcatggatt

SEQ ID NO: 303450 - DNA, 19 bp, Homo sapiens
  siRNA target sequence for OSBPL11 (NM_022776.3,1459-1477).
gagtggtgcttcctacatt

SEQ ID NO: 303451 - DNA, 19 bp, Homo sapiens
  siRNA target sequence for OSBPL11 (NM_022776.3,1466-1484).
gcttcctacatttatccta

SEQ ID NO: 303452 - DNA, 19 bp, Homo sapiens
  siRNA target sequence for OSBPL11 (NM_022776.3,1595-1613).
gtactaccttacctcattt

SEQ ID NO: 303453 - DNA, 19 bp, Homo sapiens
  siRNA target sequence for OSBPL11 (NM_022776.3,1623-1641).
cgtaagggagccattgcta

SEQ ID NO: 303454 - DNA, 19 bp, Homo sapiens
  siRNA target sequence for OSBPL11 (NM_022776.3,1632-1650).
gccattgctaaaaaaccat

SEQ ID NO: 303455 - DNA, 19 bp, Homo sapiens
  siRNA target sequence for OSBPL11 (NM_022776.3,1633-1651).
ccattgctaaaaaaccata

SEQ ID NO: 303456 - DNA, 19 bp, Homo sapiens
  siRNA target sequence for OSBPL11 (NM_022776.3,1656-1674).
cctatcattggagaaacat

SEQ ID NO: 303457 - DNA, 19 bp, Homo sapiens
  siRNA target sequence for OSBPL11 (NM_022776.3,1657-1675).
ctatcattggagaaacatt

SEQ ID NO: 303458 - DNA, 19 bp, Homo sapiens
  siRNA target sequence for OSBPL11 (NM_022776.3,1738-1756).
cccagggagtcacaaatca

SEQ ID NO: 303459 - DNA, 19 bp, Homo sapiens
  siRNA target sequence for OSBPL11 (NM_022776.3,1762-1780).
ctttatcgggggagtcttt

SEQ ID NO: 303460 - DNA, 19 bp, Homo sapiens
  siRNA target sequence for OSBPL11 (NM_022776.3,1788-1806).
gtgggatcagactgttaca

SEQ ID NO: 303461 - DNA, 19 bp, Homo sapiens
  siRNA target sequence for OSBPL11 (NM_022776.3,1790-1808).
gggatcagactgttacaca

SEQ ID NO: 303462 - DNA, 19 bp, Homo sapiens
  siRNA target sequence for OSBPL11 (NM_022776.3,1896-1914).
gcgcatgtctggactaaga

SEQ ID NO: 303463 - DNA, 19 bp, Homo sapiens
  siRNA target sequence for OSBPL11 (NM_022776.3,1919-1937).
gttcttaggcatgtcaata

SEQ ID NO: 303464 - DNA, 19 bp, Homo sapiens
  siRNA target sequence for OSBPL11 (NM_022776.3,1954-1972).
gagaaggtatccttagtct

SEQ ID NO: 303465 - DNA, 19 bp, Homo sapiens
  siRNA target sequence for OSBPL11 (NM_022776.3,2049-2067).
gaactgggtggcaaagtca

SEQ ID NO: 303466 - DNA, 19 bp, Homo sapiens
  siRNA target sequence for OSBPL11 (NM_022776.3,2075-2093).
ctgtgcaaaaactggatat

SEQ ID NO: 303467 - DNA, 19 bp, Homo sapiens
  siRNA target sequence for OSBPL11 (NM_022776.3,2101-2119).
gcatcacttttcataccaa

SEQ ID NO: 303468 - DNA, 19 bp, Homo sapiens
  siRNA target sequence for OSBPL11 (NM_022776.3,2145-2163).
cgggttacagctgaagtaa

SEQ ID NO: 303469 - DNA, 19 bp, Homo sapiens
  siRNA target sequence for OSBPL11 (NM_022776.3,2146-2164).
gggttacagctgaagtaaa

SEQ ID NO: 303470 - DNA, 19 bp, Homo sapiens
  siRNA target sequence for OSBPL11 (NM_022776.3,2194-2212).
gagtgcaaggggaatggaa

SEQ ID NO: 303471 - DNA, 19 bp, Homo sapiens
  siRNA target sequence for OSBPL11 (NM_022776.3,2220-2238).
cttgagttcacatatagca

SEQ ID NO: 303472 - DNA, 19 bp, Homo sapiens
  siRNA target sequence for OSBPL11 (NM_022776.3,2306-2324).
gaagcaggatccatttgaa

SEQ ID NO: 303473 - DNA, 19 bp, Homo sapiens
  siRNA target sequence for OSBPL11 (NM_022776.3,2329-2347).
ggcgattgtggaaaaatgt

SEQ ID NO: 303474 - DNA, 19 bp, Homo sapiens
  siRNA target sequence for OSBPL11 (NM_022776.3,2354-2372).
ctcgctgagagaatctgaa

SEQ ID NO: 303475 - DNA, 19 bp, Homo sapiens
  siRNA target sequence for OSBPL11 (NM_022776.3,2356-2374).
cgctgagagaatctgaaat

SEQ ID NO: 303476 - DNA, 19 bp, Homo sapiens
  siRNA target sequence for OSBPL11 (NM_022776.3,2381-2399).
ggccacagagcataagcat

SEQ ID NO: 303477 - DNA, 19 bp, Homo sapiens
  siRNA target sequence for OSBPL11 (NM_022776.3,2382-2400).
gccacagagcataagcata

SEQ ID NO: 303478 - DNA, 19 bp, Homo sapiens
  siRNA target sequence for OSBPL11 (NM_022776.3,2412-2430).
cgtcagaggactgaagaaa

SEQ ID NO: 303479 - DNA, 19 bp, Homo sapiens
  siRNA target sequence for OSBPL11 (NM_022776.3,2427-2445).
gaaaggcatcgtactgaaa

SEQ ID NO: 303480 - DNA, 19 bp, Homo sapiens
  siRNA target sequence for OSBPL2 (NM_014835.2,231-249).
ccgtcacagaggcaaatca

SEQ ID NO: 303481 - DNA, 19 bp, Homo sapiens
  siRNA target sequence for OSBPL2 (NM_014835.2,254-272).
gtcacgggaatgattgact

SEQ ID NO: 303482 - DNA, 19 bp, Homo sapiens
  siRNA target sequence for OSBPL2 (NM_014835.2,256-274).
cacgggaatgattgactta

SEQ ID NO: 303483 - DNA, 19 bp, Homo sapiens
  siRNA target sequence for OSBPL2 (NM_014835.2,258-276).
cgggaatgattgacttaga

SEQ ID NO: 303484 - DNA, 19 bp, Homo sapiens
  siRNA target sequence for OSBPL2 (NM_014835.2,269-287).
gacttagacaccagcaaaa

SEQ ID NO: 303485 - DNA, 19 bp, Homo sapiens
  siRNA target sequence for OSBPL2 (NM_014835.2,321-339).
ctcaagagaacggaattca

SEQ ID NO: 303486 - DNA, 19 bp, Homo sapiens
  siRNA target sequence for OSBPL2 (NM_014835.2,602-620).
gagaggaccggcaaaccat

SEQ ID NO: 303487 - DNA, 19 bp, Homo sapiens
  siRNA target sequence for OSBPL2 (NM_014835.2,604-622).
gaggaccggcaaaccattt

SEQ ID NO: 303488 - DNA, 19 bp, Homo sapiens
  siRNA target sequence for OSBPL2 (NM_014835.2,606-624).
ggaccggcaaaccatttaa

SEQ ID NO: 303489 - DNA, 19 bp, Homo sapiens
  siRNA target sequence for OSBPL2 (NM_014835.2,607-625).
gaccggcaaaccatttaat

SEQ ID NO: 303490 - DNA, 19 bp, Homo sapiens
  siRNA target sequence for OSBPL2 (NM_014835.2,638-656).
gaaacgtatgaattaatca

SEQ ID NO: 303491 - DNA, 19 bp, Homo sapiens
  siRNA target sequence for OSBPL2 (NM_014835.2,829-847).
ggagctgctcaaacataat

SEQ ID NO: 303492 - DNA, 19 bp, Homo sapiens
  siRNA target sequence for OSBPL2 (NM_014835.2,944-962).
cacagaactggacataagt

SEQ ID NO: 303493 - DNA, 19 bp, Homo sapiens
  siRNA target sequence for OSBPL2 (NM_014835.2,973-991).
ctttaaaccgtgtggatta

SEQ ID NO: 303494 - DNA, 19 bp, Homo sapiens
  siRNA target sequence for OSBPL2 (NM_014835.2,1045-1063).
gaagctctttatgatctat

SEQ ID NO: 303495 - DNA, 19 bp, Homo sapiens
  siRNA target sequence for OSBPL2 (NM_014835.2,1064-1082).
ggcaaatggacggaatgtt

SEQ ID NO: 303496 - DNA, 19 bp, Homo sapiens
  siRNA target sequence for OSBPL2 (NM_014835.2,1065-1083).
gcaaatggacggaatgttt

SEQ ID NO: 303497 - DNA, 19 bp, Homo sapiens
  siRNA target sequence for OSBPL2 (NM_014835.2,1089-1107).
gcatagatcctgtttcgta

SEQ ID NO: 303498 - DNA, 19 bp, Homo sapiens
  siRNA target sequence for OSBPL2 (NM_014835.2,1098-1116).
ctgtttcgtatgaatcctt

SEQ ID NO: 303499 - DNA, 19 bp, Homo sapiens
  siRNA target sequence for OSBPL2 (NM_014835.2,1134-1152).
gaggtgaccacctgagaaa

SEQ ID NO: 303500 - DNA, 19 bp, Homo sapiens
  siRNA target sequence for OSBPL2 (NM_014835.2,1509-1527).
ggttctacccaggcaataa

SEQ ID NO: 303501 - DNA, 19 bp, Homo sapiens
  siRNA target sequence for OSBPL2 (NM_014835.2,1540-1558).
gacccccgactggttgtat

SEQ ID NO: 303502 - DNA, 19 bp, Homo sapiens
  siRNA target sequence for OSBPL2 (NM_014835.2,1587-1605).
ccgactgcccagatatcta

SEQ ID NO: 303503 - DNA, 19 bp, Homo sapiens
  siRNA target sequence for OSBPL2 (NM_014835.2,1589-1607).
gactgcccagatatctact

SEQ ID NO: 303504 - DNA, 19 bp, Homo sapiens
  siRNA target sequence for OSBPL3 (NM_015550.2,433-451).
gtgtcccaaaaattggtat

SEQ ID NO: 303505 - DNA, 19 bp, Homo sapiens
  siRNA target sequence for OSBPL3 (NM_015550.2,526-544).
ctgaggggggagatgaatt

SEQ ID NO: 303506 - DNA, 19 bp, Homo sapiens
  siRNA target sequence for OSBPL3 (NM_015550.2,611-629).
ggcataagagattcttcta

SEQ ID NO: 303507 - DNA, 19 bp, Homo sapiens
  siRNA target sequence for OSBPL3 (NM_015550.2,657-675).
caagagccaaaccgatata

SEQ ID NO: 303508 - DNA, 19 bp, Homo sapiens
  siRNA target sequence for OSBPL3 (NM_015550.2,718-736).
gtgatgtctgtaaagaagt

SEQ ID NO: 303509 - DNA, 19 bp, Homo sapiens
  siRNA target sequence for OSBPL3 (NM_015550.2,826-844).
cttcgccaccacagaatgt

SEQ ID NO: 303510 - DNA, 19 bp, Homo sapiens
  siRNA target sequence for OSBPL3 (NM_015550.2,925-943).
ggggtgtttgactccattt

SEQ ID NO: 303511 - DNA, 19 bp, Homo sapiens
  siRNA target sequence for OSBPL3 (NM_015550.2,927-945).
ggtgtttgactccatttca

SEQ ID NO: 303512 - DNA, 19 bp, Homo sapiens
  siRNA target sequence for OSBPL3 (NM_015550.2,951-969).
gaagcgtagcagtatatca

SEQ ID NO: 303513 - DNA, 19 bp, Homo sapiens
  siRNA target sequence for OSBPL3 (NM_015550.2,985-1003).
caaactggaagcaatgtat

SEQ ID NO: 303514 - DNA, 19 bp, Homo sapiens
  siRNA target sequence for OSBPL3 (NM_015550.2,1019-1037).
gtgagacacgagttccatt

SEQ ID NO: 303515 - DNA, 19 bp, Homo sapiens
  siRNA target sequence for OSBPL3 (NM_015550.2,1021-1039).
gagacacgagttccattat

SEQ ID NO: 303516 - DNA, 19 bp, Homo sapiens
  siRNA target sequence for OSBPL3 (NM_015550.2,1030-1048).
gttccattatggttacagt

SEQ ID NO: 303517 - DNA, 19 bp, Homo sapiens
  siRNA target sequence for OSBPL3 (NM_015550.2,1115-1133).
gccagctcctgcaaagcat

SEQ ID NO: 303518 - DNA, 19 bp, Homo sapiens
  siRNA target sequence for OSBPL3 (NM_015550.2,1138-1156).
gtcctgcatcggacatact

SEQ ID NO: 303519 - DNA, 19 bp, Homo sapiens
  siRNA target sequence for OSBPL3 (NM_015550.2,1175-1193).
ccatccagggtggatcttt

SEQ ID NO: 303520 - DNA, 19 bp, Homo sapiens
  siRNA target sequence for OSBPL3 (NM_015550.2,1176-1194).
catccagggtggatctttt

SEQ ID NO: 303521 - DNA, 19 bp, Homo sapiens
  siRNA target sequence for OSBPL3 (NM_015550.2,1239-1257).
cagagctattggcaaagat

SEQ ID NO: 303522 - DNA, 19 bp, Homo sapiens
  siRNA target sequence for OSBPL3 (NM_015550.2,1309-1327).
cactcctccaatcctaatt

SEQ ID NO: 303523 - DNA, 19 bp, Homo sapiens
  siRNA target sequence for OSBPL3 (NM_015550.2,1314-1332).
ctccaatcctaatttgtca

SEQ ID NO: 303524 - DNA, 19 bp, Homo sapiens
  siRNA target sequence for OSBPL3 (NM_015550.2,1415-1433).
gtcatattgcccataaagt

SEQ ID NO: 303525 - DNA, 19 bp, Homo sapiens
  siRNA target sequence for OSBPL3 (NM_015550.2,1417-1435).
catattgcccataaagttt

SEQ ID NO: 303526 - DNA, 19 bp, Homo sapiens
  siRNA target sequence for OSBPL3 (NM_015550.2,1432-1450).
gtttacttcactttaaggt

SEQ ID NO: 303527 - DNA, 19 bp, Homo sapiens
  siRNA target sequence for OSBPL3 (NM_015550.2,1448-1466).
ggtcagcttttaatatcat

SEQ ID NO: 303528 - DNA, 19 bp, Homo sapiens
  siRNA target sequence for OSBPL3 (NM_015550.2,1467-1485).
gtcagcggagagagagaaa

SEQ ID NO: 303529 - DNA, 19 bp, Homo sapiens
  siRNA target sequence for OSBPL3 (NM_015550.2,1469-1487).
cagcggagagagagaaact

SEQ ID NO: 303530 - DNA, 19 bp, Homo sapiens
  siRNA target sequence for OSBPL3 (NM_015550.2,1570-1588).
gcacaaaacacagatctta

SEQ ID NO: 303531 - DNA, 19 bp, Homo sapiens
  siRNA target sequence for OSBPL3 (NM_015550.2,1644-1662).
cgccaagtcgggtgacaat

SEQ ID NO: 303532 - DNA, 19 bp, Homo sapiens
  siRNA target sequence for OSBPL3 (NM_015550.2,1646-1664).
ccaagtcgggtgacaatct

SEQ ID NO: 303533 - DNA, 19 bp, Homo sapiens
  siRNA target sequence for OSBPL3 (NM_015550.2,1710-1728).
gctttctaatgaaagtaga

SEQ ID NO: 303534 - DNA, 19 bp, Homo sapiens
  siRNA target sequence for OSBPL3 (NM_015550.2,1821-1839).
ctcatatgtcagtgacata

SEQ ID NO: 303535 - DNA, 19 bp, Homo sapiens
  siRNA target sequence for OSBPL3 (NM_015550.2,1828-1846).
gtcagtgacataagtgata

SEQ ID NO: 303536 - DNA, 19 bp, Homo sapiens
  siRNA target sequence for OSBPL3 (NM_015550.2,1834-1852).
gacataagtgataatcttt

SEQ ID NO: 303537 - DNA, 19 bp, Homo sapiens
  siRNA target sequence for OSBPL3 (NM_015550.2,1843-1861).
gataatctttccttagata

SEQ ID NO: 303538 - DNA, 19 bp, Homo sapiens
  siRNA target sequence for OSBPL3 (NM_015550.2,1864-1882).
ctcagtaatgatttagata

SEQ ID NO: 303539 - DNA, 19 bp, Homo sapiens
  siRNA target sequence for OSBPL3 (NM_015550.2,1899-1917).
ggggcctgtccttgatagt

SEQ ID NO: 303540 - DNA, 19 bp, Homo sapiens
  siRNA target sequence for OSBPL3 (NM_015550.2,1927-1945).
gcgaagtcccggagaagaa

SEQ ID NO: 303541 - DNA, 19 bp, Homo sapiens
  siRNA target sequence for OSBPL3 (NM_015550.2,1964-1982).
gcccgagcagcagtaacat

SEQ ID NO: 303542 - DNA, 19 bp, Homo sapiens
  siRNA target sequence for OSBPL3 (NM_015550.2,1966-1984).
ccgagcagcagtaacatca

SEQ ID NO: 303543 - DNA, 19 bp, Homo sapiens
  siRNA target sequence for OSBPL3 (NM_015550.2,2160-2178).
ggcagcctttgccatatca

SEQ ID NO: 303544 - DNA, 19 bp, Homo sapiens
  siRNA target sequence for OSBPL3 (NM_015550.2,2170-2188).
gccatatcagcgtatgcat

SEQ ID NO: 303545 - DNA, 19 bp, Homo sapiens
  siRNA target sequence for OSBPL3 (NM_015550.2,2204-2222).
ctggaagcaagccatttaa

SEQ ID NO: 303546 - DNA, 19 bp, Homo sapiens
  siRNA target sequence for OSBPL3 (NM_015550.2,2224-2242).
ccggttcttggagaaacat

SEQ ID NO: 303547 - DNA, 19 bp, Homo sapiens
  siRNA target sequence for OSBPL3 (NM_015550.2,2225-2243).
cggttcttggagaaacata

SEQ ID NO: 303548 - DNA, 19 bp, Homo sapiens
  siRNA target sequence for OSBPL3 (NM_015550.2,2226-2244).
ggttcttggagaaacatat

SEQ ID NO: 303549 - DNA, 19 bp, Homo sapiens
  siRNA target sequence for OSBPL3 (NM_015550.2,2320-2338).
catgctgagtctagaaatt

SEQ ID NO: 303550 - DNA, 19 bp, Homo sapiens
  siRNA target sequence for OSBPL3 (NM_015550.2,2429-2447).
cagtttttggggatcattt

SEQ ID NO: 303551 - DNA, 19 bp, Homo sapiens
  siRNA target sequence for OSBPL3 (NM_015550.2,2465-2483).
cctcttgcatccataacat

SEQ ID NO: 303552 - DNA, 19 bp, Homo sapiens
  siRNA target sequence for OSBPL3 (NM_015550.2,2509-2527).
cactatggagagattgtca

SEQ ID NO: 303553 - DNA, 19 bp, Homo sapiens
  siRNA target sequence for OSBPL3 (NM_015550.2,2549-2567).
cctgctactgcaaagtgaa

SEQ ID NO: 303554 - DNA, 19 bp, Homo sapiens
  siRNA target sequence for OSBPL3 (NM_015550.2,2550-2568).
ctgctactgcaaagtgaat

SEQ ID NO: 303555 - DNA, 19 bp, Homo sapiens
  siRNA target sequence for OSBPL3 (NM_015550.2,2594-2612).
ctaatgcccatgagattga

SEQ ID NO: 303556 - DNA, 19 bp, Homo sapiens
  siRNA target sequence for OSBPL3 (NM_015550.2,2737-2755).
ggctacgagcaatactata

SEQ ID NO: 303557 - DNA, 19 bp, Homo sapiens
  siRNA target sequence for OSBPL3 (NM_015550.2,2751-2769).
ctatagcttcacacagttt

SEQ ID NO: 303558 - DNA, 19 bp, Homo sapiens
  siRNA target sequence for OSBPL3 (NM_015550.2,2762-2780).
cacagtttgcgctggaatt

SEQ ID NO: 303559 - DNA, 19 bp, Homo sapiens
  siRNA target sequence for OSBPL3 (NM_015550.2,2818-2836).
cctactgacactcgattta

SEQ ID NO: 303560 - DNA, 19 bp, Homo sapiens
  siRNA target sequence for OSBPL3 (NM_015550.2,2995-3013).
gtgagcaacggcacctatt

SEQ ID NO: 303561 - DNA, 19 bp, Homo sapiens
  siRNA target sequence for OSBPL3 (NM_015550.2,3006-3024).
cacctatttggaacttaga

SEQ ID NO: 303562 - DNA, 19 bp, Homo sapiens
  siRNA target sequence for OSBPL3 (NM_015550.2,3046-3064).
ctggaccatcctgtcttat

SEQ ID NO: 303563 - DNA, 19 bp, Homo sapiens
  siRNA target sequence for OSBPL3 (NM_145321.1,1552-1570).
gccctgtcatccgaaaact

SEQ ID NO: 303564 - DNA, 19 bp, Homo sapiens
  siRNA target sequence for OSBPL3 (NM_145323.1,2238-2256).
ctgttccctccggtttcat

SEQ ID NO: 303565 - DNA, 19 bp, Homo sapiens
  siRNA target sequence for OSBPL3 (NM_145323.1,2240-2258).
gttccctccggtttcattt

SEQ ID NO: 303566 - DNA, 19 bp, Homo sapiens
  siRNA target sequence for OSBPL3 (NM_145323.1,2268-2286).
cgtaaacaggttcattact

SEQ ID NO: 303567 - DNA, 19 bp, Homo sapiens
  siRNA target sequence for OSBPL6 (NM_032523.2,423-441).
cactccaacccatagaagt

SEQ ID NO: 303568 - DNA, 19 bp, Homo sapiens
  siRNA target sequence for OSBPL6 (NM_032523.2,473-491).
gtaggcagagtattcacat

SEQ ID NO: 303569 - DNA, 19 bp, Homo sapiens
  siRNA target sequence for OSBPL6 (NM_032523.2,527-545).
ctgtaagtcggcaattgct

SEQ ID NO: 303570 - DNA, 19 bp, Homo sapiens
  siRNA target sequence for OSBPL6 (NM_032523.2,687-705).
ctggcacaagcgttttttt

SEQ ID NO: 303571 - DNA, 19 bp, Homo sapiens
  siRNA target sequence for OSBPL6 (NM_032523.2,689-707).
ggcacaagcgtttttttgt

SEQ ID NO: 303572 - DNA, 19 bp, Homo sapiens
  siRNA target sequence for OSBPL6 (NM_032523.2,708-726).
cctggataatggaatgtta

SEQ ID NO: 303573 - DNA, 19 bp, Homo sapiens
  siRNA target sequence for OSBPL6 (NM_032523.2,712-730).
gataatggaatgttaaagt

SEQ ID NO: 303574 - DNA, 19 bp, Homo sapiens
  siRNA target sequence for OSBPL6 (NM_032523.2,719-737).
gaatgttaaagtattcaaa

SEQ ID NO: 303575 - DNA, 19 bp, Homo sapiens
  siRNA target sequence for OSBPL6 (NM_032523.2,734-752).
caaaggcaccactcgatat

SEQ ID NO: 303576 - DNA, 19 bp, Homo sapiens
  siRNA target sequence for OSBPL6 (NM_032523.2,739-757).
gcaccactcgatattcaga

SEQ ID NO: 303577 - DNA, 19 bp, Homo sapiens
  siRNA target sequence for OSBPL6 (NM_032523.2,740-758).
caccactcgatattcagaa

SEQ ID NO: 303578 - DNA, 19 bp, Homo sapiens
  siRNA target sequence for OSBPL6 (NM_032523.2,765-783).
ggtccatgggagcatagat

SEQ ID NO: 303579 - DNA, 19 bp, Homo sapiens
  siRNA target sequence for OSBPL6 (NM_032523.2,787-805).
ggactctcagtcatgtcaa

SEQ ID NO: 303580 - DNA, 19 bp, Homo sapiens
  siRNA target sequence for OSBPL6 (NM_032523.2,788-806).
gactctcagtcatgtcaat

SEQ ID NO: 303581 - DNA, 19 bp, Homo sapiens
  siRNA target sequence for OSBPL6 (NM_032523.2,790-808).
ctctcagtcatgtcaatta

SEQ ID NO: 303582 - DNA, 19 bp, Homo sapiens
  siRNA target sequence for OSBPL6 (NM_032523.2,841-859).
gaagagcacatctatcatt

SEQ ID NO: 303583 - DNA, 19 bp, Homo sapiens
  siRNA target sequence for OSBPL6 (NM_032523.2,906-924).
gcgacatcatcggttgtat

SEQ ID NO: 303584 - DNA, 19 bp, Homo sapiens
  siRNA target sequence for OSBPL6 (NM_032523.2,947-965).
caccaagagatgctagttt

SEQ ID NO: 303585 - DNA, 19 bp, Homo sapiens
  siRNA target sequence for OSBPL6 (NM_032523.2,955-973).
gatgctagttttcacatat

SEQ ID NO: 303586 - DNA, 19 bp, Homo sapiens
  siRNA target sequence for OSBPL6 (NM_032523.2,998-1016).
cctcaccagctgctaatgt

SEQ ID NO: 303587 - DNA, 19 bp, Homo sapiens
  siRNA target sequence for OSBPL6 (NM_032523.2,999-1017).
ctcaccagctgctaatgtt

SEQ ID NO: 303588 - DNA, 19 bp, Homo sapiens
  siRNA target sequence for OSBPL6 (NM_032523.2,1007-1025).
ctgctaatgtttctgtaat

SEQ ID NO: 303589 - DNA, 19 bp, Homo sapiens
  siRNA target sequence for OSBPL6 (NM_032523.2,1010-1028).
ctaatgtttctgtaatgga

SEQ ID NO: 303590 - DNA, 19 bp, Homo sapiens
  siRNA target sequence for OSBPL6 (NM_032523.2,1056-1074).
gtggcagtcccctttacca

SEQ ID NO: 303591 - DNA, 19 bp, Homo sapiens
  siRNA target sequence for OSBPL6 (NM_032523.2,1100-1118).
gcacaactggccagagtaa

SEQ ID NO: 303592 - DNA, 19 bp, Homo sapiens
  siRNA target sequence for OSBPL6 (NM_032523.2,1191-1209).
ccttgtggaacttagcaaa

SEQ ID NO: 303593 - DNA, 19 bp, Homo sapiens
  siRNA target sequence for OSBPL6 (NM_032523.2,1205-1223).
gcaaactcctgcaaaattt

SEQ ID NO: 303594 - DNA, 19 bp, Homo sapiens
  siRNA target sequence for OSBPL6 (NM_032523.2,1269-1287).
gcaggctaactgtgtagat

SEQ ID NO: 303595 - DNA, 19 bp, Homo sapiens
  siRNA target sequence for OSBPL6 (NM_032523.2,1270-1288).
caggctaactgtgtagata

SEQ ID NO: 303596 - DNA, 19 bp, Homo sapiens
  siRNA target sequence for OSBPL6 (NM_032523.2,1272-1290).
ggctaactgtgtagatatt

SEQ ID NO: 303597 - DNA, 19 bp, Homo sapiens
  siRNA target sequence for OSBPL6 (NM_032523.2,1273-1291).
gctaactgtgtagatattt

SEQ ID NO: 303598 - DNA, 19 bp, Homo sapiens
  siRNA target sequence for OSBPL6 (NM_032523.2,1420-1438).
ctttgtgcagatattgaat

SEQ ID NO: 303599 - DNA, 19 bp, Homo sapiens
  siRNA target sequence for OSBPL6 (NM_032523.2,1471-1489).
ctggaaagttcaacagatt

SEQ ID NO: 303600 - DNA, 19 bp, Homo sapiens
  siRNA target sequence for OSBPL6 (NM_032523.2,1473-1491).
ggaaagttcaacagattat

SEQ ID NO: 303601 - DNA, 19 bp, Homo sapiens
  siRNA target sequence for OSBPL6 (NM_032523.2,1514-1532).
gtctaatcgcacagaaagt

SEQ ID NO: 303602 - DNA, 19 bp, Homo sapiens
  siRNA target sequence for OSBPL6 (NM_032523.2,1548-1566).
gtctgcatttaatagcata

SEQ ID NO: 303603 - DNA, 19 bp, Homo sapiens
  siRNA target sequence for OSBPL6 (NM_032523.2,1552-1570).
gcatttaatagcatagcta

SEQ ID NO: 303604 - DNA, 19 bp, Homo sapiens
  siRNA target sequence for OSBPL6 (NM_032523.2,1553-1571).
catttaatagcatagctat

SEQ ID NO: 303605 - DNA, 19 bp, Homo sapiens
  siRNA target sequence for OSBPL6 (NM_032523.2,1671-1689).
caaccagaatgctgaacta

SEQ ID NO: 303606 - DNA, 19 bp, Homo sapiens
  siRNA target sequence for OSBPL6 (NM_032523.2,1687-1705).
ctaaggagtcggttgaaca

SEQ ID NO: 303607 - DNA, 19 bp, Homo sapiens
  siRNA target sequence for OSBPL6 (NM_032523.2,1692-1710).
gagtcggttgaacagaata

SEQ ID NO: 303608 - DNA, 19 bp, Homo sapiens
  siRNA target sequence for OSBPL6 (NM_032523.2,1694-1712).
gtcggttgaacagaataca

SEQ ID NO: 303609 - DNA, 19 bp, Homo sapiens
  siRNA target sequence for OSBPL6 (NM_032523.2,1696-1714).
cggttgaacagaatacatt

SEQ ID NO: 303610 - DNA, 19 bp, Homo sapiens
  siRNA target sequence for OSBPL6 (NM_032523.2,1732-1750).
gatcaggttgtcagtgtaa

SEQ ID NO: 303611 - DNA, 19 bp, Homo sapiens
  siRNA target sequence for OSBPL6 (NM_032523.2,1737-1755).
ggttgtcagtgtaaatatt

SEQ ID NO: 303612 - DNA, 19 bp, Homo sapiens
  siRNA target sequence for OSBPL6 (NM_032523.2,1773-1791).
ggctggtgagcaaatccat

SEQ ID NO: 303613 - DNA, 19 bp, Homo sapiens
  siRNA target sequence for OSBPL6 (NM_032523.2,1839-1857).
catgtcagagtctgtttct

SEQ ID NO: 303614 - DNA, 19 bp, Homo sapiens
  siRNA target sequence for OSBPL6 (NM_032523.2,1892-1910).
caagttcgtcagagaatga

SEQ ID NO: 303615 - DNA, 19 bp, Homo sapiens
  siRNA target sequence for OSBPL6 (NM_032523.2,1937-1955).
gtgatgtgagtgataatat

SEQ ID NO: 303616 - DNA, 19 bp, Homo sapiens
  siRNA target sequence for OSBPL6 (NM_032523.2,2066-2084).
gtcctgacaccagtaacat

SEQ ID NO: 303617 - DNA, 19 bp, Homo sapiens
  siRNA target sequence for OSBPL6 (NM_032523.2,2068-2086).
cctgacaccagtaacatta

SEQ ID NO: 303618 - DNA, 19 bp, Homo sapiens
  siRNA target sequence for OSBPL6 (NM_032523.2,2069-2087).
ctgacaccagtaacattaa

SEQ ID NO: 303619 - DNA, 19 bp, Homo sapiens
  siRNA target sequence for OSBPL6 (NM_032523.2,2103-2121).
gaggaacaacattggtaaa

SEQ ID NO: 303620 - DNA, 19 bp, Homo sapiens
  siRNA target sequence for OSBPL6 (NM_032523.2,2117-2135).
gtaaagacctgtctaaagt

SEQ ID NO: 303621 - DNA, 19 bp, Homo sapiens
  siRNA target sequence for OSBPL6 (NM_032523.2,2138-2156).
ctatgcctgtggagctaaa

SEQ ID NO: 303622 - DNA, 19 bp, Homo sapiens
  siRNA target sequence for OSBPL6 (NM_032523.2,2220-2238).
ggcttcggaaactgatgat

SEQ ID NO: 303623 - DNA, 19 bp, Homo sapiens
  siRNA target sequence for OSBPL6 (NM_032523.2,2281-2299).
ggatactgctccacctatt

SEQ ID NO: 303624 - DNA, 19 bp, Homo sapiens
  siRNA target sequence for OSBPL6 (NM_032523.2,2282-2300).
gatactgctccacctattt

SEQ ID NO: 303625 - DNA, 19 bp, Homo sapiens
  siRNA target sequence for OSBPL6 (NM_032523.2,2416-2434).
gcctgtcactgtgaatcaa

SEQ ID NO: 303626 - DNA, 19 bp, Homo sapiens
  siRNA target sequence for OSBPL6 (NM_032523.2,2480-2498).
gggggaagtcgatggaaat

SEQ ID NO: 303627 - DNA, 19 bp, Homo sapiens
  siRNA target sequence for OSBPL6 (NM_032523.2,2597-2615).
gaagatggatagaacatta

SEQ ID NO: 303628 - DNA, 19 bp, Homo sapiens
  siRNA target sequence for OSBPL6 (NM_032523.2,2660-2678).
gcaaactcacatttgtcaa

SEQ ID NO: 303629 - DNA, 19 bp, Homo sapiens
  siRNA target sequence for OSBPL6 (NM_032523.2,2676-2694).
caaggtgaattattggaat

SEQ ID NO: 303630 - DNA, 19 bp, Homo sapiens
  siRNA target sequence for OSBPL6 (NM_032523.2,2712-2730).
ccagggggtggtgatagat

SEQ ID NO: 303631 - DNA, 19 bp, Homo sapiens
  siRNA target sequence for OSBPL6 (NM_032523.2,2746-2764).
gtgtaccggctgtttggaa

SEQ ID NO: 303632 - DNA, 19 bp, Homo sapiens
  siRNA target sequence for OSBPL6 (NM_032523.2,2825-2843).
gttccatgccaacaaacta

SEQ ID NO: 303633 - DNA, 19 bp, Homo sapiens
  siRNA target sequence for OSBPL6 (NM_032523.2,2848-2866).
ctgtactatggcttcacaa

SEQ ID NO: 303634 - DNA, 19 bp, Homo sapiens
  siRNA target sequence for OSBPL6 (NM_032523.2,2857-2875).
ggcttcacaaggtttgcta

SEQ ID NO: 303635 - DNA, 19 bp, Homo sapiens
  siRNA target sequence for OSBPL6 (NM_032523.2,2858-2876).
gcttcacaaggtttgctat

SEQ ID NO: 303636 - DNA, 19 bp, Homo sapiens
  siRNA target sequence for OSBPL6 (NM_032523.2,2872-2890).
gctattgagctcaatgagt

SEQ ID NO: 303637 - DNA, 19 bp, Homo sapiens
  siRNA target sequence for OSBPL6 (NM_032523.2,2873-2891).
ctattgagctcaatgagtt

SEQ ID NO: 303638 - DNA, 19 bp, Homo sapiens
  siRNA target sequence for OSBPL6 (NM_032523.2,2889-2907).
gttagatccagtactaaaa

SEQ ID NO: 303639 - DNA, 19 bp, Homo sapiens
  siRNA target sequence for OSBPL6 (NM_032523.2,2931-2949).
ccggttccggccagatcaa

SEQ ID NO: 303640 - DNA, 19 bp, Homo sapiens
  siRNA target sequence for OSBPL6 (NM_032523.2,2932-2950).
cggttccggccagatcaaa

SEQ ID NO: 303641 - DNA, 19 bp, Homo sapiens
  siRNA target sequence for OSBPL6 (NM_032523.2,2934-2952).
gttccggccagatcaaaga

SEQ ID NO: 303642 - DNA, 19 bp, Homo sapiens
  siRNA target sequence for OSBPL6 (NM_032523.2,2937-2955).
ccggccagatcaaagattt

SEQ ID NO: 303643 - DNA, 19 bp, Homo sapiens
  siRNA target sequence for OSBPL6 (NM_032523.2,2938-2956).
cggccagatcaaagatttt

SEQ ID NO: 303644 - DNA, 19 bp, Homo sapiens
  siRNA target sequence for OSBPL6 (NM_032523.2,3015-3033).
gagatctcggagacgatat

SEQ ID NO: 303645 - DNA, 19 bp, Homo sapiens
  siRNA target sequence for OSBPL6 (NM_032523.2,3017-3035).
gatctcggagacgatatat

SEQ ID NO: 303646 - DNA, 19 bp, Homo sapiens
  siRNA target sequence for OSBPL6 (NM_032523.2,3020-3038).
ctcggagacgatatatgga

SEQ ID NO: 303647 - DNA, 19 bp, Homo sapiens
  siRNA target sequence for OSBPL6 (NM_032523.2,3045-3063).
caatcttgaacatatacca

SEQ ID NO: 303648 - DNA, 19 bp, Homo sapiens
  siRNA target sequence for OSBPL6 (NM_032523.2,3122-3140).
cctactgggagcttcgaaa

SEQ ID NO: 303649 - DNA, 19 bp, Homo sapiens
  siRNA target sequence for OSBPL6 (NM_032523.2,3141-3159).
ggaccctgggtttagcaaa

SEQ ID NO: 303650 - DNA, 19 bp, Homo sapiens
  siRNA target sequence for OSBPL6 (NM_032523.2,3146-3164).
ctgggtttagcaaagtaga

SEQ ID NO: 303651 - DNA, 19 bp, Homo sapiens
  siRNA target sequence for OSBPL7 (NM_017731.3,410-428).
ggtcacctgctcaagaaga

SEQ ID NO: 303652 - DNA, 19 bp, Homo sapiens
  siRNA target sequence for OSBPL7 (NM_017731.3,450-468).
ggcacaagagatactttgt

SEQ ID NO: 303653 - DNA, 19 bp, Homo sapiens
  siRNA target sequence for OSBPL7 (NM_017731.3,473-491).
gaggacgggatccttcatt

SEQ ID NO: 303654 - DNA, 19 bp, Homo sapiens
  siRNA target sequence for OSBPL7 (NM_017731.3,475-493).
ggacgggatccttcattat

SEQ ID NO: 303655 - DNA, 19 bp, Homo sapiens
  siRNA target sequence for OSBPL7 (NM_017731.3,478-496).
cgggatccttcattatgca

SEQ ID NO: 303656 - DNA, 19 bp, Homo sapiens
  siRNA target sequence for OSBPL7 (NM_017731.3,479-497).
gggatccttcattatgcaa

SEQ ID NO: 303657 - DNA, 19 bp, Homo sapiens
  siRNA target sequence for OSBPL7 (NM_017731.3,495-513).
caacaacccggcaagacat

SEQ ID NO: 303658 - DNA, 19 bp, Homo sapiens
  siRNA target sequence for OSBPL7 (NM_017731.3,556-574).
ggtcatgtccatcaacaaa

SEQ ID NO: 303659 - DNA, 19 bp, Homo sapiens
  siRNA target sequence for OSBPL7 (NM_017731.3,1253-1271).
cagggctcagagttgtcaa

SEQ ID NO: 303660 - DNA, 19 bp, Homo sapiens
  siRNA target sequence for OSBPL7 (NM_017731.3,1257-1275).
gctcagagttgtcaagaat

SEQ ID NO: 303661 - DNA, 19 bp, Homo sapiens
  siRNA target sequence for OSBPL7 (NM_017731.3,1845-1863).
gcgagcgcatggtgtacat

SEQ ID NO: 303662 - DNA, 19 bp, Homo sapiens
  siRNA target sequence for OSBPL7 (NM_017731.3,1967-1985).
cgaggcttccgcttcatca

SEQ ID NO: 303663 - DNA, 19 bp, Homo sapiens
  siRNA target sequence for OSBPL7 (NM_017731.3,2057-2075).
gatatgaagtggaagaaca

SEQ ID NO: 303664 - DNA, 19 bp, Homo sapiens
  siRNA target sequence for OSBPL7 (NM_017731.3,2284-2302).
caagtactggagttccaat

SEQ ID NO: 303665 - DNA, 19 bp, Homo sapiens
  siRNA target sequence for OSBPL7 (NM_017731.3,2439-2457).
ccgaccatgagcgaaactt

SEQ ID NO: 303666 - DNA, 19 bp, Homo sapiens
  siRNA target sequence for OSBPL7 (NM_017731.3,2619-2637).
gagacaggcgcaaagtcat

SEQ ID NO: 303667 - DNA, 19 bp, Homo sapiens
  siRNA target sequence for OSBPL7 (NM_017731.3,2687-2705).
gatagcagcgggaaagagt

SEQ ID NO: 303668 - DNA, 19 bp, Homo sapiens
  siRNA target sequence for OSBPL7 (NM_017731.3,2704-2722).
gtggtgggtgaccaacaat

SEQ ID NO: 303669 - DNA, 19 bp, Homo sapiens
  siRNA target sequence for OSBPL7 (NM_017731.3,2709-2727).
gggtgaccaacaataccta

SEQ ID NO: 303670 - DNA, 19 bp, Homo sapiens
  siRNA target sequence for OSBPL8 (NM_020841.3,522-540).
gcttcttggtgatagcaaa

SEQ ID NO: 303671 - DNA, 19 bp, Homo sapiens
  siRNA target sequence for OSBPL8 (NM_020841.3,569-587).
caaacagtgacgaatctca

SEQ ID NO: 303672 - DNA, 19 bp, Homo sapiens
  siRNA target sequence for OSBPL8 (NM_020841.3,638-656).
caacgccaaccaaagattt

SEQ ID NO: 303673 - DNA, 19 bp, Homo sapiens
  siRNA target sequence for OSBPL8 (NM_020841.3,641-659).
cgccaaccaaagatttgca

SEQ ID NO: 303674 - DNA, 19 bp, Homo sapiens
  siRNA target sequence for OSBPL8 (NM_020841.3,657-675).
gcatcagccatctcttagt

SEQ ID NO: 303675 - DNA, 19 bp, Homo sapiens
  siRNA target sequence for OSBPL8 (NM_020841.3,688-706).
catagccagggttttgaaa

SEQ ID NO: 303676 - DNA, 19 bp, Homo sapiens
  siRNA target sequence for OSBPL8 (NM_020841.3,736-754).
gatgaatcttcactttcta

SEQ ID NO: 303677 - DNA, 19 bp, Homo sapiens
  siRNA target sequence for OSBPL8 (NM_020841.3,770-788).
ctgaatctaaactttataa

SEQ ID NO: 303678 - DNA, 19 bp, Homo sapiens
  siRNA target sequence for OSBPL8 (NM_020841.3,796-814).
gagaaggacagttcaactt

SEQ ID NO: 303679 - DNA, 19 bp, Homo sapiens
  siRNA target sequence for OSBPL8 (NM_020841.3,928-946).
gttatggctgattggttaa

SEQ ID NO: 303680 - DNA, 19 bp, Homo sapiens
  siRNA target sequence for OSBPL8 (NM_020841.3,933-951).
ggctgattggttaaagatt

SEQ ID NO: 303681 - DNA, 19 bp, Homo sapiens
  siRNA target sequence for OSBPL8 (NM_020841.3,1003-1021).
gtgctactgatctataaaa

SEQ ID NO: 303682 - DNA, 19 bp, Homo sapiens
  siRNA target sequence for OSBPL8 (NM_020841.3,1038-1056).
gtgggtaggaacagttctt

SEQ ID NO: 303683 - DNA, 19 bp, Homo sapiens
  siRNA target sequence for OSBPL8 (NM_020841.3,1040-1058).
gggtaggaacagttcttct

SEQ ID NO: 303684 - DNA, 19 bp, Homo sapiens
  siRNA target sequence for OSBPL8 (NM_020841.3,1074-1092).
cattgaacgtccatcaaaa

SEQ ID NO: 303685 - DNA, 19 bp, Homo sapiens
  siRNA target sequence for OSBPL8 (NM_020841.3,1120-1138).
catcctttggagcaatcta

SEQ ID NO: 303686 - DNA, 19 bp, Homo sapiens
  siRNA target sequence for OSBPL8 (NM_020841.3,1165-1183).
gaagcggttggatccatta

SEQ ID NO: 303687 - DNA, 19 bp, Homo sapiens
  siRNA target sequence for OSBPL8 (NM_020841.3,1169-1187).
cggttggatccattactca

SEQ ID NO: 303688 - DNA, 19 bp, Homo sapiens
  siRNA target sequence for OSBPL8 (NM_020841.3,1170-1188).
ggttggatccattactcaa

SEQ ID NO: 303689 - DNA, 19 bp, Homo sapiens
  siRNA target sequence for OSBPL8 (NM_020841.3,1189-1207).
cccttacctagcagttatt

SEQ ID NO: 303690 - DNA, 19 bp, Homo sapiens
  siRNA target sequence for OSBPL8 (NM_020841.3,1190-1208).
ccttacctagcagttattt

SEQ ID NO: 303691 - DNA, 19 bp, Homo sapiens
  siRNA target sequence for OSBPL8 (NM_020841.3,1195-1213).
cctagcagttatttgatca

SEQ ID NO: 303692 - DNA, 19 bp, Homo sapiens
  siRNA target sequence for OSBPL8 (NM_020841.3,1283-1301).
gtcttcttaaacgtacaat

SEQ ID NO: 303693 - DNA, 19 bp, Homo sapiens
  siRNA target sequence for OSBPL8 (NM_020841.3,1288-1306).
cttaaacgtacaatgatca

SEQ ID NO: 303694 - DNA, 19 bp, Homo sapiens
  siRNA target sequence for OSBPL8 (NM_020841.3,1326-1344).
cctgagcgtttcatcagat

SEQ ID NO: 303695 - DNA, 19 bp, Homo sapiens
  siRNA target sequence for OSBPL8 (NM_020841.3,1327-1345).
ctgagcgtttcatcagata

SEQ ID NO: 303696 - DNA, 19 bp, Homo sapiens
  siRNA target sequence for OSBPL8 (NM_020841.3,1347-1365).
cacacatgtgactttctat

SEQ ID NO: 303697 - DNA, 19 bp, Homo sapiens
  siRNA target sequence for OSBPL8 (NM_020841.3,1356-1374).
gactttctatggcttacta

SEQ ID NO: 303698 - DNA, 19 bp, Homo sapiens
  siRNA target sequence for OSBPL8 (NM_020841.3,1367-1385).
gcttactacgtgctaacaa

SEQ ID NO: 303699 - DNA, 19 bp, Homo sapiens
  siRNA target sequence for OSBPL8 (NM_020841.3,1368-1386).
cttactacgtgctaacaat

SEQ ID NO: 303700 - DNA, 19 bp, Homo sapiens
  siRNA target sequence for OSBPL8 (NM_020841.3,1396-1414).
ggtgataacttccagttaa

SEQ ID NO: 303701 - DNA, 19 bp, Homo sapiens
  siRNA target sequence for OSBPL8 (NM_020841.3,1423-1441).
gaaattgaacgacaacatt

SEQ ID NO: 303702 - DNA, 19 bp, Homo sapiens
  siRNA target sequence for OSBPL8 (NM_020841.3,1438-1456).
cattttaaggaccaagata

SEQ ID NO: 303703 - DNA, 19 bp, Homo sapiens
  siRNA target sequence for OSBPL8 (NM_020841.3,1449-1467).
ccaagatatgtattctgat

SEQ ID NO: 303704 - DNA, 19 bp, Homo sapiens
  siRNA target sequence for OSBPL8 (NM_020841.3,1701-1719).
ctggacactattgaaacaa

SEQ ID NO: 303705 - DNA, 19 bp, Homo sapiens
  siRNA target sequence for OSBPL8 (NM_020841.3,1727-1745).
ctggcatggacctatccaa

SEQ ID NO: 303706 - DNA, 19 bp, Homo sapiens
  siRNA target sequence for OSBPL8 (NM_020841.3,1746-1764).
ggtggttctgcctacattt

SEQ ID NO: 303707 - DNA, 19 bp, Homo sapiens
  siRNA target sequence for OSBPL8 (NM_020841.3,1775-1793).
cccgttctttcctggataa

SEQ ID NO: 303708 - DNA, 19 bp, Homo sapiens
  siRNA target sequence for OSBPL8 (NM_020841.3,1789-1807).
gataaactttcagattact

SEQ ID NO: 303709 - DNA, 19 bp, Homo sapiens
  siRNA target sequence for OSBPL8 (NM_020841.3,1809-1827).
ctatcatgcagatttccta

SEQ ID NO: 303710 - DNA, 19 bp, Homo sapiens
  siRNA target sequence for OSBPL8 (NM_020841.3,1838-1856).
ctcttgaagaaaatcctta

SEQ ID NO: 303711 - DNA, 19 bp, Homo sapiens
  siRNA target sequence for OSBPL8 (NM_020841.3,1914-1932).
gggactgaagaaaccttat

SEQ ID NO: 303712 - DNA, 19 bp, Homo sapiens
  siRNA target sequence for OSBPL8 (NM_020841.3,1915-1933).
ggactgaagaaaccttata

SEQ ID NO: 303713 - DNA, 19 bp, Homo sapiens
  siRNA target sequence for OSBPL8 (NM_020841.3,1916-1934).
gactgaagaaaccttataa

SEQ ID NO: 303714 - DNA, 19 bp, Homo sapiens
  siRNA target sequence for OSBPL8 (NM_020841.3,1923-1941).
gaaaccttataatcctata

SEQ ID NO: 303715 - DNA, 19 bp, Homo sapiens
  siRNA target sequence for OSBPL8 (NM_020841.3,1937-1955).
ctatacttggcgagacttt

SEQ ID NO: 303716 - DNA, 19 bp, Homo sapiens
  siRNA target sequence for OSBPL8 (NM_020841.3,1946-1964).
gcgagactttccgttgttt

SEQ ID NO: 303717 - DNA, 19 bp, Homo sapiens
  siRNA target sequence for OSBPL8 (NM_020841.3,1956-1974).
ccgttgtttatggattcat

SEQ ID NO: 303718 - DNA, 19 bp, Homo sapiens
  siRNA target sequence for OSBPL8 (NM_020841.3,2016-2034).
gtcccatcatccaccaata

SEQ ID NO: 303719 - DNA, 19 bp, Homo sapiens
  siRNA target sequence for OSBPL8 (NM_020841.3,2040-2058).
cttttatgttagtaatcga

SEQ ID NO: 303720 - DNA, 19 bp, Homo sapiens
  siRNA target sequence for OSBPL8 (NM_020841.3,2051-2069).
gtaatcgaaaagatggatt

SEQ ID NO: 303721 - DNA, 19 bp, Homo sapiens
  siRNA target sequence for OSBPL8 (NM_020841.3,2115-2133).
ctcattatctgcaatatta

SEQ ID NO: 303722 - DNA, 19 bp, Homo sapiens
  siRNA target sequence for OSBPL8 (NM_020841.3,2117-2135).
cattatctgcaatattaga

SEQ ID NO: 303723 - DNA, 19 bp, Homo sapiens
  siRNA target sequence for OSBPL8 (NM_020841.3,2136-2154).
gggagaagcacggttaact

SEQ ID NO: 303724 - DNA, 19 bp, Homo sapiens
  siRNA target sequence for OSBPL8 (NM_020841.3,2137-2155).
ggagaagcacggttaactt

SEQ ID NO: 303725 - DNA, 19 bp, Homo sapiens
  siRNA target sequence for OSBPL8 (NM_020841.3,2138-2156).
gagaagcacggttaacttt

SEQ ID NO: 303726 - DNA, 19 bp, Homo sapiens
  siRNA target sequence for OSBPL8 (NM_020841.3,2140-2158).
gaagcacggttaactttct

SEQ ID NO: 303727 - DNA, 19 bp, Homo sapiens
  siRNA target sequence for OSBPL8 (NM_020841.3,2143-2161).
gcacggttaactttcttga

SEQ ID NO: 303728 - DNA, 19 bp, Homo sapiens
  siRNA target sequence for OSBPL8 (NM_020841.3,2146-2164).
cggttaactttcttgaata

SEQ ID NO: 303729 - DNA, 19 bp, Homo sapiens
  siRNA target sequence for OSBPL8 (NM_020841.3,2148-2166).
gttaactttcttgaataga

SEQ ID NO: 303730 - DNA, 19 bp, Homo sapiens
  siRNA target sequence for OSBPL8 (NM_020841.3,2190-2208).
gccatacgctcattgtaaa

SEQ ID NO: 303731 - DNA, 19 bp, Homo sapiens
  siRNA target sequence for OSBPL8 (NM_020841.3,2196-2214).
cgctcattgtaaaggaatt

SEQ ID NO: 303732 - DNA, 19 bp, Homo sapiens
  siRNA target sequence for OSBPL8 (NM_020841.3,2198-2216).
ctcattgtaaaggaattct

SEQ ID NO: 303733 - DNA, 19 bp, Homo sapiens
  siRNA target sequence for OSBPL8 (NM_020841.3,2245-2263).
ggaacagtcaatattacat

SEQ ID NO: 303734 - DNA, 19 bp, Homo sapiens
  siRNA target sequence for OSBPL8 (NM_020841.3,2273-2291).
ctggatacagtgcaatact

SEQ ID NO: 303735 - DNA, 19 bp, Homo sapiens
  siRNA target sequence for OSBPL8 (NM_020841.3,2276-2294).
gatacagtgcaatacttga

SEQ ID NO: 303736 - DNA, 19 bp, Homo sapiens
  siRNA target sequence for OSBPL8 (NM_020841.3,2318-2336).
ggagtagtgactgtgttaa

SEQ ID NO: 303737 - DNA, 19 bp, Homo sapiens
  siRNA target sequence for OSBPL8 (NM_020841.3,2319-2337).
gagtagtgactgtgttaat

SEQ ID NO: 303738 - DNA, 19 bp, Homo sapiens
  siRNA target sequence for OSBPL8 (NM_020841.3,2396-2414).
gggatagtgaagtttttat

SEQ ID NO: 303739 - DNA, 19 bp, Homo sapiens
  siRNA target sequence for OSBPL8 (NM_020841.3,2431-2449).
gataattcagaggttttct

SEQ ID NO: 303740 - DNA, 19 bp, Homo sapiens
  siRNA target sequence for OSBPL8 (NM_020841.3,2451-2469).
gaatccaacacctgacatt

SEQ ID NO: 303741 - DNA, 19 bp, Homo sapiens
  siRNA target sequence for OSBPL8 (NM_020841.3,2546-2564).
gggtaactcgagccataaa

SEQ ID NO: 303742 - DNA, 19 bp, Homo sapiens
  siRNA target sequence for OSBPL8 (NM_020841.3,2547-2565).
ggtaactcgagccataaat

SEQ ID NO: 303743 - DNA, 19 bp, Homo sapiens
  siRNA target sequence for OSBPL8 (NM_020841.3,2629-2647).
gccagggatcggaaaacaa

SEQ ID NO: 303744 - DNA, 19 bp, Homo sapiens
  siRNA target sequence for OSBPL8 (NM_020841.3,2631-2649).
cagggatcggaaaacaaaa

SEQ ID NO: 303745 - DNA, 19 bp, Homo sapiens
  siRNA target sequence for OSBPL8 (NM_020841.3,2726-2744).
gaccatgggacccacttaa

SEQ ID NO: 303746 - DNA, 19 bp, Homo sapiens
  siRNA target sequence for OSBPL8 (NM_020841.3,2732-2750).
gggacccacttaatgatat

SEQ ID NO: 303747 - DNA, 19 bp, Homo sapiens
  siRNA target sequence for OSBPL8 (NM_020841.3,2736-2754).
cccacttaatgatatgata

SEQ ID NO: 303748 - DNA, 19 bp, Homo sapiens
  siRNA target sequence for OSBPL8 (NM_020841.3,2738-2756).
cacttaatgatatgataca

SEQ ID NO: 303749 - DNA, 19 bp, Homo sapiens
  siRNA target sequence for OSBPL8 (NM_020841.3,2740-2758).
cttaatgatatgatacagt

SEQ ID NO: 303750 - DNA, 19 bp, Homo sapiens
  siRNA target sequence for OSBPL8 (NM_020841.3,2746-2764).
gatatgatacagtttgaaa

SEQ ID NO: 303751 - DNA, 19 bp, Homo sapiens
  siRNA target sequence for OSBPL8 (NM_020841.3,2794-2812).
catcgtactccaatggtta

SEQ ID NO: 303752 - DNA, 19 bp, Homo sapiens
  siRNA target sequence for OSBPL8 (NM_020841.3,2809-2827).
gttagcgtccccaaaatga

SEQ ID NO: 303753 - DNA, 19 bp, Homo sapiens
  siRNA target sequence for OSBPL8 (NM_020841.3,2813-2831).
gcgtccccaaaatgaaaca

SEQ ID NO: 303754 - DNA, 19 bp, Homo sapiens
  siRNA target sequence for OSBPL8 (NM_020841.3,2815-2833).
gtccccaaaatgaaacata

SEQ ID NO: 303755 - DNA, 19 bp, Homo sapiens
  siRNA target sequence for OSBPL8 (NM_020841.3,2909-2927).
gtgaagctcaatcagtaaa

SEQ ID NO: 303756 - DNA, 19 bp, Homo sapiens
  siRNA target sequence for OSBPL8 (NM_020841.3,2923-2941).
gtaaaaccaagtacaagaa

SEQ ID NO: 303757 - DNA, 19 bp, Homo sapiens
  siRNA target sequence for OSBPL8 (NM_020841.3,2971-2989).
cagagttccatcgaatcta

SEQ ID NO: 303758 - DNA, 19 bp, Homo sapiens
  siRNA target sequence for OSBPL8 (NM_020841.3,2973-2991).
gagttccatcgaatctata

SEQ ID NO: 303759 - DNA, 19 bp, Homo sapiens
  siRNA target sequence for OSBPL8 (NM_020841.3,2975-2993).
gttccatcgaatctataaa

SEQ ID NO: 303760 - DNA, 19 bp, Homo sapiens
  siRNA target sequence for OSBPL8 (NM_020841.3,3054-3072).
cacaccggccacggattat

SEQ ID NO: 303761 - DNA, 19 bp, Homo sapiens
  siRNA target sequence for OSBPL8 (NM_020841.3,3056-3074).
caccggccacggattattt

SEQ ID NO: 303762 - DNA, 19 bp, Homo sapiens
  siRNA target sequence for OSBPL8 (NM_020841.3,3059-3077).
cggccacggattattttct

SEQ ID NO: 303763 - DNA, 19 bp, Homo sapiens
  siRNA target sequence for OSBPL8 (NM_020841.3,3111-3129).
gattttgcttcaagtcata

SEQ ID NO: 303764 - DNA, 19 bp, Homo sapiens
  siRNA target sequence for OSBPL9 (NM_024586.3,159-177).
gcagaggatgtgttagact

SEQ ID NO: 303765 - DNA, 19 bp, Homo sapiens
  siRNA target sequence for OSBPL9 (NM_024586.3,211-229).
cgacagcaccttcacaata

SEQ ID NO: 303766 - DNA, 19 bp, Homo sapiens
  siRNA target sequence for OSBPL9 (NM_024586.3,212-230).
gacagcaccttcacaataa

SEQ ID NO: 303767 - DNA, 19 bp, Homo sapiens
  siRNA target sequence for OSBPL9 (NM_024586.3,216-234).
gcaccttcacaataactgt

SEQ ID NO: 303768 - DNA, 19 bp, Homo sapiens
  siRNA target sequence for OSBPL9 (NM_024586.3,220-238).
cttcacaataactgttgat

SEQ ID NO: 303769 - DNA, 19 bp, Homo sapiens
  siRNA target sequence for OSBPL9 (NM_024586.3,236-254).
gatcagaaaaccttccatt

SEQ ID NO: 303770 - DNA, 19 bp, Homo sapiens
  siRNA target sequence for OSBPL9 (NM_024586.3,288-306).
ggatccatgccttagaaga

SEQ ID NO: 303771 - DNA, 19 bp, Homo sapiens
  siRNA target sequence for OSBPL9 (NM_024586.3,309-327).
caattcttcgacatactct

SEQ ID NO: 303772 - DNA, 19 bp, Homo sapiens
  siRNA target sequence for OSBPL9 (NM_024586.3,356-374).
gttcctagtgtccaagatt

SEQ ID NO: 303773 - DNA, 19 bp, Homo sapiens
  siRNA target sequence for OSBPL9 (NM_024586.3,363-381).
gtgtccaagattttgataa

SEQ ID NO: 303774 - DNA, 19 bp, Homo sapiens
  siRNA target sequence for OSBPL9 (NM_024586.3,365-383).
gtccaagattttgataaga

SEQ ID NO: 303775 - DNA, 19 bp, Homo sapiens
  siRNA target sequence for OSBPL9 (NM_024586.3,398-416).
gatgcttacctacaaatct

SEQ ID NO: 303776 - DNA, 19 bp, Homo sapiens
  siRNA target sequence for OSBPL9 (NM_024586.3,401-419).
gcttacctacaaatcttga

SEQ ID NO: 303777 - DNA, 19 bp, Homo sapiens
  siRNA target sequence for OSBPL9 (NM_024586.3,586-604).
cgcagatggaatgataagt

SEQ ID NO: 303778 - DNA, 19 bp, Homo sapiens
  siRNA target sequence for OSBPL9 (NM_024586.3,615-633).
ccgtagatgcaatatatca

SEQ ID NO: 303779 - DNA, 19 bp, Homo sapiens
  siRNA target sequence for OSBPL9 (NM_024586.3,616-634).
cgtagatgcaatatatcaa

SEQ ID NO: 303780 - DNA, 19 bp, Homo sapiens
  siRNA target sequence for OSBPL9 (NM_024586.3,754-772).
ggctaccttgggacatcat

SEQ ID NO: 303781 - DNA, 19 bp, Homo sapiens
  siRNA target sequence for OSBPL9 (NM_024586.3,756-774).
ctaccttgggacatcatca

SEQ ID NO: 303782 - DNA, 19 bp, Homo sapiens
  siRNA target sequence for OSBPL9 (NM_024586.3,834-852).
ctccaagccacgtgaactt

SEQ ID NO: 303783 - DNA, 19 bp, Homo sapiens
  siRNA target sequence for OSBPL9 (NM_024586.3,836-854).
ccaagccacgtgaacttgt

SEQ ID NO: 303784 - DNA, 19 bp, Homo sapiens
  siRNA target sequence for OSBPL9 (NM_024586.3,864-882).
cagtcccagagttctctta

SEQ ID NO: 303785 - DNA, 19 bp, Homo sapiens
  siRNA target sequence for OSBPL9 (NM_024586.3,866-884).
gtcccagagttctcttact

SEQ ID NO: 303786 - DNA, 19 bp, Homo sapiens
  siRNA target sequence for OSBPL9 (NM_024586.3,936-954).
catccccaaagcgcttaat

SEQ ID NO: 303787 - DNA, 19 bp, Homo sapiens
  siRNA target sequence for OSBPL9 (NM_024586.3,939-957).
ccccaaagcgcttaataga

SEQ ID NO: 303788 - DNA, 19 bp, Homo sapiens
  siRNA target sequence for OSBPL9 (NM_024586.3,940-958).
cccaaagcgcttaatagat

SEQ ID NO: 303789 - DNA, 19 bp, Homo sapiens
  siRNA target sequence for OSBPL9 (NM_024586.3,941-959).
ccaaagcgcttaatagatt

SEQ ID NO: 303790 - DNA, 19 bp, Homo sapiens
  siRNA target sequence for OSBPL9 (NM_024586.3,988-1006).
cagcagctcgggaaatagt

SEQ ID NO: 303791 - DNA, 19 bp, Homo sapiens
  siRNA target sequence for OSBPL9 (NM_024586.3,990-1008).
gcagctcgggaaatagtct

SEQ ID NO: 303792 - DNA, 19 bp, Homo sapiens
  siRNA target sequence for OSBPL9 (NM_024586.3,991-1009).
cagctcgggaaatagtcta

SEQ ID NO: 303793 - DNA, 19 bp, Homo sapiens
  siRNA target sequence for OSBPL9 (NM_024586.3,993-1011).
gctcgggaaatagtctaaa

SEQ ID NO: 303794 - DNA, 19 bp, Homo sapiens
  siRNA target sequence for OSBPL9 (NM_024586.3,1013-1031).
cgcccagataccacagaat

SEQ ID NO: 303795 - DNA, 19 bp, Homo sapiens
  siRNA target sequence for OSBPL9 (NM_024586.3,1017-1035).
cagataccacagaatcact

SEQ ID NO: 303796 - DNA, 19 bp, Homo sapiens
  siRNA target sequence for OSBPL9 (NM_024586.3,1019-1037).
gataccacagaatcactta

SEQ ID NO: 303797 - DNA, 19 bp, Homo sapiens
  siRNA target sequence for OSBPL9 (NM_024586.3,1127-1145).
gagcacaagagcgttatca

SEQ ID NO: 303798 - DNA, 19 bp, Homo sapiens
  siRNA target sequence for OSBPL9 (NM_024586.3,1153-1171).
cttgtcgcaggttagactt

SEQ ID NO: 303799 - DNA, 19 bp, Homo sapiens
  siRNA target sequence for OSBPL9 (NM_024586.3,1158-1176).
cgcaggttagacttggaat

SEQ ID NO: 303800 - DNA, 19 bp, Homo sapiens
  siRNA target sequence for OSBPL9 (NM_024586.3,1169-1187).
cttggaatggatcttacta

SEQ ID NO: 303801 - DNA, 19 bp, Homo sapiens
  siRNA target sequence for OSBPL9 (NM_024586.3,1189-1207).
ggtagttcttccaacgttt

SEQ ID NO: 303802 - DNA, 19 bp, Homo sapiens
  siRNA target sequence for OSBPL9 (NM_024586.3,1199-1217).
ccaacgtttattcttgaaa

SEQ ID NO: 303803 - DNA, 19 bp, Homo sapiens
  siRNA target sequence for OSBPL9 (NM_024586.3,1254-1272).
cacatccggacctgtttgt

SEQ ID NO: 303804 - DNA, 19 bp, Homo sapiens
  siRNA target sequence for OSBPL9 (NM_024586.3,1256-1274).
catccggacctgtttgtga

SEQ ID NO: 303805 - DNA, 19 bp, Homo sapiens
  siRNA target sequence for OSBPL9 (NM_024586.3,1262-1280).
gacctgtttgtgagcatta

SEQ ID NO: 303806 - DNA, 19 bp, Homo sapiens
  siRNA target sequence for OSBPL9 (NM_024586.3,1310-1328).
gttcaggttgtgaaatggt

SEQ ID NO: 303807 - DNA, 19 bp, Homo sapiens
  siRNA target sequence for OSBPL9 (NM_024586.3,1343-1361).
catgcgggaaggaaaggat

SEQ ID NO: 303808 - DNA, 19 bp, Homo sapiens
  siRNA target sequence for OSBPL9 (NM_024586.3,1417-1435).
gacattaccaaatgatact

SEQ ID NO: 303809 - DNA, 19 bp, Homo sapiens
  siRNA target sequence for OSBPL9 (NM_024586.3,1441-1459).
gaacacagaactagtttca

SEQ ID NO: 303810 - DNA, 19 bp, Homo sapiens
  siRNA target sequence for OSBPL9 (NM_024586.3,1482-1500).
ccaaaaacagtgtaacatt

SEQ ID NO: 303811 - DNA, 19 bp, Homo sapiens
  siRNA target sequence for OSBPL9 (NM_024586.3,1547-1565).
gctgagtgttttaacaaga

SEQ ID NO: 303812 - DNA, 19 bp, Homo sapiens
  siRNA target sequence for OSBPL9 (NM_024586.3,1548-1566).
ctgagtgttttaacaagaa

SEQ ID NO: 303813 - DNA, 19 bp, Homo sapiens
  siRNA target sequence for OSBPL9 (NM_024586.3,1550-1568).
gagtgttttaacaagaaga

SEQ ID NO: 303814 - DNA, 19 bp, Homo sapiens
  siRNA target sequence for OSBPL9 (NM_024586.3,1554-1572).
gttttaacaagaagataca

SEQ ID NO: 303815 - DNA, 19 bp, Homo sapiens
  siRNA target sequence for OSBPL9 (NM_024586.3,1580-1598).
gctcatatctggaccaaat

SEQ ID NO: 303816 - DNA, 19 bp, Homo sapiens
  siRNA target sequence for OSBPL9 (NM_024586.3,1642-1660).
gggctgtgtctcatgtcta

SEQ ID NO: 303817 - DNA, 19 bp, Homo sapiens
  siRNA target sequence for OSBPL9 (NM_024586.3,1647-1665).
gtgtctcatgtctagacta

SEQ ID NO: 303818 - DNA, 19 bp, Homo sapiens
  siRNA target sequence for OSBPL9 (NM_024586.3,1651-1669).
ctcatgtctagactatgat

SEQ ID NO: 303819 - DNA, 19 bp, Homo sapiens
  siRNA target sequence for OSBPL9 (NM_024586.3,1653-1671).
catgtctagactatgatga

SEQ ID NO: 303820 - DNA, 19 bp, Homo sapiens
  siRNA target sequence for OSBPL9 (NM_024586.3,1658-1676).
ctagactatgatgaacatt

SEQ ID NO: 303821 - DNA, 19 bp, Homo sapiens
  siRNA target sequence for OSBPL9 (NM_024586.3,1661-1679).
gactatgatgaacattaca

SEQ ID NO: 303822 - DNA, 19 bp, Homo sapiens
  siRNA target sequence for OSBPL9 (NM_024586.3,1723-1741).
gccctgggtggaattagga

SEQ ID NO: 303823 - DNA, 19 bp, Homo sapiens
  siRNA target sequence for OSBPL9 (NM_024586.3,1773-1791).
gctatagtgcaaatatcat

SEQ ID NO: 303824 - DNA, 19 bp, Homo sapiens
  siRNA target sequence for OSBPL9 (NM_024586.3,1830-1848).
gaattactgccgagatttt

SEQ ID NO: 303825 - DNA, 19 bp, Homo sapiens
  siRNA target sequence for OSBPL9 (NM_024586.3,1859-1877).
gacaagaagtctttttgct

SEQ ID NO: 303826 - DNA, 19 bp, Homo sapiens
  siRNA target sequence for OSBPL9 (NM_024586.3,1935-1953).
cagtctttgtagataccaa

SEQ ID NO: 303827 - DNA, 19 bp, Homo sapiens
  siRNA target sequence for OSBPL9 (NM_024586.3,1950-1968).
ccaagaagttgcctataat

SEQ ID NO: 303828 - DNA, 19 bp, Homo sapiens
  siRNA target sequence for OSBPL9 (NM_024586.3,1994-2012).
gatcagaacgagtatgaat

SEQ ID NO: 303829 - DNA, 19 bp, Homo sapiens
  siRNA target sequence for OSBPL9 (NM_024586.3,2146-2164).
ggagacaaggttatttcat

SEQ ID NO: 303830 - DNA, 19 bp, Homo sapiens
  siRNA target sequence for OSBPL9 (NM_148904.2,514-532).
gctgcagattgccaaaagt

SEQ ID NO: 303831 - DNA, 19 bp, Homo sapiens
  siRNA target sequence for OSBPL9 (NM_148904.2,515-533).
ctgcagattgccaaaagta

SEQ ID NO: 303832 - DNA, 19 bp, Homo sapiens
  siRNA target sequence for OSBPL9 (NM_148904.2,520-538).
gattgccaaaagtactatt

SEQ ID NO: 303833 - DNA, 19 bp, Homo sapiens
  siRNA target sequence for OSBPL9 (NM_148909.1,340-358).
cagtaccacacttgctttt

SEQ ID NO: 303834 - DNA, 19 bp, Homo sapiens
  siRNA target sequence for OSBPL9 (NM_148909.1,342-360).
gtaccacacttgctttttt

SEQ ID NO: 303835 - DNA, 19 bp, Homo sapiens
  siRNA target sequence for ASAH2 (NM_019893.1,42-60).
caccagtgggaccattgaa

SEQ ID NO: 303836 - DNA, 19 bp, Homo sapiens
  siRNA target sequence for ASAH2 (NM_019893.1,47-65).
gtgggaccattgaaaacca

SEQ ID NO: 303837 - DNA, 19 bp, Homo sapiens
  siRNA target sequence for ASAH2 (NM_019893.1,54-72).
cattgaaaaccacaaagat

SEQ ID NO: 303838 - DNA, 19 bp, Homo sapiens
  siRNA target sequence for ASAH2 (NM_019893.1,70-88).
gatttaggaggccattttt

SEQ ID NO: 303839 - DNA, 19 bp, Homo sapiens
  siRNA target sequence for ASAH2 (NM_019893.1,180-198).
cacagccactcaaacttct

SEQ ID NO: 303840 - DNA, 19 bp, Homo sapiens
  siRNA target sequence for ASAH2 (NM_019893.1,280-298).
ggacaagtagcagatatca

SEQ ID NO: 303841 - DNA, 19 bp, Homo sapiens
  siRNA target sequence for ASAH2 (NM_019893.1,286-304).
gtagcagatatcaatttga

SEQ ID NO: 303842 - DNA, 19 bp, Homo sapiens
  siRNA target sequence for ASAH2 (NM_019893.1,342-360).
cctcaccaggctatacagt

SEQ ID NO: 303843 - DNA, 19 bp, Homo sapiens
  siRNA target sequence for ASAH2 (NM_019893.1,382-400).
cctgatgggtccaatcgaa

SEQ ID NO: 303844 - DNA, 19 bp, Homo sapiens
  siRNA target sequence for ASAH2 (NM_019893.1,420-438).
cataggcatggtatcacaa

SEQ ID NO: 303845 - DNA, 19 bp, Homo sapiens
  siRNA target sequence for ASAH2 (NM_019893.1,613-631).
gtcactggtatcttgaaga

SEQ ID NO: 303846 - DNA, 19 bp, Homo sapiens
  siRNA target sequence for ASAH2 (NM_019893.1,637-655).
gacatagcacacacaaata

SEQ ID NO: 303847 - DNA, 19 bp, Homo sapiens
  siRNA target sequence for ASAH2 (NM_019893.1,718-736).
ccgtattcttaccttcaaa

SEQ ID NO: 303848 - DNA, 19 bp, Homo sapiens
  siRNA target sequence for ASAH2 (NM_019893.1,719-737).
cgtattcttaccttcaaaa

SEQ ID NO: 303849 - DNA, 19 bp, Homo sapiens
  siRNA target sequence for ASAH2 (NM_019893.1,850-868).
cacccggtcagcatgaaca

SEQ ID NO: 303850 - DNA, 19 bp, Homo sapiens
  siRNA target sequence for ASAH2 (NM_019893.1,867-885).
caacagtaaccatcttgta

SEQ ID NO: 303851 - DNA, 19 bp, Homo sapiens
  siRNA target sequence for ASAH2 (NM_019893.1,892-910).
gacaatgtgggctatgcat

SEQ ID NO: 303852 - DNA, 19 bp, Homo sapiens
  siRNA target sequence for ASAH2 (NM_019893.1,1018-1036).
ggaccacgttgcatcaaca

SEQ ID NO: 303853 - DNA, 19 bp, Homo sapiens
  siRNA target sequence for ASAH2 (NM_019893.1,1085-1103).
ctagcatgtgcattgctaa

SEQ ID NO: 303854 - DNA, 19 bp, Homo sapiens
  siRNA target sequence for ASAH2 (NM_019893.1,1105-1123).
ggacctggacaggatatgt

SEQ ID NO: 303855 - DNA, 19 bp, Homo sapiens
  siRNA target sequence for ASAH2 (NM_019893.1,1106-1124).
gacctggacaggatatgtt

SEQ ID NO: 303856 - DNA, 19 bp, Homo sapiens
  siRNA target sequence for ASAH2 (NM_019893.1,1111-1129).
ggacaggatatgtttgaca

SEQ ID NO: 303857 - DNA, 19 bp, Homo sapiens
  siRNA target sequence for ASAH2 (NM_019893.1,1144-1162).
ggacgggccatgtatcaga

SEQ ID NO: 303858 - DNA, 19 bp, Homo sapiens
  siRNA target sequence for ASAH2 (NM_019893.1,1161-1179).
gagagcaaaggaactctat

SEQ ID NO: 303859 - DNA, 19 bp, Homo sapiens
  siRNA target sequence for ASAH2 (NM_019893.1,1220-1238).
cacaccagtgggtggatat

SEQ ID NO: 303860 - DNA, 19 bp, Homo sapiens
  siRNA target sequence for ASAH2 (NM_019893.1,1266-1284).
cacacatgcatcaaaaaca

SEQ ID NO: 303861 - DNA, 19 bp, Homo sapiens
  siRNA target sequence for ASAH2 (NM_019893.1,1291-1309).
ccagcattgggctacagtt

SEQ ID NO: 303862 - DNA, 19 bp, Homo sapiens
  siRNA target sequence for ASAH2 (NM_019893.1,1333-1351).
gttggaggcctcaatttta

SEQ ID NO: 303863 - DNA, 19 bp, Homo sapiens
  siRNA target sequence for ASAH2 (NM_019893.1,1459-1477).
cttcacaccggagaactat

SEQ ID NO: 303864 - DNA, 19 bp, Homo sapiens
  siRNA target sequence for ASAH2 (NM_019893.1,1462-1480).
cacaccggagaactatcaa

SEQ ID NO: 303865 - DNA, 19 bp, Homo sapiens
  siRNA target sequence for ASAH2 (NM_019893.1,1572-1590).
catgtctggacgaagactt

SEQ ID NO: 303866 - DNA, 19 bp, Homo sapiens
  siRNA target sequence for ASAH2 (NM_019893.1,1629-1647).
gcagaacatgactgttgtt

SEQ ID NO: 303867 - DNA, 19 bp, Homo sapiens
  siRNA target sequence for ASAH2 (NM_019893.1,1635-1653).
catgactgttgttatttca

SEQ ID NO: 303868 - DNA, 19 bp, Homo sapiens
  siRNA target sequence for ASAH2 (NM_019893.1,1654-1672).
ggtctatgcaacgtctata

SEQ ID NO: 303869 - DNA, 19 bp, Homo sapiens
  siRNA target sequence for ASAH2 (NM_019893.1,1661-1679).
gcaacgtctatacacatta

SEQ ID NO: 303870 - DNA, 19 bp, Homo sapiens
  siRNA target sequence for ASAH2 (NM_019893.1,1665-1683).
cgtctatacacattacatt

SEQ ID NO: 303871 - DNA, 19 bp, Homo sapiens
  siRNA target sequence for ASAH2 (NM_019893.1,1666-1684).
gtctatacacattacatta

SEQ ID NO: 303872 - DNA, 19 bp, Homo sapiens
  siRNA target sequence for ASAH2 (NM_019893.1,1680-1698).
cattaccacttatgaagaa

SEQ ID NO: 303873 - DNA, 19 bp, Homo sapiens
  siRNA target sequence for ASAH2 (NM_019893.1,1826-1844).
gtccagaacctcccttttt

SEQ ID NO: 303874 - DNA, 19 bp, Homo sapiens
  siRNA target sequence for ASAH2 (NM_019893.1,1838-1856).
cctttttcaaacaattaat

SEQ ID NO: 303875 - DNA, 19 bp, Homo sapiens
  siRNA target sequence for ASAH2 (NM_019893.1,1862-1880).
cattaattcctagtattgt

SEQ ID NO: 303876 - DNA, 19 bp, Homo sapiens
  siRNA target sequence for ASAH2 (NM_019893.1,1889-1907).
caccaaaaggcagaacttt

SEQ ID NO: 303877 - DNA, 19 bp, Homo sapiens
  siRNA target sequence for ASAH2 (NM_019893.1,2084-2102).
cctgggagactcgttttta

SEQ ID NO: 303878 - DNA, 19 bp, Homo sapiens
  siRNA target sequence for SFTPB (NM_000542.2,651-669).
gcggatccaagccatgatt

SEQ ID NO: 303879 - DNA, 19 bp, Homo sapiens
  siRNA target sequence for BTN3A1 (NM_007048.3,1321-1339).
gacattcagcctataatga

SEQ ID NO: 303880 - DNA, 19 bp, Homo sapiens
  siRNA target sequence for BTN3A1 (NM_007048.3,1327-1345).
cagcctataatgaatggaa

SEQ ID NO: 303881 - DNA, 19 bp, Homo sapiens
  siRNA target sequence for BTN3A1 (NM_007048.3,1576-1594).
gggtgtgcagtaagaatgt

SEQ ID NO: 303882 - DNA, 19 bp, Homo sapiens
  siRNA target sequence for BTN3A1 (NM_007048.3,1782-1800).
ggatcgcatattcatactt

SEQ ID NO: 303883 - DNA, 19 bp, Homo sapiens
  siRNA target sequence for BTN3A1 (NM_007048.3,1783-1801).
gatcgcatattcatacttt

SEQ ID NO: 303884 - DNA, 19 bp, Homo sapiens
  siRNA target sequence for BTN3A1 (NM_007048.3,1862-1880).
cacggccctgactatttgt

SEQ ID NO: 303885 - DNA, 19 bp, Homo sapiens
  siRNA target sequence for CLU (NM_001831.1,151-169).
ccaatcagggaagtaagta

SEQ ID NO: 303886 - DNA, 19 bp, Homo sapiens
  siRNA target sequence for CLU (NM_001831.1,159-177).
ggaagtaagtacgtcaata

SEQ ID NO: 303887 - DNA, 19 bp, Homo sapiens
  siRNA target sequence for CLU (NM_001831.1,163-181).
gtaagtacgtcaataagga

SEQ ID NO: 303888 - DNA, 19 bp, Homo sapiens
  siRNA target sequence for CLU (NM_001831.1,167-185).
gtacgtcaataaggaaatt

SEQ ID NO: 303889 - DNA, 19 bp, Homo sapiens
  siRNA target sequence for CLU (NM_001831.1,193-211).
ctgtcaacggggtgaaaca

SEQ ID NO: 303890 - DNA, 19 bp, Homo sapiens
  siRNA target sequence for CLU (NM_001831.1,195-213).
gtcaacggggtgaaacaga

SEQ ID NO: 303891 - DNA, 19 bp, Homo sapiens
  siRNA target sequence for CLU (NM_001831.1,197-215).
caacggggtgaaacagata

SEQ ID NO: 303892 - DNA, 19 bp, Homo sapiens
  siRNA target sequence for CLU (NM_001831.1,287-305).
gaaagaggatgccctaaat

SEQ ID NO: 303893 - DNA, 19 bp, Homo sapiens
  siRNA target sequence for CLU (NM_001831.1,291-309).
gaggatgccctaaatgaga

SEQ ID NO: 303894 - DNA, 19 bp, Homo sapiens
  siRNA target sequence for CLU (NM_001831.1,748-766).
cgtacgagcccctgaactt

SEQ ID NO: 303895 - DNA, 19 bp, Homo sapiens
  siRNA target sequence for CLU (NM_001831.1,849-867).
cagcacccgccaacagaat

SEQ ID NO: 303896 - DNA, 19 bp, Homo sapiens
  siRNA target sequence for CLU (NM_001831.1,1128-1146).
cagctgaacgagcagttta

SEQ ID NO: 303897 - DNA, 19 bp, Homo sapiens
  siRNA target sequence for CLU (NM_001831.1,1180-1198).
gcgaagaccagtactatct

SEQ ID NO: 303898 - DNA, 19 bp, Homo sapiens
  siRNA target sequence for CLU (NM_001831.1,1263-1281).
gtcgtgaagctctttgact

SEQ ID NO: 303899 - DNA, 19 bp, Homo sapiens
  siRNA target sequence for CLU (NM_001831.1,1318-1336).
ccaggaagaaccctaaatt

SEQ ID NO: 303900 - DNA, 19 bp, Homo sapiens
  siRNA target sequence for CLU (NM_001831.1,1319-1337).
caggaagaaccctaaattt

SEQ ID NO: 303901 - DNA, 19 bp, Homo sapiens
  siRNA target sequence for CYB5-M (NM_030579.1,85-103).
gagacctcagtcacctatt

SEQ ID NO: 303902 - DNA, 19 bp, Homo sapiens
  siRNA target sequence for CYB5-M (NM_030579.1,225-243).
ggaacaagctggtgtagat

SEQ ID NO: 303903 - DNA, 19 bp, Homo sapiens
  siRNA target sequence for CYB5-M (NM_030579.1,235-253).
ggtgtagatgcaagtgaaa

SEQ ID NO: 303904 - DNA, 19 bp, Homo sapiens
  siRNA target sequence for CYB5-M (NM_030579.1,284-302).
ccagagaaatgctaaagca

SEQ ID NO: 303905 - DNA, 19 bp, Homo sapiens
  siRNA target sequence for CYB5-M (NM_030579.1,294-312).
gctaaagcagtactacatt

SEQ ID NO: 303906 - DNA, 19 bp, Homo sapiens
  siRNA target sequence for CYB5-M (NM_030579.1,321-339).
ccatccgagtgaccttaaa

SEQ ID NO: 303907 - DNA, 19 bp, Homo sapiens
  siRNA target sequence for CYB5-M (NM_030579.1,350-368).
gtagcaaggacccttcaaa

SEQ ID NO: 303908 - DNA, 19 bp, Homo sapiens
  siRNA target sequence for CYB5-M (NM_030579.1,386-404).
gttgctgggcatattggat

SEQ ID NO: 303909 - DNA, 19 bp, Homo sapiens
  siRNA target sequence for CYB5-M (NM_030579.1,414-432).
cataggcgctgttctctta

SEQ ID NO: 303910 - DNA, 19 bp, Homo sapiens
  siRNA target sequence for CYB5-M (NM_030579.1,419-437).
gcgctgttctcttaggttt

SEQ ID NO: 303911 - DNA, 19 bp, Homo sapiens
  siRNA target sequence for CYBRD1 (NM_024843.2,197-215).
gggagcgcactagagttta

SEQ ID NO: 303912 - DNA, 19 bp, Homo sapiens
  siRNA target sequence for CYBRD1 (NM_024843.2,198-216).
ggagcgcactagagtttaa

SEQ ID NO: 303913 - DNA, 19 bp, Homo sapiens
  siRNA target sequence for CYBRD1 (NM_024843.2,324-342).
ccatccatgcagggttaaa

SEQ ID NO: 303914 - DNA, 19 bp, Homo sapiens
  siRNA target sequence for CYBRD1 (NM_024843.2,328-346).
ccatgcagggttaaatgca

SEQ ID NO: 303915 - DNA, 19 bp, Homo sapiens
  siRNA target sequence for CYBRD1 (NM_024843.2,443-461).
ggactgatagctgtcatat

SEQ ID NO: 303916 - DNA, 19 bp, Homo sapiens
  siRNA target sequence for CYBRD1 (NM_024843.2,448-466).
gatagctgtcatatgctat

SEQ ID NO: 303917 - DNA, 19 bp, Homo sapiens
  siRNA target sequence for CYBRD1 (NM_024843.2,452-470).
gctgtcatatgctatttgt

SEQ ID NO: 303918 - DNA, 19 bp, Homo sapiens
  siRNA target sequence for CYBRD1 (NM_024843.2,522-540).
ctctccgagcatttctcat

SEQ ID NO: 303919 - DNA, 19 bp, Homo sapiens
  siRNA target sequence for CYBRD1 (NM_024843.2,541-559).
gcccatacatgtttattct

SEQ ID NO: 303920 - DNA, 19 bp, Homo sapiens
  siRNA target sequence for CYBRD1 (NM_024843.2,551-569).
gtttattctggaattgtca

SEQ ID NO: 303921 - DNA, 19 bp, Homo sapiens
  siRNA target sequence for CYBRD1 (NM_024843.2,635-653).
gatcctgcatacagtacat

SEQ ID NO: 303922 - DNA, 19 bp, Homo sapiens
  siRNA target sequence for CYBRD1 (NM_024843.2,662-680).
gaaggtgttttcgtaaata

SEQ ID NO: 303923 - DNA, 19 bp, Homo sapiens
  siRNA target sequence for CYBRD1 (NM_024843.2,713-731).
ctcattttttggatagtca

SEQ ID NO: 303924 - DNA, 19 bp, Homo sapiens
  siRNA target sequence for CYBRD1 (NM_024843.2,730-748).
caccagaccgcaatggaaa

SEQ ID NO: 303925 - DNA, 19 bp, Homo sapiens
  siRNA target sequence for CYBRD1 (NM_024843.2,749-767).
cgtcctaaggagccaaatt

SEQ ID NO: 303926 - DNA, 19 bp, Homo sapiens
  siRNA target sequence for CYBRD1 (NM_024843.2,757-775).
ggagccaaattctaccatt

SEQ ID NO: 303927 - DNA, 19 bp, Homo sapiens
  siRNA target sequence for CYP4Z1 (NM_178134.2,1194-1212).
cttacctgcaggaataact

SEQ ID NO: 303928 - DNA, 19 bp, Homo sapiens
  siRNA target sequence for FLJ20296 (NM_017750.2,305-323).
ctggtgctggaacaacata

SEQ ID NO: 303929 - DNA, 19 bp, Homo sapiens
  siRNA target sequence for FLJ20296 (NM_017750.2,333-351).
ggggctgctgtcatacctt

SEQ ID NO: 303930 - DNA, 19 bp, Homo sapiens
  siRNA target sequence for FLJ20296 (NM_017750.2,334-352).
gggctgctgtcataccttt

SEQ ID NO: 303931 - DNA, 19 bp, Homo sapiens
  siRNA target sequence for FLJ20296 (NM_017750.2,374-392).
gacacaggaatccattaca

SEQ ID NO: 303932 - DNA, 19 bp, Homo sapiens
  siRNA target sequence for FLJ20296 (NM_017750.2,376-394).
cacaggaatccattacatt

SEQ ID NO: 303933 - DNA, 19 bp, Homo sapiens
  siRNA target sequence for FLJ20296 (NM_017750.2,410-428).
ggcagcattggccgtttta

SEQ ID NO: 303934 - DNA, 19 bp, Homo sapiens
  siRNA target sequence for FLJ20296 (NM_017750.2,411-429).
gcagcattggccgttttat

SEQ ID NO: 303935 - DNA, 19 bp, Homo sapiens
  siRNA target sequence for FLJ20296 (NM_017750.2,414-432).
gcattggccgttttatctt

SEQ ID NO: 303936 - DNA, 19 bp, Homo sapiens
  siRNA target sequence for FLJ20296 (NM_017750.2,590-608).
gctatcattgacaagtata

SEQ ID NO: 303937 - DNA, 19 bp, Homo sapiens
  siRNA target sequence for FLJ20296 (NM_017750.2,642-660).
ctcatgccatcctgttgaa

SEQ ID NO: 303938 - DNA, 19 bp, Homo sapiens
  siRNA target sequence for FLJ20296 (NM_017750.2,795-813).
cagtactcagctacatctt

SEQ ID NO: 303939 - DNA, 19 bp, Homo sapiens
  siRNA target sequence for FLJ20296 (NM_017750.2,868-886).
ggtcaaccactacatgaaa

SEQ ID NO: 303940 - DNA, 19 bp, Homo sapiens
  siRNA target sequence for FLJ20296 (NM_017750.2,902-920).
cgagggggttccagtgaaa

SEQ ID NO: 303941 - DNA, 19 bp, Homo sapiens
  siRNA target sequence for FLJ20296 (NM_017750.2,928-946).
ccacaccatccctgtgatt

SEQ ID NO: 303942 - DNA, 19 bp, Homo sapiens
  siRNA target sequence for FLJ20296 (NM_017750.2,1046-1064).
gagctggtgaacatctatt

SEQ ID NO: 303943 - DNA, 19 bp, Homo sapiens
  siRNA target sequence for FLJ20296 (NM_017750.2,1181-1199).
ggcatgacctctgttttca

SEQ ID NO: 303944 - DNA, 19 bp, Homo sapiens
  siRNA target sequence for FLJ20296 (NM_017750.2,1234-1252).
gccgtccaccaactactat

SEQ ID NO: 303945 - DNA, 19 bp, Homo sapiens
  siRNA target sequence for FLJ20296 (NM_017750.2,1236-1254).
cgtccaccaactactatgt

SEQ ID NO: 303946 - DNA, 19 bp, Homo sapiens
  siRNA target sequence for FLJ20296 (NM_017750.2,1239-1257).
ccaccaactactatgttta

SEQ ID NO: 303947 - DNA, 19 bp, Homo sapiens
  siRNA target sequence for FLJ20296 (NM_017750.2,1242-1260).
ccaactactatgtttacta

SEQ ID NO: 303948 - DNA, 19 bp, Homo sapiens
  siRNA target sequence for FLJ20296 (NM_017750.2,1712-1730).
ctgacaggccaggatatct

SEQ ID NO: 303949 - DNA, 19 bp, Homo sapiens
  siRNA target sequence for FLJ20296 (NM_017750.2,1801-1819).
gtactcagaccttaagaat

SEQ ID NO: 303950 - DNA, 19 bp, Homo sapiens
  siRNA target sequence for FLJ20296 (NM_017750.2,1804-1822).
ctcagaccttaagaatctt

SEQ ID NO: 303951 - DNA, 19 bp, Homo sapiens
  siRNA target sequence for FLJ23153 (NM_024636.1,122-140).
gatgcacttcctcttacta

SEQ ID NO: 303952 - DNA, 19 bp, Homo sapiens
  siRNA target sequence for FLJ23153 (NM_024636.1,125-143).
gcacttcctcttactatga

SEQ ID NO: 303953 - DNA, 19 bp, Homo sapiens
  siRNA target sequence for FLJ23153 (NM_024636.1,220-238).
ccagtgtggttattctgtt

SEQ ID NO: 303954 - DNA, 19 bp, Homo sapiens
  siRNA target sequence for FLJ23153 (NM_024636.1,346-364).
ccacagagagcattatgat

SEQ ID NO: 303955 - DNA, 19 bp, Homo sapiens
  siRNA target sequence for FLJ23153 (NM_024636.1,347-365).
cacagagagcattatgatt

SEQ ID NO: 303956 - DNA, 19 bp, Homo sapiens
  siRNA target sequence for FLJ23153 (NM_024636.1,349-367).
cagagagcattatgatttt

SEQ ID NO: 303957 - DNA, 19 bp, Homo sapiens
  siRNA target sequence for FLJ23153 (NM_024636.1,386-404).
gttctcaatggaaaaatat

SEQ ID NO: 303958 - DNA, 19 bp, Homo sapiens
  siRNA target sequence for FLJ23153 (NM_024636.1,396-414).
gaaaaatattggtagacat

SEQ ID NO: 303959 - DNA, 19 bp, Homo sapiens
  siRNA target sequence for FLJ23153 (NM_024636.1,427-445).
caaaatcaatcaatatcca

SEQ ID NO: 303960 - DNA, 19 bp, Homo sapiens
  siRNA target sequence for FLJ23153 (NM_024636.1,486-504).
cccacgtggtaaaagcatt

SEQ ID NO: 303961 - DNA, 19 bp, Homo sapiens
  siRNA target sequence for FLJ23153 (NM_024636.1,487-505).
ccacgtggtaaaagcattt

SEQ ID NO: 303962 - DNA, 19 bp, Homo sapiens
  siRNA target sequence for FLJ23153 (NM_024636.1,700-718).
gtggaggttccccttctat

SEQ ID NO: 303963 - DNA, 19 bp, Homo sapiens
  siRNA target sequence for FLJ23153 (NM_024636.1,756-774).
gtgttataagagacgtaat

SEQ ID NO: 303964 - DNA, 19 bp, Homo sapiens
  siRNA target sequence for FLJ23153 (NM_024636.1,758-776).
gttataagagacgtaatct

SEQ ID NO: 303965 - DNA, 19 bp, Homo sapiens
  siRNA target sequence for FLJ23153 (NM_024636.1,769-787).
cgtaatctacccttatgtt

SEQ ID NO: 303966 - DNA, 19 bp, Homo sapiens
  siRNA target sequence for FLJ23153 (NM_024636.1,770-788).
gtaatctacccttatgttt

SEQ ID NO: 303967 - DNA, 19 bp, Homo sapiens
  siRNA target sequence for FLJ23153 (NM_024636.1,825-843).
ccattccaaatcgtatctt

SEQ ID NO: 303968 - DNA, 19 bp, Homo sapiens
  siRNA target sequence for FLJ23153 (NM_024636.1,826-844).
cattccaaatcgtatcttt

SEQ ID NO: 303969 - DNA, 19 bp, Homo sapiens
  siRNA target sequence for FLJ23153 (NM_024636.1,831-849).
caaatcgtatctttccaat

SEQ ID NO: 303970 - DNA, 19 bp, Homo sapiens
  siRNA target sequence for FLJ23153 (NM_024636.1,862-880).
cactgcttgctttggttta

SEQ ID NO: 303971 - DNA, 19 bp, Homo sapiens
  siRNA target sequence for FLJ23153 (NM_024636.1,898-916).
ctgccattctacaactgta

SEQ ID NO: 303972 - DNA, 19 bp, Homo sapiens
  siRNA target sequence for FLJ23153 (NM_024636.1,912-930).
ctgtaccgaggcacaaaat

SEQ ID NO: 303973 - DNA, 19 bp, Homo sapiens
  siRNA target sequence for FLJ39035 (NM_182580.1,267-285).
ctgaacactccctgttctt

SEQ ID NO: 303974 - DNA, 19 bp, Homo sapiens
  siRNA target sequence for FLJ39035 (NM_182580.1,269-287).
gaacactccctgttcttct

SEQ ID NO: 303975 - DNA, 19 bp, Homo sapiens
  siRNA target sequence for FLJ39035 (NM_182580.1,581-599).
gtgcttctgggcatgtact

SEQ ID NO: 303976 - DNA, 19 bp, Homo sapiens
  siRNA target sequence for FLJ39035 (NM_182580.1,587-605).
ctgggcatgtactcagtat

SEQ ID NO: 303977 - DNA, 19 bp, Homo sapiens
  siRNA target sequence for FLJ39035 (NM_182580.1,591-609).
gcatgtactcagtatggtt

SEQ ID NO: 303978 - DNA, 19 bp, Homo sapiens
  siRNA target sequence for FLJ39035 (NM_182580.1,674-692).
gtgatcatgcaccagattt

SEQ ID NO: 303979 - DNA, 19 bp, Homo sapiens
  siRNA target sequence for KIAA0601 (NM_015013.1,620-638).
cctcatgaccggatgactt

SEQ ID NO: 303980 - DNA, 19 bp, Homo sapiens
  siRNA target sequence for KIAA0601 (NM_015013.1,628-646).
ccggatgacttctcaagaa

SEQ ID NO: 303981 - DNA, 19 bp, Homo sapiens
  siRNA target sequence for KIAA0601 (NM_015013.1,722-740).
ctgcagttgtggttggata

SEQ ID NO: 303982 - DNA, 19 bp, Homo sapiens
  siRNA target sequence for KIAA0601 (NM_015013.1,727-745).
gttgtggttggataatcca

SEQ ID NO: 303983 - DNA, 19 bp, Homo sapiens
  siRNA target sequence for KIAA0601 (NM_015013.1,733-751).
gttggataatccaaagatt

SEQ ID NO: 303984 - DNA, 19 bp, Homo sapiens
  siRNA target sequence for KIAA0601 (NM_015013.1,764-782).
gaggctactctccaacaat

SEQ ID NO: 303985 - DNA, 19 bp, Homo sapiens
  siRNA target sequence for KIAA0601 (NM_015013.1,768-786).
ctactctccaacaattaga

SEQ ID NO: 303986 - DNA, 19 bp, Homo sapiens
  siRNA target sequence for KIAA0601 (NM_015013.1,788-806).
gcaccttataacagtgata

SEQ ID NO: 303987 - DNA, 19 bp, Homo sapiens
  siRNA target sequence for KIAA0601 (NM_015013.1,817-835).
ccaccgagttcacagttat

SEQ ID NO: 303988 - DNA, 19 bp, Homo sapiens
  siRNA target sequence for KIAA0601 (NM_015013.1,818-836).
caccgagttcacagttatt

SEQ ID NO: 303989 - DNA, 19 bp, Homo sapiens
  siRNA target sequence for KIAA0601 (NM_015013.1,820-838).
ccgagttcacagttattta

SEQ ID NO: 303990 - DNA, 19 bp, Homo sapiens
  siRNA target sequence for KIAA0601 (NM_015013.1,839-857).
gagcgtcatggtcttatca

SEQ ID NO: 303991 - DNA, 19 bp, Homo sapiens
  siRNA target sequence for KIAA0601 (NM_015013.1,842-860).
cgtcatggtcttatcaact

SEQ ID NO: 303992 - DNA, 19 bp, Homo sapiens
  siRNA target sequence for KIAA0601 (NM_015013.1,843-861).
gtcatggtcttatcaactt

SEQ ID NO: 303993 - DNA, 19 bp, Homo sapiens
  siRNA target sequence for KIAA0601 (NM_015013.1,884-902).
cccctaccaactaaaaaga

SEQ ID NO: 303994 - DNA, 19 bp, Homo sapiens
  siRNA target sequence for KIAA0601 (NM_015013.1,950-968).
gctcgacagttacaaagtt

SEQ ID NO: 303995 - DNA, 19 bp, Homo sapiens
  siRNA target sequence for KIAA0601 (NM_015013.1,951-969).
ctcgacagttacaaagttt

SEQ ID NO: 303996 - DNA, 19 bp, Homo sapiens
  siRNA target sequence for KIAA0601 (NM_015013.1,1076-1094).
ggtcttggagggaatccta

SEQ ID NO: 303997 - DNA, 19 bp, Homo sapiens
  siRNA target sequence for KIAA0601 (NM_015013.1,1098-1116).
ctgtggtcagcaaacaagt

SEQ ID NO: 303998 - DNA, 19 bp, Homo sapiens
  siRNA target sequence for KIAA0601 (NM_015013.1,1100-1118).
gtggtcagcaaacaagtaa

SEQ ID NO: 303999 - DNA, 19 bp, Homo sapiens
  siRNA target sequence for KIAA0601 (NM_015013.1,1103-1121).
gtcagcaaacaagtaaata

SEQ ID NO: 304000 - DNA, 19 bp, Homo sapiens
  siRNA target sequence for KIAA0601 (NM_015013.1,1141-1159).
gcaaaaatgcccactttat

SEQ ID NO: 304001 - DNA, 19 bp, Homo sapiens
  siRNA target sequence for KIAA0601 (NM_015013.1,1170-1188).
gacaagctgttcctaaaga

SEQ ID NO: 304002 - DNA, 19 bp, Homo sapiens
  siRNA target sequence for KIAA0601 (NM_015013.1,1233-1251).
ctacatcttaccttagtca

SEQ ID NO: 304003 - DNA, 19 bp, Homo sapiens
  siRNA target sequence for KIAA0601 (NM_015013.1,1239-1257).
cttaccttagtcatcaact

SEQ ID NO: 304004 - DNA, 19 bp, Homo sapiens
  siRNA target sequence for KIAA0601 (NM_015013.1,1248-1266).
gtcatcaactagacttcaa

SEQ ID NO: 304005 - DNA, 19 bp, Homo sapiens
  siRNA target sequence for KIAA0601 (NM_015013.1,1306-1324).
ggaagttgtcattcagtta

SEQ ID NO: 304006 - DNA, 19 bp, Homo sapiens
  siRNA target sequence for KIAA0601 (NM_015013.1,1343-1361).
gatgagcagattgaacatt

SEQ ID NO: 304007 - DNA, 19 bp, Homo sapiens
  siRNA target sequence for KIAA0601 (NM_015013.1,1400-1418).
cttcttaataagatggtaa

SEQ ID NO: 304008 - DNA, 19 bp, Homo sapiens
  siRNA target sequence for KIAA0601 (NM_015013.1,1533-1551).
ccgccctatgcaaggaata

SEQ ID NO: 304009 - DNA, 19 bp, Homo sapiens
  siRNA target sequence for KIAA0601 (NM_015013.1,1534-1552).
cgccctatgcaaggaatat

SEQ ID NO: 304010 - DNA, 19 bp, Homo sapiens
  siRNA target sequence for KIAA0601 (NM_015013.1,1537-1555).
cctatgcaaggaatatgat

SEQ ID NO: 304011 - DNA, 19 bp, Homo sapiens
  siRNA target sequence for KIAA0601 (NM_015013.1,1609-1627).
gaatcccccaagtgatgta

SEQ ID NO: 304012 - DNA, 19 bp, Homo sapiens
  siRNA target sequence for KIAA0601 (NM_015013.1,1616-1634).
ccaagtgatgtatatctct

SEQ ID NO: 304013 - DNA, 19 bp, Homo sapiens
  siRNA target sequence for KIAA0601 (NM_015013.1,1622-1640).
gatgtatatctctcatcaa

SEQ ID NO: 304014 - DNA, 19 bp, Homo sapiens
  siRNA target sequence for KIAA0601 (NM_015013.1,1754-1772).
ggcagccacctgacagtaa

SEQ ID NO: 304015 - DNA, 19 bp, Homo sapiens
  siRNA target sequence for KIAA0601 (NM_015013.1,1758-1776).
gccacctgacagtaaggaa

SEQ ID NO: 304016 - DNA, 19 bp, Homo sapiens
  siRNA target sequence for KIAA0601 (NM_015013.1,1806-1824).
cagaaggcctagacattaa

SEQ ID NO: 304017 - DNA, 19 bp, Homo sapiens
  siRNA target sequence for KIAA0601 (NM_015013.1,1814-1832).
ctagacattaaactgaata

SEQ ID NO: 304018 - DNA, 19 bp, Homo sapiens
  siRNA target sequence for KIAA0601 (NM_015013.1,1893-1911).
gctccacgagtcaaacctt

SEQ ID NO: 304019 - DNA, 19 bp, Homo sapiens
  siRNA target sequence for KIAA0601 (NM_015013.1,1894-1912).
ctccacgagtcaaaccttt

SEQ ID NO: 304020 - DNA, 19 bp, Homo sapiens
  siRNA target sequence for KIAA0601 (NM_015013.1,1896-1914).
ccacgagtcaaacctttat

SEQ ID NO: 304021 - DNA, 19 bp, Homo sapiens
  siRNA target sequence for KIAA0601 (NM_015013.1,1899-1917).
cgagtcaaacctttattta

SEQ ID NO: 304022 - DNA, 19 bp, Homo sapiens
  siRNA target sequence for KIAA0601 (NM_015013.1,1971-1989).
caccagccgttcagtttgt

SEQ ID NO: 304023 - DNA, 19 bp, Homo sapiens
  siRNA target sequence for KIAA0601 (NM_015013.1,1994-2012).
cctctccctgagtggaaaa

SEQ ID NO: 304024 - DNA, 19 bp, Homo sapiens
  siRNA target sequence for KIAA0601 (NM_015013.1,1997-2015).
ctccctgagtggaaaacat

SEQ ID NO: 304025 - DNA, 19 bp, Homo sapiens
  siRNA target sequence for KIAA0601 (NM_015013.1,2053-2071).
ggtggtgttgtgttttgat

SEQ ID NO: 304026 - DNA, 19 bp, Homo sapiens
  siRNA target sequence for KIAA0601 (NM_015013.1,2080-2098).
ctgggatccaagtgtcaat

SEQ ID NO: 304027 - DNA, 19 bp, Homo sapiens
  siRNA target sequence for KIAA0601 (NM_015013.1,2084-2102).
gatccaagtgtcaatttgt

SEQ ID NO: 304028 - DNA, 19 bp, Homo sapiens
  siRNA target sequence for KIAA0601 (NM_015013.1,2147-2165).
ctcttctggaacctctata

SEQ ID NO: 304029 - DNA, 19 bp, Homo sapiens
  siRNA target sequence for KIAA0601 (NM_015013.1,2149-2167).
cttctggaacctctataaa

SEQ ID NO: 304030 - DNA, 19 bp, Homo sapiens
  siRNA target sequence for KIAA0601 (NM_015013.1,2152-2170).
ctggaacctctataaagct

SEQ ID NO: 304031 - DNA, 19 bp, Homo sapiens
  siRNA target sequence for KIAA0601 (NM_015013.1,2158-2176).
cctctataaagctccaata

SEQ ID NO: 304032 - DNA, 19 bp, Homo sapiens
  siRNA target sequence for KIAA0601 (NM_015013.1,2221-2239).
cataagtgacgatgtgatt

SEQ ID NO: 304033 - DNA, 19 bp, Homo sapiens
  siRNA target sequence for KIAA0601 (NM_015013.1,2246-2264).
cgatgcctggccattctca

SEQ ID NO: 304034 - DNA, 19 bp, Homo sapiens
  siRNA target sequence for KIAA0601 (NM_015013.1,2335-2353).
ctgggctcggggctcttat

SEQ ID NO: 304035 - DNA, 19 bp, Homo sapiens
  siRNA target sequence for KIAA0601 (NM_015013.1,2339-2357).
gctcggggctcttattcct

SEQ ID NO: 304036 - DNA, 19 bp, Homo sapiens
  siRNA target sequence for KIAA0601 (NM_015013.1,2344-2362).
gggctcttattcctatgtt

SEQ ID NO: 304037 - DNA, 19 bp, Homo sapiens
  siRNA target sequence for KIAA0601 (NM_015013.1,2370-2388).
gatcatctggaaatgacta

SEQ ID NO: 304038 - DNA, 19 bp, Homo sapiens
  siRNA target sequence for KIAA0601 (NM_015013.1,2445-2463).
cgattccacgactcttctt

SEQ ID NO: 304039 - DNA, 19 bp, Homo sapiens
  siRNA target sequence for KIAA0601 (NM_015013.1,2458-2476).
cttctttgcgggagaacat

SEQ ID NO: 304040 - DNA, 19 bp, Homo sapiens
  siRNA target sequence for LDHD (NM_153486.2,930-948).
cccgtagcccgcattgagt

SEQ ID NO: 304041 - DNA, 19 bp, Homo sapiens
  siRNA target sequence for LDHD (NM_153486.2,931-949).
ccgtagcccgcattgagtt

SEQ ID NO: 304042 - DNA, 19 bp, Homo sapiens
  siRNA target sequence for MGC20446 (NM_153611.2,476-494).
gtgtctggacggttctact

SEQ ID NO: 304043 - DNA, 19 bp, Homo sapiens
  siRNA target sequence for MGC20446 (NM_153611.2,630-648).
ctggcatggtggtattcta

SEQ ID NO: 304044 - DNA, 19 bp, Homo sapiens
  siRNA target sequence for MGC20446 (NM_153611.2,766-784).
ggttgctgtctttacgttt

SEQ ID NO: 304045 - DNA, 19 bp, Homo sapiens
  siRNA target sequence for MGC20446 (NM_153611.2,770-788).
gctgtctttacgtttcaca

SEQ ID NO: 304046 - DNA, 19 bp, Homo sapiens
  siRNA target sequence for MGC20446 (NM_153611.2,771-789).
ctgtctttacgtttcacaa

SEQ ID NO: 304047 - DNA, 19 bp, Homo sapiens
  siRNA target sequence for MGC20446 (NM_153611.2,912-930).
ggctgcgcagcctcctaaa

SEQ ID NO: 304048 - DNA, 19 bp, Homo sapiens
  siRNA target sequence for MGC20446 (NM_153611.2,913-931).
gctgcgcagcctcctaaaa

SEQ ID NO: 304049 - DNA, 19 bp, Homo sapiens
  siRNA target sequence for MGC20446 (NM_153611.2,981-999).
ccgtcatttcgggcattaa

SEQ ID NO: 304050 - DNA, 19 bp, Homo sapiens
  siRNA target sequence for MGC20446 (NM_153611.2,982-1000).
cgtcatttcgggcattaat

SEQ ID NO: 304051 - DNA, 19 bp, Homo sapiens
  siRNA target sequence for MGC25181 (NM_152783.2,561-579).
gcagcgtccccgtctttga

SEQ ID NO: 304052 - DNA, 19 bp, Homo sapiens
  siRNA target sequence for MGC25181 (NM_152783.2,777-795).
gcctgcggtttcttcgata

SEQ ID NO: 304053 - DNA, 19 bp, Homo sapiens
  siRNA target sequence for MGC25181 (NM_152783.2,778-796).
cctgcggtttcttcgatat

SEQ ID NO: 304054 - DNA, 19 bp, Homo sapiens
  siRNA target sequence for MGC25181 (NM_152783.2,1461-1479).
gtaacctgcacctcaatgt

SEQ ID NO: 304055 - DNA, 19 bp, Homo sapiens
  siRNA target sequence for PAOX (NM_152911.1,707-725).
gcaccctttggggagtata

SEQ ID NO: 304056 - DNA, 19 bp, Homo sapiens
  siRNA target sequence for PAOX (NM_152911.1,751-769).
cttttctaagggctatcaa

SEQ ID NO: 304057 - DNA, 19 bp, Homo sapiens
  siRNA target sequence for PAOX (NM_152911.1,762-780).
gctatcaaggactcacaaa

SEQ ID NO: 304058 - DNA, 19 bp, Homo sapiens
  siRNA target sequence for PAOX (NM_152911.1,799-817).
gccggaggacactgtagtt

SEQ ID NO: 304059 - DNA, 19 bp, Homo sapiens
  siRNA target sequence for PAOX (NM_152911.1,800-818).
ccggaggacactgtagttt

SEQ ID NO: 304060 - DNA, 19 bp, Homo sapiens
  siRNA target sequence for PAOX (NM_152911.1,801-819).
cggaggacactgtagtttt

SEQ ID NO: 304061 - DNA, 19 bp, Homo sapiens
  siRNA target sequence for PAOX (NM_152911.1,802-820).
ggaggacactgtagttttt

SEQ ID NO: 304062 - DNA, 19 bp, Homo sapiens
  siRNA target sequence for PAOX (NM_152911.1,944-962).
gtcaccgtgcccttaggtt

SEQ ID NO: 304063 - DNA, 19 bp, Homo sapiens
  siRNA target sequence for PAOX (NM_152911.1,950-968).
gtgcccttaggttttctta

SEQ ID NO: 304064 - DNA, 19 bp, Homo sapiens
  siRNA target sequence for PAOX (NM_152911.1,960-978).
gttttcttagggaacattt

SEQ ID NO: 304065 - DNA, 19 bp, Homo sapiens
  siRNA target sequence for PAOX (NM_152911.1,1043-1061).
gggaccaacaacaaaatct

SEQ ID NO: 304066 - DNA, 19 bp, Homo sapiens
  siRNA target sequence for PAOX (NM_152911.1,1267-1285).
gactctgtcggatgaagaa

SEQ ID NO: 304067 - DNA, 19 bp, Homo sapiens
  siRNA target sequence for PAOX (NM_152911.1,1269-1287).
ctctgtcggatgaagaagt

SEQ ID NO: 304068 - DNA, 19 bp, Homo sapiens
  siRNA target sequence for PAOX (NM_152911.1,1275-1293).
cggatgaagaagtacttct

SEQ ID NO: 304069 - DNA, 19 bp, Homo sapiens
  siRNA target sequence for PAOX (NM_152911.1,1508-1526).
gccacacatcgcacgtttt

SEQ ID NO: 304070 - DNA, 19 bp, Homo sapiens
  siRNA target sequence for PAOX (NM_152911.1,1509-1527).
ccacacatcgcacgtttta

SEQ ID NO: 304071 - DNA, 19 bp, Homo sapiens
  siRNA target sequence for PCM1 (NM_006197.2,322-340).
catgaatgatcaggattta

SEQ ID NO: 304072 - DNA, 19 bp, Homo sapiens
  siRNA target sequence for PCM1 (NM_006197.2,370-388).
caggctcaacaatatggat

SEQ ID NO: 304073 - DNA, 19 bp, Homo sapiens
  siRNA target sequence for PCM1 (NM_006197.2,391-409).
gggtgcccaacagaagaaa

SEQ ID NO: 304074 - DNA, 19 bp, Homo sapiens
  siRNA target sequence for PCM1 (NM_006197.2,456-474).
gtgataaaagagtaaccaa

SEQ ID NO: 304075 - DNA, 19 bp, Homo sapiens
  siRNA target sequence for PCM1 (NM_006197.2,519-537).
caaagactccacatacgtt

SEQ ID NO: 304076 - DNA, 19 bp, Homo sapiens
  siRNA target sequence for PCM1 (NM_006197.2,534-552).
cgttcccacacagtagata

SEQ ID NO: 304077 - DNA, 19 bp, Homo sapiens
  siRNA target sequence for PCM1 (NM_006197.2,539-557).
ccacacagtagatacatga

SEQ ID NO: 304078 - DNA, 19 bp, Homo sapiens
  siRNA target sequence for PCM1 (NM_006197.2,596-614).
ctgaaacagcggataaact

SEQ ID NO: 304079 - DNA, 19 bp, Homo sapiens
  siRNA target sequence for PCM1 (NM_006197.2,606-624).
ggataaacttcagtgattt

SEQ ID NO: 304080 - DNA, 19 bp, Homo sapiens
  siRNA target sequence for PCM1 (NM_006197.2,660-678).
gagcaacagctgctaacaa

SEQ ID NO: 304081 - DNA, 19 bp, Homo sapiens
  siRNA target sequence for PCM1 (NM_006197.2,679-697).
caaacgtcagcttagtgaa

SEQ ID NO: 304082 - DNA, 19 bp, Homo sapiens
  siRNA target sequence for PCM1 (NM_006197.2,721-739).
gcctatgcagattaatact

SEQ ID NO: 304083 - DNA, 19 bp, Homo sapiens
  siRNA target sequence for PCM1 (NM_006197.2,723-741).
ctatgcagattaatactaa

SEQ ID NO: 304084 - DNA, 19 bp, Homo sapiens
  siRNA target sequence for PCM1 (NM_006197.2,768-786).
ccccaaacagagaaacgat

SEQ ID NO: 304085 - DNA, 19 bp, Homo sapiens
  siRNA target sequence for PCM1 (NM_006197.2,769-787).
cccaaacagagaaacgatt

SEQ ID NO: 304086 - DNA, 19 bp, Homo sapiens
  siRNA target sequence for PCM1 (NM_006197.2,789-807).
gatcagcacagtgtaaaga

SEQ ID NO: 304087 - DNA, 19 bp, Homo sapiens
  siRNA target sequence for PCM1 (NM_006197.2,792-810).
cagcacagtgtaaagagtt

SEQ ID NO: 304088 - DNA, 19 bp, Homo sapiens
  siRNA target sequence for PCM1 (NM_006197.2,847-865).
ctgtcaggtgtctgaagaa

SEQ ID NO: 304089 - DNA, 19 bp, Homo sapiens
  siRNA target sequence for PCM1 (NM_006197.2,905-923).
gtaagcaggcttgttcaaa

SEQ ID NO: 304090 - DNA, 19 bp, Homo sapiens
  siRNA target sequence for PCM1 (NM_006197.2,917-935).
gttcaaattcgcgattata

SEQ ID NO: 304091 - DNA, 19 bp, Homo sapiens
  siRNA target sequence for PCM1 (NM_006197.2,920-938).
caaattcgcgattatatta

SEQ ID NO: 304092 - DNA, 19 bp, Homo sapiens
  siRNA target sequence for PCM1 (NM_006197.2,928-946).
cgattatattactaaagct

SEQ ID NO: 304093 - DNA, 19 bp, Homo sapiens
  siRNA target sequence for PCM1 (NM_006197.2,929-947).
gattatattactaaagcta

SEQ ID NO: 304094 - DNA, 19 bp, Homo sapiens
  siRNA target sequence for PCM1 (NM_006197.2,948-966).
gttccatgcgggaagatct

SEQ ID NO: 304095 - DNA, 19 bp, Homo sapiens
  siRNA target sequence for PCM1 (NM_006197.2,952-970).
catgcgggaagatcttgta

SEQ ID NO: 304096 - DNA, 19 bp, Homo sapiens
  siRNA target sequence for PCM1 (NM_006197.2,998-1016).
gagcgccttactcatctaa

SEQ ID NO: 304097 - DNA, 19 bp, Homo sapiens
  siRNA target sequence for PCM1 (NM_006197.2,1002-1020).
gccttactcatctaataga

SEQ ID NO: 304098 - DNA, 19 bp, Homo sapiens
  siRNA target sequence for PCM1 (NM_006197.2,1034-1052).
caagagaagtcatatatga

SEQ ID NO: 304099 - DNA, 19 bp, Homo sapiens
  siRNA target sequence for PCM1 (NM_006197.2,1233-1251).
cagtgatggatgattctgt

SEQ ID NO: 304100 - DNA, 19 bp, Homo sapiens
  siRNA target sequence for PCM1 (NM_006197.2,1259-1277).
gaaactgcaggtagcttat

SEQ ID NO: 304101 - DNA, 19 bp, Homo sapiens
  siRNA target sequence for PCM1 (NM_006197.2,1282-1300).
cgtcagtatcacatctgaa

SEQ ID NO: 304102 - DNA, 19 bp, Homo sapiens
  siRNA target sequence for PCM1 (NM_006197.2,1287-1305).
gtatcacatctgaactaaa

SEQ ID NO: 304103 - DNA, 19 bp, Homo sapiens
  siRNA target sequence for PCM1 (NM_006197.2,1388-1406).
caggcagaaagtctttcat

SEQ ID NO: 304104 - DNA, 19 bp, Homo sapiens
  siRNA target sequence for PCM1 (NM_006197.2,1390-1408).
ggcagaaagtctttcatta

SEQ ID NO: 304105 - DNA, 19 bp, Homo sapiens
  siRNA target sequence for PCM1 (NM_006197.2,1437-1455).
catcagcttcagaacgttt

SEQ ID NO: 304106 - DNA, 19 bp, Homo sapiens
  siRNA target sequence for PCM1 (NM_006197.2,1452-1470).
gtttacctgatgagaaagt

SEQ ID NO: 304107 - DNA, 19 bp, Homo sapiens
  siRNA target sequence for PCM1 (NM_006197.2,1460-1478).
gatgagaaagtcgaacttt

SEQ ID NO: 304108 - DNA, 19 bp, Homo sapiens
  siRNA target sequence for PCM1 (NM_006197.2,1469-1487).
gtcgaactttttagcaaaa

SEQ ID NO: 304109 - DNA, 19 bp, Homo sapiens
  siRNA target sequence for PCM1 (NM_006197.2,1528-1546).
gcttggagaacttcataca

SEQ ID NO: 304110 - DNA, 19 bp, Homo sapiens
  siRNA target sequence for PCM1 (NM_006197.2,1547-1565).
cttcgagatcagcatctta

SEQ ID NO: 304111 - DNA, 19 bp, Homo sapiens
  siRNA target sequence for PCM1 (NM_006197.2,1551-1569).
gagatcagcatcttaacaa

SEQ ID NO: 304112 - DNA, 19 bp, Homo sapiens
  siRNA target sequence for PCM1 (NM_006197.2,1556-1574).
cagcatcttaacaattcat

SEQ ID NO: 304113 - DNA, 19 bp, Homo sapiens
  siRNA target sequence for PCM1 (NM_006197.2,1558-1576).
gcatcttaacaattcatca

SEQ ID NO: 304114 - DNA, 19 bp, Homo sapiens
  siRNA target sequence for PCM1 (NM_006197.2,1595-1613).
gtcgatcagagaagtactt

SEQ ID NO: 304115 - DNA, 19 bp, Homo sapiens
  siRNA target sequence for PCM1 (NM_006197.2,1597-1615).
cgatcagagaagtacttca

SEQ ID NO: 304116 - DNA, 19 bp, Homo sapiens
  siRNA target sequence for PCM1 (NM_006197.2,1635-1653).
gcttggcaccggttgtcaa

SEQ ID NO: 304117 - DNA, 19 bp, Homo sapiens
  siRNA target sequence for PCM1 (NM_006197.2,1636-1654).
cttggcaccggttgtcaat

SEQ ID NO: 304118 - DNA, 19 bp, Homo sapiens
  siRNA target sequence for PCM1 (NM_006197.2,1663-1681).
caatagcctcacatcatct

SEQ ID NO: 304119 - DNA, 19 bp, Homo sapiens
  siRNA target sequence for PCM1 (NM_006197.2,1695-1713).
ctgcttctctagtatctca

SEQ ID NO: 304120 - DNA, 19 bp, Homo sapiens
  siRNA target sequence for PCM1 (NM_006197.2,1785-1803).
gattgaatgagctaagaga

SEQ ID NO: 304121 - DNA, 19 bp, Homo sapiens
  siRNA target sequence for PCM1 (NM_006197.2,1800-1818).
gagaattagttcattatta

SEQ ID NO: 304122 - DNA, 19 bp, Homo sapiens
  siRNA target sequence for PCM1 (NM_006197.2,1914-1932).
ccgagcctgttactaacat

SEQ ID NO: 304123 - DNA, 19 bp, Homo sapiens
  siRNA target sequence for PCM1 (NM_006197.2,1915-1933).
cgagcctgttactaacatt

SEQ ID NO: 304124 - DNA, 19 bp, Homo sapiens
  siRNA target sequence for PCM1 (NM_006197.2,1919-1937).
cctgttactaacattcgaa

SEQ ID NO: 304125 - DNA, 19 bp, Homo sapiens
  siRNA target sequence for PCM1 (NM_006197.2,1920-1938).
ctgttactaacattcgaaa

SEQ ID NO: 304126 - DNA, 19 bp, Homo sapiens
  siRNA target sequence for PCM1 (NM_006197.2,1930-1948).
cattcgaaatccacaagta

SEQ ID NO: 304127 - DNA, 19 bp, Homo sapiens
  siRNA target sequence for PCM1 (NM_006197.2,1964-1982).
gaagtaaatagtcatagta

SEQ ID NO: 304128 - DNA, 19 bp, Homo sapiens
  siRNA target sequence for PCM1 (NM_006197.2,2007-2025).
gagatgggcgaacagttaa

SEQ ID NO: 304129 - DNA, 19 bp, Homo sapiens
  siRNA target sequence for PCM1 (NM_006197.2,2009-2027).
gatgggcgaacagttaatt

SEQ ID NO: 304130 - DNA, 19 bp, Homo sapiens
  siRNA target sequence for PCM1 (NM_006197.2,2012-2030).
gggcgaacagttaattcta

SEQ ID NO: 304131 - DNA, 19 bp, Homo sapiens
  siRNA target sequence for PCM1 (NM_006197.2,2013-2031).
ggcgaacagttaattctaa

SEQ ID NO: 304132 - DNA, 19 bp, Homo sapiens
  siRNA target sequence for PCM1 (NM_006197.2,2014-2032).
gcgaacagttaattctaat

SEQ ID NO: 304133 - DNA, 19 bp, Homo sapiens
  siRNA target sequence for PCM1 (NM_006197.2,2015-2033).
cgaacagttaattctaatt

SEQ ID NO: 304134 - DNA, 19 bp, Homo sapiens
  siRNA target sequence for PCM1 (NM_006197.2,2019-2037).
cagttaattctaattgtga

SEQ ID NO: 304135 - DNA, 19 bp, Homo sapiens
  siRNA target sequence for PCM1 (NM_006197.2,2028-2046).
ctaattgtgaaattaacaa

SEQ ID NO: 304136 - DNA, 19 bp, Homo sapiens
  siRNA target sequence for PCM1 (NM_006197.2,2047-2065).
cagatctgctgccaacata

SEQ ID NO: 304137 - DNA, 19 bp, Homo sapiens
  siRNA target sequence for PCM1 (NM_006197.2,2058-2076).
ccaacataagggctctaaa

SEQ ID NO: 304138 - DNA, 19 bp, Homo sapiens
  siRNA target sequence for PCM1 (NM_006197.2,2077-2095).
catgcctccttctttagat

SEQ ID NO: 304139 - DNA, 19 bp, Homo sapiens
  siRNA target sequence for PCM1 (NM_006197.2,2080-2098).
gcctccttctttagattgt

SEQ ID NO: 304140 - DNA, 19 bp, Homo sapiens
  siRNA target sequence for PCM1 (NM_006197.2,2115-2133).
gggaacaggagattcatgt

SEQ ID NO: 304141 - DNA, 19 bp, Homo sapiens
  siRNA target sequence for PCM1 (NM_006197.2,2214-2232).
ggagcagtctggttgatga

SEQ ID NO: 304142 - DNA, 19 bp, Homo sapiens
  siRNA target sequence for PCM1 (NM_006197.2,2269-2287).
ccgacttatggctgcaaaa

SEQ ID NO: 304143 - DNA, 19 bp, Homo sapiens
  siRNA target sequence for PCM1 (NM_006197.2,2271-2289).
gacttatggctgcaaaaca

SEQ ID NO: 304144 - DNA, 19 bp, Homo sapiens
  siRNA target sequence for PCM1 (NM_006197.2,2290-2308).
gaaacttagacagttacaa

SEQ ID NO: 304145 - DNA, 19 bp, Homo sapiens
  siRNA target sequence for PCM1 (NM_006197.2,2358-2376).
ctgccagtgcatcaaattt

SEQ ID NO: 304146 - DNA, 19 bp, Homo sapiens
  siRNA target sequence for PCM1 (NM_006197.2,2361-2379).
ccagtgcatcaaatttgga

SEQ ID NO: 304147 - DNA, 19 bp, Homo sapiens
  siRNA target sequence for PCM1 (NM_006197.2,2362-2380).
cagtgcatcaaatttggat

SEQ ID NO: 304148 - DNA, 19 bp, Homo sapiens
  siRNA target sequence for PCM1 (NM_006197.2,2399-2417).
gaagacaccaagcaaaatt

SEQ ID NO: 304149 - DNA, 19 bp, Homo sapiens
  siRNA target sequence for PCM1 (NM_006197.2,2404-2422).
caccaagcaaaattcaaat

SEQ ID NO: 304150 - DNA, 19 bp, Homo sapiens
  siRNA target sequence for PCM1 (NM_006197.2,2452-2470).
gaaagatactggagtaaat

SEQ ID NO: 304151 - DNA, 19 bp, Homo sapiens
  siRNA target sequence for PCM1 (NM_006197.2,2520-2538).
gagagctaaaacaattgca

SEQ ID NO: 304152 - DNA, 19 bp, Homo sapiens
  siRNA target sequence for PCM1 (NM_006197.2,2635-2653).
ctgtcccaccaaaaaatat

SEQ ID NO: 304153 - DNA, 19 bp, Homo sapiens
  siRNA target sequence for PCM1 (NM_006197.2,2670-2688).
caaccccaactgttaatca

SEQ ID NO: 304154 - DNA, 19 bp, Homo sapiens
  siRNA target sequence for PCM1 (NM_006197.2,2673-2691).
ccccaactgttaatcaaca

SEQ ID NO: 304155 - DNA, 19 bp, Homo sapiens
  siRNA target sequence for PCM1 (NM_006197.2,2687-2705).
caacacgagaccagtacaa

SEQ ID NO: 304156 - DNA, 19 bp, Homo sapiens
  siRNA target sequence for PCM1 (NM_006197.2,2692-2710).
cgagaccagtacaagcaaa

SEQ ID NO: 304157 - DNA, 19 bp, Homo sapiens
  siRNA target sequence for PCM1 (NM_006197.2,2693-2711).
gagaccagtacaagcaaat

SEQ ID NO: 304158 - DNA, 19 bp, Homo sapiens
  siRNA target sequence for PCM1 (NM_006197.2,2697-2715).
ccagtacaagcaaatctgt

SEQ ID NO: 304159 - DNA, 19 bp, Homo sapiens
  siRNA target sequence for PCM1 (NM_006197.2,2698-2716).
cagtacaagcaaatctgtt

SEQ ID NO: 304160 - DNA, 19 bp, Homo sapiens
  siRNA target sequence for PCM1 (NM_006197.2,2729-2747).
gattcttcaatagtagata

SEQ ID NO: 304161 - DNA, 19 bp, Homo sapiens
  siRNA target sequence for PCM1 (NM_006197.2,2733-2751).
cttcaatagtagataatga

SEQ ID NO: 304162 - DNA, 19 bp, Homo sapiens
  siRNA target sequence for PCM1 (NM_006197.2,2736-2754).
caatagtagataatgagtt

SEQ ID NO: 304163 - DNA, 19 bp, Homo sapiens
  siRNA target sequence for PCM1 (NM_006197.2,2823-2841).
ctctgatggctgaacatca

SEQ ID NO: 304164 - DNA, 19 bp, Homo sapiens
  siRNA target sequence for PCM1 (NM_006197.2,2848-2866).
gcaaggtctagctgaaact

SEQ ID NO: 304165 - DNA, 19 bp, Homo sapiens
  siRNA target sequence for PCM1 (NM_006197.2,2931-2949).
gtagaacagaaaaaacgat

SEQ ID NO: 304166 - DNA, 19 bp, Homo sapiens
  siRNA target sequence for PCM1 (NM_006197.2,2996-3014).
gatgaagacggttaccttt

SEQ ID NO: 304167 - DNA, 19 bp, Homo sapiens
  siRNA target sequence for PCM1 (NM_006197.2,3096-3114).
ctaacagtgtgaatcataa

SEQ ID NO: 304168 - DNA, 19 bp, Homo sapiens
  siRNA target sequence for PCM1 (NM_006197.2,3110-3128).
cataactcctacaatggaa

SEQ ID NO: 304169 - DNA, 19 bp, Homo sapiens
  siRNA target sequence for PCM1 (NM_006197.2,3223-3241).
gcaacggcaagaaaacctt

SEQ ID NO: 304170 - DNA, 19 bp, Homo sapiens
  siRNA target sequence for PCM1 (NM_006197.2,3246-3264).
gggtgtcagagctctctta

SEQ ID NO: 304171 - DNA, 19 bp, Homo sapiens
  siRNA target sequence for PCM1 (NM_006197.2,3250-3268).
gtcagagctctcttacgta

SEQ ID NO: 304172 - DNA, 19 bp, Homo sapiens
  siRNA target sequence for PCM1 (NM_006197.2,3259-3277).
ctcttacgtagaagagaaa

SEQ ID NO: 304173 - DNA, 19 bp, Homo sapiens
  siRNA target sequence for PCM1 (NM_006197.2,3261-3279).
cttacgtagaagagaaaga

SEQ ID NO: 304174 - DNA, 19 bp, Homo sapiens
  siRNA target sequence for PCM1 (NM_006197.2,3372-3390).
cttgtctgctacaaactct

SEQ ID NO: 304175 - DNA, 19 bp, Homo sapiens
  siRNA target sequence for PCM1 (NM_006197.2,3396-3414).
cgggtccttacagtgttat

SEQ ID NO: 304176 - DNA, 19 bp, Homo sapiens
  siRNA target sequence for PCM1 (NM_006197.2,3429-3447).
catctcctcaagtacactt

SEQ ID NO: 304177 - DNA, 19 bp, Homo sapiens
  siRNA target sequence for PCM1 (NM_006197.2,3434-3452).
cctcaagtacacttcataa

SEQ ID NO: 304178 - DNA, 19 bp, Homo sapiens
  siRNA target sequence for PCM1 (NM_006197.2,3435-3453).
ctcaagtacacttcataat

SEQ ID NO: 304179 - DNA, 19 bp, Homo sapiens
  siRNA target sequence for PCM1 (NM_006197.2,3458-3476).
cagttgaaccagtgctata

SEQ ID NO: 304180 - DNA, 19 bp, Homo sapiens
  siRNA target sequence for PCM1 (NM_006197.2,3460-3478).
gttgaaccagtgctatact

SEQ ID NO: 304181 - DNA, 19 bp, Homo sapiens
  siRNA target sequence for PCM1 (NM_006197.2,3508-3526).
gaggttgaaacaaatgcta

SEQ ID NO: 304182 - DNA, 19 bp, Homo sapiens
  siRNA target sequence for PCM1 (NM_006197.2,3603-3621).
ctccttctcccagtttatt

SEQ ID NO: 304183 - DNA, 19 bp, Homo sapiens
  siRNA target sequence for PCM1 (NM_006197.2,3642-3660).
cacagcctgtaaatctctt

SEQ ID NO: 304184 - DNA, 19 bp, Homo sapiens
  siRNA target sequence for PCM1 (NM_006197.2,3646-3664).
gcctgtaaatctcttcaat

SEQ ID NO: 304185 - DNA, 19 bp, Homo sapiens
  siRNA target sequence for PCM1 (NM_006197.2,3647-3665).
cctgtaaatctcttcaata

SEQ ID NO: 304186 - DNA, 19 bp, Homo sapiens
  siRNA target sequence for PCM1 (NM_006197.2,3648-3666).
ctgtaaatctcttcaatat

SEQ ID NO: 304187 - DNA, 19 bp, Homo sapiens
  siRNA target sequence for PCM1 (NM_006197.2,3661-3679).
caatatacctggatttact

SEQ ID NO: 304188 - DNA, 19 bp, Homo sapiens
  siRNA target sequence for PCM1 (NM_006197.2,3668-3686).
cctggatttactaactttt

SEQ ID NO: 304189 - DNA, 19 bp, Homo sapiens
  siRNA target sequence for PCM1 (NM_006197.2,3690-3708).
catttgcaccaggtatgaa

SEQ ID NO: 304190 - DNA, 19 bp, Homo sapiens
  siRNA target sequence for PCM1 (NM_006197.2,3782-3800).
cccttagcccagaattctt

SEQ ID NO: 304191 - DNA, 19 bp, Homo sapiens
  siRNA target sequence for PCM1 (NM_006197.2,3912-3930).
ggacaccatggttatatga

SEQ ID NO: 304192 - DNA, 19 bp, Homo sapiens
  siRNA target sequence for PCM1 (NM_006197.2,3915-3933).
caccatggttatatgaaca

SEQ ID NO: 304193 - DNA, 19 bp, Homo sapiens
  siRNA target sequence for PCM1 (NM_006197.2,3918-3936).
catggttatatgaacaaga

SEQ ID NO: 304194 - DNA, 19 bp, Homo sapiens
  siRNA target sequence for PCM1 (NM_006197.2,3944-3962).
gtagagaaaccatttatca

SEQ ID NO: 304195 - DNA, 19 bp, Homo sapiens
  siRNA target sequence for PCM1 (NM_006197.2,3977-3995).
gtgtctgtagaaaaatcta

SEQ ID NO: 304196 - DNA, 19 bp, Homo sapiens
  siRNA target sequence for PCM1 (NM_006197.2,3996-4014).
caagtagtaaccgcaaaaa

SEQ ID NO: 304197 - DNA, 19 bp, Homo sapiens
  siRNA target sequence for PCM1 (NM_006197.2,3999-4017).
gtagtaaccgcaaaaatca

SEQ ID NO: 304198 - DNA, 19 bp, Homo sapiens
  siRNA target sequence for PCM1 (NM_006197.2,4006-4024).
ccgcaaaaatcaattagat

SEQ ID NO: 304199 - DNA, 19 bp, Homo sapiens
  siRNA target sequence for PCM1 (NM_006197.2,4007-4025).
cgcaaaaatcaattagata

SEQ ID NO: 304200 - DNA, 19 bp, Homo sapiens
  siRNA target sequence for PCM1 (NM_006197.2,4038-4056).
gacgccagtttgatgaaga

SEQ ID NO: 304201 - DNA, 19 bp, Homo sapiens
  siRNA target sequence for PCM1 (NM_006197.2,4097-4115).
ccaacaacagtgactaaaa

SEQ ID NO: 304202 - DNA, 19 bp, Homo sapiens
  siRNA target sequence for PCM1 (NM_006197.2,4101-4119).
caacagtgactaaaacatt

SEQ ID NO: 304203 - DNA, 19 bp, Homo sapiens
  siRNA target sequence for PCM1 (NM_006197.2,4147-4165).
cagcctggcatctaaagat

SEQ ID NO: 304204 - DNA, 19 bp, Homo sapiens
  siRNA target sequence for PCM1 (NM_006197.2,4149-4167).
gcctggcatctaaagataa

SEQ ID NO: 304205 - DNA, 19 bp, Homo sapiens
  siRNA target sequence for PCM1 (NM_006197.2,4153-4171).
ggcatctaaagataaaact

SEQ ID NO: 304206 - DNA, 19 bp, Homo sapiens
  siRNA target sequence for PCM1 (NM_006197.2,4170-4188).
ctcccaagtcaaaaagtaa

SEQ ID NO: 304207 - DNA, 19 bp, Homo sapiens
  siRNA target sequence for PCM1 (NM_006197.2,4172-4190).
cccaagtcaaaaagtaaga

SEQ ID NO: 304208 - DNA, 19 bp, Homo sapiens
  siRNA target sequence for PCM1 (NM_006197.2,4258-4276).
cacatgtgaaccttgcaaa

SEQ ID NO: 304209 - DNA, 19 bp, Homo sapiens
  siRNA target sequence for PCM1 (NM_006197.2,4309-4327).
gcctgttcaagcaaaagta

SEQ ID NO: 304210 - DNA, 19 bp, Homo sapiens
  siRNA target sequence for PCM1 (NM_006197.2,4407-4425).
gtgatttttccatgtttga

SEQ ID NO: 304211 - DNA, 19 bp, Homo sapiens
  siRNA target sequence for PCM1 (NM_006197.2,4424-4442).
gaagctttgcgagatacta

SEQ ID NO: 304212 - DNA, 19 bp, Homo sapiens
  siRNA target sequence for PCM1 (NM_006197.2,4427-4445).
gctttgcgagatactattt

SEQ ID NO: 304213 - DNA, 19 bp, Homo sapiens
  siRNA target sequence for PCM1 (NM_006197.2,4526-4544).
ctaaacacagactacttga

SEQ ID NO: 304214 - DNA, 19 bp, Homo sapiens
  siRNA target sequence for PCM1 (NM_006197.2,4543-4561).
gagacagagggctttatat

SEQ ID NO: 304215 - DNA, 19 bp, Homo sapiens
  siRNA target sequence for PCM1 (NM_006197.2,4547-4565).
cagagggctttatatgcat

SEQ ID NO: 304216 - DNA, 19 bp, Homo sapiens
  siRNA target sequence for PCM1 (NM_006197.2,4638-4656).
gtacttggatagcatcaaa

SEQ ID NO: 304217 - DNA, 19 bp, Homo sapiens
  siRNA target sequence for PCM1 (NM_006197.2,4649-4667).
gcatcaaactcagaactta

SEQ ID NO: 304218 - DNA, 19 bp, Homo sapiens
  siRNA target sequence for PCM1 (NM_006197.2,4678-4696).
gagccttgctactactgat

SEQ ID NO: 304219 - DNA, 19 bp, Homo sapiens
  siRNA target sequence for PCM1 (NM_006197.2,4772-4790).
gtcctgtctgtatcatcaa

SEQ ID NO: 304220 - DNA, 19 bp, Homo sapiens
  siRNA target sequence for PCM1 (NM_006197.2,4800-4818).
cttttgcaacagatgatct

SEQ ID NO: 304221 - DNA, 19 bp, Homo sapiens
  siRNA target sequence for PCM1 (NM_006197.2,4820-4838).
ggtaacaccgtgattcact

SEQ ID NO: 304222 - DNA, 19 bp, Homo sapiens
  siRNA target sequence for PCM1 (NM_006197.2,4821-4839).
gtaacaccgtgattcactt

SEQ ID NO: 304223 - DNA, 19 bp, Homo sapiens
  siRNA target sequence for PCM1 (NM_006197.2,4827-4845).
ccgtgattcacttagatca

SEQ ID NO: 304224 - DNA, 19 bp, Homo sapiens
  siRNA target sequence for PCM1 (NM_006197.2,4828-4846).
cgtgattcacttagatcaa

SEQ ID NO: 304225 - DNA, 19 bp, Homo sapiens
  siRNA target sequence for PCM1 (NM_006197.2,4863-4881).
gagaatatgagcgtatgaa

SEQ ID NO: 304226 - DNA, 19 bp, Homo sapiens
  siRNA target sequence for PCM1 (NM_006197.2,4865-4883).
gaatatgagcgtatgaaga

SEQ ID NO: 304227 - DNA, 19 bp, Homo sapiens
  siRNA target sequence for PCM1 (NM_006197.2,4886-4904).
gaggctgaaagtaactcaa

SEQ ID NO: 304228 - DNA, 19 bp, Homo sapiens
  siRNA target sequence for PCM1 (NM_006197.2,4911-4929).
gatgcacctgcaggattat

SEQ ID NO: 304229 - DNA, 19 bp, Homo sapiens
  siRNA target sequence for PCM1 (NM_006197.2,4949-4967).
ggtgcaggtactacagtta

SEQ ID NO: 304230 - DNA, 19 bp, Homo sapiens
  siRNA target sequence for PCM1 (NM_006197.2,4962-4980).
cagttaataatttagaaga

SEQ ID NO: 304231 - DNA, 19 bp, Homo sapiens
  siRNA target sequence for PCM1 (NM_006197.2,4979-4997).
gaaactcccgttattgaaa

SEQ ID NO: 304232 - DNA, 19 bp, Homo sapiens
  siRNA target sequence for PCM1 (NM_006197.2,4985-5003).
cccgttattgaaaatcgta

SEQ ID NO: 304233 - DNA, 19 bp, Homo sapiens
  siRNA target sequence for PCM1 (NM_006197.2,5007-5025).
cacaacaacctgtaagtga

SEQ ID NO: 304234 - DNA, 19 bp, Homo sapiens
  siRNA target sequence for PCM1 (NM_006197.2,5015-5033).
cctgtaagtgaagtttcta

SEQ ID NO: 304235 - DNA, 19 bp, Homo sapiens
  siRNA target sequence for PCM1 (NM_006197.2,5043-5061).
gtcctagaattgatactca

SEQ ID NO: 304236 - DNA, 19 bp, Homo sapiens
  siRNA target sequence for PCM1 (NM_006197.2,5065-5083).
gctggaccggcaaattaaa

SEQ ID NO: 304237 - DNA, 19 bp, Homo sapiens
  siRNA target sequence for PCM1 (NM_006197.2,5068-5086).
ggaccggcaaattaaagca

SEQ ID NO: 304238 - DNA, 19 bp, Homo sapiens
  siRNA target sequence for PCM1 (NM_006197.2,5069-5087).
gaccggcaaattaaagcaa

SEQ ID NO: 304239 - DNA, 19 bp, Homo sapiens
  siRNA target sequence for PCM1 (NM_006197.2,5085-5103).
caattatgaaagaagtcat

SEQ ID NO: 304240 - DNA, 19 bp, Homo sapiens
  siRNA target sequence for PCM1 (NM_006197.2,5140-5158).
ctcgcagcttctaacttca

SEQ ID NO: 304241 - DNA, 19 bp, Homo sapiens
  siRNA target sequence for PCM1 (NM_006197.2,5157-5175).
cagtaaggcgcatggtttt

SEQ ID NO: 304242 - DNA, 19 bp, Homo sapiens
  siRNA target sequence for PCM1 (NM_006197.2,5159-5177).
gtaaggcgcatggttttga

SEQ ID NO: 304243 - DNA, 19 bp, Homo sapiens
  siRNA target sequence for PCM1 (NM_006197.2,5178-5196).
cccttacccagcaaaatga

SEQ ID NO: 304244 - DNA, 19 bp, Homo sapiens
  siRNA target sequence for PCM1 (NM_006197.2,5241-5259).
gtatattacaggattcact

SEQ ID NO: 304245 - DNA, 19 bp, Homo sapiens
  siRNA target sequence for PCM1 (NM_006197.2,5249-5267).
caggattcactggcaaaat

SEQ ID NO: 304246 - DNA, 19 bp, Homo sapiens
  siRNA target sequence for PCM1 (NM_006197.2,5359-5377).
gcaagatttggataataat

SEQ ID NO: 304247 - DNA, 19 bp, Homo sapiens
  siRNA target sequence for PCM1 (NM_006197.2,5531-5549).
gttaagcagactcaaacat

SEQ ID NO: 304248 - DNA, 19 bp, Homo sapiens
  siRNA target sequence for PCM1 (NM_006197.2,5561-5579).
gatggtcccaaaaatgtaa

SEQ ID NO: 304249 - DNA, 19 bp, Homo sapiens
  siRNA target sequence for PCM1 (NM_006197.2,5658-5676).
ctcaggctttaactaatta

SEQ ID NO: 304250 - DNA, 19 bp, Homo sapiens
  siRNA target sequence for PCM1 (NM_006197.2,5800-5818).
ggtcctacaacgtgacttt

SEQ ID NO: 304251 - DNA, 19 bp, Homo sapiens
  siRNA target sequence for PCM1 (NM_006197.2,5801-5819).
gtcctacaacgtgacttta

SEQ ID NO: 304252 - DNA, 19 bp, Homo sapiens
  siRNA target sequence for PCM1 (NM_006197.2,5803-5821).
cctacaacgtgactttaaa

SEQ ID NO: 304253 - DNA, 19 bp, Homo sapiens
  siRNA target sequence for PCM1 (NM_006197.2,5804-5822).
ctacaacgtgactttaaaa

SEQ ID NO: 304254 - DNA, 19 bp, Homo sapiens
  siRNA target sequence for PCM1 (NM_006197.2,5855-5873).
cgagaagccactagtaaaa

SEQ ID NO: 304255 - DNA, 19 bp, Homo sapiens
  siRNA target sequence for PCM1 (NM_006197.2,5856-5874).
gagaagccactagtaaaaa

SEQ ID NO: 304256 - DNA, 19 bp, Homo sapiens
  siRNA target sequence for PCM1 (NM_006197.2,5894-5912).
ccctgttacctcaatatct

SEQ ID NO: 304257 - DNA, 19 bp, Homo sapiens
  siRNA target sequence for PCM1 (NM_006197.2,5918-5936).
gatgagcaacctttaaata

SEQ ID NO: 304258 - DNA, 19 bp, Homo sapiens
  siRNA target sequence for PCM1 (NM_006197.2,5950-5968).
ggagtcacctcctactgtt

SEQ ID NO: 304259 - DNA, 19 bp, Homo sapiens
  siRNA target sequence for PCM1 (NM_006197.2,5953-5971).
gtcacctcctactgttgat

SEQ ID NO: 304260 - DNA, 19 bp, Homo sapiens
  siRNA target sequence for PCM1 (NM_006197.2,5989-6007).
ccctttgccgttacgttta

SEQ ID NO: 304261 - DNA, 19 bp, Homo sapiens
  siRNA target sequence for PCM1 (NM_006197.2,6022-6040).
cttagtgcctagagtcaaa

SEQ ID NO: 304262 - DNA, 19 bp, Homo sapiens
  siRNA target sequence for PCM1 (NM_006197.2,6029-6047).
cctagagtcaaagaagtta

SEQ ID NO: 304263 - DNA, 19 bp, Homo sapiens
  siRNA target sequence for PCM1 (NM_006197.2,6096-6114).
ctgaatctccagtgttagt

SEQ ID NO: 304264 - DNA, 19 bp, Homo sapiens
  siRNA target sequence for PCM1 (NM_006197.2,6098-6116).
gaatctccagtgttagtga

SEQ ID NO: 304265 - DNA, 19 bp, Homo sapiens
  siRNA target sequence for PCM1 (NM_006197.2,6102-6120).
ctccagtgttagtgaatga

SEQ ID NO: 304266 - DNA, 19 bp, Homo sapiens
  siRNA target sequence for PCM1 (NM_006197.2,6105-6123).
cagtgttagtgaatgacta

SEQ ID NO: 304267 - DNA, 19 bp, Homo sapiens
  siRNA target sequence for PCM1 (NM_006197.2,6281-6299).
gaaatgcagaccgaagaat

SEQ ID NO: 304268 - DNA, 19 bp, Homo sapiens
  siRNA target sequence for PCM1 (NM_006197.2,6286-6304).
gcagaccgaagaattagct

SEQ ID NO: 304269 - DNA, 19 bp, Homo sapiens
  siRNA target sequence for PCM1 (NM_006197.2,6305-6323).
ggaaattctgagacactaa

SEQ ID NO: 304270 - DNA, 19 bp, Homo sapiens
  siRNA target sequence for PCM1 (NM_006197.2,6336-6354).
cggtgggagcccagagtat

SEQ ID NO: 304271 - DNA, 19 bp, Homo sapiens
  siRNA target sequence for PCM1 (NM_006197.2,6337-6355).
ggtgggagcccagagtata

SEQ ID NO: 304272 - DNA, 19 bp, Homo sapiens
  siRNA target sequence for SRPUL (NM_014467.1,422-440).
gccagtcagctaactcaaa

SEQ ID NO: 304273 - DNA, 19 bp, Homo sapiens
  siRNA target sequence for SRPUL (NM_014467.1,506-524).
ggctactatccggatgaaa

SEQ ID NO: 304274 - DNA, 19 bp, Homo sapiens
  siRNA target sequence for SRPUL (NM_014467.1,521-539).
gaaagctacaatgaagtat

SEQ ID NO: 304275 - DNA, 19 bp, Homo sapiens
  siRNA target sequence for SRPUL (NM_014467.1,581-599).
gtcccccgatggtgttata

SEQ ID NO: 304276 - DNA, 19 bp, Homo sapiens
  siRNA target sequence for SRPUL (NM_014467.1,583-601).
cccccgatggtgttataca

SEQ ID NO: 304277 - DNA, 19 bp, Homo sapiens
  siRNA target sequence for SRPUL (NM_014467.1,584-602).
ccccgatggtgttatacat

SEQ ID NO: 304278 - DNA, 19 bp, Homo sapiens
  siRNA target sequence for SRPUL (NM_014467.1,586-604).
ccgatggtgttatacatta

SEQ ID NO: 304279 - DNA, 19 bp, Homo sapiens
  siRNA target sequence for SRPUL (NM_014467.1,587-605).
cgatggtgttatacattaa

SEQ ID NO: 304280 - DNA, 19 bp, Homo sapiens
  siRNA target sequence for SRPUL (NM_014467.1,636-654).
caccgaagggaggaaatta

SEQ ID NO: 304281 - DNA, 19 bp, Homo sapiens
  siRNA target sequence for SRPUL (NM_014467.1,780-798).
gatgccacgcactaccatt

SEQ ID NO: 304282 - DNA, 19 bp, Homo sapiens
  siRNA target sequence for SRPUL (NM_014467.1,930-948).
gaggcgagcctgtatgtgt

SEQ ID NO: 304283 - DNA, 19 bp, Homo sapiens
  siRNA target sequence for SRPUL (NM_014467.1,1036-1054).
cccaccgttggtgaaagat

SEQ ID NO: 304284 - DNA, 19 bp, Homo sapiens
  siRNA target sequence for SRPUL (NM_014467.1,1117-1135).
cgaaggagagcatgtgatt

SEQ ID NO: 304285 - DNA, 19 bp, Homo sapiens
  siRNA target sequence for SRPUL (NM_014467.1,1121-1139).
ggagagcatgtgattcgtt

SEQ ID NO: 304286 - DNA, 19 bp, Homo sapiens
  siRNA target sequence for SRPUL (NM_014467.1,1122-1140).
gagagcatgtgattcgtta

SEQ ID NO: 304287 - DNA, 19 bp, Homo sapiens
  siRNA target sequence for SRPUL (NM_014467.1,1126-1144).
gcatgtgattcgttacact

SEQ ID NO: 304288 - DNA, 19 bp, Homo sapiens
  siRNA target sequence for SRPUL (NM_014467.1,1180-1198).
gttcattgtgaaagtacaa

SEQ ID NO: 304289 - DNA, 19 bp, Homo sapiens
  siRNA target sequence for SRPUL (NM_014467.1,1368-1386).
caatctgtgctcctatgaa

SEQ ID NO: 304290 - DNA, 19 bp, Homo sapiens
  siRNA target sequence for SRPUL (NM_014467.1,1377-1395).
ctcctatgaagattaacgt

SEQ ID NO: 304291 - DNA, 19 bp, Homo sapiens
  siRNA target sequence for SRPUL (NM_014467.1,1469-1487).
gatccttccaaccgatatt

SEQ ID NO: 304292 - DNA, 19 bp, Homo sapiens
  siRNA target sequence for SRPUL (NM_014467.1,1472-1490).
ccttccaaccgatattata

SEQ ID NO: 304293 - DNA, 19 bp, Homo sapiens
  siRNA target sequence for SRPUL (NM_014467.1,1540-1558).
gcatgtgaccatcattgaa

SEQ ID NO: 304294 - DNA, 19 bp, Homo sapiens
  siRNA target sequence for SRPUL (NM_014467.1,1719-1737).
ctgtcacccccgaggaaat

SEQ ID NO: 304295 - DNA, 19 bp, Homo sapiens
  siRNA target sequence for SRPUL (NM_014467.1,1721-1739).
gtcacccccgaggaaatct

SEQ ID NO: 304296 - DNA, 19 bp, Homo sapiens
  siRNA target sequence for SRPUL (NM_014467.1,1728-1746).
ccgaggaaatcttcacatt

SEQ ID NO: 304297 - DNA, 19 bp, Homo sapiens
  siRNA target sequence for STEAP2 (NM_152999.2,449-467).
ctaatggcataaatggtat

SEQ ID NO: 304298 - DNA, 19 bp, Homo sapiens
  siRNA target sequence for STEAP2 (NM_152999.2,456-474).
cataaatggtatcaaagat

SEQ ID NO: 304299 - DNA, 19 bp, Homo sapiens
  siRNA target sequence for STEAP2 (NM_152999.2,483-501).
ggtcactgtaggtgtgatt

SEQ ID NO: 304300 - DNA, 19 bp, Homo sapiens
  siRNA target sequence for STEAP2 (NM_152999.2,509-527).
gagattttgccaaatcctt

SEQ ID NO: 304301 - DNA, 19 bp, Homo sapiens
  siRNA target sequence for STEAP2 (NM_152999.2,524-542).
ccttgaccattcgacttat

SEQ ID NO: 304302 - DNA, 19 bp, Homo sapiens
  siRNA target sequence for STEAP2 (NM_152999.2,528-546).
gaccattcgacttattaga

SEQ ID NO: 304303 - DNA, 19 bp, Homo sapiens
  siRNA target sequence for STEAP2 (NM_152999.2,564-582).
cataggaagtagaaatcct

SEQ ID NO: 304304 - DNA, 19 bp, Homo sapiens
  siRNA target sequence for STEAP2 (NM_152999.2,569-587).
gaagtagaaatcctaagtt

SEQ ID NO: 304305 - DNA, 19 bp, Homo sapiens
  siRNA target sequence for STEAP2 (NM_152999.2,580-598).
cctaagtttgcttctgaat

SEQ ID NO: 304306 - DNA, 19 bp, Homo sapiens
  siRNA target sequence for STEAP2 (NM_152999.2,581-599).
ctaagtttgcttctgaatt

SEQ ID NO: 304307 - DNA, 19 bp, Homo sapiens
  siRNA target sequence for STEAP2 (NM_152999.2,720-738).
gggtaaaatcctgattgat

SEQ ID NO: 304308 - DNA, 19 bp, Homo sapiens
  siRNA target sequence for STEAP2 (NM_152999.2,730-748).
ctgattgatgtgagcaata

SEQ ID NO: 304309 - DNA, 19 bp, Homo sapiens
  siRNA target sequence for STEAP2 (NM_152999.2,736-754).
gatgtgagcaataacatga

SEQ ID NO: 304310 - DNA, 19 bp, Homo sapiens
  siRNA target sequence for STEAP2 (NM_152999.2,743-761).
gcaataacatgaggataaa

SEQ ID NO: 304311 - DNA, 19 bp, Homo sapiens
  siRNA target sequence for STEAP2 (NM_152999.2,770-788).
cagaatccaatgctgaata

SEQ ID NO: 304312 - DNA, 19 bp, Homo sapiens
  siRNA target sequence for STEAP2 (NM_152999.2,874-892).
gccagccggcaggtttata

SEQ ID NO: 304313 - DNA, 19 bp, Homo sapiens
  siRNA target sequence for STEAP2 (NM_152999.2,876-894).
cagccggcaggtttatata

SEQ ID NO: 304314 - DNA, 19 bp, Homo sapiens
  siRNA target sequence for STEAP2 (NM_152999.2,880-898).
cggcaggtttatatatgca

SEQ ID NO: 304315 - DNA, 19 bp, Homo sapiens
  siRNA target sequence for STEAP2 (NM_152999.2,914-932).
cgcgacaacaggttattga

SEQ ID NO: 304316 - DNA, 19 bp, Homo sapiens
  siRNA target sequence for STEAP2 (NM_152999.2,915-933).
gcgacaacaggttattgaa

SEQ ID NO: 304317 - DNA, 19 bp, Homo sapiens
  siRNA target sequence for STEAP2 (NM_152999.2,960-978).
cattgacttgggatcctta

SEQ ID NO: 304318 - DNA, 19 bp, Homo sapiens
  siRNA target sequence for STEAP2 (NM_152999.2,1035-1053).
gccagtggtggtagctata

SEQ ID NO: 304319 - DNA, 19 bp, Homo sapiens
  siRNA target sequence for STEAP2 (NM_152999.2,1096-1114).
gtgattcatccatatgcta

SEQ ID NO: 304320 - DNA, 19 bp, Homo sapiens
  siRNA target sequence for STEAP2 (NM_152999.2,1120-1138).
caacagagtgacttttaca

SEQ ID NO: 304321 - DNA, 19 bp, Homo sapiens
  siRNA target sequence for STEAP2 (NM_152999.2,1144-1162).
cctatagagattgtgaata

SEQ ID NO: 304322 - DNA, 19 bp, Homo sapiens
  siRNA target sequence for STEAP2 (NM_152999.2,1152-1170).
gattgtgaataaaacctta

SEQ ID NO: 304323 - DNA, 19 bp, Homo sapiens
  siRNA target sequence for STEAP2 (NM_152999.2,1158-1176).
gaataaaaccttacctata

SEQ ID NO: 304324 - DNA, 19 bp, Homo sapiens
  siRNA target sequence for STEAP2 (NM_152999.2,1187-1205).
ctttgctctccctagtata

SEQ ID NO: 304325 - DNA, 19 bp, Homo sapiens
  siRNA target sequence for STEAP2 (NM_152999.2,1225-1243).
gctgcttatcaactttatt

SEQ ID NO: 304326 - DNA, 19 bp, Homo sapiens
  siRNA target sequence for STEAP2 (NM_152999.2,1226-1244).
ctgcttatcaactttatta

SEQ ID NO: 304327 - DNA, 19 bp, Homo sapiens
  siRNA target sequence for STEAP2 (NM_152999.2,1248-1266).
caccaagtataggagattt

SEQ ID NO: 304328 - DNA, 19 bp, Homo sapiens
  siRNA target sequence for STEAP2 (NM_152999.2,1286-1304).
ggttacagtgtagaaaaca

SEQ ID NO: 304329 - DNA, 19 bp, Homo sapiens
  siRNA target sequence for STEAP2 (NM_152999.2,1303-1321).
cagcttggattactaagtt

SEQ ID NO: 304330 - DNA, 19 bp, Homo sapiens
  siRNA target sequence for STEAP2 (NM_152999.2,1309-1327).
ggattactaagttttttct

SEQ ID NO: 304331 - DNA, 19 bp, Homo sapiens
  siRNA target sequence for STEAP2 (NM_152999.2,1408-1426).
cagcaggttcatgcaaata

SEQ ID NO: 304332 - DNA, 19 bp, Homo sapiens
  siRNA target sequence for STEAP2 (NM_152999.2,1413-1431).
ggttcatgcaaatattgaa

SEQ ID NO: 304333 - DNA, 19 bp, Homo sapiens
  siRNA target sequence for STEAP2 (NM_152999.2,1546-1564).
gctttaaactggagagaat

SEQ ID NO: 304334 - DNA, 19 bp, Homo sapiens
  siRNA target sequence for STEAP2 (NM_152999.2,1594-1612).
gtcgctctgctcataagta

SEQ ID NO: 304335 - DNA, 19 bp, Homo sapiens
  siRNA target sequence for STEAP2 (NM_152999.2,1596-1614).
cgctctgctcataagtact

SEQ ID NO: 304336 - DNA, 19 bp, Homo sapiens
  siRNA target sequence for STEAP2 (NM_152999.2,1602-1620).
gctcataagtactttccat

SEQ ID NO: 304337 - DNA, 19 bp, Homo sapiens
  siRNA target sequence for STEAP2 (NM_152999.2,1643-1661).
gagcttttgaggaagagta

SEQ ID NO: 304338 - DNA, 19 bp, Homo sapiens
  siRNA target sequence for STEAP2 (NM_152999.2,1651-1669).
gaggaagagtactacagat

SEQ ID NO: 304339 - DNA, 19 bp, Homo sapiens
  siRNA target sequence for STEAP2 (NM_152999.2,1654-1672).
gaagagtactacagatttt

SEQ ID NO: 304340 - DNA, 19 bp, Homo sapiens
  siRNA target sequence for STEAP2 (NM_152999.2,1702-1720).
gttttgccctcaattgtaa

SEQ ID NO: 304341 - DNA, 19 bp, Homo sapiens
  siRNA target sequence for STEAP2 (NM_152999.2,1717-1735).
gtaattctgggtaagatta

SEQ ID NO: 304342 - DNA, 19 bp, Homo sapiens
  siRNA target sequence for TSAP6 (NM_018234.1,174-192).
ctggtggacagcgatagta

SEQ ID NO: 304343 - DNA, 19 bp, Homo sapiens
  siRNA target sequence for TSAP6 (NM_018234.1,379-397).
gctccccggaggtcatctt

SEQ ID NO: 304344 - DNA, 19 bp, Homo sapiens
  siRNA target sequence for TSAP6 (NM_018234.1,380-398).
ctccccggaggtcatcttt

SEQ ID NO: 304345 - DNA, 19 bp, Homo sapiens
  siRNA target sequence for TSAP6 (NM_018234.1,561-579).
gtcaaggccttcaatgtca

SEQ ID NO: 304346 - DNA, 19 bp, Homo sapiens
  siRNA target sequence for TSAP6 (NM_018234.1,1392-1410).
gaggagagccgctacaagt

SEQ ID NO: 304347 - DNA, 19 bp, Homo sapiens
  siRNA target sequence for TSAP6 (NM_018234.1,1395-1413).
gagagccgctacaagttct

SEQ ID NO: 304348 - DNA, 19 bp, Homo sapiens
  siRNA target sequence for TSAP6 (NM_018234.1,1534-1552).
gggagagcaccatcaagtt

SEQ ID NO: 304349 - DNA, 19 bp, Homo sapiens
  siRNA target sequence for TSAP6 (NM_018234.1,1536-1554).
gagagcaccatcaagttca

SEQ ID NO: 304350 - DNA, 19 bp, Homo sapiens
  siRNA target sequence for FLJ10986 (NM_018291.2,449-467).
cgagcagtcagtcaagtta

SEQ ID NO: 304351 - DNA, 19 bp, Homo sapiens
  siRNA target sequence for FLJ10986 (NM_018291.2,450-468).
gagcagtcagtcaagttaa

SEQ ID NO: 304352 - DNA, 19 bp, Homo sapiens
  siRNA target sequence for FLJ10986 (NM_018291.2,582-600).
gggataaggcgggacattt

SEQ ID NO: 304353 - DNA, 19 bp, Homo sapiens
  siRNA target sequence for FLJ10986 (NM_018291.2,584-602).
gataaggcgggacatttct

SEQ ID NO: 304354 - DNA, 19 bp, Homo sapiens
  siRNA target sequence for FLJ10986 (NM_018291.2,589-607).
ggcgggacatttctttgat

SEQ ID NO: 304355 - DNA, 19 bp, Homo sapiens
  siRNA target sequence for FLJ10986 (NM_018291.2,667-685).
ggtgtgtaagtggacatat

SEQ ID NO: 304356 - DNA, 19 bp, Homo sapiens
  siRNA target sequence for FLJ10986 (NM_018291.2,856-874).
ggtcgcagcttcactcatt

SEQ ID NO: 304357 - DNA, 19 bp, Homo sapiens
  siRNA target sequence for FLJ10986 (NM_018291.2,859-877).
cgcagcttcactcattgat

SEQ ID NO: 304358 - DNA, 19 bp, Homo sapiens
  siRNA target sequence for FLJ10986 (NM_018291.2,1006-1024).
caaagacccgatttttgta

SEQ ID NO: 304359 - DNA, 19 bp, Homo sapiens
  siRNA target sequence for FLJ10986 (NM_018291.2,1092-1110).
gcgttactggaaaattgat

SEQ ID NO: 304360 - DNA, 19 bp, Homo sapiens
  siRNA target sequence for FLJ10986 (NM_018291.2,1166-1184).
gccagatgccagagtatat

SEQ ID NO: 304361 - DNA, 19 bp, Homo sapiens
  siRNA target sequence for FLJ10986 (NM_018291.2,1167-1185).
ccagatgccagagtatata

SEQ ID NO: 304362 - DNA, 19 bp, Homo sapiens
  siRNA target sequence for FLJ10986 (NM_018291.2,1168-1186).
cagatgccagagtatatat

SEQ ID NO: 304363 - DNA, 19 bp, Homo sapiens
  siRNA target sequence for FLJ10986 (NM_018291.2,1173-1191).
gccagagtatatatgcata

SEQ ID NO: 304364 - DNA, 19 bp, Homo sapiens
  siRNA target sequence for FLJ10986 (NM_018291.2,1234-1252).
gggtttccttactgttgat

SEQ ID NO: 304365 - DNA, 19 bp, Homo sapiens
  siRNA target sequence for FLJ10986 (NM_018291.2,1319-1337).
gtcaccggattgaaactgt

SEQ ID NO: 304366 - DNA, 19 bp, Homo sapiens
  siRNA target sequence for FLJ10986 (NM_018291.2,1336-1354).
gtctcaggaccttgatgat

SEQ ID NO: 304367 - DNA, 19 bp, Homo sapiens
  siRNA target sequence for FLJ10986 (NM_018291.2,1396-1414).
ggggactcgcttcattata

SEQ ID NO: 304368 - DNA, 19 bp, Homo sapiens
  siRNA target sequence for FLJ10986 (NM_018291.2,1398-1416).
ggactcgcttcattataga

SEQ ID NO: 304369 - DNA, 19 bp, Homo sapiens
  siRNA target sequence for FLJ10986 (NM_018291.2,1399-1417).
gactcgcttcattatagaa

SEQ ID NO: 304370 - DNA, 19 bp, Homo sapiens
  siRNA target sequence for FLJ10986 (NM_018291.2,1430-1448).
gcagggcactcaatcagta

SEQ ID NO: 304371 - DNA, 19 bp, Homo sapiens
  siRNA target sequence for FLJ10986 (NM_018291.2,1440-1458).
caatcagtactcttttcct

SEQ ID NO: 304372 - DNA, 19 bp, Homo sapiens
  siRNA target sequence for FLJ10986 (NM_018291.2,1493-1511).
caaatgcatgcggacatta

SEQ ID NO: 304373 - DNA, 19 bp, Homo sapiens
  siRNA target sequence for FLJ10986 (NM_018291.2,1724-1742).
gagtatttggcgatcatga

SEQ ID NO: 304374 - DNA, 19 bp, Homo sapiens
  siRNA target sequence for KIAA1838 (NM_032448.1,117-135).
gagaggtttgcaaggattt

SEQ ID NO: 304375 - DNA, 19 bp, Homo sapiens
  siRNA target sequence for KIAA1838 (NM_032448.1,164-182).
cagtagtaaatttcaaaga

SEQ ID NO: 304376 - DNA, 19 bp, Homo sapiens
  siRNA target sequence for KIAA1838 (NM_032448.1,192-210).
gcaccaccgaagcaagtat

SEQ ID NO: 304377 - DNA, 19 bp, Homo sapiens
  siRNA target sequence for KIAA1838 (NM_032448.1,248-266).
gttgtctcagatattggta

SEQ ID NO: 304378 - DNA, 19 bp, Homo sapiens
  siRNA target sequence for KIAA1838 (NM_032448.1,292-310).
ggccagtggcgagaatact

SEQ ID NO: 304379 - DNA, 19 bp, Homo sapiens
  siRNA target sequence for KIAA1838 (NM_032448.1,293-311).
gccagtggcgagaatactt

SEQ ID NO: 304380 - DNA, 19 bp, Homo sapiens
  siRNA target sequence for KIAA1838 (NM_032448.1,294-312).
ccagtggcgagaatacttt

SEQ ID NO: 304381 - DNA, 19 bp, Homo sapiens
  siRNA target sequence for KIAA1838 (NM_032448.1,349-367).
gctgggatcaagttgatat

SEQ ID NO: 304382 - DNA, 19 bp, Homo sapiens
  siRNA target sequence for KIAA1838 (NM_032448.1,487-505).
ggcagaaatatgttcttca

SEQ ID NO: 304383 - DNA, 19 bp, Homo sapiens
  siRNA target sequence for KIAA1838 (NM_032448.1,639-657).
ggaagacactgattaccta

SEQ ID NO: 304384 - DNA, 19 bp, Homo sapiens
  siRNA target sequence for KIAA1838 (NM_032448.1,647-665).
ctgattacctaatctatga

SEQ ID NO: 304385 - DNA, 19 bp, Homo sapiens
  siRNA target sequence for KIAA1838 (NM_032448.1,664-682).
gacacttgtccctactttt

SEQ ID NO: 304386 - DNA, 19 bp, Homo sapiens
  siRNA target sequence for KIAA1838 (NM_032448.1,790-808).
ctccttggcaacgacataa

SEQ ID NO: 304387 - DNA, 19 bp, Homo sapiens
  siRNA target sequence for KIAA1838 (NM_032448.1,810-828).
cccagagggcatgtttgaa

SEQ ID NO: 304388 - DNA, 19 bp, Homo sapiens
  siRNA target sequence for KIAA1838 (NM_032448.1,830-848).
gctttaggtacaaatgctt

SEQ ID NO: 304389 - DNA, 19 bp, Homo sapiens
  siRNA target sequence for KIAA1838 (NM_032448.1,831-849).
ctttaggtacaaatgctta

SEQ ID NO: 304390 - DNA, 19 bp, Homo sapiens
  siRNA target sequence for KIAA1838 (NM_032448.1,851-869).
cgtcctacacctctgtaaa

SEQ ID NO: 304391 - DNA, 19 bp, Homo sapiens
  siRNA target sequence for KIAA1838 (NM_032448.1,860-878).
cctctgtaaaagagaactt

SEQ ID NO: 304392 - DNA, 19 bp, Homo sapiens
  siRNA target sequence for KIAA1838 (NM_032448.1,865-883).
gtaaaagagaactttgaca

SEQ ID NO: 304393 - DNA, 19 bp, Homo sapiens
  siRNA target sequence for KIAA1838 (NM_032448.1,907-925).
gtgtcagaccatatatcga

SEQ ID NO: 304394 - DNA, 19 bp, Homo sapiens
  siRNA target sequence for KIAA1838 (NM_032448.1,909-927).
gtcagaccatatatcgaaa

SEQ ID NO: 304395 - DNA, 19 bp, Homo sapiens
  siRNA target sequence for KIAA1838 (NM_032448.1,915-933).
ccatatatcgaaagttctt

SEQ ID NO: 304396 - DNA, 19 bp, Homo sapiens
  siRNA target sequence for KIAA1838 (NM_032448.1,923-941).
cgaaagttctttacttgta

SEQ ID NO: 304397 - DNA, 19 bp, Homo sapiens
  siRNA target sequence for KIAA1838 (NM_032448.1,980-998).
gaccaaacaaagctctttt

SEQ ID NO: 304398 - DNA, 19 bp, Homo sapiens
  siRNA target sequence for KIAA1838 (NM_032448.1,1060-1078).
cccaaaggtgtaataactt

SEQ ID NO: 304399 - DNA, 19 bp, Homo sapiens
  siRNA target sequence for KIAA1838 (NM_032448.1,1061-1079).
ccaaaggtgtaataacttt

SEQ ID NO: 304400 - DNA, 19 bp, Homo sapiens
  siRNA target sequence for KIAA1838 (NM_032448.1,1570-1588).
cggacagaccctgaatcta

SEQ ID NO: 304401 - DNA, 19 bp, Homo sapiens
  siRNA target sequence for KIAA1838 (NM_032448.1,1634-1652).
ccatatgtacagatcctat

SEQ ID NO: 304402 - DNA, 19 bp, Homo sapiens
  siRNA target sequence for KIAA1838 (NM_032448.1,1676-1694).
gtacacacgctgaaatcaa

SEQ ID NO: 304403 - DNA, 19 bp, Homo sapiens
  siRNA target sequence for KIAA1838 (NM_032448.1,1679-1697).
cacacgctgaaatcaatca

SEQ ID NO: 304404 - DNA, 19 bp, Homo sapiens
  siRNA target sequence for KIAA1838 (NM_032448.1,1708-1726).
gtagcaacagattttgaat

SEQ ID NO: 304405 - DNA, 19 bp, Homo sapiens
  siRNA target sequence for KIAA1838 (NM_032448.1,1746-1764).
gtgtacaaaccctgaaatt

SEQ ID NO: 304406 - DNA, 19 bp, Homo sapiens
  siRNA target sequence for KIAA1838 (NM_032448.1,1748-1766).
gtacaaaccctgaaattaa

SEQ ID NO: 304407 - DNA, 19 bp, Homo sapiens
  siRNA target sequence for KIAA1838 (NM_032448.1,1788-1806).
ggggcctgaagtaaagcaa

SEQ ID NO: 304408 - DNA, 19 bp, Homo sapiens
  siRNA target sequence for KIAA1838 (NM_032448.1,1795-1813).
gaagtaaagcaacaagtaa

SEQ ID NO: 304409 - DNA, 19 bp, Homo sapiens
  siRNA target sequence for KIAA1838 (NM_032448.1,1804-1822).
caacaagtaaccatggttt

SEQ ID NO: 304410 - DNA, 19 bp, Homo sapiens
  siRNA target sequence for KIAA1838 (NM_032448.1,1836-1854).
cttaaaggttgctagaaca

SEQ ID NO: 304411 - DNA, 19 bp, Homo sapiens
  siRNA target sequence for KIAA1838 (NM_032448.1,1917-1935).
cagcaacaccctagaagat

SEQ ID NO: 304412 - DNA, 19 bp, Homo sapiens
  siRNA target sequence for KIAA1838 (NM_032448.1,2047-2065).
gtcaaggagtggtttgtgt

SEQ ID NO: 304413 - DNA, 19 bp, Homo sapiens
  siRNA target sequence for KIAA1838 (NM_032448.1,2049-2067).
caaggagtggtttgtgtat

SEQ ID NO: 304414 - DNA, 19 bp, Homo sapiens
  siRNA target sequence for KIAA1838 (NM_032448.1,2125-2143).
gggggaacgcctagtttga

SEQ ID NO: 304415 - DNA, 19 bp, Homo sapiens
  siRNA target sequence for KIAA1838 (NM_032448.1,2126-2144).
ggggaacgcctagtttgaa

SEQ ID NO: 304416 - DNA, 19 bp, Homo sapiens
  siRNA target sequence for KIAA1838 (NM_032448.1,2127-2145).
gggaacgcctagtttgaaa

SEQ ID NO: 304417 - DNA, 19 bp, Homo sapiens
  siRNA target sequence for KIAA1838 (NM_032448.1,2128-2146).
ggaacgcctagtttgaaaa

SEQ ID NO: 304418 - DNA, 19 bp, Homo sapiens
  siRNA target sequence for KIAA1838 (NM_032448.1,2132-2150).
cgcctagtttgaaaatatt

SEQ ID NO: 304419 - DNA, 19 bp, Homo sapiens
  siRNA target sequence for KIAA1838 (NM_032448.1,2133-2151).
gcctagtttgaaaatatta

SEQ ID NO: 304420 - DNA, 19 bp, Homo sapiens
  siRNA target sequence for KIAA1838 (NM_032448.1,2369-2387).
cctcgcagcttgtaaatct

SEQ ID NO: 304421 - DNA, 19 bp, Homo sapiens
  siRNA target sequence for KIAA1838 (NM_032448.1,2370-2388).
ctcgcagcttgtaaatcta

SEQ ID NO: 304422 - DNA, 19 bp, Homo sapiens
  siRNA target sequence for KIAA1838 (NM_032448.1,2372-2390).
cgcagcttgtaaatctaca

SEQ ID NO: 304423 - DNA, 19 bp, Homo sapiens
  siRNA target sequence for KIAA1838 (NM_032448.1,2386-2404).
ctacagcctgattacatca

SEQ ID NO: 304424 - DNA, 19 bp, Homo sapiens
  siRNA target sequence for KIAA1838 (NM_032448.1,2450-2468).
ccactctggttttagtcaa

SEQ ID NO: 304425 - DNA, 19 bp, Homo sapiens
  siRNA target sequence for KIAA1838 (NM_032448.1,2486-2504).
cctggaagacgagtgattt

SEQ ID NO: 304426 - DNA, 19 bp, Homo sapiens
  siRNA target sequence for KIAA1838 (NM_032448.1,2489-2507).
ggaagacgagtgatttcat

SEQ ID NO: 304427 - DNA, 19 bp, Homo sapiens
  siRNA target sequence for KIAA1838 (NM_032448.1,2518-2536).
gtatttgacgggaagcttt

SEQ ID NO: 304428 - DNA, 19 bp, Homo sapiens
  siRNA target sequence for KIAA1838 (NM_032448.1,2577-2595).
ggaggttcttttagaacaa

SEQ ID NO: 304429 - DNA, 19 bp, Homo sapiens
  siRNA target sequence for KIAA1838 (NM_032448.1,2580-2598).
ggttcttttagaacaaaat

SEQ ID NO: 304430 - DNA, 19 bp, Homo sapiens
  siRNA target sequence for MGC40579 (NM_152776.1,249-267).
gcgtgcagaaggtagaaaa

SEQ ID NO: 304431 - DNA, 19 bp, Homo sapiens
  siRNA target sequence for MGC40579 (NM_152776.1,250-268).
cgtgcagaaggtagaaaat

SEQ ID NO: 304432 - DNA, 19 bp, Homo sapiens
  siRNA target sequence for MGC40579 (NM_152776.1,320-338).
caatttgttgccgtaataa

SEQ ID NO: 304433 - DNA, 19 bp, Homo sapiens
  siRNA target sequence for MGC40579 (NM_152776.1,479-497).
gctgttgaacttgtaaaat

SEQ ID NO: 304434 - DNA, 19 bp, Homo sapiens
  siRNA target sequence for MGC40579 (NM_152776.1,482-500).
gttgaacttgtaaaatctt

SEQ ID NO: 304435 - DNA, 19 bp, Homo sapiens
  siRNA target sequence for MGC40579 (NM_152776.1,537-555).
cttgccgagtgcttcactt

SEQ ID NO: 304436 - DNA, 19 bp, Homo sapiens
  siRNA target sequence for MGC40579 (NM_152776.1,540-558).
gccgagtgcttcacttttt

SEQ ID NO: 304437 - DNA, 19 bp, Homo sapiens
  siRNA target sequence for MGC40579 (NM_152776.1,542-560).
cgagtgcttcactttttca

SEQ ID NO: 304438 - DNA, 19 bp, Homo sapiens
  siRNA target sequence for MGC40579 (NM_152776.1,545-563).
gtgcttcactttttcacta

SEQ ID NO: 304439 - DNA, 19 bp, Homo sapiens
  siRNA target sequence for MGC40579 (NM_152776.1,548-566).
cttcactttttcactagaa

SEQ ID NO: 304440 - DNA, 19 bp, Homo sapiens
  siRNA target sequence for MGC40579 (NM_152776.1,561-579).
ctagaagtaaacgactttt

SEQ ID NO: 304441 - DNA, 19 bp, Homo sapiens
  siRNA target sequence for MGC40579 (NM_152776.1,584-602).
gccagtttgttcactttca

SEQ ID NO: 304442 - DNA, 19 bp, Homo sapiens
  siRNA target sequence for MGC40579 (NM_152776.1,701-719).
gatacctggttgttatata

SEQ ID NO: 304443 - DNA, 19 bp, Homo sapiens
  siRNA target sequence for MGC40579 (NM_152776.1,721-739).
gctcacaaaaggttctgta

SEQ ID NO: 304444 - DNA, 19 bp, Homo sapiens
  siRNA target sequence for MGC40579 (NM_152776.1,773-791).
ggactttttgacccatata

SEQ ID NO: 304445 - DNA, 19 bp, Homo sapiens
  siRNA target sequence for MGC40579 (NM_152776.1,776-794).
ctttttgacccatataaga

SEQ ID NO: 304446 - DNA, 19 bp, Homo sapiens
  siRNA target sequence for MGC40579 (NM_152776.1,806-824).
gggatgattacctctctaa

SEQ ID NO: 304447 - DNA, 19 bp, Homo sapiens
  siRNA target sequence for MGC40579 (NM_152776.1,807-825).
ggatgattacctctctaat

SEQ ID NO: 304448 - DNA, 19 bp, Homo sapiens
  siRNA target sequence for MGC40579 (NM_152776.1,858-876).
gggacacaagccacaattt

SEQ ID NO: 304449 - DNA, 19 bp, Homo sapiens
  siRNA target sequence for MGC40579 (NM_152776.1,862-880).
cacaagccacaattttgga

SEQ ID NO: 304450 - DNA, 19 bp, Homo sapiens
  siRNA target sequence for MGC40579 (NM_152776.1,914-932).
ccaatagttgccttgttaa

SEQ ID NO: 304451 - DNA, 19 bp, Homo sapiens
  siRNA target sequence for MGC40579 (NM_152776.1,915-933).
caatagttgccttgttaaa

SEQ ID NO: 304452 - DNA, 19 bp, Homo sapiens
  siRNA target sequence for MGC40579 (NM_152776.1,928-946).
gttaaaggtccctggatat

SEQ ID NO: 304453 - DNA, 19 bp, Homo sapiens
  siRNA target sequence for MGC40579 (NM_152776.1,947-965).
gaccagaatatctgctata

SEQ ID NO: 304454 - DNA, 19 bp, Homo sapiens
  siRNA target sequence for MGC40579 (NM_152776.1,981-999).
ccattgagccagtattcta

SEQ ID NO: 304455 - DNA, 19 bp, Homo sapiens
  siRNA target sequence for KIAA0992 (NM_016081.2,398-416).
gagatctcgcagattttca

SEQ ID NO: 304456 - DNA, 19 bp, Homo sapiens
  siRNA target sequence for KIAA0992 (NM_016081.2,400-418).
gatctcgcagattttcagt

SEQ ID NO: 304457 - DNA, 19 bp, Homo sapiens
  siRNA target sequence for KIAA0992 (NM_016081.2,406-424).
gcagattttcagtacttct

SEQ ID NO: 304458 - DNA, 19 bp, Homo sapiens
  siRNA target sequence for KIAA0992 (NM_016081.2,450-468).
cccataaggagaccaaatt

SEQ ID NO: 304459 - DNA, 19 bp, Homo sapiens
  siRNA target sequence for KIAA0992 (NM_016081.2,536-554).
caaactaagagtatctctt

SEQ ID NO: 304460 - DNA, 19 bp, Homo sapiens
  siRNA target sequence for KIAA0992 (NM_016081.2,632-650).
gaaaagcgtggtgcaaaaa

SEQ ID NO: 304461 - DNA, 19 bp, Homo sapiens
  siRNA target sequence for KIAA0992 (NM_016081.2,651-669).
ctcccagcacaaacgtaaa

SEQ ID NO: 304462 - DNA, 19 bp, Homo sapiens
  siRNA target sequence for KIAA0992 (NM_016081.2,670-688).
gcccaaaacgccacatcaa

SEQ ID NO: 304463 - DNA, 19 bp, Homo sapiens
  siRNA target sequence for KIAA0992 (NM_016081.2,671-689).
cccaaaacgccacatcaaa

SEQ ID NO: 304464 - DNA, 19 bp, Homo sapiens
  siRNA target sequence for KIAA0992 (NM_016081.2,673-691).
caaaacgccacatcaaaga

SEQ ID NO: 304465 - DNA, 19 bp, Homo sapiens
  siRNA target sequence for KIAA0992 (NM_016081.2,715-733).
gtgtgacaaggcagctaat

SEQ ID NO: 304466 - DNA, 19 bp, Homo sapiens
  siRNA target sequence for KIAA0992 (NM_016081.2,719-737).
gacaaggcagctaatttaa

SEQ ID NO: 304467 - DNA, 19 bp, Homo sapiens
  siRNA target sequence for KIAA0992 (NM_016081.2,742-760).
ggagctaacatccatattt

SEQ ID NO: 304468 - DNA, 19 bp, Homo sapiens
  siRNA target sequence for KIAA0992 (NM_016081.2,745-763).
gctaacatccatatttaaa

SEQ ID NO: 304469 - DNA, 19 bp, Homo sapiens
  siRNA target sequence for KIAA0992 (NM_016081.2,818-836).
gggtacctgtctcctaaaa

SEQ ID NO: 304470 - DNA, 19 bp, Homo sapiens
  siRNA target sequence for KIAA0992 (NM_016081.2,1014-1032).
cagctgcacctcgattcat

SEQ ID NO: 304471 - DNA, 19 bp, Homo sapiens
  siRNA target sequence for KIAA0992 (NM_016081.2,1019-1037).
gcacctcgattcatccaaa

SEQ ID NO: 304472 - DNA, 19 bp, Homo sapiens
  siRNA target sequence for KIAA0992 (NM_016081.2,1020-1038).
cacctcgattcatccaaaa

SEQ ID NO: 304473 - DNA, 19 bp, Homo sapiens
  siRNA target sequence for KIAA0992 (NM_016081.2,1023-1041).
ctcgattcatccaaaagct

SEQ ID NO: 304474 - DNA, 19 bp, Homo sapiens
  siRNA target sequence for KIAA0992 (NM_016081.2,1059-1077).
cagaagggagccgagttta

SEQ ID NO: 304475 - DNA, 19 bp, Homo sapiens
  siRNA target sequence for KIAA0992 (NM_016081.2,1144-1162).
gcacaacactcctgatatt

SEQ ID NO: 304476 - DNA, 19 bp, Homo sapiens
  siRNA target sequence for KIAA0992 (NM_016081.2,1147-1165).
caacactcctgatattcaa

SEQ ID NO: 304477 - DNA, 19 bp, Homo sapiens
  siRNA target sequence for KIAA0992 (NM_016081.2,1186-1204).
cctccataccctgatcata

SEQ ID NO: 304478 - DNA, 19 bp, Homo sapiens
  siRNA target sequence for KIAA0992 (NM_016081.2,1237-1255).
cacctgtttggctacgaat

SEQ ID NO: 304479 - DNA, 19 bp, Homo sapiens
  siRNA target sequence for KIAA0992 (NM_016081.2,1261-1279).
cggctcagacacaacatct

SEQ ID NO: 304480 - DNA, 19 bp, Homo sapiens
  siRNA target sequence for KIAA0992 (NM_016081.2,1298-1316).
ggtgccagttcaacagatt

SEQ ID NO: 304481 - DNA, 19 bp, Homo sapiens
  siRNA target sequence for KIAA0992 (NM_016081.2,1319-1337).
gacagtgaaagtttagctt

SEQ ID NO: 304482 - DNA, 19 bp, Homo sapiens
  siRNA target sequence for KIAA0992 (NM_016081.2,1388-1406).
gtttccttgacaataggat

SEQ ID NO: 304483 - DNA, 19 bp, Homo sapiens
  siRNA target sequence for KIAA0992 (NM_016081.2,1393-1411).
cttgacaataggatcatca

SEQ ID NO: 304484 - DNA, 19 bp, Homo sapiens
  siRNA target sequence for KIAA0992 (NM_016081.2,1396-1414).
gacaataggatcatcatct

SEQ ID NO: 304485 - DNA, 19 bp, Homo sapiens
  siRNA target sequence for KIAA0992 (NM_016081.2,1429-1447).
gaccacagctgtgattcaa

SEQ ID NO: 304486 - DNA, 19 bp, Homo sapiens
  siRNA target sequence for KIAA0992 (NM_016081.2,1638-1656).
ggcaagggagtgaaatcca

SEQ ID NO: 304487 - DNA, 19 bp, Homo sapiens
  siRNA target sequence for KIAA0992 (NM_016081.2,1665-1683).
cagatttccgaattctaca

SEQ ID NO: 304488 - DNA, 19 bp, Homo sapiens
  siRNA target sequence for KIAA0992 (NM_016081.2,1684-1702).
gaaaaaacctagatctaca

SEQ ID NO: 304489 - DNA, 19 bp, Homo sapiens
  siRNA target sequence for KIAA0992 (NM_016081.2,1754-1772).
gatgcagggatctttacat

SEQ ID NO: 304490 - DNA, 19 bp, Homo sapiens
  siRNA target sequence for KIAA0992 (NM_016081.2,1757-1775).
gcagggatctttacatgtt

SEQ ID NO: 304491 - DNA, 19 bp, Homo sapiens
  siRNA target sequence for KIAA0992 (NM_016081.2,1910-1928).
ccaatcttggagacaagtt

SEQ ID NO: 304492 - DNA, 19 bp, Homo sapiens
  siRNA target sequence for KIAA0992 (NM_016081.2,2003-2021).
gcccttcaaatgcaattca

SEQ ID NO: 304493 - DNA, 19 bp, Homo sapiens
  siRNA target sequence for KIAA0992 (NM_016081.2,2004-2022).
cccttcaaatgcaattcaa

SEQ ID NO: 304494 - DNA, 19 bp, Homo sapiens
  siRNA target sequence for KIAA0992 (NM_016081.2,2056-2074).
cagccgtggagtaaatgga

SEQ ID NO: 304495 - DNA, 19 bp, Homo sapiens
  siRNA target sequence for KIAA0992 (NM_016081.2,2064-2082).
gagtaaatggactgattaa

SEQ ID NO: 304496 - DNA, 19 bp, Homo sapiens
  siRNA target sequence for KIAA0992 (NM_016081.2,2075-2093).
ctgattaacggcaaagcta

SEQ ID NO: 304497 - DNA, 19 bp, Homo sapiens
  siRNA target sequence for KIAA0992 (NM_016081.2,2083-2101).
cggcaaagctaacagtaat

SEQ ID NO: 304498 - DNA, 19 bp, Homo sapiens
  siRNA target sequence for KIAA0992 (NM_016081.2,2091-2109).
ctaacagtaataaatctct

SEQ ID NO: 304499 - DNA, 19 bp, Homo sapiens
  siRNA target sequence for KIAA0992 (NM_016081.2,2153-2171).
cctctgcttgccaaaccaa

SEQ ID NO: 304500 - DNA, 19 bp, Homo sapiens
  siRNA target sequence for KIAA0992 (NM_016081.2,2158-2176).
gcttgccaaaccaaaacta

SEQ ID NO: 304501 - DNA, 19 bp, Homo sapiens
  siRNA target sequence for KIAA0992 (NM_016081.2,2163-2181).
ccaaaccaaaactaggatt

SEQ ID NO: 304502 - DNA, 19 bp, Homo sapiens
  siRNA target sequence for KIAA0992 (NM_016081.2,2194-2212).
cagtagaactgctagaata

SEQ ID NO: 304503 - DNA, 19 bp, Homo sapiens
  siRNA target sequence for KIAA0992 (NM_016081.2,2235-2253).
gcacaaaggatgctgttat

SEQ ID NO: 304504 - DNA, 19 bp, Homo sapiens
  siRNA target sequence for KIAA0992 (NM_016081.2,2304-2322).
gccagccgaggttaacata

SEQ ID NO: 304505 - DNA, 19 bp, Homo sapiens
  siRNA target sequence for KIAA0992 (NM_016081.2,2308-2326).
gccgaggttaacatacgaa

SEQ ID NO: 304506 - DNA, 19 bp, Homo sapiens
  siRNA target sequence for KIAA0992 (NM_016081.2,2359-2377).
cagtgcaactgtctttaat

SEQ ID NO: 304507 - DNA, 19 bp, Homo sapiens
  siRNA target sequence for KIAA0992 (NM_016081.2,2400-2418).
cagctaatcaggaatacaa

SEQ ID NO: 304508 - DNA, 19 bp, Homo sapiens
  siRNA target sequence for KIAA0992 (NM_016081.2,2473-2491).
gtctcctgtggatgaatca

SEQ ID NO: 304509 - DNA, 19 bp, Homo sapiens
  siRNA target sequence for KIAA0992 (NM_016081.2,2532-2550).
gaatggcaccattctttga

SEQ ID NO: 304510 - DNA, 19 bp, Homo sapiens
  siRNA target sequence for KIAA0992 (NM_016081.2,2538-2556).
caccattctttgagatgaa

SEQ ID NO: 304511 - DNA, 19 bp, Homo sapiens
  siRNA target sequence for KIAA0992 (NM_016081.2,2588-2606).
ccagtaactttcacatgta

SEQ ID NO: 304512 - DNA, 19 bp, Homo sapiens
  siRNA target sequence for KIAA0992 (NM_016081.2,2626-2644).
gccaaagatctattggttt

SEQ ID NO: 304513 - DNA, 19 bp, Homo sapiens
  siRNA target sequence for KIAA0992 (NM_016081.2,2632-2650).
gatctattggtttaaagat

SEQ ID NO: 304514 - DNA, 19 bp, Homo sapiens
  siRNA target sequence for KIAA0992 (NM_016081.2,2680-2698).
ctacaccattcaaagagat

SEQ ID NO: 304515 - DNA, 19 bp, Homo sapiens
  siRNA target sequence for KIAA0992 (NM_016081.2,2727-2745).
cagcctccaccctagatga

SEQ ID NO: 304516 - DNA, 19 bp, Homo sapiens
  siRNA target sequence for KIAA0992 (NM_016081.2,2796-2814).
gtactggacggctaatggt

SEQ ID NO: 304517 - DNA, 19 bp, Homo sapiens
  siRNA target sequence for KIAA0992 (NM_016081.2,2813-2831).
gtacaggctgtcaaccaaa

SEQ ID NO: 304518 - DNA, 19 bp, Homo sapiens
  siRNA target sequence for KIAA0992 (NM_016081.2,2904-2922).
gagacgaaaatgaaccaat

SEQ ID NO: 304519 - DNA, 19 bp, Homo sapiens
  siRNA target sequence for KIAA0992 (NM_016081.2,2975-2993).
gttcaagaaggaaaactct

SEQ ID NO: 304520 - DNA, 19 bp, Homo sapiens
  siRNA target sequence for KIAA0992 (NM_016081.2,3039-3057).
gctggcaactagatggaaa

SEQ ID NO: 304521 - DNA, 19 bp, Homo sapiens
  siRNA target sequence for KIAA0992 (NM_016081.2,3069-3087).
ctgacagtgctcacaagat

SEQ ID NO: 304522 - DNA, 19 bp, Homo sapiens
  siRNA target sequence for KIAA0992 (NM_016081.2,3105-3123).
gggtgcactctctgatcat

SEQ ID NO: 304523 - DNA, 19 bp, Homo sapiens
  siRNA target sequence for KIAA0992 (NM_016081.2,3106-3124).
ggtgcactctctgatcata

SEQ ID NO: 304524 - DNA, 19 bp, Homo sapiens
  siRNA target sequence for KIAA0992 (NM_016081.2,3140-3158).
cgtgatgccggcatctaca

SEQ ID NO: 304525 - DNA, 19 bp, Homo sapiens
  siRNA target sequence for KIAA0992 (NM_016081.2,3146-3164).
gccggcatctacacatgta

SEQ ID NO: 304526 - DNA, 19 bp, Homo sapiens
  siRNA target sequence for KIAA0992 (NM_016081.2,3148-3166).
cggcatctacacatgtata

SEQ ID NO: 304527 - DNA, 19 bp, Homo sapiens
  siRNA target sequence for KIAA0992 (NM_016081.2,3176-3194).
cgagcaggacagaactcat

SEQ ID NO: 304528 - DNA, 19 bp, Homo sapiens
  siRNA target sequence for KIAA0992 (NM_016081.2,3177-3195).
gagcaggacagaactcatt

SEQ ID NO: 304529 - DNA, 19 bp, Homo sapiens
  siRNA target sequence for KIAA0992 (NM_016081.2,3232-3250).
caaaccccctgtgtttatt

SEQ ID NO: 304530 - DNA, 19 bp, Homo sapiens
  siRNA target sequence for KIAA0992 (NM_016081.2,3323-3341).
ccacctcagatattttgga

SEQ ID NO: 304531 - DNA, 19 bp, Homo sapiens
  siRNA target sequence for KIAA0992 (NM_016081.2,3324-3342).
cacctcagatattttggaa

SEQ ID NO: 304532 - DNA, 19 bp, Homo sapiens
  siRNA target sequence for KIAA0992 (NM_016081.2,3421-3439).
cattcagggagccacaaaa

SEQ ID NO: 304533 - DNA, 19 bp, Homo sapiens
  siRNA target sequence for KIAA0992 (NM_016081.2,3500-3518).
gccaggctggacgtttaca

SEQ ID NO: 304534 - DNA, 19 bp, Homo sapiens
  siRNA target sequence for KIAA0992 (NM_016081.2,3501-3519).
ccaggctggacgtttacat

SEQ ID NO: 304535 - DNA, 19 bp, Homo sapiens
  siRNA target sequence for KIAA0992 (NM_016081.2,3502-3520).
caggctggacgtttacatt

SEQ ID NO: 304536 - DNA, 19 bp, Homo sapiens
  siRNA target sequence for KIAA0992 (NM_016081.2,3505-3523).
gctggacgtttacatttct

SEQ ID NO: 304537 - DNA, 19 bp, Homo sapiens
  siRNA target sequence for WFS1 (NM_006005.2,236-254).
ggcgcgttcccgactcaat

SEQ ID NO: 304538 - DNA, 19 bp, Homo sapiens
  siRNA target sequence for WFS1 (NM_006005.2,514-532).
gcgacacggatgaagaact

SEQ ID NO: 304539 - DNA, 19 bp, Homo sapiens
  siRNA target sequence for WFS1 (NM_006005.2,705-723).
gcagccctggtcatgtact

SEQ ID NO: 304540 - DNA, 19 bp, Homo sapiens
  siRNA target sequence for WFS1 (NM_006005.2,874-892).
gcagcgagtccaagaacta

SEQ ID NO: 304541 - DNA, 19 bp, Homo sapiens
  siRNA target sequence for WFS1 (NM_006005.2,877-895).
gcgagtccaagaactacat

SEQ ID NO: 304542 - DNA, 19 bp, Homo sapiens
  siRNA target sequence for WFS1 (NM_006005.2,893-911).
catcgcgctggatgacttt

SEQ ID NO: 304543 - DNA, 19 bp, Homo sapiens
  siRNA target sequence for WFS1 (NM_006005.2,1695-1713).
gtctacctgctctatctct

SEQ ID NO: 304544 - DNA, 19 bp, Homo sapiens
  siRNA target sequence for WFS1 (NM_006005.2,2102-2120).
gctgttctgctggttctat

SEQ ID NO: 304545 - DNA, 19 bp, Homo sapiens
  siRNA target sequence for WFS1 (NM_006005.2,2317-2335).
ccgagtctgccatcaacat

SEQ ID NO: 304546 - DNA, 19 bp, Homo sapiens
  siRNA target sequence for WFS1 (NM_006005.2,2477-2495).
gttcgaccgctacaagttt

SEQ ID NO: 304547 - DNA, 19 bp, Homo sapiens
  siRNA target sequence for WFS1 (NM_006005.2,2483-2501).
ccgctacaagtttgagatt

SEQ ID NO: 304548 - DNA, 19 bp, Homo sapiens
  siRNA target sequence for WFS1 (NM_006005.2,2740-2758).
ccaggcggcacgtgaagat

SEQ ID NO: 304549 - DNA, 19 bp, Homo sapiens
  siRNA target sequence for WFS1 (NM_006005.2,2798-2816).
gttcgccttcgacttcttt

SEQ ID NO: 304550 - DNA, 19 bp, Homo sapiens
  siRNA target sequence for WFS1 (NM_006005.2,2802-2820).
gccttcgacttctttttct

SEQ ID NO: 304551 - DNA, 19 bp, Homo sapiens
  siRNA target sequence for CDT6 (NM_021146.2,528-546).
gatgctgagagcaagtact

SEQ ID NO: 304552 - DNA, 19 bp, Homo sapiens
  siRNA target sequence for CDT6 (NM_021146.2,547-565).
ccgagatgaacaaccaaat

SEQ ID NO: 304553 - DNA, 19 bp, Homo sapiens
  siRNA target sequence for CDT6 (NM_021146.2,548-566).
cgagatgaacaaccaaatt

SEQ ID NO: 304554 - DNA, 19 bp, Homo sapiens
  siRNA target sequence for CDT6 (NM_021146.2,657-675).
cgcatctctggagtgtata

SEQ ID NO: 304555 - DNA, 19 bp, Homo sapiens
  siRNA target sequence for CDT6 (NM_021146.2,847-865).
ggctggggaacgaacacat

SEQ ID NO: 304556 - DNA, 19 bp, Homo sapiens
  siRNA target sequence for CDT6 (NM_021146.2,889-907).
cccggctgcgtgtagagat

SEQ ID NO: 304557 - DNA, 19 bp, Homo sapiens
  siRNA target sequence for CDT6 (NM_021146.2,926-944).
cctgcgctacgctgagtat

SEQ ID NO: 304558 - DNA, 19 bp, Homo sapiens
  siRNA target sequence for CDT6 (NM_021146.2,939-957).
gagtatagccactttgttt

SEQ ID NO: 304559 - DNA, 19 bp, Homo sapiens
  siRNA target sequence for CDT6 (NM_021146.2,1019-1037).
cgacgccctccagtatcat

SEQ ID NO: 304560 - DNA, 19 bp, Homo sapiens
  siRNA target sequence for CDT6 (NM_021146.2,1020-1038).
gacgccctccagtatcata

SEQ ID NO: 304561 - DNA, 19 bp, Homo sapiens
  siRNA target sequence for CDT6 (NM_021146.2,1110-1128).
ggtggctactggtacaact

SEQ ID NO: 304562 - DNA, 19 bp, Homo sapiens
  siRNA target sequence for MTL5 (NM_004923.2,234-252).
cgttcgcttcggagaacat

SEQ ID NO: 304563 - DNA, 19 bp, Homo sapiens
  siRNA target sequence for MTL5 (NM_004923.2,286-304).
cgagttccacgtcttcaaa

SEQ ID NO: 304564 - DNA, 19 bp, Homo sapiens
  siRNA target sequence for MTL5 (NM_004923.2,637-655).
ggaagcaggtggtactact

SEQ ID NO: 304565 - DNA, 19 bp, Homo sapiens
  siRNA target sequence for MTL5 (NM_004923.2,678-696).
caactttgcagaatcttct

SEQ ID NO: 304566 - DNA, 19 bp, Homo sapiens
  siRNA target sequence for MTL5 (NM_004923.2,723-741).
catcgtcccaggaactaga

SEQ ID NO: 304567 - DNA, 19 bp, Homo sapiens
  siRNA target sequence for MTL5 (NM_004923.2,818-836).
ctatgtatagacaattcta

SEQ ID NO: 304568 - DNA, 19 bp, Homo sapiens
  siRNA target sequence for MTL5 (NM_004923.2,872-890).
cagtatcaagatcaaaata

SEQ ID NO: 304569 - DNA, 19 bp, Homo sapiens
  siRNA target sequence for MTL5 (NM_004923.2,927-945).
ctttagtagggagattttt

SEQ ID NO: 304570 - DNA, 19 bp, Homo sapiens
  siRNA target sequence for MTL5 (NM_004923.2,983-1001).
cttgagggagccttaccat

SEQ ID NO: 304571 - DNA, 19 bp, Homo sapiens
  siRNA target sequence for MTL5 (NM_004923.2,993-1011).
ccttaccatcggtagtcaa

SEQ ID NO: 304572 - DNA, 19 bp, Homo sapiens
  siRNA target sequence for MTL5 (NM_004923.2,1024-1042).
cccctcgggatcaactctt

SEQ ID NO: 304573 - DNA, 19 bp, Homo sapiens
  siRNA target sequence for MTL5 (NM_004923.2,1131-1149).
gcaacaacttgcatcatga

SEQ ID NO: 304574 - DNA, 19 bp, Homo sapiens
  siRNA target sequence for MTL5 (NM_004923.2,1132-1150).
caacaacttgcatcatgat

SEQ ID NO: 304575 - DNA, 19 bp, Homo sapiens
  siRNA target sequence for MTL5 (NM_004923.2,1135-1153).
caacttgcatcatgatatt

SEQ ID NO: 304576 - DNA, 19 bp, Homo sapiens
  siRNA target sequence for MTL5 (NM_004923.2,1223-1241).
ggccaattgggcaatgtca

SEQ ID NO: 304577 - DNA, 19 bp, Homo sapiens
  siRNA target sequence for MTL5 (NM_004923.2,1278-1296).
caggctgcctgaagaatta

SEQ ID NO: 304578 - DNA, 19 bp, Homo sapiens
  siRNA target sequence for MTL5 (NM_004923.2,1313-1331).
gcccaaattatgtgttctt

SEQ ID NO: 304579 - DNA, 19 bp, Homo sapiens
  siRNA target sequence for MTL5 (NM_004923.2,1373-1391).
ccagaacgaaagacactaa

SEQ ID NO: 304580 - DNA, 19 bp, Homo sapiens
  siRNA target sequence for PDLIM1 (NM_020992.2,219-237).
gcaaggcggctctagctaa

SEQ ID NO: 304581 - DNA, 19 bp, Homo sapiens
  siRNA target sequence for PDLIM1 (NM_020992.2,220-238).
caaggcggctctagctaat

SEQ ID NO: 304582 - DNA, 19 bp, Homo sapiens
  siRNA target sequence for PDLIM1 (NM_020992.2,223-241).
ggcggctctagctaattta

SEQ ID NO: 304583 - DNA, 19 bp, Homo sapiens
  siRNA target sequence for PDLIM1 (NM_020992.2,224-242).
gcggctctagctaatttat

SEQ ID NO: 304584 - DNA, 19 bp, Homo sapiens
  siRNA target sequence for PDLIM1 (NM_020992.2,226-244).
ggctctagctaatttatgt

SEQ ID NO: 304585 - DNA, 19 bp, Homo sapiens
  siRNA target sequence for PDLIM1 (NM_020992.2,272-290).
ggggaaaatactagcaata

SEQ ID NO: 304586 - DNA, 19 bp, Homo sapiens
  siRNA target sequence for PDLIM1 (NM_020992.2,350-368).
gtagccagatctgaacata

SEQ ID NO: 304587 - DNA, 19 bp, Homo sapiens
  siRNA target sequence for PDLIM1 (NM_020992.2,443-461).
gaggtcctgcacataggaa

SEQ ID NO: 304588 - DNA, 19 bp, Homo sapiens
  siRNA target sequence for PDLIM1 (NM_020992.2,516-534).
ctgccagggtcatcacaaa

SEQ ID NO: 304589 - DNA, 19 bp, Homo sapiens
  siRNA target sequence for PDLIM1 (NM_020992.2,676-694).
catcgacaaagaatctgaa

SEQ ID NO: 304590 - DNA, 19 bp, Homo sapiens
  siRNA target sequence for PDLIM1 (NM_020992.2,679-697).
cgacaaagaatctgaagtt

SEQ ID NO: 304591 - DNA, 19 bp, Homo sapiens
  siRNA target sequence for PDLIM1 (NM_020992.2,848-866).
gtggctgcgtcgattggaa

SEQ ID NO: 304592 - DNA, 19 bp, Homo sapiens
  siRNA target sequence for PDLIM1 (NM_020992.2,850-868).
ggctgcgtcgattggaaat

SEQ ID NO: 304593 - DNA, 19 bp, Homo sapiens
  siRNA target sequence for PDLIM1 (NM_020992.2,877-895).
gttgcctatgtgtgacaaa

SEQ ID NO: 304594 - DNA, 19 bp, Homo sapiens
  siRNA target sequence for PDLIM1 (NM_020992.2,943-961).
ccgccaccctgagtgttat

SEQ ID NO: 304595 - DNA, 19 bp, Homo sapiens
  siRNA target sequence for PDLIM1 (NM_020992.2,947-965).
caccctgagtgttatgtgt

SEQ ID NO: 304596 - DNA, 19 bp, Homo sapiens
  siRNA target sequence for PDLIM1 (NM_020992.2,975-993).
gtggcaccaacctgaaaca

SEQ ID NO: 304597 - DNA, 19 bp, Homo sapiens
  siRNA target sequence for PDLIM1 (NM_020992.2,978-996).
gcaccaacctgaaacagaa

SEQ ID NO: 304598 - DNA, 19 bp, Homo sapiens
  siRNA target sequence for PDLIM1 (NM_020992.2,1059-1077).
cacctgagggttatgaagt

SEQ ID NO: 304599 - DNA, 19 bp, Homo sapiens
  siRNA target sequence for CAMP (NM_004345.3,500-518).
ctttgacatcagttgtgat

SEQ ID NO: 304600 - DNA, 19 bp, Homo sapiens
  siRNA target sequence for CAMP (NM_004345.3,506-524).
catcagttgtgataaggat

SEQ ID NO: 304601 - DNA, 19 bp, Homo sapiens
  siRNA target sequence for CAMP (NM_004345.3,511-529).
gttgtgataaggataacaa

SEQ ID NO: 304602 - DNA, 19 bp, Homo sapiens
  siRNA target sequence for CAMP (NM_004345.3,595-613).
gaattgtccagagaatcaa

SEQ ID NO: 304603 - DNA, 19 bp, Homo sapiens
  siRNA target sequence for CAMP (NM_004345.3,600-618).
gtccagagaatcaaggatt

SEQ ID NO: 304604 - DNA, 19 bp, Homo sapiens
  siRNA target sequence for CAMP (NM_004345.3,602-620).
ccagagaatcaaggatttt

SEQ ID NO: 304605 - DNA, 19 bp, Homo sapiens
  siRNA target sequence for CAMP (NM_004345.3,614-632).
ggattttttgcggaatctt

SEQ ID NO: 304606 - DNA, 19 bp, Homo sapiens
  siRNA target sequence for DEFA1 (NM_004084.2,306-324).
ggagaacgtcgctatggaa

SEQ ID NO: 304607 - DNA, 19 bp, Homo sapiens
  siRNA target sequence for DEFA5 (NM_021010.1,188-206).
ggactctctgctcttagaa

SEQ ID NO: 304608 - DNA, 19 bp, Homo sapiens
  siRNA target sequence for DEFA5 (NM_021010.1,272-290).
ctctccggggtgtgtgaaa

SEQ ID NO: 304609 - DNA, 19 bp, Homo sapiens
  siRNA target sequence for DEFA5 (NM_021010.1,277-295).
cggggtgtgtgaaatcagt

SEQ ID NO: 304610 - DNA, 19 bp, Homo sapiens
  siRNA target sequence for DEFA6 (NM_001926.2,123-141).
ccactgcaggcaaaagctt

SEQ ID NO: 304611 - DNA, 19 bp, Homo sapiens
  siRNA target sequence for DEFA6 (NM_001926.2,124-142).
cactgcaggcaaaagctta

SEQ ID NO: 304612 - DNA, 19 bp, Homo sapiens
  siRNA target sequence for DEFA6 (NM_001926.2,263-281).
cagaaggtcctgttattca

SEQ ID NO: 304613 - DNA, 19 bp, Homo sapiens
  siRNA target sequence for DEFA6 (NM_001926.2,269-287).
gtcctgttattcaacagaa

SEQ ID NO: 304614 - DNA, 19 bp, Homo sapiens
  siRNA target sequence for DEFA6 (NM_001926.2,304-322).
gcactgtcatgggtattaa

SEQ ID NO: 304615 - DNA, 19 bp, Homo sapiens
  siRNA target sequence for DEFA6 (NM_001926.2,307-325).
ctgtcatgggtattaacca

SEQ ID NO: 304616 - DNA, 19 bp, Homo sapiens
  siRNA target sequence for DEFB1 (NM_005218.2,127-145).
cctcaggtggtaactttct

SEQ ID NO: 304617 - DNA, 19 bp, Homo sapiens
  siRNA target sequence for DEFB1 (NM_005218.2,157-175).
gccacagatctgatcatta

SEQ ID NO: 304618 - DNA, 19 bp, Homo sapiens
  siRNA target sequence for DEFB103 (NM_018661.2,223-241).
ggatccattatcttctgtt

SEQ ID NO: 304619 - DNA, 19 bp, Homo sapiens
  siRNA target sequence for DEFB103 (NM_018661.2,224-242).
gatccattatcttctgttt

SEQ ID NO: 304620 - DNA, 19 bp, Homo sapiens
  siRNA target sequence for DEFB103 (NM_018661.2,274-292).
caggtcatggaggaatcat

SEQ ID NO: 304621 - DNA, 19 bp, Homo sapiens
  siRNA target sequence for DEFB103 (NM_018661.2,276-294).
ggtcatggaggaatcataa

SEQ ID NO: 304622 - DNA, 19 bp, Homo sapiens
  siRNA target sequence for DEFB103 (NM_018661.2,279-297).
catggaggaatcataaaca

SEQ ID NO: 304623 - DNA, 19 bp, Homo sapiens
  siRNA target sequence for DEFB103 (NM_018661.2,282-300).
ggaggaatcataaacacat

SEQ ID NO: 304624 - DNA, 19 bp, Homo sapiens
  siRNA target sequence for DEFB103 (NM_018661.2,283-301).
gaggaatcataaacacatt

SEQ ID NO: 304625 - DNA, 19 bp, Homo sapiens
  siRNA target sequence for DEFB104 (NM_080389.1,20-38).
gagacttgtgctgctatta

SEQ ID NO: 304626 - DNA, 19 bp, Homo sapiens
  siRNA target sequence for DEFB104 (NM_080389.1,46-64).
ctcttctactctatcaaga

SEQ ID NO: 304627 - DNA, 19 bp, Homo sapiens
  siRNA target sequence for DEFB104 (NM_080389.1,70-88).
cagtgagaagcgaatttga

SEQ ID NO: 304628 - DNA, 19 bp, Homo sapiens
  siRNA target sequence for DEFB104 (NM_080389.1,72-90).
gtgagaagcgaatttgaat

SEQ ID NO: 304629 - DNA, 19 bp, Homo sapiens
  siRNA target sequence for DEFB104 (NM_080389.1,117-135).
gcccgttgccggaagaaat

SEQ ID NO: 304630 - DNA, 19 bp, Homo sapiens
  siRNA target sequence for DEFB104 (NM_080389.1,119-137).
ccgttgccggaagaaatgt

SEQ ID NO: 304631 - DNA, 19 bp, Homo sapiens
  siRNA target sequence for DEFB104 (NM_080389.1,176-194).
ctatgcatgctgtttgaga

SEQ ID NO: 304632 - DNA, 19 bp, Homo sapiens
  siRNA target sequence for DEFB104 (NM_080389.1,199-217).
gggatgagagcttactgaa

SEQ ID NO: 304633 - DNA, 19 bp, Homo sapiens
  siRNA target sequence for DEFB104 (NM_080389.1,200-218).
ggatgagagcttactgaat

SEQ ID NO: 304634 - DNA, 19 bp, Homo sapiens
  siRNA target sequence for DEFB104 (NM_080389.1,204-222).
gagagcttactgaatcgta

SEQ ID NO: 304635 - DNA, 19 bp, Homo sapiens
  siRNA target sequence for DEFB104 (NM_080389.1,208-226).
gcttactgaatcgtacaaa

SEQ ID NO: 304636 - DNA, 19 bp, Homo sapiens
  siRNA target sequence for DEFB104 (NM_080389.1,209-227).
cttactgaatcgtacaaaa

SEQ ID NO: 304637 - DNA, 19 bp, Homo sapiens
  siRNA target sequence for DEFB106 (NM_152251.2,143-161).
ctgccagaagtctctgaaa

SEQ ID NO: 304638 - DNA, 19 bp, Homo sapiens
  siRNA target sequence for DEFB106 (NM_152251.2,179-197).
gccatgtgggagcattata

SEQ ID NO: 304639 - DNA, 19 bp, Homo sapiens
  siRNA target sequence for DEFB106 (NM_152251.2,181-199).
catgtgggagcattataga

SEQ ID NO: 304640 - DNA, 19 bp, Homo sapiens
  siRNA target sequence for DEFB118 (NM_054112.1,120-138).
gggcactgcaggaaacaat

SEQ ID NO: 304641 - DNA, 19 bp, Homo sapiens
  siRNA target sequence for DEFB118 (NM_054112.1,188-206).
ctgcattccatccaatgaa

SEQ ID NO: 304642 - DNA, 19 bp, Homo sapiens
  siRNA target sequence for DEFB118 (NM_054112.1,190-208).
gcattccatccaatgaaga

SEQ ID NO: 304643 - DNA, 19 bp, Homo sapiens
  siRNA target sequence for DEFB118 (NM_054112.1,249-267).
gactcaacaccaggaatta

SEQ ID NO: 304644 - DNA, 19 bp, Homo sapiens
  siRNA target sequence for DEFB118 (NM_054112.1,262-280).
gaattattgatgatatttt

SEQ ID NO: 304645 - DNA, 19 bp, Homo sapiens
  siRNA target sequence for DEFB118 (NM_054112.1,290-308).
gttcacgacagactacttt

SEQ ID NO: 304646 - DNA, 19 bp, Homo sapiens
  siRNA target sequence for DEFB118 (NM_054112.1,295-313).
cgacagactactttgaagt

SEQ ID NO: 304647 - DNA, 19 bp, Homo sapiens
  siRNA target sequence for DEFB118 (NM_054112.1,296-314).
gacagactactttgaagta

SEQ ID NO: 304648 - DNA, 19 bp, Homo sapiens
  siRNA target sequence for DEFB119 (NM_153289.2,224-242).
gtagggcctcttgcaaaaa

SEQ ID NO: 304649 - DNA, 19 bp, Homo sapiens
  siRNA target sequence for DEFB119 (NM_153289.2,250-268).
cagccctacctctattgca

SEQ ID NO: 304650 - DNA, 19 bp, Homo sapiens
  siRNA target sequence for DEFB119 (NM_153289.2,255-273).
ctacctctattgcagaaat

SEQ ID NO: 304651 - DNA, 19 bp, Homo sapiens
  siRNA target sequence for DEFB119 (NM_153289.2,292-310).
cagtcctacatgaggataa

SEQ ID NO: 304652 - DNA, 19 bp, Homo sapiens
  siRNA target sequence for DEFB119 (NM_153289.2,296-314).
cctacatgaggataagcat

SEQ ID NO: 304653 - DNA, 19 bp, Homo sapiens
  siRNA target sequence for DEFB119 (NM_153289.2,335-353).
ccgactggtcttatgagaa

SEQ ID NO: 304654 - DNA, 19 bp, Homo sapiens
  siRNA target sequence for DEFB123 (NM_153324.2,146-164).
ccaggtggcacccaaagat

SEQ ID NO: 304655 - DNA, 19 bp, Homo sapiens
  siRNA target sequence for DEFB123 (NM_153324.2,215-233).
gtctatgtttactgcataa

SEQ ID NO: 304656 - DNA, 19 bp, Homo sapiens
  siRNA target sequence for DEFB123 (NM_153324.2,217-235).
ctatgtttactgcataaat

SEQ ID NO: 304657 - DNA, 19 bp, Homo sapiens
  siRNA target sequence for DEFB125 (NM_153325.1,36-54).
ggtgaccaaaggtagcttt

SEQ ID NO: 304658 - DNA, 19 bp, Homo sapiens
  siRNA target sequence for DEFB125 (NM_153325.1,39-57).
gaccaaaggtagctttgaa

SEQ ID NO: 304659 - DNA, 19 bp, Homo sapiens
  siRNA target sequence for DEFB125 (NM_153325.1,93-111).
cagaagacgatgtttagat

SEQ ID NO: 304660 - DNA, 19 bp, Homo sapiens
  siRNA target sequence for DEFB125 (NM_153325.1,98-116).
gacgatgtttagatactga

SEQ ID NO: 304661 - DNA, 19 bp, Homo sapiens
  siRNA target sequence for DEFB125 (NM_153325.1,115-133).
gaaaggtacatacttcttt

SEQ ID NO: 304662 - DNA, 19 bp, Homo sapiens
  siRNA target sequence for DEFB125 (NM_153325.1,130-148).
ctttgtaggaacaagctat

SEQ ID NO: 304663 - DNA, 19 bp, Homo sapiens
  siRNA target sequence for DEFB125 (NM_153325.1,145-163).
ctatcatgctgcatttcta

SEQ ID NO: 304664 - DNA, 19 bp, Homo sapiens
  siRNA target sequence for DEFB125 (NM_153325.1,149-167).
catgctgcatttctataat

SEQ ID NO: 304665 - DNA, 19 bp, Homo sapiens
  siRNA target sequence for DEFB125 (NM_153325.1,257-275).
gttccccagtatctatgtt

SEQ ID NO: 304666 - DNA, 19 bp, Homo sapiens
  siRNA target sequence for DEFB125 (NM_153325.1,263-281).
cagtatctatgttgaatga

SEQ ID NO: 304667 - DNA, 19 bp, Homo sapiens
  siRNA target sequence for DEFB125 (NM_153325.1,273-291).
gttgaatgatctgataaca

SEQ ID NO: 304668 - DNA, 19 bp, Homo sapiens
  siRNA target sequence for DEFB125 (NM_153325.1,321-339).
gacacctgagaccaatact

SEQ ID NO: 304669 - DNA, 19 bp, Homo sapiens
  siRNA target sequence for DEFB125 (NM_153325.1,404-422).
ctgctacttccgagactat

SEQ ID NO: 304670 - DNA, 19 bp, Homo sapiens
  siRNA target sequence for DEFB127 (NM_139074.2,44-62).
ccacagtaaccgaacaact

SEQ ID NO: 304671 - DNA, 19 bp, Homo sapiens
  siRNA target sequence for DEFB127 (NM_139074.2,45-63).
cacagtaaccgaacaactt

SEQ ID NO: 304672 - DNA, 19 bp, Homo sapiens
  siRNA target sequence for DEFB127 (NM_139074.2,49-67).
gtaaccgaacaacttaaga

SEQ ID NO: 304673 - DNA, 19 bp, Homo sapiens
  siRNA target sequence for DEFB127 (NM_139074.2,66-84).
gaagtgctggaataactat

SEQ ID NO: 304674 - DNA, 19 bp, Homo sapiens
  siRNA target sequence for DEFB127 (NM_139074.2,69-87).
gtgctggaataactatgta

SEQ ID NO: 304675 - DNA, 19 bp, Homo sapiens
  siRNA target sequence for DEFB127 (NM_139074.2,152-170).
gatactgttgcctcaatat

SEQ ID NO: 304676 - DNA, 19 bp, Homo sapiens
  siRNA target sequence for DEFB127 (NM_139074.2,237-255).
gactcttcaagactatgtt

SEQ ID NO: 304677 - DNA, 19 bp, Homo sapiens
  siRNA target sequence for DEFB129 (NM_080831.2,72-90).
ggcttgagacgctgtttaa

SEQ ID NO: 304678 - DNA, 19 bp, Homo sapiens
  siRNA target sequence for DEFB129 (NM_080831.2,73-91).
gcttgagacgctgtttaat

SEQ ID NO: 304679 - DNA, 19 bp, Homo sapiens
  siRNA target sequence for DEFB129 (NM_080831.2,163-181).
gttgtgttggaccaaaagt

SEQ ID NO: 304680 - DNA, 19 bp, Homo sapiens
  siRNA target sequence for DEFB129 (NM_080831.2,266-284).
gaattctagtgctgtgata

SEQ ID NO: 304681 - DNA, 19 bp, Homo sapiens
  siRNA target sequence for DEFB129 (NM_080831.2,331-349).
gcttttttgctaataccaa

SEQ ID NO: 304682 - DNA, 19 bp, Homo sapiens
  siRNA target sequence for DEFB129 (NM_080831.2,429-447).
gctacttctaccaagagta

SEQ ID NO: 304683 - DNA, 19 bp, Homo sapiens
  siRNA target sequence for DEFB129 (NM_080831.2,430-448).
ctacttctaccaagagtaa

SEQ ID NO: 304684 - DNA, 19 bp, Homo sapiens
  siRNA target sequence for DEFB129 (NM_080831.2,440-458).
caagagtaacaccaaagaa

SEQ ID NO: 304685 - DNA, 19 bp, Homo sapiens
  siRNA target sequence for GNLY (NM_006433.2,237-255).
cgtgatgaggagaaatcct

SEQ ID NO: 304686 - DNA, 19 bp, Homo sapiens
  siRNA target sequence for GNLY (NM_006433.2,334-352).
gtctgacgatagtccaaaa

SEQ ID NO: 304687 - DNA, 19 bp, Homo sapiens
  siRNA target sequence for GNLY (NM_006433.2,340-358).
cgatagtccaaaaactgaa

SEQ ID NO: 304688 - DNA, 19 bp, Homo sapiens
  siRNA target sequence for GNLY (NM_006433.2,374-392).
gcccacccagagaagtgtt

SEQ ID NO: 304689 - DNA, 19 bp, Homo sapiens
  siRNA target sequence for GNLY (NM_006433.2,375-393).
cccacccagagaagtgttt

SEQ ID NO: 304690 - DNA, 19 bp, Homo sapiens
  siRNA target sequence for GNLY (NM_006433.2,437-455).
gcgcgacgtctgcagaaat

SEQ ID NO: 304691 - DNA, 19 bp, Homo sapiens
  siRNA target sequence for GNLY (NM_006433.2,438-456).
cgcgacgtctgcagaaatt

SEQ ID NO: 304692 - DNA, 19 bp, Homo sapiens
  siRNA target sequence for GNLY (NM_006433.2,527-545).
ggacctcaggttgtgtata

SEQ ID NO: 304693 - DNA, 19 bp, Homo sapiens
  siRNA target sequence for HTN1 (NM_002159.2,115-133).
gattagcgctgattcacat

SEQ ID NO: 304694 - DNA, 19 bp, Homo sapiens
  siRNA target sequence for HTN1 (NM_002159.2,183-201).
cacatcgagaatttccatt

SEQ ID NO: 304695 - DNA, 19 bp, Homo sapiens
  siRNA target sequence for HTN1 (NM_002159.2,185-203).
catcgagaatttccatttt

SEQ ID NO: 304696 - DNA, 19 bp, Homo sapiens
  siRNA target sequence for HTN1 (NM_002159.2,206-224).
ggggactatggatcaaatt

SEQ ID NO: 304697 - DNA, 19 bp, Homo sapiens
  siRNA target sequence for HTN1 (NM_002159.2,207-225).
gggactatggatcaaatta

SEQ ID NO: 304698 - DNA, 19 bp, Homo sapiens
  siRNA target sequence for HTN1 (NM_002159.2,208-226).
ggactatggatcaaattat

SEQ ID NO: 304699 - DNA, 19 bp, Homo sapiens
  siRNA target sequence for HTN3 (NM_000200.1,119-137).
gactggagctgattcacat

SEQ ID NO: 304700 - DNA, 19 bp, Homo sapiens
  siRNA target sequence for HTN3 (NM_000200.1,192-210).
cgaggctatagatcaaatt

SEQ ID NO: 304701 - DNA, 19 bp, Homo sapiens
  siRNA target sequence for HTN3 (NM_000200.1,193-211).
gaggctatagatcaaatta

SEQ ID NO: 304702 - DNA, 19 bp, Homo sapiens
  siRNA target sequence for LEAP-2 (NM_052971.1,1479-1497).
cggagaatgaccccatttt

SEQ ID NO: 304703 - DNA, 19 bp, Homo sapiens
  siRNA target sequence for LEAP-2 (NM_052971.1,1539-1557).
gatgattctgagtgtatca

SEQ ID NO: 304704 - DNA, 19 bp, Homo sapiens
  siRNA target sequence for C7orf10 (NM_024728.1,136-154).
ccgcagtcagatatgaaca

SEQ ID NO: 304705 - DNA, 19 bp, Homo sapiens
  siRNA target sequence for C7orf10 (NM_024728.1,137-155).
cgcagtcagatatgaacaa

SEQ ID NO: 304706 - DNA, 19 bp, Homo sapiens
  siRNA target sequence for C7orf10 (NM_024728.1,138-156).
gcagtcagatatgaacaat

SEQ ID NO: 304707 - DNA, 19 bp, Homo sapiens
  siRNA target sequence for C7orf10 (NM_024728.1,141-159).
gtcagatatgaacaatata

SEQ ID NO: 304708 - DNA, 19 bp, Homo sapiens
  siRNA target sequence for C7orf10 (NM_024728.1,153-171).
caatataaagccattggaa

SEQ ID NO: 304709 - DNA, 19 bp, Homo sapiens
  siRNA target sequence for C7orf10 (NM_024728.1,202-220).
ctggcgggaccttttgcta

SEQ ID NO: 304710 - DNA, 19 bp, Homo sapiens
  siRNA target sequence for C7orf10 (NM_024728.1,206-224).
cgggaccttttgctactat

SEQ ID NO: 304711 - DNA, 19 bp, Homo sapiens
  siRNA target sequence for C7orf10 (NM_024728.1,208-226).
ggaccttttgctactatga

SEQ ID NO: 304712 - DNA, 19 bp, Homo sapiens
  siRNA target sequence for C7orf10 (NM_024728.1,209-227).
gaccttttgctactatgaa

SEQ ID NO: 304713 - DNA, 19 bp, Homo sapiens
  siRNA target sequence for C7orf10 (NM_024728.1,319-337).
gaaagtacatattatctca

SEQ ID NO: 304714 - DNA, 19 bp, Homo sapiens
  siRNA target sequence for C7orf10 (NM_024728.1,326-344).
catattatctcagtgttaa

SEQ ID NO: 304715 - DNA, 19 bp, Homo sapiens
  siRNA target sequence for C7orf10 (NM_024728.1,334-352).
ctcagtgttaaccgaaata

SEQ ID NO: 304716 - DNA, 19 bp, Homo sapiens
  siRNA target sequence for C7orf10 (NM_024728.1,390-408).
ggtgaaaatcatctattgt

SEQ ID NO: 304717 - DNA, 19 bp, Homo sapiens
  siRNA target sequence for C7orf10 (NM_024728.1,443-461).
ctcagcgagctggttatga

SEQ ID NO: 304718 - DNA, 19 bp, Homo sapiens
  siRNA target sequence for C7orf10 (NM_024728.1,554-572).
ccactggcctgtatgcata

SEQ ID NO: 304719 - DNA, 19 bp, Homo sapiens
  siRNA target sequence for C7orf10 (NM_024728.1,555-573).
cactggcctgtatgcatat

SEQ ID NO: 304720 - DNA, 19 bp, Homo sapiens
  siRNA target sequence for C7orf10 (NM_024728.1,578-596).
ctattatggctggattgat

SEQ ID NO: 304721 - DNA, 19 bp, Homo sapiens
  siRNA target sequence for C7orf10 (NM_024728.1,611-629).
ctgggaaaggactgttcat

SEQ ID NO: 304722 - DNA, 19 bp, Homo sapiens
  siRNA target sequence for C7orf10 (NM_024728.1,619-637).
ggactgttcattgattgta

SEQ ID NO: 304723 - DNA, 19 bp, Homo sapiens
  siRNA target sequence for C7orf10 (NM_024728.1,651-669).
ccaggtggcgtgtttgtct

SEQ ID NO: 304724 - DNA, 19 bp, Homo sapiens
  siRNA target sequence for C7orf10 (NM_024728.1,668-686).
ctcacatagctgcaaatta

SEQ ID NO: 304725 - DNA, 19 bp, Homo sapiens
  siRNA target sequence for C7orf10 (NM_024728.1,697-715).
caaaaggaagcaaaacgtt

SEQ ID NO: 304726 - DNA, 19 bp, Homo sapiens
  siRNA target sequence for C7orf10 (NM_024728.1,742-760).
ccttaccaggcttttaaaa

SEQ ID NO: 304727 - DNA, 19 bp, Homo sapiens
  siRNA target sequence for C7orf10 (NM_024728.1,765-783).
ggatggctatattgtagtt

SEQ ID NO: 304728 - DNA, 19 bp, Homo sapiens
  siRNA target sequence for C7orf10 (NM_024728.1,814-832).
gtctgcaagatcttggatt

SEQ ID NO: 304729 - DNA, 19 bp, Homo sapiens
  siRNA target sequence for C7orf10 (NM_024728.1,835-853).
cctgagttgattgataatt

SEQ ID NO: 304730 - DNA, 19 bp, Homo sapiens
  siRNA target sequence for C7orf10 (NM_024728.1,847-865).
gataattccaagtataaaa

SEQ ID NO: 304731 - DNA, 19 bp, Homo sapiens
  siRNA target sequence for C7orf10 (NM_024728.1,870-888).
ccaccttcgggtacacaat

SEQ ID NO: 304732 - DNA, 19 bp, Homo sapiens
  siRNA target sequence for C7orf10 (NM_024728.1,871-889).
caccttcgggtacacaata

SEQ ID NO: 304733 - DNA, 19 bp, Homo sapiens
  siRNA target sequence for C7orf10 (NM_024728.1,873-891).
ccttcgggtacacaataga

SEQ ID NO: 304734 - DNA, 19 bp, Homo sapiens
  siRNA target sequence for C7orf10 (NM_024728.1,874-892).
cttcgggtacacaatagaa

SEQ ID NO: 304735 - DNA, 19 bp, Homo sapiens
  siRNA target sequence for C7orf10 (NM_024728.1,914-932).
ctgaacggtttgaagaaga

SEQ ID NO: 304736 - DNA, 19 bp, Homo sapiens
  siRNA target sequence for C7orf10 (NM_024728.1,936-954).
gaccagcaagtggttatat

SEQ ID NO: 304737 - DNA, 19 bp, Homo sapiens
  siRNA target sequence for C7orf10 (NM_024728.1,941-959).
gcaagtggttatatctttt

SEQ ID NO: 304738 - DNA, 19 bp, Homo sapiens
  siRNA target sequence for C7orf10 (NM_024728.1,942-960).
caagtggttatatcttttt

SEQ ID NO: 304739 - DNA, 19 bp, Homo sapiens
  siRNA target sequence for C7orf10 (NM_024728.1,976-994).
ccgtatggcccaatcaaca

SEQ ID NO: 304740 - DNA, 19 bp, Homo sapiens
  siRNA target sequence for C7orf10 (NM_024728.1,977-995).
cgtatggcccaatcaacaa

SEQ ID NO: 304741 - DNA, 19 bp, Homo sapiens
  siRNA target sequence for C7orf10 (NM_024728.1,982-1000).
ggcccaatcaacaacatga

SEQ ID NO: 304742 - DNA, 19 bp, Homo sapiens
  siRNA target sequence for C7orf10 (NM_024728.1,983-1001).
gcccaatcaacaacatgaa

SEQ ID NO: 304743 - DNA, 19 bp, Homo sapiens
  siRNA target sequence for C7orf10 (NM_024728.1,1091-1109).
gatcagcaagggtattaca

SEQ ID NO: 304744 - DNA, 19 bp, Homo sapiens
  siRNA target sequence for C7orf10 (NM_024728.1,1138-1156).
ccaactgtggggaagattt

SEQ ID NO: 304745 - DNA, 19 bp, Homo sapiens
  siRNA target sequence for C7orf10 (NM_024728.1,1169-1187).
cagctgtgagatacagtaa

SEQ ID NO: 304746 - DNA, 19 bp, Homo sapiens
  siRNA target sequence for C7orf10 (NM_024728.1,1172-1190).
ctgtgagatacagtaagtt

SEQ ID NO: 304747 - DNA, 19 bp, Homo sapiens
  siRNA target sequence for C7orf10 (NM_024728.1,1174-1192).
gtgagatacagtaagttca

SEQ ID NO: 304748 - DNA, 19 bp, Homo sapiens
  siRNA target sequence for C7orf10 (NM_024728.1,1251-1269).
ggaggtcctgagatacgat

SEQ ID NO: 304749 - DNA, 19 bp, Homo sapiens
  siRNA target sequence for C7orf10 (NM_024728.1,1301-1319).
gagtggtggaccaacatga

SEQ ID NO: 304750 - DNA, 19 bp, Homo sapiens
  siRNA target sequence for C7orf10 (NM_024728.1,1303-1321).
gtggtggaccaacatgaaa

SEQ ID NO: 304751 - DNA, 19 bp, Homo sapiens
  siRNA target sequence for INSIG1 (NM_005542.3,249-267).
ccaaggttggggagatgat

SEQ ID NO: 304752 - DNA, 19 bp, Homo sapiens
  siRNA target sequence for INSIG1 (NM_005542.3,257-275).
ggggagatgatcaacgttt

SEQ ID NO: 304753 - DNA, 19 bp, Homo sapiens
  siRNA target sequence for INSIG1 (NM_005542.3,505-523).
ggtgatcgccaccatcttt

SEQ ID NO: 304754 - DNA, 19 bp, Homo sapiens
  siRNA target sequence for INSIG1 (NM_005542.3,506-524).
gtgatcgccaccatctttt

SEQ ID NO: 304755 - DNA, 19 bp, Homo sapiens
  siRNA target sequence for INSIG1 (NM_005542.3,611-629).
gaaccccacaaatttaaga

SEQ ID NO: 304756 - DNA, 19 bp, Homo sapiens
  siRNA target sequence for INSIG1 (NM_005542.3,649-667).
gcgctgcatagcagttttt

SEQ ID NO: 304757 - DNA, 19 bp, Homo sapiens
  siRNA target sequence for INSIG1 (NM_005542.3,729-747).
ctttagcagccctatcttt

SEQ ID NO: 304758 - DNA, 19 bp, Homo sapiens
  siRNA target sequence for INSIG1 (NM_005542.3,791-809).
ctggggatcaccatagctt

SEQ ID NO: 304759 - DNA, 19 bp, Homo sapiens
  siRNA target sequence for INSIG1 (NM_005542.3,793-811).
ggggatcaccatagctttt

SEQ ID NO: 304760 - DNA, 19 bp, Homo sapiens
  siRNA target sequence for INSIG1 (NM_005542.3,796-814).
gatcaccatagcttttcta

SEQ ID NO: 304761 - DNA, 19 bp, Homo sapiens
  siRNA target sequence for INSIG1 (NM_005542.3,828-846).
cgcagtttctcgtgtataa

SEQ ID NO: 304762 - DNA, 19 bp, Homo sapiens
  siRNA target sequence for INSIG1 (NM_005542.3,838-856).
cgtgtataatggtgtctat

SEQ ID NO: 304763 - DNA, 19 bp, Homo sapiens
  siRNA target sequence for INSIG1 (NM_005542.3,888-906).
gttcttggctcccttgtat

SEQ ID NO: 304764 - DNA, 19 bp, Homo sapiens
  siRNA target sequence for INSIG1 (NM_005542.3,922-940).
cgtcacggtggggaacata

SEQ ID NO: 304765 - DNA, 19 bp, Homo sapiens
  siRNA target sequence for INSIG1 (NM_005542.3,934-952).
gaacataggacgacagtta

SEQ ID NO: 304766 - DNA, 19 bp, Homo sapiens
  siRNA target sequence for INSIG1 (NM_005542.3,966-984).
ctgaaaagccccatagtga

SEQ ID NO: 304767 - DNA, 19 bp, Homo sapiens
  siRNA target sequence for INSIG1 (NM_005542.3,968-986).
gaaaagccccatagtgatt

SEQ ID NO: 304768 - DNA, 19 bp, Homo sapiens
  siRNA target sequence for INSIG1 (NM_198336.1,967-985).
cttctgtgaggagttgaat

SEQ ID NO: 304769 - DNA, 19 bp, Homo sapiens
  siRNA target sequence for INSIG1 (NM_198336.1,972-990).
gtgaggagttgaatttgaa

SEQ ID NO: 304770 - DNA, 19 bp, Homo sapiens
  siRNA target sequence for INSIG1 (NM_198336.1,1109-1127).
ctgactgtggattatgaca

SEQ ID NO: 304771 - DNA, 19 bp, Homo sapiens
  siRNA target sequence for INSIG1 (NM_198337.1,553-571).
cgggacagcagctggtata

SEQ ID NO: 304772 - DNA, 19 bp, Homo sapiens
  siRNA target sequence for INSIG1 (NM_198337.1,556-574).
gacagcagctggtatacat

SEQ ID NO: 304773 - DNA, 19 bp, Homo sapiens
  siRNA target sequence for PRNP (NM_000311.2,532-550).
ctatgaggaccgttactat

SEQ ID NO: 304774 - DNA, 19 bp, Homo sapiens
  siRNA target sequence for PRNP (NM_000311.2,542-560).
cgttactatcgtgaaaaca

SEQ ID NO: 304775 - DNA, 19 bp, Homo sapiens
  siRNA target sequence for PRNP (NM_000311.2,543-561).
gttactatcgtgaaaacat

SEQ ID NO: 304776 - DNA, 19 bp, Homo sapiens
  siRNA target sequence for PRNP (NM_000311.2,567-585).
gttaccccaaccaagtgta

SEQ ID NO: 304777 - DNA, 19 bp, Homo sapiens
  siRNA target sequence for PRNP (NM_000311.2,626-644).
gtgcacgactgcgtcaata

SEQ ID NO: 304778 - DNA, 19 bp, Homo sapiens
  siRNA target sequence for PRNP (NM_000311.2,631-649).
cgactgcgtcaatatcaca

SEQ ID NO: 304779 - DNA, 19 bp, Homo sapiens
  siRNA target sequence for PRNP (NM_000311.2,632-650).
gactgcgtcaatatcacaa

SEQ ID NO: 304780 - DNA, 19 bp, Homo sapiens
  siRNA target sequence for PRNP (NM_000311.2,636-654).
gcgtcaatatcacaatcaa

SEQ ID NO: 304781 - DNA, 19 bp, Homo sapiens
  siRNA target sequence for PRNP (NM_000311.2,696-714).
ccgagaccgacgttaagat

SEQ ID NO: 304782 - DNA, 19 bp, Homo sapiens
  siRNA target sequence for PRNP (NM_000311.2,728-746).
gttgagcagatgtgtatca

SEQ ID NO: 304783 - DNA, 19 bp, Homo sapiens
  siRNA target sequence for ATP6V0A4 (NM_020632.1,284-302).
cgaagcgaggagatgtgtt

SEQ ID NO: 304784 - DNA, 19 bp, Homo sapiens
  siRNA target sequence for ATP6V0A4 (NM_020632.1,355-373).
cggagagctcggattggtt

SEQ ID NO: 304785 - DNA, 19 bp, Homo sapiens
  siRNA target sequence for ATP6V0A4 (NM_020632.1,364-382).
cggattggttcagttcaaa

SEQ ID NO: 304786 - DNA, 19 bp, Homo sapiens
  siRNA target sequence for ATP6V0A4 (NM_020632.1,366-384).
gattggttcagttcaaaga

SEQ ID NO: 304787 - DNA, 19 bp, Homo sapiens
  siRNA target sequence for ATP6V0A4 (NM_020632.1,484-502).
gcaaaatgagattgtagtt

SEQ ID NO: 304788 - DNA, 19 bp, Homo sapiens
  siRNA target sequence for ATP6V0A4 (NM_020632.1,531-549).
cgctcccacgggaaatgat

SEQ ID NO: 304789 - DNA, 19 bp, Homo sapiens
  siRNA target sequence for ATP6V0A4 (NM_020632.1,533-551).
ctcccacgggaaatgatta

SEQ ID NO: 304790 - DNA, 19 bp, Homo sapiens
  siRNA target sequence for ATP6V0A4 (NM_020632.1,679-697).
ctttgagacggaaaccaat

SEQ ID NO: 304791 - DNA, 19 bp, Homo sapiens
  siRNA target sequence for ATP6V0A4 (NM_020632.1,685-703).
gacggaaaccaatttagct

SEQ ID NO: 304792 - DNA, 19 bp, Homo sapiens
  siRNA target sequence for ATP6V0A4 (NM_020632.1,759-777).
catatatgaccggaaagtt

SEQ ID NO: 304793 - DNA, 19 bp, Homo sapiens
  siRNA target sequence for ATP6V0A4 (NM_020632.1,769-787).
cggaaagttggggttcata

SEQ ID NO: 304794 - DNA, 19 bp, Homo sapiens
  siRNA target sequence for ATP6V0A4 (NM_020632.1,846-864).
gccgaggaaacgtgtactt

SEQ ID NO: 304795 - DNA, 19 bp, Homo sapiens
  siRNA target sequence for ATP6V0A4 (NM_020632.1,848-866).
cgaggaaacgtgtacttga

SEQ ID NO: 304796 - DNA, 19 bp, Homo sapiens
  siRNA target sequence for ATP6V0A4 (NM_020632.1,1083-1101).
ccgtcataacacaaacaga

SEQ ID NO: 304797 - DNA, 19 bp, Homo sapiens
  siRNA target sequence for ATP6V0A4 (NM_020632.1,1257-1275).
cagatgccacacgtatcaa

SEQ ID NO: 304798 - DNA, 19 bp, Homo sapiens
  siRNA target sequence for ATP6V0A4 (NM_020632.1,1259-1277).
gatgccacacgtatcaaga

SEQ ID NO: 304799 - DNA, 19 bp, Homo sapiens
  siRNA target sequence for ATP6V0A4 (NM_020632.1,1369-1387).
caggaccaataaattcaca

SEQ ID NO: 304800 - DNA, 19 bp, Homo sapiens
  siRNA target sequence for ATP6V0A4 (NM_020632.1,1530-1548).
ctgcactttggatgattct

SEQ ID NO: 304801 - DNA, 19 bp, Homo sapiens
  siRNA target sequence for ATP6V0A4 (NM_020632.1,1533-1551).
cactttggatgattctgaa

SEQ ID NO: 304802 - DNA, 19 bp, Homo sapiens
  siRNA target sequence for ATP6V0A4 (NM_020632.1,1578-1596).
cagacaatgagatttggaa

SEQ ID NO: 304803 - DNA, 19 bp, Homo sapiens
  siRNA target sequence for ATP6V0A4 (NM_020632.1,1613-1631).
cgctatctgatcctactta

SEQ ID NO: 304804 - DNA, 19 bp, Homo sapiens
  siRNA target sequence for ATP6V0A4 (NM_020632.1,1625-1643).
ctacttatgggcatcttct

SEQ ID NO: 304805 - DNA, 19 bp, Homo sapiens
  siRNA target sequence for ATP6V0A4 (NM_020632.1,1644-1662).
ccatctacacgggtttgat

SEQ ID NO: 304806 - DNA, 19 bp, Homo sapiens
  siRNA target sequence for ATP6V0A4 (NM_020632.1,1651-1669).
cacgggtttgatctacaat

SEQ ID NO: 304807 - DNA, 19 bp, Homo sapiens
  siRNA target sequence for ATP6V0A4 (NM_020632.1,1735-1753).
cggcacatggaatactcat

SEQ ID NO: 304808 - DNA, 19 bp, Homo sapiens
  siRNA target sequence for ATP6V0A4 (NM_020632.1,1790-1808).
gccataccaggagtgtatt

SEQ ID NO: 304809 - DNA, 19 bp, Homo sapiens
  siRNA target sequence for ATP6V0A4 (NM_020632.1,1791-1809).
ccataccaggagtgtattt

SEQ ID NO: 304810 - DNA, 19 bp, Homo sapiens
  siRNA target sequence for ATP6V0A4 (NM_020632.1,1874-1892).
ctgaactcgtataaaatga

SEQ ID NO: 304811 - DNA, 19 bp, Homo sapiens
  siRNA target sequence for ATP6V0A4 (NM_020632.1,1899-1917).
cggtgatcctgggaattgt

SEQ ID NO: 304812 - DNA, 19 bp, Homo sapiens
  siRNA target sequence for ATP6V0A4 (NM_020632.1,1946-1964).
cttttcaatcacatatact

SEQ ID NO: 304813 - DNA, 19 bp, Homo sapiens
  siRNA target sequence for ATP6V0A4 (NM_020632.1,1968-1986).
gaagaactctcaacatcat

SEQ ID NO: 304814 - DNA, 19 bp, Homo sapiens
  siRNA target sequence for ATP6V0A4 (NM_020632.1,2151-2169).
ccaacgcacccctctacaa

SEQ ID NO: 304815 - DNA, 19 bp, Homo sapiens
  siRNA target sequence for ATP6V0A4 (NM_020632.1,2152-2170).
caacgcacccctctacaaa

SEQ ID NO: 304816 - DNA, 19 bp, Homo sapiens
  siRNA target sequence for ATP6V0A4 (NM_020632.1,2155-2173).
cgcacccctctacaaacat

SEQ ID NO: 304817 - DNA, 19 bp, Homo sapiens
  siRNA target sequence for ATP6V0A4 (NM_020632.1,2223-2241).
cgtggatgcttctgattaa

SEQ ID NO: 304818 - DNA, 19 bp, Homo sapiens
  siRNA target sequence for ATP6V0A4 (NM_020632.1,2588-2606).
ggaatcgtcggggttttta

SEQ ID NO: 304819 - DNA, 19 bp, Homo sapiens
  siRNA target sequence for ATP6V0A4 (NM_020632.1,2589-2607).
gaatcgtcggggtttttat

SEQ ID NO: 304820 - DNA, 19 bp, Homo sapiens
  siRNA target sequence for ATP6V0A4 (NM_020632.1,2593-2611).
cgtcggggtttttattatt

SEQ ID NO: 304821 - DNA, 19 bp, Homo sapiens
  siRNA target sequence for ATP6V0A4 (NM_020632.1,2594-2612).
gtcggggtttttattattt

SEQ ID NO: 304822 - DNA, 19 bp, Homo sapiens
  siRNA target sequence for ATP6V0A4 (NM_020632.1,2723-2741).
gtcggggatggttacaagt

SEQ ID NO: 304823 - DNA, 19 bp, Homo sapiens
  siRNA target sequence for ATP6V0A4 (NM_020632.1,2725-2743).
cggggatggttacaagttt

SEQ ID NO: 304824 - DNA, 19 bp, Homo sapiens
  siRNA target sequence for ATP6V0A4 (NM_020632.1,2726-2744).
ggggatggttacaagtttt

SEQ ID NO: 304825 - DNA, 19 bp, Homo sapiens
  siRNA target sequence for ATP6V0D2 (NM_152565.1,79-97).
ggtgcggagctgtacttca

SEQ ID NO: 304826 - DNA, 19 bp, Homo sapiens
  siRNA target sequence for ATP6V0D2 (NM_152565.1,80-98).
gtgcggagctgtacttcaa

SEQ ID NO: 304827 - DNA, 19 bp, Homo sapiens
  siRNA target sequence for ATP6V0D2 (NM_152565.1,233-251).
gtaactttttggctaatca

SEQ ID NO: 304828 - DNA, 19 bp, Homo sapiens
  siRNA target sequence for ATP6V0D2 (NM_152565.1,243-261).
ggctaatcacacaaatcct

SEQ ID NO: 304829 - DNA, 19 bp, Homo sapiens
  siRNA target sequence for ATP6V0D2 (NM_152565.1,316-334).
gagtatttccggaatcatt

SEQ ID NO: 304830 - DNA, 19 bp, Homo sapiens
  siRNA target sequence for ATP6V0D2 (NM_152565.1,339-357).
ggagcccctcagcacattt

SEQ ID NO: 304831 - DNA, 19 bp, Homo sapiens
  siRNA target sequence for ATP6V0D2 (NM_152565.1,350-368).
gcacatttctcacctatat

SEQ ID NO: 304832 - DNA, 19 bp, Homo sapiens
  siRNA target sequence for ATP6V0D2 (NM_152565.1,369-387).
gacgtgcagttatatgata

SEQ ID NO: 304833 - DNA, 19 bp, Homo sapiens
  siRNA target sequence for ATP6V0D2 (NM_152565.1,467-485).
gccgtttcacagaaatgga

SEQ ID NO: 304834 - DNA, 19 bp, Homo sapiens
  siRNA target sequence for ATP6V0D2 (NM_152565.1,534-552).
gatcgaaacgccattagct

SEQ ID NO: 304835 - DNA, 19 bp, Homo sapiens
  siRNA target sequence for ATP6V0D2 (NM_152565.1,542-560).
cgccattagctccattctt

SEQ ID NO: 304836 - DNA, 19 bp, Homo sapiens
  siRNA target sequence for ATP6V0D2 (NM_152565.1,583-601).
gctctagatgaactgaata

SEQ ID NO: 304837 - DNA, 19 bp, Homo sapiens
  siRNA target sequence for ATP6V0D2 (NM_152565.1,584-602).
ctctagatgaactgaatat

SEQ ID NO: 304838 - DNA, 19 bp, Homo sapiens
  siRNA target sequence for ATP6V0D2 (NM_152565.1,610-628).
ctacgcaataaactataca

SEQ ID NO: 304839 - DNA, 19 bp, Homo sapiens
  siRNA target sequence for ATP6V0D2 (NM_152565.1,613-631).
cgcaataaactatacaagt

SEQ ID NO: 304840 - DNA, 19 bp, Homo sapiens
  siRNA target sequence for ATP6V0D2 (NM_152565.1,648-666).
ctataaattctgtaagaat

SEQ ID NO: 304841 - DNA, 19 bp, Homo sapiens
  siRNA target sequence for ATP6V0D2 (NM_152565.1,673-691).
gatgtcacagcagaagtta

SEQ ID NO: 304842 - DNA, 19 bp, Homo sapiens
  siRNA target sequence for ATP6V0D2 (NM_152565.1,714-732).
ggccgacagacgtgctttt

SEQ ID NO: 304843 - DNA, 19 bp, Homo sapiens
  siRNA target sequence for ATP6V0D2 (NM_152565.1,715-733).
gccgacagacgtgctttta

SEQ ID NO: 304844 - DNA, 19 bp, Homo sapiens
  siRNA target sequence for ATP6V0D2 (NM_152565.1,716-734).
ccgacagacgtgcttttat

SEQ ID NO: 304845 - DNA, 19 bp, Homo sapiens
  siRNA target sequence for ATP6V0D2 (NM_152565.1,718-736).
gacagacgtgcttttatca

SEQ ID NO: 304846 - DNA, 19 bp, Homo sapiens
  siRNA target sequence for ATP6V0D2 (NM_152565.1,793-811).
ccaaccttcggcaaactct

SEQ ID NO: 304847 - DNA, 19 bp, Homo sapiens
  siRNA target sequence for ATP6V0D2 (NM_152565.1,794-812).
caaccttcggcaaactcta

SEQ ID NO: 304848 - DNA, 19 bp, Homo sapiens
  siRNA target sequence for ATP6V0D2 (NM_152565.1,872-890).
cggatcattacggagtata

SEQ ID NO: 304849 - DNA, 19 bp, Homo sapiens
  siRNA target sequence for ATP6V0D2 (NM_152565.1,874-892).
gatcattacggagtataca

SEQ ID NO: 304850 - DNA, 19 bp, Homo sapiens
  siRNA target sequence for ATP6V0D2 (NM_152565.1,916-934).
ggcagtgggggaaagacat

SEQ ID NO: 304851 - DNA, 19 bp, Homo sapiens
  siRNA target sequence for ATP6V0D2 (NM_152565.1,956-974).
gtgaggtacaaatgaatgt

SEQ ID NO: 304852 - DNA, 19 bp, Homo sapiens
  siRNA target sequence for ATP6V0D2 (NM_152565.1,993-1011).
gttccactacggtgtgttt

SEQ ID NO: 304853 - DNA, 19 bp, Homo sapiens
  siRNA target sequence for ATP6V0D2 (NM_152565.1,996-1014).
ccactacggtgtgttttat

SEQ ID NO: 304854 - DNA, 19 bp, Homo sapiens
  siRNA target sequence for ATP6V0D2 (NM_152565.1,999-1017).
ctacggtgtgttttatgca

SEQ ID NO: 304855 - DNA, 19 bp, Homo sapiens
  siRNA target sequence for ATP6V0D2 (NM_152565.1,1059-1077).
gatagcagaatgtatttca

SEQ ID NO: 304856 - DNA, 19 bp, Homo sapiens
  siRNA target sequence for ATP6V0D2 (NM_152565.1,1076-1094).
cacagaggcatcgaactaa

SEQ ID NO: 304857 - DNA, 19 bp, Homo sapiens
  siRNA target sequence for ATP6V0D2 (NM_152565.1,1078-1096).
cagaggcatcgaactaaaa

SEQ ID NO: 304858 - DNA, 19 bp, Homo sapiens
  siRNA target sequence for ATP6V0D2 (NM_152565.1,1088-1106).
gaactaaaatcaacagtta

SEQ ID NO: 304859 - DNA, 19 bp, Homo sapiens
  siRNA target sequence for ATP6V0D2 (NM_152565.1,1098-1116).
caacagttacattccaatt

SEQ ID NO: 304860 - DNA, 19 bp, Homo sapiens
  siRNA target sequence for BAT3 (NM_004639.2,350-368).
gaccttggactctcaaact

SEQ ID NO: 304861 - DNA, 19 bp, Homo sapiens
  siRNA target sequence for BAT3 (NM_004639.2,359-377).
ctctcaaactcgtaccttt

SEQ ID NO: 304862 - DNA, 19 bp, Homo sapiens
  siRNA target sequence for BAT3 (NM_004639.2,361-379).
ctcaaactcgtacctttat

SEQ ID NO: 304863 - DNA, 19 bp, Homo sapiens
  siRNA target sequence for BAT3 (NM_004639.2,472-490).
gacgagttctgcaagatga

SEQ ID NO: 304864 - DNA, 19 bp, Homo sapiens
  siRNA target sequence for BAT3 (NM_004639.2,477-495).
gttctgcaagatgataaga

SEQ ID NO: 304865 - DNA, 19 bp, Homo sapiens
  siRNA target sequence for BAT3 (NM_004639.2,686-704).
ggttggaaccttcaatctt

SEQ ID NO: 304866 - DNA, 19 bp, Homo sapiens
  siRNA target sequence for BAT3 (NM_004639.2,794-812).
gcacatgatcagggatata

SEQ ID NO: 304867 - DNA, 19 bp, Homo sapiens
  siRNA target sequence for BAT3 (NM_004639.2,806-824).
ggatatacagaccttacta

SEQ ID NO: 304868 - DNA, 19 bp, Homo sapiens
  siRNA target sequence for BAT3 (NM_004639.2,807-825).
gatatacagaccttactat

SEQ ID NO: 304869 - DNA, 19 bp, Homo sapiens
  siRNA target sequence for BAT3 (NM_004639.2,1195-1213).
ctgccaccacggactacaa

SEQ ID NO: 304870 - DNA, 19 bp, Homo sapiens
  siRNA target sequence for BAT3 (NM_004639.2,1197-1215).
gccaccacggactacaata

SEQ ID NO: 304871 - DNA, 19 bp, Homo sapiens
  siRNA target sequence for BAT3 (NM_004639.2,1202-1220).
cacggactacaataacaat

SEQ ID NO: 304872 - DNA, 19 bp, Homo sapiens
  siRNA target sequence for BAT3 (NM_004639.2,1236-1254).
gaggatcagcggttgatca

SEQ ID NO: 304873 - DNA, 19 bp, Homo sapiens
  siRNA target sequence for BAT3 (NM_004639.2,1402-1420).
cagccattcccatacagat

SEQ ID NO: 304874 - DNA, 19 bp, Homo sapiens
  siRNA target sequence for BAT3 (NM_004639.2,1406-1424).
cattcccatacagatcaat

SEQ ID NO: 304875 - DNA, 19 bp, Homo sapiens
  siRNA target sequence for BAT3 (NM_004639.2,1652-1670).
gatgcacatgaacattcaa

SEQ ID NO: 304876 - DNA, 19 bp, Homo sapiens
  siRNA target sequence for BAT3 (NM_004639.2,1914-1932).
cttgtggggcagcttctta

SEQ ID NO: 304877 - DNA, 19 bp, Homo sapiens
  siRNA target sequence for BAT3 (NM_004639.2,2083-2101).
cctccatggctgatcttca

SEQ ID NO: 304878 - DNA, 19 bp, Homo sapiens
  siRNA target sequence for BAT3 (NM_004639.2,2086-2104).
ccatggctgatcttcagtt

SEQ ID NO: 304879 - DNA, 19 bp, Homo sapiens
  siRNA target sequence for BAT3 (NM_004639.2,2368-2386).
gcctgtcaccggagttttt

SEQ ID NO: 304880 - DNA, 19 bp, Homo sapiens
  siRNA target sequence for BAT3 (NM_004639.2,2369-2387).
cctgtcaccggagtttttt

SEQ ID NO: 304881 - DNA, 19 bp, Homo sapiens
  siRNA target sequence for BAT3 (NM_004639.2,2370-2388).
ctgtcaccggagtttttta

SEQ ID NO: 304882 - DNA, 19 bp, Homo sapiens
  siRNA target sequence for BAT3 (NM_004639.2,2443-2461).
ctggcagcagtgaaagtat

SEQ ID NO: 304883 - DNA, 19 bp, Homo sapiens
  siRNA target sequence for BAT3 (NM_004639.2,2447-2465).
cagcagtgaaagtattgct

SEQ ID NO: 304884 - DNA, 19 bp, Homo sapiens
  siRNA target sequence for BAT3 (NM_004639.2,2485-2503).
gtggatccagcaacatctt

SEQ ID NO: 304885 - DNA, 19 bp, Homo sapiens
  siRNA target sequence for BAT3 (NM_004639.2,2572-2590).
ctatggtggacgtagtgat

SEQ ID NO: 304886 - DNA, 19 bp, Homo sapiens
  siRNA target sequence for BAT3 (NM_004639.2,2603-2621).
gcatttccagccactacaa

SEQ ID NO: 304887 - DNA, 19 bp, Homo sapiens
  siRNA target sequence for BAT3 (NM_004639.2,2698-2716).
ggatggcaacccacacatt

SEQ ID NO: 304888 - DNA, 19 bp, Homo sapiens
  siRNA target sequence for BAT3 (NM_004639.2,2720-2738).
cacggggctagaagagtat

SEQ ID NO: 304889 - DNA, 19 bp, Homo sapiens
  siRNA target sequence for BAT3 (NM_004639.2,2722-2740).
cggggctagaagagtatgt

SEQ ID NO: 304890 - DNA, 19 bp, Homo sapiens
  siRNA target sequence for BAT3 (NM_004639.2,2735-2753).
gtatgtgcgggagagtttt

SEQ ID NO: 304891 - DNA, 19 bp, Homo sapiens
  siRNA target sequence for BAT3 (NM_004639.2,2739-2757).
gtgcgggagagtttttcct

SEQ ID NO: 304892 - DNA, 19 bp, Homo sapiens
  siRNA target sequence for BAT3 (NM_004639.2,2841-2859).
gtgctgcattgcacagata

SEQ ID NO: 304893 - DNA, 19 bp, Homo sapiens
  siRNA target sequence for BAT3 (NM_004639.2,2975-2993).
ccgaattcgtcgtatgtct

SEQ ID NO: 304894 - DNA, 19 bp, Homo sapiens
  siRNA target sequence for BAT3 (NM_004639.2,3078-3096).
ggccctgatgccattctca

SEQ ID NO: 304895 - DNA, 19 bp, Homo sapiens
  siRNA target sequence for BAT3 (NM_004639.2,3183-3201).
cctcagcgggagaatgctt

SEQ ID NO: 304896 - DNA, 19 bp, Homo sapiens
  siRNA target sequence for BAT3 (NM_004639.2,3582-3600).
cagcagctccggtctgata

SEQ ID NO: 304897 - DNA, 19 bp, Homo sapiens
  siRNA target sequence for BAT3 (NM_004639.2,3584-3602).
gcagctccggtctgatata

SEQ ID NO: 304898 - DNA, 19 bp, Homo sapiens
  siRNA target sequence for BAT3 (NM_004639.2,3590-3608).
ccggtctgatatacaaaaa

SEQ ID NO: 304899 - DNA, 19 bp, Homo sapiens
  siRNA target sequence for AP1GBP1 (NM_007247.3,204-222).
ctgtcatgcagcctaatat

SEQ ID NO: 304900 - DNA, 19 bp, Homo sapiens
  siRNA target sequence for AP1GBP1 (NM_007247.3,208-226).
catgcagcctaatatgcaa

SEQ ID NO: 304901 - DNA, 19 bp, Homo sapiens
  siRNA target sequence for AP1GBP1 (NM_007247.3,216-234).
ctaatatgcaaggcattat

SEQ ID NO: 304902 - DNA, 19 bp, Homo sapiens
  siRNA target sequence for AP1GBP1 (NM_007247.3,259-277).
gtcccaaggacctattgct

SEQ ID NO: 304903 - DNA, 19 bp, Homo sapiens
  siRNA target sequence for AP1GBP1 (NM_007247.3,261-279).
cccaaggacctattgctat

SEQ ID NO: 304904 - DNA, 19 bp, Homo sapiens
  siRNA target sequence for AP1GBP1 (NM_007247.3,644-662).
gaggagaagttcctagtat

SEQ ID NO: 304905 - DNA, 19 bp, Homo sapiens
  siRNA target sequence for AP1GBP1 (NM_007247.3,647-665).
gagaagttcctagtatctt

SEQ ID NO: 304906 - DNA, 19 bp, Homo sapiens
  siRNA target sequence for AP1GBP1 (NM_007247.3,652-670).
gttcctagtatcttgtgat

SEQ ID NO: 304907 - DNA, 19 bp, Homo sapiens
  siRNA target sequence for AP1GBP1 (NM_007247.3,681-699).
ctgggcaggaacaaattaa

SEQ ID NO: 304908 - DNA, 19 bp, Homo sapiens
  siRNA target sequence for AP1GBP1 (NM_007247.3,735-753).
gcccaggttccagtaagaa

SEQ ID NO: 304909 - DNA, 19 bp, Homo sapiens
  siRNA target sequence for AP1GBP1 (NM_007247.3,737-755).
ccaggttccagtaagaagt

SEQ ID NO: 304910 - DNA, 19 bp, Homo sapiens
  siRNA target sequence for AP1GBP1 (NM_007247.3,738-756).
caggttccagtaagaagta

SEQ ID NO: 304911 - DNA, 19 bp, Homo sapiens
  siRNA target sequence for AP1GBP1 (NM_007247.3,918-936).
ggatttacaatgagagttt

SEQ ID NO: 304912 - DNA, 19 bp, Homo sapiens
  siRNA target sequence for AP1GBP1 (NM_007247.3,1040-1058).
gaaactcttggacagatat

SEQ ID NO: 304913 - DNA, 19 bp, Homo sapiens
  siRNA target sequence for AP1GBP1 (NM_007247.3,1052-1070).
cagatatgggccttagcta

SEQ ID NO: 304914 - DNA, 19 bp, Homo sapiens
  siRNA target sequence for AP1GBP1 (NM_007247.3,1054-1072).
gatatgggccttagctaat

SEQ ID NO: 304915 - DNA, 19 bp, Homo sapiens
  siRNA target sequence for AP1GBP1 (NM_007247.3,1063-1081).
cttagctaatcgaactaca

SEQ ID NO: 304916 - DNA, 19 bp, Homo sapiens
  siRNA target sequence for AP1GBP1 (NM_007247.3,1122-1140).
ccatgatagcggtaacaca

SEQ ID NO: 304917 - DNA, 19 bp, Homo sapiens
  siRNA target sequence for AP1GBP1 (NM_007247.3,1144-1162).
gggcgttcctgcaatgagt

SEQ ID NO: 304918 - DNA, 19 bp, Homo sapiens
  siRNA target sequence for AP1GBP1 (NM_007247.3,1155-1173).
caatgagtcctgatgcttt

SEQ ID NO: 304919 - DNA, 19 bp, Homo sapiens
  siRNA target sequence for AP1GBP1 (NM_007247.3,1188-1206).
cagctcctattccaacttt

SEQ ID NO: 304920 - DNA, 19 bp, Homo sapiens
  siRNA target sequence for AP1GBP1 (NM_007247.3,1240-1258).
gagtcagccaactgtgata

SEQ ID NO: 304921 - DNA, 19 bp, Homo sapiens
  siRNA target sequence for AP1GBP1 (NM_007247.3,1351-1369).
ggcttctagtggtttcata

SEQ ID NO: 304922 - DNA, 19 bp, Homo sapiens
  siRNA target sequence for AP1GBP1 (NM_007247.3,1446-1464).
gatcccttgatgactcatt

SEQ ID NO: 304923 - DNA, 19 bp, Homo sapiens
  siRNA target sequence for AP1GBP1 (NM_007247.3,1450-1468).
ccttgatgactcattcagt

SEQ ID NO: 304924 - DNA, 19 bp, Homo sapiens
  siRNA target sequence for AP1GBP1 (NM_007247.3,1454-1472).
gatgactcattcagtgatt

SEQ ID NO: 304925 - DNA, 19 bp, Homo sapiens
  siRNA target sequence for AP1GBP1 (NM_007247.3,1478-1496).
gagttgcctgcttcttcaa

SEQ ID NO: 304926 - DNA, 19 bp, Homo sapiens
  siRNA target sequence for AP1GBP1 (NM_007247.3,1480-1498).
gttgcctgcttcttcaaaa

SEQ ID NO: 304927 - DNA, 19 bp, Homo sapiens
  siRNA target sequence for AP1GBP1 (NM_007247.3,1503-1521).
gtaactcccagcatggaaa

SEQ ID NO: 304928 - DNA, 19 bp, Homo sapiens
  siRNA target sequence for AP1GBP1 (NM_007247.3,1507-1525).
ctcccagcatggaaacagt

SEQ ID NO: 304929 - DNA, 19 bp, Homo sapiens
  siRNA target sequence for AP1GBP1 (NM_007247.3,1524-1542).
gtgccccttctttgttgat

SEQ ID NO: 304930 - DNA, 19 bp, Homo sapiens
  siRNA target sequence for AP1GBP1 (NM_007247.3,1567-1585).
gccttcaatggacaaatat

SEQ ID NO: 304931 - DNA, 19 bp, Homo sapiens
  siRNA target sequence for AP1GBP1 (NM_007247.3,1615-1633).
gtcctctgaaaatactgtt

SEQ ID NO: 304932 - DNA, 19 bp, Homo sapiens
  siRNA target sequence for AP1GBP1 (NM_007247.3,1748-1766).
ggtttcaccgattttaaaa

SEQ ID NO: 304933 - DNA, 19 bp, Homo sapiens
  siRNA target sequence for AP1GBP1 (NM_007247.3,1785-1803).
cactagagccaccaacaaa

SEQ ID NO: 304934 - DNA, 19 bp, Homo sapiens
  siRNA target sequence for AP1GBP1 (NM_007247.3,1825-1843).
cttcccctcaggaactata

SEQ ID NO: 304935 - DNA, 19 bp, Homo sapiens
  siRNA target sequence for AP1GBP1 (NM_007247.3,1828-1846).
cccctcaggaactatacaa

SEQ ID NO: 304936 - DNA, 19 bp, Homo sapiens
  siRNA target sequence for AP1GBP1 (NM_007247.3,1830-1848).
cctcaggaactatacaaca

SEQ ID NO: 304937 - DNA, 19 bp, Homo sapiens
  siRNA target sequence for AP1GBP1 (NM_007247.3,1833-1851).
caggaactatacaacagaa

SEQ ID NO: 304938 - DNA, 19 bp, Homo sapiens
  siRNA target sequence for AP1GBP1 (NM_007247.3,1921-1939).
cagcgagaaaccattgtct

SEQ ID NO: 304939 - DNA, 19 bp, Homo sapiens
  siRNA target sequence for AP1GBP1 (NM_007247.3,1951-1969).
gtttagcacatcaaaatca

SEQ ID NO: 304940 - DNA, 19 bp, Homo sapiens
  siRNA target sequence for AP1GBP1 (NM_007247.3,2021-2039).
gcaacaaaaacttctagtt

SEQ ID NO: 304941 - DNA, 19 bp, Homo sapiens
  siRNA target sequence for AP1GBP1 (NM_007247.3,2065-2083).
cctttttggggaatattct

SEQ ID NO: 304942 - DNA, 19 bp, Homo sapiens
  siRNA target sequence for AP1GBP1 (NM_007247.3,2237-2255).
gtgaagggtggacaaaact

SEQ ID NO: 304943 - DNA, 19 bp, Homo sapiens
  siRNA target sequence for AP1GBP1 (NM_007247.3,2268-2286).
ctaccaagtacgatgtctt

SEQ ID NO: 304944 - DNA, 19 bp, Homo sapiens
  siRNA target sequence for AP1GBP1 (NM_007247.3,2321-2339).
gttgaagacctgaaagata

SEQ ID NO: 304945 - DNA, 19 bp, Homo sapiens
  siRNA target sequence for AP1GBP1 (NM_007247.3,2386-2404).
cagtaaattttcttccata

SEQ ID NO: 304946 - DNA, 19 bp, Homo sapiens
  siRNA target sequence for AP1GBP1 (NM_007247.3,2572-2590).
gggaggagatcttaagcat

SEQ ID NO: 304947 - DNA, 19 bp, Homo sapiens
  siRNA target sequence for AP1GBP1 (NM_007247.3,2577-2595).
gagatcttaagcatgtcat

SEQ ID NO: 304948 - DNA, 19 bp, Homo sapiens
  siRNA target sequence for AP1GBP1 (NM_007247.3,2681-2699).
ggaagctacagtagcaatt

SEQ ID NO: 304949 - DNA, 19 bp, Homo sapiens
  siRNA target sequence for AP1GBP1 (NM_007247.3,2702-2720).
gcagtgagcacacttacaa

SEQ ID NO: 304950 - DNA, 19 bp, Homo sapiens
  siRNA target sequence for AP1GBP1 (NM_007247.3,2707-2725).
gagcacacttacaagctat

SEQ ID NO: 304951 - DNA, 19 bp, Homo sapiens
  siRNA target sequence for AP1GBP1 (NM_007247.3,2852-2870).
gaaaacatcaccatgacat

SEQ ID NO: 304952 - DNA, 19 bp, Homo sapiens
  siRNA target sequence for AP1GBP1 (NM_007247.3,2878-2896).
caaagtaacgacctttgta

SEQ ID NO: 304953 - DNA, 19 bp, Homo sapiens
  siRNA target sequence for AP1GBP1 (NM_007247.3,2927-2945).
ccagctcttgccagtttta

SEQ ID NO: 304954 - DNA, 19 bp, Homo sapiens
  siRNA target sequence for AP1GBP1 (NM_007247.3,3086-3104).
gaaaccccgaacgaatgtt

SEQ ID NO: 304955 - DNA, 19 bp, Homo sapiens
  siRNA target sequence for AP1GBP1 (NM_007247.3,3097-3115).
cgaatgttcggatgacttt

SEQ ID NO: 304956 - DNA, 19 bp, Homo sapiens
  siRNA target sequence for AP1GBP1 (NM_007247.3,3145-3163).
cagcaaatttgacttctta

SEQ ID NO: 304957 - DNA, 19 bp, Homo sapiens
  siRNA target sequence for AP1GBP1 (NM_007247.3,3168-3186).
ccacttcacaaagcaaaat

SEQ ID NO: 304958 - DNA, 19 bp, Homo sapiens
  siRNA target sequence for AP1GBP1 (NM_007247.3,3171-3189).
cttcacaaagcaaaatgaa

SEQ ID NO: 304959 - DNA, 19 bp, Homo sapiens
  siRNA target sequence for AP1GBP1 (NM_007247.3,3325-3343).
cagagaccgttccaatact

SEQ ID NO: 304960 - DNA, 19 bp, Homo sapiens
  siRNA target sequence for AP1GBP1 (NM_007247.3,3327-3345).
gagaccgttccaatactct

SEQ ID NO: 304961 - DNA, 19 bp, Homo sapiens
  siRNA target sequence for AP1GBP1 (NM_007247.3,3366-3384).
ccgtcatccgagacaagta

SEQ ID NO: 304962 - DNA, 19 bp, Homo sapiens
  siRNA target sequence for AP1GBP1 (NM_007247.3,3410-3428).
gaaaatgagagatatgcat

SEQ ID NO: 304963 - DNA, 19 bp, Homo sapiens
  siRNA target sequence for AP1GBP1 (NM_007247.3,3449-3467).
gggagtgccctgaatgtca

SEQ ID NO: 304964 - DNA, 19 bp, Homo sapiens
  siRNA target sequence for AP1GBP1 (NM_007247.3,3534-3552).
cagctcaaggcatggaata

SEQ ID NO: 304965 - DNA, 19 bp, Homo sapiens
  siRNA target sequence for AP1GBP1 (NM_007247.3,3537-3555).
ctcaaggcatggaatattt

SEQ ID NO: 304966 - DNA, 19 bp, Homo sapiens
  siRNA target sequence for AP1GBP1 (NM_007247.3,3618-3636).
cagtgtgcagtgagaaact

SEQ ID NO: 304967 - DNA, 19 bp, Homo sapiens
  siRNA target sequence for AP1GBP1 (NM_007247.3,3646-3664).
gctgaaggacatcgataaa

SEQ ID NO: 304968 - DNA, 19 bp, Homo sapiens
  siRNA target sequence for AP1GBP1 (NM_007247.3,3649-3667).
gaaggacatcgataaagta

SEQ ID NO: 304969 - DNA, 19 bp, Homo sapiens
  siRNA target sequence for AP1GBP1 (NM_007247.3,3655-3673).
catcgataaagtatggaat

SEQ ID NO: 304970 - DNA, 19 bp, Homo sapiens
  siRNA target sequence for AP1GBP1 (NM_007247.3,3848-3866).
cctaaaaaagcattcaact

SEQ ID NO: 304971 - DNA, 19 bp, Homo sapiens
  siRNA target sequence for AP1GBP1 (NM_007247.3,3923-3941).
gccaacttctggatcaact

SEQ ID NO: 304972 - DNA, 19 bp, Homo sapiens
  siRNA target sequence for BRDG1 (NM_012108.1,151-169).
ctctacctttgtactttga

SEQ ID NO: 304973 - DNA, 19 bp, Homo sapiens
  siRNA target sequence for BRDG1 (NM_012108.1,193-211).
caggataccgggagtatga

SEQ ID NO: 304974 - DNA, 19 bp, Homo sapiens
  siRNA target sequence for BRDG1 (NM_012108.1,201-219).
cgggagtatgagcattact

SEQ ID NO: 304975 - DNA, 19 bp, Homo sapiens
  siRNA target sequence for BRDG1 (NM_012108.1,227-245).
gttgagaggaactactctt

SEQ ID NO: 304976 - DNA, 19 bp, Homo sapiens
  siRNA target sequence for BRDG1 (NM_012108.1,256-274).
ccgacaaaaagagtataat

SEQ ID NO: 304977 - DNA, 19 bp, Homo sapiens
  siRNA target sequence for BRDG1 (NM_012108.1,258-276).
gacaaaaagagtataatat

SEQ ID NO: 304978 - DNA, 19 bp, Homo sapiens
  siRNA target sequence for BRDG1 (NM_012108.1,345-363).
gcgaaattcacccttgttt

SEQ ID NO: 304979 - DNA, 19 bp, Homo sapiens
  siRNA target sequence for BRDG1 (NM_012108.1,365-383).
gccgaaagaggaagtacaa

SEQ ID NO: 304980 - DNA, 19 bp, Homo sapiens
  siRNA target sequence for BRDG1 (NM_012108.1,545-563).
gagtacgtccgtggaaaaa

SEQ ID NO: 304981 - DNA, 19 bp, Homo sapiens
  siRNA target sequence for BRDG1 (NM_012108.1,547-565).
gtacgtccgtggaaaaaga

SEQ ID NO: 304982 - DNA, 19 bp, Homo sapiens
  siRNA target sequence for BRDG1 (NM_012108.1,550-568).
cgtccgtggaaaaagagaa

SEQ ID NO: 304983 - DNA, 19 bp, Homo sapiens
  siRNA target sequence for BRDG1 (NM_012108.1,566-584).
gaaggaaccaactgaagat

SEQ ID NO: 304984 - DNA, 19 bp, Homo sapiens
  siRNA target sequence for BRDG1 (NM_012108.1,693-711).
cctggtagtgacagtagaa

SEQ ID NO: 304985 - DNA, 19 bp, Homo sapiens
  siRNA target sequence for BRDG1 (NM_012108.1,709-727).
gaaactactccatcactat

SEQ ID NO: 304986 - DNA, 19 bp, Homo sapiens
  siRNA target sequence for BRDG1 (NM_012108.1,724-742).
ctattcggcaggagataga

SEQ ID NO: 304987 - DNA, 19 bp, Homo sapiens
  siRNA target sequence for BRDG1 (NM_012108.1,748-766).
caagaatcaagcactacaa

SEQ ID NO: 304988 - DNA, 19 bp, Homo sapiens
  siRNA target sequence for BRDG1 (NM_012108.1,777-795).
gtaggacaaaactacacta

SEQ ID NO: 304989 - DNA, 19 bp, Homo sapiens
  siRNA target sequence for BRDG1 (NM_012108.1,854-872).
gaaggagactcgaggaaat

SEQ ID NO: 304990 - DNA, 19 bp, Homo sapiens
  siRNA target sequence for STAM2 (NM_005843.3,396-414).
gccacgaatgagtacaaca

SEQ ID NO: 304991 - DNA, 19 bp, Homo sapiens
  siRNA target sequence for STAM2 (NM_005843.3,407-425).
gtacaacactacagaagat

SEQ ID NO: 304992 - DNA, 19 bp, Homo sapiens
  siRNA target sequence for STAM2 (NM_005843.3,420-438).
gaagattggagtcttatta

SEQ ID NO: 304993 - DNA, 19 bp, Homo sapiens
  siRNA target sequence for STAM2 (NM_005843.3,440-458).
ggacatatgtgacaaagtt

SEQ ID NO: 304994 - DNA, 19 bp, Homo sapiens
  siRNA target sequence for STAM2 (NM_005843.3,539-557).
gcaagcactaactcttctt

SEQ ID NO: 304995 - DNA, 19 bp, Homo sapiens
  siRNA target sequence for STAM2 (NM_005843.3,608-626).
ccgtgattttgcaacagaa

SEQ ID NO: 304996 - DNA, 19 bp, Homo sapiens
  siRNA target sequence for STAM2 (NM_005843.3,624-642).
gaagtacgtgctgtgatta

SEQ ID NO: 304997 - DNA, 19 bp, Homo sapiens
  siRNA target sequence for STAM2 (NM_005843.3,719-737).
ccctcagtttagtctgata

SEQ ID NO: 304998 - DNA, 19 bp, Homo sapiens
  siRNA target sequence for STAM2 (NM_005843.3,720-738).
cctcagtttagtctgatat

SEQ ID NO: 304999 - DNA, 19 bp, Homo sapiens
  siRNA target sequence for STAM2 (NM_005843.3,730-748).
gtctgatatctgcaactat

SEQ ID NO: 305000 - DNA, 19 bp, Homo sapiens
  siRNA target sequence for STAM2 (NM_005843.3,732-750).
ctgatatctgcaactatta

SEQ ID NO: 305001 - DNA, 19 bp, Homo sapiens
  siRNA target sequence for STAM2 (NM_005843.3,739-757).
ctgcaactattaaatctat

SEQ ID NO: 305002 - DNA, 19 bp, Homo sapiens
  siRNA target sequence for STAM2 (NM_005843.3,741-759).
gcaactattaaatctatga

SEQ ID NO: 305003 - DNA, 19 bp, Homo sapiens
  siRNA target sequence for STAM2 (NM_005843.3,822-840).
ggtacgtcatcgaacaaaa

SEQ ID NO: 305004 - DNA, 19 bp, Homo sapiens
  siRNA target sequence for STAM2 (NM_005843.3,823-841).
gtacgtcatcgaacaaaaa

SEQ ID NO: 305005 - DNA, 19 bp, Homo sapiens
  siRNA target sequence for STAM2 (NM_005843.3,826-844).
cgtcatcgaacaaaaacaa

SEQ ID NO: 305006 - DNA, 19 bp, Homo sapiens
  siRNA target sequence for STAM2 (NM_005843.3,827-845).
gtcatcgaacaaaaacaaa

SEQ ID NO: 305007 - DNA, 19 bp, Homo sapiens
  siRNA target sequence for STAM2 (NM_005843.3,852-870).
gaagacatagctaaagcta

SEQ ID NO: 305008 - DNA, 19 bp, Homo sapiens
  siRNA target sequence for STAM2 (NM_005843.3,920-938).
cttatatccatcttcagaa

SEQ ID NO: 305009 - DNA, 19 bp, Homo sapiens
  siRNA target sequence for STAM2 (NM_005843.3,963-981).
cggaaagtgagagctttat

SEQ ID NO: 305010 - DNA, 19 bp, Homo sapiens
  siRNA target sequence for STAM2 (NM_005843.3,964-982).
ggaaagtgagagctttata

SEQ ID NO: 305011 - DNA, 19 bp, Homo sapiens
  siRNA target sequence for STAM2 (NM_005843.3,965-983).
gaaagtgagagctttatat

SEQ ID NO: 305012 - DNA, 19 bp, Homo sapiens
  siRNA target sequence for STAM2 (NM_005843.3,969-987).
gtgagagctttatatgatt

SEQ ID NO: 305013 - DNA, 19 bp, Homo sapiens
  siRNA target sequence for STAM2 (NM_005843.3,971-989).
gagagctttatatgatttt

SEQ ID NO: 305014 - DNA, 19 bp, Homo sapiens
  siRNA target sequence for STAM2 (NM_005843.3,1149-1167).
gcggctgtggacaaattga

SEQ ID NO: 305015 - DNA, 19 bp, Homo sapiens
  siRNA target sequence for STAM2 (NM_005843.3,1150-1168).
cggctgtggacaaattgaa

SEQ ID NO: 305016 - DNA, 19 bp, Homo sapiens
  siRNA target sequence for STAM2 (NM_005843.3,1206-1224).
gagcctgagcctgtttata

SEQ ID NO: 305017 - DNA, 19 bp, Homo sapiens
  siRNA target sequence for STAM2 (NM_005843.3,1208-1226).
gcctgagcctgtttatata

SEQ ID NO: 305018 - DNA, 19 bp, Homo sapiens
  siRNA target sequence for STAM2 (NM_005843.3,1256-1274).
ggtacttcagagtatagat

SEQ ID NO: 305019 - DNA, 19 bp, Homo sapiens
  siRNA target sequence for STAM2 (NM_005843.3,1291-1309).
cagactcccaagacctttt

SEQ ID NO: 305020 - DNA, 19 bp, Homo sapiens
  siRNA target sequence for STAM2 (NM_005843.3,1334-1352).
gatgggtccaatgatagat

SEQ ID NO: 305021 - DNA, 19 bp, Homo sapiens
  siRNA target sequence for STAM2 (NM_005843.3,1380-1398).
cattcagaattgtctgaat

SEQ ID NO: 305022 - DNA, 19 bp, Homo sapiens
  siRNA target sequence for STAM2 (NM_005843.3,1419-1437).
gctctggaactatataaca

SEQ ID NO: 305023 - DNA, 19 bp, Homo sapiens
  siRNA target sequence for STAM2 (NM_005843.3,1420-1438).
ctctggaactatataacaa

SEQ ID NO: 305024 - DNA, 19 bp, Homo sapiens
  siRNA target sequence for STAM2 (NM_005843.3,1458-1476).
gtgtactcagtctattcaa

SEQ ID NO: 305025 - DNA, 19 bp, Homo sapiens
  siRNA target sequence for STAM2 (NM_005843.3,1507-1525).
catcatctggggttccaat

SEQ ID NO: 305026 - DNA, 19 bp, Homo sapiens
  siRNA target sequence for STAM2 (NM_005843.3,1516-1534).
gggttccaatgcagacata

SEQ ID NO: 305027 - DNA, 19 bp, Homo sapiens
  siRNA target sequence for STAM2 (NM_005843.3,1517-1535).
ggttccaatgcagacatat

SEQ ID NO: 305028 - DNA, 19 bp, Homo sapiens
  siRNA target sequence for STAM2 (NM_005843.3,1526-1544).
gcagacatatccagttcaa

SEQ ID NO: 305029 - DNA, 19 bp, Homo sapiens
  siRNA target sequence for STAM2 (NM_005843.3,1529-1547).
gacatatccagttcaatca

SEQ ID NO: 305030 - DNA, 19 bp, Homo sapiens
  siRNA target sequence for STAM2 (NM_005843.3,1546-1564).
cacatggtggaaactatat

SEQ ID NO: 305031 - DNA, 19 bp, Homo sapiens
  siRNA target sequence for STAM2 (NM_005843.3,1606-1624).
gcctaggacccgatcaaat

SEQ ID NO: 305032 - DNA, 19 bp, Homo sapiens
  siRNA target sequence for STAM2 (NM_005843.3,1636-1654).
gatctctgcctccaaatgt

SEQ ID NO: 305033 - DNA, 19 bp, Homo sapiens
  siRNA target sequence for STAM2 (NM_005843.3,1641-1659).
ctgcctccaaatgtgaatt

SEQ ID NO: 305034 - DNA, 19 bp, Homo sapiens
  siRNA target sequence for STAM2 (NM_005843.3,1714-1732).
ctgtttccaatcctactta

SEQ ID NO: 305035 - DNA, 19 bp, Homo sapiens
  siRNA target sequence for STAM2 (NM_005843.3,1716-1734).
gtttccaatcctacttata

SEQ ID NO: 305036 - DNA, 19 bp, Homo sapiens
  siRNA target sequence for STAM2 (NM_005843.3,1720-1738).
ccaatcctacttatatgaa

SEQ ID NO: 305037 - DNA, 19 bp, Homo sapiens
  siRNA target sequence for STAM2 (NM_005843.3,1736-1754).
gaaccagaactctaaccta

SEQ ID NO: 305038 - DNA, 19 bp, Homo sapiens
  siRNA target sequence for STAM2 (NM_005843.3,1887-1905).
gcacagcagcacacaaatt

SEQ ID NO: 305039 - DNA, 19 bp, Homo sapiens
  siRNA target sequence for STN2 (NM_033104.2,506-524).
gggttcagtttgaagatga

SEQ ID NO: 305040 - DNA, 19 bp, Homo sapiens
  siRNA target sequence for STN2 (NM_033104.2,566-584).
ctgagacagccctaccatt

SEQ ID NO: 305041 - DNA, 19 bp, Homo sapiens
  siRNA target sequence for STN2 (NM_033104.2,653-671).
gctggaccacccattctga

SEQ ID NO: 305042 - DNA, 19 bp, Homo sapiens
  siRNA target sequence for STN2 (NM_033104.2,654-672).
ctggaccacccattctgaa

SEQ ID NO: 305043 - DNA, 19 bp, Homo sapiens
  siRNA target sequence for STN2 (NM_033104.2,690-708).
ctttggatgttcgtataca

SEQ ID NO: 305044 - DNA, 19 bp, Homo sapiens
  siRNA target sequence for STN2 (NM_033104.2,782-800).
cctcgcttcaagaagatga

SEQ ID NO: 305045 - DNA, 19 bp, Homo sapiens
  siRNA target sequence for STN2 (NM_033104.2,783-801).
ctcgcttcaagaagatgaa

SEQ ID NO: 305046 - DNA, 19 bp, Homo sapiens
  siRNA target sequence for STN2 (NM_033104.2,902-920).
cctttgatgacaatgaagt

SEQ ID NO: 305047 - DNA, 19 bp, Homo sapiens
  siRNA target sequence for STN2 (NM_033104.2,1033-1051).
cgtcccaagagcactttga

SEQ ID NO: 305048 - DNA, 19 bp, Homo sapiens
  siRNA target sequence for STN2 (NM_033104.2,1097-1115).
gcacgccttctgtaactga

SEQ ID NO: 305049 - DNA, 19 bp, Homo sapiens
  siRNA target sequence for STN2 (NM_033104.2,1179-1197).
ccctatcaaccctttcagt

SEQ ID NO: 305050 - DNA, 19 bp, Homo sapiens
  siRNA target sequence for STN2 (NM_033104.2,1216-1234).
gagaggcgctcccaaaaca

SEQ ID NO: 305051 - DNA, 19 bp, Homo sapiens
  siRNA target sequence for STN2 (NM_033104.2,1224-1242).
ctcccaaaacagttccatt

SEQ ID NO: 305052 - DNA, 19 bp, Homo sapiens
  siRNA target sequence for STN2 (NM_033104.2,1255-1273).
ggcaaaagccaaagagatt

SEQ ID NO: 305053 - DNA, 19 bp, Homo sapiens
  siRNA target sequence for STN2 (NM_033104.2,1293-1311).
ggatgccatcagttttgat

SEQ ID NO: 305054 - DNA, 19 bp, Homo sapiens
  siRNA target sequence for STN2 (NM_033104.2,1333-1351).
cactctgatgctgttgaaa

SEQ ID NO: 305055 - DNA, 19 bp, Homo sapiens
  siRNA target sequence for STN2 (NM_033104.2,1356-1374).
caaacaactccaaattgat

SEQ ID NO: 305056 - DNA, 19 bp, Homo sapiens
  siRNA target sequence for STN2 (NM_033104.2,1386-1404).
ctttggcagtgcaactcta

SEQ ID NO: 305057 - DNA, 19 bp, Homo sapiens
  siRNA target sequence for STN2 (NM_033104.2,1416-1434).
cccagtagcctggattgaa

SEQ ID NO: 305058 - DNA, 19 bp, Homo sapiens
  siRNA target sequence for STN2 (NM_033104.2,1504-1522).
cctgagaagaaaaacatca

SEQ ID NO: 305059 - DNA, 19 bp, Homo sapiens
  siRNA target sequence for STN2 (NM_033104.2,1541-1559).
gaccgatcttcgtcaaact

SEQ ID NO: 305060 - DNA, 19 bp, Homo sapiens
  siRNA target sequence for STN2 (NM_033104.2,1543-1561).
ccgatcttcgtcaaactga

SEQ ID NO: 305061 - DNA, 19 bp, Homo sapiens
  siRNA target sequence for STN2 (NM_033104.2,1629-1647).
ggagatctgtcatgagatt

SEQ ID NO: 305062 - DNA, 19 bp, Homo sapiens
  siRNA target sequence for STN2 (NM_033104.2,1630-1648).
gagatctgtcatgagattt

SEQ ID NO: 305063 - DNA, 19 bp, Homo sapiens
  siRNA target sequence for STN2 (NM_033104.2,1632-1650).
gatctgtcatgagatttca

SEQ ID NO: 305064 - DNA, 19 bp, Homo sapiens
  siRNA target sequence for STN2 (NM_033104.2,1708-1726).
cgtgtcacctataaagaga

SEQ ID NO: 305065 - DNA, 19 bp, Homo sapiens
  siRNA target sequence for STN2 (NM_033104.2,1768-1786).
gagagggaacaggtgatta

SEQ ID NO: 305066 - DNA, 19 bp, Homo sapiens
  siRNA target sequence for STN2 (NM_033104.2,1772-1790).
gggaacaggtgattaagct

SEQ ID NO: 305067 - DNA, 19 bp, Homo sapiens
  siRNA target sequence for STN2 (NM_033104.2,1791-1809).
gggcaccaccaattacgat

SEQ ID NO: 305068 - DNA, 19 bp, Homo sapiens
  siRNA target sequence for STN2 (NM_033104.2,1880-1898).
gcacagttggcctcaacta

SEQ ID NO: 305069 - DNA, 19 bp, Homo sapiens
  siRNA target sequence for STN2 (NM_033104.2,1889-1907).
gcctcaactaccttgaaga

SEQ ID NO: 305070 - DNA, 19 bp, Homo sapiens
  siRNA target sequence for STN2 (NM_033104.2,2055-2073).
cctcgtcaaagggaatgaa

SEQ ID NO: 305071 - DNA, 19 bp, Homo sapiens
  siRNA target sequence for STN2 (NM_033104.2,2274-2292).
gacggccacaagtgtcaat

SEQ ID NO: 305072 - DNA, 19 bp, Homo sapiens
  siRNA target sequence for STN2 (NM_033104.2,2515-2533).
gagcctgtcatgagagtaa

SEQ ID NO: 305073 - DNA, 19 bp, Homo sapiens
  siRNA target sequence for STN2 (NM_033104.2,2560-2578).
gccttcaactccattgtgt

SEQ ID NO: 305074 - DNA, 19 bp, Homo sapiens
  siRNA target sequence for STN2 (NM_033104.2,2590-2608).
cgactgccggacaaaaact

SEQ ID NO: 305075 - DNA, 19 bp, Homo sapiens
  siRNA target sequence for STN2 (NM_033104.2,2615-2633).
ccggtcacccacactgttt

SEQ ID NO: 305076 - DNA, 19 bp, Homo sapiens
  siRNA target sequence for STN2 (NM_033104.2,2617-2635).
ggtcacccacactgtttct

SEQ ID NO: 305077 - DNA, 19 bp, Homo sapiens
  siRNA target sequence for STN2 (NM_033104.2,2618-2636).
gtcacccacactgtttctt

SEQ ID NO: 305078 - DNA, 19 bp, Homo sapiens
  siRNA target sequence for STN2 (NM_033104.2,2734-2752).
gccagcgtgagatctatct

SEQ ID NO: 305079 - DNA, 19 bp, Homo sapiens
  siRNA target sequence for STN2 (NM_033104.2,2736-2754).
cagcgtgagatctatctct

SEQ ID NO: 305080 - DNA, 19 bp, Homo sapiens
  siRNA target sequence for STN2 (NM_033104.2,2742-2760).
gagatctatctctgtagaa

SEQ ID NO: 305081 - DNA, 19 bp, Homo sapiens
  siRNA target sequence for STN2 (NM_033104.2,2773-2791).
gtcaggaagtgggtcaatt

SEQ ID NO: 305082 - DNA, 19 bp, Homo sapiens
  siRNA target sequence for STN2 (NM_033104.2,2775-2793).
caggaagtgggtcaattat

SEQ ID NO: 305083 - DNA, 19 bp, Homo sapiens
  siRNA target sequence for STN2 (NM_033104.2,2841-2859).
gcttccaactccatttgtt

SEQ ID NO: 305084 - DNA, 19 bp, Homo sapiens
  siRNA target sequence for SEC22L1 (NM_004892.3,204-222).
gaccttcaacagtatcaga

SEQ ID NO: 305085 - DNA, 19 bp, Homo sapiens
  siRNA target sequence for SEC22L1 (NM_004892.3,223-241).
gtcaggctaagcaactctt

SEQ ID NO: 305086 - DNA, 19 bp, Homo sapiens
  siRNA target sequence for SEC22L1 (NM_004892.3,228-246).
gctaagcaactctttcgaa

SEQ ID NO: 305087 - DNA, 19 bp, Homo sapiens
  siRNA target sequence for SEC22L1 (NM_004892.3,229-247).
ctaagcaactctttcgaaa

SEQ ID NO: 305088 - DNA, 19 bp, Homo sapiens
  siRNA target sequence for SEC22L1 (NM_004892.3,239-257).
ctttcgaaagttgaatgaa

SEQ ID NO: 305089 - DNA, 19 bp, Homo sapiens
  siRNA target sequence for SEC22L1 (NM_004892.3,258-276).
cagtcccctaccagatgta

SEQ ID NO: 305090 - DNA, 19 bp, Homo sapiens
  siRNA target sequence for SEC22L1 (NM_004892.3,289-307).
gagccatgacttttcacta

SEQ ID NO: 305091 - DNA, 19 bp, Homo sapiens
  siRNA target sequence for SEC22L1 (NM_004892.3,370-388).
cttttgcctacctagaaga

SEQ ID NO: 305092 - DNA, 19 bp, Homo sapiens
  siRNA target sequence for SEC22L1 (NM_004892.3,376-394).
cctacctagaagatttgca

SEQ ID NO: 305093 - DNA, 19 bp, Homo sapiens
  siRNA target sequence for SEC22L1 (NM_004892.3,384-402).
gaagatttgcactcagaat

SEQ ID NO: 305094 - DNA, 19 bp, Homo sapiens
  siRNA target sequence for SEC22L1 (NM_004892.3,435-453).
gtgtcccgaccctattcct

SEQ ID NO: 305095 - DNA, 19 bp, Homo sapiens
  siRNA target sequence for SEC22L1 (NM_004892.3,503-521).
cagtcgtgctcgaagaaat

SEQ ID NO: 305096 - DNA, 19 bp, Homo sapiens
  siRNA target sequence for SEC22L1 (NM_004892.3,505-523).
gtcgtgctcgaagaaatct

SEQ ID NO: 305097 - DNA, 19 bp, Homo sapiens
  siRNA target sequence for SEC22L1 (NM_004892.3,526-544).
gctccatcaacactgaatt

SEQ ID NO: 305098 - DNA, 19 bp, Homo sapiens
  siRNA target sequence for SEC22L1 (NM_004892.3,660-678).
cgccaggatgcgaagtact

SEQ ID NO: 305099 - DNA, 19 bp, Homo sapiens
  siRNA target sequence for SEC22L1 (NM_004892.3,661-679).
gccaggatgcgaagtactt

SEQ ID NO: 305100 - DNA, 19 bp, Homo sapiens
  siRNA target sequence for SEC22L1 (NM_004892.3,666-684).
gatgcgaagtacttgaaca

SEQ ID NO: 305101 - DNA, 19 bp, Homo sapiens
  siRNA target sequence for SEC22L1 (NM_004892.3,728-746).
catcatgttaatagtgtat

SEQ ID NO: 305102 - DNA, 19 bp, Homo sapiens
  siRNA target sequence for SEC22L3 (NM_004206.2,174-192).
cagcctctactgattttta

SEQ ID NO: 305103 - DNA, 19 bp, Homo sapiens
  siRNA target sequence for SEC22L3 (NM_004206.2,177-195).
cctctactgatttttacca

SEQ ID NO: 305104 - DNA, 19 bp, Homo sapiens
  siRNA target sequence for SEC22L3 (NM_004206.2,219-237).
ggagacggctcaagagttt

SEQ ID NO: 305105 - DNA, 19 bp, Homo sapiens
  siRNA target sequence for SEC22L3 (NM_004206.2,278-296).
gaaggttgtgactttagta

SEQ ID NO: 305106 - DNA, 19 bp, Homo sapiens
  siRNA target sequence for SEC22L3 (NM_004206.2,282-300).
gttgtgactttagtataca

SEQ ID NO: 305107 - DNA, 19 bp, Homo sapiens
  siRNA target sequence for SEC22L3 (NM_004206.2,394-412).
ggaattcacagcttcctat

SEQ ID NO: 305108 - DNA, 19 bp, Homo sapiens
  siRNA target sequence for SEC22L3 (NM_004206.2,438-456).
ccaggccatacgcttttct

SEQ ID NO: 305109 - DNA, 19 bp, Homo sapiens
  siRNA target sequence for SEC22L3 (NM_004206.2,439-457).
caggccatacgcttttctt

SEQ ID NO: 305110 - DNA, 19 bp, Homo sapiens
  siRNA target sequence for SEC22L3 (NM_004206.2,441-459).
ggccatacgcttttcttga

SEQ ID NO: 305111 - DNA, 19 bp, Homo sapiens
  siRNA target sequence for SEC22L3 (NM_004206.2,444-462).
catacgcttttcttgagtt

SEQ ID NO: 305112 - DNA, 19 bp, Homo sapiens
  siRNA target sequence for SEC22L3 (NM_004206.2,478-496).
gaaagtgaagtggcatttt

SEQ ID NO: 305113 - DNA, 19 bp, Homo sapiens
  siRNA target sequence for SEC22L3 (NM_004206.2,487-505).
gtggcattttaactatgta

SEQ ID NO: 305114 - DNA, 19 bp, Homo sapiens
  siRNA target sequence for SEC22L3 (NM_004206.2,711-729).
gtgctgccctgaatctcat

SEQ ID NO: 305115 - DNA, 19 bp, Homo sapiens
  siRNA target sequence for SEC22L3 (NM_004206.2,767-785).
gcccatgaggaaattggaa

SEQ ID NO: 305116 - DNA, 19 bp, Homo sapiens
  siRNA target sequence for SEC22L3 (NM_004206.2,806-824).
cctttcgtagcctgcattt

SEQ ID NO: 305117 - DNA, 19 bp, Homo sapiens
  siRNA target sequence for SEC22L3 (NM_004206.2,807-825).
ctttcgtagcctgcatttt

SEQ ID NO: 305118 - DNA, 19 bp, Homo sapiens
  siRNA target sequence for SEC22L3 (NM_032970.2,875-893).
gtgcttatgctgctcttta

SEQ ID NO: 305119 - DNA, 19 bp, Homo sapiens
  siRNA target sequence for SEC22L3 (NM_032970.2,877-895).
gcttatgctgctctttatt

SEQ ID NO: 305120 - DNA, 19 bp, Homo sapiens
  siRNA target sequence for SEC22L3 (NM_032970.2,963-981).
cttttctgtcttcatatca

SEQ ID NO: 305121 - DNA, 19 bp, Homo sapiens
  siRNA target sequence for RAB9P40 (NM_005833.2,279-297).
gagggaaggtcttcattgt

SEQ ID NO: 305122 - DNA, 19 bp, Homo sapiens
  siRNA target sequence for RAB9P40 (NM_005833.2,296-314).
gttgggggagcaaatccaa

SEQ ID NO: 305123 - DNA, 19 bp, Homo sapiens
  siRNA target sequence for RAB9P40 (NM_005833.2,339-357).
ccatggatctgggaaaaca

SEQ ID NO: 305124 - DNA, 19 bp, Homo sapiens
  siRNA target sequence for RAB9P40 (NM_005833.2,463-481).
ccaatcaggaaatcgaaat

SEQ ID NO: 305125 - DNA, 19 bp, Homo sapiens
  siRNA target sequence for RAB9P40 (NM_005833.2,468-486).
caggaaatcgaaattgtct

SEQ ID NO: 305126 - DNA, 19 bp, Homo sapiens
  siRNA target sequence for RAB9P40 (NM_005833.2,584-602).
ggaaaccagctatatgtct

SEQ ID NO: 305127 - DNA, 19 bp, Homo sapiens
  siRNA target sequence for RAB9P40 (NM_005833.2,685-703).
gccagagacacttggaaat

SEQ ID NO: 305128 - DNA, 19 bp, Homo sapiens
  siRNA target sequence for RAB9P40 (NM_005833.2,794-812).
gacctccactgcattgata

SEQ ID NO: 305129 - DNA, 19 bp, Homo sapiens
  siRNA target sequence for RAB9P40 (NM_005833.2,797-815).
ctccactgcattgatataa

SEQ ID NO: 305130 - DNA, 19 bp, Homo sapiens
  siRNA target sequence for RAB9P40 (NM_005833.2,971-989).
cagcattggaccttgctta

SEQ ID NO: 305131 - DNA, 19 bp, Homo sapiens
  siRNA target sequence for RAB9P40 (NM_005833.2,973-991).
gcattggaccttgcttaaa

SEQ ID NO: 305132 - DNA, 19 bp, Homo sapiens
  siRNA target sequence for RAB9P40 (NM_005833.2,979-997).
gaccttgcttaaatttgat

SEQ ID NO: 305133 - DNA, 19 bp, Homo sapiens
  siRNA target sequence for RAB9P40 (NM_005833.2,1014-1032).
gacgattggaccattccat

SEQ ID NO: 305134 - DNA, 19 bp, Homo sapiens
  siRNA target sequence for RAB9P40 (NM_005833.2,1022-1040).
gaccattccatgtgtatca

SEQ ID NO: 305135 - DNA, 19 bp, Homo sapiens
  siRNA target sequence for ELMO2 (NM_022086.6,213-231).
gccaccaccgtcagacatt

SEQ ID NO: 305136 - DNA, 19 bp, Homo sapiens
  siRNA target sequence for ELMO2 (NM_022086.6,215-233).
caccaccgtcagacattgt

SEQ ID NO: 305137 - DNA, 19 bp, Homo sapiens
  siRNA target sequence for ELMO2 (NM_022086.6,217-235).
ccaccgtcagacattgtca

SEQ ID NO: 305138 - DNA, 19 bp, Homo sapiens
  siRNA target sequence for ELMO2 (NM_022086.6,218-236).
caccgtcagacattgtcaa

SEQ ID NO: 305139 - DNA, 19 bp, Homo sapiens
  siRNA target sequence for ELMO2 (NM_022086.6,296-314).
ccctggcatccattatcaa

SEQ ID NO: 305140 - DNA, 19 bp, Homo sapiens
  siRNA target sequence for ELMO2 (NM_022086.6,336-354).
gttgccaaacccagagtat

SEQ ID NO: 305141 - DNA, 19 bp, Homo sapiens
  siRNA target sequence for ELMO2 (NM_022086.6,340-358).
ccaaacccagagtattata

SEQ ID NO: 305142 - DNA, 19 bp, Homo sapiens
  siRNA target sequence for ELMO2 (NM_022086.6,400-418).
cagactcgcagtgacatta

SEQ ID NO: 305143 - DNA, 19 bp, Homo sapiens
  siRNA target sequence for ELMO2 (NM_022086.6,701-719).
cctgggacatggtttcaat

SEQ ID NO: 305144 - DNA, 19 bp, Homo sapiens
  siRNA target sequence for ELMO2 (NM_022086.6,733-751).
cagattgcagggtatgtga

SEQ ID NO: 305145 - DNA, 19 bp, Homo sapiens
  siRNA target sequence for ELMO2 (NM_022086.6,758-776).
ccatggtggacgtgtcaat

SEQ ID NO: 305146 - DNA, 19 bp, Homo sapiens
  siRNA target sequence for ELMO2 (NM_022086.6,762-780).
ggtggacgtgtcaatcctt

SEQ ID NO: 305147 - DNA, 19 bp, Homo sapiens
  siRNA target sequence for ELMO2 (NM_022086.6,802-820).
gagagcatggtcttgaaca

SEQ ID NO: 305148 - DNA, 19 bp, Homo sapiens
  siRNA target sequence for ELMO2 (NM_022086.6,909-927).
ctacgccattgcactgatt

SEQ ID NO: 305149 - DNA, 19 bp, Homo sapiens
  siRNA target sequence for ELMO2 (NM_022086.6,990-1008).
gaagcatctccggtctata

SEQ ID NO: 305150 - DNA, 19 bp, Homo sapiens
  siRNA target sequence for ELMO2 (NM_022086.6,1001-1019).
ggtctataatcctgaatca

SEQ ID NO: 305151 - DNA, 19 bp, Homo sapiens
  siRNA target sequence for ELMO2 (NM_022086.6,1053-1071).
gatggcccatcagctatat

SEQ ID NO: 305152 - DNA, 19 bp, Homo sapiens
  siRNA target sequence for ELMO2 (NM_022086.6,1395-1413).
cagtagccgggaagacaaa

SEQ ID NO: 305153 - DNA, 19 bp, Homo sapiens
  siRNA target sequence for ELMO2 (NM_022086.6,1397-1415).
gtagccgggaagacaaaca

SEQ ID NO: 305154 - DNA, 19 bp, Homo sapiens
  siRNA target sequence for ELMO2 (NM_022086.6,1439-1457).
ccattgagctcaccaaaat

SEQ ID NO: 305155 - DNA, 19 bp, Homo sapiens
  siRNA target sequence for ELMO2 (NM_022086.6,1476-1494).
ggttggggaactaccaaat

SEQ ID NO: 305156 - DNA, 19 bp, Homo sapiens
  siRNA target sequence for ELMO2 (NM_022086.6,1636-1654).
gtcgtccgagagcaaatca

SEQ ID NO: 305157 - DNA, 19 bp, Homo sapiens
  siRNA target sequence for ELMO2 (NM_022086.6,1638-1656).
cgtccgagagcaaatcact

SEQ ID NO: 305158 - DNA, 19 bp, Homo sapiens
  siRNA target sequence for ELMO2 (NM_022086.6,1707-1725).
gcgtagcctgagttactct

SEQ ID NO: 305159 - DNA, 19 bp, Homo sapiens
  siRNA target sequence for ELMO2 (NM_022086.6,1716-1734).
gagttactctgagattcta

SEQ ID NO: 305160 - DNA, 19 bp, Homo sapiens
  siRNA target sequence for ELMO2 (NM_022086.6,1754-1772).
ggatgagtcaggatgactt

SEQ ID NO: 305161 - DNA, 19 bp, Homo sapiens
  siRNA target sequence for ELMO2 (NM_022086.6,2131-2149).
cctgatgagaccttaaact

SEQ ID NO: 305162 - DNA, 19 bp, Homo sapiens
  siRNA target sequence for ELMO2 (NM_022086.6,2148-2166).
cttcatcgcacctaataaa

SEQ ID NO: 305163 - DNA, 19 bp, Homo sapiens
  siRNA target sequence for ELMO2 (NM_022086.6,2151-2169).
catcgcacctaataaatat

SEQ ID NO: 305164 - DNA, 19 bp, Homo sapiens
  siRNA target sequence for ELMO2 (NM_022086.6,2345-2363).
gctatgactttgtctatca

SEQ ID NO: 305165 - DNA, 19 bp, Homo sapiens
  siRNA target sequence for ELMO3 (NM_024712.2,334-352).
gtaatgggctccagatact

SEQ ID NO: 305166 - DNA, 19 bp, Homo sapiens
  siRNA target sequence for ELMO3 (NM_024712.2,347-365).
gatactaggcaccatcatt

SEQ ID NO: 305167 - DNA, 19 bp, Homo sapiens
  siRNA target sequence for ELMO3 (NM_024712.2,706-724).
gcaagcacatgcttgacta

SEQ ID NO: 305168 - DNA, 19 bp, Homo sapiens
  siRNA target sequence for ELMO3 (NM_024712.2,707-725).
caagcacatgcttgactat

SEQ ID NO: 305169 - DNA, 19 bp, Homo sapiens
  siRNA target sequence for ELMO3 (NM_024712.2,711-729).
cacatgcttgactatcttt

SEQ ID NO: 305170 - DNA, 19 bp, Homo sapiens
  siRNA target sequence for ELMO3 (NM_024712.2,736-754).
ggaaccttcgccagttcat

SEQ ID NO: 305171 - DNA, 19 bp, Homo sapiens
  siRNA target sequence for ELMO3 (NM_024712.2,740-758).
ccttcgccagttcatctat

SEQ ID NO: 305172 - DNA, 19 bp, Homo sapiens
  siRNA target sequence for ELMO3 (NM_024712.2,741-759).
cttcgccagttcatctata

SEQ ID NO: 305173 - DNA, 19 bp, Homo sapiens
  siRNA target sequence for ELMO3 (NM_024712.2,744-762).
cgccagttcatctataaga

SEQ ID NO: 305174 - DNA, 19 bp, Homo sapiens
  siRNA target sequence for ELMO3 (NM_024712.2,1000-1018).
gcaaactgggcttttctaa

SEQ ID NO: 305175 - DNA, 19 bp, Homo sapiens
  siRNA target sequence for ELMO3 (NM_024712.2,1107-1125).
gcgtacagccggtttgtgt

SEQ ID NO: 305176 - DNA, 19 bp, Homo sapiens
  siRNA target sequence for ELMO3 (NM_024712.2,1108-1126).
cgtacagccggtttgtgtt

SEQ ID NO: 305177 - DNA, 19 bp, Homo sapiens
  siRNA target sequence for ELMO3 (NM_024712.2,1245-1263).
gacttctcacccatgttct

SEQ ID NO: 305178 - DNA, 19 bp, Homo sapiens
  siRNA target sequence for ELMO3 (NM_024712.2,1442-1460).
ggtgaatgcgctcacttat

SEQ ID NO: 305179 - DNA, 19 bp, Homo sapiens
  siRNA target sequence for ELMO3 (NM_024712.2,1510-1528).
cactggctccccctatact

SEQ ID NO: 305180 - DNA, 19 bp, Homo sapiens
  siRNA target sequence for ELMO3 (NM_024712.2,1839-1857).
gagttggccttctcaatca

SEQ ID NO: 305181 - DNA, 19 bp, Homo sapiens
  siRNA target sequence for ELMO3 (NM_024712.2,1878-1896).
gaagcgtacctcaacttca

SEQ ID NO: 305182 - DNA, 19 bp, Homo sapiens
  siRNA target sequence for AMPH (NM_001635.2,177-195).
cgaacagttcgaagaatat

SEQ ID NO: 305183 - DNA, 19 bp, Homo sapiens
  siRNA target sequence for AMPH (NM_001635.2,240-258).
gcgagaactccgaggatat

SEQ ID NO: 305184 - DNA, 19 bp, Homo sapiens
  siRNA target sequence for AMPH (NM_001635.2,241-259).
cgagaactccgaggatatt

SEQ ID NO: 305185 - DNA, 19 bp, Homo sapiens
  siRNA target sequence for AMPH (NM_001635.2,242-260).
gagaactccgaggatattt

SEQ ID NO: 305186 - DNA, 19 bp, Homo sapiens
  siRNA target sequence for AMPH (NM_001635.2,306-324).
gtcgctgcatgaagtctat

SEQ ID NO: 305187 - DNA, 19 bp, Homo sapiens
  siRNA target sequence for AMPH (NM_001635.2,444-462).
ggggcaatttcctgacata

SEQ ID NO: 305188 - DNA, 19 bp, Homo sapiens
  siRNA target sequence for AMPH (NM_001635.2,445-463).
gggcaatttcctgacataa

SEQ ID NO: 305189 - DNA, 19 bp, Homo sapiens
  siRNA target sequence for AMPH (NM_001635.2,552-570).
ggatgagagtcgaatctct

SEQ ID NO: 305190 - DNA, 19 bp, Homo sapiens
  siRNA target sequence for AMPH (NM_001635.2,553-571).
gatgagagtcgaatctcta

SEQ ID NO: 305191 - DNA, 19 bp, Homo sapiens
  siRNA target sequence for AMPH (NM_001635.2,634-652).
gaagagttaccatcattat

SEQ ID NO: 305192 - DNA, 19 bp, Homo sapiens
  siRNA target sequence for AMPH (NM_001635.2,637-655).
gagttaccatcattatggt

SEQ ID NO: 305193 - DNA, 19 bp, Homo sapiens
  siRNA target sequence for AMPH (NM_001635.2,659-677).
gacgagttggattttatgt

SEQ ID NO: 305194 - DNA, 19 bp, Homo sapiens
  siRNA target sequence for AMPH (NM_001635.2,699-717).
cagccttgaagccaagttt

SEQ ID NO: 305195 - DNA, 19 bp, Homo sapiens
  siRNA target sequence for AMPH (NM_001635.2,701-719).
gccttgaagccaagtttca

SEQ ID NO: 305196 - DNA, 19 bp, Homo sapiens
  siRNA target sequence for AMPH (NM_001635.2,703-721).
cttgaagccaagtttcata

SEQ ID NO: 305197 - DNA, 19 bp, Homo sapiens
  siRNA target sequence for AMPH (NM_001635.2,731-749).
cggtgctttgccacaaact

SEQ ID NO: 305198 - DNA, 19 bp, Homo sapiens
  siRNA target sequence for AMPH (NM_001635.2,733-751).
gtgctttgccacaaactgt

SEQ ID NO: 305199 - DNA, 19 bp, Homo sapiens
  siRNA target sequence for AMPH (NM_001635.2,805-823).
caaggagcgcccagtgatt

SEQ ID NO: 305200 - DNA, 19 bp, Homo sapiens
  siRNA target sequence for AMPH (NM_001635.2,826-844).
ggtcctctccgcattgcaa

SEQ ID NO: 305201 - DNA, 19 bp, Homo sapiens
  siRNA target sequence for AMPH (NM_001635.2,827-845).
gtcctctccgcattgcaaa

SEQ ID NO: 305202 - DNA, 19 bp, Homo sapiens
  siRNA target sequence for AMPH (NM_001635.2,979-997).
ccacctctacctaaagtca

SEQ ID NO: 305203 - DNA, 19 bp, Homo sapiens
  siRNA target sequence for AMPH (NM_001635.2,1223-1241).
ggacgacaagcactgattt

SEQ ID NO: 305204 - DNA, 19 bp, Homo sapiens
  siRNA target sequence for AMPH (NM_001635.2,1226-1244).
cgacaagcactgatttggt

SEQ ID NO: 305205 - DNA, 19 bp, Homo sapiens
  siRNA target sequence for AMPH (NM_001635.2,1227-1245).
gacaagcactgatttggta

SEQ ID NO: 305206 - DNA, 19 bp, Homo sapiens
  siRNA target sequence for AMPH (NM_001635.2,1250-1268).
cggcttctggtggttcatt

SEQ ID NO: 305207 - DNA, 19 bp, Homo sapiens
  siRNA target sequence for AMPH (NM_001635.2,1251-1269).
ggcttctggtggttcattt

SEQ ID NO: 305208 - DNA, 19 bp, Homo sapiens
  siRNA target sequence for AMPH (NM_001635.2,1252-1270).
gcttctggtggttcattta

SEQ ID NO: 305209 - DNA, 19 bp, Homo sapiens
  siRNA target sequence for AMPH (NM_001635.2,1258-1276).
ggtggttcatttaatggat

SEQ ID NO: 305210 - DNA, 19 bp, Homo sapiens
  siRNA target sequence for AMPH (NM_001635.2,1286-1304).
cccaggatacttcattatt

SEQ ID NO: 305211 - DNA, 19 bp, Homo sapiens
  siRNA target sequence for AMPH (NM_001635.2,1288-1306).
caggatacttcattattca

SEQ ID NO: 305212 - DNA, 19 bp, Homo sapiens
  siRNA target sequence for AMPH (NM_001635.2,1334-1352).
gcaacttggctgaatctga

SEQ ID NO: 305213 - DNA, 19 bp, Homo sapiens
  siRNA target sequence for AMPH (NM_001635.2,1597-1615).
gccaaaattggaactgaaa

SEQ ID NO: 305214 - DNA, 19 bp, Homo sapiens
  siRNA target sequence for AMPH (NM_001635.2,1963-1981).
gattttgaggcagcaaatt

SEQ ID NO: 305215 - DNA, 19 bp, Homo sapiens
  siRNA target sequence for AMPH (NM_001635.2,2019-2037).
ggtggtcccctcagattca

SEQ ID NO: 305216 - DNA, 19 bp, Homo sapiens
  siRNA target sequence for AMPH (NM_001635.2,2022-2040).
ggtcccctcagattcagaa

SEQ ID NO: 305217 - DNA, 19 bp, Homo sapiens
  siRNA target sequence for AMPH (NM_001635.2,2136-2154).
cttcacccgacgcttagat

SEQ ID NO: 305218 - DNA, 19 bp, Homo sapiens
  siRNA target sequence for AP4E1 (NM_007347.2,273-291).
ggtgagacttatatattgt

SEQ ID NO: 305219 - DNA, 19 bp, Homo sapiens
  siRNA target sequence for AP4E1 (NM_007347.2,311-329).
cttcctttggctatattca

SEQ ID NO: 305220 - DNA, 19 bp, Homo sapiens
  siRNA target sequence for AP4E1 (NM_007347.2,461-479).
gcactaacctagtagaagt

SEQ ID NO: 305221 - DNA, 19 bp, Homo sapiens
  siRNA target sequence for AP4E1 (NM_007347.2,530-548).
cagctgttcttccattaat

SEQ ID NO: 305222 - DNA, 19 bp, Homo sapiens
  siRNA target sequence for AP4E1 (NM_007347.2,576-594).
gattgtacgaagaaaagct

SEQ ID NO: 305223 - DNA, 19 bp, Homo sapiens
  siRNA target sequence for AP4E1 (NM_007347.2,592-610).
gctgttctggcattataca

SEQ ID NO: 305224 - DNA, 19 bp, Homo sapiens
  siRNA target sequence for AP4E1 (NM_007347.2,615-633).
ccatctcattgctcctaat

SEQ ID NO: 305225 - DNA, 19 bp, Homo sapiens
  siRNA target sequence for AP4E1 (NM_007347.2,621-639).
cattgctcctaatcaagta

SEQ ID NO: 305226 - DNA, 19 bp, Homo sapiens
  siRNA target sequence for AP4E1 (NM_007347.2,628-646).
cctaatcaagtacaacata

SEQ ID NO: 305227 - DNA, 19 bp, Homo sapiens
  siRNA target sequence for AP4E1 (NM_007347.2,657-675).
gtttcggaaagcactttgt

SEQ ID NO: 305228 - DNA, 19 bp, Homo sapiens
  siRNA target sequence for AP4E1 (NM_007347.2,701-719).
cctccttgcatatatatct

SEQ ID NO: 305229 - DNA, 19 bp, Homo sapiens
  siRNA target sequence for AP4E1 (NM_007347.2,740-758).
catctggatataaagactt

SEQ ID NO: 305230 - DNA, 19 bp, Homo sapiens
  siRNA target sequence for AP4E1 (NM_007347.2,776-794).
ccattttgaagcaagtagt

SEQ ID NO: 305231 - DNA, 19 bp, Homo sapiens
  siRNA target sequence for AP4E1 (NM_007347.2,804-822).
gctcccagtagaattcaat

SEQ ID NO: 305232 - DNA, 19 bp, Homo sapiens
  siRNA target sequence for AP4E1 (NM_007347.2,805-823).
ctcccagtagaattcaatt

SEQ ID NO: 305233 - DNA, 19 bp, Homo sapiens
  siRNA target sequence for AP4E1 (NM_007347.2,809-827).
cagtagaattcaattacca

SEQ ID NO: 305234 - DNA, 19 bp, Homo sapiens
  siRNA target sequence for AP4E1 (NM_007347.2,835-853).
ccagcaccatggttacaaa

SEQ ID NO: 305235 - DNA, 19 bp, Homo sapiens
  siRNA target sequence for AP4E1 (NM_007347.2,839-857).
caccatggttacaaattca

SEQ ID NO: 305236 - DNA, 19 bp, Homo sapiens
  siRNA target sequence for AP4E1 (NM_007347.2,864-882).
gagaatactgggacttcta

SEQ ID NO: 305237 - DNA, 19 bp, Homo sapiens
  siRNA target sequence for AP4E1 (NM_007347.2,873-891).
gggacttctaggaaaagat

SEQ ID NO: 305238 - DNA, 19 bp, Homo sapiens
  siRNA target sequence for AP4E1 (NM_007347.2,875-893).
gacttctaggaaaagatga

SEQ ID NO: 305239 - DNA, 19 bp, Homo sapiens
  siRNA target sequence for AP4E1 (NM_007347.2,892-910).
gatcaaaggacaagtgaat

SEQ ID NO: 305240 - DNA, 19 bp, Homo sapiens
  siRNA target sequence for AP4E1 (NM_007347.2,895-913).
caaaggacaagtgaattaa

SEQ ID NO: 305241 - DNA, 19 bp, Homo sapiens
  siRNA target sequence for AP4E1 (NM_007347.2,925-943).
cttgatgaatccttacgaa

SEQ ID NO: 305242 - DNA, 19 bp, Homo sapiens
  siRNA target sequence for AP4E1 (NM_007347.2,936-954).
cttacgaagagctgagtta

SEQ ID NO: 305243 - DNA, 19 bp, Homo sapiens
  siRNA target sequence for AP4E1 (NM_007347.2,941-959).
gaagagctgagttaaatca

SEQ ID NO: 305244 - DNA, 19 bp, Homo sapiens
  siRNA target sequence for AP4E1 (NM_007347.2,966-984).
cacatatgctattttgttt

SEQ ID NO: 305245 - DNA, 19 bp, Homo sapiens
  siRNA target sequence for AP4E1 (NM_007347.2,991-1009).
gtgcatacagtctattcta

SEQ ID NO: 305246 - DNA, 19 bp, Homo sapiens
  siRNA target sequence for AP4E1 (NM_007347.2,1000-1018).
gtctattctatttatccta

SEQ ID NO: 305247 - DNA, 19 bp, Homo sapiens
  siRNA target sequence for AP4E1 (NM_007347.2,1097-1115).
gactgaaggctcttaccta

SEQ ID NO: 305248 - DNA, 19 bp, Homo sapiens
  siRNA target sequence for AP4E1 (NM_007347.2,1106-1124).
ctcttacctatgttatcca

SEQ ID NO: 305249 - DNA, 19 bp, Homo sapiens
  siRNA target sequence for AP4E1 (NM_007347.2,1133-1151).
ctactctggctcttcaaca

SEQ ID NO: 305250 - DNA, 19 bp, Homo sapiens
  siRNA target sequence for AP4E1 (NM_007347.2,1144-1162).
cttcaacaccagatgacaa

SEQ ID NO: 305251 - DNA, 19 bp, Homo sapiens
  siRNA target sequence for AP4E1 (NM_007347.2,1216-1234).
cttctttacagaattacta

SEQ ID NO: 305252 - DNA, 19 bp, Homo sapiens
  siRNA target sequence for AP4E1 (NM_007347.2,1289-1307).
gcaaagaagagtatgtcat

SEQ ID NO: 305253 - DNA, 19 bp, Homo sapiens
  siRNA target sequence for AP4E1 (NM_007347.2,1297-1315).
gagtatgtcatcgtcaatt

SEQ ID NO: 305254 - DNA, 19 bp, Homo sapiens
  siRNA target sequence for AP4E1 (NM_007347.2,1311-1329).
caatttggtcggcaaaata

SEQ ID NO: 305255 - DNA, 19 bp, Homo sapiens
  siRNA target sequence for AP4E1 (NM_007347.2,1383-1401).
gaatgctgtgttttcagta

SEQ ID NO: 305256 - DNA, 19 bp, Homo sapiens
  siRNA target sequence for AP4E1 (NM_007347.2,1397-1415).
cagtaggaggagatgtaat

SEQ ID NO: 305257 - DNA, 19 bp, Homo sapiens
  siRNA target sequence for AP4E1 (NM_007347.2,1420-1438).
cctgatattcccaataact

SEQ ID NO: 305258 - DNA, 19 bp, Homo sapiens
  siRNA target sequence for AP4E1 (NM_007347.2,1497-1515).
ctatgcagttcagtcttat

SEQ ID NO: 305259 - DNA, 19 bp, Homo sapiens
  siRNA target sequence for AP4E1 (NM_007347.2,1619-1637).
cagaggaagttatagctaa

SEQ ID NO: 305260 - DNA, 19 bp, Homo sapiens
  siRNA target sequence for AP4E1 (NM_007347.2,1634-1652).
ctaagctctacaagttact

SEQ ID NO: 305261 - DNA, 19 bp, Homo sapiens
  siRNA target sequence for AP4E1 (NM_007347.2,1718-1736).
ctcaggcgcactcttctaa

SEQ ID NO: 305262 - DNA, 19 bp, Homo sapiens
  siRNA target sequence for AP4E1 (NM_007347.2,1720-1738).
caggcgcactcttctaata

SEQ ID NO: 305263 - DNA, 19 bp, Homo sapiens
  siRNA target sequence for AP4E1 (NM_007347.2,1722-1740).
ggcgcactcttctaataca

SEQ ID NO: 305264 - DNA, 19 bp, Homo sapiens
  siRNA target sequence for AP4E1 (NM_007347.2,1744-1762).
gagagattaatccatgaat

SEQ ID NO: 305265 - DNA, 19 bp, Homo sapiens
  siRNA target sequence for AP4E1 (NM_007347.2,1767-1785).
catatctttggatacttgt

SEQ ID NO: 305266 - DNA, 19 bp, Homo sapiens
  siRNA target sequence for AP4E1 (NM_007347.2,1792-1810).
caacatgcatttgaattaa

SEQ ID NO: 305267 - DNA, 19 bp, Homo sapiens
  siRNA target sequence for AP4E1 (NM_007347.2,1819-1837).
catgagaatgtggaactta

SEQ ID NO: 305268 - DNA, 19 bp, Homo sapiens
  siRNA target sequence for AP4E1 (NM_007347.2,1878-1896).
ggtggtagatgcttcttta

SEQ ID NO: 305269 - DNA, 19 bp, Homo sapiens
  siRNA target sequence for AP4E1 (NM_007347.2,1879-1897).
gtggtagatgcttctttat

SEQ ID NO: 305270 - DNA, 19 bp, Homo sapiens
  siRNA target sequence for AP4E1 (NM_007347.2,1935-1953).
gggtgcagcgccttacaaa

SEQ ID NO: 305271 - DNA, 19 bp, Homo sapiens
  siRNA target sequence for AP4E1 (NM_007347.2,2113-2131).
ctgaaagagacaaatagct

SEQ ID NO: 305272 - DNA, 19 bp, Homo sapiens
  siRNA target sequence for AP4E1 (NM_007347.2,2129-2147).
gcttgaagctggaaggtat

SEQ ID NO: 305273 - DNA, 19 bp, Homo sapiens
  siRNA target sequence for AP4E1 (NM_007347.2,2235-2253).
gagtataatggagaatgta

SEQ ID NO: 305274 - DNA, 19 bp, Homo sapiens
  siRNA target sequence for AP4E1 (NM_007347.2,2237-2255).
gtataatggagaatgtaga

SEQ ID NO: 305275 - DNA, 19 bp, Homo sapiens
  siRNA target sequence for AP4E1 (NM_007347.2,2251-2269).
gtagatcaagctataacta

SEQ ID NO: 305276 - DNA, 19 bp, Homo sapiens
  siRNA target sequence for AP4E1 (NM_007347.2,2254-2272).
gatcaagctataactaaaa

SEQ ID NO: 305277 - DNA, 19 bp, Homo sapiens
  siRNA target sequence for AP4E1 (NM_007347.2,2267-2285).
ctaaaaaggatcaatctca

SEQ ID NO: 305278 - DNA, 19 bp, Homo sapiens
  siRNA target sequence for AP4E1 (NM_007347.2,2275-2293).
gatcaatctcaagttctta

SEQ ID NO: 305279 - DNA, 19 bp, Homo sapiens
  siRNA target sequence for AP4E1 (NM_007347.2,2328-2346).
ggcatcatcattatttgtt

SEQ ID NO: 305280 - DNA, 19 bp, Homo sapiens
  siRNA target sequence for AP4E1 (NM_007347.2,2347-2365).
ggtctaggatcagaaagta

SEQ ID NO: 305281 - DNA, 19 bp, Homo sapiens
  siRNA target sequence for AP4E1 (NM_007347.2,2350-2368).
ctaggatcagaaagtacaa

SEQ ID NO: 305282 - DNA, 19 bp, Homo sapiens
  siRNA target sequence for AP4E1 (NM_007347.2,2353-2371).
ggatcagaaagtacaatca

SEQ ID NO: 305283 - DNA, 19 bp, Homo sapiens
  siRNA target sequence for AP4E1 (NM_007347.2,2354-2372).
gatcagaaagtacaatcaa

SEQ ID NO: 305284 - DNA, 19 bp, Homo sapiens
  siRNA target sequence for AP4E1 (NM_007347.2,2434-2452).
gctaaaagtggcgaaacaa

SEQ ID NO: 305285 - DNA, 19 bp, Homo sapiens
  siRNA target sequence for AP4E1 (NM_007347.2,2445-2463).
cgaaacaaccagtactcat

SEQ ID NO: 305286 - DNA, 19 bp, Homo sapiens
  siRNA target sequence for AP4E1 (NM_007347.2,2446-2464).
gaaacaaccagtactcata

SEQ ID NO: 305287 - DNA, 19 bp, Homo sapiens
  siRNA target sequence for AP4E1 (NM_007347.2,2450-2468).
caaccagtactcataatat

SEQ ID NO: 305288 - DNA, 19 bp, Homo sapiens
  siRNA target sequence for AP4E1 (NM_007347.2,2461-2479).
cataatatgacctgttctt

SEQ ID NO: 305289 - DNA, 19 bp, Homo sapiens
  siRNA target sequence for AP4E1 (NM_007347.2,2515-2533).
gattattattcgaatactt

SEQ ID NO: 305290 - DNA, 19 bp, Homo sapiens
  siRNA target sequence for AP4E1 (NM_007347.2,2654-2672).
cttcattgtttgctaataa

SEQ ID NO: 305291 - DNA, 19 bp, Homo sapiens
  siRNA target sequence for AP4E1 (NM_007347.2,2807-2825).
ctatatcagtgtcttctta

SEQ ID NO: 305292 - DNA, 19 bp, Homo sapiens
  siRNA target sequence for AP4E1 (NM_007347.2,2857-2875).
gtctggtcagtcactaata

SEQ ID NO: 305293 - DNA, 19 bp, Homo sapiens
  siRNA target sequence for AP4E1 (NM_007347.2,2862-2880).
gtcagtcactaataagagt

SEQ ID NO: 305294 - DNA, 19 bp, Homo sapiens
  siRNA target sequence for AP4E1 (NM_007347.2,2897-2915).
gtgctgacttagaaatttt

SEQ ID NO: 305295 - DNA, 19 bp, Homo sapiens
  siRNA target sequence for AP4E1 (NM_007347.2,2954-2972).
gctgtttgcctgtaatgga

SEQ ID NO: 305296 - DNA, 19 bp, Homo sapiens
  siRNA target sequence for AP4E1 (NM_007347.2,2955-2973).
ctgtttgcctgtaatggaa

SEQ ID NO: 305297 - DNA, 19 bp, Homo sapiens
  siRNA target sequence for AP4E1 (NM_007347.2,2974-2992).
gcagaaagcaccaaaagct

SEQ ID NO: 305298 - DNA, 19 bp, Homo sapiens
  siRNA target sequence for AP4E1 (NM_007347.2,2981-2999).
gcaccaaaagctttcaata

SEQ ID NO: 305299 - DNA, 19 bp, Homo sapiens
  siRNA target sequence for AP4E1 (NM_007347.2,3031-3049).
ggaaatcttactggtttta

SEQ ID NO: 305300 - DNA, 19 bp, Homo sapiens
  siRNA target sequence for AP4E1 (NM_007347.2,3087-3105).
ggaattttctgtaaactta

SEQ ID NO: 305301 - DNA, 19 bp, Homo sapiens
  siRNA target sequence for AP4E1 (NM_007347.2,3115-3133).
gatttcattagaccattaa

SEQ ID NO: 305302 - DNA, 19 bp, Homo sapiens
  siRNA target sequence for AP4E1 (NM_007347.2,3145-3163).
gacgactttgggaaactct

SEQ ID NO: 305303 - DNA, 19 bp, Homo sapiens
  siRNA target sequence for AP4E1 (NM_007347.2,3154-3172).
gggaaactctggttatcct

SEQ ID NO: 305304 - DNA, 19 bp, Homo sapiens
  siRNA target sequence for AP4E1 (NM_007347.2,3155-3173).
ggaaactctggttatcctt

SEQ ID NO: 305305 - DNA, 19 bp, Homo sapiens
  siRNA target sequence for AP4E1 (NM_007347.2,3164-3182).
ggttatccttcgcaaatga

SEQ ID NO: 305306 - DNA, 19 bp, Homo sapiens
  siRNA target sequence for AP4E1 (NM_007347.2,3165-3183).
gttatccttcgcaaatgat

SEQ ID NO: 305307 - DNA, 19 bp, Homo sapiens
  siRNA target sequence for AP4E1 (NM_007347.2,3252-3270).
gaaactaagactccatatt

SEQ ID NO: 305308 - DNA, 19 bp, Homo sapiens
  siRNA target sequence for AP4E1 (NM_007347.2,3398-3416).
ctgactatttactgtatca

SEQ ID NO: 305309 - DNA, 19 bp, Homo sapiens
  siRNA target sequence for AP4E1 (NM_007347.2,3400-3418).
gactatttactgtatcagt

SEQ ID NO: 305310 - DNA, 19 bp, Homo sapiens
  siRNA target sequence for BIN1 (NM_004305.2,944-962).
ggaacagccgcgtaggttt

SEQ ID NO: 305311 - DNA, 19 bp, Homo sapiens
  siRNA target sequence for BIN1 (NM_004305.2,1029-1047).
caaccagaacctcaatgat

SEQ ID NO: 305312 - DNA, 19 bp, Homo sapiens
  siRNA target sequence for BIN1 (NM_004305.2,1101-1119).
ccagcccagaaagaaaagt

SEQ ID NO: 305313 - DNA, 19 bp, Homo sapiens
  siRNA target sequence for BIN1 (NM_004305.2,1480-1498).
cccccaggtttcatgttca

SEQ ID NO: 305314 - DNA, 19 bp, Homo sapiens
  siRNA target sequence for BIN1 (NM_139343.1,866-884).
ctgtctcgctgcttgagaa

SEQ ID NO: 305315 - DNA, 19 bp, Homo sapiens
  siRNA target sequence for BIN1 (NM_139343.1,1388-1406).
ccccgtccaaggaagtcaa

SEQ ID NO: 305316 - DNA, 19 bp, Homo sapiens
  siRNA target sequence for BIN1 (NM_139343.1,1571-1589).
cgccctctggtcagtcaat

SEQ ID NO: 305317 - DNA, 19 bp, Homo sapiens
  siRNA target sequence for BIN2 (NM_016187.1,209-227).
cttccttagtgcagtcaaa

SEQ ID NO: 305318 - DNA, 19 bp, Homo sapiens
  siRNA target sequence for BIN2 (NM_016187.1,228-246).
gtgatgcatgaaagttcaa

SEQ ID NO: 305319 - DNA, 19 bp, Homo sapiens
  siRNA target sequence for BIN2 (NM_016187.1,308-326).
gaaggccatcgtatggaat

SEQ ID NO: 305320 - DNA, 19 bp, Homo sapiens
  siRNA target sequence for BIN2 (NM_016187.1,311-329).
ggccatcgtatggaataat

SEQ ID NO: 305321 - DNA, 19 bp, Homo sapiens
  siRNA target sequence for BIN2 (NM_016187.1,313-331).
ccatcgtatggaataatga

SEQ ID NO: 305322 - DNA, 19 bp, Homo sapiens
  siRNA target sequence for BIN2 (NM_016187.1,373-391).
ctgtaaggaccatggaaat

SEQ ID NO: 305323 - DNA, 19 bp, Homo sapiens
  siRNA target sequence for BIN2 (NM_016187.1,399-417).
gcccagttcagtgaaatta

SEQ ID NO: 305324 - DNA, 19 bp, Homo sapiens
  siRNA target sequence for BIN2 (NM_016187.1,612-630).
cgtattggctgctatgtga

SEQ ID NO: 305325 - DNA, 19 bp, Homo sapiens
  siRNA target sequence for BIN2 (NM_016187.1,682-700).
gcaagctgaaccacaatct

SEQ ID NO: 305326 - DNA, 19 bp, Homo sapiens
  siRNA target sequence for BIN2 (NM_016187.1,772-790).
gcagcaggcgctctttagt

SEQ ID NO: 305327 - DNA, 19 bp, Homo sapiens
  siRNA target sequence for BIN2 (NM_016187.1,775-793).
gcaggcgctctttagtcat

SEQ ID NO: 305328 - DNA, 19 bp, Homo sapiens
  siRNA target sequence for BIN2 (NM_016187.1,779-797).
gcgctctttagtcatttct

SEQ ID NO: 305329 - DNA, 19 bp, Homo sapiens
  siRNA target sequence for BIN2 (NM_016187.1,866-884).
gaagagtgagagtgaatct

SEQ ID NO: 305330 - DNA, 19 bp, Homo sapiens
  siRNA target sequence for BIN2 (NM_016187.1,941-959).
gatcaaggagctcttagaa

SEQ ID NO: 305331 - DNA, 19 bp, Homo sapiens
  siRNA target sequence for BIN2 (NM_016187.1,1153-1171).
catctgccacagaagtagt

SEQ ID NO: 305332 - DNA, 19 bp, Homo sapiens
  siRNA target sequence for BIN2 (NM_016187.1,1289-1307).
gccctcctcagggaacata

SEQ ID NO: 305333 - DNA, 19 bp, Homo sapiens
  siRNA target sequence for BIN2 (NM_016187.1,1394-1412).
cctagaggtctctcctaat

SEQ ID NO: 305334 - DNA, 19 bp, Homo sapiens
  siRNA target sequence for BIN2 (NM_016187.1,1495-1513).
gtacttcccccaccttaat

SEQ ID NO: 305335 - DNA, 19 bp, Homo sapiens
  siRNA target sequence for BIN2 (NM_016187.1,1566-1584).
gaaaaggataataagctta

SEQ ID NO: 305336 - DNA, 19 bp, Homo sapiens
  siRNA target sequence for BIN2 (NM_016187.1,1674-1692).
gaggtatccacaagtgaaa

SEQ ID NO: 305337 - DNA, 19 bp, Homo sapiens
  siRNA target sequence for BIN3 (NM_018688.3,144-162).
cccggaggctgcagaaaga

SEQ ID NO: 305338 - DNA, 19 bp, Homo sapiens
  siRNA target sequence for BIN3 (NM_018688.3,182-200).
gcagacctggccatgtcaa

SEQ ID NO: 305339 - DNA, 19 bp, Homo sapiens
  siRNA target sequence for BIN3 (NM_018688.3,187-205).
cctggccatgtcaaaatct

SEQ ID NO: 305340 - DNA, 19 bp, Homo sapiens
  siRNA target sequence for BIN3 (NM_018688.3,204-222).
ctgccgtgaagatatcctt

SEQ ID NO: 305341 - DNA, 19 bp, Homo sapiens
  siRNA target sequence for BIN3 (NM_018688.3,301-319).
gcggatggatgccttcaat

SEQ ID NO: 305342 - DNA, 19 bp, Homo sapiens
  siRNA target sequence for BIN3 (NM_018688.3,348-366).
ctgtgatcgagcccttaaa

SEQ ID NO: 305343 - DNA, 19 bp, Homo sapiens
  siRNA target sequence for BIN3 (NM_018688.3,639-657).
gagctcaggttgtgtacta

SEQ ID NO: 305344 - DNA, 19 bp, Homo sapiens
  siRNA target sequence for EPN1 (NM_013333.1,990-1008).
ctccctcatgtcagagatt

SEQ ID NO: 305345 - DNA, 19 bp, Homo sapiens
  siRNA target sequence for EPN1 (NM_013333.1,1239-1257).
cgtgaacgtgcgtgagaaa

SEQ ID NO: 305346 - DNA, 19 bp, Homo sapiens
  siRNA target sequence for EPN1 (NM_013333.1,2007-2025).
cgacgagttctctgacttt

SEQ ID NO: 305347 - DNA, 19 bp, Homo sapiens
  siRNA target sequence for EPN1 (NM_013333.1,2207-2225).
ggaagacgccggagtcatt

SEQ ID NO: 305348 - DNA, 19 bp, Homo sapiens
  siRNA target sequence for EPN1 (NM_013333.1,2434-2452).
gcgccacccacgtacatct

SEQ ID NO: 305349 - DNA, 19 bp, Homo sapiens
  siRNA target sequence for HOOK2 (NM_013312.1,438-456).
gccatcagttgcgagaaaa

SEQ ID NO: 305350 - DNA, 19 bp, Homo sapiens
  siRNA target sequence for HOOK2 (NM_013312.1,439-457).
ccatcagttgcgagaaaaa

SEQ ID NO: 305351 - DNA, 19 bp, Homo sapiens
  siRNA target sequence for HOOK2 (NM_013312.1,590-608).
ccagtcccgcaggtactat

SEQ ID NO: 305352 - DNA, 19 bp, Homo sapiens
  siRNA target sequence for HOOK2 (NM_013312.1,591-609).
cagtcccgcaggtactatt

SEQ ID NO: 305353 - DNA, 19 bp, Homo sapiens
  siRNA target sequence for HOOK2 (NM_013312.1,597-615).
cgcaggtactatttcctaa

SEQ ID NO: 305354 - DNA, 19 bp, Homo sapiens
  siRNA target sequence for HOOK2 (NM_013312.1,1220-1238).
ggccgagaaatggctattt

SEQ ID NO: 305355 - DNA, 19 bp, Homo sapiens
  siRNA target sequence for HOOK2 (NM_013312.1,1247-1265).
caacctggaggaaaagtat

SEQ ID NO: 305356 - DNA, 19 bp, Homo sapiens
  siRNA target sequence for HOOK2 (NM_013312.1,1399-1417).
ccacacccgtggataactt

SEQ ID NO: 305357 - DNA, 19 bp, Homo sapiens
  siRNA target sequence for HOOK2 (NM_013312.1,1400-1418).
cacacccgtggataactta

SEQ ID NO: 305358 - DNA, 19 bp, Homo sapiens
  siRNA target sequence for HOOK2 (NM_013312.1,1748-1766).
gaggaagcgggagtacatt

SEQ ID NO: 305359 - DNA, 19 bp, Homo sapiens
  siRNA target sequence for HOOK2 (NM_013312.1,2153-2171).
gcagcggctggcaaccaat

SEQ ID NO: 305360 - DNA, 19 bp, Homo sapiens
  siRNA target sequence for HOOK2 (NM_013312.1,2154-2172).
cagcggctggcaaccaatt

SEQ ID NO: 305361 - DNA, 19 bp, Homo sapiens
  siRNA target sequence for HOOK2 (NM_013312.1,2156-2174).
gcggctggcaaccaattct

SEQ ID NO: 305362 - DNA, 19 bp, Homo sapiens
  siRNA target sequence for PACSIN3 (NM_016223.3,865-883).
gagcgccagcggcttcttt

SEQ ID NO: 305363 - DNA, 19 bp, Homo sapiens
  siRNA target sequence for PACSIN3 (NM_016223.3,877-895).
cttcttttcttcaaggata

SEQ ID NO: 305364 - DNA, 19 bp, Homo sapiens
  siRNA target sequence for PACSIN3 (NM_016223.3,1088-1106).
caatcagccggaaagagaa

SEQ ID NO: 305365 - DNA, 19 bp, Homo sapiens
  siRNA target sequence for CPLX2 (NM_006650.2,424-442).
gaccccgacgcgcagaaaa

SEQ ID NO: 305366 - DNA, 19 bp, Homo sapiens
  siRNA target sequence for CPLX2 (NM_006650.2,428-446).
ccgacgcgcagaaaaagga

SEQ ID NO: 305367 - DNA, 19 bp, Homo sapiens
  siRNA target sequence for CPLX2 (NM_006650.2,537-555).
gcagatccgagataagtat

SEQ ID NO: 305368 - DNA, 19 bp, Homo sapiens
  siRNA target sequence for CPLX2 (NM_006650.2,694-712).
ctggacacggtgctcaaat

SEQ ID NO: 305369 - DNA, 19 bp, Homo sapiens
  siRNA target sequence for YKT6 (NM_006555.3,211-229).
gctcaaagccgcatacgat

SEQ ID NO: 305370 - DNA, 19 bp, Homo sapiens
  siRNA target sequence for YKT6 (NM_006555.3,258-276).
ccagcgttcaggaattcat

SEQ ID NO: 305371 - DNA, 19 bp, Homo sapiens
  siRNA target sequence for YKT6 (NM_006555.3,280-298).
cttcacgagtcaactgatt

SEQ ID NO: 305372 - DNA, 19 bp, Homo sapiens
  siRNA target sequence for YKT6 (NM_006555.3,358-376).
cgtctacgtccggaatgat

SEQ ID NO: 305373 - DNA, 19 bp, Homo sapiens
  siRNA target sequence for YKT6 (NM_006555.3,359-377).
gtctacgtccggaatgata

SEQ ID NO: 305374 - DNA, 19 bp, Homo sapiens
  siRNA target sequence for YKT6 (NM_006555.3,361-379).
ctacgtccggaatgatagt

SEQ ID NO: 305375 - DNA, 19 bp, Homo sapiens
  siRNA target sequence for YKT6 (NM_006555.3,364-382).
cgtccggaatgatagtctt

SEQ ID NO: 305376 - DNA, 19 bp, Homo sapiens
  siRNA target sequence for YKT6 (NM_006555.3,391-409).
ggtcattgctgacaatgaa

SEQ ID NO: 305377 - DNA, 19 bp, Homo sapiens
  siRNA target sequence for YKT6 (NM_006555.3,417-435).
cccgggtggcctttacctt

SEQ ID NO: 305378 - DNA, 19 bp, Homo sapiens
  siRNA target sequence for YKT6 (NM_006555.3,467-485).
caagtcgacaggatagact

SEQ ID NO: 305379 - DNA, 19 bp, Homo sapiens
  siRNA target sequence for YKT6 (NM_006555.3,527-545).
gatggtcacctcagtagat

SEQ ID NO: 305380 - DNA, 19 bp, Homo sapiens
  siRNA target sequence for YKT6 (NM_006555.3,564-582).
ctgatcccatgactaaagt

SEQ ID NO: 305381 - DNA, 19 bp, Homo sapiens
  siRNA target sequence for YKT6 (NM_006555.3,624-642).
ccatggagtctctgttaga

SEQ ID NO: 305382 - DNA, 19 bp, Homo sapiens
  siRNA target sequence for YKT6 (NM_006555.3,648-666).
gtgagaagctagatgactt

SEQ ID NO: 305383 - DNA, 19 bp, Homo sapiens
  siRNA target sequence for LRMP (NM_006152.1,577-595).
ggaatcaacacctttctca

SEQ ID NO: 305384 - DNA, 19 bp, Homo sapiens
  siRNA target sequence for LRMP (NM_006152.1,622-640).
gtgtgaaaggcccacatat

SEQ ID NO: 305385 - DNA, 19 bp, Homo sapiens
  siRNA target sequence for LRMP (NM_006152.1,632-650).
cccacatatggagaagtaa

SEQ ID NO: 305386 - DNA, 19 bp, Homo sapiens
  siRNA target sequence for LRMP (NM_006152.1,706-724).
ccccagcccaggaacgaat

SEQ ID NO: 305387 - DNA, 19 bp, Homo sapiens
  siRNA target sequence for LRMP (NM_006152.1,754-772).
cccaagtatggaagagaat

SEQ ID NO: 305388 - DNA, 19 bp, Homo sapiens
  siRNA target sequence for LRMP (NM_006152.1,849-867).
catcgacagacggtactat

SEQ ID NO: 305389 - DNA, 19 bp, Homo sapiens
  siRNA target sequence for LRMP (NM_006152.1,857-875).
gacggtactataacttcaa

SEQ ID NO: 305390 - DNA, 19 bp, Homo sapiens
  siRNA target sequence for LRMP (NM_006152.1,859-877).
cggtactataacttcaagt

SEQ ID NO: 305391 - DNA, 19 bp, Homo sapiens
  siRNA target sequence for LRMP (NM_006152.1,881-899).
cctggattagaaattctga

SEQ ID NO: 305392 - DNA, 19 bp, Homo sapiens
  siRNA target sequence for LRMP (NM_006152.1,885-903).
gattagaaattctgaatat

SEQ ID NO: 305393 - DNA, 19 bp, Homo sapiens
  siRNA target sequence for LRMP (NM_006152.1,924-942).
gaaactcgctctgtaagaa

SEQ ID NO: 305394 - DNA, 19 bp, Homo sapiens
  siRNA target sequence for LRMP (NM_006152.1,988-1006).
cacaagtccagctcatgat

SEQ ID NO: 305395 - DNA, 19 bp, Homo sapiens
  siRNA target sequence for LRMP (NM_006152.1,990-1008).
caagtccagctcatgataa

SEQ ID NO: 305396 - DNA, 19 bp, Homo sapiens
  siRNA target sequence for LRMP (NM_006152.1,993-1011).
gtccagctcatgataatat

SEQ ID NO: 305397 - DNA, 19 bp, Homo sapiens
  siRNA target sequence for LRMP (NM_006152.1,1022-1040).
gactctacgagtaaggata

SEQ ID NO: 305398 - DNA, 19 bp, Homo sapiens
  siRNA target sequence for LRMP (NM_006152.1,1024-1042).
ctctacgagtaaggataaa

SEQ ID NO: 305399 - DNA, 19 bp, Homo sapiens
  siRNA target sequence for LRMP (NM_006152.1,1029-1047).
cgagtaaggataaaaccat

SEQ ID NO: 305400 - DNA, 19 bp, Homo sapiens
  siRNA target sequence for LRMP (NM_006152.1,1030-1048).
gagtaaggataaaaccata

SEQ ID NO: 305401 - DNA, 19 bp, Homo sapiens
  siRNA target sequence for LRMP (NM_006152.1,1136-1154).
cctgtaaccactgtgaaat

SEQ ID NO: 305402 - DNA, 19 bp, Homo sapiens
  siRNA target sequence for LRMP (NM_006152.1,1207-1225).
ggcagaatttctcagatta

SEQ ID NO: 305403 - DNA, 19 bp, Homo sapiens
  siRNA target sequence for LRMP (NM_006152.1,1481-1499).
caggaaagccgggttagta

SEQ ID NO: 305404 - DNA, 19 bp, Homo sapiens
  siRNA target sequence for LRMP (NM_006152.1,1483-1501).
ggaaagccgggttagtaaa

SEQ ID NO: 305405 - DNA, 19 bp, Homo sapiens
  siRNA target sequence for LRMP (NM_006152.1,1503-1521).
cagttgaagtgatgattca

SEQ ID NO: 305406 - DNA, 19 bp, Homo sapiens
  siRNA target sequence for LRMP (NM_006152.1,1520-1538).
cagcacgtagaaaacttga

SEQ ID NO: 305407 - DNA, 19 bp, Homo sapiens
  siRNA target sequence for LRMP (NM_006152.1,1558-1576).
gcacgctgaattagaagaa

SEQ ID NO: 305408 - DNA, 19 bp, Homo sapiens
  siRNA target sequence for LRMP (NM_006152.1,1606-1624).
gtctttcaatcctcttgaa

SEQ ID NO: 305409 - DNA, 19 bp, Homo sapiens
  siRNA target sequence for LRMP (NM_006152.1,1608-1626).
ctttcaatcctcttgaaga

SEQ ID NO: 305410 - DNA, 19 bp, Homo sapiens
  siRNA target sequence for LRMP (NM_006152.1,1636-1654).
ctgccaaattaaaaaacgt

SEQ ID NO: 305411 - DNA, 19 bp, Homo sapiens
  siRNA target sequence for LRMP (NM_006152.1,1652-1670).
cgttcagcttctctaaact

SEQ ID NO: 305412 - DNA, 19 bp, Homo sapiens
  siRNA target sequence for LRMP (NM_006152.1,1683-1701).
ctctacgaagagtgactat

SEQ ID NO: 305413 - DNA, 19 bp, Homo sapiens
  siRNA target sequence for LRMP (NM_006152.1,1823-1841).
ccctcattacctcgattta

SEQ ID NO: 305414 - DNA, 19 bp, Homo sapiens
  siRNA target sequence for LRMP (NM_006152.1,1835-1853).
cgatttattagcacctatt

SEQ ID NO: 305415 - DNA, 19 bp, Homo sapiens
  siRNA target sequence for LRMP (NM_006152.1,1988-2006).
gtctcttcagtttatgaca

SEQ ID NO: 305416 - DNA, 19 bp, Homo sapiens
  siRNA target sequence for LRMP (NM_006152.1,1992-2010).
cttcagtttatgacacaat

SEQ ID NO: 305417 - DNA, 19 bp, Homo sapiens
  siRNA target sequence for LRMP (NM_006152.1,1997-2015).
gtttatgacacaatagctt

SEQ ID NO: 305418 - DNA, 19 bp, Homo sapiens
  siRNA target sequence for LRMP (NM_006152.1,2016-2034).
cctgggcaacaaatctcaa

SEQ ID NO: 305419 - DNA, 19 bp, Homo sapiens
  siRNA target sequence for LRMP (NM_006152.1,2059-2077).
ggccctctggctctctatt

SEQ ID NO: 305420 - DNA, 19 bp, Homo sapiens
  siRNA target sequence for LRMP (NM_006152.1,2071-2089).
ctctattgcattcattgta

SEQ ID NO: 305421 - DNA, 19 bp, Homo sapiens
  siRNA target sequence for LRMP (NM_006152.1,2073-2091).
ctattgcattcattgtact

SEQ ID NO: 305422 - DNA, 19 bp, Homo sapiens
  siRNA target sequence for LRMP (NM_006152.1,2170-2188).
ctcatggacgtctctagaa

SEQ ID NO: 305423 - DNA, 19 bp, Homo sapiens
  siRNA target sequence for LRMP (NM_006152.1,2172-2190).
catggacgtctctagaaca

SEQ ID NO: 305424 - DNA, 19 bp, Homo sapiens
  siRNA target sequence for LRMP (NM_006152.1,2175-2193).
ggacgtctctagaacatat

SEQ ID NO: 305425 - DNA, 19 bp, Homo sapiens
  siRNA target sequence for LRMP (NM_006152.1,2178-2196).
cgtctctagaacatatctt

SEQ ID NO: 305426 - DNA, 19 bp, Homo sapiens
  siRNA target sequence for LRMP (NM_006152.1,2189-2207).
catatcttgtggccattta

SEQ ID NO: 305427 - DNA, 19 bp, Homo sapiens
  siRNA target sequence for CADPS (NM_003716.2,734-752).
catcgcctacccctttaat

SEQ ID NO: 305428 - DNA, 19 bp, Homo sapiens
  siRNA target sequence for CADPS (NM_003716.2,884-902).
cgctgtgcagagttactat

SEQ ID NO: 305429 - DNA, 19 bp, Homo sapiens
  siRNA target sequence for CADPS (NM_003716.2,1055-1073).
ctcctggatggccaaattt

SEQ ID NO: 305430 - DNA, 19 bp, Homo sapiens
  siRNA target sequence for CADPS (NM_003716.2,1058-1076).
ctggatggccaaatttgat

SEQ ID NO: 305431 - DNA, 19 bp, Homo sapiens
  siRNA target sequence for CADPS (NM_003716.2,1280-1298).
gctggatggacgtctacaa

SEQ ID NO: 305432 - DNA, 19 bp, Homo sapiens
  siRNA target sequence for CADPS (NM_003716.2,1415-1433).
gagcatgccggtatccaaa

SEQ ID NO: 305433 - DNA, 19 bp, Homo sapiens
  siRNA target sequence for CADPS (NM_003716.2,1525-1543).
cagatgtcgtgctgtcttt

SEQ ID NO: 305434 - DNA, 19 bp, Homo sapiens
  siRNA target sequence for CADPS (NM_003716.2,1566-1584).
gaagtccaaggcctcaaat

SEQ ID NO: 305435 - DNA, 19 bp, Homo sapiens
  siRNA target sequence for CADPS (NM_003716.2,1590-1608).
gctccaaatcgcatcgtat

SEQ ID NO: 305436 - DNA, 19 bp, Homo sapiens
  siRNA target sequence for CADPS (NM_003716.2,1591-1609).
ctccaaatcgcatcgtata

SEQ ID NO: 305437 - DNA, 19 bp, Homo sapiens
  siRNA target sequence for CADPS (NM_003716.2,1593-1611).
ccaaatcgcatcgtatatt

SEQ ID NO: 305438 - DNA, 19 bp, Homo sapiens
  siRNA target sequence for CADPS (NM_003716.2,1655-1673).
ggccgaggcttctaaacca

SEQ ID NO: 305439 - DNA, 19 bp, Homo sapiens
  siRNA target sequence for CADPS (NM_003716.2,1656-1674).
gccgaggcttctaaaccaa

SEQ ID NO: 305440 - DNA, 19 bp, Homo sapiens
  siRNA target sequence for CADPS (NM_003716.2,1806-1824).
ccgaacagccccaaacagt

SEQ ID NO: 305441 - DNA, 19 bp, Homo sapiens
  siRNA target sequence for CADPS (NM_003716.2,1936-1954).
gggccatcggtaagaatgt

SEQ ID NO: 305442 - DNA, 19 bp, Homo sapiens
  siRNA target sequence for CADPS (NM_003716.2,1938-1956).
gccatcggtaagaatgtct

SEQ ID NO: 305443 - DNA, 19 bp, Homo sapiens
  siRNA target sequence for CADPS (NM_003716.2,2020-2038).
gcagttatcgggagaagaa

SEQ ID NO: 305444 - DNA, 19 bp, Homo sapiens
  siRNA target sequence for CADPS (NM_003716.2,2051-2069).
ggaacttctacaattggat

SEQ ID NO: 305445 - DNA, 19 bp, Homo sapiens
  siRNA target sequence for CADPS (NM_003716.2,2113-2131).
gtggccgagccttcttcaa

SEQ ID NO: 305446 - DNA, 19 bp, Homo sapiens
  siRNA target sequence for CADPS (NM_003716.2,2192-2210).
gtgggtccaggccatgtat

SEQ ID NO: 305447 - DNA, 19 bp, Homo sapiens
  siRNA target sequence for CADPS (NM_003716.2,2245-2263).
cgacccaagtccagaaact

SEQ ID NO: 305448 - DNA, 19 bp, Homo sapiens
  siRNA target sequence for CADPS (NM_003716.2,2267-2285).
cgccaagggaggaaatgta

SEQ ID NO: 305449 - DNA, 19 bp, Homo sapiens
  siRNA target sequence for CADPS (NM_003716.2,2291-2309).
gctggatgcccctatctct

SEQ ID NO: 305450 - DNA, 19 bp, Homo sapiens
  siRNA target sequence for CADPS (NM_003716.2,2295-2313).
gatgcccctatctctcaat

SEQ ID NO: 305451 - DNA, 19 bp, Homo sapiens
  siRNA target sequence for CADPS (NM_003716.2,2298-2316).
gcccctatctctcaatttt

SEQ ID NO: 305452 - DNA, 19 bp, Homo sapiens
  siRNA target sequence for CADPS (NM_003716.2,2299-2317).
cccctatctctcaatttta

SEQ ID NO: 305453 - DNA, 19 bp, Homo sapiens
  siRNA target sequence for CADPS (NM_003716.2,2359-2377).
cttccaacccctgtaactt

SEQ ID NO: 305454 - DNA, 19 bp, Homo sapiens
  siRNA target sequence for CADPS (NM_003716.2,2382-2400).
cacgcttccctctttgaga

SEQ ID NO: 305455 - DNA, 19 bp, Homo sapiens
  siRNA target sequence for CADPS (NM_003716.2,2552-2570).
gcttgaacgggcagaaaat

SEQ ID NO: 305456 - DNA, 19 bp, Homo sapiens
  siRNA target sequence for CADPS (NM_003716.2,2708-2726).
ccgagttctgctagaaaat

SEQ ID NO: 305457 - DNA, 19 bp, Homo sapiens
  siRNA target sequence for CADPS (NM_003716.2,2710-2728).
gagttctgctagaaaatca

SEQ ID NO: 305458 - DNA, 19 bp, Homo sapiens
  siRNA target sequence for CADPS (NM_003716.2,2715-2733).
ctgctagaaaatcagatta

SEQ ID NO: 305459 - DNA, 19 bp, Homo sapiens
  siRNA target sequence for CADPS (NM_003716.2,2717-2735).
gctagaaaatcagattaca

SEQ ID NO: 305460 - DNA, 19 bp, Homo sapiens
  siRNA target sequence for CADPS (NM_003716.2,2857-2875).
cagttatccgtaaatgtct

SEQ ID NO: 305461 - DNA, 19 bp, Homo sapiens
  siRNA target sequence for CADPS (NM_003716.2,2877-2895).
gaacaggctgcgttagtca

SEQ ID NO: 305462 - DNA, 19 bp, Homo sapiens
  siRNA target sequence for CADPS (NM_003716.2,2882-2900).
ggctgcgttagtcaactat

SEQ ID NO: 305463 - DNA, 19 bp, Homo sapiens
  siRNA target sequence for CADPS (NM_003716.2,2883-2901).
gctgcgttagtcaactatt

SEQ ID NO: 305464 - DNA, 19 bp, Homo sapiens
  siRNA target sequence for CADPS (NM_003716.2,2920-2938).
ccaaaatcgaagagaatca

SEQ ID NO: 305465 - DNA, 19 bp, Homo sapiens
  siRNA target sequence for CADPS (NM_003716.2,2984-3002).
gcttgaagatacaatacgt

SEQ ID NO: 305466 - DNA, 19 bp, Homo sapiens
  siRNA target sequence for CADPS (NM_003716.2,3052-3070).
cagagccacatgttgataa

SEQ ID NO: 305467 - DNA, 19 bp, Homo sapiens
  siRNA target sequence for CADPS (NM_003716.2,3056-3074).
gccacatgttgataaagga

SEQ ID NO: 305468 - DNA, 19 bp, Homo sapiens
  siRNA target sequence for CADPS (NM_003716.2,3085-3103).
cgtggtggtcagatttaat

SEQ ID NO: 305469 - DNA, 19 bp, Homo sapiens
  siRNA target sequence for CADPS (NM_003716.2,3088-3106).
ggtggtcagatttaatggt

SEQ ID NO: 305470 - DNA, 19 bp, Homo sapiens
  siRNA target sequence for CADPS (NM_003716.2,3222-3240).
ctccgtactgactataatt

SEQ ID NO: 305471 - DNA, 19 bp, Homo sapiens
  siRNA target sequence for CADPS (NM_003716.2,3225-3243).
cgtactgactataatttgt

SEQ ID NO: 305472 - DNA, 19 bp, Homo sapiens
  siRNA target sequence for CADPS (NM_003716.2,3275-3293).
cctgtttgccccacttgtt

SEQ ID NO: 305473 - DNA, 19 bp, Homo sapiens
  siRNA target sequence for CADPS (NM_003716.2,3278-3296).
gtttgccccacttgttgtt

SEQ ID NO: 305474 - DNA, 19 bp, Homo sapiens
  siRNA target sequence for CADPS (NM_003716.2,3282-3300).
gccccacttgttgttagat

SEQ ID NO: 305475 - DNA, 19 bp, Homo sapiens
  siRNA target sequence for CADPS (NM_003716.2,3283-3301).
ccccacttgttgttagata

SEQ ID NO: 305476 - DNA, 19 bp, Homo sapiens
  siRNA target sequence for CADPS (NM_003716.2,3284-3302).
cccacttgttgttagatat

SEQ ID NO: 305477 - DNA, 19 bp, Homo sapiens
  siRNA target sequence for CADPS (NM_003716.2,3286-3304).
cacttgttgttagatatgt

SEQ ID NO: 305478 - DNA, 19 bp, Homo sapiens
  siRNA target sequence for CADPS (NM_003716.2,3320-3338).
ctcaattgcacaatccatt

SEQ ID NO: 305479 - DNA, 19 bp, Homo sapiens
  siRNA target sequence for CADPS (NM_003716.2,3366-3384).
gaaccagtcaagagtttaa

SEQ ID NO: 305480 - DNA, 19 bp, Homo sapiens
  siRNA target sequence for CADPS (NM_003716.2,3377-3395).
gagtttaaccagtaaccta

SEQ ID NO: 305481 - DNA, 19 bp, Homo sapiens
  siRNA target sequence for CADPS (NM_003716.2,3436-3454).
caaatctaccagttaacat

SEQ ID NO: 305482 - DNA, 19 bp, Homo sapiens
  siRNA target sequence for CADPS (NM_003716.2,3457-3475).
ctctaggcatcccacaaat

SEQ ID NO: 305483 - DNA, 19 bp, Homo sapiens
  siRNA target sequence for CADPS (NM_003716.2,3530-3548).
gtcaggcacctcagaagat

SEQ ID NO: 305484 - DNA, 19 bp, Homo sapiens
  siRNA target sequence for CADPS (NM_003716.2,3566-3584).
cgcccttcagaccttcatt

SEQ ID NO: 305485 - DNA, 19 bp, Homo sapiens
  siRNA target sequence for CADPS (NM_003716.2,3627-3645).
gaacaacggctgaagttga

SEQ ID NO: 305486 - DNA, 19 bp, Homo sapiens
  siRNA target sequence for CADPS (NM_003716.2,3735-3753).
cgagtcccacagtcaatat

SEQ ID NO: 305487 - DNA, 19 bp, Homo sapiens
  siRNA target sequence for CADPS (NM_003716.2,3738-3756).
gtcccacagtcaatatgca

SEQ ID NO: 305488 - DNA, 19 bp, Homo sapiens
  siRNA target sequence for CADPS (NM_003716.2,3754-3772).
gcaccatgtttaatgttat

SEQ ID NO: 305489 - DNA, 19 bp, Homo sapiens
  siRNA target sequence for CADPS (NM_003716.2,3894-3912).
gttgcaaagttcgttacta

SEQ ID NO: 305490 - DNA, 19 bp, Homo sapiens
  siRNA target sequence for CADPS (NM_003716.2,3898-3916).
caaagttcgttactatctt

SEQ ID NO: 305491 - DNA, 19 bp, Homo sapiens
  siRNA target sequence for CADPS (NM_003716.2,3986-4004).
cgtgaaggcagcttccaaa

SEQ ID NO: 305492 - DNA, 19 bp, Homo sapiens
  siRNA target sequence for CADPS (NM_003716.2,3989-4007).
gaaggcagcttccaaatat

SEQ ID NO: 305493 - DNA, 19 bp, Homo sapiens
  siRNA target sequence for CADPS (NM_003716.2,4039-4057).
ccgacgcctacgtgacttt

SEQ ID NO: 305494 - DNA, 19 bp, Homo sapiens
  siRNA target sequence for CADPS (NM_003716.2,4054-4072).
ctttcgtccgccattctca

SEQ ID NO: 305495 - DNA, 19 bp, Homo sapiens
  siRNA target sequence for CADPS (NM_003716.2,4171-4189).
cggaccggatggacttaca

SEQ ID NO: 305496 - DNA, 19 bp, Homo sapiens
  siRNA target sequence for CADPS (NM_003716.2,4188-4206).
cagcttcatatttatcagt

SEQ ID NO: 305497 - DNA, 19 bp, Homo sapiens
  siRNA target sequence for CADPS (NM_003716.2,4213-4231).
cactaattaggatggtaaa

SEQ ID NO: 305498 - DNA, 19 bp, Homo sapiens
  siRNA target sequence for CADPS (NM_003716.2,4215-4233).
ctaattaggatggtaaaga

SEQ ID NO: 305499 - DNA, 19 bp, Homo sapiens
  siRNA target sequence for CADPS (NM_003716.2,4222-4240).
ggatggtaaagaaaaccta

SEQ ID NO: 305500 - DNA, 19 bp, Homo sapiens
  siRNA target sequence for CADPS (NM_003716.2,4241-4259).
cagagatttccgattgcaa

SEQ ID NO: 305501 - DNA, 19 bp, Homo sapiens
  siRNA target sequence for CADPS (NM_003716.2,4285-4303).
gcaagacctatgaaacgat

SEQ ID NO: 305502 - DNA, 19 bp, Homo sapiens
  siRNA target sequence for CADPS (NM_183394.1,2920-2938).
ccaaaatcgaagggaaaaa

SEQ ID NO: 305503 - DNA, 19 bp, Homo sapiens
  siRNA target sequence for CPLX1 (NM_006651.3,393-411).
gacaagtacggcatcaaga

SEQ ID NO: 305504 - DNA, 19 bp, Homo sapiens
  siRNA target sequence for CGI-141 (NM_016072.2,121-139).
cctgttctttggaatgatt

SEQ ID NO: 305505 - DNA, 19 bp, Homo sapiens
  siRNA target sequence for CGI-141 (NM_016072.2,155-173).
gcactactggctattggaa

SEQ ID NO: 305506 - DNA, 19 bp, Homo sapiens
  siRNA target sequence for CGI-141 (NM_016072.2,188-206).
gccggcttggcttttgtaa

SEQ ID NO: 305507 - DNA, 19 bp, Homo sapiens
  siRNA target sequence for CGI-141 (NM_016072.2,315-333).
gcatgatcttcgaaattta

SEQ ID NO: 305508 - DNA, 19 bp, Homo sapiens
  siRNA target sequence for CGI-141 (NM_016072.2,316-334).
catgatcttcgaaatttat

SEQ ID NO: 305509 - DNA, 19 bp, Homo sapiens
  siRNA target sequence for CGI-141 (NM_016072.2,319-337).
gatcttcgaaatttatgga

SEQ ID NO: 305510 - DNA, 19 bp, Homo sapiens
  siRNA target sequence for CGI-141 (NM_016072.2,322-340).
cttcgaaatttatggattt

SEQ ID NO: 305511 - DNA, 19 bp, Homo sapiens
  siRNA target sequence for CGI-141 (NM_016072.2,366-384).
ctgtcgttgttggctttat

SEQ ID NO: 305512 - DNA, 19 bp, Homo sapiens
  siRNA target sequence for CGI-141 (NM_016072.2,370-388).
cgttgttggctttattaga

SEQ ID NO: 305513 - DNA, 19 bp, Homo sapiens
  siRNA target sequence for CGI-141 (NM_016072.2,401-419).
cttggatccctcctaaatt

SEQ ID NO: 305514 - DNA, 19 bp, Homo sapiens
  siRNA target sequence for CGI-141 (NM_016072.2,412-430).
cctaaatttacctggaatt

SEQ ID NO: 305515 - DNA, 19 bp, Homo sapiens
  siRNA target sequence for CGI-141 (NM_016072.2,449-467).
gttggagaaagcaacaata

SEQ ID NO: 305516 - DNA, 19 bp, Homo sapiens
  siRNA target sequence for GOLGA4 (NM_002078.2,352-370).
gctcaggcgtcctccaatt

SEQ ID NO: 305517 - DNA, 19 bp, Homo sapiens
  siRNA target sequence for GOLGA4 (NM_002078.2,355-373).
caggcgtcctccaattctt

SEQ ID NO: 305518 - DNA, 19 bp, Homo sapiens
  siRNA target sequence for GOLGA4 (NM_002078.2,358-376).
gcgtcctccaattcttcaa

SEQ ID NO: 305519 - DNA, 19 bp, Homo sapiens
  siRNA target sequence for GOLGA4 (NM_002078.2,360-378).
gtcctccaattcttcaaca

SEQ ID NO: 305520 - DNA, 19 bp, Homo sapiens
  siRNA target sequence for GOLGA4 (NM_002078.2,407-425).
catttacagagcaacttga

SEQ ID NO: 305521 - DNA, 19 bp, Homo sapiens
  siRNA target sequence for GOLGA4 (NM_002078.2,499-517).
gtggagtctttgtttcgaa

SEQ ID NO: 305522 - DNA, 19 bp, Homo sapiens
  siRNA target sequence for GOLGA4 (NM_002078.2,514-532).
cgaagtccgataaaggaat

SEQ ID NO: 305523 - DNA, 19 bp, Homo sapiens
  siRNA target sequence for GOLGA4 (NM_002078.2,520-538).
ccgataaaggaatctctat

SEQ ID NO: 305524 - DNA, 19 bp, Homo sapiens
  siRNA target sequence for GOLGA4 (NM_002078.2,521-539).
cgataaaggaatctctatt

SEQ ID NO: 305525 - DNA, 19 bp, Homo sapiens
  siRNA target sequence for GOLGA4 (NM_002078.2,545-563).
cttcttctaaagagtcttt

SEQ ID NO: 305526 - DNA, 19 bp, Homo sapiens
  siRNA target sequence for GOLGA4 (NM_002078.2,558-576).
gtctttggtacgaacatct

SEQ ID NO: 305527 - DNA, 19 bp, Homo sapiens
  siRNA target sequence for GOLGA4 (NM_002078.2,598-616).
cttgacctggacagttcta

SEQ ID NO: 305528 - DNA, 19 bp, Homo sapiens
  siRNA target sequence for GOLGA4 (NM_002078.2,611-629).
gttctactgccagttttga

SEQ ID NO: 305529 - DNA, 19 bp, Homo sapiens
  siRNA target sequence for GOLGA4 (NM_002078.2,683-701).
gtctcaacaaagaacagtt

SEQ ID NO: 305530 - DNA, 19 bp, Homo sapiens
  siRNA target sequence for GOLGA4 (NM_002078.2,708-726).
gcggttgcgaagaatggaa

SEQ ID NO: 305531 - DNA, 19 bp, Homo sapiens
  siRNA target sequence for GOLGA4 (NM_002078.2,737-755).
gtagctacaggggaaaata

SEQ ID NO: 305532 - DNA, 19 bp, Homo sapiens
  siRNA target sequence for GOLGA4 (NM_002078.2,763-781).
cttgttacagcttatcaga

SEQ ID NO: 305533 - DNA, 19 bp, Homo sapiens
  siRNA target sequence for GOLGA4 (NM_002078.2,798-816).
gaaaaagctacaaggtata

SEQ ID NO: 305534 - DNA, 19 bp, Homo sapiens
  siRNA target sequence for GOLGA4 (NM_002078.2,825-843).
gagtcaggataaatcactt

SEQ ID NO: 305535 - DNA, 19 bp, Homo sapiens
  siRNA target sequence for GOLGA4 (NM_002078.2,909-927).
ggagtttgatgcatcttta

SEQ ID NO: 305536 - DNA, 19 bp, Homo sapiens
  siRNA target sequence for GOLGA4 (NM_002078.2,931-949).
gagaaagatcagtatatca

SEQ ID NO: 305537 - DNA, 19 bp, Homo sapiens
  siRNA target sequence for GOLGA4 (NM_002078.2,933-951).
gaaagatcagtatatcagt

SEQ ID NO: 305538 - DNA, 19 bp, Homo sapiens
  siRNA target sequence for GOLGA4 (NM_002078.2,971-989).
ctctactgaaacaacgatt

SEQ ID NO: 305539 - DNA, 19 bp, Homo sapiens
  siRNA target sequence for GOLGA4 (NM_002078.2,976-994).
ctgaaacaacgattacgaa

SEQ ID NO: 305540 - DNA, 19 bp, Homo sapiens
  siRNA target sequence for GOLGA4 (NM_002078.2,978-996).
gaaacaacgattacgaaat

SEQ ID NO: 305541 - DNA, 19 bp, Homo sapiens
  siRNA target sequence for GOLGA4 (NM_002078.2,998-1016).
gcccgatgaatgttgatgt

SEQ ID NO: 305542 - DNA, 19 bp, Homo sapiens
  siRNA target sequence for GOLGA4 (NM_002078.2,999-1017).
cccgatgaatgttgatgta

SEQ ID NO: 305543 - DNA, 19 bp, Homo sapiens
  siRNA target sequence for GOLGA4 (NM_002078.2,1001-1019).
cgatgaatgttgatgtact

SEQ ID NO: 305544 - DNA, 19 bp, Homo sapiens
  siRNA target sequence for GOLGA4 (NM_002078.2,1101-1119).
ggaagatggaacttctgta

SEQ ID NO: 305545 - DNA, 19 bp, Homo sapiens
  siRNA target sequence for GOLGA4 (NM_002078.2,1153-1171).
cgtcaagagaacctactta

SEQ ID NO: 305546 - DNA, 19 bp, Homo sapiens
  siRNA target sequence for GOLGA4 (NM_002078.2,1192-1210).
cagtcacataaggaacaat

SEQ ID NO: 305547 - DNA, 19 bp, Homo sapiens
  siRNA target sequence for GOLGA4 (NM_002078.2,1207-1225).
caatgtacactattaacta

SEQ ID NO: 305548 - DNA, 19 bp, Homo sapiens
  siRNA target sequence for GOLGA4 (NM_002078.2,1214-1232).
cactattaactagtgaaaa

SEQ ID NO: 305549 - DNA, 19 bp, Homo sapiens
  siRNA target sequence for GOLGA4 (NM_002078.2,1262-1280).
gacttcaagaactagaaaa

SEQ ID NO: 305550 - DNA, 19 bp, Homo sapiens
  siRNA target sequence for GOLGA4 (NM_002078.2,1294-1312).
catatggccgagaagacta

SEQ ID NO: 305551 - DNA, 19 bp, Homo sapiens
  siRNA target sequence for GOLGA4 (NM_002078.2,1305-1323).
gaagactaaacttatcact

SEQ ID NO: 305552 - DNA, 19 bp, Homo sapiens
  siRNA target sequence for GOLGA4 (NM_002078.2,1330-1348).
cgtgatgcaaagaacttaa

SEQ ID NO: 305553 - DNA, 19 bp, Homo sapiens
  siRNA target sequence for GOLGA4 (NM_002078.2,1331-1349).
gtgatgcaaagaacttaat

SEQ ID NO: 305554 - DNA, 19 bp, Homo sapiens
  siRNA target sequence for GOLGA4 (NM_002078.2,1447-1465).
cgtagtcgcatcaaacaga

SEQ ID NO: 305555 - DNA, 19 bp, Homo sapiens
  siRNA target sequence for GOLGA4 (NM_002078.2,1448-1466).
gtagtcgcatcaaacagat

SEQ ID NO: 305556 - DNA, 19 bp, Homo sapiens
  siRNA target sequence for GOLGA4 (NM_002078.2,1453-1471).
cgcatcaaacagatgacta

SEQ ID NO: 305557 - DNA, 19 bp, Homo sapiens
  siRNA target sequence for GOLGA4 (NM_002078.2,1469-1487).
ctacccagggagaggaatt

SEQ ID NO: 305558 - DNA, 19 bp, Homo sapiens
  siRNA target sequence for GOLGA4 (NM_002078.2,1506-1524).
gtccgaaagagctgctttt

SEQ ID NO: 305559 - DNA, 19 bp, Homo sapiens
  siRNA target sequence for GOLGA4 (NM_002078.2,1508-1526).
ccgaaagagctgcttttga

SEQ ID NO: 305560 - DNA, 19 bp, Homo sapiens
  siRNA target sequence for GOLGA4 (NM_002078.2,1635-1653).
ggaacgcatcagtcttcaa

SEQ ID NO: 305561 - DNA, 19 bp, Homo sapiens
  siRNA target sequence for GOLGA4 (NM_002078.2,1678-1696).
gaggttgttgatgtaatga

SEQ ID NO: 305562 - DNA, 19 bp, Homo sapiens
  siRNA target sequence for GOLGA4 (NM_002078.2,1680-1698).
ggttgttgatgtaatgaaa

SEQ ID NO: 305563 - DNA, 19 bp, Homo sapiens
  siRNA target sequence for GOLGA4 (NM_002078.2,1726-1744).
ctacagaagcttcatgaaa

SEQ ID NO: 305564 - DNA, 19 bp, Homo sapiens
  siRNA target sequence for GOLGA4 (NM_002078.2,1825-1843).
gctcttgaaaagagtcaat

SEQ ID NO: 305565 - DNA, 19 bp, Homo sapiens
  siRNA target sequence for GOLGA4 (NM_002078.2,1891-1909).
gccctagaagagttagagt

SEQ ID NO: 305566 - DNA, 19 bp, Homo sapiens
  siRNA target sequence for GOLGA4 (NM_002078.2,1976-1994).
cttacagaactagaattct

SEQ ID NO: 305567 - DNA, 19 bp, Homo sapiens
  siRNA target sequence for GOLGA4 (NM_002078.2,1985-2003).
ctagaattcttgaattgga

SEQ ID NO: 305568 - DNA, 19 bp, Homo sapiens
  siRNA target sequence for GOLGA4 (NM_002078.2,2013-2031).
ggaaaaaagcttacaagaa

SEQ ID NO: 305569 - DNA, 19 bp, Homo sapiens
  siRNA target sequence for GOLGA4 (NM_002078.2,2085-2103).
gcacaataaggagattaca

SEQ ID NO: 305570 - DNA, 19 bp, Homo sapiens
  siRNA target sequence for GOLGA4 (NM_002078.2,2104-2122).
gtcatggttgaaaaacaca

SEQ ID NO: 305571 - DNA, 19 bp, Homo sapiens
  siRNA target sequence for GOLGA4 (NM_002078.2,2159-2177).
ccctttggactgaaaaact

SEQ ID NO: 305572 - DNA, 19 bp, Homo sapiens
  siRNA target sequence for GOLGA4 (NM_002078.2,2170-2188).
gaaaaactccaagtcttaa

SEQ ID NO: 305573 - DNA, 19 bp, Homo sapiens
  siRNA target sequence for GOLGA4 (NM_002078.2,2191-2209).
caacaatatcagactgaaa

SEQ ID NO: 305574 - DNA, 19 bp, Homo sapiens
  siRNA target sequence for GOLGA4 (NM_002078.2,2338-2356).
gaactagaatcattatctt

SEQ ID NO: 305575 - DNA, 19 bp, Homo sapiens
  siRNA target sequence for GOLGA4 (NM_002078.2,2381-2399).
cccgtcacaaactagaaga

SEQ ID NO: 305576 - DNA, 19 bp, Homo sapiens
  siRNA target sequence for GOLGA4 (NM_002078.2,2413-2431).
ctgaaagatcaaacagata

SEQ ID NO: 305577 - DNA, 19 bp, Homo sapiens
  siRNA target sequence for GOLGA4 (NM_002078.2,2487-2505).
gcaagttgacagtatcatt

SEQ ID NO: 305578 - DNA, 19 bp, Homo sapiens
  siRNA target sequence for GOLGA4 (NM_002078.2,2569-2587).
gagcttctcttgaaggaaa

SEQ ID NO: 305579 - DNA, 19 bp, Homo sapiens
  siRNA target sequence for GOLGA4 (NM_002078.2,2608-2626).
catcaggctcatgtagaaa

SEQ ID NO: 305580 - DNA, 19 bp, Homo sapiens
  siRNA target sequence for GOLGA4 (NM_002078.2,2613-2631).
ggctcatgtagaaaattta

SEQ ID NO: 305581 - DNA, 19 bp, Homo sapiens
  siRNA target sequence for GOLGA4 (NM_002078.2,2632-2650).
gaggcagatattaaaaggt

SEQ ID NO: 305582 - DNA, 19 bp, Homo sapiens
  siRNA target sequence for GOLGA4 (NM_002078.2,2678-2696).
ctaagctggacgtttttca

SEQ ID NO: 305583 - DNA, 19 bp, Homo sapiens
  siRNA target sequence for GOLGA4 (NM_002078.2,2758-2776).
cagcagaagttgttggatt

SEQ ID NO: 305584 - DNA, 19 bp, Homo sapiens
  siRNA target sequence for GOLGA4 (NM_002078.2,2848-2866).
gagttagatgctcacaaaa

SEQ ID NO: 305585 - DNA, 19 bp, Homo sapiens
  siRNA target sequence for GOLGA4 (NM_002078.2,3058-3076).
gagatactcacacagaaat

SEQ ID NO: 305586 - DNA, 19 bp, Homo sapiens
  siRNA target sequence for GOLGA4 (NM_002078.2,3084-3102).
caaggaggacagtattcat

SEQ ID NO: 305587 - DNA, 19 bp, Homo sapiens
  siRNA target sequence for GOLGA4 (NM_002078.2,3087-3105).
ggaggacagtattcatatt

SEQ ID NO: 305588 - DNA, 19 bp, Homo sapiens
  siRNA target sequence for GOLGA4 (NM_002078.2,3191-3209).
cgttaaagaaaaaattact

SEQ ID NO: 305589 - DNA, 19 bp, Homo sapiens
  siRNA target sequence for GOLGA4 (NM_002078.2,3226-3244).
cttaagaaagagcttgaaa

SEQ ID NO: 305590 - DNA, 19 bp, Homo sapiens
  siRNA target sequence for GOLGA4 (NM_002078.2,3248-3266).
ctgctctagagcttagtca

SEQ ID NO: 305591 - DNA, 19 bp, Homo sapiens
  siRNA target sequence for GOLGA4 (NM_002078.2,3398-3416).
gagaactcaatgatgtcat

SEQ ID NO: 305592 - DNA, 19 bp, Homo sapiens
  siRNA target sequence for GOLGA4 (NM_002078.2,3400-3418).
gaactcaatgatgtcatat

SEQ ID NO: 305593 - DNA, 19 bp, Homo sapiens
  siRNA target sequence for GOLGA4 (NM_002078.2,3526-3544).
ctcctatttgggtgtgaaa

SEQ ID NO: 305594 - DNA, 19 bp, Homo sapiens
  siRNA target sequence for GOLGA4 (NM_002078.2,3651-3669).
gaattctcttgcacaagat

SEQ ID NO: 305595 - DNA, 19 bp, Homo sapiens
  siRNA target sequence for GOLGA4 (NM_002078.2,3658-3676).
cttgcacaagatgaaacta

SEQ ID NO: 305596 - DNA, 19 bp, Homo sapiens
  siRNA target sequence for GOLGA4 (NM_002078.2,3664-3682).
caagatgaaactaaactga

SEQ ID NO: 305597 - DNA, 19 bp, Homo sapiens
  siRNA target sequence for GOLGA4 (NM_002078.2,3699-3717).
gctagaggttgacttgaat

SEQ ID NO: 305598 - DNA, 19 bp, Homo sapiens
  siRNA target sequence for GOLGA4 (NM_002078.2,3700-3718).
ctagaggttgacttgaata

SEQ ID NO: 305599 - DNA, 19 bp, Homo sapiens
  siRNA target sequence for GOLGA4 (NM_002078.2,3703-3721).
gaggttgacttgaataagt

SEQ ID NO: 305600 - DNA, 19 bp, Homo sapiens
  siRNA target sequence for GOLGA4 (NM_002078.2,3720-3738).
gtctctgaaggaaaatact

SEQ ID NO: 305601 - DNA, 19 bp, Homo sapiens
  siRNA target sequence for GOLGA4 (NM_002078.2,3781-3799).
gaagataagcggaaggttt

SEQ ID NO: 305602 - DNA, 19 bp, Homo sapiens
  siRNA target sequence for GOLGA4 (NM_002078.2,3804-3822).
gttgactagcaagttgaaa

SEQ ID NO: 305603 - DNA, 19 bp, Homo sapiens
  siRNA target sequence for GOLGA4 (NM_002078.2,3883-3901).
gaggacaagagcttggaat

SEQ ID NO: 305604 - DNA, 19 bp, Homo sapiens
  siRNA target sequence for GOLGA4 (NM_002078.2,3922-3940).
ctagcgattcagctagata

SEQ ID NO: 305605 - DNA, 19 bp, Homo sapiens
  siRNA target sequence for GOLGA4 (NM_002078.2,3925-3943).
gcgattcagctagatattt

SEQ ID NO: 305606 - DNA, 19 bp, Homo sapiens
  siRNA target sequence for GOLGA4 (NM_002078.2,3934-3952).
ctagatatttgctgtaaga

SEQ ID NO: 305607 - DNA, 19 bp, Homo sapiens
  siRNA target sequence for GOLGA4 (NM_002078.2,3980-3998).
caaatgagctaatcaacat

SEQ ID NO: 305608 - DNA, 19 bp, Homo sapiens
  siRNA target sequence for GOLGA4 (NM_002078.2,3985-4003).
gagctaatcaacattagta

SEQ ID NO: 305609 - DNA, 19 bp, Homo sapiens
  siRNA target sequence for GOLGA4 (NM_002078.2,4043-4061).
gtcagcaccgtacaactaa

SEQ ID NO: 305610 - DNA, 19 bp, Homo sapiens
  siRNA target sequence for GOLGA4 (NM_002078.2,4063-4081).
gttaaggaggcactgttaa

SEQ ID NO: 305611 - DNA, 19 bp, Homo sapiens
  siRNA target sequence for GOLGA4 (NM_002078.2,4068-4086).
ggaggcactgttaattaaa

SEQ ID NO: 305612 - DNA, 19 bp, Homo sapiens
  siRNA target sequence for GOLGA4 (NM_002078.2,4069-4087).
gaggcactgttaattaaaa

SEQ ID NO: 305613 - DNA, 19 bp, Homo sapiens
  siRNA target sequence for GOLGA4 (NM_002078.2,4102-4120).
gaattagaagcacaactta

SEQ ID NO: 305614 - DNA, 19 bp, Homo sapiens
  siRNA target sequence for GOLGA4 (NM_002078.2,4132-4150).
gaggagcaaaatacactaa

SEQ ID NO: 305615 - DNA, 19 bp, Homo sapiens
  siRNA target sequence for GOLGA4 (NM_002078.2,4134-4152).
ggagcaaaatacactaaat

SEQ ID NO: 305616 - DNA, 19 bp, Homo sapiens
  siRNA target sequence for GOLGA4 (NM_002078.2,4167-4185).
ggctactcatcagttagaa

SEQ ID NO: 305617 - DNA, 19 bp, Homo sapiens
  siRNA target sequence for GOLGA4 (NM_002078.2,4169-4187).
ctactcatcagttagaaga

SEQ ID NO: 305618 - DNA, 19 bp, Homo sapiens
  siRNA target sequence for GOLGA4 (NM_002078.2,4172-4190).
ctcatcagttagaagaaaa

SEQ ID NO: 305619 - DNA, 19 bp, Homo sapiens
  siRNA target sequence for GOLGA4 (NM_002078.2,4215-4233).
ggctgatattgaaagtctt

SEQ ID NO: 305620 - DNA, 19 bp, Homo sapiens
  siRNA target sequence for GOLGA4 (NM_002078.2,4219-4237).
gatattgaaagtcttgtaa

SEQ ID NO: 305621 - DNA, 19 bp, Homo sapiens
  siRNA target sequence for GOLGA4 (NM_002078.2,4384-4402).
gttgagattagcagtctta

SEQ ID NO: 305622 - DNA, 19 bp, Homo sapiens
  siRNA target sequence for GOLGA4 (NM_002078.2,4387-4405).
gagattagcagtcttagta

SEQ ID NO: 305623 - DNA, 19 bp, Homo sapiens
  siRNA target sequence for GOLGA4 (NM_002078.2,4394-4412).
gcagtcttagtaaacaact

SEQ ID NO: 305624 - DNA, 19 bp, Homo sapiens
  siRNA target sequence for GOLGA4 (NM_002078.2,4395-4413).
cagtcttagtaaacaacta

SEQ ID NO: 305625 - DNA, 19 bp, Homo sapiens
  siRNA target sequence for GOLGA4 (NM_002078.2,4426-4444).
gttcagcttcaaaatagca

SEQ ID NO: 305626 - DNA, 19 bp, Homo sapiens
  siRNA target sequence for GOLGA4 (NM_002078.2,4443-4461).
catcagcctatccgaaaaa

SEQ ID NO: 305627 - DNA, 19 bp, Homo sapiens
  siRNA target sequence for GOLGA4 (NM_002078.2,4446-4464).
cagcctatccgaaaaagaa

SEQ ID NO: 305628 - DNA, 19 bp, Homo sapiens
  siRNA target sequence for GOLGA4 (NM_002078.2,4516-4534).
ctggatcaggtgcaagatt

SEQ ID NO: 305629 - DNA, 19 bp, Homo sapiens
  siRNA target sequence for GOLGA4 (NM_002078.2,4518-4536).
ggatcaggtgcaagattta

SEQ ID NO: 305630 - DNA, 19 bp, Homo sapiens
  siRNA target sequence for GOLGA4 (NM_002078.2,4519-4537).
gatcaggtgcaagatttat

SEQ ID NO: 305631 - DNA, 19 bp, Homo sapiens
  siRNA target sequence for GOLGA4 (NM_002078.2,4524-4542).
ggtgcaagatttatctttt

SEQ ID NO: 305632 - DNA, 19 bp, Homo sapiens
  siRNA target sequence for GOLGA4 (NM_002078.2,4588-4606).
gtagatgactggtccaata

SEQ ID NO: 305633 - DNA, 19 bp, Homo sapiens
  siRNA target sequence for GOLGA4 (NM_002078.2,4591-4609).
gatgactggtccaataaat

SEQ ID NO: 305634 - DNA, 19 bp, Homo sapiens
  siRNA target sequence for GOLGA4 (NM_002078.2,4596-4614).
ctggtccaataaattctca

SEQ ID NO: 305635 - DNA, 19 bp, Homo sapiens
  siRNA target sequence for GOLGA4 (NM_002078.2,4640-4658).
gatttacacagcatcaaaa

SEQ ID NO: 305636 - DNA, 19 bp, Homo sapiens
  siRNA target sequence for GOLGA4 (NM_002078.2,4648-4666).
cagcatcaaaacactgtta

SEQ ID NO: 305637 - DNA, 19 bp, Homo sapiens
  siRNA target sequence for GOLGA4 (NM_002078.2,4717-4735).
gatgagcagataaatttat

SEQ ID NO: 305638 - DNA, 19 bp, Homo sapiens
  siRNA target sequence for GOLGA4 (NM_002078.2,4972-4990).
gttcagaaacttcaacatt

SEQ ID NO: 305639 - DNA, 19 bp, Homo sapiens
  siRNA target sequence for GOLGA4 (NM_002078.2,5013-5031).
ggacaacagggttaaagaa

SEQ ID NO: 305640 - DNA, 19 bp, Homo sapiens
  siRNA target sequence for GOLGA4 (NM_002078.2,5061-5079).
ccaagtttattccatgaaa

SEQ ID NO: 305641 - DNA, 19 bp, Homo sapiens
  siRNA target sequence for GOLGA4 (NM_002078.2,5164-5182).
gataggcttgagtcagaaa

SEQ ID NO: 305642 - DNA, 19 bp, Homo sapiens
  siRNA target sequence for GOLGA4 (NM_002078.2,5175-5193).
gtcagaaagtgctgcaaaa

SEQ ID NO: 305643 - DNA, 19 bp, Homo sapiens
  siRNA target sequence for GOLGA4 (NM_002078.2,5234-5252).
ccattaagaagcagttgtt

SEQ ID NO: 305644 - DNA, 19 bp, Homo sapiens
  siRNA target sequence for GOLGA4 (NM_002078.2,5235-5253).
cattaagaagcagttgtta

SEQ ID NO: 305645 - DNA, 19 bp, Homo sapiens
  siRNA target sequence for GOLGA4 (NM_002078.2,5247-5265).
gttgttatctcaaatggaa

SEQ ID NO: 305646 - DNA, 19 bp, Homo sapiens
  siRNA target sequence for GOLGA4 (NM_002078.2,5275-5293).
gaacagtataaaaaaggta

SEQ ID NO: 305647 - DNA, 19 bp, Homo sapiens
  siRNA target sequence for GOLGA4 (NM_002078.2,5301-5319).
ccatttgagtgagctaaat

SEQ ID NO: 305648 - DNA, 19 bp, Homo sapiens
  siRNA target sequence for GOLGA4 (NM_002078.2,5380-5398).
gaaagttcacagtcagaaa

SEQ ID NO: 305649 - DNA, 19 bp, Homo sapiens
  siRNA target sequence for GOLGA4 (NM_002078.2,5469-5487).
ctgtgtgcagaagacatat

SEQ ID NO: 305650 - DNA, 19 bp, Homo sapiens
  siRNA target sequence for GOLGA4 (NM_002078.2,5607-5625).
ggagcgcttaataaagcta

SEQ ID NO: 305651 - DNA, 19 bp, Homo sapiens
  siRNA target sequence for GOLGA4 (NM_002078.2,5820-5838).
ggaactaacctgtcagatt

SEQ ID NO: 305652 - DNA, 19 bp, Homo sapiens
  siRNA target sequence for GOLGA4 (NM_002078.2,5821-5839).
gaactaacctgtcagattt

SEQ ID NO: 305653 - DNA, 19 bp, Homo sapiens
  siRNA target sequence for GOLGA4 (NM_002078.2,5859-5877).
gctggattcctgcttagta

SEQ ID NO: 305654 - DNA, 19 bp, Homo sapiens
  siRNA target sequence for GOLGA4 (NM_002078.2,5860-5878).
ctggattcctgcttagtaa

SEQ ID NO: 305655 - DNA, 19 bp, Homo sapiens
  siRNA target sequence for GOLGA4 (NM_002078.2,5862-5880).
ggattcctgcttagtaaga

SEQ ID NO: 305656 - DNA, 19 bp, Homo sapiens
  siRNA target sequence for GOLGA4 (NM_002078.2,5907-5925).
ggaagagttgacctcaaaa

SEQ ID NO: 305657 - DNA, 19 bp, Homo sapiens
  siRNA target sequence for GOLGA4 (NM_002078.2,5908-5926).
gaagagttgacctcaaaat

SEQ ID NO: 305658 - DNA, 19 bp, Homo sapiens
  siRNA target sequence for GOLGA4 (NM_002078.2,6025-6043).
caacccaaattgcttagta

SEQ ID NO: 305659 - DNA, 19 bp, Homo sapiens
  siRNA target sequence for GOLGA4 (NM_002078.2,6028-6046).
cccaaattgcttagtaaca

SEQ ID NO: 305660 - DNA, 19 bp, Homo sapiens
  siRNA target sequence for GOLGA4 (NM_002078.2,6029-6047).
ccaaattgcttagtaacat

SEQ ID NO: 305661 - DNA, 19 bp, Homo sapiens
  siRNA target sequence for GOLGA4 (NM_002078.2,6060-6078).
caatgatctggagtttaaa

SEQ ID NO: 305662 - DNA, 19 bp, Homo sapiens
  siRNA target sequence for GOLGA4 (NM_002078.2,6109-6127).
ctgggcaaggagattgtta

SEQ ID NO: 305663 - DNA, 19 bp, Homo sapiens
  siRNA target sequence for GOLGA4 (NM_002078.2,6112-6130).
ggcaaggagattgttagat

SEQ ID NO: 305664 - DNA, 19 bp, Homo sapiens
  siRNA target sequence for GOLGA4 (NM_002078.2,6241-6259).
cttgaactgaagcacaatt

SEQ ID NO: 305665 - DNA, 19 bp, Homo sapiens
  siRNA target sequence for GOLGA4 (NM_002078.2,6271-6289).
cagctgatgagggagttta

SEQ ID NO: 305666 - DNA, 19 bp, Homo sapiens
  siRNA target sequence for GOLGA4 (NM_002078.2,6276-6294).
gatgagggagtttaataca

SEQ ID NO: 305667 - DNA, 19 bp, Homo sapiens
  siRNA target sequence for GOLGA4 (NM_002078.2,6316-6334).
gagctggaaatgaccataa

SEQ ID NO: 305668 - DNA, 19 bp, Homo sapiens
  siRNA target sequence for GOLGA4 (NM_002078.2,6358-6376).
gaggtggaggctgaacttt

SEQ ID NO: 305669 - DNA, 19 bp, Homo sapiens
  siRNA target sequence for GOLGA4 (NM_002078.2,6360-6378).
ggtggaggctgaactttta

SEQ ID NO: 305670 - DNA, 19 bp, Homo sapiens
  siRNA target sequence for GOLGA4 (NM_002078.2,6383-6401).
gccatcaagaagagacaaa

SEQ ID NO: 305671 - DNA, 19 bp, Homo sapiens
  siRNA target sequence for GOLGA4 (NM_002078.2,6405-6423).
gttacttaaaaaaattgct

SEQ ID NO: 305672 - DNA, 19 bp, Homo sapiens
  siRNA target sequence for GOLGA4 (NM_002078.2,6570-6588).
ggagaaccctggcaatgat

SEQ ID NO: 305673 - DNA, 19 bp, Homo sapiens
  siRNA target sequence for GOLGA4 (NM_002078.2,6576-6594).
ccctggcaatgataatgta

SEQ ID NO: 305674 - DNA, 19 bp, Homo sapiens
  siRNA target sequence for GOLGA4 (NM_002078.2,6635-6653).
ctttaatcagtgattcgaa

SEQ ID NO: 305675 - DNA, 19 bp, Homo sapiens
  siRNA target sequence for GOLGA4 (NM_002078.2,6674-6692).
gagaacagattcacaattt

SEQ ID NO: 305676 - DNA, 19 bp, Homo sapiens
  siRNA target sequence for GOLGA4 (NM_002078.2,6699-6717).
ccgtttgaagaaatatgaa

SEQ ID NO: 305677 - DNA, 19 bp, Homo sapiens
  siRNA target sequence for GOLGA4 (NM_002078.2,6799-6817).
cctaccgaatttgagtatt

SEQ ID NO: 305678 - DNA, 19 bp, Homo sapiens
  siRNA target sequence for GOLGA4 (NM_002078.2,6800-6818).
ctaccgaatttgagtattt

SEQ ID NO: 305679 - DNA, 19 bp, Homo sapiens
  siRNA target sequence for GOLGA4 (NM_002078.2,6861-6879).
gaccatggcaaaagttata

SEQ ID NO: 305680 - DNA, 19 bp, Homo sapiens
  siRNA target sequence for GOLGA4 (NM_002078.2,6937-6955).
gctcggctgatgtttactt

SEQ ID NO: 305681 - DNA, 19 bp, Homo sapiens
  siRNA target sequence for GOLGA4 (NM_002078.2,6956-6974).
cacctcgcagtggtatctt

SEQ ID NO: 305682 - DNA, 19 bp, Homo sapiens
  siRNA target sequence for APOL4 (NM_030643.3,793-811).
cgtgtcattgcaaatgaga

SEQ ID NO: 305683 - DNA, 19 bp, Homo sapiens
  siRNA target sequence for APOL4 (NM_030643.3,875-893).
ctgtcattggcgttatgtt

SEQ ID NO: 305684 - DNA, 19 bp, Homo sapiens
  siRNA target sequence for APOL4 (NM_030643.3,885-903).
cgttatgttggcaccattt

SEQ ID NO: 305685 - DNA, 19 bp, Homo sapiens
  siRNA target sequence for APOL4 (NM_030643.3,886-904).
gttatgttggcaccattta

SEQ ID NO: 305686 - DNA, 19 bp, Homo sapiens
  siRNA target sequence for APOL4 (NM_030643.3,912-930).
gctgagcctgagcattact

SEQ ID NO: 305687 - DNA, 19 bp, Homo sapiens
  siRNA target sequence for APOL4 (NM_030643.3,1043-1061).
ccagcactgaccaattgga

SEQ ID NO: 305688 - DNA, 19 bp, Homo sapiens
  siRNA target sequence for APOL4 (NM_030643.3,1125-1143).
cgaagccacaaaaatgatt

SEQ ID NO: 305689 - DNA, 19 bp, Homo sapiens
  siRNA target sequence for APOL4 (NM_030643.3,1186-1204).
ggacgccctttgattgctt

SEQ ID NO: 305690 - DNA, 19 bp, Homo sapiens
  siRNA target sequence for APOL4 (NM_030643.3,1197-1215).
gattgcttggcgatatgta

SEQ ID NO: 305691 - DNA, 19 bp, Homo sapiens
  siRNA target sequence for APOL4 (NM_030643.3,1202-1220).
cttggcgatatgtacctat

SEQ ID NO: 305692 - DNA, 19 bp, Homo sapiens
  siRNA target sequence for APOL4 (NM_030643.3,1205-1223).
ggcgatatgtacctataaa

SEQ ID NO: 305693 - DNA, 19 bp, Homo sapiens
  siRNA target sequence for APOL4 (NM_030643.3,1206-1224).
gcgatatgtacctataaat

SEQ ID NO: 305694 - DNA, 19 bp, Homo sapiens
  siRNA target sequence for APOL4 (NM_030643.3,1256-1274).
ccacccggatagtgagaaa

SEQ ID NO: 305695 - DNA, 19 bp, Homo sapiens
  siRNA target sequence for APOL4 (NM_030643.3,1257-1275).
cacccggatagtgagaaaa

SEQ ID NO: 305696 - DNA, 19 bp, Homo sapiens
  siRNA target sequence for APOL4 (NM_030643.3,1259-1277).
cccggatagtgagaaaagt

SEQ ID NO: 305697 - DNA, 19 bp, Homo sapiens
  siRNA target sequence for APOL4 (NM_030643.3,1301-1319).
cttcaggtgtccttgttgt

SEQ ID NO: 305698 - DNA, 19 bp, Homo sapiens
  siRNA target sequence for APOL4 (NM_030643.3,1441-1459).
catatccatcagagtctaa

SEQ ID NO: 305699 - DNA, 19 bp, Homo sapiens
  siRNA target sequence for APOL4 (NM_145661.1,459-477).
gacaagcggacttttcctt

SEQ ID NO: 305700 - DNA, 19 bp, Homo sapiens
  siRNA target sequence for APOL4 (NM_145661.1,608-626).
gctccttctgtgtccatta

SEQ ID NO: 305701 - DNA, 19 bp, Homo sapiens
  siRNA target sequence for APOL4 (NM_145661.1,609-627).
ctccttctgtgtccattat

SEQ ID NO: 305702 - DNA, 19 bp, Homo sapiens
  siRNA target sequence for APOL4 (NM_145661.1,715-733).
gactggccgaggttaagct

SEQ ID NO: 305703 - DNA, 19 bp, Homo sapiens
  siRNA target sequence for APOL4 (NM_145661.1,721-739).
ccgaggttaagctgtgttt

SEQ ID NO: 305704 - DNA, 19 bp, Homo sapiens
  siRNA target sequence for APOL4 (NM_145661.1,723-741).
gaggttaagctgtgtttgt

SEQ ID NO: 305705 - DNA, 19 bp, Homo sapiens
  siRNA target sequence for GLTP (NM_016433.2,223-241).
cttgggtccccagtgttta

SEQ ID NO: 305706 - DNA, 19 bp, Homo sapiens
  siRNA target sequence for GLTP (NM_016433.2,244-262).
cccatcaaggcagacataa

SEQ ID NO: 305707 - DNA, 19 bp, Homo sapiens
  siRNA target sequence for GLTP (NM_016433.2,656-674).
gcctcttcctagtcaacta

SEQ ID NO: 305708 - DNA, 19 bp, Homo sapiens
  siRNA target sequence for GLTP (NM_016433.2,658-676).
ctcttcctagtcaactaca

SEQ ID NO: 305709 - DNA, 19 bp, Homo sapiens
  siRNA target sequence for GLTP (NM_016433.2,680-698).
cgaccatcgatgtcatcta

SEQ ID NO: 305710 - DNA, 19 bp, Homo sapiens
  siRNA target sequence for FLJ23790 (NM_144963.1,304-322).
cgagtgcaaggtgattatt

SEQ ID NO: 305711 - DNA, 19 bp, Homo sapiens
  siRNA target sequence for FLJ23790 (NM_144963.1,305-323).
gagtgcaaggtgattattt

SEQ ID NO: 305712 - DNA, 19 bp, Homo sapiens
  siRNA target sequence for FLJ23790 (NM_144963.1,325-343).
gaaactctactctataaga

SEQ ID NO: 305713 - DNA, 19 bp, Homo sapiens
  siRNA target sequence for FLJ23790 (NM_144963.1,329-347).
ctctactctataagatatt

SEQ ID NO: 305714 - DNA, 19 bp, Homo sapiens
  siRNA target sequence for FLJ23790 (NM_144963.1,758-776).
caccaaacttgaaaagtca

SEQ ID NO: 305715 - DNA, 19 bp, Homo sapiens
  siRNA target sequence for FLJ23790 (NM_144963.1,773-791).
gtcatgcagtcacaatgtt

SEQ ID NO: 305716 - DNA, 19 bp, Homo sapiens
  siRNA target sequence for FLJ23790 (NM_144963.1,827-845).
gctttcttatagaactaga

SEQ ID NO: 305717 - DNA, 19 bp, Homo sapiens
  siRNA target sequence for FLJ23790 (NM_144963.1,828-846).
ctttcttatagaactagaa

SEQ ID NO: 305718 - DNA, 19 bp, Homo sapiens
  siRNA target sequence for FLJ23790 (NM_144963.1,1453-1471).
gagttcactcgtgtcaata

SEQ ID NO: 305719 - DNA, 19 bp, Homo sapiens
  siRNA target sequence for LAPTM4A (NM_014713.2,176-194).
cgcagtgaccggttctaca

SEQ ID NO: 305720 - DNA, 19 bp, Homo sapiens
  siRNA target sequence for LAPTM4A (NM_014713.2,252-270).
ggtacatggtagtaaacct

SEQ ID NO: 305721 - DNA, 19 bp, Homo sapiens
  siRNA target sequence for LAPTM4A (NM_014713.2,253-271).
gtacatggtagtaaaccta

SEQ ID NO: 305722 - DNA, 19 bp, Homo sapiens
  siRNA target sequence for LAPTM4A (NM_014713.2,341-359).
gaagtcatcggtaattact

SEQ ID NO: 305723 - DNA, 19 bp, Homo sapiens
  siRNA target sequence for LAPTM4A (NM_014713.2,344-362).
gtcatcggtaattactatt

SEQ ID NO: 305724 - DNA, 19 bp, Homo sapiens
  siRNA target sequence for LAPTM4A (NM_014713.2,366-384).
ctgagagaatggctgataa

SEQ ID NO: 305725 - DNA, 19 bp, Homo sapiens
  siRNA target sequence for LAPTM4A (NM_014713.2,401-419).
gccgtctctgttcttatgt

SEQ ID NO: 305726 - DNA, 19 bp, Homo sapiens
  siRNA target sequence for LAPTM4A (NM_014713.2,403-421).
cgtctctgttcttatgttt

SEQ ID NO: 305727 - DNA, 19 bp, Homo sapiens
  siRNA target sequence for LAPTM4A (NM_014713.2,404-422).
gtctctgttcttatgttta

SEQ ID NO: 305728 - DNA, 19 bp, Homo sapiens
  siRNA target sequence for LAPTM4A (NM_014713.2,406-424).
ctctgttcttatgtttata

SEQ ID NO: 305729 - DNA, 19 bp, Homo sapiens
  siRNA target sequence for LAPTM4A (NM_014713.2,427-445).
cagttcaatgctggtttat

SEQ ID NO: 305730 - DNA, 19 bp, Homo sapiens
  siRNA target sequence for LAPTM4A (NM_014713.2,440-458).
gtttatggagcaatttctt

SEQ ID NO: 305731 - DNA, 19 bp, Homo sapiens
  siRNA target sequence for LAPTM4A (NM_014713.2,484-502).
cttctgttaccgacttttt

SEQ ID NO: 305732 - DNA, 19 bp, Homo sapiens
  siRNA target sequence for LAPTM4A (NM_014713.2,489-507).
gttaccgactttttgactt

SEQ ID NO: 305733 - DNA, 19 bp, Homo sapiens
  siRNA target sequence for LAPTM4A (NM_014713.2,571-589).
ggatcaactacctgatttt

SEQ ID NO: 305734 - DNA, 19 bp, Homo sapiens
  siRNA target sequence for LAPTM4A (NM_014713.2,676-694).
ggcttatctaattaactgt

SEQ ID NO: 305735 - DNA, 19 bp, Homo sapiens
  siRNA target sequence for LAPTM4A (NM_014713.2,693-711).
gtgtttggaactgctataa

SEQ ID NO: 305736 - DNA, 19 bp, Homo sapiens
  siRNA target sequence for LAPTM4A (NM_014713.2,705-723).
gctataaatacatcaacaa

SEQ ID NO: 305737 - DNA, 19 bp, Homo sapiens
  siRNA target sequence for LAPTM4A (NM_014713.2,764-782).
gcacctcctcagtacgttt

SEQ ID NO: 305738 - DNA, 19 bp, Homo sapiens
  siRNA target sequence for LAPTM4A (NM_014713.2,765-783).
cacctcctcagtacgtttt

SEQ ID NO: 305739 - DNA, 19 bp, Homo sapiens
  siRNA target sequence for LAPTM4A (NM_014713.2,775-793).
gtacgttttgccaacctat

SEQ ID NO: 305740 - DNA, 19 bp, Homo sapiens
  siRNA target sequence for LAPTM4A (NM_014713.2,778-796).
cgttttgccaacctatgaa

SEQ ID NO: 305741 - DNA, 19 bp, Homo sapiens
  siRNA target sequence for LAPTM4A (NM_014713.2,801-819).
ccgtgaaaatgcctgaaaa

SEQ ID NO: 305742 - DNA, 19 bp, Homo sapiens
  siRNA target sequence for NPTX1 (NM_002522.1,529-547).
ctcgggcaaactttgcaat

SEQ ID NO: 305743 - DNA, 19 bp, Homo sapiens
  siRNA target sequence for NPTX1 (NM_002522.1,577-595).
cagtacagccgcctcaatt

SEQ ID NO: 305744 - DNA, 19 bp, Homo sapiens
  siRNA target sequence for NPTX1 (NM_002522.1,828-846).
cccactgcggaccaactat

SEQ ID NO: 305745 - DNA, 19 bp, Homo sapiens
  siRNA target sequence for NPTX1 (NM_002522.1,829-847).
ccactgcggaccaactata

SEQ ID NO: 305746 - DNA, 19 bp, Homo sapiens
  siRNA target sequence for NPTX1 (NM_002522.1,830-848).
cactgcggaccaactatat

SEQ ID NO: 305747 - DNA, 19 bp, Homo sapiens
  siRNA target sequence for NPTX1 (NM_002522.1,832-850).
ctgcggaccaactatatgt

SEQ ID NO: 305748 - DNA, 19 bp, Homo sapiens
  siRNA target sequence for NPTX1 (NM_002522.1,834-852).
gcggaccaactatatgtat

SEQ ID NO: 305749 - DNA, 19 bp, Homo sapiens
  siRNA target sequence for NPTX1 (NM_002522.1,1136-1154).
gtggcagtggcgagaactt

SEQ ID NO: 305750 - DNA, 19 bp, Homo sapiens
  siRNA target sequence for NPTX1 (NM_002522.1,1333-1351).
gctctgtccggcaatgtca

SEQ ID NO: 305751 - DNA, 19 bp, Homo sapiens
  siRNA target sequence for NPTX1 (NM_002522.1,1411-1429).
gcctgtcgccagatcaact

SEQ ID NO: 305752 - DNA, 19 bp, Homo sapiens
  siRNA target sequence for NUP62 (NM_012346.3,369-387).
ggcactggagggtttaatt

SEQ ID NO: 305753 - DNA, 19 bp, Homo sapiens
  siRNA target sequence for NUP62 (NM_012346.3,465-483).
cagacgacaggcttcactt

SEQ ID NO: 305754 - DNA, 19 bp, Homo sapiens
  siRNA target sequence for NUP62 (NM_012346.3,467-485).
gacgacaggcttcactttt

SEQ ID NO: 305755 - DNA, 19 bp, Homo sapiens
  siRNA target sequence for NUP62 (NM_012346.3,608-626).
cagcagcaacctcactaat

SEQ ID NO: 305756 - DNA, 19 bp, Homo sapiens
  siRNA target sequence for NUP62 (NM_012346.3,618-636).
ctcactaatgccatatcga

SEQ ID NO: 305757 - DNA, 19 bp, Homo sapiens
  siRNA target sequence for NUP62 (NM_012346.3,664-682).
cacccaccggctttgtgtt

SEQ ID NO: 305758 - DNA, 19 bp, Homo sapiens
  siRNA target sequence for NUP62 (NM_012346.3,754-772).
cccaaccctccggtttcaa

SEQ ID NO: 305759 - DNA, 19 bp, Homo sapiens
  siRNA target sequence for NUP62 (NM_012346.3,756-774).
caaccctccggtttcaaca

SEQ ID NO: 305760 - DNA, 19 bp, Homo sapiens
  siRNA target sequence for NUP62 (NM_012346.3,914-932).
cagcctctttgcgtcaata

SEQ ID NO: 305761 - DNA, 19 bp, Homo sapiens
  siRNA target sequence for NUP62 (NM_012346.3,917-935).
cctctttgcgtcaatagca

SEQ ID NO: 305762 - DNA, 19 bp, Homo sapiens
  siRNA target sequence for NUP62 (NM_012346.3,918-936).
ctctttgcgtcaatagcaa

SEQ ID NO: 305763 - DNA, 19 bp, Homo sapiens
  siRNA target sequence for NUP62 (NM_012346.3,1053-1071).
ggcacctccacaacaacat

SEQ ID NO: 305764 - DNA, 19 bp, Homo sapiens
  siRNA target sequence for NUP62 (NM_012346.3,1120-1138).
ccggctttgccttgaattt

SEQ ID NO: 305765 - DNA, 19 bp, Homo sapiens
  siRNA target sequence for NUP62 (NM_012346.3,1121-1139).
cggctttgccttgaattta

SEQ ID NO: 305766 - DNA, 19 bp, Homo sapiens
  siRNA target sequence for NUP62 (NM_012346.3,1122-1140).
ggctttgccttgaatttaa

SEQ ID NO: 305767 - DNA, 19 bp, Homo sapiens
  siRNA target sequence for NUP62 (NM_012346.3,1155-1173).
gccgggatccccagcaata

SEQ ID NO: 305768 - DNA, 19 bp, Homo sapiens
  siRNA target sequence for NUP62 (NM_012346.3,1157-1175).
cgggatccccagcaataca

SEQ ID NO: 305769 - DNA, 19 bp, Homo sapiens
  siRNA target sequence for NUP62 (NM_012346.3,1256-1274).
ggagagcctgatcaacaaa

SEQ ID NO: 305770 - DNA, 19 bp, Homo sapiens
  siRNA target sequence for STX17 (NM_017919.1,125-143).
gaaccagctatccagaaat

SEQ ID NO: 305771 - DNA, 19 bp, Homo sapiens
  siRNA target sequence for STX17 (NM_017919.1,131-149).
gctatccagaaattcatta

SEQ ID NO: 305772 - DNA, 19 bp, Homo sapiens
  siRNA target sequence for STX17 (NM_017919.1,188-206).
caccagataaatattgaga

SEQ ID NO: 305773 - DNA, 19 bp, Homo sapiens
  siRNA target sequence for STX17 (NM_017919.1,253-271).
caatgcaggacgtacagtt

SEQ ID NO: 305774 - DNA, 19 bp, Homo sapiens
  siRNA target sequence for STX17 (NM_017919.1,272-290).
cagcaactccgatccaata

SEQ ID NO: 305775 - DNA, 19 bp, Homo sapiens
  siRNA target sequence for STX17 (NM_017919.1,282-300).
gatccaatatccgagaaat

SEQ ID NO: 305776 - DNA, 19 bp, Homo sapiens
  siRNA target sequence for STX17 (NM_017919.1,285-303).
ccaatatccgagaaattga

SEQ ID NO: 305777 - DNA, 19 bp, Homo sapiens
  siRNA target sequence for STX17 (NM_017919.1,324-342).
gaaaggatgacctagtact

SEQ ID NO: 305778 - DNA, 19 bp, Homo sapiens
  siRNA target sequence for STX17 (NM_017919.1,351-369).
gaatgatagatcctgttaa

SEQ ID NO: 305779 - DNA, 19 bp, Homo sapiens
  siRNA target sequence for STX17 (NM_017919.1,490-508).
gactgttggtggagcattt

SEQ ID NO: 305780 - DNA, 19 bp, Homo sapiens
  siRNA target sequence for STX17 (NM_017919.1,497-515).
ggtggagcatttcatacta

SEQ ID NO: 305781 - DNA, 19 bp, Homo sapiens
  siRNA target sequence for STX17 (NM_017919.1,606-624).
ccttagaagcggacttaat

SEQ ID NO: 305782 - DNA, 19 bp, Homo sapiens
  siRNA target sequence for STX17 (NM_017919.1,607-625).
cttagaagcggacttaatt

SEQ ID NO: 305783 - DNA, 19 bp, Homo sapiens
  siRNA target sequence for STX17 (NM_017919.1,690-708).
gcattgcagaccatgtcaa

SEQ ID NO: 305784 - DNA, 19 bp, Homo sapiens
  siRNA target sequence for STX17 (NM_017919.1,896-914).
ggtggaaaattgatacaaa

SEQ ID NO: 305785 - DNA, 19 bp, Homo sapiens
  siRNA target sequence for STX6 (NM_005819.3,228-246).
cactgcccagggattgttt

SEQ ID NO: 305786 - DNA, 19 bp, Homo sapiens
  siRNA target sequence for STX6 (NM_005819.3,309-327).
caccaacgagctgagaaat

SEQ ID NO: 305787 - DNA, 19 bp, Homo sapiens
  siRNA target sequence for STX6 (NM_005819.3,352-370).
ctagaggaccttgatgaaa

SEQ ID NO: 305788 - DNA, 19 bp, Homo sapiens
  siRNA target sequence for STX6 (NM_005819.3,375-393).
cagcatagttgaagcaaat

SEQ ID NO: 305789 - DNA, 19 bp, Homo sapiens
  siRNA target sequence for STX6 (NM_005819.3,378-396).
catagttgaagcaaatcct

SEQ ID NO: 305790 - DNA, 19 bp, Homo sapiens
  siRNA target sequence for STX6 (NM_005819.3,415-433).
gcaactgaattgagtataa

SEQ ID NO: 305791 - DNA, 19 bp, Homo sapiens
  siRNA target sequence for STX6 (NM_005819.3,449-467).
caagtactcggcaagttgt

SEQ ID NO: 305792 - DNA, 19 bp, Homo sapiens
  siRNA target sequence for STX6 (NM_005819.3,481-499).
gatcagatgtcaacttcat

SEQ ID NO: 305793 - DNA, 19 bp, Homo sapiens
  siRNA target sequence for STX6 (NM_005819.3,504-522).
gcaggcattagctgaaaga

SEQ ID NO: 305794 - DNA, 19 bp, Homo sapiens
  siRNA target sequence for STX6 (NM_005819.3,570-588).
cactggaacaacagataaa

SEQ ID NO: 305795 - DNA, 19 bp, Homo sapiens
  siRNA target sequence for STX6 (NM_005819.3,609-627).
gctccagagagccaattct

SEQ ID NO: 305796 - DNA, 19 bp, Homo sapiens
  siRNA target sequence for STX6 (NM_005819.3,620-638).
ccaattctcatttcattga

SEQ ID NO: 305797 - DNA, 19 bp, Homo sapiens
  siRNA target sequence for STX6 (NM_005819.3,766-784).
gttatgttggaagatttct

SEQ ID NO: 305798 - DNA, 19 bp, Homo sapiens
  siRNA target sequence for STX6 (NM_005819.3,838-856).
gcaaaagtatctcatatga

SEQ ID NO: 305799 - DNA, 19 bp, Homo sapiens
  siRNA target sequence for STX8 (NM_004853.1,165-183).
ctggttctccacatacgat

SEQ ID NO: 305800 - DNA, 19 bp, Homo sapiens
  siRNA target sequence for STX8 (NM_004853.1,171-189).
ctccacatacgattctact

SEQ ID NO: 305801 - DNA, 19 bp, Homo sapiens
  siRNA target sequence for STX8 (NM_004853.1,174-192).
cacatacgattctacttgt

SEQ ID NO: 305802 - DNA, 19 bp, Homo sapiens
  siRNA target sequence for STX8 (NM_004853.1,180-198).
cgattctacttgtcaaatt

SEQ ID NO: 305803 - DNA, 19 bp, Homo sapiens
  siRNA target sequence for STX8 (NM_004853.1,253-271).
gaaaaggcaccaaagctta

SEQ ID NO: 305804 - DNA, 19 bp, Homo sapiens
  siRNA target sequence for STX8 (NM_004853.1,263-281).
caaagcttaccgtgacaat

SEQ ID NO: 305805 - DNA, 19 bp, Homo sapiens
  siRNA target sequence for STX8 (NM_004853.1,267-285).
gcttaccgtgacaatcaga

SEQ ID NO: 305806 - DNA, 19 bp, Homo sapiens
  siRNA target sequence for STX8 (NM_004853.1,307-325).
gaaaagatcgcccttttga

SEQ ID NO: 305807 - DNA, 19 bp, Homo sapiens
  siRNA target sequence for STX8 (NM_004853.1,317-335).
cccttttgaaggacttatt

SEQ ID NO: 305808 - DNA, 19 bp, Homo sapiens
  siRNA target sequence for STX8 (NM_004853.1,346-364).
gtgtcaacacatcagataa

SEQ ID NO: 305809 - DNA, 19 bp, Homo sapiens
  siRNA target sequence for STX8 (NM_004853.1,348-366).
gtcaacacatcagataaca

SEQ ID NO: 305810 - DNA, 19 bp, Homo sapiens
  siRNA target sequence for STX8 (NM_004853.1,390-408).
gaacctcttggatgatctt

SEQ ID NO: 305811 - DNA, 19 bp, Homo sapiens
  siRNA target sequence for STX8 (NM_004853.1,393-411).
cctcttggatgatcttgta

SEQ ID NO: 305812 - DNA, 19 bp, Homo sapiens
  siRNA target sequence for STX8 (NM_004853.1,413-431).
ctcgagagagactacttct

SEQ ID NO: 305813 - DNA, 19 bp, Homo sapiens
  siRNA target sequence for STX8 (NM_004853.1,450-468).
gggtgccgaaccagatcta

SEQ ID NO: 305814 - DNA, 19 bp, Homo sapiens
  siRNA target sequence for STX8 (NM_004853.1,451-469).
ggtgccgaaccagatctaa

SEQ ID NO: 305815 - DNA, 19 bp, Homo sapiens
  siRNA target sequence for STX8 (NM_004853.1,452-470).
gtgccgaaccagatctaat

SEQ ID NO: 305816 - DNA, 19 bp, Homo sapiens
  siRNA target sequence for STX8 (NM_004853.1,454-472).
gccgaaccagatctaatca

SEQ ID NO: 305817 - DNA, 19 bp, Homo sapiens
  siRNA target sequence for STX8 (NM_004853.1,512-530).
ccaacccttggctctttga

SEQ ID NO: 305818 - DNA, 19 bp, Homo sapiens
  siRNA target sequence for STX8 (NM_004853.1,619-637).
gccctttcctctatcataa

SEQ ID NO: 305819 - DNA, 19 bp, Homo sapiens
  siRNA target sequence for STX8 (NM_004853.1,733-751).
gaaaaacttcgcaatgaaa

SEQ ID NO: 305820 - DNA, 19 bp, Homo sapiens
  siRNA target sequence for STX8 (NM_004853.1,748-766).
gaaaccaggcgggtaaaca

SEQ ID NO: 305821 - DNA, 19 bp, Homo sapiens
  siRNA target sequence for STX8 (NM_004853.1,765-783).
catggtggacagaaagtca

SEQ ID NO: 305822 - DNA, 19 bp, Homo sapiens
  siRNA target sequence for STX8 (NM_004853.1,785-803).
cctcttgtgggatgatcat

SEQ ID NO: 305823 - DNA, 19 bp, Homo sapiens
  siRNA target sequence for TRAPPC3 (NM_014408.3,111-129).
gcaccgagagcaagaaaat

SEQ ID NO: 305824 - DNA, 19 bp, Homo sapiens
  siRNA target sequence for TRAPPC3 (NM_014408.3,221-239).
gacaaaatgggctttaaca

SEQ ID NO: 305825 - DNA, 19 bp, Homo sapiens
  siRNA target sequence for TRAPPC3 (NM_014408.3,248-266).
cggctgattgaagatttct

SEQ ID NO: 305826 - DNA, 19 bp, Homo sapiens
  siRNA target sequence for TRAPPC3 (NM_014408.3,303-321).
gggaaactgcggatgtcat

SEQ ID NO: 305827 - DNA, 19 bp, Homo sapiens
  siRNA target sequence for TRAPPC3 (NM_014408.3,323-341).
gccaaggtggcgttcaaga

SEQ ID NO: 305828 - DNA, 19 bp, Homo sapiens
  siRNA target sequence for TRAPPC3 (NM_014408.3,324-342).
ccaaggtggcgttcaagat

SEQ ID NO: 305829 - DNA, 19 bp, Homo sapiens
  siRNA target sequence for TRAPPC3 (NM_014408.3,329-347).
gtggcgttcaagatgtact

SEQ ID NO: 305830 - DNA, 19 bp, Homo sapiens
  siRNA target sequence for TRAPPC3 (NM_014408.3,359-377).
ccaagcattactaattgga

SEQ ID NO: 305831 - DNA, 19 bp, Homo sapiens
  siRNA target sequence for TRAPPC3 (NM_014408.3,452-470).
cactcatcccttatttatt

SEQ ID NO: 305832 - DNA, 19 bp, Homo sapiens
  siRNA target sequence for TRAPPC3 (NM_014408.3,572-590).
gaaatccggatgagattca

SEQ ID NO: 305833 - DNA, 19 bp, Homo sapiens
  siRNA target sequence for TRAPPC3 (NM_014408.3,594-612).
ggcggattgaggacaatct

SEQ ID NO: 305834 - DNA, 19 bp, Homo sapiens
  siRNA target sequence for TRAPPC3 (NM_014408.3,595-613).
gcggattgaggacaatctt

SEQ ID NO: 305835 - DNA, 19 bp, Homo sapiens
  siRNA target sequence for ASC (NM_013258.3,567-585).
gccaggcctgcactttata

SEQ ID NO: 305836 - DNA, 19 bp, Homo sapiens
  siRNA target sequence for ASC (NM_013258.3,609-627).
cgcgagggtcacaaacgtt

SEQ ID NO: 305837 - DNA, 19 bp, Homo sapiens
  siRNA target sequence for ASC (NM_145182.1,508-526).
caccagggcctgcacttta

SEQ ID NO: 305838 - DNA, 19 bp, Homo sapiens
  siRNA target sequence for DLEU1 (NM_005887.1,270-288).
gagaccttgtatatggata

SEQ ID NO: 305839 - DNA, 19 bp, Homo sapiens
  siRNA target sequence for DLEU1 (NM_005887.1,284-302).
ggatacacgtgcatttaaa

SEQ ID NO: 305840 - DNA, 19 bp, Homo sapiens
  siRNA target sequence for DLEU1 (NM_005887.1,305-323).
cgccctgccggcttgtaga

SEQ ID NO: 305841 - DNA, 19 bp, Homo sapiens
  siRNA target sequence for DLEU1 (NM_005887.1,311-329).
gccggcttgtagagctttt

SEQ ID NO: 305842 - DNA, 19 bp, Homo sapiens
  siRNA target sequence for DLEU1 (NM_005887.1,332-350).
cgttctccagcgctttaca

SEQ ID NO: 305843 - DNA, 19 bp, Homo sapiens
  siRNA target sequence for DLEU1 (NM_005887.1,349-367).
caggggttatcgcacttaa

SEQ ID NO: 305844 - DNA, 19 bp, Homo sapiens
  siRNA target sequence for DLEU1 (NM_005887.1,363-381).
cttaagcctcggaacaact

SEQ ID NO: 305845 - DNA, 19 bp, Homo sapiens
  siRNA target sequence for DLEU1 (NM_005887.1,369-387).
cctcggaacaactttacca

SEQ ID NO: 305846 - DNA, 19 bp, Homo sapiens
  siRNA target sequence for DLEU1 (NM_005887.1,390-408).
gattctaccagaaaggaat

SEQ ID NO: 305847 - DNA, 19 bp, Homo sapiens
  siRNA target sequence for DLEU2 (NM_006021.1,458-476).
cattgaatactatcaaaaa

SEQ ID NO: 305848 - DNA, 19 bp, Homo sapiens
  siRNA target sequence for PDAP2 (NM_007275.1,382-400).
ctgaggcgagtgcataaga

SEQ ID NO: 305849 - DNA, 19 bp, Homo sapiens
  siRNA target sequence for PDAP2 (NM_007275.1,384-402).
gaggcgagtgcataagaat

SEQ ID NO: 305850 - DNA, 19 bp, Homo sapiens
  siRNA target sequence for PDAP2 (NM_007275.1,386-404).
ggcgagtgcataagaatct

SEQ ID NO: 305851 - DNA, 19 bp, Homo sapiens
  siRNA target sequence for PDAP2 (NM_007275.1,389-407).
gagtgcataagaatctgat

SEQ ID NO: 305852 - DNA, 19 bp, Homo sapiens
  siRNA target sequence for SASH1 (NM_015278.2,663-681).
cgcagcagtatgcagatta

SEQ ID NO: 305853 - DNA, 19 bp, Homo sapiens
  siRNA target sequence for SASH1 (NM_015278.2,664-682).
gcagcagtatgcagattat

SEQ ID NO: 305854 - DNA, 19 bp, Homo sapiens
  siRNA target sequence for SASH1 (NM_015278.2,668-686).
cagtatgcagattattaca

SEQ ID NO: 305855 - DNA, 19 bp, Homo sapiens
  siRNA target sequence for SASH1 (NM_015278.2,812-830).
gagtcgcttggcttctgta

SEQ ID NO: 305856 - DNA, 19 bp, Homo sapiens
  siRNA target sequence for SASH1 (NM_015278.2,1007-1025).
gttgccagtgaaataacga

SEQ ID NO: 305857 - DNA, 19 bp, Homo sapiens
  siRNA target sequence for SASH1 (NM_015278.2,1037-1055).
gagcggattcagctaatga

SEQ ID NO: 305858 - DNA, 19 bp, Homo sapiens
  siRNA target sequence for SASH1 (NM_015278.2,1040-1058).
cggattcagctaatgatga

SEQ ID NO: 305859 - DNA, 19 bp, Homo sapiens
  siRNA target sequence for SASH1 (NM_015278.2,1179-1197).
cgtttgatggctcatcaaa

SEQ ID NO: 305860 - DNA, 19 bp, Homo sapiens
  siRNA target sequence for SASH1 (NM_015278.2,1187-1205).
ggctcatcaaactgcaatt

SEQ ID NO: 305861 - DNA, 19 bp, Homo sapiens
  siRNA target sequence for SASH1 (NM_015278.2,1254-1272).
ggttacacaagctggtaaa

SEQ ID NO: 305862 - DNA, 19 bp, Homo sapiens
  siRNA target sequence for SASH1 (NM_015278.2,1275-1293).
ccactcgcagagtcagaaa

SEQ ID NO: 305863 - DNA, 19 bp, Homo sapiens
  siRNA target sequence for SASH1 (NM_015278.2,1341-1359).
gggaggagcacgtgtttga

SEQ ID NO: 305864 - DNA, 19 bp, Homo sapiens
  siRNA target sequence for SASH1 (NM_015278.2,1681-1699).
cgggagaacctgcagtttt

SEQ ID NO: 305865 - DNA, 19 bp, Homo sapiens
  siRNA target sequence for SASH1 (NM_015278.2,1692-1710).
gcagttttggaggatttga

SEQ ID NO: 305866 - DNA, 19 bp, Homo sapiens
  siRNA target sequence for SASH1 (NM_015278.2,1727-1745).
ctgcacgttggcagtaata

SEQ ID NO: 305867 - DNA, 19 bp, Homo sapiens
  siRNA target sequence for SASH1 (NM_015278.2,1729-1747).
gcacgttggcagtaataat

SEQ ID NO: 305868 - DNA, 19 bp, Homo sapiens
  siRNA target sequence for SASH1 (NM_015278.2,1732-1750).
cgttggcagtaataattct

SEQ ID NO: 305869 - DNA, 19 bp, Homo sapiens
  siRNA target sequence for SASH1 (NM_015278.2,1761-1779).
gtaaagaaggagactttgt

SEQ ID NO: 305870 - DNA, 19 bp, Homo sapiens
  siRNA target sequence for SASH1 (NM_015278.2,1989-2007).
ggggttctgtagaaagtct

SEQ ID NO: 305871 - DNA, 19 bp, Homo sapiens
  siRNA target sequence for SASH1 (NM_015278.2,2032-2050).
ctccatgagcggtcaaaca

SEQ ID NO: 305872 - DNA, 19 bp, Homo sapiens
  siRNA target sequence for SASH1 (NM_015278.2,2194-2212).
ctcactcaagctcaagaaa

SEQ ID NO: 305873 - DNA, 19 bp, Homo sapiens
  siRNA target sequence for SASH1 (NM_015278.2,2213-2231).
ggagatatcatcgatataa

SEQ ID NO: 305874 - DNA, 19 bp, Homo sapiens
  siRNA target sequence for SASH1 (NM_015278.2,2214-2232).
gagatatcatcgatataat

SEQ ID NO: 305875 - DNA, 19 bp, Homo sapiens
  siRNA target sequence for SASH1 (NM_015278.2,2216-2234).
gatatcatcgatataatca

SEQ ID NO: 305876 - DNA, 19 bp, Homo sapiens
  siRNA target sequence for SASH1 (NM_015278.2,2279-2297).
gtcggcacgttcaagttca

SEQ ID NO: 305877 - DNA, 19 bp, Homo sapiens
  siRNA target sequence for SASH1 (NM_015278.2,2398-2416).
cctggatcggattaaccta

SEQ ID NO: 305878 - DNA, 19 bp, Homo sapiens
  siRNA target sequence for SASH1 (NM_015278.2,2399-2417).
ctggatcggattaacctaa

SEQ ID NO: 305879 - DNA, 19 bp, Homo sapiens
  siRNA target sequence for SASH1 (NM_015278.2,2401-2419).
ggatcggattaacctaaaa

SEQ ID NO: 305880 - DNA, 19 bp, Homo sapiens
  siRNA target sequence for SASH1 (NM_015278.2,2428-2446).
gcccactttcctgttcaat

SEQ ID NO: 305881 - DNA, 19 bp, Homo sapiens
  siRNA target sequence for SASH1 (NM_015278.2,2440-2458).
gttcaatggatatgaagat

SEQ ID NO: 305882 - DNA, 19 bp, Homo sapiens
  siRNA target sequence for SASH1 (NM_015278.2,2552-2570).
ctgttacaagagtatgaca

SEQ ID NO: 305883 - DNA, 19 bp, Homo sapiens
  siRNA target sequence for SASH1 (NM_015278.2,2645-2663).
gactcaggatgctacgaaa

SEQ ID NO: 305884 - DNA, 19 bp, Homo sapiens
  siRNA target sequence for SASH1 (NM_015278.2,2684-2702).
ggcaagactcggaaagcta

SEQ ID NO: 305885 - DNA, 19 bp, Homo sapiens
  siRNA target sequence for SASH1 (NM_015278.2,2729-2747).
gagcccagcttgaagtctt

SEQ ID NO: 305886 - DNA, 19 bp, Homo sapiens
  siRNA target sequence for SASH1 (NM_015278.2,2754-2772).
gaaaccagttgggcaatta

SEQ ID NO: 305887 - DNA, 19 bp, Homo sapiens
  siRNA target sequence for SASH1 (NM_015278.2,2774-2792).
ccaacattgcctttaatga

SEQ ID NO: 305888 - DNA, 19 bp, Homo sapiens
  siRNA target sequence for SASH1 (NM_015278.2,2775-2793).
caacattgcctttaatgaa

SEQ ID NO: 305889 - DNA, 19 bp, Homo sapiens
  siRNA target sequence for SASH1 (NM_015278.2,2883-2901).
gtgtgactggtttgaataa

SEQ ID NO: 305890 - DNA, 19 bp, Homo sapiens
  siRNA target sequence for SASH1 (NM_015278.2,3132-3150).
ctgctgtcgacaatgcatt

SEQ ID NO: 305891 - DNA, 19 bp, Homo sapiens
  siRNA target sequence for SASH1 (NM_015278.2,3799-3817).
cacggaggagccgtattct

SEQ ID NO: 305892 - DNA, 19 bp, Homo sapiens
  siRNA target sequence for SASH1 (NM_015278.2,3808-3826).
gccgtattctgataagcat

SEQ ID NO: 305893 - DNA, 19 bp, Homo sapiens
  siRNA target sequence for SASH1 (NM_015278.2,3944-3962).
caccgcatggcgattccaa

SEQ ID NO: 305894 - DNA, 19 bp, Homo sapiens
  siRNA target sequence for TSC1 (NM_000368.2,290-308).
cgacgtgacagctgtcttt

SEQ ID NO: 305895 - DNA, 19 bp, Homo sapiens
  siRNA target sequence for TSC1 (NM_000368.2,291-309).
gacgtgacagctgtcttta

SEQ ID NO: 305896 - DNA, 19 bp, Homo sapiens
  siRNA target sequence for TSC1 (NM_000368.2,331-349).
gtggccctatgcttgtaaa

SEQ ID NO: 305897 - DNA, 19 bp, Homo sapiens
  siRNA target sequence for TSC1 (NM_000368.2,333-351).
ggccctatgcttgtaaaca

SEQ ID NO: 305898 - DNA, 19 bp, Homo sapiens
  siRNA target sequence for TSC1 (NM_000368.2,352-370).
ccttggtggattattacct

SEQ ID NO: 305899 - DNA, 19 bp, Homo sapiens
  siRNA target sequence for TSC1 (NM_000368.2,432-450).
cacctcttggacaggatta

SEQ ID NO: 305900 - DNA, 19 bp, Homo sapiens
  siRNA target sequence for TSC1 (NM_000368.2,437-455).
cttggacaggattaacgaa

SEQ ID NO: 305901 - DNA, 19 bp, Homo sapiens
  siRNA target sequence for TSC1 (NM_000368.2,440-458).
ggacaggattaacgaatat

SEQ ID NO: 305902 - DNA, 19 bp, Homo sapiens
  siRNA target sequence for TSC1 (NM_000368.2,464-482).
caaagccgccactcgttta

SEQ ID NO: 305903 - DNA, 19 bp, Homo sapiens
  siRNA target sequence for TSC1 (NM_000368.2,468-486).
gccgccactcgtttatcca

SEQ ID NO: 305904 - DNA, 19 bp, Homo sapiens
  siRNA target sequence for TSC1 (NM_000368.2,469-487).
ccgccactcgtttatccat

SEQ ID NO: 305905 - DNA, 19 bp, Homo sapiens
  siRNA target sequence for TSC1 (NM_000368.2,493-511).
cgttactgggtcatgtcat

SEQ ID NO: 305906 - DNA, 19 bp, Homo sapiens
  siRNA target sequence for TSC1 (NM_000368.2,618-636).
gtcttggtgttgataacca

SEQ ID NO: 305907 - DNA, 19 bp, Homo sapiens
  siRNA target sequence for TSC1 (NM_000368.2,731-749).
ccacgtggcggaagtctat

SEQ ID NO: 305908 - DNA, 19 bp, Homo sapiens
  siRNA target sequence for TSC1 (NM_000368.2,769-787).
gtgtgtacgcactctttca

SEQ ID NO: 305909 - DNA, 19 bp, Homo sapiens
  siRNA target sequence for TSC1 (NM_000368.2,782-800).
ctttcatcgcctttatgga

SEQ ID NO: 305910 - DNA, 19 bp, Homo sapiens
  siRNA target sequence for TSC1 (NM_000368.2,821-839).
ctcctttttgcgttctcat

SEQ ID NO: 305911 - DNA, 19 bp, Homo sapiens
  siRNA target sequence for TSC1 (NM_000368.2,823-841).
cctttttgcgttctcatta

SEQ ID NO: 305912 - DNA, 19 bp, Homo sapiens
  siRNA target sequence for TSC1 (NM_000368.2,902-920).
gcgaattcatccggaatta

SEQ ID NO: 305913 - DNA, 19 bp, Homo sapiens
  siRNA target sequence for TSC1 (NM_000368.2,904-922).
gaattcatccggaattagt

SEQ ID NO: 305914 - DNA, 19 bp, Homo sapiens
  siRNA target sequence for TSC1 (NM_000368.2,1113-1131).
gctgacacacagaatagct

SEQ ID NO: 305915 - DNA, 19 bp, Homo sapiens
  siRNA target sequence for TSC1 (NM_000368.2,1114-1132).
ctgacacacagaatagcta

SEQ ID NO: 305916 - DNA, 19 bp, Homo sapiens
  siRNA target sequence for TSC1 (NM_000368.2,1130-1148).
ctatgggtgtgctacttct

SEQ ID NO: 305917 - DNA, 19 bp, Homo sapiens
  siRNA target sequence for TSC1 (NM_000368.2,1159-1177).
ccacgtctcggctgatgtt

SEQ ID NO: 305918 - DNA, 19 bp, Homo sapiens
  siRNA target sequence for TSC1 (NM_000368.2,1162-1180).
cgtctcggctgatgttgtt

SEQ ID NO: 305919 - DNA, 19 bp, Homo sapiens
  siRNA target sequence for TSC1 (NM_000368.2,1163-1181).
gtctcggctgatgttgtta

SEQ ID NO: 305920 - DNA, 19 bp, Homo sapiens
  siRNA target sequence for TSC1 (NM_000368.2,1165-1183).
ctcggctgatgttgttaaa

SEQ ID NO: 305921 - DNA, 19 bp, Homo sapiens
  siRNA target sequence for TSC1 (NM_000368.2,1218-1236).
ccatcgacacggctgataa

SEQ ID NO: 305922 - DNA, 19 bp, Homo sapiens
  siRNA target sequence for TSC1 (NM_000368.2,1222-1240).
cgacacggctgataactga

SEQ ID NO: 305923 - DNA, 19 bp, Homo sapiens
  siRNA target sequence for TSC1 (NM_000368.2,1223-1241).
gacacggctgataactgaa

SEQ ID NO: 305924 - DNA, 19 bp, Homo sapiens
  siRNA target sequence for TSC1 (NM_000368.2,1330-1348).
cacacccttacagtaaagt

SEQ ID NO: 305925 - DNA, 19 bp, Homo sapiens
  siRNA target sequence for TSC1 (NM_000368.2,1410-1428).
ccagccccactctgtcatt

SEQ ID NO: 305926 - DNA, 19 bp, Homo sapiens
  siRNA target sequence for TSC1 (NM_000368.2,1431-1449).
gatgactacgtgcacattt

SEQ ID NO: 305927 - DNA, 19 bp, Homo sapiens
  siRNA target sequence for TSC1 (NM_000368.2,1576-1594).
gttctgtcactctaagtga

SEQ ID NO: 305928 - DNA, 19 bp, Homo sapiens
  siRNA target sequence for TSC1 (NM_000368.2,1662-1680).
gcaatatctagagaacttt

SEQ ID NO: 305929 - DNA, 19 bp, Homo sapiens
  siRNA target sequence for TSC1 (NM_000368.2,1726-1744).
gctttgactctccctttta

SEQ ID NO: 305930 - DNA, 19 bp, Homo sapiens
  siRNA target sequence for TSC1 (NM_000368.2,1966-1984).
ctcccagtccttgtaaaat

SEQ ID NO: 305931 - DNA, 19 bp, Homo sapiens
  siRNA target sequence for TSC1 (NM_000368.2,2018-2036).
gcagcctcccccgtatgat

SEQ ID NO: 305932 - DNA, 19 bp, Homo sapiens
  siRNA target sequence for TSC1 (NM_000368.2,2021-2039).
gcctcccccgtatgatcat

SEQ ID NO: 305933 - DNA, 19 bp, Homo sapiens
  siRNA target sequence for TSC1 (NM_000368.2,2023-2041).
ctcccccgtatgatcatct

SEQ ID NO: 305934 - DNA, 19 bp, Homo sapiens
  siRNA target sequence for TSC1 (NM_000368.2,2025-2043).
cccccgtatgatcatcttt

SEQ ID NO: 305935 - DNA, 19 bp, Homo sapiens
  siRNA target sequence for TSC1 (NM_000368.2,2026-2044).
ccccgtatgatcatctttt

SEQ ID NO: 305936 - DNA, 19 bp, Homo sapiens
  siRNA target sequence for TSC1 (NM_000368.2,2058-2076).
ccaaagacagcccatcatt

SEQ ID NO: 305937 - DNA, 19 bp, Homo sapiens
  siRNA target sequence for TSC1 (NM_000368.2,2059-2077).
caaagacagcccatcattt

SEQ ID NO: 305938 - DNA, 19 bp, Homo sapiens
  siRNA target sequence for TSC1 (NM_000368.2,2097-2115).
gagctgttaaagaaagcaa

SEQ ID NO: 305939 - DNA, 19 bp, Homo sapiens
  siRNA target sequence for TSC1 (NM_000368.2,2294-2312).
ccgagaccagttgctttta

SEQ ID NO: 305940 - DNA, 19 bp, Homo sapiens
  siRNA target sequence for TSC1 (NM_000368.2,2315-2333).
gcacaaccagttactctat

SEQ ID NO: 305941 - DNA, 19 bp, Homo sapiens
  siRNA target sequence for TSC1 (NM_000368.2,2429-2447).
gaaagatcagttgaagtta

SEQ ID NO: 305942 - DNA, 19 bp, Homo sapiens
  siRNA target sequence for TSC1 (NM_000368.2,2519-2537).
gcagcgtgacactatggta

SEQ ID NO: 305943 - DNA, 19 bp, Homo sapiens
  siRNA target sequence for TSC1 (NM_000368.2,2520-2538).
cagcgtgacactatggtaa

SEQ ID NO: 305944 - DNA, 19 bp, Homo sapiens
  siRNA target sequence for TSC1 (NM_000368.2,2571-2589).
catgaccgagaggaattct

SEQ ID NO: 305945 - DNA, 19 bp, Homo sapiens
  siRNA target sequence for TSC1 (NM_000368.2,2795-2813).
caacgagctctatttggaa

SEQ ID NO: 305946 - DNA, 19 bp, Homo sapiens
  siRNA target sequence for TSC1 (NM_000368.2,2913-2931).
cagactcagaggcttgata

SEQ ID NO: 305947 - DNA, 19 bp, Homo sapiens
  siRNA target sequence for TSC1 (NM_000368.2,2932-2950).
cctcccaaaaacggatttt

SEQ ID NO: 305948 - DNA, 19 bp, Homo sapiens
  siRNA target sequence for TSC1 (NM_000368.2,2935-2953).
cccaaaaacggattttgga

SEQ ID NO: 305949 - DNA, 19 bp, Homo sapiens
  siRNA target sequence for TSC1 (NM_000368.2,2936-2954).
ccaaaaacggattttggaa

SEQ ID NO: 305950 - DNA, 19 bp, Homo sapiens
  siRNA target sequence for TSC1 (NM_000368.2,3079-3097).
ggataacccaggtgtttga

SEQ ID NO: 305951 - DNA, 19 bp, Homo sapiens
  siRNA target sequence for TSC1 (NM_000368.2,3096-3114).
gaattggagatcttagatt

SEQ ID NO: 305952 - DNA, 19 bp, Homo sapiens
  siRNA target sequence for TSC1 (NM_000368.2,3196-3214).
ggcttgactgttgtaatga

SEQ ID NO: 305953 - DNA, 19 bp, Homo sapiens
  siRNA target sequence for TSC1 (NM_000368.2,3494-3512).
ggctcgagagttatttcgt

SEQ ID NO: 305954 - DNA, 19 bp, Homo sapiens
  siRNA target sequence for TSC1 (NM_000368.2,3495-3513).
gctcgagagttatttcgta

SEQ ID NO: 305955 - DNA, 19 bp, Homo sapiens
  siRNA target sequence for TSC1 (NM_000368.2,3496-3514).
ctcgagagttatttcgtaa

SEQ ID NO: 305956 - DNA, 19 bp, Homo sapiens
  siRNA target sequence for TSC1 (NM_000368.2,3498-3516).
cgagagttatttcgtaata

SEQ ID NO: 305957 - DNA, 19 bp, Homo sapiens
  siRNA target sequence for TSC1 (NM_000368.2,3501-3519).
gagttatttcgtaataaga

SEQ ID NO: 305958 - DNA, 19 bp, Homo sapiens
  siRNA target sequence for TSC1 (NM_000368.2,3661-3679).
gtgttggacagctacatat

SEQ ID NO: 305959 - DNA, 19 bp, Homo sapiens
  siRNA target sequence for TSC1 (NM_000368.2,3663-3681).
gttggacagctacatatca

SEQ ID NO: 305960 - DNA, 19 bp, Homo sapiens
  siRNA target sequence for BTG4 (NM_017589.2,287-305).
gatgacgatcttgtttgaa

SEQ ID NO: 305961 - DNA, 19 bp, Homo sapiens
  siRNA target sequence for BTG4 (NM_017589.2,290-308).
gacgatcttgtttgaaaca

SEQ ID NO: 305962 - DNA, 19 bp, Homo sapiens
  siRNA target sequence for BTG4 (NM_017589.2,358-376).
ggtgcatcaggataaacaa

SEQ ID NO: 305963 - DNA, 19 bp, Homo sapiens
  siRNA target sequence for BTG4 (NM_017589.2,362-380).
catcaggataaacaacaat

SEQ ID NO: 305964 - DNA, 19 bp, Homo sapiens
  siRNA target sequence for BTG4 (NM_017589.2,367-385).
ggataaacaacaatcagaa

SEQ ID NO: 305965 - DNA, 19 bp, Homo sapiens
  siRNA target sequence for BTG4 (NM_017589.2,368-386).
gataaacaacaatcagaat

SEQ ID NO: 305966 - DNA, 19 bp, Homo sapiens
  siRNA target sequence for BTG4 (NM_017589.2,406-424).
gggcatgtgtggaaagtaa

SEQ ID NO: 305967 - DNA, 19 bp, Homo sapiens
  siRNA target sequence for BTG4 (NM_017589.2,412-430).
gtgtggaaagtaatgtaga

SEQ ID NO: 305968 - DNA, 19 bp, Homo sapiens
  siRNA target sequence for BTG4 (NM_017589.2,414-432).
gtggaaagtaatgtagatt

SEQ ID NO: 305969 - DNA, 19 bp, Homo sapiens
  siRNA target sequence for BTG4 (NM_017589.2,450-468).
ccgaaggagatgaccatat

SEQ ID NO: 305970 - DNA, 19 bp, Homo sapiens
  siRNA target sequence for BTG4 (NM_017589.2,469-487).
gggtagatccctttgaagt

SEQ ID NO: 305971 - DNA, 19 bp, Homo sapiens
  siRNA target sequence for BTG4 (NM_017589.2,470-488).
ggtagatccctttgaagta

SEQ ID NO: 305972 - DNA, 19 bp, Homo sapiens
  siRNA target sequence for BTG4 (NM_017589.2,471-489).
gtagatccctttgaagtat

SEQ ID NO: 305973 - DNA, 19 bp, Homo sapiens
  siRNA target sequence for BTG4 (NM_017589.2,558-576).
gaactatatcaacaaatca

SEQ ID NO: 305974 - DNA, 19 bp, Homo sapiens
  siRNA target sequence for BTG4 (NM_017589.2,575-593).
cagttatgccgttagtaga

SEQ ID NO: 305975 - DNA, 19 bp, Homo sapiens
  siRNA target sequence for BTG4 (NM_017589.2,644-662).
caaggaacctcgtgtcatt

SEQ ID NO: 305976 - DNA, 19 bp, Homo sapiens
  siRNA target sequence for BTG4 (NM_017589.2,652-670).
ctcgtgtcattcctaaagt

SEQ ID NO: 305977 - DNA, 19 bp, Homo sapiens
  siRNA target sequence for BTG4 (NM_017589.2,654-672).
cgtgtcattcctaaagtca

SEQ ID NO: 305978 - DNA, 19 bp, Homo sapiens
  siRNA target sequence for BTG4 (NM_017589.2,669-687).
gtcagcaatccgaagagta

SEQ ID NO: 305979 - DNA, 19 bp, Homo sapiens
  siRNA target sequence for BTG4 (NM_017589.2,671-689).
cagcaatccgaagagtatt

SEQ ID NO: 305980 - DNA, 19 bp, Homo sapiens
  siRNA target sequence for BTG4 (NM_017589.2,713-731).
gccctttcaatcttggtta

SEQ ID NO: 305981 - DNA, 19 bp, Homo sapiens
  siRNA target sequence for BTG4 (NM_017589.2,772-790).
gcctcctgggaaacactta

SEQ ID NO: 305982 - DNA, 19 bp, Homo sapiens
  siRNA target sequence for BTG4 (NM_017589.2,796-814).
gctcgcagaagcatcctaa

SEQ ID NO: 305983 - DNA, 19 bp, Homo sapiens
  siRNA target sequence for BTG4 (NM_017589.2,800-818).
gcagaagcatcctaagtgt

SEQ ID NO: 305984 - DNA, 19 bp, Homo sapiens
  siRNA target sequence for C10orf7 (NM_006023.1,335-353).
cgaggcgttaccatcaaga

SEQ ID NO: 305985 - DNA, 19 bp, Homo sapiens
  siRNA target sequence for C10orf7 (NM_006023.1,372-390).
ctcagaatgtgaaggatta

SEQ ID NO: 305986 - DNA, 19 bp, Homo sapiens
  siRNA target sequence for C10orf7 (NM_006023.1,428-446).
gatgatccaccaacacatt

SEQ ID NO: 305987 - DNA, 19 bp, Homo sapiens
  siRNA target sequence for C10orf7 (NM_006023.1,510-528).
cgcttacggcaccagaatt

SEQ ID NO: 305988 - DNA, 19 bp, Homo sapiens
  siRNA target sequence for C10orf7 (NM_006023.1,511-529).
gcttacggcaccagaattt

SEQ ID NO: 305989 - DNA, 19 bp, Homo sapiens
  siRNA target sequence for C10orf7 (NM_006023.1,531-549).
ctgagtttgccactaaagt

SEQ ID NO: 305990 - DNA, 19 bp, Homo sapiens
  siRNA target sequence for C10orf7 (NM_006023.1,608-626).
ccaagggatgcgtattgga

SEQ ID NO: 305991 - DNA, 19 bp, Homo sapiens
  siRNA target sequence for C10orf7 (NM_006023.1,609-627).
caagggatgcgtattggat

SEQ ID NO: 305992 - DNA, 19 bp, Homo sapiens
  siRNA target sequence for C10orf7 (NM_006023.1,614-632).
gatgcgtattggatagcaa

SEQ ID NO: 305993 - DNA, 19 bp, Homo sapiens
  siRNA target sequence for C10orf7 (NM_006023.1,618-636).
cgtattggatagcaatgaa

SEQ ID NO: 305994 - DNA, 19 bp, Homo sapiens
  siRNA target sequence for C10orf7 (NM_006023.1,619-637).
gtattggatagcaatgaat

SEQ ID NO: 305995 - DNA, 19 bp, Homo sapiens
  siRNA target sequence for C10orf7 (NM_006023.1,709-727).
cttcactcagccgtttatt

SEQ ID NO: 305996 - DNA, 19 bp, Homo sapiens
  siRNA target sequence for C10orf7 (NM_006023.1,712-730).
cactcagccgtttattcat

SEQ ID NO: 305997 - DNA, 19 bp, Homo sapiens
  siRNA target sequence for C10orf7 (NM_006023.1,718-736).
gccgtttattcattgtact

SEQ ID NO: 305998 - DNA, 19 bp, Homo sapiens
  siRNA target sequence for C10orf7 (NM_006023.1,747-765).
cagatccatgtatagaata

SEQ ID NO: 305999 - DNA, 19 bp, Homo sapiens
  siRNA target sequence for C10orf7 (NM_006023.1,767-785).
gagctcgttctccgaaaat

SEQ ID NO: 306000 - DNA, 19 bp, Homo sapiens
  siRNA target sequence for C10orf7 (NM_006023.1,770-788).
ctcgttctccgaaaatggt

SEQ ID NO: 306001 - DNA, 19 bp, Homo sapiens
  siRNA target sequence for C10orf7 (NM_006023.1,776-794).
ctccgaaaatggtgtgaat

SEQ ID NO: 306002 - DNA, 19 bp, Homo sapiens
  siRNA target sequence for C10orf7 (NM_006023.1,804-822).
gggctgagtttcgatgttt

SEQ ID NO: 306003 - DNA, 19 bp, Homo sapiens
  siRNA target sequence for C10orf7 (NM_006023.1,938-956).
cacatacagtacaaattct

SEQ ID NO: 306004 - DNA, 19 bp, Homo sapiens
  siRNA target sequence for C10orf7 (NM_006023.1,946-964).
gtacaaattcttagatgaa

SEQ ID NO: 306005 - DNA, 19 bp, Homo sapiens
  siRNA target sequence for C10orf7 (NM_006023.1,962-980).
gaagactttgtgttcgata

SEQ ID NO: 306006 - DNA, 19 bp, Homo sapiens
  siRNA target sequence for C10orf7 (NM_006023.1,1004-1022).
gtgtggctcattgacttta

SEQ ID NO: 306007 - DNA, 19 bp, Homo sapiens
  siRNA target sequence for C10orf7 (NM_006023.1,1006-1024).
gtggctcattgactttaat

SEQ ID NO: 306008 - DNA, 19 bp, Homo sapiens
  siRNA target sequence for C10orf7 (NM_006023.1,1009-1027).
gctcattgactttaatcca

SEQ ID NO: 306009 - DNA, 19 bp, Homo sapiens
  siRNA target sequence for C10orf7 (NM_006023.1,1060-1078).
ctgggaagaactgatatct

SEQ ID NO: 306010 - DNA, 19 bp, Homo sapiens
  siRNA target sequence for C10orf7 (NM_006023.1,1062-1080).
gggaagaactgatatctga

SEQ ID NO: 306011 - DNA, 19 bp, Homo sapiens
  siRNA target sequence for C10orf7 (NM_006023.1,1072-1090).
gatatctgagaacaactta

SEQ ID NO: 306012 - DNA, 19 bp, Homo sapiens
  siRNA target sequence for C10orf7 (NM_006023.1,1084-1102).
caacttaaacggcgatttt

SEQ ID NO: 306013 - DNA, 19 bp, Homo sapiens
  siRNA target sequence for C10orf7 (NM_006023.1,1087-1105).
cttaaacggcgattttagt

SEQ ID NO: 306014 - DNA, 19 bp, Homo sapiens
  siRNA target sequence for C10orf7 (NM_006023.1,1093-1111).
cggcgattttagtgaagtt

SEQ ID NO: 306015 - DNA, 19 bp, Homo sapiens
  siRNA target sequence for C10orf7 (NM_006023.1,1095-1113).
gcgattttagtgaagttga

SEQ ID NO: 306016 - DNA, 19 bp, Homo sapiens
  siRNA target sequence for C10orf7 (NM_006023.1,1169-1187).
cagcccagcccctatttga

SEQ ID NO: 306017 - DNA, 19 bp, Homo sapiens
  siRNA target sequence for C10orf7 (NM_006023.1,1231-1249).
ggacgctcacaagctaata

SEQ ID NO: 306018 - DNA, 19 bp, Homo sapiens
  siRNA target sequence for C10orf7 (NM_006023.1,1235-1253).
gctcacaagctaatagact

SEQ ID NO: 306019 - DNA, 19 bp, Homo sapiens
  siRNA target sequence for C10orf7 (NM_006023.1,1236-1254).
ctcacaagctaatagactt

SEQ ID NO: 306020 - DNA, 19 bp, Homo sapiens
  siRNA target sequence for CUL2 (NM_003591.2,227-245).
gagtagtagattttgatga

SEQ ID NO: 306021 - DNA, 19 bp, Homo sapiens
  siRNA target sequence for CUL2 (NM_003591.2,277-295).
gccgtggtcatgttggaat

SEQ ID NO: 306022 - DNA, 19 bp, Homo sapiens
  siRNA target sequence for CUL2 (NM_003591.2,278-296).
ccgtggtcatgttggaata

SEQ ID NO: 306023 - DNA, 19 bp, Homo sapiens
  siRNA target sequence for CUL2 (NM_003591.2,300-318).
cgaaagagcaacatggaat

SEQ ID NO: 306024 - DNA, 19 bp, Homo sapiens
  siRNA target sequence for CUL2 (NM_003591.2,327-345).
ctcagatatctatgcttta

SEQ ID NO: 306025 - DNA, 19 bp, Homo sapiens
  siRNA target sequence for CUL2 (NM_003591.2,379-397).
ctttatacagaaactaaga

SEQ ID NO: 306026 - DNA, 19 bp, Homo sapiens
  siRNA target sequence for CUL2 (NM_003591.2,412-430).
catgttcggcatttgcata

SEQ ID NO: 306027 - DNA, 19 bp, Homo sapiens
  siRNA target sequence for CUL2 (NM_003591.2,415-433).
gttcggcatttgcataaga

SEQ ID NO: 306028 - DNA, 19 bp, Homo sapiens
  siRNA target sequence for CUL2 (NM_003591.2,513-531).
ggactgcttatataggtat

SEQ ID NO: 306029 - DNA, 19 bp, Homo sapiens
  siRNA target sequence for CUL2 (NM_003591.2,532-550).
ctcaacacccagtttatta

SEQ ID NO: 306030 - DNA, 19 bp, Homo sapiens
  siRNA target sequence for CUL2 (NM_003591.2,586-604).
ggctatggtggtgtagata

SEQ ID NO: 306031 - DNA, 19 bp, Homo sapiens
  siRNA target sequence for CUL2 (NM_003591.2,587-605).
gctatggtggtgtagatat

SEQ ID NO: 306032 - DNA, 19 bp, Homo sapiens
  siRNA target sequence for CUL2 (NM_003591.2,628-646).
ggagagctagcattggata

SEQ ID NO: 306033 - DNA, 19 bp, Homo sapiens
  siRNA target sequence for CUL2 (NM_003591.2,629-647).
gagagctagcattggatat

SEQ ID NO: 306034 - DNA, 19 bp, Homo sapiens
  siRNA target sequence for CUL2 (NM_003591.2,670-688).
ccacttcaggccatcctta

SEQ ID NO: 306035 - DNA, 19 bp, Homo sapiens
  siRNA target sequence for CUL2 (NM_003591.2,671-689).
cacttcaggccatccttat

SEQ ID NO: 306036 - DNA, 19 bp, Homo sapiens
  siRNA target sequence for CUL2 (NM_003591.2,696-714).
gctgctccgagaaatcaaa

SEQ ID NO: 306037 - DNA, 19 bp, Homo sapiens
  siRNA target sequence for CUL2 (NM_003591.2,699-717).
gctccgagaaatcaaaaat

SEQ ID NO: 306038 - DNA, 19 bp, Homo sapiens
  siRNA target sequence for CUL2 (NM_003591.2,759-777).
ggttattaactcctttgtt

SEQ ID NO: 306039 - DNA, 19 bp, Homo sapiens
  siRNA target sequence for CUL2 (NM_003591.2,949-967).
gaaattcgatgtcgaaaat

SEQ ID NO: 306040 - DNA, 19 bp, Homo sapiens
  siRNA target sequence for CUL2 (NM_003591.2,969-987).
cctacatccaagttcatat

SEQ ID NO: 306041 - DNA, 19 bp, Homo sapiens
  siRNA target sequence for CUL2 (NM_003591.2,970-988).
ctacatccaagttcatata

SEQ ID NO: 306042 - DNA, 19 bp, Homo sapiens
  siRNA target sequence for CUL2 (NM_003591.2,993-1011).
ggtgattcatgaatgtcaa

SEQ ID NO: 306043 - DNA, 19 bp, Homo sapiens
  siRNA target sequence for CUL2 (NM_003591.2,1094-1112).
caaatatgtacgtcttact

SEQ ID NO: 306044 - DNA, 19 bp, Homo sapiens
  siRNA target sequence for CUL2 (NM_003591.2,1183-1201).
cgagcaaccagcaacctta

SEQ ID NO: 306045 - DNA, 19 bp, Homo sapiens
  siRNA target sequence for CUL2 (NM_003591.2,1187-1205).
caaccagcaaccttactca

SEQ ID NO: 306046 - DNA, 19 bp, Homo sapiens
  siRNA target sequence for CUL2 (NM_003591.2,1207-1225).
gaaaacatgccaacactat

SEQ ID NO: 306047 - DNA, 19 bp, Homo sapiens
  siRNA target sequence for CUL2 (NM_003591.2,1222-1240).
ctatttgtggagtcagttt

SEQ ID NO: 306048 - DNA, 19 bp, Homo sapiens
  siRNA target sequence for CUL2 (NM_003591.2,1242-1260).
ggaagtgcatggtaaattt

SEQ ID NO: 306049 - DNA, 19 bp, Homo sapiens
  siRNA target sequence for CUL2 (NM_003591.2,1324-1342).
cttacgtcagttgtaaatt

SEQ ID NO: 306050 - DNA, 19 bp, Homo sapiens
  siRNA target sequence for CUL2 (NM_003591.2,1370-1388).
cacctgaactgcttgctaa

SEQ ID NO: 306051 - DNA, 19 bp, Homo sapiens
  siRNA target sequence for CUL2 (NM_003591.2,1373-1391).
ctgaactgcttgctaagta

SEQ ID NO: 306052 - DNA, 19 bp, Homo sapiens
  siRNA target sequence for CUL2 (NM_003591.2,1385-1403).
ctaagtactgtgacaactt

SEQ ID NO: 306053 - DNA, 19 bp, Homo sapiens
  siRNA target sequence for CUL2 (NM_003591.2,1396-1414).
gacaacttactgaagaagt

SEQ ID NO: 306054 - DNA, 19 bp, Homo sapiens
  siRNA target sequence for CUL2 (NM_003591.2,1467-1485).
cacagtgttcaaatacatt

SEQ ID NO: 306055 - DNA, 19 bp, Homo sapiens
  siRNA target sequence for CUL2 (NM_003591.2,1489-1507).
gacaaggacgtctttcaaa

SEQ ID NO: 306056 - DNA, 19 bp, Homo sapiens
  siRNA target sequence for CUL2 (NM_003591.2,1520-1538).
gaatgctggcaaaacgttt

SEQ ID NO: 306057 - DNA, 19 bp, Homo sapiens
  siRNA target sequence for CUL2 (NM_003591.2,1524-1542).
gctggcaaaacgtttaatt

SEQ ID NO: 306058 - DNA, 19 bp, Homo sapiens
  siRNA target sequence for CUL2 (NM_003591.2,1557-1575).
gtctatggactctgaagaa

SEQ ID NO: 306059 - DNA, 19 bp, Homo sapiens
  siRNA target sequence for CUL2 (NM_003591.2,1576-1594).
gccatgatcaacaaattaa

SEQ ID NO: 306060 - DNA, 19 bp, Homo sapiens
  siRNA target sequence for CUL2 (NM_003591.2,1577-1595).
ccatgatcaacaaattaaa

SEQ ID NO: 306061 - DNA, 19 bp, Homo sapiens
  siRNA target sequence for CUL2 (NM_003591.2,1623-1641).
caagctacatcggatgtat

SEQ ID NO: 306062 - DNA, 19 bp, Homo sapiens
  siRNA target sequence for CUL2 (NM_003591.2,1626-1644).
gctacatcggatgtataca

SEQ ID NO: 306063 - DNA, 19 bp, Homo sapiens
  siRNA target sequence for CUL2 (NM_003591.2,1630-1648).
catcggatgtatacagata

SEQ ID NO: 306064 - DNA, 19 bp, Homo sapiens
  siRNA target sequence for CUL2 (NM_003591.2,1633-1651).
cggatgtatacagatatga

SEQ ID NO: 306065 - DNA, 19 bp, Homo sapiens
  siRNA target sequence for CUL2 (NM_003591.2,1656-1674).
cagcgctgatctcaacaat

SEQ ID NO: 306066 - DNA, 19 bp, Homo sapiens
  siRNA target sequence for CUL2 (NM_003591.2,1660-1678).
gctgatctcaacaataagt

SEQ ID NO: 306067 - DNA, 19 bp, Homo sapiens
  siRNA target sequence for CUL2 (NM_003591.2,1661-1679).
ctgatctcaacaataagtt

SEQ ID NO: 306068 - DNA, 19 bp, Homo sapiens
  siRNA target sequence for CUL2 (NM_003591.2,1663-1681).
gatctcaacaataagttca

SEQ ID NO: 306069 - DNA, 19 bp, Homo sapiens
  siRNA target sequence for CUL2 (NM_003591.2,1666-1684).
ctcaacaataagttcaaca

SEQ ID NO: 306070 - DNA, 19 bp, Homo sapiens
  siRNA target sequence for CUL2 (NM_003591.2,1668-1686).
caacaataagttcaacaat

SEQ ID NO: 306071 - DNA, 19 bp, Homo sapiens
  siRNA target sequence for CUL2 (NM_003591.2,1708-1726).
gtaatagatttgggaatta

SEQ ID NO: 306072 - DNA, 19 bp, Homo sapiens
  siRNA target sequence for CUL2 (NM_003591.2,1719-1737).
gggaattagttttcaaata

SEQ ID NO: 306073 - DNA, 19 bp, Homo sapiens
  siRNA target sequence for CUL2 (NM_003591.2,1778-1796).
cttcatctacgtttgcaat

SEQ ID NO: 306074 - DNA, 19 bp, Homo sapiens
  siRNA target sequence for CUL2 (NM_003591.2,1863-1881).
gaaacttacatggttacat

SEQ ID NO: 306075 - DNA, 19 bp, Homo sapiens
  siRNA target sequence for CUL2 (NM_003591.2,1885-1903).
ctgtgtacaggtgaagtta

SEQ ID NO: 306076 - DNA, 19 bp, Homo sapiens
  siRNA target sequence for CUL2 (NM_003591.2,1887-1905).
gtgtacaggtgaagttaaa

SEQ ID NO: 306077 - DNA, 19 bp, Homo sapiens
  siRNA target sequence for CUL2 (NM_003591.2,1892-1910).
caggtgaagttaaaatgaa

SEQ ID NO: 306078 - DNA, 19 bp, Homo sapiens
  siRNA target sequence for CUL2 (NM_003591.2,1894-1912).
ggtgaagttaaaatgaact

SEQ ID NO: 306079 - DNA, 19 bp, Homo sapiens
  siRNA target sequence for CUL2 (NM_003591.2,1924-1942).
ccatatgtagccatggtta

SEQ ID NO: 306080 - DNA, 19 bp, Homo sapiens
  siRNA target sequence for CUL2 (NM_003591.2,1930-1948).
gtagccatggttacaacat

SEQ ID NO: 306081 - DNA, 19 bp, Homo sapiens
  siRNA target sequence for CUL2 (NM_003591.2,1935-1953).
catggttacaacataccaa

SEQ ID NO: 306082 - DNA, 19 bp, Homo sapiens
  siRNA target sequence for CUL2 (NM_003591.2,1960-1978).
gttcttcttgcctttaaca

SEQ ID NO: 306083 - DNA, 19 bp, Homo sapiens
  siRNA target sequence for CUL2 (NM_003591.2,2013-2031).
cagcactcagatgaatgaa

SEQ ID NO: 306084 - DNA, 19 bp, Homo sapiens
  siRNA target sequence for CUL2 (NM_003591.2,2062-2080).
cttgatgtgaaaatgatta

SEQ ID NO: 306085 - DNA, 19 bp, Homo sapiens
  siRNA target sequence for CUL2 (NM_003591.2,2076-2094).
gattaaccatgattcagaa

SEQ ID NO: 306086 - DNA, 19 bp, Homo sapiens
  siRNA target sequence for CUL2 (NM_003591.2,2113-2131).
gaatcttcgttttcattaa

SEQ ID NO: 306087 - DNA, 19 bp, Homo sapiens
  siRNA target sequence for CUL2 (NM_003591.2,2136-2154).
gaactttagcagtaaaaga

SEQ ID NO: 306088 - DNA, 19 bp, Homo sapiens
  siRNA target sequence for CUL2 (NM_003591.2,2213-2231).
ctagaagtgcagttgatga

SEQ ID NO: 306089 - DNA, 19 bp, Homo sapiens
  siRNA target sequence for CUL2 (NM_003591.2,2255-2273).
ctgctatagttcgtatcat

SEQ ID NO: 306090 - DNA, 19 bp, Homo sapiens
  siRNA target sequence for CUL2 (NM_003591.2,2257-2275).
gctatagttcgtatcatga

SEQ ID NO: 306091 - DNA, 19 bp, Homo sapiens
  siRNA target sequence for CUL2 (NM_003591.2,2258-2276).
ctatagttcgtatcatgaa

SEQ ID NO: 306092 - DNA, 19 bp, Homo sapiens
  siRNA target sequence for CUL2 (NM_003591.2,2294-2312).
ggcacaatgcccttattca

SEQ ID NO: 306093 - DNA, 19 bp, Homo sapiens
  siRNA target sequence for CUL2 (NM_003591.2,2295-2313).
gcacaatgcccttattcaa

SEQ ID NO: 306094 - DNA, 19 bp, Homo sapiens
  siRNA target sequence for CUL2 (NM_003591.2,2305-2323).
cttattcaagaggtgatta

SEQ ID NO: 306095 - DNA, 19 bp, Homo sapiens
  siRNA target sequence for CUL2 (NM_003591.2,2326-2344).
cagtcaagagctaggttta

SEQ ID NO: 306096 - DNA, 19 bp, Homo sapiens
  siRNA target sequence for CUL2 (NM_003591.2,2328-2346).
gtcaagagctaggtttaat

SEQ ID NO: 306097 - DNA, 19 bp, Homo sapiens
  siRNA target sequence for CUL2 (NM_003591.2,2348-2366).
ccagtatcagcatgattaa

SEQ ID NO: 306098 - DNA, 19 bp, Homo sapiens
  siRNA target sequence for CUL2 (NM_003591.2,2413-2431).
caggcgtcggcagatgaat

SEQ ID NO: 306099 - DNA, 19 bp, Homo sapiens
  siRNA target sequence for CUL2 (NM_003591.2,2416-2434).
gcgtcggcagatgaataca

SEQ ID NO: 306100 - DNA, 19 bp, Homo sapiens
  siRNA target sequence for CUL3 (NM_003590.1,385-403).
ccgatgaccatggatgaaa

SEQ ID NO: 306101 - DNA, 19 bp, Homo sapiens
  siRNA target sequence for CUL3 (NM_003590.1,417-435).
catttgggaccttctgaaa

SEQ ID NO: 306102 - DNA, 19 bp, Homo sapiens
  siRNA target sequence for CUL3 (NM_003590.1,448-466).
gaaatccagcgtaagaata

SEQ ID NO: 306103 - DNA, 19 bp, Homo sapiens
  siRNA target sequence for CUL3 (NM_003590.1,453-471).
ccagcgtaagaataacagt

SEQ ID NO: 306104 - DNA, 19 bp, Homo sapiens
  siRNA target sequence for CUL3 (NM_003590.1,462-480).
gaataacagtggtcttagt

SEQ ID NO: 306105 - DNA, 19 bp, Homo sapiens
  siRNA target sequence for CUL3 (NM_003590.1,503-521).
catatacaatggttttgca

SEQ ID NO: 306106 - DNA, 19 bp, Homo sapiens
  siRNA target sequence for CUL3 (NM_003590.1,509-527).
caatggttttgcataaaca

SEQ ID NO: 306107 - DNA, 19 bp, Homo sapiens
  siRNA target sequence for CUL3 (NM_003590.1,537-555).
gctctacactggactaaga

SEQ ID NO: 306108 - DNA, 19 bp, Homo sapiens
  siRNA target sequence for CUL3 (NM_003590.1,562-580).
gttaccgaacatctcataa

SEQ ID NO: 306109 - DNA, 19 bp, Homo sapiens
  siRNA target sequence for CUL3 (NM_003590.1,566-584).
ccgaacatctcataaataa

SEQ ID NO: 306110 - DNA, 19 bp, Homo sapiens
  siRNA target sequence for CUL3 (NM_003590.1,585-603).
ggtgcgagaagatgtacta

SEQ ID NO: 306111 - DNA, 19 bp, Homo sapiens
  siRNA target sequence for CUL3 (NM_003590.1,588-606).
gcgagaagatgtactaaat

SEQ ID NO: 306112 - DNA, 19 bp, Homo sapiens
  siRNA target sequence for CUL3 (NM_003590.1,589-607).
cgagaagatgtactaaatt

SEQ ID NO: 306113 - DNA, 19 bp, Homo sapiens
  siRNA target sequence for CUL3 (NM_003590.1,592-610).
gaagatgtactaaattcat

SEQ ID NO: 306114 - DNA, 19 bp, Homo sapiens
  siRNA target sequence for CUL3 (NM_003590.1,598-616).
gtactaaattcattgaata

SEQ ID NO: 306115 - DNA, 19 bp, Homo sapiens
  siRNA target sequence for CUL3 (NM_003590.1,643-661).
gcttggaatgatcatcaaa

SEQ ID NO: 306116 - DNA, 19 bp, Homo sapiens
  siRNA target sequence for CUL3 (NM_003590.1,669-687).
ggtgatgattagagacata

SEQ ID NO: 306117 - DNA, 19 bp, Homo sapiens
  siRNA target sequence for CUL3 (NM_003590.1,672-690).
gatgattagagacatacta

SEQ ID NO: 306118 - DNA, 19 bp, Homo sapiens
  siRNA target sequence for CUL3 (NM_003590.1,699-717).
ggaccgtgtgtatgtacaa

SEQ ID NO: 306119 - DNA, 19 bp, Homo sapiens
  siRNA target sequence for CUL3 (NM_003590.1,702-720).
ccgtgtgtatgtacaacaa

SEQ ID NO: 306120 - DNA, 19 bp, Homo sapiens
  siRNA target sequence for CUL3 (NM_003590.1,708-726).
gtatgtacaacaaaataat

SEQ ID NO: 306121 - DNA, 19 bp, Homo sapiens
  siRNA target sequence for CUL3 (NM_003590.1,727-745).
gtggagaacgtctacaatt

SEQ ID NO: 306122 - DNA, 19 bp, Homo sapiens
  siRNA target sequence for CUL3 (NM_003590.1,786-804).
gtgtattagggatcatcta

SEQ ID NO: 306123 - DNA, 19 bp, Homo sapiens
  siRNA target sequence for CUL3 (NM_003590.1,799-817).
catctacggcaaactctat

SEQ ID NO: 306124 - DNA, 19 bp, Homo sapiens
  siRNA target sequence for CUL3 (NM_003590.1,805-823).
cggcaaactctattggata

SEQ ID NO: 306125 - DNA, 19 bp, Homo sapiens
  siRNA target sequence for CUL3 (NM_003590.1,808-826).
caaactctattggatatga

SEQ ID NO: 306126 - DNA, 19 bp, Homo sapiens
  siRNA target sequence for CUL3 (NM_003590.1,853-871).
gtagacagaggcgcaataa

SEQ ID NO: 306127 - DNA, 19 bp, Homo sapiens
  siRNA target sequence for CUL3 (NM_003590.1,862-880).
ggcgcaataagaaatgctt

SEQ ID NO: 306128 - DNA, 19 bp, Homo sapiens
  siRNA target sequence for CUL3 (NM_003590.1,877-895).
gcttgccagatgttaatga

SEQ ID NO: 306129 - DNA, 19 bp, Homo sapiens
  siRNA target sequence for CUL3 (NM_003590.1,882-900).
ccagatgttaatgatttta

SEQ ID NO: 306130 - DNA, 19 bp, Homo sapiens
  siRNA target sequence for CUL3 (NM_003590.1,885-903).
gatgttaatgattttaggt

SEQ ID NO: 306131 - DNA, 19 bp, Homo sapiens
  siRNA target sequence for CUL3 (NM_003590.1,906-924).
cgaaggaagatcagtctat

SEQ ID NO: 306132 - DNA, 19 bp, Homo sapiens
  siRNA target sequence for CUL3 (NM_003590.1,937-955).
gaggctccttttttggaaa

SEQ ID NO: 306133 - DNA, 19 bp, Homo sapiens
  siRNA target sequence for CUL3 (NM_003590.1,1000-1018).
gaaaatagtgcttcagtat

SEQ ID NO: 306134 - DNA, 19 bp, Homo sapiens
  siRNA target sequence for CUL3 (NM_003590.1,1069-1087).
cactgccttgacaaatcaa

SEQ ID NO: 306135 - DNA, 19 bp, Homo sapiens
  siRNA target sequence for CUL3 (NM_003590.1,1085-1103).
caacggaagaaccaattgt

SEQ ID NO: 306136 - DNA, 19 bp, Homo sapiens
  siRNA target sequence for CUL3 (NM_003590.1,1111-1129).
gttgaaagggaactcattt

SEQ ID NO: 306137 - DNA, 19 bp, Homo sapiens
  siRNA target sequence for CUL3 (NM_003590.1,1166-1184).
ctgggctagtacatatgtt

SEQ ID NO: 306138 - DNA, 19 bp, Homo sapiens
  siRNA target sequence for CUL3 (NM_003590.1,1168-1186).
gggctagtacatatgttga

SEQ ID NO: 306139 - DNA, 19 bp, Homo sapiens
  siRNA target sequence for CUL3 (NM_003590.1,1169-1187).
ggctagtacatatgttgaa

SEQ ID NO: 306140 - DNA, 19 bp, Homo sapiens
  siRNA target sequence for CUL3 (NM_003590.1,1170-1188).
gctagtacatatgttgaaa

SEQ ID NO: 306141 - DNA, 19 bp, Homo sapiens
  siRNA target sequence for CUL3 (NM_003590.1,1171-1189).
ctagtacatatgttgaaaa

SEQ ID NO: 306142 - DNA, 19 bp, Homo sapiens
  siRNA target sequence for CUL3 (NM_003590.1,1204-1222).
gaccttggttgcatgtaca

SEQ ID NO: 306143 - DNA, 19 bp, Homo sapiens
  siRNA target sequence for CUL3 (NM_003590.1,1210-1228).
ggttgcatgtacaagttat

SEQ ID NO: 306144 - DNA, 19 bp, Homo sapiens
  siRNA target sequence for CUL3 (NM_003590.1,1215-1233).
catgtacaagttatttagt

SEQ ID NO: 306145 - DNA, 19 bp, Homo sapiens
  siRNA target sequence for CUL3 (NM_003590.1,1232-1250).
gtcgtgtgccaaatggttt

SEQ ID NO: 306146 - DNA, 19 bp, Homo sapiens
  siRNA target sequence for CUL3 (NM_003590.1,1387-1405).
ctcctggaatcattcaaca

SEQ ID NO: 306147 - DNA, 19 bp, Homo sapiens
  siRNA target sequence for CUL3 (NM_003590.1,1401-1419).
caacaatgaccgtctcttt

SEQ ID NO: 306148 - DNA, 19 bp, Homo sapiens
  siRNA target sequence for CUL3 (NM_003590.1,1408-1426).
gaccgtctctttaaacaaa

SEQ ID NO: 306149 - DNA, 19 bp, Homo sapiens
  siRNA target sequence for CUL3 (NM_003590.1,1433-1451).
cgggtgactttgagtattt

SEQ ID NO: 306150 - DNA, 19 bp, Homo sapiens
  siRNA target sequence for CUL3 (NM_003590.1,1472-1490).
ctcctgaatacctctcatt

SEQ ID NO: 306151 - DNA, 19 bp, Homo sapiens
  siRNA target sequence for CUL3 (NM_003590.1,1572-1590).
cctttttaggtttatgcaa

SEQ ID NO: 306152 - DNA, 19 bp, Homo sapiens
  siRNA target sequence for CUL3 (NM_003590.1,1597-1615).
gatgtatttgaacgttatt

SEQ ID NO: 306153 - DNA, 19 bp, Homo sapiens
  siRNA target sequence for CUL3 (NM_003590.1,1600-1618).
gtatttgaacgttattata

SEQ ID NO: 306154 - DNA, 19 bp, Homo sapiens
  siRNA target sequence for CUL3 (NM_003590.1,1631-1649).
caaggagacttctcacaaa

SEQ ID NO: 306155 - DNA, 19 bp, Homo sapiens
  siRNA target sequence for CUL3 (NM_003590.1,1668-1686).
ctctgaaaaaaacatgata

SEQ ID NO: 306156 - DNA, 19 bp, Homo sapiens
  siRNA target sequence for CUL3 (NM_003590.1,1683-1701).
gatatctaagttaaagact

SEQ ID NO: 306157 - DNA, 19 bp, Homo sapiens
  siRNA target sequence for CUL3 (NM_003590.1,1712-1730).
gtcagttcacgtcaaaact

SEQ ID NO: 306158 - DNA, 19 bp, Homo sapiens
  siRNA target sequence for CUL3 (NM_003590.1,1735-1753).
ggaatgtttagggatatga

SEQ ID NO: 306159 - DNA, 19 bp, Homo sapiens
  siRNA target sequence for CUL3 (NM_003590.1,1797-1815).
ggcaactggtgtatcttta

SEQ ID NO: 306160 - DNA, 19 bp, Homo sapiens
  siRNA target sequence for CUL3 (NM_003590.1,1817-1835).
gtggtgttgatcttacagt

SEQ ID NO: 306161 - DNA, 19 bp, Homo sapiens
  siRNA target sequence for CUL3 (NM_003590.1,1839-1857).
ggtgctcacgacaggatat

SEQ ID NO: 306162 - DNA, 19 bp, Homo sapiens
  siRNA target sequence for CUL3 (NM_003590.1,1840-1858).
gtgctcacgacaggatatt

SEQ ID NO: 306163 - DNA, 19 bp, Homo sapiens
  siRNA target sequence for CUL3 (NM_003590.1,2006-2024).
cattttatggaccagttaa

SEQ ID NO: 306164 - DNA, 19 bp, Homo sapiens
  siRNA target sequence for CUL3 (NM_003590.1,2081-2099).
cacggaagcacatattgca

SEQ ID NO: 306165 - DNA, 19 bp, Homo sapiens
  siRNA target sequence for CUL3 (NM_003590.1,2121-2139).
catattaatgctctttaat

SEQ ID NO: 306166 - DNA, 19 bp, Homo sapiens
  siRNA target sequence for CUL3 (NM_003590.1,2144-2162).
gagaaaaatacacatttga

SEQ ID NO: 306167 - DNA, 19 bp, Homo sapiens
  siRNA target sequence for CUL3 (NM_003590.1,2220-2238).
cctcgcctgtggtaaacca

SEQ ID NO: 306168 - DNA, 19 bp, Homo sapiens
  siRNA target sequence for CUL3 (NM_003590.1,2221-2239).
ctcgcctgtggtaaaccaa

SEQ ID NO: 306169 - DNA, 19 bp, Homo sapiens
  siRNA target sequence for CUL3 (NM_003590.1,2236-2254).
ccaacacagcgggttctta

SEQ ID NO: 306170 - DNA, 19 bp, Homo sapiens
  siRNA target sequence for CUL3 (NM_003590.1,2240-2258).
cacagcgggttcttacaaa

SEQ ID NO: 306171 - DNA, 19 bp, Homo sapiens
  siRNA target sequence for CUL3 (NM_003590.1,2244-2262).
gcgggttcttacaaaagaa

SEQ ID NO: 306172 - DNA, 19 bp, Homo sapiens
  siRNA target sequence for CUL3 (NM_003590.1,2302-2320).
gttaatgatcaattcacat

SEQ ID NO: 306173 - DNA, 19 bp, Homo sapiens
  siRNA target sequence for CUL3 (NM_003590.1,2329-2347).
cacagagtcaagattcaaa

SEQ ID NO: 306174 - DNA, 19 bp, Homo sapiens
  siRNA target sequence for CUL3 (NM_003590.1,2435-2453).
ctgctatagtgcggataat

SEQ ID NO: 306175 - DNA, 19 bp, Homo sapiens
  siRNA target sequence for CUL3 (NM_003590.1,2437-2455).
gctatagtgcggataatga

SEQ ID NO: 306176 - DNA, 19 bp, Homo sapiens
  siRNA target sequence for CUL3 (NM_003590.1,2438-2456).
ctatagtgcggataatgaa

SEQ ID NO: 306177 - DNA, 19 bp, Homo sapiens
  siRNA target sequence for CUL3 (NM_003590.1,2443-2461).
gtgcggataatgaaatcta

SEQ ID NO: 306178 - DNA, 19 bp, Homo sapiens
  siRNA target sequence for CUL3 (NM_003590.1,2472-2490).
gcagcacaatgttctagta

SEQ ID NO: 306179 - DNA, 19 bp, Homo sapiens
  siRNA target sequence for CUL3 (NM_003590.1,2508-2526).
gttgaaggcgcgattctta

SEQ ID NO: 306180 - DNA, 19 bp, Homo sapiens
  siRNA target sequence for CUL3 (NM_003590.1,2523-2541).
cttaccaagtccagttgtt

SEQ ID NO: 306181 - DNA, 19 bp, Homo sapiens
  siRNA target sequence for CUL3 (NM_003590.1,2527-2545).
ccaagtccagttgttatta

SEQ ID NO: 306182 - DNA, 19 bp, Homo sapiens
  siRNA target sequence for CUL3 (NM_003590.1,2536-2554).
gttgttattaagaaacgta

SEQ ID NO: 306183 - DNA, 19 bp, Homo sapiens
  siRNA target sequence for CUL3 (NM_003590.1,2552-2570).
gtattgaaggacttattga

SEQ ID NO: 306184 - DNA, 19 bp, Homo sapiens
  siRNA target sequence for CUL3 (NM_003590.1,2560-2578).
ggacttattgagagagaat

SEQ ID NO: 306185 - DNA, 19 bp, Homo sapiens
  siRNA target sequence for CUL3 (NM_003590.1,2593-2611).
cctgaggatcgcaaagtat

SEQ ID NO: 306186 - DNA, 19 bp, Homo sapiens
  siRNA target sequence for CUL3 (NM_003590.1,2594-2612).
ctgaggatcgcaaagtata

SEQ ID NO: 306187 - DNA, 19 bp, Homo sapiens
  siRNA target sequence for CUL3 (NM_003590.1,2596-2614).
gaggatcgcaaagtataca

SEQ ID NO: 306188 - DNA, 19 bp, Homo sapiens
  siRNA target sequence for CUL3 (NM_003590.1,2598-2616).
ggatcgcaaagtatacaca

SEQ ID NO: 306189 - DNA, 19 bp, Homo sapiens
  siRNA target sequence for CUL3 (NM_003590.1,2599-2617).
gatcgcaaagtatacacat

SEQ ID NO: 306190 - DNA, 19 bp, Homo sapiens
  siRNA target sequence for CUL4A (NM_003589.1,211-229).
gatccttccgtttagagaa

SEQ ID NO: 306191 - DNA, 19 bp, Homo sapiens
  siRNA target sequence for CUL4A (NM_003589.1,232-250).
ctcactagatagtgtttta

SEQ ID NO: 306192 - DNA, 19 bp, Homo sapiens
  siRNA target sequence for CUL4A (NM_003589.1,234-252).
cactagatagtgttttatt

SEQ ID NO: 306193 - DNA, 19 bp, Homo sapiens
  siRNA target sequence for CUL4A (NM_003589.1,389-407).
ctgtttagaacccatatta

SEQ ID NO: 306194 - DNA, 19 bp, Homo sapiens
  siRNA target sequence for CUL4A (NM_003589.1,391-409).
gtttagaacccatattatt

SEQ ID NO: 306195 - DNA, 19 bp, Homo sapiens
  siRNA target sequence for CUL4A (NM_003589.1,396-414).
gaacccatattattagtga

SEQ ID NO: 306196 - DNA, 19 bp, Homo sapiens
  siRNA target sequence for CUL4A (NM_003589.1,421-439).
ggttcagagtaaaaccatt

SEQ ID NO: 306197 - DNA, 19 bp, Homo sapiens
  siRNA target sequence for CUL4A (NM_003589.1,533-551).
caggtgtataaagattcat

SEQ ID NO: 306198 - DNA, 19 bp, Homo sapiens
  siRNA target sequence for CUL4A (NM_003589.1,569-587).
gaagagactaattgcttat

SEQ ID NO: 306199 - DNA, 19 bp, Homo sapiens
  siRNA target sequence for CUL4A (NM_003589.1,593-611).
gccgaaggccaaaggttaa

SEQ ID NO: 306200 - DNA, 19 bp, Homo sapiens
  siRNA target sequence for CUL4A (NM_003589.1,594-612).
ccgaaggccaaaggttaat

SEQ ID NO: 306201 - DNA, 19 bp, Homo sapiens
  siRNA target sequence for CUL4A (NM_003589.1,632-650).
gaatatcttaaccatgtaa

SEQ ID NO: 306202 - DNA, 19 bp, Homo sapiens
  siRNA target sequence for CUL4A (NM_003589.1,671-689).
ggagacagagtaatcactt

SEQ ID NO: 306203 - DNA, 19 bp, Homo sapiens
  siRNA target sequence for CUL4A (NM_003589.1,739-757).
gctattaggagaacattta

SEQ ID NO: 306204 - DNA, 19 bp, Homo sapiens
  siRNA target sequence for CUL4A (NM_003589.1,740-758).
ctattaggagaacatttaa

SEQ ID NO: 306205 - DNA, 19 bp, Homo sapiens
  siRNA target sequence for CUL4A (NM_003589.1,810-828).
cggacctcgcacagatgta

SEQ ID NO: 306206 - DNA, 19 bp, Homo sapiens
  siRNA target sequence for CUL4A (NM_003589.1,875-893).
cactggagcgagtacatca

SEQ ID NO: 306207 - DNA, 19 bp, Homo sapiens
  siRNA target sequence for CUL4A (NM_003589.1,882-900).
gcgagtacatcaagacttt

SEQ ID NO: 306208 - DNA, 19 bp, Homo sapiens
  siRNA target sequence for CUL4A (NM_003589.1,883-901).
cgagtacatcaagactttt

SEQ ID NO: 306209 - DNA, 19 bp, Homo sapiens
  siRNA target sequence for CUL4A (NM_003589.1,903-921).
gaacagcgatcgtaatcaa

SEQ ID NO: 306210 - DNA, 19 bp, Homo sapiens
  siRNA target sequence for CUL4A (NM_003589.1,991-1009).
ggtctgcttccagaagaat

SEQ ID NO: 306211 - DNA, 19 bp, Homo sapiens
  siRNA target sequence for CUL4A (NM_003589.1,1088-1106).
gcaaagcatgtggattcaa

SEQ ID NO: 306212 - DNA, 19 bp, Homo sapiens
  siRNA target sequence for CUL4A (NM_003589.1,1089-1107).
caaagcatgtggattcaaa

SEQ ID NO: 306213 - DNA, 19 bp, Homo sapiens
  siRNA target sequence for CUL4A (NM_003589.1,1183-1201).
gtttatccacggtaaagat

SEQ ID NO: 306214 - DNA, 19 bp, Homo sapiens
  siRNA target sequence for CUL4A (NM_003589.1,1260-1278).
cctcagtcgatgctgaaaa

SEQ ID NO: 306215 - DNA, 19 bp, Homo sapiens
  siRNA target sequence for CUL4A (NM_003589.1,1265-1283).
gtcgatgctgaaaagtcta

SEQ ID NO: 306216 - DNA, 19 bp, Homo sapiens
  siRNA target sequence for CUL4A (NM_003589.1,1271-1289).
gctgaaaagtctatgttgt

SEQ ID NO: 306217 - DNA, 19 bp, Homo sapiens
  siRNA target sequence for CUL4A (NM_003589.1,1407-1425).
gtgactcaggccctataga

SEQ ID NO: 306218 - DNA, 19 bp, Homo sapiens
  siRNA target sequence for CUL4A (NM_003589.1,1491-1509).
ccccagaaatgattaaact

SEQ ID NO: 306219 - DNA, 19 bp, Homo sapiens
  siRNA target sequence for CUL4A (NM_003589.1,1543-1561).
gcacagtggtcgaaaactt

SEQ ID NO: 306220 - DNA, 19 bp, Homo sapiens
  siRNA target sequence for CUL4A (NM_003589.1,1559-1577).
cttcagtggcaaactactt

SEQ ID NO: 306221 - DNA, 19 bp, Homo sapiens
  siRNA target sequence for CUL4A (NM_003589.1,1589-1607).
gttttaaaagcggagttta

SEQ ID NO: 306222 - DNA, 19 bp, Homo sapiens
  siRNA target sequence for CUL4A (NM_003589.1,1710-1728).
cggggatagaggatagtga

SEQ ID NO: 306223 - DNA, 19 bp, Homo sapiens
  siRNA target sequence for CUL4A (NM_003589.1,1766-1784).
gcacgtgtgctgattaaaa

SEQ ID NO: 306224 - DNA, 19 bp, Homo sapiens
  siRNA target sequence for CUL4A (NM_003589.1,1833-1851).
gagagttcaagcacaagtt

SEQ ID NO: 306225 - DNA, 19 bp, Homo sapiens
  siRNA target sequence for CUL4A (NM_003589.1,1837-1855).
gttcaagcacaagttgttt

SEQ ID NO: 306226 - DNA, 19 bp, Homo sapiens
  siRNA target sequence for CUL4A (NM_003589.1,1840-1858).
caagcacaagttgtttaga

SEQ ID NO: 306227 - DNA, 19 bp, Homo sapiens
  siRNA target sequence for CUL4A (NM_003589.1,1852-1870).
gtttagaataaagatcaat

SEQ ID NO: 306228 - DNA, 19 bp, Homo sapiens
  siRNA target sequence for CUL4A (NM_003589.1,1911-1929).
ccactgagagagtgtttca

SEQ ID NO: 306229 - DNA, 19 bp, Homo sapiens
  siRNA target sequence for CUL4A (NM_003589.1,1922-1940).
gtgtttcaggatagacaat

SEQ ID NO: 306230 - DNA, 19 bp, Homo sapiens
  siRNA target sequence for CUL4A (NM_003589.1,1952-1970).
gctgctatcgtcagaataa

SEQ ID NO: 306231 - DNA, 19 bp, Homo sapiens
  siRNA target sequence for CUL4A (NM_003589.1,1953-1971).
ctgctatcgtcagaataat

SEQ ID NO: 306232 - DNA, 19 bp, Homo sapiens
  siRNA target sequence for CUL4A (NM_003589.1,1980-1998).
gaaagactcttggtcataa

SEQ ID NO: 306233 - DNA, 19 bp, Homo sapiens
  siRNA target sequence for CUL4A (NM_003589.1,1984-2002).
gactcttggtcataatctt

SEQ ID NO: 306234 - DNA, 19 bp, Homo sapiens
  siRNA target sequence for CUL4A (NM_003589.1,1991-2009).
ggtcataatcttctagttt

SEQ ID NO: 306235 - DNA, 19 bp, Homo sapiens
  siRNA target sequence for CUL4A (NM_003589.1,2003-2021).
ctagtttctgaattatata

SEQ ID NO: 306236 - DNA, 19 bp, Homo sapiens
  siRNA target sequence for CUL4A (NM_003589.1,2064-2082).
gaattgaatctctgataga

SEQ ID NO: 306237 - DNA, 19 bp, Homo sapiens
  siRNA target sequence for GAR17 (NM_139285.1,357-375).
ccagggacaatgtctctaa

SEQ ID NO: 306238 - DNA, 19 bp, Homo sapiens
  siRNA target sequence for GAR17 (NM_139285.1,816-834).
gccattacctggacaaaca

SEQ ID NO: 306239 - DNA, 19 bp, Homo sapiens
  siRNA target sequence for GAR17 (NM_139285.1,989-1007).
gtggactggaagacatata

SEQ ID NO: 306240 - DNA, 19 bp, Homo sapiens
  siRNA target sequence for GAR17 (NM_139285.1,1278-1296).
ccacatcttgggttcatga

SEQ ID NO: 306241 - DNA, 19 bp, Homo sapiens
  siRNA target sequence for GAR17 (NM_139285.1,1279-1297).
cacatcttgggttcatgaa

SEQ ID NO: 306242 - DNA, 19 bp, Homo sapiens
  siRNA target sequence for GAR17 (NM_139285.1,1363-1381).
caccaccaaagggatatca

SEQ ID NO: 306243 - DNA, 19 bp, Homo sapiens
  siRNA target sequence for GAR17 (NM_139285.1,1817-1835).
gagcaagccatctactgta

SEQ ID NO: 306244 - DNA, 19 bp, Homo sapiens
  siRNA target sequence for GAR17 (NM_139285.1,1847-1865).
gagattttgggcaacatga

SEQ ID NO: 306245 - DNA, 19 bp, Homo sapiens
  siRNA target sequence for GAR17 (NM_139285.1,1920-1938).
ctcgcagtggggtctacat

SEQ ID NO: 306246 - DNA, 19 bp, Homo sapiens
  siRNA target sequence for GAR17 (NM_139285.1,2010-2028).
ggtccccatccctccttaa

SEQ ID NO: 306247 - DNA, 19 bp, Homo sapiens
  siRNA target sequence for GAR17 (NM_139285.1,2328-2346).
gggtcccgtccatctacaa

SEQ ID NO: 306248 - DNA, 19 bp, Homo sapiens
  siRNA target sequence for GAR17 (NM_139285.1,2418-2436).
ggccactggcctatgtctt

SEQ ID NO: 306249 - DNA, 19 bp, Homo sapiens
  siRNA target sequence for GAS2 (NM_005256.2,106-124).
ctctgatatgcatcagtat

SEQ ID NO: 306250 - DNA, 19 bp, Homo sapiens
  siRNA target sequence for GAS2 (NM_005256.2,133-151).
gctagccagcagacatgaa

SEQ ID NO: 306251 - DNA, 19 bp, Homo sapiens
  siRNA target sequence for GAS2 (NM_005256.2,179-197).
ctggccttgtggttaacca

SEQ ID NO: 306252 - DNA, 19 bp, Homo sapiens
  siRNA target sequence for GAS2 (NM_005256.2,184-202).
cttgtggttaaccaatcta

SEQ ID NO: 306253 - DNA, 19 bp, Homo sapiens
  siRNA target sequence for GAS2 (NM_005256.2,187-205).
gtggttaaccaatctatta

SEQ ID NO: 306254 - DNA, 19 bp, Homo sapiens
  siRNA target sequence for GAS2 (NM_005256.2,200-218).
ctattagggaaggagatta

SEQ ID NO: 306255 - DNA, 19 bp, Homo sapiens
  siRNA target sequence for GAS2 (NM_005256.2,214-232).
gattacagcagaaactttt

SEQ ID NO: 306256 - DNA, 19 bp, Homo sapiens
  siRNA target sequence for GAS2 (NM_005256.2,311-329).
gctaacaagcccacaaaga

SEQ ID NO: 306257 - DNA, 19 bp, Homo sapiens
  siRNA target sequence for GAS2 (NM_005256.2,312-330).
ctaacaagcccacaaagaa

SEQ ID NO: 306258 - DNA, 19 bp, Homo sapiens
  siRNA target sequence for GAS2 (NM_005256.2,365-383).
gcaccctcgggctcctttt

SEQ ID NO: 306259 - DNA, 19 bp, Homo sapiens
  siRNA target sequence for GAS2 (NM_005256.2,366-384).
caccctcgggctccttttt

SEQ ID NO: 306260 - DNA, 19 bp, Homo sapiens
  siRNA target sequence for GAS2 (NM_005256.2,390-408).
gagacaatacagcaaattt

SEQ ID NO: 306261 - DNA, 19 bp, Homo sapiens
  siRNA target sequence for GAS2 (NM_005256.2,392-410).
gacaatacagcaaatttct

SEQ ID NO: 306262 - DNA, 19 bp, Homo sapiens
  siRNA target sequence for GAS2 (NM_005256.2,434-452).
gtggatgaaacgtgtctat

SEQ ID NO: 306263 - DNA, 19 bp, Homo sapiens
  siRNA target sequence for GAS2 (NM_005256.2,436-454).
ggatgaaacgtgtctattt

SEQ ID NO: 306264 - DNA, 19 bp, Homo sapiens
  siRNA target sequence for GAS2 (NM_005256.2,440-458).
gaaacgtgtctatttgaat

SEQ ID NO: 306265 - DNA, 19 bp, Homo sapiens
  siRNA target sequence for GAS2 (NM_005256.2,545-563).
gagcctcctggtttgataa

SEQ ID NO: 306266 - DNA, 19 bp, Homo sapiens
  siRNA target sequence for GAS2 (NM_005256.2,549-567).
ctcctggtttgataaagct

SEQ ID NO: 306267 - DNA, 19 bp, Homo sapiens
  siRNA target sequence for GAS2 (NM_005256.2,668-686).
gatgatgcagtgaaacgaa

SEQ ID NO: 306268 - DNA, 19 bp, Homo sapiens
  siRNA target sequence for GAS2 (NM_005256.2,675-693).
cagtgaaacgaatttctga

SEQ ID NO: 306269 - DNA, 19 bp, Homo sapiens
  siRNA target sequence for GAS2 (NM_005256.2,783-801).
ggatgctgcacaacaaaca

SEQ ID NO: 306270 - DNA, 19 bp, Homo sapiens
  siRNA target sequence for GAS2 (NM_005256.2,840-858).
cagggtatttgttgaaaca

SEQ ID NO: 306271 - DNA, 19 bp, Homo sapiens
  siRNA target sequence for GAS2 (NM_005256.2,886-904).
ccgtgtggatggcaaaaca

SEQ ID NO: 306272 - DNA, 19 bp, Homo sapiens
  siRNA target sequence for GAS2 (NM_005256.2,887-905).
cgtgtggatggcaaaacat

SEQ ID NO: 306273 - DNA, 19 bp, Homo sapiens
  siRNA target sequence for GAS2 (NM_005256.2,927-945).
caactctaaaggacatgaa

SEQ ID NO: 306274 - DNA, 19 bp, Homo sapiens
  siRNA target sequence for GAS2 (NM_005256.2,962-980).
gtggtctctgccagttata

SEQ ID NO: 306275 - DNA, 19 bp, Homo sapiens
  siRNA target sequence for GAS2L1 (NM_006478.3,542-560).
gccggaggtgctcatgttt

SEQ ID NO: 306276 - DNA, 19 bp, Homo sapiens
  siRNA target sequence for GAS2L1 (NM_006478.3,544-562).
cggaggtgctcatgtttga

SEQ ID NO: 306277 - DNA, 19 bp, Homo sapiens
  siRNA target sequence for GAS2L1 (NM_006478.3,658-676).
cacgcctcgtgcagtttga

SEQ ID NO: 306278 - DNA, 19 bp, Homo sapiens
  siRNA target sequence for GAS2L1 (NM_006478.3,735-753).
ggggaggacaccactgaaa

SEQ ID NO: 306279 - DNA, 19 bp, Homo sapiens
  siRNA target sequence for GAS2L1 (NM_006478.3,861-879).
gaccagtttcccatgatca

SEQ ID NO: 306280 - DNA, 19 bp, Homo sapiens
  siRNA target sequence for GAS2L1 (NM_006478.3,911-929).
ctcgagcctgctcatcttt

SEQ ID NO: 306281 - DNA, 19 bp, Homo sapiens
  siRNA target sequence for GAS2L1 (NM_006478.3,976-994).
gggacacgctggagcatta

SEQ ID NO: 306282 - DNA, 19 bp, Homo sapiens
  siRNA target sequence for GAS2L1 (NM_006478.3,1050-1068).
ccgagggtctgcacctttt

SEQ ID NO: 306283 - DNA, 19 bp, Homo sapiens
  siRNA target sequence for GAS2L1 (NM_006478.3,1151-1169).
gatgactcccgttagctta

SEQ ID NO: 306284 - DNA, 19 bp, Homo sapiens
  siRNA target sequence for GAS2L1 (NM_006478.3,1860-1878).
cctgactctgcctattgtt

SEQ ID NO: 306285 - DNA, 19 bp, Homo sapiens
  siRNA target sequence for LOC283431 (NM_174942.1,229-247).
gcagcctgcaattcaagta

SEQ ID NO: 306286 - DNA, 19 bp, Homo sapiens
  siRNA target sequence for LOC283431 (NM_174942.1,230-248).
cagcctgcaattcaagtat

SEQ ID NO: 306287 - DNA, 19 bp, Homo sapiens
  siRNA target sequence for LOC283431 (NM_174942.1,303-321).
gaccaggattggctaatgt

SEQ ID NO: 306288 - DNA, 19 bp, Homo sapiens
  siRNA target sequence for LOC283431 (NM_174942.1,309-327).
gattggctaatgtttgtca

SEQ ID NO: 306289 - DNA, 19 bp, Homo sapiens
  siRNA target sequence for LOC283431 (NM_174942.1,351-369).
ggcatgaagccactttgtt

SEQ ID NO: 306290 - DNA, 19 bp, Homo sapiens
  siRNA target sequence for LOC283431 (NM_174942.1,377-395).
caagaagatctgtcaatct

SEQ ID NO: 306291 - DNA, 19 bp, Homo sapiens
  siRNA target sequence for LOC283431 (NM_174942.1,402-420).
ctggtttattaggtattaa

SEQ ID NO: 306292 - DNA, 19 bp, Homo sapiens
  siRNA target sequence for LOC283431 (NM_174942.1,442-460).
ggaagaacttgataatgga

SEQ ID NO: 306293 - DNA, 19 bp, Homo sapiens
  siRNA target sequence for LOC283431 (NM_174942.1,452-470).
gataatggagtactattat

SEQ ID NO: 306294 - DNA, 19 bp, Homo sapiens
  siRNA target sequence for LOC283431 (NM_174942.1,471-489).
gtcaactgattgatgttct

SEQ ID NO: 306295 - DNA, 19 bp, Homo sapiens
  siRNA target sequence for LOC283431 (NM_174942.1,488-506).
cttcaaaacatggtgaaaa

SEQ ID NO: 306296 - DNA, 19 bp, Homo sapiens
  siRNA target sequence for LOC283431 (NM_174942.1,567-585).
ctgcatcaggttcattctt

SEQ ID NO: 306297 - DNA, 19 bp, Homo sapiens
  siRNA target sequence for LOC283431 (NM_174942.1,591-609).
gggacaataccgcaaactt

SEQ ID NO: 306298 - DNA, 19 bp, Homo sapiens
  siRNA target sequence for LOC283431 (NM_174942.1,641-659).
gaaacttacctctttgaat

SEQ ID NO: 306299 - DNA, 19 bp, Homo sapiens
  siRNA target sequence for LOC283431 (NM_174942.1,652-670).
ctttgaatctgaaggttta

SEQ ID NO: 306300 - DNA, 19 bp, Homo sapiens
  siRNA target sequence for LOC283431 (NM_174942.1,690-708).
gacaggtgtatctttgtct

SEQ ID NO: 306301 - DNA, 19 bp, Homo sapiens
  siRNA target sequence for LOC283431 (NM_174942.1,713-731).
gaaattggtcgaattgtgt

SEQ ID NO: 306302 - DNA, 19 bp, Homo sapiens
  siRNA target sequence for LOC283431 (NM_174942.1,719-737).
ggtcgaattgtgtcaagat

SEQ ID NO: 306303 - DNA, 19 bp, Homo sapiens
  siRNA target sequence for LOC283431 (NM_174942.1,720-738).
gtcgaattgtgtcaagata

SEQ ID NO: 306304 - DNA, 19 bp, Homo sapiens
  siRNA target sequence for LOC283431 (NM_174942.1,742-760).
ggttgagccaccagtgtta

SEQ ID NO: 306305 - DNA, 19 bp, Homo sapiens
  siRNA target sequence for LOC283431 (NM_174942.1,746-764).
gagccaccagtgttagtaa

SEQ ID NO: 306306 - DNA, 19 bp, Homo sapiens
  siRNA target sequence for LOC283431 (NM_174942.1,748-766).
gccaccagtgttagtaaaa

SEQ ID NO: 306307 - DNA, 19 bp, Homo sapiens
  siRNA target sequence for LOC283431 (NM_174942.1,750-768).
caccagtgttagtaaaact

SEQ ID NO: 306308 - DNA, 19 bp, Homo sapiens
  siRNA target sequence for LOC283431 (NM_174942.1,772-790).
gaaagaaattgagttagaa

SEQ ID NO: 306309 - DNA, 19 bp, Homo sapiens
  siRNA target sequence for LOC283431 (NM_174942.1,821-839).
gattccatcagcattccaa

SEQ ID NO: 306310 - DNA, 19 bp, Homo sapiens
  siRNA target sequence for LOC283431 (NM_174942.1,890-908).
gaggaccctccttgtagtt

SEQ ID NO: 306311 - DNA, 19 bp, Homo sapiens
  siRNA target sequence for LOC283431 (NM_174942.1,892-910).
ggaccctccttgtagttgt

SEQ ID NO: 306312 - DNA, 19 bp, Homo sapiens
  siRNA target sequence for LOC283431 (NM_174942.1,893-911).
gaccctccttgtagttgtt

SEQ ID NO: 306313 - DNA, 19 bp, Homo sapiens
  siRNA target sequence for LOC283431 (NM_174942.1,903-921).
gtagttgttctcatcgatt

SEQ ID NO: 306314 - DNA, 19 bp, Homo sapiens
  siRNA target sequence for LOC283431 (NM_174942.1,909-927).
gttctcatcgattttctat

SEQ ID NO: 306315 - DNA, 19 bp, Homo sapiens
  siRNA target sequence for LOC283431 (NM_174942.1,914-932).
catcgattttctattgagt

SEQ ID NO: 306316 - DNA, 19 bp, Homo sapiens
  siRNA target sequence for LOC283431 (NM_174942.1,949-967).
gtaccgactaggggataaa

SEQ ID NO: 306317 - DNA, 19 bp, Homo sapiens
  siRNA target sequence for LOC283431 (NM_174942.1,952-970).
ccgactaggggataaaata

SEQ ID NO: 306318 - DNA, 19 bp, Homo sapiens
  siRNA target sequence for LOC283431 (NM_174942.1,954-972).
gactaggggataaaatact

SEQ ID NO: 306319 - DNA, 19 bp, Homo sapiens
  siRNA target sequence for LOC283431 (NM_174942.1,1026-1044).
gggatactcttcaaggatt

SEQ ID NO: 306320 - DNA, 19 bp, Homo sapiens
  siRNA target sequence for LOC283431 (NM_174942.1,1027-1045).
ggatactcttcaaggattt

SEQ ID NO: 306321 - DNA, 19 bp, Homo sapiens
  siRNA target sequence for LOC283431 (NM_174942.1,1119-1137).
gagtttctaatgaaagtgt

SEQ ID NO: 306322 - DNA, 19 bp, Homo sapiens
  siRNA target sequence for LOC283431 (NM_174942.1,1223-1241).
cccagcgtgccagttagta

SEQ ID NO: 306323 - DNA, 19 bp, Homo sapiens
  siRNA target sequence for LOC283431 (NM_174942.1,1224-1242).
ccagcgtgccagttagtat

SEQ ID NO: 306324 - DNA, 19 bp, Homo sapiens
  siRNA target sequence for LOC283431 (NM_174942.1,1225-1243).
cagcgtgccagttagtatt

SEQ ID NO: 306325 - DNA, 19 bp, Homo sapiens
  siRNA target sequence for LOC283431 (NM_174942.1,1228-1246).
cgtgccagttagtattcca

SEQ ID NO: 306326 - DNA, 19 bp, Homo sapiens
  siRNA target sequence for LOC283431 (NM_174942.1,1323-1341).
ctatgtcagtccgttctaa

SEQ ID NO: 306327 - DNA, 19 bp, Homo sapiens
  siRNA target sequence for LOC283431 (NM_174942.1,1334-1352).
cgttctaaattgccaaatt

SEQ ID NO: 306328 - DNA, 19 bp, Homo sapiens
  siRNA target sequence for LOC283431 (NM_174942.1,1370-1388).
catcccaagctcaagtctt

SEQ ID NO: 306329 - DNA, 19 bp, Homo sapiens
  siRNA target sequence for LOC283431 (NM_174942.1,1373-1391).
cccaagctcaagtcttcaa

SEQ ID NO: 306330 - DNA, 19 bp, Homo sapiens
  siRNA target sequence for LOC283431 (NM_174942.1,1386-1404).
cttcaaaaggcataacgaa

SEQ ID NO: 306331 - DNA, 19 bp, Homo sapiens
  siRNA target sequence for LOC283431 (NM_174942.1,1415-1433).
gctccttcaaacaatgcat

SEQ ID NO: 306332 - DNA, 19 bp, Homo sapiens
  siRNA target sequence for LOC283431 (NM_174942.1,1449-1467).
cattaaatccagtaggtaa

SEQ ID NO: 306333 - DNA, 19 bp, Homo sapiens
  siRNA target sequence for LOC283431 (NM_174942.1,1516-1534).
gtcaccgagaaaatgtatt

SEQ ID NO: 306334 - DNA, 19 bp, Homo sapiens
  siRNA target sequence for LOC283431 (NM_174942.1,1520-1538).
ccgagaaaatgtatttcat

SEQ ID NO: 306335 - DNA, 19 bp, Homo sapiens
  siRNA target sequence for LOC283431 (NM_174942.1,1589-1607).
ctgcccgagtccacacttt

SEQ ID NO: 306336 - DNA, 19 bp, Homo sapiens
  siRNA target sequence for LOC283431 (NM_174942.1,1632-1650).
ctcaacctaagtatttgaa

SEQ ID NO: 306337 - DNA, 19 bp, Homo sapiens
  siRNA target sequence for LOC283431 (NM_174942.1,1637-1655).
cctaagtatttgaaacata

SEQ ID NO: 306338 - DNA, 19 bp, Homo sapiens
  siRNA target sequence for LOC283431 (NM_174942.1,1671-1689).
gagataatgcagtatctca

SEQ ID NO: 306339 - DNA, 19 bp, Homo sapiens
  siRNA target sequence for LOC283431 (NM_174942.1,1729-1747).
gctgcctaaagcaaatata

SEQ ID NO: 306340 - DNA, 19 bp, Homo sapiens
  siRNA target sequence for LOC283431 (NM_174942.1,1732-1750).
gcctaaagcaaatatacct

SEQ ID NO: 306341 - DNA, 19 bp, Homo sapiens
  siRNA target sequence for LOC283431 (NM_174942.1,1748-1766).
cctgtaagacctaaacctt

SEQ ID NO: 306342 - DNA, 19 bp, Homo sapiens
  siRNA target sequence for LOC283431 (NM_174942.1,1873-1891).
cccagcacagaaacttaaa

SEQ ID NO: 306343 - DNA, 19 bp, Homo sapiens
  siRNA target sequence for LOC283431 (NM_174942.1,1987-2005).
caaaaagcagcctcagaat

SEQ ID NO: 306344 - DNA, 19 bp, Homo sapiens
  siRNA target sequence for LOC283431 (NM_174942.1,2137-2155).
gagccagcattcaactaaa

SEQ ID NO: 306345 - DNA, 19 bp, Homo sapiens
  siRNA target sequence for LOC283431 (NM_174942.1,2199-2217).
caccctcatctgttaagga

SEQ ID NO: 306346 - DNA, 19 bp, Homo sapiens
  siRNA target sequence for PPP1R15A (NM_014330.2,554-572).
ctgaagcctggggactttt

SEQ ID NO: 306347 - DNA, 19 bp, Homo sapiens
  siRNA target sequence for PPP1R15A (NM_014330.2,689-707).
cactgcaaggttctgataa

SEQ ID NO: 306348 - DNA, 19 bp, Homo sapiens
  siRNA target sequence for PPP1R15A (NM_014330.2,751-769).
gaggagggagttaacaagt

SEQ ID NO: 306349 - DNA, 19 bp, Homo sapiens
  siRNA target sequence for PPP1R15A (NM_014330.2,754-772).
gagggagttaacaagttct

SEQ ID NO: 306350 - DNA, 19 bp, Homo sapiens
  siRNA target sequence for PPP1R15A (NM_014330.2,933-951).
cacggaggataaaagaaca

SEQ ID NO: 306351 - DNA, 19 bp, Homo sapiens
  siRNA target sequence for PPP1R15A (NM_014330.2,1379-1397).
ctgctacaggtgtcttctt

SEQ ID NO: 306352 - DNA, 19 bp, Homo sapiens
  siRNA target sequence for PPP1R15A (NM_014330.2,1381-1399).
gctacaggtgtcttcttga

SEQ ID NO: 306353 - DNA, 19 bp, Homo sapiens
  siRNA target sequence for PPP1R15A (NM_014330.2,1382-1400).
ctacaggtgtcttcttgaa

SEQ ID NO: 306354 - DNA, 19 bp, Homo sapiens
  siRNA target sequence for PPP1R15A (NM_014330.2,1462-1480).
ggatcagccgaggatgaaa

SEQ ID NO: 306355 - DNA, 19 bp, Homo sapiens
  siRNA target sequence for PPP1R15A (NM_014330.2,1510-1528).
cctgcaagtgctttcttga

SEQ ID NO: 306356 - DNA, 19 bp, Homo sapiens
  siRNA target sequence for PPP1R15A (NM_014330.2,1677-1695).
caggggctggggatatcga

SEQ ID NO: 306357 - DNA, 19 bp, Homo sapiens
  siRNA target sequence for PPP1R15A (NM_014330.2,1761-1779).
ccgagtggccatctatgta

SEQ ID NO: 306358 - DNA, 19 bp, Homo sapiens
  siRNA target sequence for REPRIMO (NM_019845.1,384-402).
cgagcgtagcctgtacata

SEQ ID NO: 306359 - DNA, 19 bp, Homo sapiens
  siRNA target sequence for REPRIMO (NM_019845.1,385-403).
gagcgtagcctgtacataa

SEQ ID NO: 306360 - DNA, 19 bp, Homo sapiens
  siRNA target sequence for SESN1 (NM_014454.1,45-63).
ggactctgcagcagagatt

SEQ ID NO: 306361 - DNA, 19 bp, Homo sapiens
  siRNA target sequence for SESN1 (NM_014454.1,126-144).
cttcgttcggtgaaagaaa

SEQ ID NO: 306362 - DNA, 19 bp, Homo sapiens
  siRNA target sequence for SESN1 (NM_014454.1,182-200).
gtcttcggatgggttgaat

SEQ ID NO: 306363 - DNA, 19 bp, Homo sapiens
  siRNA target sequence for SESN1 (NM_014454.1,184-202).
cttcggatgggttgaataa

SEQ ID NO: 306364 - DNA, 19 bp, Homo sapiens
  siRNA target sequence for SESN1 (NM_014454.1,187-205).
cggatgggttgaataagct

SEQ ID NO: 306365 - DNA, 19 bp, Homo sapiens
  siRNA target sequence for SESN1 (NM_014454.1,188-206).
ggatgggttgaataagcta

SEQ ID NO: 306366 - DNA, 19 bp, Homo sapiens
  siRNA target sequence for SESN1 (NM_014454.1,213-231).
catctgcttatgctttcta

SEQ ID NO: 306367 - DNA, 19 bp, Homo sapiens
  siRNA target sequence for SESN1 (NM_014454.1,233-251).
gaggtgtcccttcaaagat

SEQ ID NO: 306368 - DNA, 19 bp, Homo sapiens
  siRNA target sequence for SESN1 (NM_014454.1,324-342).
cagggaccaagcagattca

SEQ ID NO: 306369 - DNA, 19 bp, Homo sapiens
  siRNA target sequence for SESN1 (NM_014454.1,381-399).
gcacagatgcatgctttat

SEQ ID NO: 306370 - DNA, 19 bp, Homo sapiens
  siRNA target sequence for SESN1 (NM_014454.1,417-435).
gctttgggccgtttggata

SEQ ID NO: 306371 - DNA, 19 bp, Homo sapiens
  siRNA target sequence for SESN1 (NM_014454.1,422-440).
gggccgtttggataacatt

SEQ ID NO: 306372 - DNA, 19 bp, Homo sapiens
  siRNA target sequence for SESN1 (NM_014454.1,423-441).
ggccgtttggataacatta

SEQ ID NO: 306373 - DNA, 19 bp, Homo sapiens
  siRNA target sequence for SESN1 (NM_014454.1,426-444).
cgtttggataacattacgt

SEQ ID NO: 306374 - DNA, 19 bp, Homo sapiens
  siRNA target sequence for SESN1 (NM_014454.1,432-450).
gataacattacgttagtga

SEQ ID NO: 306375 - DNA, 19 bp, Homo sapiens
  siRNA target sequence for SESN1 (NM_014454.1,461-479).
cccacaatatttagaaagt

SEQ ID NO: 306376 - DNA, 19 bp, Homo sapiens
  siRNA target sequence for SESN1 (NM_014454.1,517-535).
ggccgttacccctacatta

SEQ ID NO: 306377 - DNA, 19 bp, Homo sapiens
  siRNA target sequence for SESN1 (NM_014454.1,518-536).
gccgttacccctacattat

SEQ ID NO: 306378 - DNA, 19 bp, Homo sapiens
  siRNA target sequence for SESN1 (NM_014454.1,537-555).
cgtcactacattggaataa

SEQ ID NO: 306379 - DNA, 19 bp, Homo sapiens
  siRNA target sequence for SESN1 (NM_014454.1,538-556).
gtcactacattggaataat

SEQ ID NO: 306380 - DNA, 19 bp, Homo sapiens
  siRNA target sequence for SESN1 (NM_014454.1,573-591).
cagtgctcctacttagtga

SEQ ID NO: 306381 - DNA, 19 bp, Homo sapiens
  siRNA target sequence for SESN1 (NM_014454.1,632-650).
caagtggctcaatggttta

SEQ ID NO: 306382 - DNA, 19 bp, Homo sapiens
  siRNA target sequence for SESN1 (NM_014454.1,637-655).
ggctcaatggtttagagaa

SEQ ID NO: 306383 - DNA, 19 bp, Homo sapiens
  siRNA target sequence for SESN1 (NM_014454.1,638-656).
gctcaatggtttagagaat

SEQ ID NO: 306384 - DNA, 19 bp, Homo sapiens
  siRNA target sequence for SESN1 (NM_014454.1,704-722).
ccatagaccttggcttatt

SEQ ID NO: 306385 - DNA, 19 bp, Homo sapiens
  siRNA target sequence for SESN1 (NM_014454.1,769-787).
ggtcccttgcggaattggt

SEQ ID NO: 306386 - DNA, 19 bp, Homo sapiens
  siRNA target sequence for SESN1 (NM_014454.1,816-834).
cattctcttgcctcattca

SEQ ID NO: 306387 - DNA, 19 bp, Homo sapiens
  siRNA target sequence for SESN1 (NM_014454.1,847-865).
gaatcagtccagaaattca

SEQ ID NO: 306388 - DNA, 19 bp, Homo sapiens
  siRNA target sequence for SESN1 (NM_014454.1,851-869).
cagtccagaaattcattgt

SEQ ID NO: 306389 - DNA, 19 bp, Homo sapiens
  siRNA target sequence for SESN1 (NM_014454.1,889-907).
gacctccttctgttagcaa

SEQ ID NO: 306390 - DNA, 19 bp, Homo sapiens
  siRNA target sequence for SESN1 (NM_014454.1,894-912).
ccttctgttagcaactact

SEQ ID NO: 306391 - DNA, 19 bp, Homo sapiens
  siRNA target sequence for SESN1 (NM_014454.1,908-926).
ctactgcatctgtgacatt

SEQ ID NO: 306392 - DNA, 19 bp, Homo sapiens
  siRNA target sequence for SESN1 (NM_014454.1,959-977).
ggtcaactcagcagaaaat

SEQ ID NO: 306393 - DNA, 19 bp, Homo sapiens
  siRNA target sequence for SESN1 (NM_014454.1,1040-1058).
ggaatgtcgagatgaagaa

SEQ ID NO: 306394 - DNA, 19 bp, Homo sapiens
  siRNA target sequence for SESN1 (NM_014454.1,1076-1094).
gatggcttcacgttttgaa

SEQ ID NO: 306395 - DNA, 19 bp, Homo sapiens
  siRNA target sequence for SESN1 (NM_014454.1,1115-1133).
gtttgtcttctcttcagat

SEQ ID NO: 306396 - DNA, 19 bp, Homo sapiens
  siRNA target sequence for SESN1 (NM_014454.1,1159-1177).
ctgtatctcgtcattttga

SEQ ID NO: 306397 - DNA, 19 bp, Homo sapiens
  siRNA target sequence for SESN1 (NM_014454.1,1167-1185).
cgtcattttgaggatacta

SEQ ID NO: 306398 - DNA, 19 bp, Homo sapiens
  siRNA target sequence for SESN1 (NM_014454.1,1183-1201).
ctagttatggctataaaga

SEQ ID NO: 306399 - DNA, 19 bp, Homo sapiens
  siRNA target sequence for SESN1 (NM_014454.1,1186-1204).
gttatggctataaagattt

SEQ ID NO: 306400 - DNA, 19 bp, Homo sapiens
  siRNA target sequence for SESN1 (NM_014454.1,1216-1234).
ggatgcatgttccaacatt

SEQ ID NO: 306401 - DNA, 19 bp, Homo sapiens
  siRNA target sequence for SESN1 (NM_014454.1,1220-1238).
gcatgttccaacatttcgt

SEQ ID NO: 306402 - DNA, 19 bp, Homo sapiens
  siRNA target sequence for SESN1 (NM_014454.1,1236-1254).
cgtgtccaggactattgct

SEQ ID NO: 306403 - DNA, 19 bp, Homo sapiens
  siRNA target sequence for SESN1 (NM_014454.1,1256-1274).
ggaagatcatggttattct

SEQ ID NO: 306404 - DNA, 19 bp, Homo sapiens
  siRNA target sequence for SESN1 (NM_014454.1,1257-1275).
gaagatcatggttattctt

SEQ ID NO: 306405 - DNA, 19 bp, Homo sapiens
  siRNA target sequence for SESN1 (NM_014454.1,1263-1281).
catggttattctttggtaa

SEQ ID NO: 306406 - DNA, 19 bp, Homo sapiens
  siRNA target sequence for SESN1 (NM_014454.1,1277-1295).
ggtaaatcgcctttatcca

SEQ ID NO: 306407 - DNA, 19 bp, Homo sapiens
  siRNA target sequence for SESN1 (NM_014454.1,1328-1346).
cattgcttacaatcttact

SEQ ID NO: 306408 - DNA, 19 bp, Homo sapiens
  siRNA target sequence for SESN1 (NM_014454.1,1337-1355).
caatcttacttataataca

SEQ ID NO: 306409 - DNA, 19 bp, Homo sapiens
  siRNA target sequence for SESN1 (NM_014454.1,1360-1378).
caatgcacaaagatgttga

SEQ ID NO: 306410 - DNA, 19 bp, Homo sapiens
  siRNA target sequence for SESN1 (NM_014454.1,1374-1392).
gttgatacctcaatgctta

SEQ ID NO: 306411 - DNA, 19 bp, Homo sapiens
  siRNA target sequence for SESN1 (NM_014454.1,1389-1407).
cttagacgggcaatttgga

SEQ ID NO: 306412 - DNA, 19 bp, Homo sapiens
  siRNA target sequence for SESN1 (NM_014454.1,1399-1417).
caatttggaactatattca

SEQ ID NO: 306413 - DNA, 19 bp, Homo sapiens
  siRNA target sequence for SESN1 (NM_014454.1,1470-1488).
ctattggatcgtagcttta

SEQ ID NO: 306414 - DNA, 19 bp, Homo sapiens
  siRNA target sequence for SESN1 (NM_014454.1,1475-1493).
ggatcgtagctttaaagtt

SEQ ID NO: 306415 - DNA, 19 bp, Homo sapiens
  siRNA target sequence for SESN1 (NM_014454.1,1476-1494).
gatcgtagctttaaagttt

SEQ ID NO: 306416 - DNA, 19 bp, Homo sapiens
  siRNA target sequence for SESN1 (NM_014454.1,1571-1589).
ctctgagaaggttcatgtt

SEQ ID NO: 306417 - DNA, 19 bp, Homo sapiens
  siRNA target sequence for SESN1 (NM_014454.1,1573-1591).
ctgagaaggttcatgttaa

SEQ ID NO: 306418 - DNA, 19 bp, Homo sapiens
  siRNA target sequence for SESN1 (NM_014454.1,1642-1660).
gagccattacccgctatat

SEQ ID NO: 306419 - DNA, 19 bp, Homo sapiens
  siRNA target sequence for SESN2 (NM_031459.3,679-697).
gctcctggcgccactacat

SEQ ID NO: 306420 - DNA, 19 bp, Homo sapiens
  siRNA target sequence for SESN2 (NM_031459.3,680-698).
ctcctggcgccactacatt

SEQ ID NO: 306421 - DNA, 19 bp, Homo sapiens
  siRNA target sequence for SESN2 (NM_031459.3,922-940).
ccctggccgagctcattca

SEQ ID NO: 306422 - DNA, 19 bp, Homo sapiens
  siRNA target sequence for SESN2 (NM_031459.3,1078-1096).
gcagggacccgttgaacaa

SEQ ID NO: 306423 - DNA, 19 bp, Homo sapiens
  siRNA target sequence for SESN2 (NM_031459.3,1468-1486).
gcctcacctacaataccat

SEQ ID NO: 306424 - DNA, 19 bp, Homo sapiens
  siRNA target sequence for SESN2 (NM_031459.3,1549-1567).
gcgtctttggcatcagata

SEQ ID NO: 306425 - DNA, 19 bp, Homo sapiens
  siRNA target sequence for SESN2 (NM_031459.3,1550-1568).
cgtctttggcatcagatat

SEQ ID NO: 306426 - DNA, 19 bp, Homo sapiens
  siRNA target sequence for SESN2 (NM_031459.3,1608-1626).
cggaacctcaaggtctata

SEQ ID NO: 306427 - DNA, 19 bp, Homo sapiens
  siRNA target sequence for SESN2 (NM_031459.3,1657-1675).
ccacccgaagaatgtacaa

SEQ ID NO: 306428 - DNA, 19 bp, Homo sapiens
  siRNA target sequence for SESN3 (NM_144665.2,383-401).
cagtggatgaacgtactaa

SEQ ID NO: 306429 - DNA, 19 bp, Homo sapiens
  siRNA target sequence for SESN3 (NM_144665.2,385-403).
gtggatgaacgtactaact

SEQ ID NO: 306430 - DNA, 19 bp, Homo sapiens
  siRNA target sequence for SESN3 (NM_144665.2,387-405).
ggatgaacgtactaacttt

SEQ ID NO: 306431 - DNA, 19 bp, Homo sapiens
  siRNA target sequence for SESN3 (NM_144665.2,406-424).
cttgtggaagaatactcta

SEQ ID NO: 306432 - DNA, 19 bp, Homo sapiens
  siRNA target sequence for SESN3 (NM_144665.2,409-427).
gtggaagaatactctacat

SEQ ID NO: 306433 - DNA, 19 bp, Homo sapiens
  siRNA target sequence for SESN3 (NM_144665.2,428-446).
ccggtcgtctggacaacat

SEQ ID NO: 306434 - DNA, 19 bp, Homo sapiens
  siRNA target sequence for SESN3 (NM_144665.2,449-467).
cacaggtcatgagtttaca

SEQ ID NO: 306435 - DNA, 19 bp, Homo sapiens
  siRNA target sequence for SESN3 (NM_144665.2,451-469).
caggtcatgagtttacaca

SEQ ID NO: 306436 - DNA, 19 bp, Homo sapiens
  siRNA target sequence for SESN3 (NM_144665.2,493-511).
cggagccagttttacatgt

SEQ ID NO: 306437 - DNA, 19 bp, Homo sapiens
  siRNA target sequence for SESN3 (NM_144665.2,535-553).
ctaccatacaggcactata

SEQ ID NO: 306438 - DNA, 19 bp, Homo sapiens
  siRNA target sequence for SESN3 (NM_144665.2,543-561).
caggcactatattgcaata

SEQ ID NO: 306439 - DNA, 19 bp, Homo sapiens
  siRNA target sequence for SESN3 (NM_144665.2,545-563).
ggcactatattgcaataat

SEQ ID NO: 306440 - DNA, 19 bp, Homo sapiens
  siRNA target sequence for SESN3 (NM_144665.2,571-589).
gctagacatcagtgttctt

SEQ ID NO: 306441 - DNA, 19 bp, Homo sapiens
  siRNA target sequence for SESN3 (NM_144665.2,572-590).
ctagacatcagtgttctta

SEQ ID NO: 306442 - DNA, 19 bp, Homo sapiens
  siRNA target sequence for SESN3 (NM_144665.2,603-621).
gcatgtggatgaattttta

SEQ ID NO: 306443 - DNA, 19 bp, Homo sapiens
  siRNA target sequence for SESN3 (NM_144665.2,637-655).
gctgagtggttgaatggtt

SEQ ID NO: 306444 - DNA, 19 bp, Homo sapiens
  siRNA target sequence for SESN3 (NM_144665.2,644-662).
ggttgaatggtttggaata

SEQ ID NO: 306445 - DNA, 19 bp, Homo sapiens
  siRNA target sequence for SESN3 (NM_144665.2,715-733).
cgaccttggctgatcacaa

SEQ ID NO: 306446 - DNA, 19 bp, Homo sapiens
  siRNA target sequence for SESN3 (NM_144665.2,716-734).
gaccttggctgatcacaaa

SEQ ID NO: 306447 - DNA, 19 bp, Homo sapiens
  siRNA target sequence for SESN3 (NM_144665.2,831-849).
ggcaagctttgtttttggt

SEQ ID NO: 306448 - DNA, 19 bp, Homo sapiens
  siRNA target sequence for SESN3 (NM_144665.2,890-908).
gattcaggctaatatcagt

SEQ ID NO: 306449 - DNA, 19 bp, Homo sapiens
  siRNA target sequence for SESN3 (NM_144665.2,896-914).
ggctaatatcagtcaacaa

SEQ ID NO: 306450 - DNA, 19 bp, Homo sapiens
  siRNA target sequence for SESN3 (NM_144665.2,920-938).
gcgtttgtgatcttgctaa

SEQ ID NO: 306451 - DNA, 19 bp, Homo sapiens
  siRNA target sequence for SESN3 (NM_144665.2,921-939).
cgtttgtgatcttgctaat

SEQ ID NO: 306452 - DNA, 19 bp, Homo sapiens
  siRNA target sequence for SESN3 (NM_144665.2,984-1002).
gattgtggattctctaagt

SEQ ID NO: 306453 - DNA, 19 bp, Homo sapiens
  siRNA target sequence for SESN3 (NM_144665.2,1014-1032).
cttaatggaaaggatgaaa

SEQ ID NO: 306454 - DNA, 19 bp, Homo sapiens
  siRNA target sequence for SESN3 (NM_144665.2,1082-1100).
gcactcgttttgaaaagga

SEQ ID NO: 306455 - DNA, 19 bp, Homo sapiens
  siRNA target sequence for SESN3 (NM_144665.2,1167-1185).
ggatgacatgattataaca

SEQ ID NO: 306456 - DNA, 19 bp, Homo sapiens
  siRNA target sequence for SESN3 (NM_144665.2,1187-1205).
ctgatgtctctcgatatat

SEQ ID NO: 306457 - DNA, 19 bp, Homo sapiens
  siRNA target sequence for SESN3 (NM_144665.2,1281-1299).
ctatacctgggaaaatcat

SEQ ID NO: 306458 - DNA, 19 bp, Homo sapiens
  siRNA target sequence for SESN3 (NM_144665.2,1307-1325).
ccctggtgaacagacttta

SEQ ID NO: 306459 - DNA, 19 bp, Homo sapiens
  siRNA target sequence for SESN3 (NM_144665.2,1332-1350).
cattggacatcttcttgat

SEQ ID NO: 306460 - DNA, 19 bp, Homo sapiens
  siRNA target sequence for SESN3 (NM_144665.2,1356-1374).
gtttcggatggtctacaat

SEQ ID NO: 306461 - DNA, 19 bp, Homo sapiens
  siRNA target sequence for SESN3 (NM_144665.2,1360-1378).
cggatggtctacaatctca

SEQ ID NO: 306462 - DNA, 19 bp, Homo sapiens
  siRNA target sequence for SESN3 (NM_144665.2,1365-1383).
ggtctacaatctcacatat

SEQ ID NO: 306463 - DNA, 19 bp, Homo sapiens
  siRNA target sequence for SESN3 (NM_144665.2,1366-1384).
gtctacaatctcacatata

SEQ ID NO: 306464 - DNA, 19 bp, Homo sapiens
  siRNA target sequence for SESN3 (NM_144665.2,1422-1440).
gctgcgcagagctttattt

SEQ ID NO: 306465 - DNA, 19 bp, Homo sapiens
  siRNA target sequence for SESN3 (NM_144665.2,1423-1441).
ctgcgcagagctttattta

SEQ ID NO: 306466 - DNA, 19 bp, Homo sapiens
  siRNA target sequence for SESN3 (NM_144665.2,1510-1528).
gaaagaagcctgaaggttt

SEQ ID NO: 306467 - DNA, 19 bp, Homo sapiens
  siRNA target sequence for SESN3 (NM_144665.2,1514-1532).
gaagcctgaaggtttacat

SEQ ID NO: 306468 - DNA, 19 bp, Homo sapiens
  siRNA target sequence for SESN3 (NM_144665.2,1517-1535).
gcctgaaggtttacattaa

SEQ ID NO: 306469 - DNA, 19 bp, Homo sapiens
  siRNA target sequence for SESN3 (NM_144665.2,1521-1539).
gaaggtttacattaagaca

SEQ ID NO: 306470 - DNA, 19 bp, Homo sapiens
  siRNA target sequence for SESN3 (NM_144665.2,1548-1566).
ctatcctgagagaactaca

SEQ ID NO: 306471 - DNA, 19 bp, Homo sapiens
  siRNA target sequence for SESN3 (NM_144665.2,1562-1580).
ctacaaaacgcatgtatga

SEQ ID NO: 306472 - DNA, 19 bp, Homo sapiens
  siRNA target sequence for SESN3 (NM_144665.2,1570-1588).
cgcatgtatgatagttact

SEQ ID NO: 306473 - DNA, 19 bp, Homo sapiens
  siRNA target sequence for SESN3 (NM_144665.2,1583-1601).
gttactggcggcagttcaa

SEQ ID NO: 306474 - DNA, 19 bp, Homo sapiens
  siRNA target sequence for SESN3 (NM_144665.2,1607-1625).
cagaaaaagttcatgtcaa

SEQ ID NO: 306475 - DNA, 19 bp, Homo sapiens
  siRNA target sequence for SESN3 (NM_144665.2,1615-1633).
gttcatgtcaatctacttt

SEQ ID NO: 306476 - DNA, 19 bp, Homo sapiens
  siRNA target sequence for SESN3 (NM_144665.2,1618-1636).
catgtcaatctacttttaa

SEQ ID NO: 306477 - DNA, 19 bp, Homo sapiens
  siRNA target sequence for SESN3 (NM_144665.2,1678-1696).
gccataactcggcatttga

SEQ ID NO: 306478 - DNA, 19 bp, Homo sapiens
  siRNA target sequence for BCCIP (NM_016567.2,174-192).
cgaggaagtgaatattgaa

SEQ ID NO: 306479 - DNA, 19 bp, Homo sapiens
  siRNA target sequence for BCCIP (NM_016567.2,207-225).
cctatcagataatgattat

SEQ ID NO: 306480 - DNA, 19 bp, Homo sapiens
  siRNA target sequence for BCCIP (NM_016567.2,220-238).
gattatgacggaattaaga

SEQ ID NO: 306481 - DNA, 19 bp, Homo sapiens
  siRNA target sequence for BCCIP (NM_016567.2,273-291).
gaacactgcagaactaaca

SEQ ID NO: 306482 - DNA, 19 bp, Homo sapiens
  siRNA target sequence for BCCIP (NM_016567.2,276-294).
cactgcagaactaacagat

SEQ ID NO: 306483 - DNA, 19 bp, Homo sapiens
  siRNA target sequence for BCCIP (NM_016567.2,283-301).
gaactaacagatctcttaa

SEQ ID NO: 306484 - DNA, 19 bp, Homo sapiens
  siRNA target sequence for BCCIP (NM_016567.2,333-351).
gcaaacggatgtttcagaa

SEQ ID NO: 306485 - DNA, 19 bp, Homo sapiens
  siRNA target sequence for BCCIP (NM_016567.2,388-406).
ggtttcataagccttttaa

SEQ ID NO: 306486 - DNA, 19 bp, Homo sapiens
  siRNA target sequence for BCCIP (NM_016567.2,425-443).
gtacccagtgtgttgaaca

SEQ ID NO: 306487 - DNA, 19 bp, Homo sapiens
  siRNA target sequence for BCCIP (NM_016567.2,463-481).
cgcttctgtgagaagaact

SEQ ID NO: 306488 - DNA, 19 bp, Homo sapiens
  siRNA target sequence for BCCIP (NM_016567.2,508-526).
gacaagtttttaaatgaca

SEQ ID NO: 306489 - DNA, 19 bp, Homo sapiens
  siRNA target sequence for BCCIP (NM_016567.2,543-561).
ccttctcctaagtgaaaga

SEQ ID NO: 306490 - DNA, 19 bp, Homo sapiens
  siRNA target sequence for BCCIP (NM_016567.2,547-565).
ctcctaagtgaaagattca

SEQ ID NO: 306491 - DNA, 19 bp, Homo sapiens
  siRNA target sequence for BCCIP (NM_016567.2,549-567).
cctaagtgaaagattcatt

SEQ ID NO: 306492 - DNA, 19 bp, Homo sapiens
  siRNA target sequence for BCCIP (NM_016567.2,550-568).
ctaagtgaaagattcatta

SEQ ID NO: 306493 - DNA, 19 bp, Homo sapiens
  siRNA target sequence for BCCIP (NM_016567.2,554-572).
gtgaaagattcattaatgt

SEQ ID NO: 306494 - DNA, 19 bp, Homo sapiens
  siRNA target sequence for BCCIP (NM_016567.2,626-644).
gggcacacagaaccaataa

SEQ ID NO: 306495 - DNA, 19 bp, Homo sapiens
  siRNA target sequence for BCCIP (NM_016567.2,738-756).
gaaagctgcgttaatgttt

SEQ ID NO: 306496 - DNA, 19 bp, Homo sapiens
  siRNA target sequence for BCCIP (NM_016567.2,900-918).
gaaggctggactaattcaa

SEQ ID NO: 306497 - DNA, 19 bp, Homo sapiens
  siRNA target sequence for BCCIP (NM_016567.2,903-921).
ggctggactaattcaatca

SEQ ID NO: 306498 - DNA, 19 bp, Homo sapiens
  siRNA target sequence for BCCIP (NM_016567.2,910-928).
ctaattcaatcaagatcaa

SEQ ID NO: 306499 - DNA, 19 bp, Homo sapiens
  siRNA target sequence for BCCIP (NM_016567.2,916-934).
caatcaagatcaactctaa

SEQ ID NO: 306500 - DNA, 19 bp, Homo sapiens
  siRNA target sequence for BCCIP (NM_016567.2,923-941).
gatcaactctaagtgattt

SEQ ID NO: 306501 - DNA, 19 bp, Homo sapiens
  siRNA target sequence for BCCIP (NM_016567.2,950-968).
ccttcatgactgttggaat

SEQ ID NO: 306502 - DNA, 19 bp, Homo sapiens
  siRNA target sequence for BCCIP (NM_016567.2,951-969).
cttcatgactgttggaatt

SEQ ID NO: 306503 - DNA, 19 bp, Homo sapiens
  siRNA target sequence for BCCIP (NM_016567.2,954-972).
catgactgttggaattgct

SEQ ID NO: 306504 - DNA, 19 bp, Homo sapiens
  siRNA target sequence for BCCIP (NM_078468.1,791-809).
caattctcaagttcaacta

SEQ ID NO: 306505 - DNA, 19 bp, Homo sapiens
  siRNA target sequence for BCCIP (NM_078468.1,854-872).
cttttgatgacgtaccaat

SEQ ID NO: 306506 - DNA, 19 bp, Homo sapiens
  siRNA target sequence for BCCIP (NM_078468.1,878-896).
ccttgcgaactgtgatgtt

SEQ ID NO: 306507 - DNA, 19 bp, Homo sapiens
  siRNA target sequence for BCCIP (NM_078468.1,879-897).
cttgcgaactgtgatgtta

SEQ ID NO: 306508 - DNA, 19 bp, Homo sapiens
  siRNA target sequence for BCCIP (NM_078468.1,882-900).
gcgaactgtgatgttaatt

SEQ ID NO: 306509 - DNA, 19 bp, Homo sapiens
  siRNA target sequence for BCCIP (NM_078468.1,905-923).
gcgacaagatgaacgaaat

SEQ ID NO: 306510 - DNA, 19 bp, Homo sapiens
  siRNA target sequence for BCCIP (NM_078469.1,866-884).
ggtctgttcccccagtatt

SEQ ID NO: 306511 - DNA, 19 bp, Homo sapiens
  siRNA target sequence for BCCIP (NM_078469.1,867-885).
gtctgttcccccagtatta

SEQ ID NO: 306512 - DNA, 19 bp, Homo sapiens
  siRNA target sequence for BCCIP (NM_078469.1,869-887).
ctgttcccccagtattaga

SEQ ID NO: 306513 - DNA, 19 bp, Homo sapiens
  siRNA target sequence for BCCIP (NM_078469.1,871-889).
gttcccccagtattagaat

SEQ ID NO: 306514 - DNA, 19 bp, Homo sapiens
  siRNA target sequence for CCNA1 (NM_003914.2,137-155).
ccggctttcccgcaatcat

SEQ ID NO: 306515 - DNA, 19 bp, Homo sapiens
  siRNA target sequence for CCNA1 (NM_003914.2,140-158).
gctttcccgcaatcatgta

SEQ ID NO: 306516 - DNA, 19 bp, Homo sapiens
  siRNA target sequence for CCNA1 (NM_003914.2,245-263).
ccgtggagtctgaagcaat

SEQ ID NO: 306517 - DNA, 19 bp, Homo sapiens
  siRNA target sequence for CCNA1 (NM_003914.2,317-335).
ccgatgcttgtcagatact

SEQ ID NO: 306518 - DNA, 19 bp, Homo sapiens
  siRNA target sequence for CCNA1 (NM_003914.2,422-440).
gccaggggatcacaagaat

SEQ ID NO: 306519 - DNA, 19 bp, Homo sapiens
  siRNA target sequence for CCNA1 (NM_003914.2,432-450).
cacaagaatcaggtgttat

SEQ ID NO: 306520 - DNA, 19 bp, Homo sapiens
  siRNA target sequence for CCNA1 (NM_003914.2,520-538).
cccaagcaagggtttgaca

SEQ ID NO: 306521 - DNA, 19 bp, Homo sapiens
  siRNA target sequence for CCNA1 (NM_003914.2,678-696).
ccctatgctggtagattca

SEQ ID NO: 306522 - DNA, 19 bp, Homo sapiens
  siRNA target sequence for CCNA1 (NM_003914.2,679-697).
cctatgctggtagattcat

SEQ ID NO: 306523 - DNA, 19 bp, Homo sapiens
  siRNA target sequence for CCNA1 (NM_003914.2,705-723).
ctcccagtctgaagatata

SEQ ID NO: 306524 - DNA, 19 bp, Homo sapiens
  siRNA target sequence for CCNA1 (NM_003914.2,809-827).
gacccaaagcacactacat

SEQ ID NO: 306525 - DNA, 19 bp, Homo sapiens
  siRNA target sequence for CCNA1 (NM_003914.2,812-830).
ccaaagcacactacatgaa

SEQ ID NO: 306526 - DNA, 19 bp, Homo sapiens
  siRNA target sequence for CCNA1 (NM_003914.2,886-904).
gaggttggggaagaatata

SEQ ID NO: 306527 - DNA, 19 bp, Homo sapiens
  siRNA target sequence for CCNA1 (NM_003914.2,943-961).
ctggacaggttcctttcat

SEQ ID NO: 306528 - DNA, 19 bp, Homo sapiens
  siRNA target sequence for CCNA1 (NM_003914.2,945-963).
ggacaggttcctttcatgt

SEQ ID NO: 306529 - DNA, 19 bp, Homo sapiens
  siRNA target sequence for CCNA1 (NM_003914.2,951-969).
gttcctttcatgtatgtct

SEQ ID NO: 306530 - DNA, 19 bp, Homo sapiens
  siRNA target sequence for CCNA1 (NM_003914.2,1011-1029).
gcttttggcttcgaaatat

SEQ ID NO: 306531 - DNA, 19 bp, Homo sapiens
  siRNA target sequence for CCNA1 (NM_003914.2,1019-1037).
cttcgaaatatgaagagat

SEQ ID NO: 306532 - DNA, 19 bp, Homo sapiens
  siRNA target sequence for CCNA1 (NM_003914.2,1022-1040).
cgaaatatgaagagatata

SEQ ID NO: 306533 - DNA, 19 bp, Homo sapiens
  siRNA target sequence for CCNA1 (NM_003914.2,1046-1064).
ctgaagtagacgagtttgt

SEQ ID NO: 306534 - DNA, 19 bp, Homo sapiens
  siRNA target sequence for CCNA1 (NM_003914.2,1048-1066).
gaagtagacgagtttgtct

SEQ ID NO: 306535 - DNA, 19 bp, Homo sapiens
  siRNA target sequence for CCNA1 (NM_003914.2,1051-1069).
gtagacgagtttgtctata

SEQ ID NO: 306536 - DNA, 19 bp, Homo sapiens
  siRNA target sequence for CCNA1 (NM_003914.2,1054-1072).
gacgagtttgtctatatca

SEQ ID NO: 306537 - DNA, 19 bp, Homo sapiens
  siRNA target sequence for CCNA1 (NM_003914.2,1063-1081).
gtctatatcaccgatgata

SEQ ID NO: 306538 - DNA, 19 bp, Homo sapiens
  siRNA target sequence for CCNA1 (NM_003914.2,1071-1089).
caccgatgatacatacaca

SEQ ID NO: 306539 - DNA, 19 bp, Homo sapiens
  siRNA target sequence for CCNA1 (NM_003914.2,1073-1091).
ccgatgatacatacacaaa

SEQ ID NO: 306540 - DNA, 19 bp, Homo sapiens
  siRNA target sequence for CCNA1 (NM_003914.2,1094-1112).
gacaactgttaaaaatgga

SEQ ID NO: 306541 - DNA, 19 bp, Homo sapiens
  siRNA target sequence for CCNA1 (NM_003914.2,1125-1143).
gaaagttctagcttttgat

SEQ ID NO: 306542 - DNA, 19 bp, Homo sapiens
  siRNA target sequence for CCNA1 (NM_003914.2,1235-1253).
cagagctgagtctacttga

SEQ ID NO: 306543 - DNA, 19 bp, Homo sapiens
  siRNA target sequence for CCNA1 (NM_003914.2,1252-1270).
gaagcagatccattcttga

SEQ ID NO: 306544 - DNA, 19 bp, Homo sapiens
  siRNA target sequence for CCNA1 (NM_003914.2,1256-1274).
cagatccattcttgaaata

SEQ ID NO: 306545 - DNA, 19 bp, Homo sapiens
  siRNA target sequence for CCNA1 (NM_003914.2,1307-1325).
gcctggcaaactatactgt

SEQ ID NO: 306546 - DNA, 19 bp, Homo sapiens
  siRNA target sequence for CCNA1 (NM_003914.2,1345-1363).
gaaacccttgctgcattta

SEQ ID NO: 306547 - DNA, 19 bp, Homo sapiens
  siRNA target sequence for CCNA1 (NM_003914.2,1366-1384).
gggtattcattaagtgaaa

SEQ ID NO: 306548 - DNA, 19 bp, Homo sapiens
  siRNA target sequence for CCNA1 (NM_003914.2,1367-1385).
ggtattcattaagtgaaat

SEQ ID NO: 306549 - DNA, 19 bp, Homo sapiens
  siRNA target sequence for CCNA1 (NM_003914.2,1394-1412).
gcctgagtgagcttcataa

SEQ ID NO: 306550 - DNA, 19 bp, Homo sapiens
  siRNA target sequence for CCNA1 (NM_003914.2,1408-1426).
cataaagcgtaccttgata

SEQ ID NO: 306551 - DNA, 19 bp, Homo sapiens
  siRNA target sequence for CCNA1 (NM_003914.2,1447-1465).
gcaattagggagaagtaca

SEQ ID NO: 306552 - DNA, 19 bp, Homo sapiens
  siRNA target sequence for CCNA2 (NM_001237.2,152-170).
gctcggcgctgctagcatt

SEQ ID NO: 306553 - DNA, 19 bp, Homo sapiens
  siRNA target sequence for CCNA2 (NM_001237.2,321-339).
ggttgcaccccttaaggat

SEQ ID NO: 306554 - DNA, 19 bp, Homo sapiens
  siRNA target sequence for CCNA2 (NM_001237.2,336-354).
ggatcttcctgtaaatgat

SEQ ID NO: 306555 - DNA, 19 bp, Homo sapiens
  siRNA target sequence for CCNA2 (NM_001237.2,363-381).
caccgttcctccttggaaa

SEQ ID NO: 306556 - DNA, 19 bp, Homo sapiens
  siRNA target sequence for CCNA2 (NM_001237.2,396-414).
gcctgcgttcaccattcat

SEQ ID NO: 306557 - DNA, 19 bp, Homo sapiens
  siRNA target sequence for CCNA2 (NM_001237.2,398-416).
ctgcgttcaccattcatgt

SEQ ID NO: 306558 - DNA, 19 bp, Homo sapiens
  siRNA target sequence for CCNA2 (NM_001237.2,441-459).
gaagaagccagctgaatct

SEQ ID NO: 306559 - DNA, 19 bp, Homo sapiens
  siRNA target sequence for CCNA2 (NM_001237.2,527-545).
cattggtccctcttgatta

SEQ ID NO: 306560 - DNA, 19 bp, Homo sapiens
  siRNA target sequence for CCNA2 (NM_001237.2,531-549).
ggtccctcttgattatcca

SEQ ID NO: 306561 - DNA, 19 bp, Homo sapiens
  siRNA target sequence for CCNA2 (NM_001237.2,532-550).
gtccctcttgattatccaa

SEQ ID NO: 306562 - DNA, 19 bp, Homo sapiens
  siRNA target sequence for CCNA2 (NM_001237.2,635-653).
cagactaccatgaggatat

SEQ ID NO: 306563 - DNA, 19 bp, Homo sapiens
  siRNA target sequence for CCNA2 (NM_001237.2,649-667).
gatattcacacatacctta

SEQ ID NO: 306564 - DNA, 19 bp, Homo sapiens
  siRNA target sequence for CCNA2 (NM_001237.2,675-693).
ggaggttaaatgtaaacct

SEQ ID NO: 306565 - DNA, 19 bp, Homo sapiens
  siRNA target sequence for CCNA2 (NM_001237.2,692-710).
ctaaagtgggttacatgaa

SEQ ID NO: 306566 - DNA, 19 bp, Homo sapiens
  siRNA target sequence for CCNA2 (NM_001237.2,717-735).
gccagacatcactaacagt

SEQ ID NO: 306567 - DNA, 19 bp, Homo sapiens
  siRNA target sequence for CCNA2 (NM_001237.2,723-741).
catcactaacagtatgaga

SEQ ID NO: 306568 - DNA, 19 bp, Homo sapiens
  siRNA target sequence for CCNA2 (NM_001237.2,747-765).
cctcgtggactggttagtt

SEQ ID NO: 306569 - DNA, 19 bp, Homo sapiens
  siRNA target sequence for CCNA2 (NM_001237.2,750-768).
cgtggactggttagttgaa

SEQ ID NO: 306570 - DNA, 19 bp, Homo sapiens
  siRNA target sequence for CCNA2 (NM_001237.2,753-771).
ggactggttagttgaagta

SEQ ID NO: 306571 - DNA, 19 bp, Homo sapiens
  siRNA target sequence for CCNA2 (NM_001237.2,810-828).
ggctgtgaactacattgat

SEQ ID NO: 306572 - DNA, 19 bp, Homo sapiens
  siRNA target sequence for CCNA2 (NM_001237.2,811-829).
gctgtgaactacattgata

SEQ ID NO: 306573 - DNA, 19 bp, Homo sapiens
  siRNA target sequence for CCNA2 (NM_001237.2,891-909).
gctgttagcctcaaagttt

SEQ ID NO: 306574 - DNA, 19 bp, Homo sapiens
  siRNA target sequence for CCNA2 (NM_001237.2,924-942).
cccagaagtagcagagttt

SEQ ID NO: 306575 - DNA, 19 bp, Homo sapiens
  siRNA target sequence for CCNA2 (NM_001237.2,962-980).
cctacaccaagaaacaagt

SEQ ID NO: 306576 - DNA, 19 bp, Homo sapiens
  siRNA target sequence for CCNA2 (NM_001237.2,984-1002).
gagaatggagcatctagtt

SEQ ID NO: 306577 - DNA, 19 bp, Homo sapiens
  siRNA target sequence for CCNA2 (NM_001237.2,990-1008).
ggagcatctagttttgaaa

SEQ ID NO: 306578 - DNA, 19 bp, Homo sapiens
  siRNA target sequence for CCNA2 (NM_001237.2,1031-1049).
ctccaacagtaaatcagtt

SEQ ID NO: 306579 - DNA, 19 bp, Homo sapiens
  siRNA target sequence for CCNA2 (NM_001237.2,1077-1095).
gcctgcaaactgcaaagtt

SEQ ID NO: 306580 - DNA, 19 bp, Homo sapiens
  siRNA target sequence for CCNA2 (NM_001237.2,1079-1097).
ctgcaaactgcaaagttga

SEQ ID NO: 306581 - DNA, 19 bp, Homo sapiens
  siRNA target sequence for CCNA2 (NM_001237.2,1110-1128).
gtttttgggagaattaagt

SEQ ID NO: 306582 - DNA, 19 bp, Homo sapiens
  siRNA target sequence for CCNA2 (NM_001237.2,1118-1136).
gagaattaagtttgataga

SEQ ID NO: 306583 - DNA, 19 bp, Homo sapiens
  siRNA target sequence for CCNA2 (NM_001237.2,1141-1159).
gacccatacctcaagtatt

SEQ ID NO: 306584 - DNA, 19 bp, Homo sapiens
  siRNA target sequence for CCNA2 (NM_001237.2,1155-1173).
gtatttgccatcagttatt

SEQ ID NO: 306585 - DNA, 19 bp, Homo sapiens
  siRNA target sequence for CCNA2 (NM_001237.2,1174-1192).
gctggagctgcctttcatt

SEQ ID NO: 306586 - DNA, 19 bp, Homo sapiens
  siRNA target sequence for CCNA2 (NM_001237.2,1216-1234).
caaagctggcctgaatcat

SEQ ID NO: 306587 - DNA, 19 bp, Homo sapiens
  siRNA target sequence for CCNA2 (NM_001237.2,1220-1238).
gctggcctgaatcattaat

SEQ ID NO: 306588 - DNA, 19 bp, Homo sapiens
  siRNA target sequence for CCNA2 (NM_001237.2,1224-1242).
gcctgaatcattaatacga

SEQ ID NO: 306589 - DNA, 19 bp, Homo sapiens
  siRNA target sequence for CCNA2 (NM_001237.2,1225-1243).
cctgaatcattaatacgaa

SEQ ID NO: 306590 - DNA, 19 bp, Homo sapiens
  siRNA target sequence for CCNA2 (NM_001237.2,1226-1244).
ctgaatcattaatacgaaa

SEQ ID NO: 306591 - DNA, 19 bp, Homo sapiens
  siRNA target sequence for CCNA2 (NM_001237.2,1317-1335).
gcatgcacaacagtcaata

SEQ ID NO: 306592 - DNA, 19 bp, Homo sapiens
  siRNA target sequence for CCNA2 (NM_001237.2,1383-1401).
cccaccagagacactaaat

SEQ ID NO: 306593 - DNA, 19 bp, Homo sapiens
  siRNA target sequence for CCNA2 (NM_001237.2,1385-1403).
caccagagacactaaatct

SEQ ID NO: 306594 - DNA, 19 bp, Homo sapiens
  siRNA target sequence for CCNE2 (NM_004702.2,412-430).
gatttatgttgacacaaaa

SEQ ID NO: 306595 - DNA, 19 bp, Homo sapiens
  siRNA target sequence for CCNE2 (NM_004702.2,547-565).
cttgcagtgaagaggatat

SEQ ID NO: 306596 - DNA, 19 bp, Homo sapiens
  siRNA target sequence for CCNE2 (NM_004702.2,555-573).
gaagaggatatcttaagga

SEQ ID NO: 306597 - DNA, 19 bp, Homo sapiens
  siRNA target sequence for CCNE2 (NM_004702.2,566-584).
cttaaggatggaactcatt

SEQ ID NO: 306598 - DNA, 19 bp, Homo sapiens
  siRNA target sequence for CCNE2 (NM_004702.2,605-623).
ggaactttgtcctgtaaca

SEQ ID NO: 306599 - DNA, 19 bp, Homo sapiens
  siRNA target sequence for CCNE2 (NM_004702.2,728-746).
gcttttagatctgtgtatt

SEQ ID NO: 306600 - DNA, 19 bp, Homo sapiens
  siRNA target sequence for CCNE2 (NM_004702.2,740-758).
gtgtattctagccattgat

SEQ ID NO: 306601 - DNA, 19 bp, Homo sapiens
  siRNA target sequence for CCNE2 (NM_004702.2,750-768).
gccattgattcattagagt

SEQ ID NO: 306602 - DNA, 19 bp, Homo sapiens
  siRNA target sequence for CCNE2 (NM_004702.2,751-769).
ccattgattcattagagtt

SEQ ID NO: 306603 - DNA, 19 bp, Homo sapiens
  siRNA target sequence for CCNE2 (NM_004702.2,792-810).
gctgccttgtgccatttta

SEQ ID NO: 306604 - DNA, 19 bp, Homo sapiens
  siRNA target sequence for CCNE2 (NM_004702.2,814-832).
ccattgaagtggttaagaa

SEQ ID NO: 306605 - DNA, 19 bp, Homo sapiens
  siRNA target sequence for CCNE2 (NM_004702.2,845-863).
ggagtgggacagtatttca

SEQ ID NO: 306606 - DNA, 19 bp, Homo sapiens
  siRNA target sequence for CCNE2 (NM_004702.2,862-880).
cagaatgtgtagattggat

SEQ ID NO: 306607 - DNA, 19 bp, Homo sapiens
  siRNA target sequence for CCNE2 (NM_004702.2,878-896).
gatggtaccttttgtcaat

SEQ ID NO: 306608 - DNA, 19 bp, Homo sapiens
  siRNA target sequence for CCNE2 (NM_004702.2,881-899).
ggtaccttttgtcaatgta

SEQ ID NO: 306609 - DNA, 19 bp, Homo sapiens
  siRNA target sequence for CCNE2 (NM_004702.2,885-903).
ccttttgtcaatgtagtaa

SEQ ID NO: 306610 - DNA, 19 bp, Homo sapiens
  siRNA target sequence for CCNE2 (NM_004702.2,886-904).
cttttgtcaatgtagtaaa

SEQ ID NO: 306611 - DNA, 19 bp, Homo sapiens
  siRNA target sequence for CCNE2 (NM_004702.2,893-911).
caatgtagtaaaaagtact

SEQ ID NO: 306612 - DNA, 19 bp, Homo sapiens
  siRNA target sequence for CCNE2 (NM_004702.2,945-963).
cctatggaagacagacata

SEQ ID NO: 306613 - DNA, 19 bp, Homo sapiens
  siRNA target sequence for CCNE2 (NM_004702.2,968-986).
ccagacacatacaaactat

SEQ ID NO: 306614 - DNA, 19 bp, Homo sapiens
  siRNA target sequence for CCNE2 (NM_057735.1,117-135).
gacgaagtagccgtttaca

SEQ ID NO: 306615 - DNA, 19 bp, Homo sapiens
  siRNA target sequence for CCNE2 (NM_057735.1,213-231).
ctacccaggatgtcaaaaa

SEQ ID NO: 306616 - DNA, 19 bp, Homo sapiens
  siRNA target sequence for CCNE2 (NM_057735.1,241-259).
ggaggtcaccaagaaacat

SEQ ID NO: 306617 - DNA, 19 bp, Homo sapiens
  siRNA target sequence for CCNE2 (NM_057735.1,247-265).
caccaagaaacatcagtat

SEQ ID NO: 306618 - DNA, 19 bp, Homo sapiens
  siRNA target sequence for CCNE2 (NM_057735.1,301-319).
ggggatcagtccttgcatt

SEQ ID NO: 306619 - DNA, 19 bp, Homo sapiens
  siRNA target sequence for CCNE2 (NM_057735.1,302-320).
gggatcagtccttgcatta

SEQ ID NO: 306620 - DNA, 19 bp, Homo sapiens
  siRNA target sequence for CCNE2 (NM_057735.1,311-329).
ccttgcattatcattgaaa

SEQ ID NO: 306621 - DNA, 19 bp, Homo sapiens
  siRNA target sequence for CCNG1 (NM_004060.3,325-343).
gtctgtggtttgagactaa

SEQ ID NO: 306622 - DNA, 19 bp, Homo sapiens
  siRNA target sequence for CCNG1 (NM_004060.3,331-349).
ggtttgagactaattgagt

SEQ ID NO: 306623 - DNA, 19 bp, Homo sapiens
  siRNA target sequence for CCNG1 (NM_004060.3,358-376).
gataatggcctcagaatga

SEQ ID NO: 306624 - DNA, 19 bp, Homo sapiens
  siRNA target sequence for CCNG1 (NM_004060.3,383-401).
gactaagggactttgaagt

SEQ ID NO: 306625 - DNA, 19 bp, Homo sapiens
  siRNA target sequence for CCNG1 (NM_004060.3,546-564).
ggctgtaaaatcaatagaa

SEQ ID NO: 306626 - DNA, 19 bp, Homo sapiens
  siRNA target sequence for CCNG1 (NM_004060.3,581-599).
cattggcaactgacttgat

SEQ ID NO: 306627 - DNA, 19 bp, Homo sapiens
  siRNA target sequence for CCNG1 (NM_004060.3,594-612).
cttgatccgaataagtcaa

SEQ ID NO: 306628 - DNA, 19 bp, Homo sapiens
  siRNA target sequence for CCNG1 (NM_004060.3,597-615).
gatccgaataagtcaatat

SEQ ID NO: 306629 - DNA, 19 bp, Homo sapiens
  siRNA target sequence for CCNG1 (NM_004060.3,601-619).
cgaataagtcaatataggt

SEQ ID NO: 306630 - DNA, 19 bp, Homo sapiens
  siRNA target sequence for CCNG1 (NM_004060.3,602-620).
gaataagtcaatataggtt

SEQ ID NO: 306631 - DNA, 19 bp, Homo sapiens
  siRNA target sequence for CCNG1 (NM_004060.3,685-703).
gctactactgcctttcaat

SEQ ID NO: 306632 - DNA, 19 bp, Homo sapiens
  siRNA target sequence for CCNG1 (NM_004060.3,753-771).
gagaaatagcattaatttt

SEQ ID NO: 306633 - DNA, 19 bp, Homo sapiens
  siRNA target sequence for CCNG1 (NM_004060.3,755-773).
gaaatagcattaattttga

SEQ ID NO: 306634 - DNA, 19 bp, Homo sapiens
  siRNA target sequence for CCNG1 (NM_004060.3,762-780).
cattaattttgaaagacta

SEQ ID NO: 306635 - DNA, 19 bp, Homo sapiens
  siRNA target sequence for CCNG1 (NM_004060.3,787-805).
caactgaaggcatgtcatt

SEQ ID NO: 306636 - DNA, 19 bp, Homo sapiens
  siRNA target sequence for CCNG1 (NM_004060.3,806-824).
gcaggatcatattttctaa

SEQ ID NO: 306637 - DNA, 19 bp, Homo sapiens
  siRNA target sequence for CCNG1 (NM_004060.3,838-856).
gtgttggcattgtctatca

SEQ ID NO: 306638 - DNA, 19 bp, Homo sapiens
  siRNA target sequence for CCNG1 (NM_004060.3,840-858).
gttggcattgtctatcatt

SEQ ID NO: 306639 - DNA, 19 bp, Homo sapiens
  siRNA target sequence for CCNG1 (NM_004060.3,845-863).
cattgtctatcattgcatt

SEQ ID NO: 306640 - DNA, 19 bp, Homo sapiens
  siRNA target sequence for CCNG1 (NM_004060.3,851-869).
ctatcattgcattagagat

SEQ ID NO: 306641 - DNA, 19 bp, Homo sapiens
  siRNA target sequence for CCNG1 (NM_004060.3,879-897).
gaagtgtgtagagttaaca

SEQ ID NO: 306642 - DNA, 19 bp, Homo sapiens
  siRNA target sequence for CCNG1 (NM_004060.3,902-920).
gaatagaatgtcttcagaa

SEQ ID NO: 306643 - DNA, 19 bp, Homo sapiens
  siRNA target sequence for CCNG1 (NM_004060.3,961-979).
gagcttgtatccaaatgtt

SEQ ID NO: 306644 - DNA, 19 bp, Homo sapiens
  siRNA target sequence for CCNG1 (NM_004060.3,963-981).
gcttgtatccaaatgttta

SEQ ID NO: 306645 - DNA, 19 bp, Homo sapiens
  siRNA target sequence for CCNG1 (NM_004060.3,983-1001).
ctgaatattcatcaaataa

SEQ ID NO: 306646 - DNA, 19 bp, Homo sapiens
  siRNA target sequence for CCNG1 (NM_004060.3,1023-1041).
gaagttgaaatggattgtt

SEQ ID NO: 306647 - DNA, 19 bp, Homo sapiens
  siRNA target sequence for CCNG1 (NM_004060.3,1048-1066).
cgtactgcacggcaattga

SEQ ID NO: 306648 - DNA, 19 bp, Homo sapiens
  siRNA target sequence for CCNG1 (NM_004060.3,1049-1067).
gtactgcacggcaattgaa

SEQ ID NO: 306649 - DNA, 19 bp, Homo sapiens
  siRNA target sequence for CCNG1 (NM_004060.3,1054-1072).
gcacggcaattgaagcata

SEQ ID NO: 306650 - DNA, 19 bp, Homo sapiens
  siRNA target sequence for CCNG1 (NM_004060.3,1058-1076).
ggcaattgaagcatagcta

SEQ ID NO: 306651 - DNA, 19 bp, Homo sapiens
  siRNA target sequence for CCNG1 (NM_004060.3,1068-1086).
gcatagctactacagaata

SEQ ID NO: 306652 - DNA, 19 bp, Homo sapiens
  siRNA target sequence for CCNG1 (NM_004060.3,1073-1091).
gctactacagaataactca

SEQ ID NO: 306653 - DNA, 19 bp, Homo sapiens
  siRNA target sequence for CCNG1 (NM_004060.3,1097-1115).
caacaattcctgaaatggt

SEQ ID NO: 306654 - DNA, 19 bp, Homo sapiens
  siRNA target sequence for RGC32 (NM_014059.1,320-338).
gagtgcagattcactttat

SEQ ID NO: 306655 - DNA, 19 bp, Homo sapiens
  siRNA target sequence for RGC32 (NM_014059.1,324-342).
gcagattcactttatagga

SEQ ID NO: 306656 - DNA, 19 bp, Homo sapiens
  siRNA target sequence for RGC32 (NM_014059.1,414-432).
gtcactcctcagaaagcta

SEQ ID NO: 306657 - DNA, 19 bp, Homo sapiens
  siRNA target sequence for BUB3 (NM_004725.1,75-93).
ccggttctaacgagttcaa

SEQ ID NO: 306658 - DNA, 19 bp, Homo sapiens
  siRNA target sequence for BUB3 (NM_004725.1,280-298).
ctggagtggaggactagat

SEQ ID NO: 306659 - DNA, 19 bp, Homo sapiens
  siRNA target sequence for BUB3 (NM_004725.1,282-300).
ggagtggaggactagatca

SEQ ID NO: 306660 - DNA, 19 bp, Homo sapiens
  siRNA target sequence for BUB3 (NM_004725.1,283-301).
gagtggaggactagatcat

SEQ ID NO: 306661 - DNA, 19 bp, Homo sapiens
  siRNA target sequence for BUB3 (NM_004725.1,287-305).
ggaggactagatcatcaat

SEQ ID NO: 306662 - DNA, 19 bp, Homo sapiens
  siRNA target sequence for BUB3 (NM_004725.1,288-306).
gaggactagatcatcaatt

SEQ ID NO: 306663 - DNA, 19 bp, Homo sapiens
  siRNA target sequence for BUB3 (NM_004725.1,290-308).
ggactagatcatcaattga

SEQ ID NO: 306664 - DNA, 19 bp, Homo sapiens
  siRNA target sequence for BUB3 (NM_004725.1,291-309).
gactagatcatcaattgaa

SEQ ID NO: 306665 - DNA, 19 bp, Homo sapiens
  siRNA target sequence for BUB3 (NM_004725.1,293-311).
ctagatcatcaattgaaaa

SEQ ID NO: 306666 - DNA, 19 bp, Homo sapiens
  siRNA target sequence for BUB3 (NM_004725.1,353-371).
catgatgcccctatcagat

SEQ ID NO: 306667 - DNA, 19 bp, Homo sapiens
  siRNA target sequence for BUB3 (NM_004725.1,363-381).
ctatcagatgtgttgaata

SEQ ID NO: 306668 - DNA, 19 bp, Homo sapiens
  siRNA target sequence for BUB3 (NM_004725.1,414-432).
gttgggatcagacagttaa

SEQ ID NO: 306669 - DNA, 19 bp, Homo sapiens
  siRNA target sequence for BUB3 (NM_004725.1,417-435).
gggatcagacagttaaact

SEQ ID NO: 306670 - DNA, 19 bp, Homo sapiens
  siRNA target sequence for BUB3 (NM_004725.1,445-463).
cagaactccttgtaatgct

SEQ ID NO: 306671 - DNA, 19 bp, Homo sapiens
  siRNA target sequence for BUB3 (NM_004725.1,474-492).
ctcagcctgaaaaggtata

SEQ ID NO: 306672 - DNA, 19 bp, Homo sapiens
  siRNA target sequence for BUB3 (NM_004725.1,476-494).
cagcctgaaaaggtatata

SEQ ID NO: 306673 - DNA, 19 bp, Homo sapiens
  siRNA target sequence for BUB3 (NM_004725.1,507-525).
ctggagaccggctgattgt

SEQ ID NO: 306674 - DNA, 19 bp, Homo sapiens
  siRNA target sequence for BUB3 (NM_004725.1,591-609).
gggagtccagcctgaaata

SEQ ID NO: 306675 - DNA, 19 bp, Homo sapiens
  siRNA target sequence for BUB3 (NM_004725.1,621-639).
gcatacgagcgtttccaaa

SEQ ID NO: 306676 - DNA, 19 bp, Homo sapiens
  siRNA target sequence for BUB3 (NM_004725.1,640-658).
caagcagggttatgtatta

SEQ ID NO: 306677 - DNA, 19 bp, Homo sapiens
  siRNA target sequence for BUB3 (NM_004725.1,644-662).
cagggttatgtattaagct

SEQ ID NO: 306678 - DNA, 19 bp, Homo sapiens
  siRNA target sequence for BUB3 (NM_004725.1,674-692).
cgagtggcagttgagtatt

SEQ ID NO: 306679 - DNA, 19 bp, Homo sapiens
  siRNA target sequence for BUB3 (NM_004725.1,675-693).
gagtggcagttgagtattt

SEQ ID NO: 306680 - DNA, 19 bp, Homo sapiens
  siRNA target sequence for BUB3 (NM_004725.1,766-784).
gcagatttacccagtcaat

SEQ ID NO: 306681 - DNA, 19 bp, Homo sapiens
  siRNA target sequence for BUB3 (NM_004725.1,775-793).
cccagtcaatgccatttct

SEQ ID NO: 306682 - DNA, 19 bp, Homo sapiens
  siRNA target sequence for BUB3 (NM_004725.1,797-815).
cacaatatccacaatacat

SEQ ID NO: 306683 - DNA, 19 bp, Homo sapiens
  siRNA target sequence for BUB3 (NM_004725.1,799-817).
caatatccacaatacattt

SEQ ID NO: 306684 - DNA, 19 bp, Homo sapiens
  siRNA target sequence for BUB3 (NM_004725.1,871-889).
gcgactgtgccaattccat

SEQ ID NO: 306685 - DNA, 19 bp, Homo sapiens
  siRNA target sequence for BUB3 (NM_004725.1,941-959).
cttgcaatagcgtcatcat

SEQ ID NO: 306686 - DNA, 19 bp, Homo sapiens
  siRNA target sequence for BUB3 (NM_004725.1,944-962).
gcaatagcgtcatcatata

SEQ ID NO: 306687 - DNA, 19 bp, Homo sapiens
  siRNA target sequence for BUB3 (NM_004725.1,952-970).
gtcatcatatatgtatgaa

SEQ ID NO: 306688 - DNA, 19 bp, Homo sapiens
  siRNA target sequence for MAD2L2 (NM_006341.2,125-143).
cacgacaagacctcaactt

SEQ ID NO: 306689 - DNA, 19 bp, Homo sapiens
  siRNA target sequence for MAD2L2 (NM_006341.2,282-300).
cccggagctgaatcagtat

SEQ ID NO: 306690 - DNA, 19 bp, Homo sapiens
  siRNA target sequence for MAD2L2 (NM_006341.2,283-301).
ccggagctgaatcagtata

SEQ ID NO: 306691 - DNA, 19 bp, Homo sapiens
  siRNA target sequence for MAD2L2 (NM_006341.2,284-302).
cggagctgaatcagtatat

SEQ ID NO: 306692 - DNA, 19 bp, Homo sapiens
  siRNA target sequence for MAD2L2 (NM_006341.2,684-702).
catgacgtcggacatttta

SEQ ID NO: 306693 - DNA, 19 bp, Homo sapiens
  siRNA target sequence for MAD2L2 (NM_006341.2,689-707).
cgtcggacattttaaagat

SEQ ID NO: 306694 - DNA, 19 bp, Homo sapiens
  siRNA target sequence for MAD2L2 (NM_006341.2,720-738).
ggaagagcgcgctcataaa

SEQ ID NO: 306695 - DNA, 19 bp, Homo sapiens
  siRNA target sequence for CHFR (NM_018223.1,298-316).
caccagtggaacagtgatt

SEQ ID NO: 306696 - DNA, 19 bp, Homo sapiens
  siRNA target sequence for CHFR (NM_018223.1,303-321).
gtggaacagtgattaacaa

SEQ ID NO: 306697 - DNA, 19 bp, Homo sapiens
  siRNA target sequence for CHFR (NM_018223.1,409-427).
cgtggcatacctctatgaa

SEQ ID NO: 306698 - DNA, 19 bp, Homo sapiens
  siRNA target sequence for CHFR (NM_018223.1,410-428).
gtggcatacctctatgaat

SEQ ID NO: 306699 - DNA, 19 bp, Homo sapiens
  siRNA target sequence for CHFR (NM_018223.1,601-619).
ctctgtggcaagtgatgaa

SEQ ID NO: 306700 - DNA, 19 bp, Homo sapiens
  siRNA target sequence for CHFR (NM_018223.1,603-621).
ctgtggcaagtgatgaagt

SEQ ID NO: 306701 - DNA, 19 bp, Homo sapiens
  siRNA target sequence for CHFR (NM_018223.1,763-781).
cgcacaaccgcgtagaaat

SEQ ID NO: 306702 - DNA, 19 bp, Homo sapiens
  siRNA target sequence for CHFR (NM_018223.1,974-992).
cccgtggagcggatctgta

SEQ ID NO: 306703 - DNA, 19 bp, Homo sapiens
  siRNA target sequence for CHFR (NM_018223.1,1045-1063).
caagagtcgcagtgaagaa

SEQ ID NO: 306704 - DNA, 19 bp, Homo sapiens
  siRNA target sequence for CHFR (NM_018223.1,1123-1141).
caggcggtctttttctgat

SEQ ID NO: 306705 - DNA, 19 bp, Homo sapiens
  siRNA target sequence for CHFR (NM_018223.1,1344-1362).
cgacagcagtccaggatta

SEQ ID NO: 306706 - DNA, 19 bp, Homo sapiens
  siRNA target sequence for CHFR (NM_018223.1,1347-1365).
cagcagtccaggattacgt

SEQ ID NO: 306707 - DNA, 19 bp, Homo sapiens
  siRNA target sequence for CHFR (NM_018223.1,1580-1598).
gacggcgtgctgaacaaca

SEQ ID NO: 306708 - DNA, 19 bp, Homo sapiens
  siRNA target sequence for CHFR (NM_018223.1,1583-1601).
ggcgtgctgaacaacaaca

SEQ ID NO: 306709 - DNA, 19 bp, Homo sapiens
  siRNA target sequence for CHFR (NM_018223.1,1609-1627).
gtcagacatcctgaagaat

SEQ ID NO: 306710 - DNA, 19 bp, Homo sapiens
  siRNA target sequence for CHFR (NM_018223.1,1634-1652).
gcaaccagaggtttgacat

SEQ ID NO: 306711 - DNA, 19 bp, Homo sapiens
  siRNA target sequence for CHFR (NM_018223.1,1728-1746).
gagacaccgttctgtgtta

SEQ ID NO: 306712 - DNA, 19 bp, Homo sapiens
  siRNA target sequence for CHFR (NM_018223.1,1730-1748).
gacaccgttctgtgttact

SEQ ID NO: 306713 - DNA, 19 bp, Homo sapiens
  siRNA target sequence for CHFR (NM_018223.1,1769-1787).
cgtgagctgacctatcagt

SEQ ID NO: 306714 - DNA, 19 bp, Homo sapiens
  siRNA target sequence for CHFR (NM_018223.1,1770-1788).
gtgagctgacctatcagta

SEQ ID NO: 306715 - DNA, 19 bp, Homo sapiens
  siRNA target sequence for CHFR (NM_018223.1,1880-1898).
gctcaccacgccatgaaat

SEQ ID NO: 306716 - DNA, 19 bp, Homo sapiens
  siRNA target sequence for CHFR (NM_018223.1,1881-1899).
ctcaccacgccatgaaatt

SEQ ID NO: 306717 - DNA, 19 bp, Homo sapiens
  siRNA target sequence for CHFR (NM_018223.1,1888-1906).
cgccatgaaattcaatcat

SEQ ID NO: 306718 - DNA, 19 bp, Homo sapiens
  siRNA target sequence for CHFR (NM_018223.1,1889-1907).
gccatgaaattcaatcata

SEQ ID NO: 306719 - DNA, 19 bp, Homo sapiens
  siRNA target sequence for CHFR (NM_018223.1,1894-1912).
gaaattcaatcatatctgt

SEQ ID NO: 306720 - DNA, 19 bp, Homo sapiens
  siRNA target sequence for CHFR (NM_018223.1,1913-1931).
gaacagacaaggttcaaaa

SEQ ID NO: 306721 - DNA, 19 bp, Homo sapiens
  siRNA target sequence for MAD2L1 (NM_002358.2,132-150).
gtggccgagttcttctcat

SEQ ID NO: 306722 - DNA, 19 bp, Homo sapiens
  siRNA target sequence for GML (NM_002066.1,153-171).
cgcgctcagtggacttaca

SEQ ID NO: 306723 - DNA, 19 bp, Homo sapiens
  siRNA target sequence for GML (NM_002066.1,155-173).
cgctcagtggacttacagt

SEQ ID NO: 306724 - DNA, 19 bp, Homo sapiens
  siRNA target sequence for GML (NM_002066.1,161-179).
gtggacttacagtttgaga

SEQ ID NO: 306725 - DNA, 19 bp, Homo sapiens
  siRNA target sequence for GML (NM_002066.1,183-201).
catgactgtgcggtcataa

SEQ ID NO: 306726 - DNA, 19 bp, Homo sapiens
  siRNA target sequence for GML (NM_002066.1,190-208).
gtgcggtcataaatgactt

SEQ ID NO: 306727 - DNA, 19 bp, Homo sapiens
  siRNA target sequence for GML (NM_002066.1,206-224).
cttcaactgtcccaacatt

SEQ ID NO: 306728 - DNA, 19 bp, Homo sapiens
  siRNA target sequence for GML (NM_002066.1,212-230).
ctgtcccaacattagagta

SEQ ID NO: 306729 - DNA, 19 bp, Homo sapiens
  siRNA target sequence for GML (NM_002066.1,226-244).
gagtatgtccgtatcatat

SEQ ID NO: 306730 - DNA, 19 bp, Homo sapiens
  siRNA target sequence for GML (NM_002066.1,228-246).
gtatgtccgtatcatatta

SEQ ID NO: 306731 - DNA, 19 bp, Homo sapiens
  siRNA target sequence for GML (NM_002066.1,240-258).
catattaggcgctgtatga

SEQ ID NO: 306732 - DNA, 19 bp, Homo sapiens
  siRNA target sequence for GML (NM_002066.1,259-277).
caatctccattcgcataaa

SEQ ID NO: 306733 - DNA, 19 bp, Homo sapiens
  siRNA target sequence for GML (NM_002066.1,263-281).
ctccattcgcataaattct

SEQ ID NO: 306734 - DNA, 19 bp, Homo sapiens
  siRNA target sequence for GML (NM_002066.1,280-298).
ctcgtgaactacttgttta

SEQ ID NO: 306735 - DNA, 19 bp, Homo sapiens
  siRNA target sequence for GML (NM_002066.1,282-300).
cgtgaactacttgtttata

SEQ ID NO: 306736 - DNA, 19 bp, Homo sapiens
  siRNA target sequence for GML (NM_002066.1,285-303).
gaactacttgtttataaga

SEQ ID NO: 306737 - DNA, 19 bp, Homo sapiens
  siRNA target sequence for GML (NM_002066.1,294-312).
gtttataagaactgtacaa

SEQ ID NO: 306738 - DNA, 19 bp, Homo sapiens
  siRNA target sequence for GML (NM_002066.1,383-401).
cttctactgggtttgttgt

SEQ ID NO: 306739 - DNA, 19 bp, Homo sapiens
  siRNA target sequence for GML (NM_002066.1,386-404).
ctactgggtttgttgttgt

SEQ ID NO: 306740 - DNA, 19 bp, Homo sapiens
  siRNA target sequence for GML (NM_002066.1,389-407).
ctgggtttgttgttgtaat

SEQ ID NO: 306741 - DNA, 19 bp, Homo sapiens
  siRNA target sequence for GML (NM_002066.1,403-421).
gtaatagcatggtttgcaa

SEQ ID NO: 306742 - DNA, 19 bp, Homo sapiens
  siRNA target sequence for GML (NM_002066.1,429-447).
ggacctactaatcttgaaa

SEQ ID NO: 306743 - DNA, 19 bp, Homo sapiens
  siRNA target sequence for GML (NM_002066.1,452-470).
catgttacccgatgaagta

SEQ ID NO: 306744 - DNA, 19 bp, Homo sapiens
  siRNA target sequence for GML (NM_002066.1,455-473).
gttacccgatgaagtaact

SEQ ID NO: 306745 - DNA, 19 bp, Homo sapiens
  siRNA target sequence for GML (NM_002066.1,500-518).
gaggctgggggtatcaaaa

SEQ ID NO: 306746 - DNA, 19 bp, Homo sapiens
  siRNA target sequence for GML (NM_002066.1,502-520).
ggctgggggtatcaaaact

SEQ ID NO: 306747 - DNA, 19 bp, Homo sapiens
  siRNA target sequence for GML (NM_002066.1,514-532).
caaaactgttgctgagttt

SEQ ID NO: 306748 - DNA, 19 bp, Homo sapiens
  siRNA target sequence for GML (NM_002066.1,527-545).
gagttttgcctctatcata

SEQ ID NO: 306749 - DNA, 19 bp, Homo sapiens
  siRNA target sequence for GML (NM_002066.1,538-556).
ctatcatagtcagcaatat

SEQ ID NO: 306750 - DNA, 19 bp, Homo sapiens
  siRNA target sequence for CCNG2 (NM_004354.1,181-199).
caacttctcgggttgttga

SEQ ID NO: 306751 - DNA, 19 bp, Homo sapiens
  siRNA target sequence for CCNG2 (NM_004354.1,261-279).
ggctaccccggagaatgat

SEQ ID NO: 306752 - DNA, 19 bp, Homo sapiens
  siRNA target sequence for CCNG2 (NM_004354.1,262-280).
gctaccccggagaatgata

SEQ ID NO: 306753 - DNA, 19 bp, Homo sapiens
  siRNA target sequence for CCNG2 (NM_004354.1,263-281).
ctaccccggagaatgataa

SEQ ID NO: 306754 - DNA, 19 bp, Homo sapiens
  siRNA target sequence for CCNG2 (NM_004354.1,267-285).
cccggagaatgataacact

SEQ ID NO: 306755 - DNA, 19 bp, Homo sapiens
  siRNA target sequence for CCNG2 (NM_004354.1,268-286).
ccggagaatgataacactt

SEQ ID NO: 306756 - DNA, 19 bp, Homo sapiens
  siRNA target sequence for CCNG2 (NM_004354.1,269-287).
cggagaatgataacacttt

SEQ ID NO: 306757 - DNA, 19 bp, Homo sapiens
  siRNA target sequence for CCNG2 (NM_004354.1,288-306).
gtgtccaggattgagaaat

SEQ ID NO: 306758 - DNA, 19 bp, Homo sapiens
  siRNA target sequence for CCNG2 (NM_004354.1,326-344).
ggagtttagccaacttttt

SEQ ID NO: 306759 - DNA, 19 bp, Homo sapiens
  siRNA target sequence for CCNG2 (NM_004354.1,408-426).
gaaggtgaaacctaaacat

SEQ ID NO: 306760 - DNA, 19 bp, Homo sapiens
  siRNA target sequence for CCNG2 (NM_004354.1,456-474).
gctggctgctagaatagtt

SEQ ID NO: 306761 - DNA, 19 bp, Homo sapiens
  siRNA target sequence for CCNG2 (NM_004354.1,494-512).
catccactcatgatgtgat

SEQ ID NO: 306762 - DNA, 19 bp, Homo sapiens
  siRNA target sequence for CCNG2 (NM_004354.1,513-531).
ccggattagtcagtgtaaa

SEQ ID NO: 306763 - DNA, 19 bp, Homo sapiens
  siRNA target sequence for CCNG2 (NM_004354.1,514-532).
cggattagtcagtgtaaat

SEQ ID NO: 306764 - DNA, 19 bp, Homo sapiens
  siRNA target sequence for CCNG2 (NM_004354.1,546-564).
cataaaacggatggaaaaa

SEQ ID NO: 306765 - DNA, 19 bp, Homo sapiens
  siRNA target sequence for CCNG2 (NM_004354.1,572-590).
cagaaaaattgcactatga

SEQ ID NO: 306766 - DNA, 19 bp, Homo sapiens
  siRNA target sequence for CCNG2 (NM_004354.1,615-633).
ctttttgcacttataccat

SEQ ID NO: 306767 - DNA, 19 bp, Homo sapiens
  siRNA target sequence for CCNG2 (NM_004354.1,621-639).
gcacttataccatactatt

SEQ ID NO: 306768 - DNA, 19 bp, Homo sapiens
  siRNA target sequence for CCNG2 (NM_004354.1,675-693).
gagccttgataaactagaa

SEQ ID NO: 306769 - DNA, 19 bp, Homo sapiens
  siRNA target sequence for CCNG2 (NM_004354.1,710-728).
gcaactgccgactcatctt

SEQ ID NO: 306770 - DNA, 19 bp, Homo sapiens
  siRNA target sequence for CCNG2 (NM_004354.1,716-734).
gccgactcatcttttcaaa

SEQ ID NO: 306771 - DNA, 19 bp, Homo sapiens
  siRNA target sequence for CCNG2 (NM_004354.1,717-735).
ccgactcatcttttcaaaa

SEQ ID NO: 306772 - DNA, 19 bp, Homo sapiens
  siRNA target sequence for CCNG2 (NM_004354.1,794-812).
ctgttgaattactggaaat

SEQ ID NO: 306773 - DNA, 19 bp, Homo sapiens
  siRNA target sequence for CCNG2 (NM_004354.1,888-906).
cctagccgagtattcttct

SEQ ID NO: 306774 - DNA, 19 bp, Homo sapiens
  siRNA target sequence for CCNG2 (NM_004354.1,925-943).
gatcttaagaagttggttt

SEQ ID NO: 306775 - DNA, 19 bp, Homo sapiens
  siRNA target sequence for CCNG2 (NM_004354.1,972-990).
cctccacaacagctactat

SEQ ID NO: 306776 - DNA, 19 bp, Homo sapiens
  siRNA target sequence for CCNG2 (NM_004354.1,973-991).
ctccacaacagctactata

SEQ ID NO: 306777 - DNA, 19 bp, Homo sapiens
  siRNA target sequence for CCNG2 (NM_004354.1,1025-1043).
gttgttttgatgaaagtga

SEQ ID NO: 306778 - DNA, 19 bp, Homo sapiens
  siRNA target sequence for CDC16 (NM_003903.2,228-246).
cgaccagcaacagtatcaa

SEQ ID NO: 306779 - DNA, 19 bp, Homo sapiens
  siRNA target sequence for CDC16 (NM_003903.2,251-269).
ctctattttgggcagataa

SEQ ID NO: 306780 - DNA, 19 bp, Homo sapiens
  siRNA target sequence for CDC16 (NM_003903.2,292-310).
ccccaggacatctattggt

SEQ ID NO: 306781 - DNA, 19 bp, Homo sapiens
  siRNA target sequence for CDC16 (NM_003903.2,293-311).
cccaggacatctattggtt

SEQ ID NO: 306782 - DNA, 19 bp, Homo sapiens
  siRNA target sequence for CDC16 (NM_003903.2,328-346).
ctgacagcacaatatcaca

SEQ ID NO: 306783 - DNA, 19 bp, Homo sapiens
  siRNA target sequence for CDC16 (NM_003903.2,359-377).
cacttcggtcacgaaaact

SEQ ID NO: 306784 - DNA, 19 bp, Homo sapiens
  siRNA target sequence for CDC16 (NM_003903.2,417-435).
gtgccattatgctgcaaaa

SEQ ID NO: 306785 - DNA, 19 bp, Homo sapiens
  siRNA target sequence for CDC16 (NM_003903.2,419-437).
gccattatgctgcaaaaga

SEQ ID NO: 306786 - DNA, 19 bp, Homo sapiens
  siRNA target sequence for CDC16 (NM_003903.2,444-462).
gcaggcccttgatgttctt

SEQ ID NO: 306787 - DNA, 19 bp, Homo sapiens
  siRNA target sequence for CDC16 (NM_003903.2,468-486).
ggaagagcccatcaataaa

SEQ ID NO: 306788 - DNA, 19 bp, Homo sapiens
  siRNA target sequence for CDC16 (NM_003903.2,581-599).
gtcttctacgcgggaaaat

SEQ ID NO: 306789 - DNA, 19 bp, Homo sapiens
  siRNA target sequence for CDC16 (NM_003903.2,583-601).
cttctacgcgggaaaatct

SEQ ID NO: 306790 - DNA, 19 bp, Homo sapiens
  siRNA target sequence for CDC16 (NM_003903.2,627-645).
ggctacctacagctacaaa

SEQ ID NO: 306791 - DNA, 19 bp, Homo sapiens
  siRNA target sequence for CDC16 (NM_003903.2,629-647).
ctacctacagctacaaaga

SEQ ID NO: 306792 - DNA, 19 bp, Homo sapiens
  siRNA target sequence for CDC16 (NM_003903.2,650-668).
ctttgaagcttgatgtcta

SEQ ID NO: 306793 - DNA, 19 bp, Homo sapiens
  siRNA target sequence for CDC16 (NM_003903.2,676-694).
gaagcgttcgatcttttaa

SEQ ID NO: 306794 - DNA, 19 bp, Homo sapiens
  siRNA target sequence for CDC16 (NM_003903.2,679-697).
gcgttcgatcttttaacat

SEQ ID NO: 306795 - DNA, 19 bp, Homo sapiens
  siRNA target sequence for CDC16 (NM_003903.2,681-699).
gttcgatcttttaacatca

SEQ ID NO: 306796 - DNA, 19 bp, Homo sapiens
  siRNA target sequence for CDC16 (NM_003903.2,684-702).
cgatcttttaacatcacat

SEQ ID NO: 306797 - DNA, 19 bp, Homo sapiens
  siRNA target sequence for CDC16 (NM_003903.2,705-723).
catgctgacagcacaagaa

SEQ ID NO: 306798 - DNA, 19 bp, Homo sapiens
  siRNA target sequence for CDC16 (NM_003903.2,777-795).
ggaattgctgcgttttcta

SEQ ID NO: 306799 - DNA, 19 bp, Homo sapiens
  siRNA target sequence for CDC16 (NM_003903.2,784-802).
ctgcgttttctatttgaga

SEQ ID NO: 306800 - DNA, 19 bp, Homo sapiens
  siRNA target sequence for CDC16 (NM_003903.2,836-854).
cggtcatccctgaatctgt

SEQ ID NO: 306801 - DNA, 19 bp, Homo sapiens
  siRNA target sequence for CDC16 (NM_003903.2,876-894).
ggatgtggtagtgtcttta

SEQ ID NO: 306802 - DNA, 19 bp, Homo sapiens
  siRNA target sequence for CDC16 (NM_003903.2,890-908).
ctttagctgagagacatta

SEQ ID NO: 306803 - DNA, 19 bp, Homo sapiens
  siRNA target sequence for CDC16 (NM_003903.2,895-913).
gctgagagacattattata

SEQ ID NO: 306804 - DNA, 19 bp, Homo sapiens
  siRNA target sequence for CDC16 (NM_003903.2,896-914).
ctgagagacattattataa

SEQ ID NO: 306805 - DNA, 19 bp, Homo sapiens
  siRNA target sequence for CDC16 (NM_003903.2,930-948).
gtgctacaagcttacttct

SEQ ID NO: 306806 - DNA, 19 bp, Homo sapiens
  siRNA target sequence for CDC16 (NM_003903.2,936-954).
caagcttacttctgtagta

SEQ ID NO: 306807 - DNA, 19 bp, Homo sapiens
  siRNA target sequence for CDC16 (NM_003903.2,967-985).
cctttccatgcaagttgtt

SEQ ID NO: 306808 - DNA, 19 bp, Homo sapiens
  siRNA target sequence for CDC16 (NM_003903.2,968-986).
ctttccatgcaagttgttt

SEQ ID NO: 306809 - DNA, 19 bp, Homo sapiens
  siRNA target sequence for CDC16 (NM_003903.2,980-998).
gttgtttacctgtacatat

SEQ ID NO: 306810 - DNA, 19 bp, Homo sapiens
  siRNA target sequence for CDC16 (NM_003903.2,1004-1022).
cgcttgtagagctgaataa

SEQ ID NO: 306811 - DNA, 19 bp, Homo sapiens
  siRNA target sequence for CDC16 (NM_003903.2,1025-1043).
ccaatgaacttttctatct

SEQ ID NO: 306812 - DNA, 19 bp, Homo sapiens
  siRNA target sequence for CDC16 (NM_003903.2,1048-1066).
cataaactggtggatttat

SEQ ID NO: 306813 - DNA, 19 bp, Homo sapiens
  siRNA target sequence for CDC16 (NM_003903.2,1088-1106).
ggtttgcagtgggatgtta

SEQ ID NO: 306814 - DNA, 19 bp, Homo sapiens
  siRNA target sequence for CDC16 (NM_003903.2,1096-1114).
gtgggatgttactatctca

SEQ ID NO: 306815 - DNA, 19 bp, Homo sapiens
  siRNA target sequence for CDC16 (NM_003903.2,1111-1129).
ctcatggtcggtcataaaa

SEQ ID NO: 306816 - DNA, 19 bp, Homo sapiens
  siRNA target sequence for CDC16 (NM_003903.2,1113-1131).
catggtcggtcataaaaat

SEQ ID NO: 306817 - DNA, 19 bp, Homo sapiens
  siRNA target sequence for CDC16 (NM_003903.2,1135-1153).
catgccagaagatatctca

SEQ ID NO: 306818 - DNA, 19 bp, Homo sapiens
  siRNA target sequence for CDC16 (NM_003903.2,1179-1197).
ctatggacctgcatggata

SEQ ID NO: 306819 - DNA, 19 bp, Homo sapiens
  siRNA target sequence for CDC16 (NM_003903.2,1194-1212).
gatagcctatggacattca

SEQ ID NO: 306820 - DNA, 19 bp, Homo sapiens
  siRNA target sequence for CDC16 (NM_003903.2,1270-1288).
ctgatgaaagggtgtcatt

SEQ ID NO: 306821 - DNA, 19 bp, Homo sapiens
  siRNA target sequence for CDC16 (NM_003903.2,1290-1308).
gcctatgctgtatattgga

SEQ ID NO: 306822 - DNA, 19 bp, Homo sapiens
  siRNA target sequence for CDC16 (NM_003903.2,1291-1309).
cctatgctgtatattggat

SEQ ID NO: 306823 - DNA, 19 bp, Homo sapiens
  siRNA target sequence for CDC16 (NM_003903.2,1296-1314).
gctgtatattggattagaa

SEQ ID NO: 306824 - DNA, 19 bp, Homo sapiens
  siRNA target sequence for CDC16 (NM_003903.2,1297-1315).
ctgtatattggattagaat

SEQ ID NO: 306825 - DNA, 19 bp, Homo sapiens
  siRNA target sequence for CDC16 (NM_003903.2,1312-1330).
gaatatggtttgaccaata

SEQ ID NO: 306826 - DNA, 19 bp, Homo sapiens
  siRNA target sequence for CDC16 (NM_003903.2,1318-1336).
ggtttgaccaataactcaa

SEQ ID NO: 306827 - DNA, 19 bp, Homo sapiens
  siRNA target sequence for CDC16 (NM_003903.2,1339-1357).
ctagctgaaaggttcttca

SEQ ID NO: 306828 - DNA, 19 bp, Homo sapiens
  siRNA target sequence for CDC16 (NM_003903.2,1379-1397).
cggaagacccttttgttat

SEQ ID NO: 306829 - DNA, 19 bp, Homo sapiens
  siRNA target sequence for CDC16 (NM_003903.2,1404-1422).
ggtcggcgtggttgcattt

SEQ ID NO: 306830 - DNA, 19 bp, Homo sapiens
  siRNA target sequence for CDC16 (NM_003903.2,1408-1426).
ggcgtggttgcatttcaga

SEQ ID NO: 306831 - DNA, 19 bp, Homo sapiens
  siRNA target sequence for CDC16 (NM_003903.2,1445-1463).
ccgaaaaatggtttcttga

SEQ ID NO: 306832 - DNA, 19 bp, Homo sapiens
  siRNA target sequence for CDC16 (NM_003903.2,1494-1512).
cgaggtaacagttgacaaa

SEQ ID NO: 306833 - DNA, 19 bp, Homo sapiens
  siRNA target sequence for CDC16 (NM_003903.2,1514-1532).
gggaacctttgttgaacaa

SEQ ID NO: 306834 - DNA, 19 bp, Homo sapiens
  siRNA target sequence for CDC16 (NM_003903.2,1623-1641).
cacctactctgctattgga

SEQ ID NO: 306835 - DNA, 19 bp, Homo sapiens
  siRNA target sequence for CDC16 (NM_003903.2,1702-1720).
ggtcttaggcgagatgata

SEQ ID NO: 306836 - DNA, 19 bp, Homo sapiens
  siRNA target sequence for CDC16 (NM_003903.2,1705-1723).
cttaggcgagatgatacat

SEQ ID NO: 306837 - DNA, 19 bp, Homo sapiens
  siRNA target sequence for CDC16 (NM_003903.2,1733-1751).
caatgcttggtcattgcat

SEQ ID NO: 306838 - DNA, 19 bp, Homo sapiens
  siRNA target sequence for CDC16 (NM_003903.2,1738-1756).
cttggtcattgcatcgaaa

SEQ ID NO: 306839 - DNA, 19 bp, Homo sapiens
  siRNA target sequence for CDC16 (NM_003903.2,1741-1759).
ggtcattgcatcgaaatgt

SEQ ID NO: 306840 - DNA, 19 bp, Homo sapiens
  siRNA target sequence for CDC16 (NM_003903.2,1742-1760).
gtcattgcatcgaaatgta

SEQ ID NO: 306841 - DNA, 19 bp, Homo sapiens
  siRNA target sequence for CDC16 (NM_003903.2,1758-1776).
gtacattggtgattctgaa

SEQ ID NO: 306842 - DNA, 19 bp, Homo sapiens
  siRNA target sequence for CDC16 (NM_003903.2,1869-1887).
gtgggatttcagggaattt

SEQ ID NO: 306843 - DNA, 19 bp, Homo sapiens
  siRNA target sequence for CENPF (NM_016343.2,113-131).
caagagctcttcagaaaat

SEQ ID NO: 306844 - DNA, 19 bp, Homo sapiens
  siRNA target sequence for CENPF (NM_016343.2,145-163).
ggacagcttgacaaactga

SEQ ID NO: 306845 - DNA, 19 bp, Homo sapiens
  siRNA target sequence for CENPF (NM_016343.2,478-496).
gatgtctctctgaatccat

SEQ ID NO: 306846 - DNA, 19 bp, Homo sapiens
  siRNA target sequence for CENPF (NM_016343.2,557-575).
ccaagtatgaagatctaaa

SEQ ID NO: 306847 - DNA, 19 bp, Homo sapiens
  siRNA target sequence for CENPF (NM_016343.2,595-613).
gttgaagaacgaaaaagat

SEQ ID NO: 306848 - DNA, 19 bp, Homo sapiens
  siRNA target sequence for CENPF (NM_016343.2,633-651).
cttgcaggctaaaaaagca

SEQ ID NO: 306849 - DNA, 19 bp, Homo sapiens
  siRNA target sequence for CENPF (NM_016343.2,665-683).
cacaagccaccatgaatca

SEQ ID NO: 306850 - DNA, 19 bp, Homo sapiens
  siRNA target sequence for CENPF (NM_016343.2,699-717).
gcatcaggcttcatcatct

SEQ ID NO: 306851 - DNA, 19 bp, Homo sapiens
  siRNA target sequence for CENPF (NM_016343.2,776-794).
ctccaattaggagagattt

SEQ ID NO: 306852 - DNA, 19 bp, Homo sapiens
  siRNA target sequence for CENPF (NM_016343.2,778-796).
ccaattaggagagatttct

SEQ ID NO: 306853 - DNA, 19 bp, Homo sapiens
  siRNA target sequence for CENPF (NM_016343.2,790-808).
gatttctctgcatcttact

SEQ ID NO: 306854 - DNA, 19 bp, Homo sapiens
  siRNA target sequence for CENPF (NM_016343.2,830-848).
ctccaagtcgatcaacttt

SEQ ID NO: 306855 - DNA, 19 bp, Homo sapiens
  siRNA target sequence for CENPF (NM_016343.2,836-854).
gtcgatcaactttgcaaat

SEQ ID NO: 306856 - DNA, 19 bp, Homo sapiens
  siRNA target sequence for CENPF (NM_016343.2,869-887).
ctaatagcagtttctttga

SEQ ID NO: 306857 - DNA, 19 bp, Homo sapiens
  siRNA target sequence for CENPF (NM_016343.2,896-914).
gcagtcctcatcttttgga

SEQ ID NO: 306858 - DNA, 19 bp, Homo sapiens
  siRNA target sequence for CENPF (NM_016343.2,939-957).
gctaagaaacaagattaat

SEQ ID NO: 306859 - DNA, 19 bp, Homo sapiens
  siRNA target sequence for CENPF (NM_016343.2,1001-1019).
gccaagtgaataagtttca

SEQ ID NO: 306860 - DNA, 19 bp, Homo sapiens
  siRNA target sequence for CENPF (NM_016343.2,1083-1101).
caaatgtagggatgaacta

SEQ ID NO: 306861 - DNA, 19 bp, Homo sapiens
  siRNA target sequence for CENPF (NM_016343.2,1093-1111).
gatgaactagtgagaacaa

SEQ ID NO: 306862 - DNA, 19 bp, Homo sapiens
  siRNA target sequence for CENPF (NM_016343.2,1106-1124).
gaacaacagcacaatacga

SEQ ID NO: 306863 - DNA, 19 bp, Homo sapiens
  siRNA target sequence for CENPF (NM_016343.2,1125-1143).
ccaggcgtcaaccaagtat

SEQ ID NO: 306864 - DNA, 19 bp, Homo sapiens
  siRNA target sequence for CENPF (NM_016343.2,1126-1144).
caggcgtcaaccaagtata

SEQ ID NO: 306865 - DNA, 19 bp, Homo sapiens
  siRNA target sequence for CENPF (NM_016343.2,1128-1146).
ggcgtcaaccaagtatact

SEQ ID NO: 306866 - DNA, 19 bp, Homo sapiens
  siRNA target sequence for CENPF (NM_016343.2,1147-1165).
gcattggaacaaaaactga

SEQ ID NO: 306867 - DNA, 19 bp, Homo sapiens
  siRNA target sequence for CENPF (NM_016343.2,1194-1212).
gcgacaaaatgcagaaagt

SEQ ID NO: 306868 - DNA, 19 bp, Homo sapiens
  siRNA target sequence for CENPF (NM_016343.2,1217-1235).
gatgttctctggaacagaa

SEQ ID NO: 306869 - DNA, 19 bp, Homo sapiens
  siRNA target sequence for CENPF (NM_016343.2,1274-1292).
cccgtcaacagcgttcttt

SEQ ID NO: 306870 - DNA, 19 bp, Homo sapiens
  siRNA target sequence for CENPF (NM_016343.2,1279-1297).
caacagcgttctttccaaa

SEQ ID NO: 306871 - DNA, 19 bp, Homo sapiens
  siRNA target sequence for CENPF (NM_016343.2,1331-1349).
gactcacccaggagttaca

SEQ ID NO: 306872 - DNA, 19 bp, Homo sapiens
  siRNA target sequence for CENPF (NM_016343.2,1677-1695).
catgttaagagatcttcaa

SEQ ID NO: 306873 - DNA, 19 bp, Homo sapiens
  siRNA target sequence for CENPF (NM_016343.2,1802-1820).
gagaacatcacattgaaca

SEQ ID NO: 306874 - DNA, 19 bp, Homo sapiens
  siRNA target sequence for CENPF (NM_016343.2,1862-1880).
ccttgctgagtgctttaga

SEQ ID NO: 306875 - DNA, 19 bp, Homo sapiens
  siRNA target sequence for CENPF (NM_016343.2,1869-1887).
gagtgctttagagttaaaa

SEQ ID NO: 306876 - DNA, 19 bp, Homo sapiens
  siRNA target sequence for CENPF (NM_016343.2,2047-2065).
gaatacaacgagagagtaa

SEQ ID NO: 306877 - DNA, 19 bp, Homo sapiens
  siRNA target sequence for CENPF (NM_016343.2,2092-2110).
ctaagtgtcgagatcagaa

SEQ ID NO: 306878 - DNA, 19 bp, Homo sapiens
  siRNA target sequence for CENPF (NM_016343.2,2113-2131).
cttcacaacgtgttagaca

SEQ ID NO: 306879 - DNA, 19 bp, Homo sapiens
  siRNA target sequence for CENPF (NM_016343.2,2145-2163).
ggtagagacccagaaacta

SEQ ID NO: 306880 - DNA, 19 bp, Homo sapiens
  siRNA target sequence for CENPF (NM_016343.2,2151-2169).
gacccagaaactagcttat

SEQ ID NO: 306881 - DNA, 19 bp, Homo sapiens
  siRNA target sequence for CENPF (NM_016343.2,2153-2171).
cccagaaactagcttatat

SEQ ID NO: 306882 - DNA, 19 bp, Homo sapiens
  siRNA target sequence for CENPF (NM_016343.2,2250-2268).
gcttactgggcaagttgaa

SEQ ID NO: 306883 - DNA, 19 bp, Homo sapiens
  siRNA target sequence for CENPF (NM_016343.2,2255-2273).
ctgggcaagttgaagatct

SEQ ID NO: 306884 - DNA, 19 bp, Homo sapiens
  siRNA target sequence for CENPF (NM_016343.2,2258-2276).
ggcaagttgaagatctaga

SEQ ID NO: 306885 - DNA, 19 bp, Homo sapiens
  siRNA target sequence for CENPF (NM_016343.2,2313-2331).
caaagaccggtgttaccaa

SEQ ID NO: 306886 - DNA, 19 bp, Homo sapiens
  siRNA target sequence for CENPF (NM_016343.2,2360-2378).
gggatctgctaaaatccaa

SEQ ID NO: 306887 - DNA, 19 bp, Homo sapiens
  siRNA target sequence for CENPF (NM_016343.2,2361-2379).
ggatctgctaaaatccaaa

SEQ ID NO: 306888 - DNA, 19 bp, Homo sapiens
  siRNA target sequence for CENPF (NM_016343.2,2384-2402).
cttctctggtgacaaatga

SEQ ID NO: 306889 - DNA, 19 bp, Homo sapiens
  siRNA target sequence for CENPF (NM_016343.2,2391-2409).
ggtgacaaatgaagatcat

SEQ ID NO: 306890 - DNA, 19 bp, Homo sapiens
  siRNA target sequence for CENPF (NM_016343.2,2441-2459).
ctgccatgcatcattcctt

SEQ ID NO: 306891 - DNA, 19 bp, Homo sapiens
  siRNA target sequence for CENPF (NM_016343.2,2448-2466).
gcatcattcctttgcaaat

SEQ ID NO: 306892 - DNA, 19 bp, Homo sapiens
  siRNA target sequence for CENPF (NM_016343.2,2491-2509).
ccttcagagaggagtgaat

SEQ ID NO: 306893 - DNA, 19 bp, Homo sapiens
  siRNA target sequence for CENPF (NM_016343.2,2501-2519).
ggagtgaatgtcgtttaga

SEQ ID NO: 306894 - DNA, 19 bp, Homo sapiens
  siRNA target sequence for CENPF (NM_016343.2,2522-2540).
cagaccaaagtccgaaaaa

SEQ ID NO: 306895 - DNA, 19 bp, Homo sapiens
  siRNA target sequence for CENPF (NM_016343.2,2561-2579).
gagttgattcacttgaatt

SEQ ID NO: 306896 - DNA, 19 bp, Homo sapiens
  siRNA target sequence for CENPF (NM_016343.2,2582-2600).
cattagagtctcaaaaaca

SEQ ID NO: 306897 - DNA, 19 bp, Homo sapiens
  siRNA target sequence for CENPF (NM_016343.2,2714-2732).
gtcagcgcattagtaagtt

SEQ ID NO: 306898 - DNA, 19 bp, Homo sapiens
  siRNA target sequence for CENPF (NM_016343.2,2805-2823).
gctgcaacttttaaatgat

SEQ ID NO: 306899 - DNA, 19 bp, Homo sapiens
  siRNA target sequence for CENPF (NM_016343.2,2865-2883).
gagcaaccatctacttgaa

SEQ ID NO: 306900 - DNA, 19 bp, Homo sapiens
  siRNA target sequence for CENPF (NM_016343.2,2875-2893).
ctacttgaagactctctaa

SEQ ID NO: 306901 - DNA, 19 bp, Homo sapiens
  siRNA target sequence for CENPF (NM_016343.2,2888-2906).
ctctaaaggagctacaact

SEQ ID NO: 306902 - DNA, 19 bp, Homo sapiens
  siRNA target sequence for CENPF (NM_016343.2,2890-2908).
ctaaaggagctacaacttt

SEQ ID NO: 306903 - DNA, 19 bp, Homo sapiens
  siRNA target sequence for CENPF (NM_016343.2,2994-3012).
gaatgggactcttaaggaa

SEQ ID NO: 306904 - DNA, 19 bp, Homo sapiens
  siRNA target sequence for CENPF (NM_016343.2,3042-3060).
gaacttaatccagaaaagt

SEQ ID NO: 306905 - DNA, 19 bp, Homo sapiens
  siRNA target sequence for CENPF (NM_016343.2,3104-3122).
cagagttatctgatcagta

SEQ ID NO: 306906 - DNA, 19 bp, Homo sapiens
  siRNA target sequence for CENPF (NM_016343.2,3120-3138).
gtacaagcaagaaaaactt

SEQ ID NO: 306907 - DNA, 19 bp, Homo sapiens
  siRNA target sequence for CENPF (NM_016343.2,3157-3175).
gaagaaaccggaaatgcat

SEQ ID NO: 306908 - DNA, 19 bp, Homo sapiens
  siRNA target sequence for CENPF (NM_016343.2,3248-3266).
gcactagtctttgtgaaaa

SEQ ID NO: 306909 - DNA, 19 bp, Homo sapiens
  siRNA target sequence for CENPF (NM_016343.2,3288-3306).
gctaaaggaagcatttgca

SEQ ID NO: 306910 - DNA, 19 bp, Homo sapiens
  siRNA target sequence for CENPF (NM_016343.2,3289-3307).
ctaaaggaagcatttgcaa

SEQ ID NO: 306911 - DNA, 19 bp, Homo sapiens
  siRNA target sequence for CENPF (NM_016343.2,3435-3453).
gagcgaggctggtggttta

SEQ ID NO: 306912 - DNA, 19 bp, Homo sapiens
  siRNA target sequence for CENPF (NM_016343.2,3437-3455).
gcgaggctggtggtttaaa

SEQ ID NO: 306913 - DNA, 19 bp, Homo sapiens
  siRNA target sequence for CENPF (NM_016343.2,3501-3519).
ggaagttaatgacttatta

SEQ ID NO: 306914 - DNA, 19 bp, Homo sapiens
  siRNA target sequence for CENPF (NM_016343.2,3577-3595).
gaatcagaaccaattagga

SEQ ID NO: 306915 - DNA, 19 bp, Homo sapiens
  siRNA target sequence for CENPF (NM_016343.2,3692-3710).
cgcagttggtgcaattaga

SEQ ID NO: 306916 - DNA, 19 bp, Homo sapiens
  siRNA target sequence for CENPF (NM_016343.2,3709-3727).
gaagctatgctaagaaata

SEQ ID NO: 306917 - DNA, 19 bp, Homo sapiens
  siRNA target sequence for CENPF (NM_016343.2,3713-3731).
ctatgctaagaaataagga

SEQ ID NO: 306918 - DNA, 19 bp, Homo sapiens
  siRNA target sequence for CENPF (NM_016343.2,3767-3785).
gcctgcagcatgaattaca

SEQ ID NO: 306919 - DNA, 19 bp, Homo sapiens
  siRNA target sequence for CENPF (NM_016343.2,3775-3793).
catgaattacagacaatta

SEQ ID NO: 306920 - DNA, 19 bp, Homo sapiens
  siRNA target sequence for CENPF (NM_016343.2,3809-3827).
ccagcaatttgcaagacat

SEQ ID NO: 306921 - DNA, 19 bp, Homo sapiens
  siRNA target sequence for CENPF (NM_016343.2,3871-3889).
gcggaagaaaagtatattt

SEQ ID NO: 306922 - DNA, 19 bp, Homo sapiens
  siRNA target sequence for CENPF (NM_016343.2,3892-3910).
gggcctcatgagttgtcaa

SEQ ID NO: 306923 - DNA, 19 bp, Homo sapiens
  siRNA target sequence for CENPF (NM_016343.2,3901-3919).
gagttgtcaacaagtcaaa

SEQ ID NO: 306924 - DNA, 19 bp, Homo sapiens
  siRNA target sequence for CENPF (NM_016343.2,3941-3959).
gctctctgcaaacaacaat

SEQ ID NO: 306925 - DNA, 19 bp, Homo sapiens
  siRNA target sequence for CENPF (NM_016343.2,4020-4038).
cgtaactgagctgaatgat

SEQ ID NO: 306926 - DNA, 19 bp, Homo sapiens
  siRNA target sequence for CENPF (NM_016343.2,4081-4099).
gaggtagggaaactactaa

SEQ ID NO: 306927 - DNA, 19 bp, Homo sapiens
  siRNA target sequence for CENPF (NM_016343.2,4083-4101).
ggtagggaaactactaaat

SEQ ID NO: 306928 - DNA, 19 bp, Homo sapiens
  siRNA target sequence for CENPF (NM_016343.2,4214-4232).
ctccattggacgagagtaa

SEQ ID NO: 306929 - DNA, 19 bp, Homo sapiens
  siRNA target sequence for CENPF (NM_016343.2,4216-4234).
ccattggacgagagtaatt

SEQ ID NO: 306930 - DNA, 19 bp, Homo sapiens
  siRNA target sequence for CENPF (NM_016343.2,4235-4253).
cctacgagcacttgacatt

SEQ ID NO: 306931 - DNA, 19 bp, Homo sapiens
  siRNA target sequence for CENPF (NM_016343.2,4275-4293).
gcactttgccgaattgcaa

SEQ ID NO: 306932 - DNA, 19 bp, Homo sapiens
  siRNA target sequence for CENPF (NM_016343.2,4344-4362).
ctgtcagatgagctctaaa

SEQ ID NO: 306933 - DNA, 19 bp, Homo sapiens
  siRNA target sequence for CENPF (NM_016343.2,4391-4409).
cattaaaggccgaaaattt

SEQ ID NO: 306934 - DNA, 19 bp, Homo sapiens
  siRNA target sequence for CENPF (NM_016343.2,4411-4429).
gtcttgtcaacgaatctga

SEQ ID NO: 306935 - DNA, 19 bp, Homo sapiens
  siRNA target sequence for CENPF (NM_016343.2,4418-4436).
caacgaatctgagaaactt

SEQ ID NO: 306936 - DNA, 19 bp, Homo sapiens
  siRNA target sequence for CENPF (NM_016343.2,4512-4530).
gcctgacagctctagtctt

SEQ ID NO: 306937 - DNA, 19 bp, Homo sapiens
  siRNA target sequence for CENPF (NM_016343.2,4579-4597).
ggagatatgtctcttttga

SEQ ID NO: 306938 - DNA, 19 bp, Homo sapiens
  siRNA target sequence for CENPF (NM_016343.2,4589-4607).
ctcttttgagtaatttaga

SEQ ID NO: 306939 - DNA, 19 bp, Homo sapiens
  siRNA target sequence for CENPF (NM_016343.2,4784-4802).
gtcaagggattatgaaaaa

SEQ ID NO: 306940 - DNA, 19 bp, Homo sapiens
  siRNA target sequence for CENPF (NM_016343.2,4821-4839).
cgagcagttattaagttct

SEQ ID NO: 306941 - DNA, 19 bp, Homo sapiens
  siRNA target sequence for CENPF (NM_016343.2,5002-5020).
ctacaaggtctggacttaa

SEQ ID NO: 306942 - DNA, 19 bp, Homo sapiens
  siRNA target sequence for CENPF (NM_016343.2,5078-5096).
gctgtgacatatcaaaaga

SEQ ID NO: 306943 - DNA, 19 bp, Homo sapiens
  siRNA target sequence for CENPF (NM_016343.2,5169-5187).
ggacctcaatctagacatt

SEQ ID NO: 306944 - DNA, 19 bp, Homo sapiens
  siRNA target sequence for CENPF (NM_016343.2,5173-5191).
ctcaatctagacattgaga

SEQ ID NO: 306945 - DNA, 19 bp, Homo sapiens
  siRNA target sequence for CENPF (NM_016343.2,5242-5260).
cagtccccagataccaatt

SEQ ID NO: 306946 - DNA, 19 bp, Homo sapiens
  siRNA target sequence for CENPF (NM_016343.2,5244-5262).
gtccccagataccaattat

SEQ ID NO: 306947 - DNA, 19 bp, Homo sapiens
  siRNA target sequence for CENPF (NM_016343.2,5330-5348).
ctaatgctttggtacctat

SEQ ID NO: 306948 - DNA, 19 bp, Homo sapiens
  siRNA target sequence for CENPF (NM_016343.2,5335-5353).
gctttggtacctatggatt

SEQ ID NO: 306949 - DNA, 19 bp, Homo sapiens
  siRNA target sequence for CENPF (NM_016343.2,5361-5379).
gaatcaggaagatatccat

SEQ ID NO: 306950 - DNA, 19 bp, Homo sapiens
  siRNA target sequence for CENPF (NM_016343.2,5421-5439).
gagattacttcatgtgata

SEQ ID NO: 306951 - DNA, 19 bp, Homo sapiens
  siRNA target sequence for CENPF (NM_016343.2,5423-5441).
gattacttcatgtgataga

SEQ ID NO: 306952 - DNA, 19 bp, Homo sapiens
  siRNA target sequence for CENPF (NM_016343.2,5509-5527).
caggaggtacaactaatga

SEQ ID NO: 306953 - DNA, 19 bp, Homo sapiens
  siRNA target sequence for CENPF (NM_016343.2,5529-5547).
caaaattgaagcatgcata

SEQ ID NO: 306954 - DNA, 19 bp, Homo sapiens
  siRNA target sequence for CENPF (NM_016343.2,5634-5652).
gttactccagagagtagaa

SEQ ID NO: 306955 - DNA, 19 bp, Homo sapiens
  siRNA target sequence for CENPF (NM_016343.2,5663-5681).
gcctcaattctgatttaga

SEQ ID NO: 306956 - DNA, 19 bp, Homo sapiens
  siRNA target sequence for CENPF (NM_016343.2,5665-5683).
ctcaattctgatttagaaa

SEQ ID NO: 306957 - DNA, 19 bp, Homo sapiens
  siRNA target sequence for CENPF (NM_016343.2,5748-5766).
gaaggagagatttcttgat

SEQ ID NO: 306958 - DNA, 19 bp, Homo sapiens
  siRNA target sequence for CENPF (NM_016343.2,5776-5794).
gagctgagtaggatcagat

SEQ ID NO: 306959 - DNA, 19 bp, Homo sapiens
  siRNA target sequence for CENPF (NM_016343.2,5841-5859).
cttagaggtagttcaaaca

SEQ ID NO: 306960 - DNA, 19 bp, Homo sapiens
  siRNA target sequence for CENPF (NM_016343.2,5851-5869).
gttcaaacagagaagctat

SEQ ID NO: 306961 - DNA, 19 bp, Homo sapiens
  siRNA target sequence for CENPF (NM_016343.2,5952-5970).
ccagcttcgtggagaatta

SEQ ID NO: 306962 - DNA, 19 bp, Homo sapiens
  siRNA target sequence for CENPF (NM_016343.2,5955-5973).
gcttcgtggagaattagat

SEQ ID NO: 306963 - DNA, 19 bp, Homo sapiens
  siRNA target sequence for CENPF (NM_016343.2,5956-5974).
cttcgtggagaattagata

SEQ ID NO: 306964 - DNA, 19 bp, Homo sapiens
  siRNA target sequence for CENPF (NM_016343.2,5960-5978).
gtggagaattagatactat

SEQ ID NO: 306965 - DNA, 19 bp, Homo sapiens
  siRNA target sequence for CENPF (NM_016343.2,6037-6055).
gagcttgagtctcatcaaa

SEQ ID NO: 306966 - DNA, 19 bp, Homo sapiens
  siRNA target sequence for CENPF (NM_016343.2,6039-6057).
gcttgagtctcatcaaagt

SEQ ID NO: 306967 - DNA, 19 bp, Homo sapiens
  siRNA target sequence for CENPF (NM_016343.2,6056-6074).
gtgagtgtctccattgcat

SEQ ID NO: 306968 - DNA, 19 bp, Homo sapiens
  siRNA target sequence for CENPF (NM_016343.2,6107-6125).
cggaactccttcagacttt

SEQ ID NO: 306969 - DNA, 19 bp, Homo sapiens
  siRNA target sequence for CENPF (NM_016343.2,6237-6255).
ccaaattgcacaactgaat

SEQ ID NO: 306970 - DNA, 19 bp, Homo sapiens
  siRNA target sequence for CENPF (NM_016343.2,6297-6315).
ggccagactgagtgaatca

SEQ ID NO: 306971 - DNA, 19 bp, Homo sapiens
  siRNA target sequence for CENPF (NM_016343.2,6300-6318).
cagactgagtgaatcagat

SEQ ID NO: 306972 - DNA, 19 bp, Homo sapiens
  siRNA target sequence for CENPF (NM_016343.2,6448-6466).
cgcattgaggccgatgaaa

SEQ ID NO: 306973 - DNA, 19 bp, Homo sapiens
  siRNA target sequence for CENPF (NM_016343.2,6502-6520).
cgcgagcgggagaatgatt

SEQ ID NO: 306974 - DNA, 19 bp, Homo sapiens
  siRNA target sequence for CENPF (NM_016343.2,6504-6522).
cgagcgggagaatgattca

SEQ ID NO: 306975 - DNA, 19 bp, Homo sapiens
  siRNA target sequence for CENPF (NM_016343.2,6507-6525).
gcgggagaatgattcactt

SEQ ID NO: 306976 - DNA, 19 bp, Homo sapiens
  siRNA target sequence for CENPF (NM_016343.2,6508-6526).
cgggagaatgattcactta

SEQ ID NO: 306977 - DNA, 19 bp, Homo sapiens
  siRNA target sequence for CENPF (NM_016343.2,6513-6531).
gaatgattcacttaaggat

SEQ ID NO: 306978 - DNA, 19 bp, Homo sapiens
  siRNA target sequence for CENPF (NM_016343.2,6679-6697).
gaccttgtcacgttaaggt

SEQ ID NO: 306979 - DNA, 19 bp, Homo sapiens
  siRNA target sequence for CENPF (NM_016343.2,6685-6703).
gtcacgttaaggtctgaaa

SEQ ID NO: 306980 - DNA, 19 bp, Homo sapiens
  siRNA target sequence for CENPF (NM_016343.2,6751-6769).
gaactagacaagttactct

SEQ ID NO: 306981 - DNA, 19 bp, Homo sapiens
  siRNA target sequence for CENPF (NM_016343.2,6773-6791).
catttaaaagtctgttaga

SEQ ID NO: 306982 - DNA, 19 bp, Homo sapiens
  siRNA target sequence for CENPF (NM_016343.2,6814-6832).
cagatcaaagaagaatcta

SEQ ID NO: 306983 - DNA, 19 bp, Homo sapiens
  siRNA target sequence for CENPF (NM_016343.2,6899-6917).
gtgaccaagaaattatgaa

SEQ ID NO: 306984 - DNA, 19 bp, Homo sapiens
  siRNA target sequence for CENPF (NM_016343.2,6930-6948).
gagtctagacccaccaata

SEQ ID NO: 306985 - DNA, 19 bp, Homo sapiens
  siRNA target sequence for CENPF (NM_016343.2,6958-6976).
catcagctgagaaatagca

SEQ ID NO: 306986 - DNA, 19 bp, Homo sapiens
  siRNA target sequence for CENPF (NM_016343.2,6994-7012).
cgcctagaagctgatgaaa

SEQ ID NO: 306987 - DNA, 19 bp, Homo sapiens
  siRNA target sequence for CENPF (NM_016343.2,7049-7067).
gtgagcatcatgcagattt

SEQ ID NO: 306988 - DNA, 19 bp, Homo sapiens
  siRNA target sequence for CENPF (NM_016343.2,7107-7125).
gatagccaggacaaaccaa

SEQ ID NO: 306989 - DNA, 19 bp, Homo sapiens
  siRNA target sequence for CENPF (NM_016343.2,7165-7183).
gtagagaccctaaaagcaa

SEQ ID NO: 306990 - DNA, 19 bp, Homo sapiens
  siRNA target sequence for CENPF (NM_016343.2,7225-7243).
gatgttgttactataaggt

SEQ ID NO: 306991 - DNA, 19 bp, Homo sapiens
  siRNA target sequence for CENPF (NM_016343.2,7386-7404).
catggagatgcttcaaaca

SEQ ID NO: 306992 - DNA, 19 bp, Homo sapiens
  siRNA target sequence for CENPF (NM_016343.2,7464-7482).
ggccaaagagcagaatctt

SEQ ID NO: 306993 - DNA, 19 bp, Homo sapiens
  siRNA target sequence for CENPF (NM_016343.2,7473-7491).
gcagaatcttagtagtcaa

SEQ ID NO: 306994 - DNA, 19 bp, Homo sapiens
  siRNA target sequence for CENPF (NM_016343.2,7476-7494).
gaatcttagtagtcaagta

SEQ ID NO: 306995 - DNA, 19 bp, Homo sapiens
  siRNA target sequence for CENPF (NM_016343.2,7832-7850).
gttcttacaagaatctaga

SEQ ID NO: 306996 - DNA, 19 bp, Homo sapiens
  siRNA target sequence for CENPF (NM_016343.2,7835-7853).
cttacaagaatctagagaa

SEQ ID NO: 306997 - DNA, 19 bp, Homo sapiens
  siRNA target sequence for CENPF (NM_016343.2,7855-7873).
gagcttgaattgacaaaaa

SEQ ID NO: 306998 - DNA, 19 bp, Homo sapiens
  siRNA target sequence for CENPF (NM_016343.2,8022-8040).
gttactgttggaagaaata

SEQ ID NO: 306999 - DNA, 19 bp, Homo sapiens
  siRNA target sequence for CENPF (NM_016343.2,8061-8079).
gaaggagctcacactagaa

SEQ ID NO: 307000 - DNA, 19 bp, Homo sapiens
  siRNA target sequence for CENPF (NM_016343.2,8067-8085).
gctcacactagaaaatagt

SEQ ID NO: 307001 - DNA, 19 bp, Homo sapiens
  siRNA target sequence for CENPF (NM_016343.2,8219-8237).
caaacaaacagtatgaagt

SEQ ID NO: 307002 - DNA, 19 bp, Homo sapiens
  siRNA target sequence for CENPF (NM_016343.2,8244-8262).
ccagacataccgagagaaa

SEQ ID NO: 307003 - DNA, 19 bp, Homo sapiens
  siRNA target sequence for CENPF (NM_016343.2,8254-8272).
cgagagaaattgacttcta

SEQ ID NO: 307004 - DNA, 19 bp, Homo sapiens
  siRNA target sequence for CENPF (NM_016343.2,8437-8455).
cgtgcccaggggaaaatga

SEQ ID NO: 307005 - DNA, 19 bp, Homo sapiens
  siRNA target sequence for CENPF (NM_016343.2,8555-8573).
gtactgttatggataccaa

SEQ ID NO: 307006 - DNA, 19 bp, Homo sapiens
  siRNA target sequence for CENPF (NM_016343.2,8574-8592).
ggtcgatgaattaacaact

SEQ ID NO: 307007 - DNA, 19 bp, Homo sapiens
  siRNA target sequence for CENPF (NM_016343.2,8671-8689).
cttataagccatgaaaagt

SEQ ID NO: 307008 - DNA, 19 bp, Homo sapiens
  siRNA target sequence for CENPF (NM_016343.2,8679-8697).
ccatgaaaagttagagaaa

SEQ ID NO: 307009 - DNA, 19 bp, Homo sapiens
  siRNA target sequence for CENPF (NM_016343.2,8733-8751).
gtgttcacagcaatctaaa

SEQ ID NO: 307010 - DNA, 19 bp, Homo sapiens
  siRNA target sequence for CENPF (NM_016343.2,8735-8753).
gttcacagcaatctaaaca

SEQ ID NO: 307011 - DNA, 19 bp, Homo sapiens
  siRNA target sequence for CENPF (NM_016343.2,8760-8778).
ccgagggtctcctttgcta

SEQ ID NO: 307012 - DNA, 19 bp, Homo sapiens
  siRNA target sequence for CENPF (NM_016343.2,8948-8966).
cagtcatgagtggtattca

SEQ ID NO: 307013 - DNA, 19 bp, Homo sapiens
  siRNA target sequence for CENPF (NM_016343.2,8979-8997).
cacggaaggtactgagttt

SEQ ID NO: 307014 - DNA, 19 bp, Homo sapiens
  siRNA target sequence for CENPF (NM_016343.2,8981-8999).
cggaaggtactgagtttga

SEQ ID NO: 307015 - DNA, 19 bp, Homo sapiens
  siRNA target sequence for CENPF (NM_016343.2,9006-9024).
gggacttccagaagttgta

SEQ ID NO: 307016 - DNA, 19 bp, Homo sapiens
  siRNA target sequence for CENPF (NM_016343.2,9052-9070).
ggaaagactagcccatata

SEQ ID NO: 307017 - DNA, 19 bp, Homo sapiens
  siRNA target sequence for CENPF (NM_016343.2,9053-9071).
gaaagactagcccatatat

SEQ ID NO: 307018 - DNA, 19 bp, Homo sapiens
  siRNA target sequence for CENPF (NM_016343.2,9200-9218).
gatcacaaaaggtcaaagt

SEQ ID NO: 307019 - DNA, 19 bp, Homo sapiens
  siRNA target sequence for CENPF (NM_016343.2,9225-9243).
gcggagcccagtagattca

SEQ ID NO: 307020 - DNA, 19 bp, Homo sapiens
  siRNA target sequence for CENPF (NM_016343.2,9270-9288).
gaaatccgtcccagtcaat

SEQ ID NO: 307021 - DNA, 19 bp, Homo sapiens
  siRNA target sequence for CENPF (NM_016343.2,9275-9293).
ccgtcccagtcaataatct

SEQ ID NO: 307022 - DNA, 19 bp, Homo sapiens
  siRNA target sequence for ANAPC7 (NM_016238.1,157-175).
ctctttcatgataaggaat

SEQ ID NO: 307023 - DNA, 19 bp, Homo sapiens
  siRNA target sequence for ANAPC7 (NM_016238.1,178-196).
cggaatgctgtgagtaagt

SEQ ID NO: 307024 - DNA, 19 bp, Homo sapiens
  siRNA target sequence for ANAPC7 (NM_016238.1,185-203).
ctgtgagtaagtataccat

SEQ ID NO: 307025 - DNA, 19 bp, Homo sapiens
  siRNA target sequence for ANAPC7 (NM_016238.1,214-232).
cagaagaaagcgctaagta

SEQ ID NO: 307026 - DNA, 19 bp, Homo sapiens
  siRNA target sequence for ANAPC7 (NM_016238.1,216-234).
gaagaaagcgctaagtaaa

SEQ ID NO: 307027 - DNA, 19 bp, Homo sapiens
  siRNA target sequence for ANAPC7 (NM_016238.1,224-242).
cgctaagtaaaacttcaaa

SEQ ID NO: 307028 - DNA, 19 bp, Homo sapiens
  siRNA target sequence for ANAPC7 (NM_016238.1,269-287).
catctactccacaaagtca

SEQ ID NO: 307029 - DNA, 19 bp, Homo sapiens
  siRNA target sequence for ANAPC7 (NM_016238.1,379-397).
gggatcccttcaagacaaa

SEQ ID NO: 307030 - DNA, 19 bp, Homo sapiens
  siRNA target sequence for ANAPC7 (NM_016238.1,398-416).
gaactcccaaaataaacat

SEQ ID NO: 307031 - DNA, 19 bp, Homo sapiens
  siRNA target sequence for ANAPC7 (NM_016238.1,421-439).
ctggcaaacctgtacaaga

SEQ ID NO: 307032 - DNA, 19 bp, Homo sapiens
  siRNA target sequence for ANAPC7 (NM_016238.1,461-479).
cagtcaccagctataagga

SEQ ID NO: 307033 - DNA, 19 bp, Homo sapiens
  siRNA target sequence for ANAPC7 (NM_016238.1,521-539).
gcttgttgtccctttctgt

SEQ ID NO: 307034 - DNA, 19 bp, Homo sapiens
  siRNA target sequence for ANAPC7 (NM_016238.1,614-632).
ggatcaaagcgtatgcttt

SEQ ID NO: 307035 - DNA, 19 bp, Homo sapiens
  siRNA target sequence for ANAPC7 (NM_016238.1,615-633).
gatcaaagcgtatgctttt

SEQ ID NO: 307036 - DNA, 19 bp, Homo sapiens
  siRNA target sequence for ANAPC7 (NM_016238.1,648-666).
caactcaagagcaatcagt

SEQ ID NO: 307037 - DNA, 19 bp, Homo sapiens
  siRNA target sequence for ANAPC7 (NM_016238.1,663-681).
cagtaccatctgttcacta

SEQ ID NO: 307038 - DNA, 19 bp, Homo sapiens
  siRNA target sequence for ANAPC7 (NM_016238.1,668-686).
ccatctgttcactagagaa

SEQ ID NO: 307039 - DNA, 19 bp, Homo sapiens
  siRNA target sequence for ANAPC7 (NM_016238.1,692-710).
ccttattgcgagataacgt

SEQ ID NO: 307040 - DNA, 19 bp, Homo sapiens
  siRNA target sequence for ANAPC7 (NM_016238.1,701-719).
gagataacgtggacctatt

SEQ ID NO: 307041 - DNA, 19 bp, Homo sapiens
  siRNA target sequence for ANAPC7 (NM_016238.1,767-785).
ctgtcctcaagtttgaaca

SEQ ID NO: 307042 - DNA, 19 bp, Homo sapiens
  siRNA target sequence for ANAPC7 (NM_016238.1,795-813).
gttggatctttatctgata

SEQ ID NO: 307043 - DNA, 19 bp, Homo sapiens
  siRNA target sequence for ANAPC7 (NM_016238.1,880-898).
ggatgccgccttttcaata

SEQ ID NO: 307044 - DNA, 19 bp, Homo sapiens
  siRNA target sequence for ANAPC7 (NM_016238.1,881-899).
gatgccgccttttcaatat

SEQ ID NO: 307045 - DNA, 19 bp, Homo sapiens
  siRNA target sequence for ANAPC7 (NM_016238.1,1104-1122).
cgcaccttgtcgcttagat

SEQ ID NO: 307046 - DNA, 19 bp, Homo sapiens
  siRNA target sequence for ANAPC7 (NM_016238.1,1105-1123).
gcaccttgtcgcttagatt

SEQ ID NO: 307047 - DNA, 19 bp, Homo sapiens
  siRNA target sequence for ANAPC7 (NM_016238.1,1108-1126).
ccttgtcgcttagattgtt

SEQ ID NO: 307048 - DNA, 19 bp, Homo sapiens
  siRNA target sequence for ANAPC7 (NM_016238.1,1109-1127).
cttgtcgcttagattgtta

SEQ ID NO: 307049 - DNA, 19 bp, Homo sapiens
  siRNA target sequence for ANAPC7 (NM_016238.1,1112-1130).
gtcgcttagattgttatga

SEQ ID NO: 307050 - DNA, 19 bp, Homo sapiens
  siRNA target sequence for ANAPC7 (NM_016238.1,1124-1142).
gttatgaaggtcttatcga

SEQ ID NO: 307051 - DNA, 19 bp, Homo sapiens
  siRNA target sequence for ANAPC7 (NM_016238.1,1149-1167).
cttagcctccaacagtatt

SEQ ID NO: 307052 - DNA, 19 bp, Homo sapiens
  siRNA target sequence for ANAPC7 (NM_016238.1,1180-1198).
gtaatggctaacaacgttt

SEQ ID NO: 307053 - DNA, 19 bp, Homo sapiens
  siRNA target sequence for ANAPC7 (NM_016238.1,1185-1203).
ggctaacaacgtttacaaa

SEQ ID NO: 307054 - DNA, 19 bp, Homo sapiens
  siRNA target sequence for ANAPC7 (NM_016238.1,1186-1204).
gctaacaacgtttacaaaa

SEQ ID NO: 307055 - DNA, 19 bp, Homo sapiens
  siRNA target sequence for ANAPC7 (NM_016238.1,1241-1259).
ccaccgtttgtcttgaaga

SEQ ID NO: 307056 - DNA, 19 bp, Homo sapiens
  siRNA target sequence for ANAPC7 (NM_016238.1,1279-1297).
gccaaaacattattagata

SEQ ID NO: 307057 - DNA, 19 bp, Homo sapiens
  siRNA target sequence for ANAPC7 (NM_016238.1,1397-1415).
ggaacgcactggctaatca

SEQ ID NO: 307058 - DNA, 19 bp, Homo sapiens
  siRNA target sequence for ANAPC7 (NM_016238.1,1436-1454).
ggatcctaggagatttcct

SEQ ID NO: 307059 - DNA, 19 bp, Homo sapiens
  siRNA target sequence for ANAPC7 (NM_016238.1,1437-1455).
gatcctaggagatttcctt

SEQ ID NO: 307060 - DNA, 19 bp, Homo sapiens
  siRNA target sequence for ANAPC7 (NM_016238.1,1479-1497).
ggcaatggaccagtatagt

SEQ ID NO: 307061 - DNA, 19 bp, Homo sapiens
  siRNA target sequence for ANAPC7 (NM_016238.1,1480-1498).
gcaatggaccagtatagta

SEQ ID NO: 307062 - DNA, 19 bp, Homo sapiens
  siRNA target sequence for ANAPC7 (NM_016238.1,1481-1499).
caatggaccagtatagtat

SEQ ID NO: 307063 - DNA, 19 bp, Homo sapiens
  siRNA target sequence for ANAPC7 (NM_016238.1,1485-1503).
ggaccagtatagtatagca

SEQ ID NO: 307064 - DNA, 19 bp, Homo sapiens
  siRNA target sequence for ANAPC7 (NM_016238.1,1491-1509).
gtatagtatagcactaagt

SEQ ID NO: 307065 - DNA, 19 bp, Homo sapiens
  siRNA target sequence for BCL2 (NM_000633.1,45-63).
ggagaacagggtacgataa

SEQ ID NO: 307066 - DNA, 19 bp, Homo sapiens
  siRNA target sequence for BCL2 (NM_000633.1,59-77).
gataaccgggagatagtga

SEQ ID NO: 307067 - DNA, 19 bp, Homo sapiens
  siRNA target sequence for BCL2 (NM_000633.1,74-92).
gtgatgaagtacatccatt

SEQ ID NO: 307068 - DNA, 19 bp, Homo sapiens
  siRNA target sequence for BCL2 (NM_000633.1,76-94).
gatgaagtacatccattat

SEQ ID NO: 307069 - DNA, 19 bp, Homo sapiens
  siRNA target sequence for BTG3 (NM_006806.3,169-187).
gctgccgttgtcttctttt

SEQ ID NO: 307070 - DNA, 19 bp, Homo sapiens
  siRNA target sequence for BTG3 (NM_006806.3,175-193).
gttgtcttctttttcacaa

SEQ ID NO: 307071 - DNA, 19 bp, Homo sapiens
  siRNA target sequence for BTG3 (NM_006806.3,189-207).
cacaaggctagttcgaaaa

SEQ ID NO: 307072 - DNA, 19 bp, Homo sapiens
  siRNA target sequence for BTG3 (NM_006806.3,194-212).
ggctagttcgaaaacatga

SEQ ID NO: 307073 - DNA, 19 bp, Homo sapiens
  siRNA target sequence for BTG3 (NM_006806.3,195-213).
gctagttcgaaaacatgat

SEQ ID NO: 307074 - DNA, 19 bp, Homo sapiens
  siRNA target sequence for BTG3 (NM_006806.3,196-214).
ctagttcgaaaacatgata

SEQ ID NO: 307075 - DNA, 19 bp, Homo sapiens
  siRNA target sequence for BTG3 (NM_006806.3,202-220).
cgaaaacatgataagttga

SEQ ID NO: 307076 - DNA, 19 bp, Homo sapiens
  siRNA target sequence for BTG3 (NM_006806.3,249-267).
gaaattgaccctaatactt

SEQ ID NO: 307077 - DNA, 19 bp, Homo sapiens
  siRNA target sequence for BTG3 (NM_006806.3,313-331).
ggacaggcctacagatgta

SEQ ID NO: 307078 - DNA, 19 bp, Homo sapiens
  siRNA target sequence for BTG3 (NM_006806.3,324-342).
cagatgtattcgtgtcaat

SEQ ID NO: 307079 - DNA, 19 bp, Homo sapiens
  siRNA target sequence for BTG3 (NM_006806.3,326-344).
gatgtattcgtgtcaataa

SEQ ID NO: 307080 - DNA, 19 bp, Homo sapiens
  siRNA target sequence for BTG3 (NM_006806.3,382-400).
gaaaacagctgcatcttgt

SEQ ID NO: 307081 - DNA, 19 bp, Homo sapiens
  siRNA target sequence for BTG3 (NM_006806.3,387-405).
cagctgcatcttgtatagt

SEQ ID NO: 307082 - DNA, 19 bp, Homo sapiens
  siRNA target sequence for BTG3 (NM_006806.3,489-507).
cattgttgccagctttgaa

SEQ ID NO: 307083 - DNA, 19 bp, Homo sapiens
  siRNA target sequence for BTG3 (NM_006806.3,544-562).
gttaccagggcccttgata

SEQ ID NO: 307084 - DNA, 19 bp, Homo sapiens
  siRNA target sequence for BTG3 (NM_006806.3,559-577).
gataaggttacctctgatt

SEQ ID NO: 307085 - DNA, 19 bp, Homo sapiens
  siRNA target sequence for BTG3 (NM_006806.3,564-582).
ggttacctctgattatcat

SEQ ID NO: 307086 - DNA, 19 bp, Homo sapiens
  siRNA target sequence for BTG3 (NM_006806.3,565-583).
gttacctctgattatcatt

SEQ ID NO: 307087 - DNA, 19 bp, Homo sapiens
  siRNA target sequence for BTG3 (NM_006806.3,580-598).
cattcaggatcctcttctt

SEQ ID NO: 307088 - DNA, 19 bp, Homo sapiens
  siRNA target sequence for BTG3 (NM_006806.3,670-688).
cagatttcagaacttatat

SEQ ID NO: 307089 - DNA, 19 bp, Homo sapiens
  siRNA target sequence for BTG3 (NM_006806.3,708-726).
gcaccctttgcccagaaaa

SEQ ID NO: 307090 - DNA, 19 bp, Homo sapiens
  siRNA target sequence for BTG3 (NM_006806.3,778-796).
gttccatttggttatccaa

SEQ ID NO: 307091 - DNA, 19 bp, Homo sapiens
  siRNA target sequence for BTG3 (NM_006806.3,862-880).
cattgtgaccggaatcact

SEQ ID NO: 307092 - DNA, 19 bp, Homo sapiens
  siRNA target sequence for BTG3 (NM_006806.3,868-886).
gaccggaatcactggatta

SEQ ID NO: 307093 - DNA, 19 bp, Homo sapiens
  siRNA target sequence for BTG3 (NM_006806.3,870-888).
ccggaatcactggattaat

SEQ ID NO: 307094 - DNA, 19 bp, Homo sapiens
  siRNA target sequence for BTG3 (NM_006806.3,873-891).
gaatcactggattaatcct

SEQ ID NO: 307095 - DNA, 19 bp, Homo sapiens
  siRNA target sequence for BTG3 (NM_006806.3,881-899).
ggattaatcctcacatgtt

SEQ ID NO: 307096 - DNA, 19 bp, Homo sapiens
  siRNA target sequence for BTG3 (NM_006806.3,882-900).
gattaatcctcacatgtta

SEQ ID NO: 307097 - DNA, 19 bp, Homo sapiens
  siRNA target sequence for CCNB1 (NM_031966.2,190-208).
gtcaccaggaactcgaaaa

SEQ ID NO: 307098 - DNA, 19 bp, Homo sapiens
  siRNA target sequence for CCNB1 (NM_031966.2,192-210).
caccaggaactcgaaaatt

SEQ ID NO: 307099 - DNA, 19 bp, Homo sapiens
  siRNA target sequence for CCNB1 (NM_031966.2,198-216).
gaactcgaaaattaatgct

SEQ ID NO: 307100 - DNA, 19 bp, Homo sapiens
  siRNA target sequence for CCNB1 (NM_031966.2,217-235).
gaaaataaggcgaagatca

SEQ ID NO: 307101 - DNA, 19 bp, Homo sapiens
  siRNA target sequence for CCNB1 (NM_031966.2,308-326).
ctcttggggacattggtaa

SEQ ID NO: 307102 - DNA, 19 bp, Homo sapiens
  siRNA target sequence for CCNB1 (NM_031966.2,314-332).
gggacattggtaacaaagt

SEQ ID NO: 307103 - DNA, 19 bp, Homo sapiens
  siRNA target sequence for CCNB1 (NM_031966.2,383-401).
cagctactggaaaagtcat

SEQ ID NO: 307104 - DNA, 19 bp, Homo sapiens
  siRNA target sequence for CCNB1 (NM_031966.2,520-538).
ctttcgcctgagcctattt

SEQ ID NO: 307105 - DNA, 19 bp, Homo sapiens
  siRNA target sequence for CCNB1 (NM_031966.2,524-542).
cgcctgagcctattttggt

SEQ ID NO: 307106 - DNA, 19 bp, Homo sapiens
  siRNA target sequence for CCNB1 (NM_031966.2,531-549).
gcctattttggttgatact

SEQ ID NO: 307107 - DNA, 19 bp, Homo sapiens
  siRNA target sequence for CCNB1 (NM_031966.2,607-625).
caggctttctctgatgtaa

SEQ ID NO: 307108 - DNA, 19 bp, Homo sapiens
  siRNA target sequence for CCNB1 (NM_031966.2,661-679).
gctgatccaaacctttgta

SEQ ID NO: 307109 - DNA, 19 bp, Homo sapiens
  siRNA target sequence for CCNB1 (NM_031966.2,677-695).
gtagtgaatatgtgaaaga

SEQ ID NO: 307110 - DNA, 19 bp, Homo sapiens
  siRNA target sequence for CCNB1 (NM_031966.2,680-698).
gtgaatatgtgaaagatat

SEQ ID NO: 307111 - DNA, 19 bp, Homo sapiens
  siRNA target sequence for CCNB1 (NM_031966.2,688-706).
gtgaaagatatttatgctt

SEQ ID NO: 307112 - DNA, 19 bp, Homo sapiens
  siRNA target sequence for CCNB1 (NM_031966.2,734-752).
cagtcagaccaaaatacct

SEQ ID NO: 307113 - DNA, 19 bp, Homo sapiens
  siRNA target sequence for CCNB1 (NM_031966.2,777-795).
catgagagccatcctaatt

SEQ ID NO: 307114 - DNA, 19 bp, Homo sapiens
  siRNA target sequence for CCNB1 (NM_031966.2,802-820).
ctagtacaggttcaaatga

SEQ ID NO: 307115 - DNA, 19 bp, Homo sapiens
  siRNA target sequence for CCNB1 (NM_031966.2,805-823).
gtacaggttcaaatgaaat

SEQ ID NO: 307116 - DNA, 19 bp, Homo sapiens
  siRNA target sequence for CCNB1 (NM_031966.2,852-870).
gactgtctccattattgat

SEQ ID NO: 307117 - DNA, 19 bp, Homo sapiens
  siRNA target sequence for CCNB1 (NM_031966.2,868-886).
gatcggttcatgcagaata

SEQ ID NO: 307118 - DNA, 19 bp, Homo sapiens
  siRNA target sequence for CCNB1 (NM_031966.2,871-889).
cggttcatgcagaataatt

SEQ ID NO: 307119 - DNA, 19 bp, Homo sapiens
  siRNA target sequence for CCNB1 (NM_031966.2,930-948).
catgtttattgcaagcaaa

SEQ ID NO: 307120 - DNA, 19 bp, Homo sapiens
  siRNA target sequence for CCNB1 (NM_031966.2,933-951).
gtttattgcaagcaaatat

SEQ ID NO: 307121 - DNA, 19 bp, Homo sapiens
  siRNA target sequence for CCNB1 (NM_031966.2,960-978).
gtaccctccagaaattggt

SEQ ID NO: 307122 - DNA, 19 bp, Homo sapiens
  siRNA target sequence for CCNB1 (NM_031966.2,970-988).
gaaattggtgactttgctt

SEQ ID NO: 307123 - DNA, 19 bp, Homo sapiens
  siRNA target sequence for CCNB1 (NM_031966.2,991-1009).
gtgactgacaacacttata

SEQ ID NO: 307124 - DNA, 19 bp, Homo sapiens
  siRNA target sequence for CCNB1 (NM_031966.2,995-1013).
ctgacaacacttatactaa

SEQ ID NO: 307125 - DNA, 19 bp, Homo sapiens
  siRNA target sequence for CCNB1 (NM_031966.2,1093-1111).
cttcggagagcatctaaga

SEQ ID NO: 307126 - DNA, 19 bp, Homo sapiens
  siRNA target sequence for CCNB1 (NM_031966.2,1120-1138).
gttgatgtcgagcaacata

SEQ ID NO: 307127 - DNA, 19 bp, Homo sapiens
  siRNA target sequence for CCNB1 (NM_031966.2,1123-1141).
gatgtcgagcaacatactt

SEQ ID NO: 307128 - DNA, 19 bp, Homo sapiens
  siRNA target sequence for CCNB1 (NM_031966.2,1166-1184).
ctatgttggactatgacat

SEQ ID NO: 307129 - DNA, 19 bp, Homo sapiens
  siRNA target sequence for CCNB1 (NM_031966.2,1262-1280).
caccaactctacaacatta

SEQ ID NO: 307130 - DNA, 19 bp, Homo sapiens
  siRNA target sequence for CCNB1 (NM_031966.2,1284-1302).
gtcatatactgaagaatct

SEQ ID NO: 307131 - DNA, 19 bp, Homo sapiens
  siRNA target sequence for CCNB1 (NM_031966.2,1320-1338).
gcacctggctaagaatgta

SEQ ID NO: 307132 - DNA, 19 bp, Homo sapiens
  siRNA target sequence for CCNB1 (NM_031966.2,1332-1350).
gaatgtagtcatggtaaat

SEQ ID NO: 307133 - DNA, 19 bp, Homo sapiens
  siRNA target sequence for CCNB1 (NM_031966.2,1344-1362).
ggtaaatcaaggacttaca

SEQ ID NO: 307134 - DNA, 19 bp, Homo sapiens
  siRNA target sequence for CCNB1 (NM_031966.2,1394-1412).
catcgaagcatgctaagat

SEQ ID NO: 307135 - DNA, 19 bp, Homo sapiens
  siRNA target sequence for CCNB1 (NM_031966.2,1428-1446).
gctgaattctgcactagtt

SEQ ID NO: 307136 - DNA, 19 bp, Homo sapiens
  siRNA target sequence for CCNB1 (NM_031966.2,1431-1449).
gaattctgcactagttcaa

SEQ ID NO: 307137 - DNA, 19 bp, Homo sapiens
  siRNA target sequence for CCNB2 (NM_004701.2,167-185).
ccgacggtgtccagtgatt

SEQ ID NO: 307138 - DNA, 19 bp, Homo sapiens
  siRNA target sequence for CCNB2 (NM_004701.2,168-186).
cgacggtgtccagtgattt

SEQ ID NO: 307139 - DNA, 19 bp, Homo sapiens
  siRNA target sequence for CCNB2 (NM_004701.2,199-217).
cacaggagttaattctaaa

SEQ ID NO: 307140 - DNA, 19 bp, Homo sapiens
  siRNA target sequence for CCNB2 (NM_004701.2,232-250).
gactattaggcgaactgtt

SEQ ID NO: 307141 - DNA, 19 bp, Homo sapiens
  siRNA target sequence for CCNB2 (NM_004701.2,234-252).
ctattaggcgaactgtttt

SEQ ID NO: 307142 - DNA, 19 bp, Homo sapiens
  siRNA target sequence for CCNB2 (NM_004701.2,240-258).
ggcgaactgttttagaaga

SEQ ID NO: 307143 - DNA, 19 bp, Homo sapiens
  siRNA target sequence for CCNB2 (NM_004701.2,241-259).
gcgaactgttttagaagaa

SEQ ID NO: 307144 - DNA, 19 bp, Homo sapiens
  siRNA target sequence for CCNB2 (NM_004701.2,242-260).
cgaactgttttagaagaaa

SEQ ID NO: 307145 - DNA, 19 bp, Homo sapiens
  siRNA target sequence for CCNB2 (NM_004701.2,285-303).
cagcacaagtagctaagaa

SEQ ID NO: 307146 - DNA, 19 bp, Homo sapiens
  siRNA target sequence for CCNB2 (NM_004701.2,378-396).
ctgtcaaaccagtacagat

SEQ ID NO: 307147 - DNA, 19 bp, Homo sapiens
  siRNA target sequence for CCNB2 (NM_004701.2,483-501).
ccttgctctgcaaaatcga

SEQ ID NO: 307148 - DNA, 19 bp, Homo sapiens
  siRNA target sequence for CCNB2 (NM_004701.2,536-554).
ctctgcagtgactacgtta

SEQ ID NO: 307149 - DNA, 19 bp, Homo sapiens
  siRNA target sequence for CCNB2 (NM_004701.2,541-559).
cagtgactacgttaaggat

SEQ ID NO: 307150 - DNA, 19 bp, Homo sapiens
  siRNA target sequence for CCNB2 (NM_004701.2,543-561).
gtgactacgttaaggatat

SEQ ID NO: 307151 - DNA, 19 bp, Homo sapiens
  siRNA target sequence for CCNB2 (NM_004701.2,545-563).
gactacgttaaggatatct

SEQ ID NO: 307152 - DNA, 19 bp, Homo sapiens
  siRNA target sequence for CCNB2 (NM_004701.2,557-575).
gatatctatcagtatctca

SEQ ID NO: 307153 - DNA, 19 bp, Homo sapiens
  siRNA target sequence for CCNB2 (NM_004701.2,584-602).
gaggttttgcagtccataa

SEQ ID NO: 307154 - DNA, 19 bp, Homo sapiens
  siRNA target sequence for CCNB2 (NM_004701.2,671-689).
caagtccactccaagttta

SEQ ID NO: 307155 - DNA, 19 bp, Homo sapiens
  siRNA target sequence for CCNB2 (NM_004701.2,698-716).
caggagactctgtacatgt

SEQ ID NO: 307156 - DNA, 19 bp, Homo sapiens
  siRNA target sequence for CCNB2 (NM_004701.2,715-733).
gtgcgttggcattatggat

SEQ ID NO: 307157 - DNA, 19 bp, Homo sapiens
  siRNA target sequence for CCNB2 (NM_004701.2,760-778).
ccggaagaagcttcaatta

SEQ ID NO: 307158 - DNA, 19 bp, Homo sapiens
  siRNA target sequence for CCNB2 (NM_004701.2,762-780).
ggaagaagcttcaattagt

SEQ ID NO: 307159 - DNA, 19 bp, Homo sapiens
  siRNA target sequence for CCNB2 (NM_004701.2,763-781).
gaagaagcttcaattagtt

SEQ ID NO: 307160 - DNA, 19 bp, Homo sapiens
  siRNA target sequence for CCNB2 (NM_004701.2,796-814).
gctcttggcttccaagtat

SEQ ID NO: 307161 - DNA, 19 bp, Homo sapiens
  siRNA target sequence for CCNB2 (NM_004701.2,811-829).
gtatgaggagatgttttct

SEQ ID NO: 307162 - DNA, 19 bp, Homo sapiens
  siRNA target sequence for CCNB2 (NM_004701.2,876-894).
gttcccaaatccgagaaat

SEQ ID NO: 307163 - DNA, 19 bp, Homo sapiens
  siRNA target sequence for CCNB2 (NM_004701.2,998-1016).
cacactttagccaagtatt

SEQ ID NO: 307164 - DNA, 19 bp, Homo sapiens
  siRNA target sequence for CCNB2 (NM_004701.2,1027-1045).
gactctcatcgactatgat

SEQ ID NO: 307165 - DNA, 19 bp, Homo sapiens
  siRNA target sequence for CCNB2 (NM_004701.2,1103-1121).
gttctaggacaaggaaaat

SEQ ID NO: 307166 - DNA, 19 bp, Homo sapiens
  siRNA target sequence for CCNB2 (NM_004701.2,1144-1162).
cacaggatacacagagaat

SEQ ID NO: 307167 - DNA, 19 bp, Homo sapiens
  siRNA target sequence for CCNB2 (NM_004701.2,1149-1167).
gatacacagagaatgaagt

SEQ ID NO: 307168 - DNA, 19 bp, Homo sapiens
  siRNA target sequence for CCNB2 (NM_004701.2,1315-1333).
ccttgcctccccactgata

SEQ ID NO: 307169 - DNA, 19 bp, Homo sapiens
  siRNA target sequence for CCNB2 (NM_004701.2,1319-1337).
gcctccccactgataggaa

SEQ ID NO: 307170 - DNA, 19 bp, Homo sapiens
  siRNA target sequence for CCNB3 (NM_033031.1,148-166).
caaacctgtgcctaagaaa

SEQ ID NO: 307171 - DNA, 19 bp, Homo sapiens
  siRNA target sequence for CCNB3 (NM_033031.1,219-237).
gggagaattgccaaacgaa

SEQ ID NO: 307172 - DNA, 19 bp, Homo sapiens
  siRNA target sequence for CCNB3 (NM_033031.1,278-296).
cagggagcactcaaaaaga

SEQ ID NO: 307173 - DNA, 19 bp, Homo sapiens
  siRNA target sequence for CCNB3 (NM_033031.1,380-398).
gttgtttccaagaagataa

SEQ ID NO: 307174 - DNA, 19 bp, Homo sapiens
  siRNA target sequence for CCNB3 (NM_033031.1,463-481).
ggaagtcacaccagtagta

SEQ ID NO: 307175 - DNA, 19 bp, Homo sapiens
  siRNA target sequence for CCNB3 (NM_033031.1,486-504).
ctactaccgtggtaccaaa

SEQ ID NO: 307176 - DNA, 19 bp, Homo sapiens
  siRNA target sequence for CCNB3 (NM_033031.1,489-507).
ctaccgtggtaccaaacat

SEQ ID NO: 307177 - DNA, 19 bp, Homo sapiens
  siRNA target sequence for CCNB3 (NM_033031.1,492-510).
ccgtggtaccaaacattat

SEQ ID NO: 307178 - DNA, 19 bp, Homo sapiens
  siRNA target sequence for CCNB3 (NM_033031.1,511-529).
ggagaaaccactcattcta

SEQ ID NO: 307179 - DNA, 19 bp, Homo sapiens
  siRNA target sequence for CCNB3 (NM_033031.1,518-536).
ccactcattctagacatat

SEQ ID NO: 307180 - DNA, 19 bp, Homo sapiens
  siRNA target sequence for CCNB3 (NM_033031.1,617-635).
gaggatgaaacccttatca

SEQ ID NO: 307181 - DNA, 19 bp, Homo sapiens
  siRNA target sequence for CCNB3 (NM_033031.1,619-637).
ggatgaaacccttatcaat

SEQ ID NO: 307182 - DNA, 19 bp, Homo sapiens
  siRNA target sequence for CCNB3 (NM_033031.1,620-638).
gatgaaacccttatcaata

SEQ ID NO: 307183 - DNA, 19 bp, Homo sapiens
  siRNA target sequence for CCNB3 (NM_033031.1,792-810).
ccaagaagacattatcctt

SEQ ID NO: 307184 - DNA, 19 bp, Homo sapiens
  siRNA target sequence for CCNB3 (NM_033031.1,865-883).
ggctgtgcaggatgtcaat

SEQ ID NO: 307185 - DNA, 19 bp, Homo sapiens
  siRNA target sequence for CCNB3 (NM_033031.1,866-884).
gctgtgcaggatgtcaata

SEQ ID NO: 307186 - DNA, 19 bp, Homo sapiens
  siRNA target sequence for CCNB3 (NM_033031.1,867-885).
ctgtgcaggatgtcaatat

SEQ ID NO: 307187 - DNA, 19 bp, Homo sapiens
  siRNA target sequence for CCNB3 (NM_033031.1,901-919).
ctttatggagtcaatgagt

SEQ ID NO: 307188 - DNA, 19 bp, Homo sapiens
  siRNA target sequence for CCNB3 (NM_033031.1,952-970).
ccccacccataagttatca

SEQ ID NO: 307189 - DNA, 19 bp, Homo sapiens
  siRNA target sequence for CCNB3 (NM_033031.1,953-971).
cccacccataagttatcat

SEQ ID NO: 307190 - DNA, 19 bp, Homo sapiens
  siRNA target sequence for CCNB3 (NM_033031.1,955-973).
cacccataagttatcatct

SEQ ID NO: 307191 - DNA, 19 bp, Homo sapiens
  siRNA target sequence for CCNB3 (NM_033031.1,1050-1068).
gagcaatgtcctccattaa

SEQ ID NO: 307192 - DNA, 19 bp, Homo sapiens
  siRNA target sequence for CCNB3 (NM_033031.1,1052-1070).
gcaatgtcctccattaaga

SEQ ID NO: 307193 - DNA, 19 bp, Homo sapiens
  siRNA target sequence for CCNB3 (NM_033031.1,1053-1071).
caatgtcctccattaagaa

SEQ ID NO: 307194 - DNA, 19 bp, Homo sapiens
  siRNA target sequence for CCNB3 (NM_033031.1,1139-1157).
catgagatgtccatcttga

SEQ ID NO: 307195 - DNA, 19 bp, Homo sapiens
  siRNA target sequence for CCNB3 (NM_033031.1,1147-1165).
gtccatcttgaagaaatca

SEQ ID NO: 307196 - DNA, 19 bp, Homo sapiens
  siRNA target sequence for CCNB3 (NM_033031.1,1211-1229).
gagtcgttagcctttaaga

SEQ ID NO: 307197 - DNA, 19 bp, Homo sapiens
  siRNA target sequence for CCNB3 (NM_033031.1,1239-1257).
gcactgaggaggcaatcat

SEQ ID NO: 307198 - DNA, 19 bp, Homo sapiens
  siRNA target sequence for CCNB3 (NM_033031.1,1305-1323).
cccgtctgaagccattagt

SEQ ID NO: 307199 - DNA, 19 bp, Homo sapiens
  siRNA target sequence for CCNB3 (NM_033031.1,1306-1324).
ccgtctgaagccattagta

SEQ ID NO: 307200 - DNA, 19 bp, Homo sapiens
  siRNA target sequence for CCNB3 (NM_033031.1,1307-1325).
cgtctgaagccattagtat

SEQ ID NO: 307201 - DNA, 19 bp, Homo sapiens
  siRNA target sequence for CCNB3 (NM_033031.1,1308-1326).
gtctgaagccattagtatt

SEQ ID NO: 307202 - DNA, 19 bp, Homo sapiens
  siRNA target sequence for CCNB3 (NM_033031.1,1343-1361).
ggagagaagtcgctcatta

SEQ ID NO: 307203 - DNA, 19 bp, Homo sapiens
  siRNA target sequence for CCNB3 (NM_033031.1,1344-1362).
gagagaagtcgctcattat

SEQ ID NO: 307204 - DNA, 19 bp, Homo sapiens
  siRNA target sequence for CCNB3 (NM_033031.1,1346-1364).
gagaagtcgctcattatga

SEQ ID NO: 307205 - DNA, 19 bp, Homo sapiens
  siRNA target sequence for CCNB3 (NM_033031.1,1449-1467).
ctcaggaggaggtttccat

SEQ ID NO: 307206 - DNA, 19 bp, Homo sapiens
  siRNA target sequence for CCNB3 (NM_033031.1,1480-1498).
ctcgtccttgctaaagtct

SEQ ID NO: 307207 - DNA, 19 bp, Homo sapiens
  siRNA target sequence for CCNB3 (NM_033031.1,1503-1521).
ctgaggagtcaccttttga

SEQ ID NO: 307208 - DNA, 19 bp, Homo sapiens
  siRNA target sequence for CCNB3 (NM_033031.1,1532-1550).
gcttttacaaagaagtgta

SEQ ID NO: 307209 - DNA, 19 bp, Homo sapiens
  siRNA target sequence for CCNB3 (NM_033031.1,1728-1746).
gtaccacacaagagatgat

SEQ ID NO: 307210 - DNA, 19 bp, Homo sapiens
  siRNA target sequence for CCNB3 (NM_033031.1,1778-1796).
gatatgattggtgaagata

SEQ ID NO: 307211 - DNA, 19 bp, Homo sapiens
  siRNA target sequence for CCNB3 (NM_033031.1,1814-1832).
gagccaatgtcatttagga

SEQ ID NO: 307212 - DNA, 19 bp, Homo sapiens
  siRNA target sequence for CCNB3 (NM_033031.1,1958-1976).
gaggagtcattctataaga

SEQ ID NO: 307213 - DNA, 19 bp, Homo sapiens
  siRNA target sequence for CCNB3 (NM_033031.1,1979-1997).
ctgttgccctttaagatga

SEQ ID NO: 307214 - DNA, 19 bp, Homo sapiens
  siRNA target sequence for CCNB3 (NM_033031.1,1987-2005).
ctttaagatgaaatctaca

SEQ ID NO: 307215 - DNA, 19 bp, Homo sapiens
  siRNA target sequence for CCNB3 (NM_033031.1,2091-2109).
cattggccatccaagagaa

SEQ ID NO: 307216 - DNA, 19 bp, Homo sapiens
  siRNA target sequence for CCNB3 (NM_033031.1,2279-2297).
gaagagtcccttatcaata

SEQ ID NO: 307217 - DNA, 19 bp, Homo sapiens
  siRNA target sequence for CCNB3 (NM_033031.1,2284-2302).
gtcccttatcaataagcta

SEQ ID NO: 307218 - DNA, 19 bp, Homo sapiens
  siRNA target sequence for CCNB3 (NM_033031.1,2344-2362).
catacagacacaattatct

SEQ ID NO: 307219 - DNA, 19 bp, Homo sapiens
  siRNA target sequence for CCNB3 (NM_033031.1,2368-2386).
gaagaagtccacttctcat

SEQ ID NO: 307220 - DNA, 19 bp, Homo sapiens
  siRNA target sequence for CCNB3 (NM_033031.1,2382-2400).
ctcatggaaaagtgttctt

SEQ ID NO: 307221 - DNA, 19 bp, Homo sapiens
  siRNA target sequence for CCNB3 (NM_033031.1,2411-2429).
cagttggctttgaatgaga

SEQ ID NO: 307222 - DNA, 19 bp, Homo sapiens
  siRNA target sequence for CCNB3 (NM_033031.1,2866-2884).
gaagatgtctaccatcaat

SEQ ID NO: 307223 - DNA, 19 bp, Homo sapiens
  siRNA target sequence for CCNB3 (NM_033031.1,3323-3341).
gagaagtccagcattgcaa

SEQ ID NO: 307224 - DNA, 19 bp, Homo sapiens
  siRNA target sequence for CCNB3 (NM_033031.1,3376-3394).
cgagtccagtgcatgtgaa

SEQ ID NO: 307225 - DNA, 19 bp, Homo sapiens
  siRNA target sequence for CCNB3 (NM_033031.1,3379-3397).
gtccagtgcatgtgaatct

SEQ ID NO: 307226 - DNA, 19 bp, Homo sapiens
  siRNA target sequence for CCNB3 (NM_033031.1,3450-3468).
ccccacgggaagatattga

SEQ ID NO: 307227 - DNA, 19 bp, Homo sapiens
  siRNA target sequence for CCNB3 (NM_033031.1,3451-3469).
cccacgggaagatattgat

SEQ ID NO: 307228 - DNA, 19 bp, Homo sapiens
  siRNA target sequence for CCNB3 (NM_033031.1,3477-3495).
gcagtgatccaagtttcaa

SEQ ID NO: 307229 - DNA, 19 bp, Homo sapiens
  siRNA target sequence for CCNB3 (NM_033031.1,3507-3525).
ccaaggaaatcttcagtta

SEQ ID NO: 307230 - DNA, 19 bp, Homo sapiens
  siRNA target sequence for CCNB3 (NM_033031.1,3541-3559).
ggaacagtttatacttaca

SEQ ID NO: 307231 - DNA, 19 bp, Homo sapiens
  siRNA target sequence for CCNB3 (NM_033031.1,3651-3669).
cccatgagaccctgtactt

SEQ ID NO: 307232 - DNA, 19 bp, Homo sapiens
  siRNA target sequence for CCNB3 (NM_033031.1,3712-3730).
caagaaggataagttacaa

SEQ ID NO: 307233 - DNA, 19 bp, Homo sapiens
  siRNA target sequence for CCNB3 (NM_033031.1,3738-3756).
gtgccactgcctttatgat

SEQ ID NO: 307234 - DNA, 19 bp, Homo sapiens
  siRNA target sequence for CCNB3 (NM_033031.1,3783-3801).
cacctcgtgtggatgactt

SEQ ID NO: 307235 - DNA, 19 bp, Homo sapiens
  siRNA target sequence for CCNB3 (NM_033031.1,3786-3804).
ctcgtgtggatgactttgt

SEQ ID NO: 307236 - DNA, 19 bp, Homo sapiens
  siRNA target sequence for CCNB3 (NM_033031.1,3788-3806).
cgtgtggatgactttgtgt

SEQ ID NO: 307237 - DNA, 19 bp, Homo sapiens
  siRNA target sequence for CCNB3 (NM_033031.1,3808-3826).
catctgtgatgataattat

SEQ ID NO: 307238 - DNA, 19 bp, Homo sapiens
  siRNA target sequence for CCNB3 (NM_033031.1,3836-3854).
gaggtactcagcatggaaa

SEQ ID NO: 307239 - DNA, 19 bp, Homo sapiens
  siRNA target sequence for CCNB3 (NM_033031.1,4099-4117).
cagtggctacagtatctct

SEQ ID NO: 307240 - DNA, 19 bp, Homo sapiens
  siRNA target sequence for CCNB3 (NM_033031.1,4156-4174).
gactttcagttcttacgat

SEQ ID NO: 307241 - DNA, 19 bp, Homo sapiens
  siRNA target sequence for CCNB3 (NM_033031.1,4178-4196).
ctcaaggctgtgtattaca

SEQ ID NO: 307242 - DNA, 19 bp, Homo sapiens
  siRNA target sequence for CCNB3 (NM_033031.1,4203-4221).
ctcacccggtcttctttga

SEQ ID NO: 307243 - DNA, 19 bp, Homo sapiens
  siRNA target sequence for CCNB3 (NM_033031.1,4235-4253).
cctgccttggatatgttga

SEQ ID NO: 307244 - DNA, 19 bp, Homo sapiens
  siRNA target sequence for CCNB3 (NM_033670.1,318-336).
ctaatgtgtcctttgagat

SEQ ID NO: 307245 - DNA, 19 bp, Homo sapiens
  siRNA target sequence for CCND1 (NM_053056.1,328-346).
cctcggtgtcctacttcaa

SEQ ID NO: 307246 - DNA, 19 bp, Homo sapiens
  siRNA target sequence for CCND1 (NM_053056.1,329-347).
ctcggtgtcctacttcaaa

SEQ ID NO: 307247 - DNA, 19 bp, Homo sapiens
  siRNA target sequence for CCND1 (NM_053056.1,332-350).
ggtgtcctacttcaaatgt

SEQ ID NO: 307248 - DNA, 19 bp, Homo sapiens
  siRNA target sequence for CCND1 (NM_053056.1,478-496).
cgctggagcccgtgaaaaa

SEQ ID NO: 307249 - DNA, 19 bp, Homo sapiens
  siRNA target sequence for CCND1 (NM_053056.1,674-692).
gaccccgcacgatttcatt

SEQ ID NO: 307250 - DNA, 19 bp, Homo sapiens
  siRNA target sequence for CCND1 (NM_053056.1,676-694).
ccccgcacgatttcattga

SEQ ID NO: 307251 - DNA, 19 bp, Homo sapiens
  siRNA target sequence for CCND1 (NM_053056.1,677-695).
cccgcacgatttcattgaa

SEQ ID NO: 307252 - DNA, 19 bp, Homo sapiens
  siRNA target sequence for CCND1 (NM_053056.1,679-697).
cgcacgatttcattgaaca

SEQ ID NO: 307253 - DNA, 19 bp, Homo sapiens
  siRNA target sequence for CCND1 (NM_053056.1,721-739).
cggaggagaacaaacagat

SEQ ID NO: 307254 - DNA, 19 bp, Homo sapiens
  siRNA target sequence for CCND2 (NM_001759.2,385-403).
cgcagtgctcctacttcaa

SEQ ID NO: 307255 - DNA, 19 bp, Homo sapiens
  siRNA target sequence for CCND2 (NM_001759.2,696-714).
gtgctggggaagttgaagt

SEQ ID NO: 307256 - DNA, 19 bp, Homo sapiens
  siRNA target sequence for CCND2 (NM_001759.2,731-749).
cactcctcatgacttcatt

SEQ ID NO: 307257 - DNA, 19 bp, Homo sapiens
  siRNA target sequence for CCND2 (NM_001759.2,733-751).
ctcctcatgacttcattga

SEQ ID NO: 307258 - DNA, 19 bp, Homo sapiens
  siRNA target sequence for CCND2 (NM_001759.2,806-824).
gcatgctcagaccttcatt

SEQ ID NO: 307259 - DNA, 19 bp, Homo sapiens
  siRNA target sequence for CCND2 (NM_001759.2,929-947).
gagctcgctcacttgtgat

SEQ ID NO: 307260 - DNA, 19 bp, Homo sapiens
  siRNA target sequence for CCND2 (NM_001759.2,1020-1038).
gaggcggtgctcctcaata

SEQ ID NO: 307261 - DNA, 19 bp, Homo sapiens
  siRNA target sequence for CCND2 (NM_001759.2,1114-1132).
cagacgtgcgggatatcga

SEQ ID NO: 307262 - DNA, 19 bp, Homo sapiens
  siRNA target sequence for CCND3 (NM_001760.2,516-534).
gcccctgaccatcgaaaaa

SEQ ID NO: 307263 - DNA, 19 bp, Homo sapiens
  siRNA target sequence for CCND3 (NM_001760.2,625-643).
gctgtgattgcacatgatt

SEQ ID NO: 307264 - DNA, 19 bp, Homo sapiens
  siRNA target sequence for CCND3 (NM_001760.2,626-644).
ctgtgattgcacatgattt

SEQ ID NO: 307265 - DNA, 19 bp, Homo sapiens
  siRNA target sequence for CCND3 (NM_001760.2,685-703).
cgacaggccttggtcaaaa

SEQ ID NO: 307266 - DNA, 19 bp, Homo sapiens
  siRNA target sequence for CCND3 (NM_001760.2,727-745).
ctctgtgctacagattata

SEQ ID NO: 307267 - DNA, 19 bp, Homo sapiens
  siRNA target sequence for CCND3 (NM_001760.2,731-749).
gtgctacagattatacctt

SEQ ID NO: 307268 - DNA, 19 bp, Homo sapiens
  siRNA target sequence for CCNE1 (NM_001238.1,279-297).
ggcaaacgtgaccgttttt

SEQ ID NO: 307269 - DNA, 19 bp, Homo sapiens
  siRNA target sequence for CCNE1 (NM_001238.1,363-381).
gccttgggacaataatgca

SEQ ID NO: 307270 - DNA, 19 bp, Homo sapiens
  siRNA target sequence for CCNE1 (NM_001238.1,410-428).
ccacacctgacaaagaaga

SEQ ID NO: 307271 - DNA, 19 bp, Homo sapiens
  siRNA target sequence for CCNE1 (NM_001238.1,435-453).
ccgggtttacccaaactca

SEQ ID NO: 307272 - DNA, 19 bp, Homo sapiens
  siRNA target sequence for CCNE1 (NM_001238.1,436-454).
cgggtttacccaaactcaa

SEQ ID NO: 307273 - DNA, 19 bp, Homo sapiens
  siRNA target sequence for CCNE1 (NM_001238.1,455-473).
cgtgcaagcctcggattat

SEQ ID NO: 307274 - DNA, 19 bp, Homo sapiens
  siRNA target sequence for CCNE1 (NM_001238.1,456-474).
gtgcaagcctcggattatt

SEQ ID NO: 307275 - DNA, 19 bp, Homo sapiens
  siRNA target sequence for CCNE1 (NM_001238.1,459-477).
caagcctcggattattgca

SEQ ID NO: 307276 - DNA, 19 bp, Homo sapiens
  siRNA target sequence for CCNE1 (NM_001238.1,502-520).
gtactgagctgggcaaata

SEQ ID NO: 307277 - DNA, 19 bp, Homo sapiens
  siRNA target sequence for CCNE1 (NM_001238.1,523-541).
gaggaagtctggaaaatca

SEQ ID NO: 307278 - DNA, 19 bp, Homo sapiens
  siRNA target sequence for CCNE1 (NM_001238.1,529-547).
gtctggaaaatcatgttaa

SEQ ID NO: 307279 - DNA, 19 bp, Homo sapiens
  siRNA target sequence for CCNE1 (NM_001238.1,606-624).
gccaaaaatgcgagcaatt

SEQ ID NO: 307280 - DNA, 19 bp, Homo sapiens
  siRNA target sequence for CCNE1 (NM_001238.1,620-638).
caattcttctggattggtt

SEQ ID NO: 307281 - DNA, 19 bp, Homo sapiens
  siRNA target sequence for CCNE1 (NM_001238.1,648-666).
gtgtgaagtctataaactt

SEQ ID NO: 307282 - DNA, 19 bp, Homo sapiens
  siRNA target sequence for CCNE1 (NM_001238.1,678-696).
cttttacttggcacaagat

SEQ ID NO: 307283 - DNA, 19 bp, Homo sapiens
  siRNA target sequence for CCNE1 (NM_001238.1,708-726).
gtatatggcgacacaagaa

SEQ ID NO: 307284 - DNA, 19 bp, Homo sapiens
  siRNA target sequence for CCNE1 (NM_001238.1,714-732).
ggcgacacaagaaaatgtt

SEQ ID NO: 307285 - DNA, 19 bp, Homo sapiens
  siRNA target sequence for CCNE1 (NM_001238.1,757-775).
gggatttcatctttattta

SEQ ID NO: 307286 - DNA, 19 bp, Homo sapiens
  siRNA target sequence for CCNE1 (NM_001238.1,862-880).
ctcaccatggaattaatga

SEQ ID NO: 307287 - DNA, 19 bp, Homo sapiens
  siRNA target sequence for CCNE1 (NM_001238.1,889-907).
gcccttaagtggcgtttaa

SEQ ID NO: 307288 - DNA, 19 bp, Homo sapiens
  siRNA target sequence for CCNE1 (NM_001238.1,891-909).
ccttaagtggcgtttaagt

SEQ ID NO: 307289 - DNA, 19 bp, Homo sapiens
  siRNA target sequence for CCNE1 (NM_001238.1,902-920).
gtttaagtcccctgactat

SEQ ID NO: 307290 - DNA, 19 bp, Homo sapiens
  siRNA target sequence for CCNE1 (NM_001238.1,926-944).
cctggctgaatgtatacat

SEQ ID NO: 307291 - DNA, 19 bp, Homo sapiens
  siRNA target sequence for CCNE1 (NM_001238.1,949-967).
gttgcatatctaaatgact

SEQ ID NO: 307292 - DNA, 19 bp, Homo sapiens
  siRNA target sequence for CCNE1 (NM_001238.1,986-1004).
cgcagtatccccagcaaat

SEQ ID NO: 307293 - DNA, 19 bp, Homo sapiens
  siRNA target sequence for CCNE1 (NM_001238.1,999-1017).
gcaaatctttatacagatt

SEQ ID NO: 307294 - DNA, 19 bp, Homo sapiens
  siRNA target sequence for CCNE1 (NM_001238.1,1057-1075).
cttgaatttccttatggta

SEQ ID NO: 307295 - DNA, 19 bp, Homo sapiens
  siRNA target sequence for CCNE1 (NM_001238.1,1082-1100).
ctgcttcggccttgtatca

SEQ ID NO: 307296 - DNA, 19 bp, Homo sapiens
  siRNA target sequence for CCNE1 (NM_001238.1,1084-1102).
gcttcggccttgtatcatt

SEQ ID NO: 307297 - DNA, 19 bp, Homo sapiens
  siRNA target sequence for CCNE1 (NM_001238.1,1085-1103).
cttcggccttgtatcattt

SEQ ID NO: 307298 - DNA, 19 bp, Homo sapiens
  siRNA target sequence for CCNE1 (NM_001238.1,1141-1159).
cagtggtgcgacatagaga

SEQ ID NO: 307299 - DNA, 19 bp, Homo sapiens
  siRNA target sequence for CCNE1 (NM_001238.1,1205-1223).
cggggagctcaaaactgaa

SEQ ID NO: 307300 - DNA, 19 bp, Homo sapiens
  siRNA target sequence for CCNE1 (NM_001238.1,1230-1248).
caggggcgtcgctgatgaa

SEQ ID NO: 307301 - DNA, 19 bp, Homo sapiens
  siRNA target sequence for CCNE1 (NM_001238.1,1370-1388).
cgccacagagcggtaagaa

SEQ ID NO: 307302 - DNA, 19 bp, Homo sapiens
  siRNA target sequence for CCNF (NM_001761.1,125-143).
cgaaacctgaccatcttga

SEQ ID NO: 307303 - DNA, 19 bp, Homo sapiens
  siRNA target sequence for CCNF (NM_001761.1,327-345).
ctgaaaaggggaatttcga

SEQ ID NO: 307304 - DNA, 19 bp, Homo sapiens
  siRNA target sequence for CCNF (NM_001761.1,363-381).
gcatagcctacctctacaa

SEQ ID NO: 307305 - DNA, 19 bp, Homo sapiens
  siRNA target sequence for CCNF (NM_001761.1,364-382).
catagcctacctctacaat

SEQ ID NO: 307306 - DNA, 19 bp, Homo sapiens
  siRNA target sequence for CCNF (NM_001761.1,473-491).
ggtgccgcacctttcatct

SEQ ID NO: 307307 - DNA, 19 bp, Homo sapiens
  siRNA target sequence for CCNF (NM_001761.1,583-601).
gactcacaaagcatccata

SEQ ID NO: 307308 - DNA, 19 bp, Homo sapiens
  siRNA target sequence for CCNF (NM_001761.1,913-931).
ccaggctgtcagtaaacaa

SEQ ID NO: 307309 - DNA, 19 bp, Homo sapiens
  siRNA target sequence for CCNF (NM_001761.1,916-934).
ggctgtcagtaaacaacaa

SEQ ID NO: 307310 - DNA, 19 bp, Homo sapiens
  siRNA target sequence for CCNF (NM_001761.1,953-971).
ggactcaatgacacaatga

SEQ ID NO: 307311 - DNA, 19 bp, Homo sapiens
  siRNA target sequence for CCNF (NM_001761.1,1129-1147).
ctgcacccggtttatcagt

SEQ ID NO: 307312 - DNA, 19 bp, Homo sapiens
  siRNA target sequence for CCNF (NM_001761.1,1131-1149).
gcacccggtttatcagtaa

SEQ ID NO: 307313 - DNA, 19 bp, Homo sapiens
  siRNA target sequence for CCNF (NM_001761.1,1132-1150).
cacccggtttatcagtaaa

SEQ ID NO: 307314 - DNA, 19 bp, Homo sapiens
  siRNA target sequence for CCNF (NM_001761.1,1134-1152).
cccggtttatcagtaaaga

SEQ ID NO: 307315 - DNA, 19 bp, Homo sapiens
  siRNA target sequence for CCNF (NM_001761.1,1136-1154).
cggtttatcagtaaagaga

SEQ ID NO: 307316 - DNA, 19 bp, Homo sapiens
  siRNA target sequence for CCNF (NM_001761.1,1137-1155).
ggtttatcagtaaagagat

SEQ ID NO: 307317 - DNA, 19 bp, Homo sapiens
  siRNA target sequence for CCNF (NM_001761.1,1179-1197).
ggctcacggacaacactta

SEQ ID NO: 307318 - DNA, 19 bp, Homo sapiens
  siRNA target sequence for CCNF (NM_001761.1,1181-1199).
ctcacggacaacacttaca

SEQ ID NO: 307319 - DNA, 19 bp, Homo sapiens
  siRNA target sequence for CCNF (NM_001761.1,1185-1203).
cggacaacacttacaagta

SEQ ID NO: 307320 - DNA, 19 bp, Homo sapiens
  siRNA target sequence for CCNF (NM_001761.1,1266-1284).
ccactgtggtggattacaa

SEQ ID NO: 307321 - DNA, 19 bp, Homo sapiens
  siRNA target sequence for CCNF (NM_001761.1,1476-1494).
ccggattctcctatgaaga

SEQ ID NO: 307322 - DNA, 19 bp, Homo sapiens
  siRNA target sequence for CCNF (NM_001761.1,1506-1524).
gcgtcttgagcctccataa

SEQ ID NO: 307323 - DNA, 19 bp, Homo sapiens
  siRNA target sequence for CCNF (NM_001761.1,1645-1663).
ccagttgtgtgctgcatta

SEQ ID NO: 307324 - DNA, 19 bp, Homo sapiens
  siRNA target sequence for CCNF (NM_001761.1,1648-1666).
gttgtgtgctgcattagga

SEQ ID NO: 307325 - DNA, 19 bp, Homo sapiens
  siRNA target sequence for CCNF (NM_001761.1,1784-1802).
gacagaggcagcttcgtta

SEQ ID NO: 307326 - DNA, 19 bp, Homo sapiens
  siRNA target sequence for CCNF (NM_001761.1,2264-2282).
catcaggccaggaagtcat

SEQ ID NO: 307327 - DNA, 19 bp, Homo sapiens
  siRNA target sequence for CCNF (NM_001761.1,2271-2289).
ccaggaagtcatgtttaca

SEQ ID NO: 307328 - DNA, 19 bp, Homo sapiens
  siRNA target sequence for CCNF (NM_001761.1,2335-2353).
ggtgaagcggataaaccta

SEQ ID NO: 307329 - DNA, 19 bp, Homo sapiens
  siRNA target sequence for CCNF (NM_001761.1,2336-2354).
gtgaagcggataaacctat

SEQ ID NO: 307330 - DNA, 19 bp, Homo sapiens
  siRNA target sequence for CCNF (NM_001761.1,2341-2359).
gcggataaacctatgcata

SEQ ID NO: 307331 - DNA, 19 bp, Homo sapiens
  siRNA target sequence for HARC (NM_017913.1,260-278).
gccaaaagcagaaagagtt

SEQ ID NO: 307332 - DNA, 19 bp, Homo sapiens
  siRNA target sequence for HARC (NM_017913.1,290-308).
ctgtggcgtgcaaatggaa

SEQ ID NO: 307333 - DNA, 19 bp, Homo sapiens
  siRNA target sequence for HARC (NM_017913.1,294-312).
ggcgtgcaaatggaatctt

SEQ ID NO: 307334 - DNA, 19 bp, Homo sapiens
  siRNA target sequence for HARC (NM_017913.1,335-353).
gtagcttagcactgcataa

SEQ ID NO: 307335 - DNA, 19 bp, Homo sapiens
  siRNA target sequence for HARC (NM_017913.1,479-497).
gcacggatgccattagcaa

SEQ ID NO: 307336 - DNA, 19 bp, Homo sapiens
  siRNA target sequence for HARC (NM_017913.1,624-642).
ggatgatagccagagattt

SEQ ID NO: 307337 - DNA, 19 bp, Homo sapiens
  siRNA target sequence for HARC (NM_017913.1,645-663).
gtctgaccatccatacctt

SEQ ID NO: 307338 - DNA, 19 bp, Homo sapiens
  siRNA target sequence for HARC (NM_017913.1,649-667).
gaccatccataccttgtat

SEQ ID NO: 307339 - DNA, 19 bp, Homo sapiens
  siRNA target sequence for HARC (NM_017913.1,748-766).
gcacatcaagctgttgtaa

SEQ ID NO: 307340 - DNA, 19 bp, Homo sapiens
  siRNA target sequence for HARC (NM_017913.1,749-767).
cacatcaagctgttgtaat

SEQ ID NO: 307341 - DNA, 19 bp, Homo sapiens
  siRNA target sequence for HARC (NM_017913.1,804-822).
ggatccaagagggtgtttt

SEQ ID NO: 307342 - DNA, 19 bp, Homo sapiens
  siRNA target sequence for HARC (NM_017913.1,900-918).
gtcaagagtaagactttat

SEQ ID NO: 307343 - DNA, 19 bp, Homo sapiens
  siRNA target sequence for HARC (NM_017913.1,920-938).
ctcaatcacaaagttttca

SEQ ID NO: 307344 - DNA, 19 bp, Homo sapiens
  siRNA target sequence for HARC (NM_017913.1,945-963).
gacagttcagaatcatgtt

SEQ ID NO: 307345 - DNA, 19 bp, Homo sapiens
  siRNA target sequence for HARC (NM_017913.1,980-998).
gatctataggtttattaga

SEQ ID NO: 307346 - DNA, 19 bp, Homo sapiens
  siRNA target sequence for HARC (NM_017913.1,1018-1036).
gattatcttcagtattcta

SEQ ID NO: 307347 - DNA, 19 bp, Homo sapiens
  siRNA target sequence for HARC (NM_017913.1,1064-1082).
cggtggtacataaagaaga

SEQ ID NO: 307348 - DNA, 19 bp, Homo sapiens
  siRNA target sequence for HARC (NM_017913.1,1065-1083).
ggtggtacataaagaagat

SEQ ID NO: 307349 - DNA, 19 bp, Homo sapiens
  siRNA target sequence for MPHOSPH6 (NM_005792.1,74-92).
gcgcatgaagtttatgcaa

SEQ ID NO: 307350 - DNA, 19 bp, Homo sapiens
  siRNA target sequence for MPHOSPH6 (NM_005792.1,75-93).
cgcatgaagtttatgcaaa

SEQ ID NO: 307351 - DNA, 19 bp, Homo sapiens
  siRNA target sequence for MPHOSPH6 (NM_005792.1,215-233).
gcagagtttcttactatgt

SEQ ID NO: 307352 - DNA, 19 bp, Homo sapiens
  siRNA target sequence for MPHOSPH6 (NM_005792.1,400-418).
ggacaattgggaaaaagtt

SEQ ID NO: 307353 - DNA, 19 bp, Homo sapiens
  siRNA target sequence for MPHOSPH6 (NM_005792.1,401-419).
gacaattgggaaaaagttt

SEQ ID NO: 307354 - DNA, 19 bp, Homo sapiens
  siRNA target sequence for MPHOSPH6 (NM_005792.1,428-446).
gagagaccatgccaattat

SEQ ID NO: 307355 - DNA, 19 bp, Homo sapiens
  siRNA target sequence for MPHOSPH6 (NM_005792.1,434-452).
ccatgccaattatgaagaa

SEQ ID NO: 307356 - DNA, 19 bp, Homo sapiens
  siRNA target sequence for MPHOSPH9 (NM_022782.2,210-228).
gactgcaatgtggatagtt

SEQ ID NO: 307357 - DNA, 19 bp, Homo sapiens
  siRNA target sequence for MPHOSPH9 (NM_022782.2,244-262).
gatatggcaccttttgtat

SEQ ID NO: 307358 - DNA, 19 bp, Homo sapiens
  siRNA target sequence for MPHOSPH9 (NM_022782.2,445-463).
ccatttctcctggtgaatt

SEQ ID NO: 307359 - DNA, 19 bp, Homo sapiens
  siRNA target sequence for MPHOSPH9 (NM_022782.2,508-526).
gtgggaaaacaaatagtaa

SEQ ID NO: 307360 - DNA, 19 bp, Homo sapiens
  siRNA target sequence for MPHOSPH9 (NM_022782.2,634-652).
caccaattgagaaatctga

SEQ ID NO: 307361 - DNA, 19 bp, Homo sapiens
  siRNA target sequence for MPHOSPH9 (NM_022782.2,667-685).
cacatcctcgtgcttttta

SEQ ID NO: 307362 - DNA, 19 bp, Homo sapiens
  siRNA target sequence for MPHOSPH9 (NM_022782.2,686-704).
cctcagtaaaccagatgaa

SEQ ID NO: 307363 - DNA, 19 bp, Homo sapiens
  siRNA target sequence for MPHOSPH9 (NM_022782.2,687-705).
ctcagtaaaccagatgaaa

SEQ ID NO: 307364 - DNA, 19 bp, Homo sapiens
  siRNA target sequence for MPHOSPH9 (NM_022782.2,699-717).
gatgaaactccaaatgctt

SEQ ID NO: 307365 - DNA, 19 bp, Homo sapiens
  siRNA target sequence for MPHOSPH9 (NM_022782.2,798-816).
gagaagacgttcatatcat

SEQ ID NO: 307366 - DNA, 19 bp, Homo sapiens
  siRNA target sequence for MPHOSPH9 (NM_022782.2,803-821).
gacgttcatatcattgtct

SEQ ID NO: 307367 - DNA, 19 bp, Homo sapiens
  siRNA target sequence for MPHOSPH9 (NM_022782.2,837-855).
ccaaaccagtctaatacta

SEQ ID NO: 307368 - DNA, 19 bp, Homo sapiens
  siRNA target sequence for MPHOSPH9 (NM_022782.2,847-865).
ctaatactagtaatgagat

SEQ ID NO: 307369 - DNA, 19 bp, Homo sapiens
  siRNA target sequence for MPHOSPH9 (NM_022782.2,870-888).
ctaccgtcactgaaggata

SEQ ID NO: 307370 - DNA, 19 bp, Homo sapiens
  siRNA target sequence for MPHOSPH9 (NM_022782.2,873-891).
ccgtcactgaaggatattt

SEQ ID NO: 307371 - DNA, 19 bp, Homo sapiens
  siRNA target sequence for MPHOSPH9 (NM_022782.2,874-892).
cgtcactgaaggatattta

SEQ ID NO: 307372 - DNA, 19 bp, Homo sapiens
  siRNA target sequence for MPHOSPH9 (NM_022782.2,977-995).
gactctagatcctacgtta

SEQ ID NO: 307373 - DNA, 19 bp, Homo sapiens
  siRNA target sequence for MPHOSPH9 (NM_022782.2,981-999).
ctagatcctacgttacaca

SEQ ID NO: 307374 - DNA, 19 bp, Homo sapiens
  siRNA target sequence for MPHOSPH9 (NM_022782.2,1050-1068).
gcccttgatgacagaatat

SEQ ID NO: 307375 - DNA, 19 bp, Homo sapiens
  siRNA target sequence for MPHOSPH9 (NM_022782.2,1053-1071).
cttgatgacagaatatcct

SEQ ID NO: 307376 - DNA, 19 bp, Homo sapiens
  siRNA target sequence for MPHOSPH9 (NM_022782.2,1075-1093).
ccccggactctgttctaga

SEQ ID NO: 307377 - DNA, 19 bp, Homo sapiens
  siRNA target sequence for MPHOSPH9 (NM_022782.2,1084-1102).
ctgttctagagcctagtat

SEQ ID NO: 307378 - DNA, 19 bp, Homo sapiens
  siRNA target sequence for MPHOSPH9 (NM_022782.2,1086-1104).
gttctagagcctagtatgt

SEQ ID NO: 307379 - DNA, 19 bp, Homo sapiens
  siRNA target sequence for MPHOSPH9 (NM_022782.2,1103-1121).
gtctagtccctctgacata

SEQ ID NO: 307380 - DNA, 19 bp, Homo sapiens
  siRNA target sequence for MPHOSPH9 (NM_022782.2,1105-1123).
ctagtccctctgacataga

SEQ ID NO: 307381 - DNA, 19 bp, Homo sapiens
  siRNA target sequence for MPHOSPH9 (NM_022782.2,1111-1129).
cctctgacatagactcatt

SEQ ID NO: 307382 - DNA, 19 bp, Homo sapiens
  siRNA target sequence for MPHOSPH9 (NM_022782.2,1112-1130).
ctctgacatagactcattt

SEQ ID NO: 307383 - DNA, 19 bp, Homo sapiens
  siRNA target sequence for MPHOSPH9 (NM_022782.2,1202-1220).
ggtggactcttggaaaaat

SEQ ID NO: 307384 - DNA, 19 bp, Homo sapiens
  siRNA target sequence for MPHOSPH9 (NM_022782.2,1260-1278).
ccgtcagtatataccatta

SEQ ID NO: 307385 - DNA, 19 bp, Homo sapiens
  siRNA target sequence for MPHOSPH9 (NM_022782.2,1262-1280).
gtcagtatataccattact

SEQ ID NO: 307386 - DNA, 19 bp, Homo sapiens
  siRNA target sequence for MPHOSPH9 (NM_022782.2,1266-1284).
gtatataccattactagta

SEQ ID NO: 307387 - DNA, 19 bp, Homo sapiens
  siRNA target sequence for MPHOSPH9 (NM_022782.2,1294-1312).
cggtcaacactgtagatga

SEQ ID NO: 307388 - DNA, 19 bp, Homo sapiens
  siRNA target sequence for MPHOSPH9 (NM_022782.2,1386-1404).
gaatgcatttcattgactt

SEQ ID NO: 307389 - DNA, 19 bp, Homo sapiens
  siRNA target sequence for MPHOSPH9 (NM_022782.2,1413-1431).
gatcctgtgatattgtcta

SEQ ID NO: 307390 - DNA, 19 bp, Homo sapiens
  siRNA target sequence for MPHOSPH9 (NM_022782.2,1419-1437).
gtgatattgtctaagatta

SEQ ID NO: 307391 - DNA, 19 bp, Homo sapiens
  siRNA target sequence for MPHOSPH9 (NM_022782.2,1474-1492).
cagatcttcgagcttatta

SEQ ID NO: 307392 - DNA, 19 bp, Homo sapiens
  siRNA target sequence for MPHOSPH9 (NM_022782.2,1479-1497).
cttcgagcttattatgaat

SEQ ID NO: 307393 - DNA, 19 bp, Homo sapiens
  siRNA target sequence for MPHOSPH9 (NM_022782.2,1558-1576).
ggaagataaccaatcaaat

SEQ ID NO: 307394 - DNA, 19 bp, Homo sapiens
  siRNA target sequence for MPHOSPH9 (NM_022782.2,1559-1577).
gaagataaccaatcaaatt

SEQ ID NO: 307395 - DNA, 19 bp, Homo sapiens
  siRNA target sequence for MPHOSPH9 (NM_022782.2,1629-1647).
cgcgtgagaacacttgaaa

SEQ ID NO: 307396 - DNA, 19 bp, Homo sapiens
  siRNA target sequence for MPHOSPH9 (NM_022782.2,1630-1648).
gcgtgagaacacttgaaaa

SEQ ID NO: 307397 - DNA, 19 bp, Homo sapiens
  siRNA target sequence for MPHOSPH9 (NM_022782.2,1631-1649).
cgtgagaacacttgaaaat

SEQ ID NO: 307398 - DNA, 19 bp, Homo sapiens
  siRNA target sequence for MPHOSPH9 (NM_022782.2,1727-1745).
gcaggaacgaattgaagaa

SEQ ID NO: 307399 - DNA, 19 bp, Homo sapiens
  siRNA target sequence for MPHOSPH9 (NM_022782.2,1781-1799).
cattcgactaaaatctaga

SEQ ID NO: 307400 - DNA, 19 bp, Homo sapiens
  siRNA target sequence for MPHOSPH9 (NM_022782.2,1835-1853).
caaactctcagatgataaa

SEQ ID NO: 307401 - DNA, 19 bp, Homo sapiens
  siRNA target sequence for MPHOSPH9 (NM_022782.2,1848-1866).
gataaagaagctcaactaa

SEQ ID NO: 307402 - DNA, 19 bp, Homo sapiens
  siRNA target sequence for MPHOSPH9 (NM_022782.2,1883-1901).
gtttcaagatcttttagga

SEQ ID NO: 307403 - DNA, 19 bp, Homo sapiens
  siRNA target sequence for MPHOSPH9 (NM_022782.2,2063-2081).
ccttcgtcataattctaga

SEQ ID NO: 307404 - DNA, 19 bp, Homo sapiens
  siRNA target sequence for MPHOSPH9 (NM_022782.2,2064-2082).
cttcgtcataattctagaa

SEQ ID NO: 307405 - DNA, 19 bp, Homo sapiens
  siRNA target sequence for MPHOSPH9 (NM_022782.2,2147-2165).
gattccaggtgcagagtat

SEQ ID NO: 307406 - DNA, 19 bp, Homo sapiens
  siRNA target sequence for MPHOSPH9 (NM_022782.2,2157-2175).
gcagagtattccatcttta

SEQ ID NO: 307407 - DNA, 19 bp, Homo sapiens
  siRNA target sequence for MPHOSPH9 (NM_022782.2,2290-2308).
caagcttgttgataaaaaa

SEQ ID NO: 307408 - DNA, 19 bp, Homo sapiens
  siRNA target sequence for MPHOSPH9 (NM_022782.2,2293-2311).
gcttgttgataaaaaagca

SEQ ID NO: 307409 - DNA, 19 bp, Homo sapiens
  siRNA target sequence for MPHOSPH9 (NM_022782.2,2331-2349).
ccgatcatgagagctttaa

SEQ ID NO: 307410 - DNA, 19 bp, Homo sapiens
  siRNA target sequence for MPHOSPH9 (NM_022782.2,2424-2442).
cctcggcaaactgaaactt

SEQ ID NO: 307411 - DNA, 19 bp, Homo sapiens
  siRNA target sequence for MPHOSPH9 (NM_022782.2,2504-2522).
ggcctcacagagatcatca

SEQ ID NO: 307412 - DNA, 19 bp, Homo sapiens
  siRNA target sequence for MPHOSPH9 (NM_022782.2,2509-2527).
cacagagatcatcatcttt

SEQ ID NO: 307413 - DNA, 19 bp, Homo sapiens
  siRNA target sequence for MPHOSPH9 (NM_022782.2,2529-2547).
ccaccttcaaatcgtaaat

SEQ ID NO: 307414 - DNA, 19 bp, Homo sapiens
  siRNA target sequence for MPHOSPH9 (NM_022782.2,2532-2550).
ccttcaaatcgtaaatcaa

SEQ ID NO: 307415 - DNA, 19 bp, Homo sapiens
  siRNA target sequence for MPHOSPH9 (NM_022782.2,2557-2575).
caacaaaaagagagattat

SEQ ID NO: 307416 - DNA, 19 bp, Homo sapiens
  siRNA target sequence for MPHOSPH9 (NM_022782.2,2583-2601).
ccagtgactgtggcttata

SEQ ID NO: 307417 - DNA, 19 bp, Homo sapiens
  siRNA target sequence for MPHOSPH9 (NM_022782.2,2605-2623).
caaagcgatcccctaaaga

SEQ ID NO: 307418 - DNA, 19 bp, Homo sapiens
  siRNA target sequence for MPHOSPH9 (NM_022782.2,2611-2629).
gatcccctaaagaaaactt

SEQ ID NO: 307419 - DNA, 19 bp, Homo sapiens
  siRNA target sequence for MPHOSPH9 (NM_022782.2,2627-2645).
cttgtccccaggatttagt

SEQ ID NO: 307420 - DNA, 19 bp, Homo sapiens
  siRNA target sequence for MPHOSPH9 (NM_022782.2,2630-2648).
gtccccaggatttagtcat

SEQ ID NO: 307421 - DNA, 19 bp, Homo sapiens
  siRNA target sequence for MPHOSPH9 (NM_022782.2,2644-2662).
gtcatctgcttagcaaaaa

SEQ ID NO: 307422 - DNA, 19 bp, Homo sapiens
  siRNA target sequence for MPHOSPH9 (NM_022782.2,2664-2682).
gagagcagtccaattcgat

SEQ ID NO: 307423 - DNA, 19 bp, Homo sapiens
  siRNA target sequence for MPHOSPH9 (NM_022782.2,2666-2684).
gagcagtccaattcgattt

SEQ ID NO: 307424 - DNA, 19 bp, Homo sapiens
  siRNA target sequence for MPHOSPH9 (NM_022782.2,2668-2686).
gcagtccaattcgatttga

SEQ ID NO: 307425 - DNA, 19 bp, Homo sapiens
  siRNA target sequence for MPHOSPH9 (NM_022782.2,2669-2687).
cagtccaattcgatttgat

SEQ ID NO: 307426 - DNA, 19 bp, Homo sapiens
  siRNA target sequence for MPHOSPH9 (NM_022782.2,2671-2689).
gtccaattcgatttgatat

SEQ ID NO: 307427 - DNA, 19 bp, Homo sapiens
  siRNA target sequence for MPHOSPH9 (NM_022782.2,2674-2692).
caattcgatttgatatact

SEQ ID NO: 307428 - DNA, 19 bp, Homo sapiens
  siRNA target sequence for MPHOSPH9 (NM_022782.2,2801-2819).
gaaagccaccgataaccat

SEQ ID NO: 307429 - DNA, 19 bp, Homo sapiens
  siRNA target sequence for MPHOSPH9 (NM_022782.2,2805-2823).
gccaccgataaccatgtta

SEQ ID NO: 307430 - DNA, 19 bp, Homo sapiens
  siRNA target sequence for MPHOSPH9 (NM_022782.2,2806-2824).
ccaccgataaccatgttaa

SEQ ID NO: 307431 - DNA, 19 bp, Homo sapiens
  siRNA target sequence for MPHOSPH9 (NM_022782.2,2807-2825).
caccgataaccatgttaat

SEQ ID NO: 307432 - DNA, 19 bp, Homo sapiens
  siRNA target sequence for MPHOSPH9 (NM_022782.2,2809-2827).
ccgataaccatgttaatca

SEQ ID NO: 307433 - DNA, 19 bp, Homo sapiens
  siRNA target sequence for MPHOSPH9 (NM_022782.2,2810-2828).
cgataaccatgttaatcat

SEQ ID NO: 307434 - DNA, 19 bp, Homo sapiens
  siRNA target sequence for MPHOSPH9 (NM_022782.2,2936-2954).
cactccacaggggaatgat

SEQ ID NO: 307435 - DNA, 19 bp, Homo sapiens
  siRNA target sequence for MPHOSPH9 (NM_022782.2,3064-3082).
ctggaggacgaatcacttt

SEQ ID NO: 307436 - DNA, 19 bp, Homo sapiens
  siRNA target sequence for MPHOSPH9 (NM_022782.2,3069-3087).
ggacgaatcactttacaga

SEQ ID NO: 307437 - DNA, 19 bp, Homo sapiens
  siRNA target sequence for MPHOSPH9 (NM_022782.2,3114-3132).
gatcgtttggaaaggatta

SEQ ID NO: 307438 - DNA, 19 bp, Homo sapiens
  siRNA target sequence for MPHOSPH9 (NM_022782.2,3150-3168).
gttcgcatgacgctaaaga

SEQ ID NO: 307439 - DNA, 19 bp, Homo sapiens
  siRNA target sequence for MPHOSPH9 (NM_022782.2,3182-3200).
gcgcacctctgcaaatctt

SEQ ID NO: 307440 - DNA, 19 bp, Homo sapiens
  siRNA target sequence for MTCP1 (NM_014221.1,1563-1581).
cgtctgttcaggatttgaa

SEQ ID NO: 307441 - DNA, 19 bp, Homo sapiens
  siRNA target sequence for MTCP1 (NM_014221.1,1604-1622).
cacggaagtctgcatcaaa

SEQ ID NO: 307442 - DNA, 19 bp, Homo sapiens
  siRNA target sequence for MTCP1 (NM_014221.1,1606-1624).
cggaagtctgcatcaaagt

SEQ ID NO: 307443 - DNA, 19 bp, Homo sapiens
  siRNA target sequence for NEDD9 (NM_006403.2,175-193).
gcaagggccttatatgaca

SEQ ID NO: 307444 - DNA, 19 bp, Homo sapiens
  siRNA target sequence for NEDD9 (NM_006403.2,413-431).
gccaacagaagctctatca

SEQ ID NO: 307445 - DNA, 19 bp, Homo sapiens
  siRNA target sequence for NEDD9 (NM_006403.2,414-432).
ccaacagaagctctatcaa

SEQ ID NO: 307446 - DNA, 19 bp, Homo sapiens
  siRNA target sequence for NEDD9 (NM_006403.2,522-540).
ccacggcacccaagaacaa

SEQ ID NO: 307447 - DNA, 19 bp, Homo sapiens
  siRNA target sequence for NEDD9 (NM_006403.2,530-548).
cccaagaacaagaggtata

SEQ ID NO: 307448 - DNA, 19 bp, Homo sapiens
  siRNA target sequence for NEDD9 (NM_006403.2,531-549).
ccaagaacaagaggtatat

SEQ ID NO: 307449 - DNA, 19 bp, Homo sapiens
  siRNA target sequence for NEDD9 (NM_006403.2,635-653).
gccatggctacgtatacga

SEQ ID NO: 307450 - DNA, 19 bp, Homo sapiens
  siRNA target sequence for NEDD9 (NM_006403.2,669-687).
ccaaaaggacgtctatgat

SEQ ID NO: 307451 - DNA, 19 bp, Homo sapiens
  siRNA target sequence for NEDD9 (NM_006403.2,670-688).
caaaaggacgtctatgata

SEQ ID NO: 307452 - DNA, 19 bp, Homo sapiens
  siRNA target sequence for NEDD9 (NM_006403.2,739-757).
gcaaaaggccctgtgtttt

SEQ ID NO: 307453 - DNA, 19 bp, Homo sapiens
  siRNA target sequence for NEDD9 (NM_006403.2,781-799).
cctcaaggggtgtatgaca

SEQ ID NO: 307454 - DNA, 19 bp, Homo sapiens
  siRNA target sequence for NEDD9 (NM_006403.2,804-822).
gcctacaaaaggggtatat

SEQ ID NO: 307455 - DNA, 19 bp, Homo sapiens
  siRNA target sequence for NEDD9 (NM_006403.2,856-874).
gggcttagggaaaaagact

SEQ ID NO: 307456 - DNA, 19 bp, Homo sapiens
  siRNA target sequence for NEDD9 (NM_006403.2,918-936).
cagaccggagggggtttat

SEQ ID NO: 307457 - DNA, 19 bp, Homo sapiens
  siRNA target sequence for NEDD9 (NM_006403.2,920-938).
gaccggagggggtttatga

SEQ ID NO: 307458 - DNA, 19 bp, Homo sapiens
  siRNA target sequence for NEDD9 (NM_006403.2,973-991).
gaccttcatgtaaaataca

SEQ ID NO: 307459 - DNA, 19 bp, Homo sapiens
  siRNA target sequence for NEDD9 (NM_006403.2,1088-1106).
ctcagaacgacgcatatga

SEQ ID NO: 307460 - DNA, 19 bp, Homo sapiens
  siRNA target sequence for NEDD9 (NM_006403.2,1112-1130).
cccgaggcgttcagtttct

SEQ ID NO: 307461 - DNA, 19 bp, Homo sapiens
  siRNA target sequence for NEDD9 (NM_006403.2,1113-1131).
ccgaggcgttcagtttctt

SEQ ID NO: 307462 - DNA, 19 bp, Homo sapiens
  siRNA target sequence for NEDD9 (NM_006403.2,1115-1133).
gaggcgttcagtttcttga

SEQ ID NO: 307463 - DNA, 19 bp, Homo sapiens
  siRNA target sequence for NEDD9 (NM_006403.2,1170-1188).
ggaaagggatggtgtttat

SEQ ID NO: 307464 - DNA, 19 bp, Homo sapiens
  siRNA target sequence for NEDD9 (NM_006403.2,1243-1261).
gggatcaaccgattgtctt

SEQ ID NO: 307465 - DNA, 19 bp, Homo sapiens
  siRNA target sequence for NEDD9 (NM_006403.2,1244-1262).
ggatcaaccgattgtcttt

SEQ ID NO: 307466 - DNA, 19 bp, Homo sapiens
  siRNA target sequence for NEDD9 (NM_006403.2,1273-1291).
ggcagcacccggagtaaca

SEQ ID NO: 307467 - DNA, 19 bp, Homo sapiens
  siRNA target sequence for NEDD9 (NM_006403.2,1274-1292).
gcagcacccggagtaacat

SEQ ID NO: 307468 - DNA, 19 bp, Homo sapiens
  siRNA target sequence for NEDD9 (NM_006403.2,1457-1475).
ggcggtgttacggatatat

SEQ ID NO: 307469 - DNA, 19 bp, Homo sapiens
  siRNA target sequence for NEDD9 (NM_006403.2,1679-1697).
gcagctggtccctgaatat

SEQ ID NO: 307470 - DNA, 19 bp, Homo sapiens
  siRNA target sequence for NEDD9 (NM_006403.2,1861-1879).
ccggagagcatcatgaact

SEQ ID NO: 307471 - DNA, 19 bp, Homo sapiens
  siRNA target sequence for NEDD9 (NM_006403.2,2078-2096).
ggcaacagaaagagctatt

SEQ ID NO: 307472 - DNA, 19 bp, Homo sapiens
  siRNA target sequence for NEDD9 (NM_006403.2,2163-2181).
gctgttggaacaagagatt

SEQ ID NO: 307473 - DNA, 19 bp, Homo sapiens
  siRNA target sequence for NEDD9 (NM_006403.2,2164-2182).
ctgttggaacaagagatta

SEQ ID NO: 307474 - DNA, 19 bp, Homo sapiens
  siRNA target sequence for NEDD9 (NM_006403.2,2166-2184).
gttggaacaagagattaca

SEQ ID NO: 307475 - DNA, 19 bp, Homo sapiens
  siRNA target sequence for NEDD9 (NM_006403.2,2183-2201).
caaagcccgtggagaatga

SEQ ID NO: 307476 - DNA, 19 bp, Homo sapiens
  siRNA target sequence for NEDD9 (NM_006403.2,2271-2289).
gttgctgtgcttctactat

SEQ ID NO: 307477 - DNA, 19 bp, Homo sapiens
  siRNA target sequence for NEDD9 (NM_006403.2,2293-2311).
caatgtgagacccatttca

SEQ ID NO: 307478 - DNA, 19 bp, Homo sapiens
  siRNA target sequence for NEDD9 (NM_006403.2,2460-2478).
ccaggacattcgcaacaaa

SEQ ID NO: 307479 - DNA, 19 bp, Homo sapiens
  siRNA target sequence for NEDD9 (NM_006403.2,2470-2488).
cgcaacaaagtcatgaact

SEQ ID NO: 307480 - DNA, 19 bp, Homo sapiens
  siRNA target sequence for NEDD9 (NM_006403.2,2509-2527).
cagctcaagaccatagtca

SEQ ID NO: 307481 - DNA, 19 bp, Homo sapiens
  siRNA target sequence for NEDD9 (NM_006403.2,2593-2611).
gtgacagacctttctagaa

SEQ ID NO: 307482 - DNA, 19 bp, Homo sapiens
  siRNA target sequence for NEDD9 (NM_006403.2,2609-2627).
gaaatgcccagctgttcaa

SEQ ID NO: 307483 - DNA, 19 bp, Homo sapiens
  siRNA target sequence for NOL1 (NM_006170.1,77-95).
cagaactcgtcagattctt

SEQ ID NO: 307484 - DNA, 19 bp, Homo sapiens
  siRNA target sequence for NOL1 (NM_006170.1,98-116).
ctgcagtaagtgacgaaaa

SEQ ID NO: 307485 - DNA, 19 bp, Homo sapiens
  siRNA target sequence for NOL1 (NM_006170.1,100-118).
gcagtaagtgacgaaaatt

SEQ ID NO: 307486 - DNA, 19 bp, Homo sapiens
  siRNA target sequence for NOL1 (NM_006170.1,103-121).
gtaagtgacgaaaattcca

SEQ ID NO: 307487 - DNA, 19 bp, Homo sapiens
  siRNA target sequence for NOL1 (NM_006170.1,162-180).
gagattgggctctgttgaa

SEQ ID NO: 307488 - DNA, 19 bp, Homo sapiens
  siRNA target sequence for NOL1 (NM_006170.1,175-193).
gttgaagcccctaagacaa

SEQ ID NO: 307489 - DNA, 19 bp, Homo sapiens
  siRNA target sequence for NOL1 (NM_006170.1,183-201).
ccctaagacaaataagtct

SEQ ID NO: 307490 - DNA, 19 bp, Homo sapiens
  siRNA target sequence for NOL1 (NM_006170.1,276-294).
gggaccccagtccctattt

SEQ ID NO: 307491 - DNA, 19 bp, Homo sapiens
  siRNA target sequence for NOL1 (NM_006170.1,277-295).
ggaccccagtccctattta

SEQ ID NO: 307492 - DNA, 19 bp, Homo sapiens
  siRNA target sequence for NOL1 (NM_006170.1,278-296).
gaccccagtccctatttaa

SEQ ID NO: 307493 - DNA, 19 bp, Homo sapiens
  siRNA target sequence for NOL1 (NM_006170.1,282-300).
ccagtccctatttaatgct

SEQ ID NO: 307494 - DNA, 19 bp, Homo sapiens
  siRNA target sequence for NOL1 (NM_006170.1,472-490).
gcgttgctgcccattgaaa

SEQ ID NO: 307495 - DNA, 19 bp, Homo sapiens
  siRNA target sequence for NOL1 (NM_006170.1,720-738).
caagcggatccaggatatt

SEQ ID NO: 307496 - DNA, 19 bp, Homo sapiens
  siRNA target sequence for NOL1 (NM_006170.1,778-796).
gggcggtctcgttctgaat

SEQ ID NO: 307497 - DNA, 19 bp, Homo sapiens
  siRNA target sequence for NOL1 (NM_006170.1,779-797).
ggcggtctcgttctgaata

SEQ ID NO: 307498 - DNA, 19 bp, Homo sapiens
  siRNA target sequence for NOL1 (NM_006170.1,782-800).
ggtctcgttctgaatacct

SEQ ID NO: 307499 - DNA, 19 bp, Homo sapiens
  siRNA target sequence for NOL1 (NM_006170.1,894-912).
ggagttcttagaagctaat

SEQ ID NO: 307500 - DNA, 19 bp, Homo sapiens
  siRNA target sequence for NOL1 (NM_006170.1,928-946).
gtcaccctccggaccaata

SEQ ID NO: 307501 - DNA, 19 bp, Homo sapiens
  siRNA target sequence for NOL1 (NM_006170.1,932-950).
ccctccggaccaatacctt

SEQ ID NO: 307502 - DNA, 19 bp, Homo sapiens
  siRNA target sequence for NOL1 (NM_006170.1,1012-1030).
ctgggcaagtggtcaaaga

SEQ ID NO: 307503 - DNA, 19 bp, Homo sapiens
  siRNA target sequence for NOL1 (NM_006170.1,1014-1032).
gggcaagtggtcaaagact

SEQ ID NO: 307504 - DNA, 19 bp, Homo sapiens
  siRNA target sequence for NOL1 (NM_006170.1,1033-1051).
ggactagtggtgtatgatt

SEQ ID NO: 307505 - DNA, 19 bp, Homo sapiens
  siRNA target sequence for NOL1 (NM_006170.1,1414-1432).
gatccagccgtgaagacta

SEQ ID NO: 307506 - DNA, 19 bp, Homo sapiens
  siRNA target sequence for NOL1 (NM_006170.1,1418-1436).
cagccgtgaagactaacaa

SEQ ID NO: 307507 - DNA, 19 bp, Homo sapiens
  siRNA target sequence for NOL1 (NM_006170.1,1483-1501).
ctcctgagtgctattgact

SEQ ID NO: 307508 - DNA, 19 bp, Homo sapiens
  siRNA target sequence for NOL1 (NM_006170.1,1523-1541).
caggaggctacctggttta

SEQ ID NO: 307509 - DNA, 19 bp, Homo sapiens
  siRNA target sequence for NOL1 (NM_006170.1,1525-1543).
ggaggctacctggtttact

SEQ ID NO: 307510 - DNA, 19 bp, Homo sapiens
  siRNA target sequence for NOL1 (NM_006170.1,1542-1560).
ctgcacctgttctatcaca

SEQ ID NO: 307511 - DNA, 19 bp, Homo sapiens
  siRNA target sequence for NOL1 (NM_006170.1,1548-1566).
ctgttctatcacagtagaa

SEQ ID NO: 307512 - DNA, 19 bp, Homo sapiens
  siRNA target sequence for NOL1 (NM_006170.1,1582-1600).
gtagactatgctctgaaaa

SEQ ID NO: 307513 - DNA, 19 bp, Homo sapiens
  siRNA target sequence for NOL1 (NM_006170.1,1712-1730).
ctcatacccacaatatgga

SEQ ID NO: 307514 - DNA, 19 bp, Homo sapiens
  siRNA target sequence for NOL1 (NM_006170.1,1805-1823).
ccacacctacaaatgtaga

SEQ ID NO: 307515 - DNA, 19 bp, Homo sapiens
  siRNA target sequence for NOL1 (NM_006170.1,1808-1826).
cacctacaaatgtagactt

SEQ ID NO: 307516 - DNA, 19 bp, Homo sapiens
  siRNA target sequence for NOL1 (NM_006170.1,1878-1896).
caagggggctgcaaagaca

SEQ ID NO: 307517 - DNA, 19 bp, Homo sapiens
  siRNA target sequence for NOL1 (NM_006170.1,1990-2008).
gtaccttctgtcacaaaga

SEQ ID NO: 307518 - DNA, 19 bp, Homo sapiens
  siRNA target sequence for NOL1 (NM_006170.1,2097-2115).
gcaacgatcacctaaatta

SEQ ID NO: 307519 - DNA, 19 bp, Homo sapiens
  siRNA target sequence for NOL1 (NM_006170.1,2101-2119).
cgatcacctaaattacagt

SEQ ID NO: 307520 - DNA, 19 bp, Homo sapiens
  siRNA target sequence for NOL1 (NM_006170.1,2176-2194).
caaacaccggctgtgttat

SEQ ID NO: 307521 - DNA, 19 bp, Homo sapiens
  siRNA target sequence for NOL1 (NM_006170.1,2430-2448).
ctatcttagatggttgaaa

SEQ ID NO: 307522 - DNA, 19 bp, Homo sapiens
  siRNA target sequence for NOL1 (NM_006170.1,2434-2452).
cttagatggttgaaaacta

SEQ ID NO: 307523 - DNA, 19 bp, Homo sapiens
  siRNA target sequence for NOL1 (NM_006170.1,2523-2541).
catacccatgaaatttaat

SEQ ID NO: 307524 - DNA, 19 bp, Homo sapiens
  siRNA target sequence for NUDC (NM_006600.2,198-216).
cttgtgaacaccttcttca

SEQ ID NO: 307525 - DNA, 19 bp, Homo sapiens
  siRNA target sequence for NUDC (NM_006600.2,218-236).
cttccttcgacgcaaaaca

SEQ ID NO: 307526 - DNA, 19 bp, Homo sapiens
  siRNA target sequence for NUDC (NM_006600.2,266-284).
ggcagagaagcttatcaca

SEQ ID NO: 307527 - DNA, 19 bp, Homo sapiens
  siRNA target sequence for NUDC (NM_006600.2,613-631).
gggcagacctgcccaatta

SEQ ID NO: 307528 - DNA, 19 bp, Homo sapiens
  siRNA target sequence for SUGT1 (NM_006704.2,144-162).
cgttagaggagctgactaa

SEQ ID NO: 307529 - DNA, 19 bp, Homo sapiens
  siRNA target sequence for SUGT1 (NM_006704.2,269-287).
ctagaactcaatccaaata

SEQ ID NO: 307530 - DNA, 19 bp, Homo sapiens
  siRNA target sequence for SUGT1 (NM_006704.2,418-436).
gtgtcaagaagctcagaat

SEQ ID NO: 307531 - DNA, 19 bp, Homo sapiens
  siRNA target sequence for SUGT1 (NM_006704.2,454-472).
gtggactcatcagtcaaaa

SEQ ID NO: 307532 - DNA, 19 bp, Homo sapiens
  siRNA target sequence for SUGT1 (NM_006704.2,456-474).
ggactcatcagtcaaaaat

SEQ ID NO: 307533 - DNA, 19 bp, Homo sapiens
  siRNA target sequence for SUGT1 (NM_006704.2,459-477).
ctcatcagtcaaaaatcaa

SEQ ID NO: 307534 - DNA, 19 bp, Homo sapiens
  siRNA target sequence for SUGT1 (NM_006704.2,475-493).
caagtatgactggtatcaa

SEQ ID NO: 307535 - DNA, 19 bp, Homo sapiens
  siRNA target sequence for SUGT1 (NM_006704.2,478-496).
gtatgactggtatcaaaca

SEQ ID NO: 307536 - DNA, 19 bp, Homo sapiens
  siRNA target sequence for SUGT1 (NM_006704.2,484-502).
ctggtatcaaacagaatct

SEQ ID NO: 307537 - DNA, 19 bp, Homo sapiens
  siRNA target sequence for SUGT1 (NM_006704.2,487-505).
gtatcaaacagaatctcaa

SEQ ID NO: 307538 - DNA, 19 bp, Homo sapiens
  siRNA target sequence for SUGT1 (NM_006704.2,501-519).
ctcaagtagtcattacact

SEQ ID NO: 307539 - DNA, 19 bp, Homo sapiens
  siRNA target sequence for SUGT1 (NM_006704.2,503-521).
caagtagtcattacactta

SEQ ID NO: 307540 - DNA, 19 bp, Homo sapiens
  siRNA target sequence for SUGT1 (NM_006704.2,529-547).
gaatgttcagaagaatgat

SEQ ID NO: 307541 - DNA, 19 bp, Homo sapiens
  siRNA target sequence for SUGT1 (NM_006704.2,600-618).
ctggagaggattacaattt

SEQ ID NO: 307542 - DNA, 19 bp, Homo sapiens
  siRNA target sequence for SUGT1 (NM_006704.2,625-643).
ggaacttcttcatcctata

SEQ ID NO: 307543 - DNA, 19 bp, Homo sapiens
  siRNA target sequence for SUGT1 (NM_006704.2,655-673).
gagcacgtttaaagtactt

SEQ ID NO: 307544 - DNA, 19 bp, Homo sapiens
  siRNA target sequence for SUGT1 (NM_006704.2,658-676).
cacgtttaaagtactttca

SEQ ID NO: 307545 - DNA, 19 bp, Homo sapiens
  siRNA target sequence for SUGT1 (NM_006704.2,711-729).
ctgtgagatgggaaaagct

SEQ ID NO: 307546 - DNA, 19 bp, Homo sapiens
  siRNA target sequence for SUGT1 (NM_006704.2,746-764).
gtgcctacgccaaaacaat

SEQ ID NO: 307547 - DNA, 19 bp, Homo sapiens
  siRNA target sequence for SUGT1 (NM_006704.2,750-768).
ctacgccaaaacaattcgt

SEQ ID NO: 307548 - DNA, 19 bp, Homo sapiens
  siRNA target sequence for SUGT1 (NM_006704.2,761-779).
caattcgtagcagatgtaa

SEQ ID NO: 307549 - DNA, 19 bp, Homo sapiens
  siRNA target sequence for SUGT1 (NM_006704.2,770-788).
gcagatgtaaagaacctat

SEQ ID NO: 307550 - DNA, 19 bp, Homo sapiens
  siRNA target sequence for SUGT1 (NM_006704.2,781-799).
gaacctatatccatcatca

SEQ ID NO: 307551 - DNA, 19 bp, Homo sapiens
  siRNA target sequence for SUGT1 (NM_006704.2,798-816).
catctccttatacaagaaa

SEQ ID NO: 307552 - DNA, 19 bp, Homo sapiens
  siRNA target sequence for SUGT1 (NM_006704.2,810-828).
caagaaattgggataaatt

SEQ ID NO: 307553 - DNA, 19 bp, Homo sapiens
  siRNA target sequence for SUGT1 (NM_006704.2,813-831).
gaaattgggataaattggt

SEQ ID NO: 307554 - DNA, 19 bp, Homo sapiens
  siRNA target sequence for SUGT1 (NM_006704.2,872-890).
ggagatgcagctttaaaca

SEQ ID NO: 307555 - DNA, 19 bp, Homo sapiens
  siRNA target sequence for SUGT1 (NM_006704.2,891-909).
gattatttcagcagatcta

SEQ ID NO: 307556 - DNA, 19 bp, Homo sapiens
  siRNA target sequence for SUGT1 (NM_006704.2,907-925).
ctattcagatggttctgat

SEQ ID NO: 307557 - DNA, 19 bp, Homo sapiens
  siRNA target sequence for SUGT1 (NM_006704.2,935-953).
cgtgccatgaacaaatcct

SEQ ID NO: 307558 - DNA, 19 bp, Homo sapiens
  siRNA target sequence for SUGT1 (NM_006704.2,958-976).
ggagtcgggtggtacagtt

SEQ ID NO: 307559 - DNA, 19 bp, Homo sapiens
  siRNA target sequence for SUGT1 (NM_006704.2,964-982).
gggtggtacagttttgagt

SEQ ID NO: 307560 - DNA, 19 bp, Homo sapiens
  siRNA target sequence for SUGT1 (NM_006704.2,988-1006).
ctggtctgatgtaggtaaa

SEQ ID NO: 307561 - DNA, 19 bp, Homo sapiens
  siRNA target sequence for TOB2 (NM_016272.2,641-659).
gcttccgctgtgttcacat

SEQ ID NO: 307562 - DNA, 19 bp, Homo sapiens
  siRNA target sequence for HEC (NM_006101.1,146-164).
ctccatgcaggagttaaga

SEQ ID NO: 307563 - DNA, 19 bp, Homo sapiens
  siRNA target sequence for HEC (NM_006101.1,191-209).
ctatacccctcaaaccaaa

SEQ ID NO: 307564 - DNA, 19 bp, Homo sapiens
  siRNA target sequence for HEC (NM_006101.1,210-228).
gagaaaccaacctttggaa

SEQ ID NO: 307565 - DNA, 19 bp, Homo sapiens
  siRNA target sequence for HEC (NM_006101.1,216-234).
ccaacctttggaaagttga

SEQ ID NO: 307566 - DNA, 19 bp, Homo sapiens
  siRNA target sequence for HEC (NM_006101.1,225-243).
ggaaagttgagtataaaca

SEQ ID NO: 307567 - DNA, 19 bp, Homo sapiens
  siRNA target sequence for HEC (NM_006101.1,242-260).
caaaccgacatctgaaaga

SEQ ID NO: 307568 - DNA, 19 bp, Homo sapiens
  siRNA target sequence for HEC (NM_006101.1,312-330).
caacttggtatattttcca

SEQ ID NO: 307569 - DNA, 19 bp, Homo sapiens
  siRNA target sequence for HEC (NM_006101.1,347-365).
ggacccgagaccacttaat

SEQ ID NO: 307570 - DNA, 19 bp, Homo sapiens
  siRNA target sequence for HEC (NM_006101.1,351-369).
ccgagaccacttaatgaca

SEQ ID NO: 307571 - DNA, 19 bp, Homo sapiens
  siRNA target sequence for HEC (NM_006101.1,352-370).
cgagaccacttaatgacaa

SEQ ID NO: 307572 - DNA, 19 bp, Homo sapiens
  siRNA target sequence for HEC (NM_006101.1,377-395).
cattcagcagtgtattcga

SEQ ID NO: 307573 - DNA, 19 bp, Homo sapiens
  siRNA target sequence for HEC (NM_006101.1,423-441).
ggttatgcacataatgtgt

SEQ ID NO: 307574 - DNA, 19 bp, Homo sapiens
  siRNA target sequence for HEC (NM_006101.1,618-636).
gtgggggctcctcatacat

SEQ ID NO: 307575 - DNA, 19 bp, Homo sapiens
  siRNA target sequence for HEC (NM_006101.1,644-662).
cattgtggcagccttagtt

SEQ ID NO: 307576 - DNA, 19 bp, Homo sapiens
  siRNA target sequence for HEC (NM_006101.1,672-690).
gactgcatcaagatacata

SEQ ID NO: 307577 - DNA, 19 bp, Homo sapiens
  siRNA target sequence for HEC (NM_006101.1,674-692).
ctgcatcaagatacatact

SEQ ID NO: 307578 - DNA, 19 bp, Homo sapiens
  siRNA target sequence for HEC (NM_006101.1,698-716).
gaaagaaagctcaccttta

SEQ ID NO: 307579 - DNA, 19 bp, Homo sapiens
  siRNA target sequence for HEC (NM_006101.1,706-724).
gctcacctttatttgatga

SEQ ID NO: 307580 - DNA, 19 bp, Homo sapiens
  siRNA target sequence for HEC (NM_006101.1,756-774).
ggaattatgcataataagt

SEQ ID NO: 307581 - DNA, 19 bp, Homo sapiens
  siRNA target sequence for HEC (NM_006101.1,783-801).
gactacaccataaaatgct

SEQ ID NO: 307582 - DNA, 19 bp, Homo sapiens
  siRNA target sequence for HEC (NM_006101.1,800-818).
ctatgagagttttatgagt

SEQ ID NO: 307583 - DNA, 19 bp, Homo sapiens
  siRNA target sequence for HEC (NM_006101.1,823-841).
ccgacagctttgatgagat

SEQ ID NO: 307584 - DNA, 19 bp, Homo sapiens
  siRNA target sequence for HEC (NM_006101.1,855-873).
cagtcaaaactgaaggatt

SEQ ID NO: 307585 - DNA, 19 bp, Homo sapiens
  siRNA target sequence for HEC (NM_006101.1,857-875).
gtcaaaactgaaggattta

SEQ ID NO: 307586 - DNA, 19 bp, Homo sapiens
  siRNA target sequence for HEC (NM_006101.1,899-917).
ggaatcattagaagcaaaa

SEQ ID NO: 307587 - DNA, 19 bp, Homo sapiens
  siRNA target sequence for HEC (NM_006101.1,913-931).
caaaaaacagagcattgaa

SEQ ID NO: 307588 - DNA, 19 bp, Homo sapiens
  siRNA target sequence for HEC (NM_006101.1,978-996).
cgtctagagtcgttgagaa

SEQ ID NO: 307589 - DNA, 19 bp, Homo sapiens
  siRNA target sequence for HEC (NM_006101.1,979-997).
gtctagagtcgttgagaaa

SEQ ID NO: 307590 - DNA, 19 bp, Homo sapiens
  siRNA target sequence for HEC (NM_006101.1,984-1002).
gagtcgttgagaaaactga

SEQ ID NO: 307591 - DNA, 19 bp, Homo sapiens
  siRNA target sequence for HEC (NM_006101.1,1018-1036).
gagatgttcaaaagtatca

SEQ ID NO: 307592 - DNA, 19 bp, Homo sapiens
  siRNA target sequence for HEC (NM_006101.1,1110-1128).
gctagagtagaactagaat

SEQ ID NO: 307593 - DNA, 19 bp, Homo sapiens
  siRNA target sequence for HEC (NM_006101.1,1153-1171).
ctcgactacagaatatcat

SEQ ID NO: 307594 - DNA, 19 bp, Homo sapiens
  siRNA target sequence for HEC (NM_006101.1,1184-1202).
gtactcagttgcagacatt

SEQ ID NO: 307595 - DNA, 19 bp, Homo sapiens
  siRNA target sequence for HEC (NM_006101.1,1195-1213).
cagacattgagcgaataaa

SEQ ID NO: 307596 - DNA, 19 bp, Homo sapiens
  siRNA target sequence for HEC (NM_006101.1,1205-1223).
gcgaataaatcatgaaaga

SEQ ID NO: 307597 - DNA, 19 bp, Homo sapiens
  siRNA target sequence for HEC (NM_006101.1,1206-1224).
cgaataaatcatgaaagaa

SEQ ID NO: 307598 - DNA, 19 bp, Homo sapiens
  siRNA target sequence for HEC (NM_006101.1,1227-1245).
gaattgcagcagactatta

SEQ ID NO: 307599 - DNA, 19 bp, Homo sapiens
  siRNA target sequence for HEC (NM_006101.1,1232-1250).
gcagcagactattaataaa

SEQ ID NO: 307600 - DNA, 19 bp, Homo sapiens
  siRNA target sequence for HEC (NM_006101.1,1269-1287).
gctgaacaacagaagttgt

SEQ ID NO: 307601 - DNA, 19 bp, Homo sapiens
  siRNA target sequence for HEC (NM_006101.1,1350-1368).
cacaaattggctagaaaat

SEQ ID NO: 307602 - DNA, 19 bp, Homo sapiens
  siRNA target sequence for HEC (NM_006101.1,1389-1407).
gctgagaattccaaaggtt

SEQ ID NO: 307603 - DNA, 19 bp, Homo sapiens
  siRNA target sequence for HEC (NM_006101.1,1390-1408).
ctgagaattccaaaggtta

SEQ ID NO: 307604 - DNA, 19 bp, Homo sapiens
  siRNA target sequence for HEC (NM_006101.1,1457-1475).
caaatacagggctcaagtt

SEQ ID NO: 307605 - DNA, 19 bp, Homo sapiens
  siRNA target sequence for HEC (NM_006101.1,1463-1481).
cagggctcaagtttatgta

SEQ ID NO: 307606 - DNA, 19 bp, Homo sapiens
  siRNA target sequence for HEC (NM_006101.1,1490-1508).
ggaactcctgaatgaaact

SEQ ID NO: 307607 - DNA, 19 bp, Homo sapiens
  siRNA target sequence for HEC (NM_006101.1,1544-1562).
gggtttggaggatacttta

SEQ ID NO: 307608 - DNA, 19 bp, Homo sapiens
  siRNA target sequence for HEC (NM_006101.1,1551-1569).
gaggatactttagaacaat

SEQ ID NO: 307609 - DNA, 19 bp, Homo sapiens
  siRNA target sequence for HEC (NM_006101.1,1554-1572).
gatactttagaacaattga

SEQ ID NO: 307610 - DNA, 19 bp, Homo sapiens
  siRNA target sequence for HEC (NM_006101.1,1600-1618).
gtgtgagaactctgaaaga

SEQ ID NO: 307611 - DNA, 19 bp, Homo sapiens
  siRNA target sequence for HEC (NM_006101.1,1716-1734).
cacaagcacctgctagaaa

SEQ ID NO: 307612 - DNA, 19 bp, Homo sapiens
  siRNA target sequence for HEC (NM_006101.1,1718-1736).
caagcacctgctagaaagt

SEQ ID NO: 307613 - DNA, 19 bp, Homo sapiens
  siRNA target sequence for HEC (NM_006101.1,1721-1739).
gcacctgctagaaagtact

SEQ ID NO: 307614 - DNA, 19 bp, Homo sapiens
  siRNA target sequence for HEC (NM_006101.1,1725-1743).
ctgctagaaagtactgtta

SEQ ID NO: 307615 - DNA, 19 bp, Homo sapiens
  siRNA target sequence for HEC (NM_006101.1,1750-1768).
ggctcagtgaagctatgaa

SEQ ID NO: 307616 - DNA, 19 bp, Homo sapiens
  siRNA target sequence for HEC (NM_006101.1,1787-1805).
gcgggaataccaactagtt

SEQ ID NO: 307617 - DNA, 19 bp, Homo sapiens
  siRNA target sequence for HEC (NM_006101.1,1789-1807).
gggaataccaactagttgt

SEQ ID NO: 307618 - DNA, 19 bp, Homo sapiens
  siRNA target sequence for HEC (NM_006101.1,1830-1848).
cgaaaagtgggaaataact

SEQ ID NO: 307619 - DNA, 19 bp, Homo sapiens
  siRNA target sequence for HEC (NM_006101.1,1865-1883).
gatggttgctacacatgtt

SEQ ID NO: 307620 - DNA, 19 bp, Homo sapiens
  siRNA target sequence for HEC (NM_006101.1,1907-1925).
ggagcagattgctaaagtt

SEQ ID NO: 307621 - DNA, 19 bp, Homo sapiens
  siRNA target sequence for HEC (NM_006101.1,1910-1928).
gcagattgctaaagttgat

SEQ ID NO: 307622 - DNA, 19 bp, Homo sapiens
  siRNA target sequence for HEC (NM_006101.1,1995-2013).
gagaagaaagctactctaa

SEQ ID NO: 307623 - DNA, 19 bp, Homo sapiens
  siRNA target sequence for PRC1 (NM_003981.2,225-243).
gggaaatatgggagctaat

SEQ ID NO: 307624 - DNA, 19 bp, Homo sapiens
  siRNA target sequence for PRC1 (NM_003981.2,226-244).
ggaaatatgggagctaatt

SEQ ID NO: 307625 - DNA, 19 bp, Homo sapiens
  siRNA target sequence for PRC1 (NM_003981.2,254-272).
gaggaccagcggttacaaa

SEQ ID NO: 307626 - DNA, 19 bp, Homo sapiens
  siRNA target sequence for PRC1 (NM_003981.2,256-274).
ggaccagcggttacaaaga

SEQ ID NO: 307627 - DNA, 19 bp, Homo sapiens
  siRNA target sequence for PRC1 (NM_003981.2,257-275).
gaccagcggttacaaagaa

SEQ ID NO: 307628 - DNA, 19 bp, Homo sapiens
  siRNA target sequence for PRC1 (NM_003981.2,259-277).
ccagcggttacaaagaact

SEQ ID NO: 307629 - DNA, 19 bp, Homo sapiens
  siRNA target sequence for PRC1 (NM_003981.2,302-320).
gaactcctggatatgatga

SEQ ID NO: 307630 - DNA, 19 bp, Homo sapiens
  siRNA target sequence for PRC1 (NM_003981.2,390-408).
ctctgtgcagcgagttaca

SEQ ID NO: 307631 - DNA, 19 bp, Homo sapiens
  siRNA target sequence for PRC1 (NM_003981.2,394-412).
gtgcagcgagttacatgtt

SEQ ID NO: 307632 - DNA, 19 bp, Homo sapiens
  siRNA target sequence for PRC1 (NM_003981.2,548-566).
ctgtgcgaaattctttgta

SEQ ID NO: 307633 - DNA, 19 bp, Homo sapiens
  siRNA target sequence for PRC1 (NM_003981.2,569-587).
ccccactatgatattgaca

SEQ ID NO: 307634 - DNA, 19 bp, Homo sapiens
  siRNA target sequence for PRC1 (NM_003981.2,663-681).
ctaggcgtgaggagtttgt

SEQ ID NO: 307635 - DNA, 19 bp, Homo sapiens
  siRNA target sequence for PRC1 (NM_003981.2,674-692).
gagtttgtcagtataaaga

SEQ ID NO: 307636 - DNA, 19 bp, Homo sapiens
  siRNA target sequence for PRC1 (NM_003981.2,676-694).
gtttgtcagtataaagaga

SEQ ID NO: 307637 - DNA, 19 bp, Homo sapiens
  siRNA target sequence for PRC1 (NM_003981.2,693-711).
gacagatcatactgtgtat

SEQ ID NO: 307638 - DNA, 19 bp, Homo sapiens
  siRNA target sequence for PRC1 (NM_003981.2,697-715).
gatcatactgtgtatggaa

SEQ ID NO: 307639 - DNA, 19 bp, Homo sapiens
  siRNA target sequence for PRC1 (NM_003981.2,730-748).
cccagacacaagctttgaa

SEQ ID NO: 307640 - DNA, 19 bp, Homo sapiens
  siRNA target sequence for PRC1 (NM_003981.2,1069-1087).
ctgggaccagtgcttttat

SEQ ID NO: 307641 - DNA, 19 bp, Homo sapiens
  siRNA target sequence for PRC1 (NM_003981.2,1164-1182).
ctgagattgtgcggttaaa

SEQ ID NO: 307642 - DNA, 19 bp, Homo sapiens
  siRNA target sequence for PRC1 (NM_003981.2,1166-1184).
gagattgtgcggttaaaaa

SEQ ID NO: 307643 - DNA, 19 bp, Homo sapiens
  siRNA target sequence for PRC1 (NM_003981.2,1172-1190).
gtgcggttaaaaaactact

SEQ ID NO: 307644 - DNA, 19 bp, Homo sapiens
  siRNA target sequence for PRC1 (NM_003981.2,1174-1192).
gcggttaaaaaactactat

SEQ ID NO: 307645 - DNA, 19 bp, Homo sapiens
  siRNA target sequence for PRC1 (NM_003981.2,1176-1194).
ggttaaaaaactactatga

SEQ ID NO: 307646 - DNA, 19 bp, Homo sapiens
  siRNA target sequence for PRC1 (NM_003981.2,1177-1195).
gttaaaaaactactatgaa

SEQ ID NO: 307647 - DNA, 19 bp, Homo sapiens
  siRNA target sequence for PRC1 (NM_003981.2,1245-1263).
ggcttttcttagagtttga

SEQ ID NO: 307648 - DNA, 19 bp, Homo sapiens
  siRNA target sequence for PRC1 (NM_003981.2,1271-1289).
gcttcagatccaaatcgat

SEQ ID NO: 307649 - DNA, 19 bp, Homo sapiens
  siRNA target sequence for PRC1 (NM_003981.2,1272-1290).
cttcagatccaaatcgatt

SEQ ID NO: 307650 - DNA, 19 bp, Homo sapiens
  siRNA target sequence for PRC1 (NM_003981.2,1277-1295).
gatccaaatcgatttacaa

SEQ ID NO: 307651 - DNA, 19 bp, Homo sapiens
  siRNA target sequence for PRC1 (NM_003981.2,1335-1353).
ccaagctccagaaaatgct

SEQ ID NO: 307652 - DNA, 19 bp, Homo sapiens
  siRNA target sequence for PRC1 (NM_003981.2,1491-1509).
gagccaagcaggaaagaca

SEQ ID NO: 307653 - DNA, 19 bp, Homo sapiens
  siRNA target sequence for PRC1 (NM_003981.2,1610-1628).
gcacgtaagctgaacacta

SEQ ID NO: 307654 - DNA, 19 bp, Homo sapiens
  siRNA target sequence for PRC1 (NM_003981.2,1656-1674).
gtagcattcggcctatctt

SEQ ID NO: 307655 - DNA, 19 bp, Homo sapiens
  siRNA target sequence for PRC1 (NM_003981.2,1744-1762).
cacctgttcagggaagaaa

SEQ ID NO: 307656 - DNA, 19 bp, Homo sapiens
  siRNA target sequence for PRC1 (NM_003981.2,1850-1868).
cccctccagcgcaacttca

SEQ ID NO: 307657 - DNA, 19 bp, Homo sapiens
  siRNA target sequence for PRC1 (NM_003981.2,1942-1960).
gcttcagcgagaactttca

SEQ ID NO: 307658 - DNA, 19 bp, Homo sapiens
  siRNA target sequence for PRC1 (NM_003981.2,1943-1961).
cttcagcgagaactttcaa

SEQ ID NO: 307659 - DNA, 19 bp, Homo sapiens
  siRNA target sequence for HCAP-G (NM_022346.2,193-211).
ggctgctgtcgattaagga

SEQ ID NO: 307660 - DNA, 19 bp, Homo sapiens
  siRNA target sequence for HCAP-G (NM_022346.2,282-300).
cgcacgatggatgataaga

SEQ ID NO: 307661 - DNA, 19 bp, Homo sapiens
  siRNA target sequence for HCAP-G (NM_022346.2,309-327).
catgaggagttcattcatt

SEQ ID NO: 307662 - DNA, 19 bp, Homo sapiens
  siRNA target sequence for HCAP-G (NM_022346.2,314-332).
ggagttcattcattacctt

SEQ ID NO: 307663 - DNA, 19 bp, Homo sapiens
  siRNA target sequence for HCAP-G (NM_022346.2,315-333).
gagttcattcattacctta

SEQ ID NO: 307664 - DNA, 19 bp, Homo sapiens
  siRNA target sequence for HCAP-G (NM_022346.2,371-389).
ggagagggtaatagaattt

SEQ ID NO: 307665 - DNA, 19 bp, Homo sapiens
  siRNA target sequence for HCAP-G (NM_022346.2,534-552).
ctgctcataaacaagcttt

SEQ ID NO: 307666 - DNA, 19 bp, Homo sapiens
  siRNA target sequence for HCAP-G (NM_022346.2,554-572).
gggaagtatgccagaaaat

SEQ ID NO: 307667 - DNA, 19 bp, Homo sapiens
  siRNA target sequence for HCAP-G (NM_022346.2,563-581).
gccagaaaatgctcagatt

SEQ ID NO: 307668 - DNA, 19 bp, Homo sapiens
  siRNA target sequence for HCAP-G (NM_022346.2,585-603).
gatgatgtgtttgataaaa

SEQ ID NO: 307669 - DNA, 19 bp, Homo sapiens
  siRNA target sequence for HCAP-G (NM_022346.2,711-729).
gtggttaatgcatatgcta

SEQ ID NO: 307670 - DNA, 19 bp, Homo sapiens
  siRNA target sequence for HCAP-G (NM_022346.2,744-762).
gattcaaatccagaagtta

SEQ ID NO: 307671 - DNA, 19 bp, Homo sapiens
  siRNA target sequence for HCAP-G (NM_022346.2,759-777).
gttagacgggcagtgttat

SEQ ID NO: 307672 - DNA, 19 bp, Homo sapiens
  siRNA target sequence for HCAP-G (NM_022346.2,765-783).
cgggcagtgttatcatgta

SEQ ID NO: 307673 - DNA, 19 bp, Homo sapiens
  siRNA target sequence for HCAP-G (NM_022346.2,766-784).
gggcagtgttatcatgtat

SEQ ID NO: 307674 - DNA, 19 bp, Homo sapiens
  siRNA target sequence for HCAP-G (NM_022346.2,767-785).
ggcagtgttatcatgtatt

SEQ ID NO: 307675 - DNA, 19 bp, Homo sapiens
  siRNA target sequence for HCAP-G (NM_022346.2,820-838).
ggcgcaccaaggatgtgaa

SEQ ID NO: 307676 - DNA, 19 bp, Homo sapiens
  siRNA target sequence for HCAP-G (NM_022346.2,857-875).
ggcttatcaggttttagct

SEQ ID NO: 307677 - DNA, 19 bp, Homo sapiens
  siRNA target sequence for HCAP-G (NM_022346.2,873-891).
gctgaaaaggttcatatga

SEQ ID NO: 307678 - DNA, 19 bp, Homo sapiens
  siRNA target sequence for HCAP-G (NM_022346.2,901-919).
ccattgctcagagagtaat

SEQ ID NO: 307679 - DNA, 19 bp, Homo sapiens
  siRNA target sequence for HCAP-G (NM_022346.2,927-945).
caacaaggtcttaatgaca

SEQ ID NO: 307680 - DNA, 19 bp, Homo sapiens
  siRNA target sequence for HCAP-G (NM_022346.2,967-985).
ctatgcagaagcatcttct

SEQ ID NO: 307681 - DNA, 19 bp, Homo sapiens
  siRNA target sequence for HCAP-G (NM_022346.2,1004-1022).
ctctgaaggaaatatctta

SEQ ID NO: 307682 - DNA, 19 bp, Homo sapiens
  siRNA target sequence for HCAP-G (NM_022346.2,1032-1050).
catcggttggatgtagaaa

SEQ ID NO: 307683 - DNA, 19 bp, Homo sapiens
  siRNA target sequence for HCAP-G (NM_022346.2,1035-1053).
cggttggatgtagaaaatt

SEQ ID NO: 307684 - DNA, 19 bp, Homo sapiens
  siRNA target sequence for HCAP-G (NM_022346.2,1151-1169).
gattccagtggaaacatta

SEQ ID NO: 307685 - DNA, 19 bp, Homo sapiens
  siRNA target sequence for HCAP-G (NM_022346.2,1192-1210).
ggtgtgccctttgtgaata

SEQ ID NO: 307686 - DNA, 19 bp, Homo sapiens
  siRNA target sequence for HCAP-G (NM_022346.2,1193-1211).
gtgtgccctttgtgaatat

SEQ ID NO: 307687 - DNA, 19 bp, Homo sapiens
  siRNA target sequence for HCAP-G (NM_022346.2,1197-1215).
gccctttgtgaatatttga

SEQ ID NO: 307688 - DNA, 19 bp, Homo sapiens
  siRNA target sequence for HCAP-G (NM_022346.2,1259-1277).
gccagagcctgtagtatat

SEQ ID NO: 307689 - DNA, 19 bp, Homo sapiens
  siRNA target sequence for HCAP-G (NM_022346.2,1272-1290).
gtatatgcagactatttat

SEQ ID NO: 307690 - DNA, 19 bp, Homo sapiens
  siRNA target sequence for HCAP-G (NM_022346.2,1278-1296).
gcagactatttattgagtt

SEQ ID NO: 307691 - DNA, 19 bp, Homo sapiens
  siRNA target sequence for HCAP-G (NM_022346.2,1302-1320).
cagagcattccagttgtta

SEQ ID NO: 307692 - DNA, 19 bp, Homo sapiens
  siRNA target sequence for HCAP-G (NM_022346.2,1306-1324).
gcattccagttgttaatga

SEQ ID NO: 307693 - DNA, 19 bp, Homo sapiens
  siRNA target sequence for HCAP-G (NM_022346.2,1329-1347).
cacagaggtgatttttcct

SEQ ID NO: 307694 - DNA, 19 bp, Homo sapiens
  siRNA target sequence for HCAP-G (NM_022346.2,1333-1351).
gaggtgatttttcctatat

SEQ ID NO: 307695 - DNA, 19 bp, Homo sapiens
  siRNA target sequence for HCAP-G (NM_022346.2,1380-1398).
ggtcaacaattgattctaa

SEQ ID NO: 307696 - DNA, 19 bp, Homo sapiens
  siRNA target sequence for HCAP-G (NM_022346.2,1381-1399).
gtcaacaattgattctaat

SEQ ID NO: 307697 - DNA, 19 bp, Homo sapiens
  siRNA target sequence for HCAP-G (NM_022346.2,1485-1503).
ccaatatccctggtttctt

SEQ ID NO: 307698 - DNA, 19 bp, Homo sapiens
  siRNA target sequence for HCAP-G (NM_022346.2,1486-1504).
caatatccctggtttcttt

SEQ ID NO: 307699 - DNA, 19 bp, Homo sapiens
  siRNA target sequence for HCAP-G (NM_022346.2,1516-1534).
gactactccacatcattat

SEQ ID NO: 307700 - DNA, 19 bp, Homo sapiens
  siRNA target sequence for HCAP-G (NM_022346.2,1600-1618).
ctgttggtgttaataacga

SEQ ID NO: 307701 - DNA, 19 bp, Homo sapiens
  siRNA target sequence for HCAP-G (NM_022346.2,1616-1634).
cgatccagctgatgtaaga

SEQ ID NO: 307702 - DNA, 19 bp, Homo sapiens
  siRNA target sequence for HCAP-G (NM_022346.2,1670-1688).
gcttatcgaagccaaagaa

SEQ ID NO: 307703 - DNA, 19 bp, Homo sapiens
  siRNA target sequence for HCAP-G (NM_022346.2,1769-1787).
cagaataaaccttttgaaa

SEQ ID NO: 307704 - DNA, 19 bp, Homo sapiens
  siRNA target sequence for HCAP-G (NM_022346.2,1790-1808).
gacagagcaacttgaaatt

SEQ ID NO: 307705 - DNA, 19 bp, Homo sapiens
  siRNA target sequence for HCAP-G (NM_022346.2,1883-1901).
gcagatgtccatttcaaca

SEQ ID NO: 307706 - DNA, 19 bp, Homo sapiens
  siRNA target sequence for HCAP-G (NM_022346.2,1892-1910).
catttcaacaggcttaagt

SEQ ID NO: 307707 - DNA, 19 bp, Homo sapiens
  siRNA target sequence for HCAP-G (NM_022346.2,1904-1922).
cttaagtgcaaccatgaat

SEQ ID NO: 307708 - DNA, 19 bp, Homo sapiens
  siRNA target sequence for HCAP-G (NM_022346.2,1909-1927).
gtgcaaccatgaatggaat

SEQ ID NO: 307709 - DNA, 19 bp, Homo sapiens
  siRNA target sequence for HCAP-G (NM_022346.2,1912-1930).
caaccatgaatggaatcat

SEQ ID NO: 307710 - DNA, 19 bp, Homo sapiens
  siRNA target sequence for HCAP-G (NM_022346.2,1923-1941).
ggaatcatcgaatctttga

SEQ ID NO: 307711 - DNA, 19 bp, Homo sapiens
  siRNA target sequence for HCAP-G (NM_022346.2,1924-1942).
gaatcatcgaatctttgat

SEQ ID NO: 307712 - DNA, 19 bp, Homo sapiens
  siRNA target sequence for HCAP-G (NM_022346.2,1928-1946).
catcgaatctttgattctt

SEQ ID NO: 307713 - DNA, 19 bp, Homo sapiens
  siRNA target sequence for HCAP-G (NM_022346.2,1948-1966).
ctggaataataagtattca

SEQ ID NO: 307714 - DNA, 19 bp, Homo sapiens
  siRNA target sequence for HCAP-G (NM_022346.2,2025-2043).
gattttgcaaggaaacact

SEQ ID NO: 307715 - DNA, 19 bp, Homo sapiens
  siRNA target sequence for HCAP-G (NM_022346.2,2031-2049).
gcaaggaaacacttcgtat

SEQ ID NO: 307716 - DNA, 19 bp, Homo sapiens
  siRNA target sequence for HCAP-G (NM_022346.2,2032-2050).
caaggaaacacttcgtatt

SEQ ID NO: 307717 - DNA, 19 bp, Homo sapiens
  siRNA target sequence for HCAP-G (NM_022346.2,2123-2141).
gatgacgttcgggattgaa

SEQ ID NO: 307718 - DNA, 19 bp, Homo sapiens
  siRNA target sequence for HCAP-G (NM_022346.2,2128-2146).
cgttcgggattgaaccatt

SEQ ID NO: 307719 - DNA, 19 bp, Homo sapiens
  siRNA target sequence for HCAP-G (NM_022346.2,2132-2150).
cgggattgaaccatttaaa

SEQ ID NO: 307720 - DNA, 19 bp, Homo sapiens
  siRNA target sequence for HCAP-G (NM_022346.2,2231-2249).
gactgctacagctaagaat

SEQ ID NO: 307721 - DNA, 19 bp, Homo sapiens
  siRNA target sequence for HCAP-G (NM_022346.2,2233-2251).
ctgctacagctaagaatgt

SEQ ID NO: 307722 - DNA, 19 bp, Homo sapiens
  siRNA target sequence for HCAP-G (NM_022346.2,2236-2254).
ctacagctaagaatgttct

SEQ ID NO: 307723 - DNA, 19 bp, Homo sapiens
  siRNA target sequence for HCAP-G (NM_022346.2,2239-2257).
cagctaagaatgttctgaa

SEQ ID NO: 307724 - DNA, 19 bp, Homo sapiens
  siRNA target sequence for HCAP-G (NM_022346.2,2261-2279).
cctttctgatttcttagat

SEQ ID NO: 307725 - DNA, 19 bp, Homo sapiens
  siRNA target sequence for HCAP-G (NM_022346.2,2262-2280).
ctttctgatttcttagata

SEQ ID NO: 307726 - DNA, 19 bp, Homo sapiens
  siRNA target sequence for HCAP-G (NM_022346.2,2266-2284).
ctgatttcttagatagtga

SEQ ID NO: 307727 - DNA, 19 bp, Homo sapiens
  siRNA target sequence for HCAP-G (NM_022346.2,2317-2335).
gactagccaagctgatgtt

SEQ ID NO: 307728 - DNA, 19 bp, Homo sapiens
  siRNA target sequence for HCAP-G (NM_022346.2,2359-2377).
ggattctttctcgtcttat

SEQ ID NO: 307729 - DNA, 19 bp, Homo sapiens
  siRNA target sequence for HCAP-G (NM_022346.2,2360-2378).
gattctttctcgtcttatt

SEQ ID NO: 307730 - DNA, 19 bp, Homo sapiens
  siRNA target sequence for HCAP-G (NM_022346.2,2364-2382).
ctttctcgtcttattttgt

SEQ ID NO: 307731 - DNA, 19 bp, Homo sapiens
  siRNA target sequence for HCAP-G (NM_022346.2,2371-2389).
gtcttattttgttatggta

SEQ ID NO: 307732 - DNA, 19 bp, Homo sapiens
  siRNA target sequence for HCAP-G (NM_022346.2,2401-2419).
ctgaagaggatgttcaact

SEQ ID NO: 307733 - DNA, 19 bp, Homo sapiens
  siRNA target sequence for HCAP-G (NM_022346.2,2444-2462).
ccccgtgtttgcttatgca

SEQ ID NO: 307734 - DNA, 19 bp, Homo sapiens
  siRNA target sequence for HCAP-G (NM_022346.2,2445-2463).
cccgtgtttgcttatgcaa

SEQ ID NO: 307735 - DNA, 19 bp, Homo sapiens
  siRNA target sequence for HCAP-G (NM_022346.2,2528-2546).
ccctgcatcttctccttta

SEQ ID NO: 307736 - DNA, 19 bp, Homo sapiens
  siRNA target sequence for HCAP-G (NM_022346.2,2563-2581).
caaatgttgctgagttact

SEQ ID NO: 307737 - DNA, 19 bp, Homo sapiens
  siRNA target sequence for HCAP-G (NM_022346.2,2644-2662).
ccttaacagtacatgacaa

SEQ ID NO: 307738 - DNA, 19 bp, Homo sapiens
  siRNA target sequence for HCAP-G (NM_022346.2,2645-2663).
cttaacagtacatgacaat

SEQ ID NO: 307739 - DNA, 19 bp, Homo sapiens
  siRNA target sequence for HCAP-G (NM_022346.2,2658-2676).
gacaatttggctatgaaaa

SEQ ID NO: 307740 - DNA, 19 bp, Homo sapiens
  siRNA target sequence for HCAP-G (NM_022346.2,2698-2716).
gtccgtgctcgccagaaat

SEQ ID NO: 307741 - DNA, 19 bp, Homo sapiens
  siRNA target sequence for HCAP-G (NM_022346.2,2702-2720).
gtgctcgccagaaattcga

SEQ ID NO: 307742 - DNA, 19 bp, Homo sapiens
  siRNA target sequence for HCAP-G (NM_022346.2,2712-2730).
gaaattcgagtctatacaa

SEQ ID NO: 307743 - DNA, 19 bp, Homo sapiens
  siRNA target sequence for HCAP-G (NM_022346.2,2758-2776).
gccatcttgcaaaagatct

SEQ ID NO: 307744 - DNA, 19 bp, Homo sapiens
  siRNA target sequence for HCAP-G (NM_022346.2,2780-2798).
ggttctattgaatgagatt

SEQ ID NO: 307745 - DNA, 19 bp, Homo sapiens
  siRNA target sequence for HCAP-G (NM_022346.2,2907-2925).
gccaccttgactacaacta

SEQ ID NO: 307746 - DNA, 19 bp, Homo sapiens
  siRNA target sequence for HCAP-G (NM_022346.2,2911-2929).
ccttgactacaactacttt

SEQ ID NO: 307747 - DNA, 19 bp, Homo sapiens
  siRNA target sequence for HCAP-G (NM_022346.2,2917-2935).
ctacaactactttccaaaa

SEQ ID NO: 307748 - DNA, 19 bp, Homo sapiens
  siRNA target sequence for HCAP-G (NM_022346.2,2923-2941).
ctactttccaaaatgaaga

SEQ ID NO: 307749 - DNA, 19 bp, Homo sapiens
  siRNA target sequence for HCAP-G (NM_022346.2,2988-3006).
gcaacccaagcatcaaagt

SEQ ID NO: 307750 - DNA, 19 bp, Homo sapiens
  siRNA target sequence for HCAP-G (NM_022346.2,3001-3019).
caaagtctactcagctaaa

SEQ ID NO: 307751 - DNA, 19 bp, Homo sapiens
  siRNA target sequence for HCAP-G (NM_022346.2,3007-3025).
ctactcagctaaagactaa

SEQ ID NO: 307752 - DNA, 19 bp, Homo sapiens
  siRNA target sequence for HCAP-G (NM_022346.2,3164-3182).
cgcagcactagaaaaaagt

SEQ ID NO: 307753 - DNA, 19 bp, Homo sapiens
  siRNA target sequence for HCAP-G (NM_022346.2,3191-3209).
ccttgcccaatttctcaat

SEQ ID NO: 307754 - DNA, 19 bp, Homo sapiens
  siRNA target sequence for HCAP-G (NM_022346.2,3204-3222).
ctcaatgaagatctaagtt

SEQ ID NO: 307755 - DNA, 19 bp, Homo sapiens
  siRNA target sequence for CDC27 (NM_001256.2,160-178).
ctatatggcaagcactaaa

SEQ ID NO: 307756 - DNA, 19 bp, Homo sapiens
  siRNA target sequence for CDC27 (NM_001256.2,172-190).
cactaaaccactatgctta

SEQ ID NO: 307757 - DNA, 19 bp, Homo sapiens
  siRNA target sequence for CDC27 (NM_001256.2,206-224).
cctcgcagaacgcctttat

SEQ ID NO: 307758 - DNA, 19 bp, Homo sapiens
  siRNA target sequence for CDC27 (NM_001256.2,209-227).
cgcagaacgcctttatgca

SEQ ID NO: 307759 - DNA, 19 bp, Homo sapiens
  siRNA target sequence for CDC27 (NM_001256.2,278-296).
ctcaggaaaggcatataaa

SEQ ID NO: 307760 - DNA, 19 bp, Homo sapiens
  siRNA target sequence for CDC27 (NM_001256.2,289-307).
catataaagcatatagact

SEQ ID NO: 307761 - DNA, 19 bp, Homo sapiens
  siRNA target sequence for CDC27 (NM_001256.2,325-343).
gtactacaccgcaatgcaa

SEQ ID NO: 307762 - DNA, 19 bp, Homo sapiens
  siRNA target sequence for CDC27 (NM_001256.2,340-358).
gcaaatacctgcttgcaaa

SEQ ID NO: 307763 - DNA, 19 bp, Homo sapiens
  siRNA target sequence for CDC27 (NM_001256.2,347-365).
cctgcttgcaaaatgttgt

SEQ ID NO: 307764 - DNA, 19 bp, Homo sapiens
  siRNA target sequence for CDC27 (NM_001256.2,350-368).
gcttgcaaaatgttgtgtt

SEQ ID NO: 307765 - DNA, 19 bp, Homo sapiens
  siRNA target sequence for CDC27 (NM_001256.2,385-403).
cagaaggggaacaaatctt

SEQ ID NO: 307766 - DNA, 19 bp, Homo sapiens
  siRNA target sequence for CDC27 (NM_001256.2,522-540).
gccaaaggatcagaatgtt

SEQ ID NO: 307767 - DNA, 19 bp, Homo sapiens
  siRNA target sequence for CDC27 (NM_001256.2,542-560).
ccaaaagagccttagttta

SEQ ID NO: 307768 - DNA, 19 bp, Homo sapiens
  siRNA target sequence for CDC27 (NM_001256.2,543-561).
caaaagagccttagtttaa

SEQ ID NO: 307769 - DNA, 19 bp, Homo sapiens
  siRNA target sequence for CDC27 (NM_001256.2,548-566).
gagccttagtttaaatcct

SEQ ID NO: 307770 - DNA, 19 bp, Homo sapiens
  siRNA target sequence for CDC27 (NM_001256.2,612-630).
ccagatcctgaccaaacat

SEQ ID NO: 307771 - DNA, 19 bp, Homo sapiens
  siRNA target sequence for CDC27 (NM_001256.2,613-631).
cagatcctgaccaaacatt

SEQ ID NO: 307772 - DNA, 19 bp, Homo sapiens
  siRNA target sequence for CDC27 (NM_001256.2,618-636).
cctgaccaaacatttaaat

SEQ ID NO: 307773 - DNA, 19 bp, Homo sapiens
  siRNA target sequence for CDC27 (NM_001256.2,619-637).
ctgaccaaacatttaaatt

SEQ ID NO: 307774 - DNA, 19 bp, Homo sapiens
  siRNA target sequence for CDC27 (NM_001256.2,674-692).
ctcttgcacaacacaagta

SEQ ID NO: 307775 - DNA, 19 bp, Homo sapiens
  siRNA target sequence for CDC27 (NM_001256.2,679-697).
gcacaacacaagtacctaa

SEQ ID NO: 307776 - DNA, 19 bp, Homo sapiens
  siRNA target sequence for CDC27 (NM_001256.2,680-698).
cacaacacaagtacctaat

SEQ ID NO: 307777 - DNA, 19 bp, Homo sapiens
  siRNA target sequence for CDC27 (NM_001256.2,682-700).
caacacaagtacctaatca

SEQ ID NO: 307778 - DNA, 19 bp, Homo sapiens
  siRNA target sequence for CDC27 (NM_001256.2,690-708).
gtacctaatcatagtttat

SEQ ID NO: 307779 - DNA, 19 bp, Homo sapiens
  siRNA target sequence for CDC27 (NM_001256.2,717-735).
cagcctgagacagttctta

SEQ ID NO: 307780 - DNA, 19 bp, Homo sapiens
  siRNA target sequence for CDC27 (NM_001256.2,746-764).
ccaggacacaattgaatta

SEQ ID NO: 307781 - DNA, 19 bp, Homo sapiens
  siRNA target sequence for CDC27 (NM_001256.2,780-798).
gaatcttccaattcaaagt

SEQ ID NO: 307782 - DNA, 19 bp, Homo sapiens
  siRNA target sequence for CDC27 (NM_001256.2,870-888).
ggaacaggaacttccatat

SEQ ID NO: 307783 - DNA, 19 bp, Homo sapiens
  siRNA target sequence for CDC27 (NM_001256.2,871-889).
gaacaggaacttccatatt

SEQ ID NO: 307784 - DNA, 19 bp, Homo sapiens
  siRNA target sequence for CDC27 (NM_001256.2,877-895).
gaacttccatattatctaa

SEQ ID NO: 307785 - DNA, 19 bp, Homo sapiens
  siRNA target sequence for CDC27 (NM_001256.2,913-931).
caaaaactggtcgaagttt

SEQ ID NO: 307786 - DNA, 19 bp, Homo sapiens
  siRNA target sequence for CDC27 (NM_001256.2,945-963).
gcagctcttagtccattaa

SEQ ID NO: 307787 - DNA, 19 bp, Homo sapiens
  siRNA target sequence for CDC27 (NM_001256.2,955-973).
gtccattaaccccaagttt

SEQ ID NO: 307788 - DNA, 19 bp, Homo sapiens
  siRNA target sequence for CDC27 (NM_001256.2,1002-1020).
cctggagatggatcctatt

SEQ ID NO: 307789 - DNA, 19 bp, Homo sapiens
  siRNA target sequence for CDC27 (NM_001256.2,1003-1021).
ctggagatggatcctattt

SEQ ID NO: 307790 - DNA, 19 bp, Homo sapiens
  siRNA target sequence for CDC27 (NM_001256.2,1008-1026).
gatggatcctatttacaaa

SEQ ID NO: 307791 - DNA, 19 bp, Homo sapiens
  siRNA target sequence for CDC27 (NM_001256.2,1066-1084).
ccggagccccttcaaaaaa

SEQ ID NO: 307792 - DNA, 19 bp, Homo sapiens
  siRNA target sequence for CDC27 (NM_001256.2,1145-1163).
ccgagaggtaactccaatt

SEQ ID NO: 307793 - DNA, 19 bp, Homo sapiens
  siRNA target sequence for CDC27 (NM_001256.2,1185-1203).
ggtccacaaacaagtacaa

SEQ ID NO: 307794 - DNA, 19 bp, Homo sapiens
  siRNA target sequence for CDC27 (NM_001256.2,1244-1262).
cgcactgcctcgaagaagt

SEQ ID NO: 307795 - DNA, 19 bp, Homo sapiens
  siRNA target sequence for CDC27 (NM_001256.2,1291-1309).
caaccaaggagaatagcaa

SEQ ID NO: 307796 - DNA, 19 bp, Homo sapiens
  siRNA target sequence for CDC27 (NM_001256.2,1332-1350).
cctaaaatcccaaacagaa

SEQ ID NO: 307797 - DNA, 19 bp, Homo sapiens
  siRNA target sequence for CDC27 (NM_001256.2,1378-1396).
gaataactcaacctaacat

SEQ ID NO: 307798 - DNA, 19 bp, Homo sapiens
  siRNA target sequence for CDC27 (NM_001256.2,1384-1402).
ctcaacctaacataaatga

SEQ ID NO: 307799 - DNA, 19 bp, Homo sapiens
  siRNA target sequence for CDC27 (NM_001256.2,1386-1404).
caacctaacataaatgata

SEQ ID NO: 307800 - DNA, 19 bp, Homo sapiens
  siRNA target sequence for CDC27 (NM_001256.2,1401-1419).
gatagcctggaaattacaa

SEQ ID NO: 307801 - DNA, 19 bp, Homo sapiens
  siRNA target sequence for CDC27 (NM_001256.2,1459-1477).
caatcacacctcagattca

SEQ ID NO: 307802 - DNA, 19 bp, Homo sapiens
  siRNA target sequence for CDC27 (NM_001256.2,1472-1490).
gattcaggcctttaatcta

SEQ ID NO: 307803 - DNA, 19 bp, Homo sapiens
  siRNA target sequence for CDC27 (NM_001256.2,1536-1554).
gggaaaggttatttagctt

SEQ ID NO: 307804 - DNA, 19 bp, Homo sapiens
  siRNA target sequence for CDC27 (NM_001256.2,1537-1555).
ggaaaggttatttagcttt

SEQ ID NO: 307805 - DNA, 19 bp, Homo sapiens
  siRNA target sequence for CDC27 (NM_001256.2,1571-1589).
caaagaagctataaatatt

SEQ ID NO: 307806 - DNA, 19 bp, Homo sapiens
  siRNA target sequence for CDC27 (NM_001256.2,1628-1646).
ggtactgtgccaaattgga

SEQ ID NO: 307807 - DNA, 19 bp, Homo sapiens
  siRNA target sequence for CDC27 (NM_001256.2,1629-1647).
gtactgtgccaaattggaa

SEQ ID NO: 307808 - DNA, 19 bp, Homo sapiens
  siRNA target sequence for CDC27 (NM_001256.2,1694-1712).
ctcagaggttagaaggatt

SEQ ID NO: 307809 - DNA, 19 bp, Homo sapiens
  siRNA target sequence for CDC27 (NM_001256.2,1731-1749).
ggcatggagatctactcta

SEQ ID NO: 307810 - DNA, 19 bp, Homo sapiens
  siRNA target sequence for CDC27 (NM_001256.2,1788-1806).
gttctgtcaaaagacttaa

SEQ ID NO: 307811 - DNA, 19 bp, Homo sapiens
  siRNA target sequence for CDC27 (NM_001256.2,1800-1818).
gacttaacagacatggata

SEQ ID NO: 307812 - DNA, 19 bp, Homo sapiens
  siRNA target sequence for CDC27 (NM_001256.2,1802-1820).
cttaacagacatggataaa

SEQ ID NO: 307813 - DNA, 19 bp, Homo sapiens
  siRNA target sequence for CDC27 (NM_001256.2,1863-1881).
ctgcaacgggaacatgata

SEQ ID NO: 307814 - DNA, 19 bp, Homo sapiens
  siRNA target sequence for CDC27 (NM_001256.2,1865-1883).
gcaacgggaacatgatatt

SEQ ID NO: 307815 - DNA, 19 bp, Homo sapiens
  siRNA target sequence for CDC27 (NM_001256.2,1869-1887).
cgggaacatgatattgcaa

SEQ ID NO: 307816 - DNA, 19 bp, Homo sapiens
  siRNA target sequence for CDC27 (NM_001256.2,1870-1888).
gggaacatgatattgcaat

SEQ ID NO: 307817 - DNA, 19 bp, Homo sapiens
  siRNA target sequence for CDC27 (NM_001256.2,1871-1889).
ggaacatgatattgcaatt

SEQ ID NO: 307818 - DNA, 19 bp, Homo sapiens
  siRNA target sequence for CDC27 (NM_001256.2,1906-1924).
ctatccaagttgatccaaa

SEQ ID NO: 307819 - DNA, 19 bp, Homo sapiens
  siRNA target sequence for CDC27 (NM_001256.2,1928-1946).
cgcttatgcctatactcta

SEQ ID NO: 307820 - DNA, 19 bp, Homo sapiens
  siRNA target sequence for CDC27 (NM_001256.2,1929-1947).
gcttatgcctatactctat

SEQ ID NO: 307821 - DNA, 19 bp, Homo sapiens
  siRNA target sequence for CDC27 (NM_001256.2,1930-1948).
cttatgcctatactctatt

SEQ ID NO: 307822 - DNA, 19 bp, Homo sapiens
  siRNA target sequence for CDC27 (NM_001256.2,1942-1960).
ctctattagggcatgagtt

SEQ ID NO: 307823 - DNA, 19 bp, Homo sapiens
  siRNA target sequence for CDC27 (NM_001256.2,1986-2004).
gcattagcttgttttcgaa

SEQ ID NO: 307824 - DNA, 19 bp, Homo sapiens
  siRNA target sequence for CDC27 (NM_001256.2,1993-2011).
cttgttttcgaaatgctat

SEQ ID NO: 307825 - DNA, 19 bp, Homo sapiens
  siRNA target sequence for CDC27 (NM_001256.2,2012-2030).
cagagtcaatcctagacat

SEQ ID NO: 307826 - DNA, 19 bp, Homo sapiens
  siRNA target sequence for CDC27 (NM_001256.2,2014-2032).
gagtcaatcctagacatta

SEQ ID NO: 307827 - DNA, 19 bp, Homo sapiens
  siRNA target sequence for CDC27 (NM_001256.2,2016-2034).
gtcaatcctagacattata

SEQ ID NO: 307828 - DNA, 19 bp, Homo sapiens
  siRNA target sequence for CDC27 (NM_001256.2,2018-2036).
caatcctagacattataat

SEQ ID NO: 307829 - DNA, 19 bp, Homo sapiens
  siRNA target sequence for CDC27 (NM_001256.2,2038-2056).
catggtatggtttaggaat

SEQ ID NO: 307830 - DNA, 19 bp, Homo sapiens
  siRNA target sequence for CDC27 (NM_001256.2,2041-2059).
ggtatggtttaggaatgat

SEQ ID NO: 307831 - DNA, 19 bp, Homo sapiens
  siRNA target sequence for CDC27 (NM_001256.2,2042-2060).
gtatggtttaggaatgatt

SEQ ID NO: 307832 - DNA, 19 bp, Homo sapiens
  siRNA target sequence for CDC27 (NM_001256.2,2115-2133).
gatatcaaccctcaaagtt

SEQ ID NO: 307833 - DNA, 19 bp, Homo sapiens
  siRNA target sequence for CDC27 (NM_001256.2,2146-2164).
gccacattggagtagttca

SEQ ID NO: 307834 - DNA, 19 bp, Homo sapiens
  siRNA target sequence for CDC27 (NM_001256.2,2191-2209).
ctttggataccctaaacaa

SEQ ID NO: 307835 - DNA, 19 bp, Homo sapiens
  siRNA target sequence for CDC27 (NM_001256.2,2227-2245).
ccaagaaccctctatgcaa

SEQ ID NO: 307836 - DNA, 19 bp, Homo sapiens
  siRNA target sequence for CDC27 (NM_001256.2,2329-2347).
ccaaagaatccctcgttta

SEQ ID NO: 307837 - DNA, 19 bp, Homo sapiens
  siRNA target sequence for CDC27 (NM_001256.2,2342-2360).
cgtttacttcttaatagga

SEQ ID NO: 307838 - DNA, 19 bp, Homo sapiens
  siRNA target sequence for CDC27 (NM_001256.2,2348-2366).
cttcttaataggaaaggtt

SEQ ID NO: 307839 - DNA, 19 bp, Homo sapiens
  siRNA target sequence for CDC27 (NM_001256.2,2386-2404).
cgcacctcgccctgatgaa

SEQ ID NO: 307840 - DNA, 19 bp, Homo sapiens
  siRNA target sequence for CDC27 (NM_001256.2,2387-2405).
gcacctcgccctgatgaat

SEQ ID NO: 307841 - DNA, 19 bp, Homo sapiens
  siRNA target sequence for CDC27 (NM_001256.2,2391-2409).
ctcgccctgatgaatttct

SEQ ID NO: 307842 - DNA, 19 bp, Homo sapiens
  siRNA target sequence for CDC27 (NM_001256.2,2393-2411).
cgccctgatgaatttctct

SEQ ID NO: 307843 - DNA, 19 bp, Homo sapiens
  siRNA target sequence for CDC27 (NM_001256.2,2408-2426).
ctcttgggctatggattta

SEQ ID NO: 307844 - DNA, 19 bp, Homo sapiens
  siRNA target sequence for CDC27 (NM_001256.2,2416-2434).
ctatggatttagatcctaa

SEQ ID NO: 307845 - DNA, 19 bp, Homo sapiens
  siRNA target sequence for CDC27 (NM_001256.2,2420-2438).
ggatttagatcctaaagga

SEQ ID NO: 307846 - DNA, 19 bp, Homo sapiens
  siRNA target sequence for CDC27 (NM_001256.2,2431-2449).
ctaaaggagccaataacca

SEQ ID NO: 307847 - DNA, 19 bp, Homo sapiens
  siRNA target sequence for CDC27 (NM_001256.2,2436-2454).
ggagccaataaccagatta

SEQ ID NO: 307848 - DNA, 19 bp, Homo sapiens
  siRNA target sequence for CDC27 (NM_001256.2,2440-2458).
ccaataaccagattaaaga

SEQ ID NO: 307849 - DNA, 19 bp, Homo sapiens
  siRNA target sequence for CDC27 (NM_001256.2,2461-2479).
caattgataagcgttatct

SEQ ID NO: 307850 - DNA, 19 bp, Homo sapiens
  siRNA target sequence for CDC27 (NM_001256.2,2471-2489).
gcgttatcttccagatgat

SEQ ID NO: 307851 - DNA, 19 bp, Homo sapiens
  siRNA target sequence for CDC27 (NM_001256.2,2560-2578).
cggatgacacacaacttca

SEQ ID NO: 307852 - DNA, 19 bp, Homo sapiens
  siRNA target sequence for CDC27 (NM_001256.2,2561-2579).
ggatgacacacaacttcat

SEQ ID NO: 307853 - DNA, 19 bp, Homo sapiens
  siRNA target sequence for INCENP (NM_020238.1,71-89).
gcaacatggataataagga

SEQ ID NO: 307854 - DNA, 19 bp, Homo sapiens
  siRNA target sequence for INCENP (NM_020238.1,127-145).
cgcatgttcaccagagaat

SEQ ID NO: 307855 - DNA, 19 bp, Homo sapiens
  siRNA target sequence for INCENP (NM_020238.1,201-219).
gaagagacggatttcttat

SEQ ID NO: 307856 - DNA, 19 bp, Homo sapiens
  siRNA target sequence for INCENP (NM_020238.1,215-233).
cttatgttcaggatgaaaa

SEQ ID NO: 307857 - DNA, 19 bp, Homo sapiens
  siRNA target sequence for INCENP (NM_020238.1,241-259).
cccatcaggagaaggttat

SEQ ID NO: 307858 - DNA, 19 bp, Homo sapiens
  siRNA target sequence for INCENP (NM_020238.1,445-463).
cccacgatgctgactaaga

SEQ ID NO: 307859 - DNA, 19 bp, Homo sapiens
  siRNA target sequence for INCENP (NM_020238.1,446-464).
ccacgatgctgactaagaa

SEQ ID NO: 307860 - DNA, 19 bp, Homo sapiens
  siRNA target sequence for INCENP (NM_020238.1,627-645).
gggcatcccgacatcagat

SEQ ID NO: 307861 - DNA, 19 bp, Homo sapiens
  siRNA target sequence for INCENP (NM_020238.1,649-667).
gaatcaacacctaagaagt

SEQ ID NO: 307862 - DNA, 19 bp, Homo sapiens
  siRNA target sequence for INCENP (NM_020238.1,850-868).
cccatcctgccggataact

SEQ ID NO: 307863 - DNA, 19 bp, Homo sapiens
  siRNA target sequence for INCENP (NM_020238.1,936-954).
cccgagtccccaagtctta

SEQ ID NO: 307864 - DNA, 19 bp, Homo sapiens
  siRNA target sequence for INCENP (NM_020238.1,975-993).
ggccaaacaggaaagtgtt

SEQ ID NO: 307865 - DNA, 19 bp, Homo sapiens
  siRNA target sequence for INCENP (NM_020238.1,1532-1550).
ccccacgcagcgtcatgaa

SEQ ID NO: 307866 - DNA, 19 bp, Homo sapiens
  siRNA target sequence for INCENP (NM_020238.1,1542-1560).
cgtcatgaagtcctttatt

SEQ ID NO: 307867 - DNA, 19 bp, Homo sapiens
  siRNA target sequence for INCENP (NM_020238.1,2553-2571).
gctcagccaggctatcatt

SEQ ID NO: 307868 - DNA, 19 bp, Homo sapiens
  siRNA target sequence for INCENP (NM_020238.1,2564-2582).
ctatcattcaccagtacta

SEQ ID NO: 307869 - DNA, 19 bp, Homo sapiens
  siRNA target sequence for INCENP (NM_020238.1,2601-2619).
ggagctctttggaaccatt

SEQ ID NO: 307870 - DNA, 19 bp, Homo sapiens
  siRNA target sequence for STAG1 (NM_005862.1,422-440).
gtgttacaggattcaacta

SEQ ID NO: 307871 - DNA, 19 bp, Homo sapiens
  siRNA target sequence for STAG1 (NM_005862.1,465-483).
ctggcagcgagcttgaaga

SEQ ID NO: 307872 - DNA, 19 bp, Homo sapiens
  siRNA target sequence for STAG1 (NM_005862.1,469-487).
cagcgagcttgaagaaaca

SEQ ID NO: 307873 - DNA, 19 bp, Homo sapiens
  siRNA target sequence for STAG1 (NM_005862.1,525-543).
ggcctccatctacaaataa

SEQ ID NO: 307874 - DNA, 19 bp, Homo sapiens
  siRNA target sequence for STAG1 (NM_005862.1,527-545).
cctccatctacaaataaga

SEQ ID NO: 307875 - DNA, 19 bp, Homo sapiens
  siRNA target sequence for STAG1 (NM_005862.1,645-663).
gggagcctgtcacattatt

SEQ ID NO: 307876 - DNA, 19 bp, Homo sapiens
  siRNA target sequence for STAG1 (NM_005862.1,706-724).
ggatgactggattgaatca

SEQ ID NO: 307877 - DNA, 19 bp, Homo sapiens
  siRNA target sequence for STAG1 (NM_005862.1,710-728).
gactggattgaatcatata

SEQ ID NO: 307878 - DNA, 19 bp, Homo sapiens
  siRNA target sequence for STAG1 (NM_005862.1,715-733).
gattgaatcatataaacaa

SEQ ID NO: 307879 - DNA, 19 bp, Homo sapiens
  siRNA target sequence for STAG1 (NM_005862.1,742-760).
catcgcacttctggattta

SEQ ID NO: 307880 - DNA, 19 bp, Homo sapiens
  siRNA target sequence for STAG1 (NM_005862.1,789-807).
gtcgaggtactgtgagaat

SEQ ID NO: 307881 - DNA, 19 bp, Homo sapiens
  siRNA target sequence for STAG1 (NM_005862.1,792-810).
gaggtactgtgagaataga

SEQ ID NO: 307882 - DNA, 19 bp, Homo sapiens
  siRNA target sequence for STAG1 (NM_005862.1,794-812).
ggtactgtgagaatagaga

SEQ ID NO: 307883 - DNA, 19 bp, Homo sapiens
  siRNA target sequence for STAG1 (NM_005862.1,899-917).
cctggacctcagtggaaaa

SEQ ID NO: 307884 - DNA, 19 bp, Homo sapiens
  siRNA target sequence for STAG1 (NM_005862.1,955-973).
gattcgacagtgtcagtat

SEQ ID NO: 307885 - DNA, 19 bp, Homo sapiens
  siRNA target sequence for STAG1 (NM_005862.1,959-977).
cgacagtgtcagtatagca

SEQ ID NO: 307886 - DNA, 19 bp, Homo sapiens
  siRNA target sequence for STAG1 (NM_005862.1,962-980).
cagtgtcagtatagcataa

SEQ ID NO: 307887 - DNA, 19 bp, Homo sapiens
  siRNA target sequence for STAG1 (NM_005862.1,964-982).
gtgtcagtatagcataatt

SEQ ID NO: 307888 - DNA, 19 bp, Homo sapiens
  siRNA target sequence for STAG1 (NM_005862.1,975-993).
gcataatttatgatgagta

SEQ ID NO: 307889 - DNA, 19 bp, Homo sapiens
  siRNA target sequence for STAG1 (NM_005862.1,976-994).
cataatttatgatgagtat

SEQ ID NO: 307890 - DNA, 19 bp, Homo sapiens
  siRNA target sequence for STAG1 (NM_005862.1,1049-1067).
gcttttaggcatacaagta

SEQ ID NO: 307891 - DNA, 19 bp, Homo sapiens
  siRNA target sequence for STAG1 (NM_005862.1,1090-1108).
gactgctctggtgaatgtt

SEQ ID NO: 307892 - DNA, 19 bp, Homo sapiens
  siRNA target sequence for STAG1 (NM_005862.1,1120-1138).
cagtattcatcaggataat

SEQ ID NO: 307893 - DNA, 19 bp, Homo sapiens
  siRNA target sequence for STAG1 (NM_005862.1,1197-1215).
ggttggagttactacttca

SEQ ID NO: 307894 - DNA, 19 bp, Homo sapiens
  siRNA target sequence for STAG1 (NM_005862.1,1318-1336).
gattagagccatttgtatt

SEQ ID NO: 307895 - DNA, 19 bp, Homo sapiens
  siRNA target sequence for STAG1 (NM_005862.1,1346-1364).
ggagtatggatgaaaatgt

SEQ ID NO: 307896 - DNA, 19 bp, Homo sapiens
  siRNA target sequence for STAG1 (NM_005862.1,1347-1365).
gagtatggatgaaaatgta

SEQ ID NO: 307897 - DNA, 19 bp, Homo sapiens
  siRNA target sequence for STAG1 (NM_005862.1,1457-1475).
gctctgcagagtctatata

SEQ ID NO: 307898 - DNA, 19 bp, Homo sapiens
  siRNA target sequence for STAG1 (NM_005862.1,1462-1480).
gcagagtctatataccaat

SEQ ID NO: 307899 - DNA, 19 bp, Homo sapiens
  siRNA target sequence for STAG1 (NM_005862.1,1469-1487).
ctatataccaatagagaat

SEQ ID NO: 307900 - DNA, 19 bp, Homo sapiens
  siRNA target sequence for STAG1 (NM_005862.1,1495-1513).
caaattggaactattcact

SEQ ID NO: 307901 - DNA, 19 bp, Homo sapiens
  siRNA target sequence for STAG1 (NM_005862.1,1522-1540).
caaggatcgcattgtatca

SEQ ID NO: 307902 - DNA, 19 bp, Homo sapiens
  siRNA target sequence for STAG1 (NM_005862.1,1539-1557).
caatgacacttgataaaga

SEQ ID NO: 307903 - DNA, 19 bp, Homo sapiens
  siRNA target sequence for STAG1 (NM_005862.1,1568-1586).
gctgtggaagctattcgat

SEQ ID NO: 307904 - DNA, 19 bp, Homo sapiens
  siRNA target sequence for STAG1 (NM_005862.1,1569-1587).
ctgtggaagctattcgatt

SEQ ID NO: 307905 - DNA, 19 bp, Homo sapiens
  siRNA target sequence for STAG1 (NM_005862.1,1578-1596).
ctattcgattggttactct

SEQ ID NO: 307906 - DNA, 19 bp, Homo sapiens
  siRNA target sequence for STAG1 (NM_005862.1,1584-1602).
gattggttactctgatact

SEQ ID NO: 307907 - DNA, 19 bp, Homo sapiens
  siRNA target sequence for STAG1 (NM_005862.1,1588-1606).
ggttactctgatacttcat

SEQ ID NO: 307908 - DNA, 19 bp, Homo sapiens
  siRNA target sequence for STAG1 (NM_005862.1,1597-1615).
gatacttcatggaagtgaa

SEQ ID NO: 307909 - DNA, 19 bp, Homo sapiens
  siRNA target sequence for STAG1 (NM_005862.1,1694-1712).
ggagagttccttcacaaaa

SEQ ID NO: 307910 - DNA, 19 bp, Homo sapiens
  siRNA target sequence for STAG1 (NM_005862.1,1695-1713).
gagagttccttcacaaaaa

SEQ ID NO: 307911 - DNA, 19 bp, Homo sapiens
  siRNA target sequence for STAG1 (NM_005862.1,1699-1717).
gttccttcacaaaaagcta

SEQ ID NO: 307912 - DNA, 19 bp, Homo sapiens
  siRNA target sequence for STAG1 (NM_005862.1,1778-1796).
ccgaatggaaacctcatta

SEQ ID NO: 307913 - DNA, 19 bp, Homo sapiens
  siRNA target sequence for STAG1 (NM_005862.1,1866-1884).
gggagagctctcaagaact

SEQ ID NO: 307914 - DNA, 19 bp, Homo sapiens
  siRNA target sequence for STAG1 (NM_005862.1,1968-1986).
gtgctcttatagagctaat

SEQ ID NO: 307915 - DNA, 19 bp, Homo sapiens
  siRNA target sequence for STAG1 (NM_005862.1,1971-1989).
ctcttatagagctaatggt

SEQ ID NO: 307916 - DNA, 19 bp, Homo sapiens
  siRNA target sequence for STAG1 (NM_005862.1,2076-2094).
ctcaaattgatgatagaaa

SEQ ID NO: 307917 - DNA, 19 bp, Homo sapiens
  siRNA target sequence for STAG1 (NM_005862.1,2095-2113).
caaattgactgaacatttt

SEQ ID NO: 307918 - DNA, 19 bp, Homo sapiens
  siRNA target sequence for STAG1 (NM_005862.1,2131-2149).
gttactgtcaaagtattct

SEQ ID NO: 307919 - DNA, 19 bp, Homo sapiens
  siRNA target sequence for STAG1 (NM_005862.1,2272-2290).
ggagaaacacgtagaatca

SEQ ID NO: 307920 - DNA, 19 bp, Homo sapiens
  siRNA target sequence for STAG1 (NM_005862.1,2275-2293).
gaaacacgtagaatcagat

SEQ ID NO: 307921 - DNA, 19 bp, Homo sapiens
  siRNA target sequence for STAG1 (NM_005862.1,2281-2299).
cgtagaatcagatgttcta

SEQ ID NO: 307922 - DNA, 19 bp, Homo sapiens
  siRNA target sequence for STAG1 (NM_005862.1,2297-2315).
ctagaagcctgcagtaaaa

SEQ ID NO: 307923 - DNA, 19 bp, Homo sapiens
  siRNA target sequence for STAG1 (NM_005862.1,2300-2318).
gaagcctgcagtaaaacct

SEQ ID NO: 307924 - DNA, 19 bp, Homo sapiens
  siRNA target sequence for STAG1 (NM_005862.1,2307-2325).
gcagtaaaacctatagtat

SEQ ID NO: 307925 - DNA, 19 bp, Homo sapiens
  siRNA target sequence for STAG1 (NM_005862.1,2373-2391).
gaagccagctgattgatga

SEQ ID NO: 307926 - DNA, 19 bp, Homo sapiens
  siRNA target sequence for STAG1 (NM_005862.1,2380-2398).
gctgattgatgagtttgta

SEQ ID NO: 307927 - DNA, 19 bp, Homo sapiens
  siRNA target sequence for STAG1 (NM_005862.1,2383-2401).
gattgatgagtttgtagat

SEQ ID NO: 307928 - DNA, 19 bp, Homo sapiens
  siRNA target sequence for STAG1 (NM_005862.1,2392-2410).
gtttgtagatcgattcaat

SEQ ID NO: 307929 - DNA, 19 bp, Homo sapiens
  siRNA target sequence for STAG1 (NM_005862.1,2396-2414).
gtagatcgattcaatcatt

SEQ ID NO: 307930 - DNA, 19 bp, Homo sapiens
  siRNA target sequence for STAG1 (NM_005862.1,2521-2539).
cacaaaatgggatctcttt

SEQ ID NO: 307931 - DNA, 19 bp, Homo sapiens
  siRNA target sequence for STAG1 (NM_005862.1,2531-2549).
gatctctttggtaattgct

SEQ ID NO: 307932 - DNA, 19 bp, Homo sapiens
  siRNA target sequence for STAG1 (NM_005862.1,2540-2558).
ggtaattgctacagattat

SEQ ID NO: 307933 - DNA, 19 bp, Homo sapiens
  siRNA target sequence for STAG1 (NM_005862.1,2583-2601).
ccatgccagaacagatagt

SEQ ID NO: 307934 - DNA, 19 bp, Homo sapiens
  siRNA target sequence for STAG1 (NM_005862.1,2615-2633).
cagtgttcccattattcga

SEQ ID NO: 307935 - DNA, 19 bp, Homo sapiens
  siRNA target sequence for STAG1 (NM_005862.1,2617-2635).
gtgttcccattattcgatt

SEQ ID NO: 307936 - DNA, 19 bp, Homo sapiens
  siRNA target sequence for STAG1 (NM_005862.1,2644-2662).
gttggtgaaaattactgat

SEQ ID NO: 307937 - DNA, 19 bp, Homo sapiens
  siRNA target sequence for STAG1 (NM_005862.1,2669-2687).
ccttccaaagaggatttgt

SEQ ID NO: 307938 - DNA, 19 bp, Homo sapiens
  siRNA target sequence for STAG1 (NM_005862.1,2670-2688).
cttccaaagaggatttgtt

SEQ ID NO: 307939 - DNA, 19 bp, Homo sapiens
  siRNA target sequence for STAG1 (NM_005862.1,2697-2715).
ggaaaacggtgaaatcctt

SEQ ID NO: 307940 - DNA, 19 bp, Homo sapiens
  siRNA target sequence for STAG1 (NM_005862.1,2731-2749).
gcagtgcctgtctaatgtt

SEQ ID NO: 307941 - DNA, 19 bp, Homo sapiens
  siRNA target sequence for STAG1 (NM_005862.1,2732-2750).
cagtgcctgtctaatgtta

SEQ ID NO: 307942 - DNA, 19 bp, Homo sapiens
  siRNA target sequence for STAG1 (NM_005862.1,2734-2752).
gtgcctgtctaatgttaat

SEQ ID NO: 307943 - DNA, 19 bp, Homo sapiens
  siRNA target sequence for STAG1 (NM_005862.1,2785-2803).
ctgtgatcttctgatgatt

SEQ ID NO: 307944 - DNA, 19 bp, Homo sapiens
  siRNA target sequence for STAG1 (NM_005862.1,2851-2869).
ggtgttcaatccagatact

SEQ ID NO: 307945 - DNA, 19 bp, Homo sapiens
  siRNA target sequence for STAG1 (NM_005862.1,2899-2917).
gatggatcacgtttttatt

SEQ ID NO: 307946 - DNA, 19 bp, Homo sapiens
  siRNA target sequence for STAG1 (NM_005862.1,2978-2996).
gaggccttacataaaagaa

SEQ ID NO: 307947 - DNA, 19 bp, Homo sapiens
  siRNA target sequence for STAG1 (NM_005862.1,3212-3230).
caaggtcccaacctagata

SEQ ID NO: 307948 - DNA, 19 bp, Homo sapiens
  siRNA target sequence for STAG1 (NM_005862.1,3240-3258).
cccatgtcagtggcattaa

SEQ ID NO: 307949 - DNA, 19 bp, Homo sapiens
  siRNA target sequence for STAG1 (NM_005862.1,3269-3287).
cgtcgctttgcccttacat

SEQ ID NO: 307950 - DNA, 19 bp, Homo sapiens
  siRNA target sequence for STAG1 (NM_005862.1,3270-3288).
gtcgctttgcccttacatt

SEQ ID NO: 307951 - DNA, 19 bp, Homo sapiens
  siRNA target sequence for STAG1 (NM_005862.1,3403-3421).
ggcttttcttgaagtacta

SEQ ID NO: 307952 - DNA, 19 bp, Homo sapiens
  siRNA target sequence for STAG1 (NM_005862.1,3404-3422).
gcttttcttgaagtactaa

SEQ ID NO: 307953 - DNA, 19 bp, Homo sapiens
  siRNA target sequence for STAG1 (NM_005862.1,3443-3461).
cttcgacaggacaaaaaga

SEQ ID NO: 307954 - DNA, 19 bp, Homo sapiens
  siRNA target sequence for STAG1 (NM_005862.1,3460-3478).
gacagttcattcataccta

SEQ ID NO: 307955 - DNA, 19 bp, Homo sapiens
  siRNA target sequence for STAG1 (NM_005862.1,3467-3485).
cattcatacctagagaaat

SEQ ID NO: 307956 - DNA, 19 bp, Homo sapiens
  siRNA target sequence for STAG1 (NM_005862.1,3471-3489).
catacctagagaaattcct

SEQ ID NO: 307957 - DNA, 19 bp, Homo sapiens
  siRNA target sequence for STAG1 (NM_005862.1,3530-3548).
ccactcatctcctatagaa

SEQ ID NO: 307958 - DNA, 19 bp, Homo sapiens
  siRNA target sequence for STAG1 (NM_005862.1,3566-3584).
ggtgaagatgatagaatgt

SEQ ID NO: 307959 - DNA, 19 bp, Homo sapiens
  siRNA target sequence for STAG1 (NM_005862.1,3615-3633).
cctcatcagtaaggaataa

SEQ ID NO: 307960 - DNA, 19 bp, Homo sapiens
  siRNA target sequence for STAG1 (NM_005862.1,3638-3656).
ggacgacctccacttcata

SEQ ID NO: 307961 - DNA, 19 bp, Homo sapiens
  siRNA target sequence for STAG1 (NM_005862.1,3639-3657).
gacgacctccacttcataa

SEQ ID NO: 307962 - DNA, 19 bp, Homo sapiens
  siRNA target sequence for STAG1 (NM_005862.1,3700-3718).
caggactgacaccatgatt

SEQ ID NO: 307963 - DNA, 19 bp, Homo sapiens
  siRNA target sequence for STAG1 (NM_005862.1,3822-3840).
gttctgaaccagacttttt

SEQ ID NO: 307964 - DNA, 19 bp, Homo sapiens
  siRNA target sequence for STAG1 (NM_005862.1,3853-3871).
gatgcagatctcttggtta

SEQ ID NO: 307965 - DNA, 19 bp, Homo sapiens
  siRNA target sequence for STAG1 (NM_005862.1,3868-3886).
gttaggccagccgaagtta

SEQ ID NO: 307966 - DNA, 19 bp, Homo sapiens
  siRNA target sequence for STAG1 (NM_005862.1,3873-3891).
gccagccgaagttagaaga

SEQ ID NO: 307967 - DNA, 19 bp, Homo sapiens
  siRNA target sequence for STAG1 (NM_005862.1,3877-3895).
gccgaagttagaagactta

SEQ ID NO: 307968 - DNA, 19 bp, Homo sapiens
  siRNA target sequence for STAG1 (NM_005862.1,3915-3933).
gaatgaactacatgaaagt

SEQ ID NO: 307969 - DNA, 19 bp, Homo sapiens
  siRNA target sequence for STAG1 (NM_005862.1,3954-3972).
ctgttcggggtctaatgga

SEQ ID NO: 307970 - DNA, 19 bp, Homo sapiens
  siRNA target sequence for STAG1 (NM_005862.1,4011-4029).
catcccgaagccagttaga

SEQ ID NO: 307971 - DNA, 19 bp, Homo sapiens
  siRNA target sequence for STAG1 (NM_005862.1,4016-4034).
cgaagccagttagaagata

SEQ ID NO: 307972 - DNA, 19 bp, Homo sapiens
  siRNA target sequence for STAG1 (NM_005862.1,4051-4069).
ggacaccatggttattgat

SEQ ID NO: 307973 - DNA, 19 bp, Homo sapiens
  siRNA target sequence for STAG1 (NM_005862.1,4067-4085).
gatctgcctccatcaagaa

SEQ ID NO: 307974 - DNA, 19 bp, Homo sapiens
  siRNA target sequence for STAG1 (NM_005862.1,4105-4123).
gctaaggccagacttcttt

SEQ ID NO: 307975 - DNA, 19 bp, Homo sapiens
  siRNA target sequence for STAG1 (NM_005862.1,4131-4149).
cagctatcatagaagatga

SEQ ID NO: 307976 - DNA, 19 bp, Homo sapiens
  siRNA target sequence for STAG1 (NM_005862.1,4133-4151).
gctatcatagaagatgatt

SEQ ID NO: 307977 - DNA, 19 bp, Homo sapiens
  siRNA target sequence for STAG1 (NM_005862.1,4155-4173).
gatttggaatgcctatgtt

SEQ ID NO: 307978 - DNA, 19 bp, Homo sapiens
  siRNA target sequence for PSEN1 (NM_000021.2,322-340).
ctgtacgtagccagaatga

SEQ ID NO: 307979 - DNA, 19 bp, Homo sapiens
  siRNA target sequence for PSEN1 (NM_000021.2,324-342).
gtacgtagccagaatgaca

SEQ ID NO: 307980 - DNA, 19 bp, Homo sapiens
  siRNA target sequence for PSEN1 (NM_000021.2,327-345).
cgtagccagaatgacaata

SEQ ID NO: 307981 - DNA, 19 bp, Homo sapiens
  siRNA target sequence for PSEN1 (NM_000021.2,383-401).
ccaccctgagccattatct

SEQ ID NO: 307982 - DNA, 19 bp, Homo sapiens
  siRNA target sequence for PSEN1 (NM_000021.2,481-499).
gcgccaagcatgtgatcat

SEQ ID NO: 307983 - DNA, 19 bp, Homo sapiens
  siRNA target sequence for PSEN1 (NM_000021.2,530-548).
ggtggtcgtggctaccatt

SEQ ID NO: 307984 - DNA, 19 bp, Homo sapiens
  siRNA target sequence for PSEN1 (NM_000021.2,531-549).
gtggtcgtggctaccatta

SEQ ID NO: 307985 - DNA, 19 bp, Homo sapiens
  siRNA target sequence for PSEN1 (NM_000021.2,534-552).
gtcgtggctaccattaagt

SEQ ID NO: 307986 - DNA, 19 bp, Homo sapiens
  siRNA target sequence for PSEN1 (NM_000021.2,536-554).
cgtggctaccattaagtca

SEQ ID NO: 307987 - DNA, 19 bp, Homo sapiens
  siRNA target sequence for PSEN1 (NM_000021.2,576-594).
gatgggcagctaatctata

SEQ ID NO: 307988 - DNA, 19 bp, Homo sapiens
  siRNA target sequence for PSEN1 (NM_000021.2,635-653).
cctgcactcaattctgaat

SEQ ID NO: 307989 - DNA, 19 bp, Homo sapiens
  siRNA target sequence for PSEN1 (NM_000021.2,692-710).
cctcctggtggttctgtat

SEQ ID NO: 307990 - DNA, 19 bp, Homo sapiens
  siRNA target sequence for PSEN1 (NM_000021.2,693-711).
ctcctggtggttctgtata

SEQ ID NO: 307991 - DNA, 19 bp, Homo sapiens
  siRNA target sequence for PSEN1 (NM_000021.2,744-762).
cttattatatcatctctat

SEQ ID NO: 307992 - DNA, 19 bp, Homo sapiens
  siRNA target sequence for PSEN1 (NM_000021.2,818-836).
cgttgctgtggactacatt

SEQ ID NO: 307993 - DNA, 19 bp, Homo sapiens
  siRNA target sequence for PSEN1 (NM_000021.2,819-837).
gttgctgtggactacatta

SEQ ID NO: 307994 - DNA, 19 bp, Homo sapiens
  siRNA target sequence for PSEN1 (NM_000021.2,823-841).
ctgtggactacattactgt

SEQ ID NO: 307995 - DNA, 19 bp, Homo sapiens
  siRNA target sequence for PSEN1 (NM_000021.2,848-866).
cctgatctggaattttggt

SEQ ID NO: 307996 - DNA, 19 bp, Homo sapiens
  siRNA target sequence for PSEN1 (NM_000021.2,909-927).
ctccagcaggcatatctca

SEQ ID NO: 307997 - DNA, 19 bp, Homo sapiens
  siRNA target sequence for PSEN1 (NM_000021.2,912-930).
cagcaggcatatctcatta

SEQ ID NO: 307998 - DNA, 19 bp, Homo sapiens
  siRNA target sequence for PSEN1 (NM_000021.2,917-935).
ggcatatctcattatgatt

SEQ ID NO: 307999 - DNA, 19 bp, Homo sapiens
  siRNA target sequence for PSEN1 (NM_000021.2,918-936).
gcatatctcattatgatta

SEQ ID NO: 308000 - DNA, 19 bp, Homo sapiens
  siRNA target sequence for PSEN1 (NM_000021.2,979-997).
ggactgcgtggctcatctt

SEQ ID NO: 308001 - DNA, 19 bp, Homo sapiens
  siRNA target sequence for PSEN1 (NM_000021.2,995-1013).
cttggctgtgatttcagta

SEQ ID NO: 308002 - DNA, 19 bp, Homo sapiens
  siRNA target sequence for PSEN1 (NM_000021.2,1000-1018).
ctgtgatttcagtatatga

SEQ ID NO: 308003 - DNA, 19 bp, Homo sapiens
  siRNA target sequence for PSEN1 (NM_000021.2,1039-1057).
cgaaaggtccacttcgtat

SEQ ID NO: 308004 - DNA, 19 bp, Homo sapiens
  siRNA target sequence for PSEN1 (NM_000021.2,1162-1180).
ctcaaaggagagtatccaa

SEQ ID NO: 308005 - DNA, 19 bp, Homo sapiens
  siRNA target sequence for PSEN1 (NM_000021.2,1177-1195).
ccaaaaattccaagtataa

SEQ ID NO: 308006 - DNA, 19 bp, Homo sapiens
  siRNA target sequence for PSEN1 (NM_000021.2,1373-1391).
ggaaaggggagtaaaactt

SEQ ID NO: 308007 - DNA, 19 bp, Homo sapiens
  siRNA target sequence for PSEN1 (NM_000021.2,1378-1396).
ggggagtaaaacttggatt

SEQ ID NO: 308008 - DNA, 19 bp, Homo sapiens
  siRNA target sequence for PSEN1 (NM_000021.2,1389-1407).
cttggattgggagatttca

SEQ ID NO: 308009 - DNA, 19 bp, Homo sapiens
  siRNA target sequence for PSEN1 (NM_000021.2,1392-1410).
ggattgggagatttcattt

SEQ ID NO: 308010 - DNA, 19 bp, Homo sapiens
  siRNA target sequence for PSEN1 (NM_000021.2,1393-1411).
gattgggagatttcatttt

SEQ ID NO: 308011 - DNA, 19 bp, Homo sapiens
  siRNA target sequence for PSEN1 (NM_000021.2,1474-1492).
cctgtttcgtagccatatt

SEQ ID NO: 308012 - DNA, 19 bp, Homo sapiens
  siRNA target sequence for PSEN1 (NM_000021.2,1481-1499).
cgtagccatattaattggt

SEQ ID NO: 308013 - DNA, 19 bp, Homo sapiens
  siRNA target sequence for PSEN1 (NM_000021.2,1497-1515).
ggtttgtgccttacattat

SEQ ID NO: 308014 - DNA, 19 bp, Homo sapiens
  siRNA target sequence for PSEN1 (NM_000021.2,1591-1609).
ccacagattatcttgtaca

SEQ ID NO: 308015 - DNA, 19 bp, Homo sapiens
  siRNA target sequence for PSEN1 (NM_000021.2,1623-1641).
caattagcattccatcaat

SEQ ID NO: 308016 - DNA, 19 bp, Homo sapiens
  siRNA target sequence for PSEN1 (NM_007318.1,613-631).
ccacctgagcaatactaat

SEQ ID NO: 308017 - DNA, 19 bp, Homo sapiens
  siRNA target sequence for PSEN1 (NM_007318.1,622-640).
caatactaatgacaataga

SEQ ID NO: 308018 - DNA, 19 bp, Homo sapiens
  siRNA target sequence for PSEN1 (NM_007319.1,969-987).
caacctgctgtctatagct

SEQ ID NO: 308019 - DNA, 19 bp, Homo sapiens
  siRNA target sequence for PSEN2 (NM_000447.1,413-431).
gagcggacgtccctaatgt

SEQ ID NO: 308020 - DNA, 19 bp, Homo sapiens
  siRNA target sequence for PSEN2 (NM_000447.1,542-560).
gaccctgaccgctatgtct

SEQ ID NO: 308021 - DNA, 19 bp, Homo sapiens
  siRNA target sequence for PSEN2 (NM_000447.1,596-614).
gaagagctgaccctcaaat

SEQ ID NO: 308022 - DNA, 19 bp, Homo sapiens
  siRNA target sequence for PSEN2 (NM_000447.1,618-636).
gagcgaagcacgtgatcat

SEQ ID NO: 308023 - DNA, 19 bp, Homo sapiens
  siRNA target sequence for PSEN2 (NM_000447.1,671-689).
gtggtagccaccatcaagt

SEQ ID NO: 308024 - DNA, 19 bp, Homo sapiens
  siRNA target sequence for PSEN2 (NM_000447.1,872-890).
catggctggttgatcatgt

SEQ ID NO: 308025 - DNA, 19 bp, Homo sapiens
  siRNA target sequence for PSEN2 (NM_000447.1,875-893).
ggctggttgatcatgtctt

SEQ ID NO: 308026 - DNA, 19 bp, Homo sapiens
  siRNA target sequence for PSEN2 (NM_000447.1,905-923).
ctgttcctcttcacctata

SEQ ID NO: 308027 - DNA, 19 bp, Homo sapiens
  siRNA target sequence for PSEN2 (NM_000447.1,1052-1070).
caggcctacctcatcatga

SEQ ID NO: 308028 - DNA, 19 bp, Homo sapiens
  siRNA target sequence for PSEN2 (NM_000447.1,1138-1156).
cgccatctctgtgtatgat

SEQ ID NO: 308029 - DNA, 19 bp, Homo sapiens
  siRNA target sequence for PSEN2 (NM_000447.1,1140-1158).
ccatctctgtgtatgatct

SEQ ID NO: 308030 - DNA, 19 bp, Homo sapiens
  siRNA target sequence for PSEN2 (NM_000447.1,1176-1194).
ccaaagggcctctgagaat

SEQ ID NO: 308031 - DNA, 19 bp, Homo sapiens
  siRNA target sequence for PSEN2 (NM_000447.1,1189-1207).
gagaatgctggtagaaact

SEQ ID NO: 308032 - DNA, 19 bp, Homo sapiens
  siRNA target sequence for PSEN2 (NM_000447.1,1356-1374).
gttttggggagccttcata

SEQ ID NO: 308033 - DNA, 19 bp, Homo sapiens
  siRNA target sequence for PSEN2 (NM_000447.1,1368-1386).
cttcataccccgaagtctt

SEQ ID NO: 308034 - DNA, 19 bp, Homo sapiens
  siRNA target sequence for PSEN2 (NM_000447.1,1371-1389).
cataccccgaagtctttga

SEQ ID NO: 308035 - DNA, 19 bp, Homo sapiens
  siRNA target sequence for PSEN2 (NM_000447.1,1627-1645).
cacgttcgggctcatcttt

SEQ ID NO: 308036 - DNA, 19 bp, Homo sapiens
  siRNA target sequence for STAG3 (NM_012447.1,362-380).
gggaatggcgactctttgt

SEQ ID NO: 308037 - DNA, 19 bp, Homo sapiens
  siRNA target sequence for STAG3 (NM_012447.1,363-381).
ggaatggcgactctttgtt

SEQ ID NO: 308038 - DNA, 19 bp, Homo sapiens
  siRNA target sequence for STAG3 (NM_012447.1,364-382).
gaatggcgactctttgtta

SEQ ID NO: 308039 - DNA, 19 bp, Homo sapiens
  siRNA target sequence for STAG3 (NM_012447.1,736-754).
cctaacagagcagtttaat

SEQ ID NO: 308040 - DNA, 19 bp, Homo sapiens
  siRNA target sequence for STAG3 (NM_012447.1,763-781).
gggggactaccctctcata

SEQ ID NO: 308041 - DNA, 19 bp, Homo sapiens
  siRNA target sequence for STAG3 (NM_012447.1,1162-1180).
caggggtgtctttgttcat

SEQ ID NO: 308042 - DNA, 19 bp, Homo sapiens
  siRNA target sequence for STAG3 (NM_012447.1,1572-1590).
ctgccgcaggcgaatttct

SEQ ID NO: 308043 - DNA, 19 bp, Homo sapiens
  siRNA target sequence for STAG3 (NM_012447.1,1574-1592).
gccgcaggcgaatttctgt

SEQ ID NO: 308044 - DNA, 19 bp, Homo sapiens
  siRNA target sequence for STAG3 (NM_012447.1,1575-1593).
ccgcaggcgaatttctgta

SEQ ID NO: 308045 - DNA, 19 bp, Homo sapiens
  siRNA target sequence for STAG3 (NM_012447.1,2201-2219).
ctctgtaatcccgaattca

SEQ ID NO: 308046 - DNA, 19 bp, Homo sapiens
  siRNA target sequence for STAG3 (NM_012447.1,2203-2221).
ctgtaatcccgaattcact

SEQ ID NO: 308047 - DNA, 19 bp, Homo sapiens
  siRNA target sequence for STAG3 (NM_012447.1,2205-2223).
gtaatcccgaattcacttt

SEQ ID NO: 308048 - DNA, 19 bp, Homo sapiens
  siRNA target sequence for STAG3 (NM_012447.1,2244-2262).
cccgcagccagctagtaga

SEQ ID NO: 308049 - DNA, 19 bp, Homo sapiens
  siRNA target sequence for STAG3 (NM_012447.1,2245-2263).
ccgcagccagctagtagat

SEQ ID NO: 308050 - DNA, 19 bp, Homo sapiens
  siRNA target sequence for STAG3 (NM_012447.1,2246-2264).
cgcagccagctagtagatt

SEQ ID NO: 308051 - DNA, 19 bp, Homo sapiens
  siRNA target sequence for STAG3 (NM_012447.1,2247-2265).
gcagccagctagtagattt

SEQ ID NO: 308052 - DNA, 19 bp, Homo sapiens
  siRNA target sequence for STAG3 (NM_012447.1,2512-2530).
gacactaacccacatttct

SEQ ID NO: 308053 - DNA, 19 bp, Homo sapiens
  siRNA target sequence for STAG3 (NM_012447.1,2559-2577).
cgagtttgagggacagaat

SEQ ID NO: 308054 - DNA, 19 bp, Homo sapiens
  siRNA target sequence for STAG3 (NM_012447.1,2635-2653).
ggagcaggcttttgtctta

SEQ ID NO: 308055 - DNA, 19 bp, Homo sapiens
  siRNA target sequence for STAG3 (NM_012447.1,2636-2654).
gagcaggcttttgtcttat

SEQ ID NO: 308056 - DNA, 19 bp, Homo sapiens
  siRNA target sequence for STAG3 (NM_012447.1,2650-2668).
cttattaagtgatctactt

SEQ ID NO: 308057 - DNA, 19 bp, Homo sapiens
  siRNA target sequence for STAG3 (NM_012447.1,2813-2831).
gattcccaggaggatcatt

SEQ ID NO: 308058 - DNA, 19 bp, Homo sapiens
  siRNA target sequence for STAG3 (NM_012447.1,2911-2929).
ggatgcagcctcagatgtt

SEQ ID NO: 308059 - DNA, 19 bp, Homo sapiens
  siRNA target sequence for STAG3 (NM_012447.1,2915-2933).
gcagcctcagatgttttca

SEQ ID NO: 308060 - DNA, 19 bp, Homo sapiens
  siRNA target sequence for STAG3 (NM_012447.1,2968-2986).
cattatcaaggaaacatta

SEQ ID NO: 308061 - DNA, 19 bp, Homo sapiens
  siRNA target sequence for STAG3 (NM_012447.1,2974-2992).
caaggaaacattaactaga

SEQ ID NO: 308062 - DNA, 19 bp, Homo sapiens
  siRNA target sequence for STAG3 (NM_012447.1,2988-3006).
ctagagcaaggcagattga

SEQ ID NO: 308063 - DNA, 19 bp, Homo sapiens
  siRNA target sequence for STAG3 (NM_012447.1,2999-3017).
cagattgaccgaagtcatt

SEQ ID NO: 308064 - DNA, 19 bp, Homo sapiens
  siRNA target sequence for STAG3 (NM_012447.1,3001-3019).
gattgaccgaagtcattgt

SEQ ID NO: 308065 - DNA, 19 bp, Homo sapiens
  siRNA target sequence for STAG3 (NM_012447.1,3131-3149).
cggaggtttgccttgagtt

SEQ ID NO: 308066 - DNA, 19 bp, Homo sapiens
  siRNA target sequence for STAG3 (NM_012447.1,3329-3347).
ctgtcctatctagaaaagt

SEQ ID NO: 308067 - DNA, 19 bp, Homo sapiens
  siRNA target sequence for STAG3 (NM_012447.1,3517-3535).
ctcgtcccaggaagaaagt

SEQ ID NO: 308068 - DNA, 19 bp, Homo sapiens
  siRNA target sequence for STAG3 (NM_012447.1,3519-3537).
cgtcccaggaagaaagtct

SEQ ID NO: 308069 - DNA, 19 bp, Homo sapiens
  siRNA target sequence for STAG3 (NM_012447.1,3598-3616).
gcccctgtgggggttgaaa

SEQ ID NO: 308070 - DNA, 19 bp, Homo sapiens
  siRNA target sequence for STAG3 (NM_012447.1,3691-3709).
gttcttgggtccacaatat

SEQ ID NO: 308071 - DNA, 19 bp, Homo sapiens
  siRNA target sequence for STAG3 (NM_012447.1,3845-3863).
caagcaagtagctactctt

SEQ ID NO: 308072 - DNA, 19 bp, Homo sapiens
  siRNA target sequence for STAG3 (NM_012447.1,3878-3896).
gggctggacctcttagatt

SEQ ID NO: 308073 - DNA, 19 bp, Homo sapiens
  siRNA target sequence for STAG3 (NM_012447.1,3880-3898).
gctggacctcttagattct

SEQ ID NO: 308074 - DNA, 19 bp, Homo sapiens
  siRNA target sequence for STAG3 (NM_012447.1,3881-3899).
ctggacctcttagattcta

SEQ ID NO: 308075 - DNA, 19 bp, Homo sapiens
  siRNA target sequence for SC65 (NM_006455.2,336-354).
gcgcagtacgagaagtaca

SEQ ID NO: 308076 - DNA, 19 bp, Homo sapiens
  siRNA target sequence for SC65 (NM_006455.2,809-827).
cgagctgaccgccaagtat

SEQ ID NO: 308077 - DNA, 19 bp, Homo sapiens
  siRNA target sequence for SC65 (NM_006455.2,813-831).
ctgaccgccaagtatctca

SEQ ID NO: 308078 - DNA, 19 bp, Homo sapiens
  siRNA target sequence for SC65 (NM_006455.2,817-835).
ccgccaagtatctcaacta

SEQ ID NO: 308079 - DNA, 19 bp, Homo sapiens
  siRNA target sequence for SC65 (NM_006455.2,819-837).
gccaagtatctcaactact

SEQ ID NO: 308080 - DNA, 19 bp, Homo sapiens
  siRNA target sequence for SC65 (NM_006455.2,820-838).
ccaagtatctcaactacta

SEQ ID NO: 308081 - DNA, 19 bp, Homo sapiens
  siRNA target sequence for SC65 (NM_006455.2,1061-1079).
ggccatagcagatctcttt

SEQ ID NO: 308082 - DNA, 19 bp, Homo sapiens
  siRNA target sequence for TSGA2 (NM_080860.1,210-228).
gaatgatattggggaatat

SEQ ID NO: 308083 - DNA, 19 bp, Homo sapiens
  siRNA target sequence for TSGA2 (NM_080860.1,309-327).
ctacgaattcggtaaaaga

SEQ ID NO: 308084 - DNA, 19 bp, Homo sapiens
  siRNA target sequence for TSGA2 (NM_080860.1,331-349).
ggccaggggatctacaaat

SEQ ID NO: 308085 - DNA, 19 bp, Homo sapiens
  siRNA target sequence for TSGA2 (NM_080860.1,362-380).
ctcgatatatcggagaata

SEQ ID NO: 308086 - DNA, 19 bp, Homo sapiens
  siRNA target sequence for TSGA2 (NM_080860.1,396-414).
gcacggtcaaggcactttt

SEQ ID NO: 308087 - DNA, 19 bp, Homo sapiens
  siRNA target sequence for TSGA2 (NM_080860.1,397-415).
cacggtcaaggcactttta

SEQ ID NO: 308088 - DNA, 19 bp, Homo sapiens
  siRNA target sequence for TSGA2 (NM_080860.1,399-417).
cggtcaaggcacttttata

SEQ ID NO: 308089 - DNA, 19 bp, Homo sapiens
  siRNA target sequence for TSGA2 (NM_080860.1,400-418).
ggtcaaggcacttttatat

SEQ ID NO: 308090 - DNA, 19 bp, Homo sapiens
  siRNA target sequence for TSGA2 (NM_080860.1,470-488).
gccatggcgtatactacta

SEQ ID NO: 308091 - DNA, 19 bp, Homo sapiens
  siRNA target sequence for TSGA2 (NM_080860.1,475-493).
ggcgtatactactacatca

SEQ ID NO: 308092 - DNA, 19 bp, Homo sapiens
  siRNA target sequence for TSGA2 (NM_080860.1,476-494).
gcgtatactactacatcaa

SEQ ID NO: 308093 - DNA, 19 bp, Homo sapiens
  siRNA target sequence for TSGA2 (NM_080860.1,477-495).
cgtatactactacatcaat

SEQ ID NO: 308094 - DNA, 19 bp, Homo sapiens
  siRNA target sequence for TSGA2 (NM_080860.1,538-556).
gggcaaggcacctatttat

SEQ ID NO: 308095 - DNA, 19 bp, Homo sapiens
  siRNA target sequence for TSGA2 (NM_080860.1,539-557).
ggcaaggcacctatttata

SEQ ID NO: 308096 - DNA, 19 bp, Homo sapiens
  siRNA target sequence for TSGA2 (NM_080860.1,559-577).
gcggagacgggcagtaagt

SEQ ID NO: 308097 - DNA, 19 bp, Homo sapiens
  siRNA target sequence for TSGA2 (NM_080860.1,560-578).
cggagacgggcagtaagta

SEQ ID NO: 308098 - DNA, 19 bp, Homo sapiens
  siRNA target sequence for TSGA2 (NM_080860.1,561-579).
ggagacgggcagtaagtat

SEQ ID NO: 308099 - DNA, 19 bp, Homo sapiens
  siRNA target sequence for TSGA2 (NM_080860.1,564-582).
gacgggcagtaagtatgtt

SEQ ID NO: 308100 - DNA, 19 bp, Homo sapiens
  siRNA target sequence for TSGA2 (NM_080860.1,611-629).
gcacggccgagctcattca

SEQ ID NO: 308101 - DNA, 19 bp, Homo sapiens
  siRNA target sequence for TSGA2 (NM_080860.1,646-664).
cagggcaagttcttgaaca

SEQ ID NO: 308102 - DNA, 19 bp, Homo sapiens
  siRNA target sequence for TSGA2 (NM_080860.1,677-695).
gccctggaaagtatgtatt

SEQ ID NO: 308103 - DNA, 19 bp, Homo sapiens
  siRNA target sequence for TSGA2 (NM_080860.1,719-737).
gtgaatatcgtttaacaga

SEQ ID NO: 308104 - DNA, 19 bp, Homo sapiens
  siRNA target sequence for TSGA2 (NM_080860.1,721-739).
gaatatcgtttaacagata

SEQ ID NO: 308105 - DNA, 19 bp, Homo sapiens
  siRNA target sequence for TSGA2 (NM_080860.1,775-793).
gtaactgttgttccaaaat

SEQ ID NO: 308106 - DNA, 19 bp, Homo sapiens
  siRNA target sequence for TSGA2 (NM_080860.1,799-817).
gctacccaaatcactgaat

SEQ ID NO: 308107 - DNA, 19 bp, Homo sapiens
  siRNA target sequence for C10orf9 (NM_145012.3,170-188).
cagcgaccgggagaacata

SEQ ID NO: 308108 - DNA, 19 bp, Homo sapiens
  siRNA target sequence for C10orf9 (NM_145012.3,172-190).
gcgaccgggagaacataga

SEQ ID NO: 308109 - DNA, 19 bp, Homo sapiens
  siRNA target sequence for C10orf9 (NM_145012.3,178-196).
gggagaacatagacgattt

SEQ ID NO: 308110 - DNA, 19 bp, Homo sapiens
  siRNA target sequence for C10orf9 (NM_145012.3,180-198).
gagaacatagacgatttga

SEQ ID NO: 308111 - DNA, 19 bp, Homo sapiens
  siRNA target sequence for C10orf9 (NM_145012.3,225-243).
cctcgggccagcacaatat

SEQ ID NO: 308112 - DNA, 19 bp, Homo sapiens
  siRNA target sequence for C10orf9 (NM_145012.3,226-244).
ctcgggccagcacaatatt

SEQ ID NO: 308113 - DNA, 19 bp, Homo sapiens
  siRNA target sequence for C10orf9 (NM_145012.3,279-297).
cgcaagagtctcttcatta

SEQ ID NO: 308114 - DNA, 19 bp, Homo sapiens
  siRNA target sequence for C10orf9 (NM_145012.3,312-330).
ggacaaatagcaaggaaat

SEQ ID NO: 308115 - DNA, 19 bp, Homo sapiens
  siRNA target sequence for C10orf9 (NM_145012.3,338-356).
ctgctccaccattttccta

SEQ ID NO: 308116 - DNA, 19 bp, Homo sapiens
  siRNA target sequence for C10orf9 (NM_145012.3,343-361).
ccaccattttcctagatga

SEQ ID NO: 308117 - DNA, 19 bp, Homo sapiens
  siRNA target sequence for C10orf9 (NM_145012.3,378-396).
ccaaacctcaagtatacaa

SEQ ID NO: 308118 - DNA, 19 bp, Homo sapiens
  siRNA target sequence for C10orf9 (NM_145012.3,383-401).
cctcaagtatacaattaaa

SEQ ID NO: 308119 - DNA, 19 bp, Homo sapiens
  siRNA target sequence for C10orf9 (NM_145012.3,403-421).
gtgtcgctcttgcaatata

SEQ ID NO: 308120 - DNA, 19 bp, Homo sapiens
  siRNA target sequence for C10orf9 (NM_145012.3,405-423).
gtcgctcttgcaatatatt

SEQ ID NO: 308121 - DNA, 19 bp, Homo sapiens
  siRNA target sequence for C10orf9 (NM_145012.3,407-425).
cgctcttgcaatatattat

SEQ ID NO: 308122 - DNA, 19 bp, Homo sapiens
  siRNA target sequence for C10orf9 (NM_145012.3,644-662).
cgcagagatagatatctgt

SEQ ID NO: 308123 - DNA, 19 bp, Homo sapiens
  siRNA target sequence for C10orf9 (NM_145012.3,788-806).
cgagctagagcgacagttt

SEQ ID NO: 308124 - DNA, 19 bp, Homo sapiens
  siRNA target sequence for C10orf9 (NM_145012.3,791-809).
gctagagcgacagtttctt

SEQ ID NO: 308125 - DNA, 19 bp, Homo sapiens
  siRNA target sequence for C10orf9 (NM_145012.3,818-836).
gcagttcaacatcaatgtt

SEQ ID NO: 308126 - DNA, 19 bp, Homo sapiens
  siRNA target sequence for C10orf9 (NM_145012.3,960-978).
ctctgcgaggacaagtaca

SEQ ID NO: 308127 - DNA, 19 bp, Homo sapiens
  siRNA target sequence for C10orf9 (NM_181698.1,380-398).
cagacggacgtgagagaaa

SEQ ID NO: 308128 - DNA, 19 bp, Homo sapiens
  siRNA target sequence for CCNK (NM_003858.2,201-219).
ggtactgggataagaaaga

SEQ ID NO: 308129 - DNA, 19 bp, Homo sapiens
  siRNA target sequence for CCNK (NM_003858.2,284-302).
gagggcgctcggttcatct

SEQ ID NO: 308130 - DNA, 19 bp, Homo sapiens
  siRNA target sequence for CCNK (NM_003858.2,286-304).
gggcgctcggttcatcttt

SEQ ID NO: 308131 - DNA, 19 bp, Homo sapiens
  siRNA target sequence for CCNK (NM_003858.2,288-306).
gcgctcggttcatctttga

SEQ ID NO: 308132 - DNA, 19 bp, Homo sapiens
  siRNA target sequence for CCNK (NM_003858.2,289-307).
cgctcggttcatctttgat

SEQ ID NO: 308133 - DNA, 19 bp, Homo sapiens
  siRNA target sequence for CCNK (NM_003858.2,315-333).
cacgtttggggctacacta

SEQ ID NO: 308134 - DNA, 19 bp, Homo sapiens
  siRNA target sequence for CCNK (NM_003858.2,318-336).
gtttggggctacactatga

SEQ ID NO: 308135 - DNA, 19 bp, Homo sapiens
  siRNA target sequence for CCNK (NM_003858.2,344-362).
gcaactggaataatttatt

SEQ ID NO: 308136 - DNA, 19 bp, Homo sapiens
  siRNA target sequence for CCNK (NM_003858.2,368-386).
cgcttctatatgtttcatt

SEQ ID NO: 308137 - DNA, 19 bp, Homo sapiens
  siRNA target sequence for CCNK (NM_003858.2,481-499).
caaaacagctcgtagttta

SEQ ID NO: 308138 - DNA, 19 bp, Homo sapiens
  siRNA target sequence for CCNK (NM_003858.2,486-504).
cagctcgtagtttattaaa

SEQ ID NO: 308139 - DNA, 19 bp, Homo sapiens
  siRNA target sequence for CCNK (NM_003858.2,489-507).
ctcgtagtttattaaatga

SEQ ID NO: 308140 - DNA, 19 bp, Homo sapiens
  siRNA target sequence for CCNK (NM_003858.2,574-592).
gcagaccatcaagtttgat

SEQ ID NO: 308141 - DNA, 19 bp, Homo sapiens
  siRNA target sequence for CCNK (NM_003858.2,575-593).
cagaccatcaagtttgatt

SEQ ID NO: 308142 - DNA, 19 bp, Homo sapiens
  siRNA target sequence for CCNK (NM_003858.2,577-595).
gaccatcaagtttgattta

SEQ ID NO: 308143 - DNA, 19 bp, Homo sapiens
  siRNA target sequence for CCNK (NM_003858.2,579-597).
ccatcaagtttgatttaca

SEQ ID NO: 308144 - DNA, 19 bp, Homo sapiens
  siRNA target sequence for CCNK (NM_003858.2,608-626).
ccataccagttcctactaa

SEQ ID NO: 308145 - DNA, 19 bp, Homo sapiens
  siRNA target sequence for CCNK (NM_003858.2,609-627).
cataccagttcctactaaa

SEQ ID NO: 308146 - DNA, 19 bp, Homo sapiens
  siRNA target sequence for CCNK (NM_003858.2,770-788).
gcaggacgtttgtgcaaat

SEQ ID NO: 308147 - DNA, 19 bp, Homo sapiens
  siRNA target sequence for CCNK (NM_003858.2,771-789).
caggacgtttgtgcaaatt

SEQ ID NO: 308148 - DNA, 19 bp, Homo sapiens
  siRNA target sequence for CCNK (NM_003858.2,856-874).
cccggtcgacgttttggaa

SEQ ID NO: 308149 - DNA, 19 bp, Homo sapiens
  siRNA target sequence for CCNK (NM_003858.2,949-967).
gcaacagcccccatctctt

SEQ ID NO: 308150 - DNA, 19 bp, Homo sapiens
  siRNA target sequence for CCNK (NM_003858.2,978-996).
cacaagtgccgcaagtaca

SEQ ID NO: 308151 - DNA, 19 bp, Homo sapiens
  siRNA target sequence for CCNL2 (NM_030937.2,1305-1323).
caggaaatctgcttaaaga

SEQ ID NO: 308152 - DNA, 19 bp, Homo sapiens
  siRNA target sequence for CCNL2 (NM_030937.2,1339-1357).
ctcggaaaaaggttgatct

SEQ ID NO: 308153 - DNA, 19 bp, Homo sapiens
  siRNA target sequence for CCNL2 (NM_030937.2,1483-1501).
ggtctcaatgtattgactt

SEQ ID NO: 308154 - DNA, 19 bp, Homo sapiens
  siRNA target sequence for CCNL2 (NM_030937.2,1484-1502).
gtctcaatgtattgacttt

SEQ ID NO: 308155 - DNA, 19 bp, Homo sapiens
  siRNA target sequence for CCNL2 (NM_030937.2,1486-1504).
ctcaatgtattgactttgt

SEQ ID NO: 308156 - DNA, 19 bp, Homo sapiens
  siRNA target sequence for CCNL2 (NM_030937.2,1934-1952).
ccgcagcgctccctacaaa

SEQ ID NO: 308157 - DNA, 19 bp, Homo sapiens
  siRNA target sequence for CCNL2 (NM_030937.2,2064-2082).
gcggataatccgggaaaat

SEQ ID NO: 308158 - DNA, 19 bp, Homo sapiens
  siRNA target sequence for CCNL2 (NM_030937.2,2073-2091).
ccgggaaaatacaagaaga

SEQ ID NO: 308159 - DNA, 19 bp, Homo sapiens
  siRNA target sequence for CCNL2 (NM_030937.2,2123-2141).
gcgctcgaggtcgtatgaa

SEQ ID NO: 308160 - DNA, 19 bp, Homo sapiens
  siRNA target sequence for CEP2 (NM_007186.2,685-703).
gccctgggttgaacaacat

SEQ ID NO: 308161 - DNA, 19 bp, Homo sapiens
  siRNA target sequence for CEP2 (NM_007186.2,1029-1047).
cttcgactgcacatggaaa

SEQ ID NO: 308162 - DNA, 19 bp, Homo sapiens
  siRNA target sequence for CEP2 (NM_007186.2,1194-1212).
ggtcgccttctcagtctat

SEQ ID NO: 308163 - DNA, 19 bp, Homo sapiens
  siRNA target sequence for CEP2 (NM_007186.2,1236-1254).
cgccacttcctggaaatga

SEQ ID NO: 308164 - DNA, 19 bp, Homo sapiens
  siRNA target sequence for CEP2 (NM_007186.2,1261-1279).
ctactgacagagatctgat

SEQ ID NO: 308165 - DNA, 19 bp, Homo sapiens
  siRNA target sequence for CEP2 (NM_007186.2,1647-1665).
catgaagcatctcttagta

SEQ ID NO: 308166 - DNA, 19 bp, Homo sapiens
  siRNA target sequence for CEP2 (NM_007186.2,1697-1715).
gcaggtgatcaaggatata

SEQ ID NO: 308167 - DNA, 19 bp, Homo sapiens
  siRNA target sequence for CEP2 (NM_007186.2,1698-1716).
caggtgatcaaggatataa

SEQ ID NO: 308168 - DNA, 19 bp, Homo sapiens
  siRNA target sequence for CEP2 (NM_007186.2,1759-1777).
ctggtcatgagaactcttt

SEQ ID NO: 308169 - DNA, 19 bp, Homo sapiens
  siRNA target sequence for CEP2 (NM_007186.2,1764-1782).
catgagaactctttggaat

SEQ ID NO: 308170 - DNA, 19 bp, Homo sapiens
  siRNA target sequence for CEP2 (NM_007186.2,2132-2150).
gcgcctgcgaagggtaaat

SEQ ID NO: 308171 - DNA, 19 bp, Homo sapiens
  siRNA target sequence for CEP2 (NM_007186.2,2134-2152).
gcctgcgaagggtaaatgt

SEQ ID NO: 308172 - DNA, 19 bp, Homo sapiens
  siRNA target sequence for CEP2 (NM_007186.2,2259-2277).
ggcctggaagccaaacagt

SEQ ID NO: 308173 - DNA, 19 bp, Homo sapiens
  siRNA target sequence for CEP2 (NM_007186.2,2383-2401).
ctagggcagagcagtcaat

SEQ ID NO: 308174 - DNA, 19 bp, Homo sapiens
  siRNA target sequence for CEP2 (NM_007186.2,2387-2405).
ggcagagcagtcaattgca

SEQ ID NO: 308175 - DNA, 19 bp, Homo sapiens
  siRNA target sequence for CEP2 (NM_007186.2,2435-2453).
gacagaagtagctgatctt

SEQ ID NO: 308176 - DNA, 19 bp, Homo sapiens
  siRNA target sequence for CEP2 (NM_007186.2,2487-2505).
gaggctttggcgttagata

SEQ ID NO: 308177 - DNA, 19 bp, Homo sapiens
  siRNA target sequence for CEP2 (NM_007186.2,2489-2507).
ggctttggcgttagataaa

SEQ ID NO: 308178 - DNA, 19 bp, Homo sapiens
  siRNA target sequence for CEP2 (NM_007186.2,2491-2509).
ctttggcgttagataaagt

SEQ ID NO: 308179 - DNA, 19 bp, Homo sapiens
  siRNA target sequence for CEP2 (NM_007186.2,2576-2594).
cgcagagcaggcgagaaat

SEQ ID NO: 308180 - DNA, 19 bp, Homo sapiens
  siRNA target sequence for CEP2 (NM_007186.2,2580-2598).
gagcaggcgagaaatgctt

SEQ ID NO: 308181 - DNA, 19 bp, Homo sapiens
  siRNA target sequence for CEP2 (NM_007186.2,2867-2885).
ggccctagtacgagagaaa

SEQ ID NO: 308182 - DNA, 19 bp, Homo sapiens
  siRNA target sequence for CEP2 (NM_007186.2,2927-2945).
gcaggacctcgctgaacaa

SEQ ID NO: 308183 - DNA, 19 bp, Homo sapiens
  siRNA target sequence for CEP2 (NM_007186.2,2930-2948).
ggacctcgctgaacaacta

SEQ ID NO: 308184 - DNA, 19 bp, Homo sapiens
  siRNA target sequence for CEP2 (NM_007186.2,2978-2996).
ggagagcagtctgtttgaa

SEQ ID NO: 308185 - DNA, 19 bp, Homo sapiens
  siRNA target sequence for CEP2 (NM_007186.2,3560-3578).
ggagaccactgggatacta

SEQ ID NO: 308186 - DNA, 19 bp, Homo sapiens
  siRNA target sequence for CEP2 (NM_007186.2,3970-3988).
gtgctcagatggaattact

SEQ ID NO: 308187 - DNA, 19 bp, Homo sapiens
  siRNA target sequence for CEP2 (NM_007186.2,4050-4068).
gagctggaggcgtctcata

SEQ ID NO: 308188 - DNA, 19 bp, Homo sapiens
  siRNA target sequence for CEP2 (NM_007186.2,4053-4071).
ctggaggcgtctcatatca

SEQ ID NO: 308189 - DNA, 19 bp, Homo sapiens
  siRNA target sequence for CEP2 (NM_007186.2,4244-4262).
ggccctggggtctgtttgt

SEQ ID NO: 308190 - DNA, 19 bp, Homo sapiens
  siRNA target sequence for CEP2 (NM_007186.2,4335-4353).
ggagctaggagcctcttta

SEQ ID NO: 308191 - DNA, 19 bp, Homo sapiens
  siRNA target sequence for CEP2 (NM_007186.2,4336-4354).
gagctaggagcctctttaa

SEQ ID NO: 308192 - DNA, 19 bp, Homo sapiens
  siRNA target sequence for CEP2 (NM_007186.2,4402-4420).
ccctccacaagcttcatca

SEQ ID NO: 308193 - DNA, 19 bp, Homo sapiens
  siRNA target sequence for CEP2 (NM_007186.2,4459-4477).
gggatcaggtccagaaact

SEQ ID NO: 308194 - DNA, 19 bp, Homo sapiens
  siRNA target sequence for CEP2 (NM_007186.2,4478-4496).
ggaagagcgtctaactgat

SEQ ID NO: 308195 - DNA, 19 bp, Homo sapiens
  siRNA target sequence for CEP2 (NM_007186.2,4479-4497).
gaagagcgtctaactgata

SEQ ID NO: 308196 - DNA, 19 bp, Homo sapiens
  siRNA target sequence for CEP2 (NM_007186.2,4613-4631).
gctgatggaactacatgaa

SEQ ID NO: 308197 - DNA, 19 bp, Homo sapiens
  siRNA target sequence for CEP2 (NM_007186.2,5118-5136).
gagaagtgtaggtctgttt

SEQ ID NO: 308198 - DNA, 19 bp, Homo sapiens
  siRNA target sequence for CEP2 (NM_007186.2,6212-6230).
ggagcaagcccatatgaca

SEQ ID NO: 308199 - DNA, 19 bp, Homo sapiens
  siRNA target sequence for CEP2 (NM_007186.2,7073-7091).
ggaggaacaatctctaaaa

SEQ ID NO: 308200 - DNA, 19 bp, Homo sapiens
  siRNA target sequence for CEP2 (NM_007186.2,7076-7094).
ggaacaatctctaaaactt

SEQ ID NO: 308201 - DNA, 19 bp, Homo sapiens
  siRNA target sequence for FLJ13265 (NM_024877.1,52-70).
ccggctcgggcctatcgtt

SEQ ID NO: 308202 - DNA, 19 bp, Homo sapiens
  siRNA target sequence for FLJ13265 (NM_024877.1,53-71).
cggctcgggcctatcgtta

SEQ ID NO: 308203 - DNA, 19 bp, Homo sapiens
  siRNA target sequence for FLJ13265 (NM_024877.1,298-316).
ggctggtgacacactttat

SEQ ID NO: 308204 - DNA, 19 bp, Homo sapiens
  siRNA target sequence for FLJ13265 (NM_024877.1,320-338).
gcggttcacctgcttgatt

SEQ ID NO: 308205 - DNA, 19 bp, Homo sapiens
  siRNA target sequence for FLJ13265 (NM_024877.1,398-416).
ctgtttgtggcgtgcaaaa

SEQ ID NO: 308206 - DNA, 19 bp, Homo sapiens
  siRNA target sequence for FLJ40137 (NM_173478.1,174-192).
cggcctccctcgttgactt

SEQ ID NO: 308207 - DNA, 19 bp, Homo sapiens
  siRNA target sequence for FLJ40137 (NM_173478.1,208-226).
cgccacagagacgattgaa

SEQ ID NO: 308208 - DNA, 19 bp, Homo sapiens
  siRNA target sequence for FLJ40137 (NM_173478.1,210-228).
ccacagagacgattgaaga

SEQ ID NO: 308209 - DNA, 19 bp, Homo sapiens
  siRNA target sequence for FLJ40137 (NM_173478.1,307-325).
ccagatcgtggagtttgtt

SEQ ID NO: 308210 - DNA, 19 bp, Homo sapiens
  siRNA target sequence for FLJ40137 (NM_173478.1,308-326).
cagatcgtggagtttgttt

SEQ ID NO: 308211 - DNA, 19 bp, Homo sapiens
  siRNA target sequence for FLJ40137 (NM_173478.1,380-398).
gaaatcctagaaaggttta

SEQ ID NO: 308212 - DNA, 19 bp, Homo sapiens
  siRNA target sequence for FLJ40137 (NM_173478.1,386-404).
ctagaaaggtttatggtaa

SEQ ID NO: 308213 - DNA, 19 bp, Homo sapiens
  siRNA target sequence for FLJ40137 (NM_173478.1,469-487).
gaattggagggctctgaaa

SEQ ID NO: 308214 - DNA, 19 bp, Homo sapiens
  siRNA target sequence for FLJ40137 (NM_173478.1,488-506).
cagcagcttgtcaacaagt

SEQ ID NO: 308215 - DNA, 19 bp, Homo sapiens
  siRNA target sequence for FLJ40137 (NM_173478.1,490-508).
gcagcttgtcaacaagttt

SEQ ID NO: 308216 - DNA, 19 bp, Homo sapiens
  siRNA target sequence for FLJ40137 (NM_173478.1,514-532).
ccgtcttgtgtcatgtgtt

SEQ ID NO: 308217 - DNA, 19 bp, Homo sapiens
  siRNA target sequence for FLJ40137 (NM_173478.1,552-570).
ccttccgaaacaaaataat

SEQ ID NO: 308218 - DNA, 19 bp, Homo sapiens
  siRNA target sequence for FLJ40137 (NM_173478.1,598-616).
ccaggctctaggctatcta

SEQ ID NO: 308219 - DNA, 19 bp, Homo sapiens
  siRNA target sequence for FLJ40137 (NM_173478.1,709-727).
gacgctcctagaggtttta

SEQ ID NO: 308220 - DNA, 19 bp, Homo sapiens
  siRNA target sequence for FLJ40137 (NM_173478.1,784-802).
gctcgacctggtctatctt

SEQ ID NO: 308221 - DNA, 19 bp, Homo sapiens
  siRNA target sequence for FLJ40137 (NM_173478.1,885-903).
cttcagtgaaggaagactt

SEQ ID NO: 308222 - DNA, 19 bp, Homo sapiens
  siRNA target sequence for FLJ40137 (NM_173478.1,910-928).
gttggcagtaggaatcatt

SEQ ID NO: 308223 - DNA, 19 bp, Homo sapiens
  siRNA target sequence for FLJ40137 (NM_173478.1,936-954).
gtgctttcatccaaaacca

SEQ ID NO: 308224 - DNA, 19 bp, Homo sapiens
  siRNA target sequence for FLJ40137 (NM_173478.1,985-1003).
gcagagcatcactggtatt

SEQ ID NO: 308225 - DNA, 19 bp, Homo sapiens
  siRNA target sequence for FLJ40137 (NM_173478.1,1019-1037).
gctgagttctcttatgcaa

SEQ ID NO: 308226 - DNA, 19 bp, Homo sapiens
  siRNA target sequence for FLJ40137 (NM_173478.1,1072-1090).
gagacagcagtctattcct

SEQ ID NO: 308227 - DNA, 19 bp, Homo sapiens
  siRNA target sequence for FLJ40432 (NM_152523.1,443-461).
cagggcagcttactaaaaa

SEQ ID NO: 308228 - DNA, 19 bp, Homo sapiens
  siRNA target sequence for FLJ40432 (NM_152523.1,445-463).
gggcagcttactaaaaagt

SEQ ID NO: 308229 - DNA, 19 bp, Homo sapiens
  siRNA target sequence for FLJ40432 (NM_152523.1,446-464).
ggcagcttactaaaaagta

SEQ ID NO: 308230 - DNA, 19 bp, Homo sapiens
  siRNA target sequence for FLJ40432 (NM_152523.1,447-465).
gcagcttactaaaaagtat

SEQ ID NO: 308231 - DNA, 19 bp, Homo sapiens
  siRNA target sequence for FLJ40432 (NM_152523.1,467-485).
gctcatgctcaacaatatt

SEQ ID NO: 308232 - DNA, 19 bp, Homo sapiens
  siRNA target sequence for FLJ40432 (NM_152523.1,517-535).
cttagaaccacagtaaaat

SEQ ID NO: 308233 - DNA, 19 bp, Homo sapiens
  siRNA target sequence for FLJ40432 (NM_152523.1,578-596).
caaatagatccctggatat

SEQ ID NO: 308234 - DNA, 19 bp, Homo sapiens
  siRNA target sequence for FLJ40432 (NM_152523.1,661-679).
cctgagcacaaatttattt

SEQ ID NO: 308235 - DNA, 19 bp, Homo sapiens
  siRNA target sequence for FLJ40432 (NM_152523.1,724-742).
gaatgtgcaatagtaactt

SEQ ID NO: 308236 - DNA, 19 bp, Homo sapiens
  siRNA target sequence for FLJ40432 (NM_152523.1,730-748).
gcaatagtaactttggttt

SEQ ID NO: 308237 - DNA, 19 bp, Homo sapiens
  siRNA target sequence for FLJ40432 (NM_152523.1,791-809).
ccaccaactggaaaaggat

SEQ ID NO: 308238 - DNA, 19 bp, Homo sapiens
  siRNA target sequence for FLJ40432 (NM_152523.1,937-955).
gagcttcttcagtttaata

SEQ ID NO: 308239 - DNA, 19 bp, Homo sapiens
  siRNA target sequence for FLJ40432 (NM_152523.1,1004-1022).
ccttagcagatgacaacaa

SEQ ID NO: 308240 - DNA, 19 bp, Homo sapiens
  siRNA target sequence for FLJ40432 (NM_152523.1,1068-1086).
cctagaggctatttctaga

SEQ ID NO: 308241 - DNA, 19 bp, Homo sapiens
  siRNA target sequence for FLJ40432 (NM_152523.1,1107-1125).
gtgtagagccgctatgaga

SEQ ID NO: 308242 - DNA, 19 bp, Homo sapiens
  siRNA target sequence for FLJ40432 (NM_152523.1,1139-1157).
ctgataacttcattggtat

SEQ ID NO: 308243 - DNA, 19 bp, Homo sapiens
  siRNA target sequence for LOC91768 (NM_138375.1,94-112).
ggctgccatgcaagaatat

SEQ ID NO: 308244 - DNA, 19 bp, Homo sapiens
  siRNA target sequence for LOC91768 (NM_138375.1,95-113).
gctgccatgcaagaatata

SEQ ID NO: 308245 - DNA, 19 bp, Homo sapiens
  siRNA target sequence for LOC91768 (NM_138375.1,104-122).
caagaatatatgctgattt

SEQ ID NO: 308246 - DNA, 19 bp, Homo sapiens
  siRNA target sequence for LOC91768 (NM_138375.1,362-380).
cccaagtcggggacttgaa

SEQ ID NO: 308247 - DNA, 19 bp, Homo sapiens
  siRNA target sequence for LOC91768 (NM_138375.1,387-405).
cggaggaagacaatcaact

SEQ ID NO: 308248 - DNA, 19 bp, Homo sapiens
  siRNA target sequence for LOC91768 (NM_138375.1,407-425).
gtgcagtgagtttgaaaga

SEQ ID NO: 308249 - DNA, 19 bp, Homo sapiens
  siRNA target sequence for LOC91768 (NM_138375.1,463-481).
gggaagactgtttcctata

SEQ ID NO: 308250 - DNA, 19 bp, Homo sapiens
  siRNA target sequence for LOC91768 (NM_138375.1,507-525).
ctttggagcccggagaaat

SEQ ID NO: 308251 - DNA, 19 bp, Homo sapiens
  siRNA target sequence for LOC91768 (NM_138375.1,517-535).
cggagaaataccatagact

SEQ ID NO: 308252 - DNA, 19 bp, Homo sapiens
  siRNA target sequence for LOC91768 (NM_138375.1,638-656).
gagactttatggactatga

SEQ ID NO: 308253 - DNA, 19 bp, Homo sapiens
  siRNA target sequence for LOC91768 (NM_138375.1,723-741).
ctacatgacaacagtgatt

SEQ ID NO: 308254 - DNA, 19 bp, Homo sapiens
  siRNA target sequence for LOC91768 (NM_138375.1,792-810).
ggagaagtttcctcacatt

SEQ ID NO: 308255 - DNA, 19 bp, Homo sapiens
  siRNA target sequence for LOC91768 (NM_138375.1,793-811).
gagaagtttcctcacatta

SEQ ID NO: 308256 - DNA, 19 bp, Homo sapiens
  siRNA target sequence for LOC91768 (NM_138375.1,937-955).
gggaaactcaacaaacaga

SEQ ID NO: 308257 - DNA, 19 bp, Homo sapiens
  siRNA target sequence for LOC91768 (NM_138375.1,1004-1022).
gaagtgacctcaaaaaaca

SEQ ID NO: 308258 - DNA, 19 bp, Homo sapiens
  siRNA target sequence for LOC91768 (NM_138375.1,1021-1039).
cacgaagtcaagcatttaa

SEQ ID NO: 308259 - DNA, 19 bp, Homo sapiens
  siRNA target sequence for LOC91768 (NM_138375.1,1023-1041).
cgaagtcaagcatttaatt

SEQ ID NO: 308260 - DNA, 19 bp, Homo sapiens
  siRNA target sequence for LOC91768 (NM_138375.1,1068-1086).
gaacaggcgagaactgatt

SEQ ID NO: 308261 - DNA, 19 bp, Homo sapiens
  siRNA target sequence for LOC91768 (NM_138375.1,1102-1120).
gtgttagtggccttggaat

SEQ ID NO: 308262 - DNA, 19 bp, Homo sapiens
  siRNA target sequence for PARD3 (NM_019619.2,47-65).
gcggggacggccacatgaa

SEQ ID NO: 308263 - DNA, 19 bp, Homo sapiens
  siRNA target sequence for PARD3 (NM_019619.2,48-66).
cggggacggccacatgaaa

SEQ ID NO: 308264 - DNA, 19 bp, Homo sapiens
  siRNA target sequence for PARD3 (NM_019619.2,51-69).
ggacggccacatgaaagtt

SEQ ID NO: 308265 - DNA, 19 bp, Homo sapiens
  siRNA target sequence for PARD3 (NM_019619.2,52-70).
gacggccacatgaaagttt

SEQ ID NO: 308266 - DNA, 19 bp, Homo sapiens
  siRNA target sequence for PARD3 (NM_019619.2,115-133).
gccaaggatccaaactact

SEQ ID NO: 308267 - DNA, 19 bp, Homo sapiens
  siRNA target sequence for PARD3 (NM_019619.2,197-215).
gtgatgtagcagacgataa

SEQ ID NO: 308268 - DNA, 19 bp, Homo sapiens
  siRNA target sequence for PARD3 (NM_019619.2,221-239).
gactggtagcagtgtttga

SEQ ID NO: 308269 - DNA, 19 bp, Homo sapiens
  siRNA target sequence for PARD3 (NM_019619.2,351-369).
gccttaccaagcaacaagt

SEQ ID NO: 308270 - DNA, 19 bp, Homo sapiens
  siRNA target sequence for PARD3 (NM_019619.2,389-407).
cagtccttcgagcaaatat

SEQ ID NO: 308271 - DNA, 19 bp, Homo sapiens
  siRNA target sequence for PARD3 (NM_019619.2,401-419).
caaatatgcctcttcatgt

SEQ ID NO: 308272 - DNA, 19 bp, Homo sapiens
  siRNA target sequence for PARD3 (NM_019619.2,553-571).
gctgggagtcctaaaacct

SEQ ID NO: 308273 - DNA, 19 bp, Homo sapiens
  siRNA target sequence for PARD3 (NM_019619.2,573-591).
cgacaggaagaaagatgaa

SEQ ID NO: 308274 - DNA, 19 bp, Homo sapiens
  siRNA target sequence for PARD3 (NM_019619.2,771-789).
cacgggtttggagcatata

SEQ ID NO: 308275 - DNA, 19 bp, Homo sapiens
  siRNA target sequence for PARD3 (NM_019619.2,780-798).
ggagcatatacccaacttt

SEQ ID NO: 308276 - DNA, 19 bp, Homo sapiens
  siRNA target sequence for PARD3 (NM_019619.2,781-799).
gagcatatacccaactttt

SEQ ID NO: 308277 - DNA, 19 bp, Homo sapiens
  siRNA target sequence for PARD3 (NM_019619.2,890-908).
gaaccctggggttattagt

SEQ ID NO: 308278 - DNA, 19 bp, Homo sapiens
  siRNA target sequence for PARD3 (NM_019619.2,893-911).
ccctggggttattagtaaa

SEQ ID NO: 308279 - DNA, 19 bp, Homo sapiens
  siRNA target sequence for PARD3 (NM_019619.2,894-912).
cctggggttattagtaaaa

SEQ ID NO: 308280 - DNA, 19 bp, Homo sapiens
  siRNA target sequence for PARD3 (NM_019619.2,899-917).
ggttattagtaaaacgatt

SEQ ID NO: 308281 - DNA, 19 bp, Homo sapiens
  siRNA target sequence for PARD3 (NM_019619.2,949-967).
ctttttcgtgagaatgatt

SEQ ID NO: 308282 - DNA, 19 bp, Homo sapiens
  siRNA target sequence for PARD3 (NM_019619.2,985-1003).
gatggcgaccttcgaaata

SEQ ID NO: 308283 - DNA, 19 bp, Homo sapiens
  siRNA target sequence for PARD3 (NM_019619.2,988-1006).
ggcgaccttcgaaatagaa

SEQ ID NO: 308284 - DNA, 19 bp, Homo sapiens
  siRNA target sequence for PARD3 (NM_019619.2,990-1008).
cgaccttcgaaatagaaga

SEQ ID NO: 308285 - DNA, 19 bp, Homo sapiens
  siRNA target sequence for PARD3 (NM_019619.2,1090-1108).
gagcagtatgaacaactat

SEQ ID NO: 308286 - DNA, 19 bp, Homo sapiens
  siRNA target sequence for PARD3 (NM_019619.2,1117-1135).
gagaagaacaattactatt

SEQ ID NO: 308287 - DNA, 19 bp, Homo sapiens
  siRNA target sequence for PARD3 (NM_019619.2,1151-1169).
ctgacagccagtatattga

SEQ ID NO: 308288 - DNA, 19 bp, Homo sapiens
  siRNA target sequence for PARD3 (NM_019619.2,1153-1171).
gacagccagtatattgaca

SEQ ID NO: 308289 - DNA, 19 bp, Homo sapiens
  siRNA target sequence for PARD3 (NM_019619.2,1231-1249).
ccgcctgagcagatagact

SEQ ID NO: 308290 - DNA, 19 bp, Homo sapiens
  siRNA target sequence for PARD3 (NM_019619.2,1308-1326).
ctcggcacctcagaatgta

SEQ ID NO: 308291 - DNA, 19 bp, Homo sapiens
  siRNA target sequence for PARD3 (NM_019619.2,1315-1333).
cctcagaatgtatttagta

SEQ ID NO: 308292 - DNA, 19 bp, Homo sapiens
  siRNA target sequence for PARD3 (NM_019619.2,1324-1342).
gtatttagtacgactgtaa

SEQ ID NO: 308293 - DNA, 19 bp, Homo sapiens
  siRNA target sequence for PARD3 (NM_019619.2,1335-1353).
gactgtaagcagtggttat

SEQ ID NO: 308294 - DNA, 19 bp, Homo sapiens
  siRNA target sequence for PARD3 (NM_019619.2,1337-1355).
ctgtaagcagtggttataa

SEQ ID NO: 308295 - DNA, 19 bp, Homo sapiens
  siRNA target sequence for PARD3 (NM_019619.2,1339-1357).
gtaagcagtggttataaca

SEQ ID NO: 308296 - DNA, 19 bp, Homo sapiens
  siRNA target sequence for PARD3 (NM_019619.2,1376-1394).
ggcttaatatccagcttaa

SEQ ID NO: 308297 - DNA, 19 bp, Homo sapiens
  siRNA target sequence for PARD3 (NM_019619.2,1378-1396).
cttaatatccagcttaaga

SEQ ID NO: 308298 - DNA, 19 bp, Homo sapiens
  siRNA target sequence for PARD3 (NM_019619.2,1431-1449).
cagagatgtaacaataggt

SEQ ID NO: 308299 - DNA, 19 bp, Homo sapiens
  siRNA target sequence for PARD3 (NM_019619.2,1451-1469).
gctcagctccaatctatgt

SEQ ID NO: 308300 - DNA, 19 bp, Homo sapiens
  siRNA target sequence for PARD3 (NM_019619.2,1537-1555).
gaggtaaatggagtagatt

SEQ ID NO: 308301 - DNA, 19 bp, Homo sapiens
  siRNA target sequence for PARD3 (NM_019619.2,1579-1597).
gttgtttcgctgttgagaa

SEQ ID NO: 308302 - DNA, 19 bp, Homo sapiens
  siRNA target sequence for PARD3 (NM_019619.2,1748-1766).
ccagggaatttctgacatt

SEQ ID NO: 308303 - DNA, 19 bp, Homo sapiens
  siRNA target sequence for PARD3 (NM_019619.2,1763-1781).
catttgaagtcccacttaa

SEQ ID NO: 308304 - DNA, 19 bp, Homo sapiens
  siRNA target sequence for PARD3 (NM_019619.2,1804-1822).
ggtgtcagtgtcaaaggta

SEQ ID NO: 308305 - DNA, 19 bp, Homo sapiens
  siRNA target sequence for PARD3 (NM_019619.2,1815-1833).
caaaggtaaccggtcaaaa

SEQ ID NO: 308306 - DNA, 19 bp, Homo sapiens
  siRNA target sequence for PARD3 (NM_019619.2,1819-1837).
ggtaaccggtcaaaagaga

SEQ ID NO: 308307 - DNA, 19 bp, Homo sapiens
  siRNA target sequence for PARD3 (NM_019619.2,1820-1838).
gtaaccggtcaaaagagaa

SEQ ID NO: 308308 - DNA, 19 bp, Homo sapiens
  siRNA target sequence for PARD3 (NM_019619.2,1842-1860).
cgcagatttgggaatcttt

SEQ ID NO: 308309 - DNA, 19 bp, Homo sapiens
  siRNA target sequence for PARD3 (NM_019619.2,1904-1922).
ggcttcgggtgaatgatca

SEQ ID NO: 308310 - DNA, 19 bp, Homo sapiens
  siRNA target sequence for PARD3 (NM_019619.2,1905-1923).
gcttcgggtgaatgatcaa

SEQ ID NO: 308311 - DNA, 19 bp, Homo sapiens
  siRNA target sequence for PARD3 (NM_019619.2,1910-1928).
gggtgaatgatcaactgat

SEQ ID NO: 308312 - DNA, 19 bp, Homo sapiens
  siRNA target sequence for PARD3 (NM_019619.2,2009-2027).
gcaataaacgaggaatgat

SEQ ID NO: 308313 - DNA, 19 bp, Homo sapiens
  siRNA target sequence for PARD3 (NM_019619.2,2018-2036).
gaggaatgatccagcttat

SEQ ID NO: 308314 - DNA, 19 bp, Homo sapiens
  siRNA target sequence for PARD3 (NM_019619.2,2021-2039).
gaatgatccagcttattgt

SEQ ID NO: 308315 - DNA, 19 bp, Homo sapiens
  siRNA target sequence for PARD3 (NM_019619.2,2038-2056).
gttgcaaggagaataagca

SEQ ID NO: 308316 - DNA, 19 bp, Homo sapiens
  siRNA target sequence for PARD3 (NM_019619.2,2095-2113).
cctgagctgcccattgaaa

SEQ ID NO: 308317 - DNA, 19 bp, Homo sapiens
  siRNA target sequence for PARD3 (NM_019619.2,2110-2128).
gaaacagcgttggatgata

SEQ ID NO: 308318 - DNA, 19 bp, Homo sapiens
  siRNA target sequence for PARD3 (NM_019619.2,2114-2132).
cagcgttggatgatagaga

SEQ ID NO: 308319 - DNA, 19 bp, Homo sapiens
  siRNA target sequence for PARD3 (NM_019619.2,2125-2143).
gatagagaacgaagaattt

SEQ ID NO: 308320 - DNA, 19 bp, Homo sapiens
  siRNA target sequence for PARD3 (NM_019619.2,2198-2216).
ctgccctcagtaggataat

SEQ ID NO: 308321 - DNA, 19 bp, Homo sapiens
  siRNA target sequence for PARD3 (NM_019619.2,2219-2237).
gtgagtcaggtaaatacca

SEQ ID NO: 308322 - DNA, 19 bp, Homo sapiens
  siRNA target sequence for PARD3 (NM_019619.2,2239-2257).
ctgtcccctacagtgaata

SEQ ID NO: 308323 - DNA, 19 bp, Homo sapiens
  siRNA target sequence for PARD3 (NM_019619.2,2271-2289).
cactgtcattatagaagat

SEQ ID NO: 308324 - DNA, 19 bp, Homo sapiens
  siRNA target sequence for PARD3 (NM_019619.2,2391-2409).
ggctgcaatcagtgattca

SEQ ID NO: 308325 - DNA, 19 bp, Homo sapiens
  siRNA target sequence for PARD3 (NM_019619.2,2473-2491).
cgtcagagtatgtcagaaa

SEQ ID NO: 308326 - DNA, 19 bp, Homo sapiens
  siRNA target sequence for PARD3 (NM_019619.2,2516-2534).
ccagtcaattggatttcgt

SEQ ID NO: 308327 - DNA, 19 bp, Homo sapiens
  siRNA target sequence for PARD3 (NM_019619.2,2517-2535).
cagtcaattggatttcgtt

SEQ ID NO: 308328 - DNA, 19 bp, Homo sapiens
  siRNA target sequence for PARD3 (NM_019619.2,2519-2537).
gtcaattggatttcgttaa

SEQ ID NO: 308329 - DNA, 19 bp, Homo sapiens
  siRNA target sequence for PARD3 (NM_019619.2,2521-2539).
caattggatttcgttaaaa

SEQ ID NO: 308330 - DNA, 19 bp, Homo sapiens
  siRNA target sequence for PARD3 (NM_019619.2,2532-2550).
cgttaaaacacgaaaatca

SEQ ID NO: 308331 - DNA, 19 bp, Homo sapiens
  siRNA target sequence for PARD3 (NM_019619.2,2533-2551).
gttaaaacacgaaaatcaa

SEQ ID NO: 308332 - DNA, 19 bp, Homo sapiens
  siRNA target sequence for PARD3 (NM_019619.2,2556-2574).
catggatttaggtatagct

SEQ ID NO: 308333 - DNA, 19 bp, Homo sapiens
  siRNA target sequence for PARD3 (NM_019619.2,2567-2585).
gtatagctgacgagactaa

SEQ ID NO: 308334 - DNA, 19 bp, Homo sapiens
  siRNA target sequence for PARD3 (NM_019619.2,2573-2591).
ctgacgagactaaactcaa

SEQ ID NO: 308335 - DNA, 19 bp, Homo sapiens
  siRNA target sequence for PARD3 (NM_019619.2,2575-2593).
gacgagactaaactcaata

SEQ ID NO: 308336 - DNA, 19 bp, Homo sapiens
  siRNA target sequence for PARD3 (NM_019619.2,2577-2595).
cgagactaaactcaataca

SEQ ID NO: 308337 - DNA, 19 bp, Homo sapiens
  siRNA target sequence for PARD3 (NM_019619.2,2687-2705).
cagttgccgaggtgacttt

SEQ ID NO: 308338 - DNA, 19 bp, Homo sapiens
  siRNA target sequence for PARD3 (NM_019619.2,2689-2707).
gttgccgaggtgactttga

SEQ ID NO: 308339 - DNA, 19 bp, Homo sapiens
  siRNA target sequence for PARD3 (NM_019619.2,2783-2801).
ccatcgacaaatcttatga

SEQ ID NO: 308340 - DNA, 19 bp, Homo sapiens
  siRNA target sequence for PARD3 (NM_019619.2,2784-2802).
catcgacaaatcttatgat

SEQ ID NO: 308341 - DNA, 19 bp, Homo sapiens
  siRNA target sequence for PARD3 (NM_019619.2,2787-2805).
cgacaaatcttatgataaa

SEQ ID NO: 308342 - DNA, 19 bp, Homo sapiens
  siRNA target sequence for PARD3 (NM_019619.2,3266-3284).
catttggctgtgatgatga

SEQ ID NO: 308343 - DNA, 19 bp, Homo sapiens
  siRNA target sequence for PARD3 (NM_019619.2,3291-3309).
gtatgggggagtttcttct

SEQ ID NO: 308344 - DNA, 19 bp, Homo sapiens
  siRNA target sequence for PARD3 (NM_019619.2,3418-3436).
cctgtagacagtaacagat

SEQ ID NO: 308345 - DNA, 19 bp, Homo sapiens
  siRNA target sequence for PARD3 (NM_019619.2,3421-3439).
gtagacagtaacagatcaa

SEQ ID NO: 308346 - DNA, 19 bp, Homo sapiens
  siRNA target sequence for PARD3 (NM_019619.2,3432-3450).
cagatcaactcctagcaat

SEQ ID NO: 308347 - DNA, 19 bp, Homo sapiens
  siRNA target sequence for PARD3 (NM_019619.2,3437-3455).
caactcctagcaatcatga

SEQ ID NO: 308348 - DNA, 19 bp, Homo sapiens
  siRNA target sequence for PARD3 (NM_019619.2,3491-3509).
caaagcaagatgaagatgt

SEQ ID NO: 308349 - DNA, 19 bp, Homo sapiens
  siRNA target sequence for PARD3 (NM_019619.2,3514-3532).
gatcgtcggcggacctata

SEQ ID NO: 308350 - DNA, 19 bp, Homo sapiens
  siRNA target sequence for PARD3 (NM_019619.2,3517-3535).
cgtcggcggacctatagtt

SEQ ID NO: 308351 - DNA, 19 bp, Homo sapiens
  siRNA target sequence for PARD3 (NM_019619.2,3518-3536).
gtcggcggacctatagttt

SEQ ID NO: 308352 - DNA, 19 bp, Homo sapiens
  siRNA target sequence for PARD3 (NM_019619.2,3521-3539).
ggcggacctatagttttga

SEQ ID NO: 308353 - DNA, 19 bp, Homo sapiens
  siRNA target sequence for PARD3 (NM_019619.2,3923-3941).
gcaactatgactcgtataa

SEQ ID NO: 308354 - DNA, 19 bp, Homo sapiens
  siRNA target sequence for PARD3 (NM_019619.2,3927-3945).
ctatgactcgtataagaaa

SEQ ID NO: 308355 - DNA, 19 bp, Homo sapiens
  siRNA target sequence for PARD6A (NM_016948.1,126-144).
gtcgaggtgaagagcaaat

SEQ ID NO: 308356 - DNA, 19 bp, Homo sapiens
  siRNA target sequence for PARD6A (NM_016948.1,642-660).
cgggttccaggaatcttca

SEQ ID NO: 308357 - DNA, 19 bp, Homo sapiens
  siRNA target sequence for PARD6A (NM_016948.1,854-872).
ggcatctgggcgtttgaca

SEQ ID NO: 308358 - DNA, 19 bp, Homo sapiens
  siRNA target sequence for SPIN (NM_006717.1,283-301).
gaggacatcccacaaaaaa

SEQ ID NO: 308359 - DNA, 19 bp, Homo sapiens
  siRNA target sequence for SPIN (NM_006717.1,485-503).
gtttatggactagaactta

SEQ ID NO: 308360 - DNA, 19 bp, Homo sapiens
  siRNA target sequence for SPIN (NM_006717.1,516-534).
gagtttctgcgcttgaagt

SEQ ID NO: 308361 - DNA, 19 bp, Homo sapiens
  siRNA target sequence for SPIN (NM_006717.1,668-686).
cgtgcacctgtcatgaaca

SEQ ID NO: 308362 - DNA, 19 bp, Homo sapiens
  siRNA target sequence for SPIN (NM_006717.1,677-695).
gtcatgaacacatggtttt

SEQ ID NO: 308363 - DNA, 19 bp, Homo sapiens
  siRNA target sequence for SPIN (NM_006717.1,769-787).
cattatgcctgattccaat

SEQ ID NO: 308364 - DNA, 19 bp, Homo sapiens
  siRNA target sequence for SPIN (NM_006717.1,831-849).
gcctggtaggcaaacaagt

SEQ ID NO: 308365 - DNA, 19 bp, Homo sapiens
  siRNA target sequence for SPIN (NM_006717.1,909-927).
ccaagccctccgtctattt

SEQ ID NO: 308366 - DNA, 19 bp, Homo sapiens
  siRNA target sequence for APEG1 (NM_005876.3,2472-2490).
cctccgacgaggaatacct

SEQ ID NO: 308367 - DNA, 19 bp, Homo sapiens
  siRNA target sequence for APEG1 (NM_005876.3,2799-2817).
gtggcgatgctggtttcta

SEQ ID NO: 308368 - DNA, 19 bp, Homo sapiens
  siRNA target sequence for APEG1 (NM_005876.3,2801-2819).
ggcgatgctggtttctaca

SEQ ID NO: 308369 - DNA, 19 bp, Homo sapiens
  siRNA target sequence for APEG1 (NM_005876.3,2820-2838).
cttgcaaagcggtcaatga

SEQ ID NO: 308370 - DNA, 19 bp, Homo sapiens
  siRNA target sequence for APEG1 (NM_005876.3,2823-2841).
gcaaagcggtcaatgagta

SEQ ID NO: 308371 - DNA, 19 bp, Homo sapiens
  siRNA target sequence for APEG1 (NM_005876.3,2824-2842).
caaagcggtcaatgagtat

SEQ ID NO: 308372 - DNA, 19 bp, Homo sapiens
  siRNA target sequence for BTG1 (NM_001731.1,365-383).
gtccttcatctccaagttt

SEQ ID NO: 308373 - DNA, 19 bp, Homo sapiens
  siRNA target sequence for BTG1 (NM_001731.1,367-385).
ccttcatctccaagtttct

SEQ ID NO: 308374 - DNA, 19 bp, Homo sapiens
  siRNA target sequence for BTG1 (NM_001731.1,446-464).
gctgctggcagaacattat

SEQ ID NO: 308375 - DNA, 19 bp, Homo sapiens
  siRNA target sequence for BTG1 (NM_001731.1,447-465).
ctgctggcagaacattata

SEQ ID NO: 308376 - DNA, 19 bp, Homo sapiens
  siRNA target sequence for BTG1 (NM_001731.1,499-517).
gatcgggttaccgttgtat

SEQ ID NO: 308377 - DNA, 19 bp, Homo sapiens
  siRNA target sequence for BTG1 (NM_001731.1,521-539).
catcaaccataaaatggat

SEQ ID NO: 308378 - DNA, 19 bp, Homo sapiens
  siRNA target sequence for BTG1 (NM_001731.1,620-638).
ctgggttgacccctatgaa

SEQ ID NO: 308379 - DNA, 19 bp, Homo sapiens
  siRNA target sequence for BTG1 (NM_001731.1,699-717).
ggaggtagcactcaaaaca

SEQ ID NO: 308380 - DNA, 19 bp, Homo sapiens
  siRNA target sequence for BTG1 (NM_001731.1,718-736).
gcaccaacgtgcaaatggt

SEQ ID NO: 308381 - DNA, 19 bp, Homo sapiens
  siRNA target sequence for BTG1 (NM_001731.1,719-737).
caccaacgtgcaaatggta

SEQ ID NO: 308382 - DNA, 19 bp, Homo sapiens
  siRNA target sequence for BTG1 (NM_001731.1,751-769).
gctgtaaggaggaacttct

SEQ ID NO: 308383 - DNA, 19 bp, Homo sapiens
  siRNA target sequence for BTG1 (NM_001731.1,800-818).
caatatgatgactgtatca

SEQ ID NO: 308384 - DNA, 19 bp, Homo sapiens
  siRNA target sequence for CD164 (NM_006016.3,278-296).
gctgcgtttcctgttttaa

SEQ ID NO: 308385 - DNA, 19 bp, Homo sapiens
  siRNA target sequence for CD164 (NM_006016.3,279-297).
ctgcgtttcctgttttaat

SEQ ID NO: 308386 - DNA, 19 bp, Homo sapiens
  siRNA target sequence for CD164 (NM_006016.3,298-316).
gttagcgttgttaatacta

SEQ ID NO: 308387 - DNA, 19 bp, Homo sapiens
  siRNA target sequence for CD164 (NM_006016.3,326-344).
ggatagaatgtaaagatga

SEQ ID NO: 308388 - DNA, 19 bp, Homo sapiens
  siRNA target sequence for CD164 (NM_006016.3,348-366).
ctattgttcacataactca

SEQ ID NO: 308389 - DNA, 19 bp, Homo sapiens
  siRNA target sequence for CD164 (NM_006016.3,363-381).
ctcaacagttagtgattgt

SEQ ID NO: 308390 - DNA, 19 bp, Homo sapiens
  siRNA target sequence for CD164 (NM_006016.3,430-448).
gtgccaacagccaattcta

SEQ ID NO: 308391 - DNA, 19 bp, Homo sapiens
  siRNA target sequence for CD164 (NM_006016.3,432-450).
gccaacagccaattctaca

SEQ ID NO: 308392 - DNA, 19 bp, Homo sapiens
  siRNA target sequence for CD164 (NM_006016.3,541-559).
caacctgtgcgaaagtcta

SEQ ID NO: 308393 - DNA, 19 bp, Homo sapiens
  siRNA target sequence for CD164 (NM_006016.3,549-567).
gcgaaagtctacctttgat

SEQ ID NO: 308394 - DNA, 19 bp, Homo sapiens
  siRNA target sequence for CD164 (NM_006016.3,603-621).
gggtgtgcaggctgtaatt

SEQ ID NO: 308395 - DNA, 19 bp, Homo sapiens
  siRNA target sequence for CD164 (NM_006016.3,604-622).
ggtgtgcaggctgtaattt

SEQ ID NO: 308396 - DNA, 19 bp, Homo sapiens
  siRNA target sequence for CD164 (NM_006016.3,609-627).
gcaggctgtaattttcttt

SEQ ID NO: 308397 - DNA, 19 bp, Homo sapiens
  siRNA target sequence for CD164 (NM_006016.3,641-659).
gcaaatctaaagaacgaaa

SEQ ID NO: 308398 - DNA, 19 bp, Homo sapiens
  siRNA target sequence for CGRRF1 (NM_006568.1,39-57).
gtttctggtaacgctttat

SEQ ID NO: 308399 - DNA, 19 bp, Homo sapiens
  siRNA target sequence for CGRRF1 (NM_006568.1,43-61).
ctggtaacgctttatgaat

SEQ ID NO: 308400 - DNA, 19 bp, Homo sapiens
  siRNA target sequence for CGRRF1 (NM_006568.1,46-64).
gtaacgctttatgaatact

SEQ ID NO: 308401 - DNA, 19 bp, Homo sapiens
  siRNA target sequence for CGRRF1 (NM_006568.1,117-135).
cctggtattgggatggttt

SEQ ID NO: 308402 - DNA, 19 bp, Homo sapiens
  siRNA target sequence for CGRRF1 (NM_006568.1,121-139).
gtattgggatggtttggtt

SEQ ID NO: 308403 - DNA, 19 bp, Homo sapiens
  siRNA target sequence for CGRRF1 (NM_006568.1,137-155).
gttgggatgttccagtaat

SEQ ID NO: 308404 - DNA, 19 bp, Homo sapiens
  siRNA target sequence for CGRRF1 (NM_006568.1,140-158).
gggatgttccagtaattct

SEQ ID NO: 308405 - DNA, 19 bp, Homo sapiens
  siRNA target sequence for CGRRF1 (NM_006568.1,183-201).
cagcacaagagttttcaaa

SEQ ID NO: 308406 - DNA, 19 bp, Homo sapiens
  siRNA target sequence for CGRRF1 (NM_006568.1,240-258).
gatcactaatccatcttca

SEQ ID NO: 308407 - DNA, 19 bp, Homo sapiens
  siRNA target sequence for CGRRF1 (NM_006568.1,287-305).
caacagattgccttgaaga

SEQ ID NO: 308408 - DNA, 19 bp, Homo sapiens
  siRNA target sequence for CGRRF1 (NM_006568.1,324-342).
ctgggggtgcagtgttcaa

SEQ ID NO: 308409 - DNA, 19 bp, Homo sapiens
  siRNA target sequence for CGRRF1 (NM_006568.1,329-347).
ggtgcagtgttcaaaaatt

SEQ ID NO: 308410 - DNA, 19 bp, Homo sapiens
  siRNA target sequence for CGRRF1 (NM_006568.1,330-348).
gtgcagtgttcaaaaatta

SEQ ID NO: 308411 - DNA, 19 bp, Homo sapiens
  siRNA target sequence for CGRRF1 (NM_006568.1,389-407).
gcactccccaagcattaga

SEQ ID NO: 308412 - DNA, 19 bp, Homo sapiens
  siRNA target sequence for CGRRF1 (NM_006568.1,417-435).
gtatagtgaatatctctat

SEQ ID NO: 308413 - DNA, 19 bp, Homo sapiens
  siRNA target sequence for CGRRF1 (NM_006568.1,483-501).
ccagttaccaagagatact

SEQ ID NO: 308414 - DNA, 19 bp, Homo sapiens
  siRNA target sequence for CGRRF1 (NM_006568.1,491-509).
caagagatactaaaattga

SEQ ID NO: 308415 - DNA, 19 bp, Homo sapiens
  siRNA target sequence for CGRRF1 (NM_006568.1,526-544).
cccagatctcgctatccat

SEQ ID NO: 308416 - DNA, 19 bp, Homo sapiens
  siRNA target sequence for CGRRF1 (NM_006568.1,541-559).
ccattggtagcgctattga

SEQ ID NO: 308417 - DNA, 19 bp, Homo sapiens
  siRNA target sequence for CGRRF1 (NM_006568.1,577-595).
gaccgggaaatttatgata

SEQ ID NO: 308418 - DNA, 19 bp, Homo sapiens
  siRNA target sequence for CGRRF1 (NM_006568.1,580-598).
cgggaaatttatgatatta

SEQ ID NO: 308419 - DNA, 19 bp, Homo sapiens
  siRNA target sequence for CGRRF1 (NM_006568.1,626-644).
ctgataggacttataaact

SEQ ID NO: 308420 - DNA, 19 bp, Homo sapiens
  siRNA target sequence for CGRRF1 (NM_006568.1,675-693).
cttggctcaaggtcaattt

SEQ ID NO: 308421 - DNA, 19 bp, Homo sapiens
  siRNA target sequence for CGRRF1 (NM_006568.1,680-698).
ctcaaggtcaatttcatga

SEQ ID NO: 308422 - DNA, 19 bp, Homo sapiens
  siRNA target sequence for CGRRF1 (NM_006568.1,913-931).
gatggctgtgtgaagtatt

SEQ ID NO: 308423 - DNA, 19 bp, Homo sapiens
  siRNA target sequence for CGRRF1 (NM_006568.1,944-962).
caatgtgcaggcagtttgt

SEQ ID NO: 308424 - DNA, 19 bp, Homo sapiens
  siRNA target sequence for CGRRF1 (NM_006568.1,977-995).
cactttgcagtcaaaaaga

SEQ ID NO: 308425 - DNA, 19 bp, Homo sapiens
  siRNA target sequence for DEC1 (NM_017418.1,584-602).
gccttcttgccgtgttaca

SEQ ID NO: 308426 - DNA, 19 bp, Homo sapiens
  siRNA target sequence for DEC1 (NM_017418.1,595-613).
gtgttacacatgatggttt

SEQ ID NO: 308427 - DNA, 19 bp, Homo sapiens
  siRNA target sequence for DEC1 (NM_017418.1,597-615).
gttacacatgatggttttt

SEQ ID NO: 308428 - DNA, 19 bp, Homo sapiens
  siRNA target sequence for DLEC1 (NM_005106.2,39-57).
caaaacgcggaggtcttta

SEQ ID NO: 308429 - DNA, 19 bp, Homo sapiens
  siRNA target sequence for DLEC1 (NM_005106.2,73-91).
gagtgccaggggacaatgt

SEQ ID NO: 308430 - DNA, 19 bp, Homo sapiens
  siRNA target sequence for DLEC1 (NM_005106.2,141-159).
ctggaagtcctccttgtat

SEQ ID NO: 308431 - DNA, 19 bp, Homo sapiens
  siRNA target sequence for DLEC1 (NM_005106.2,278-296).
cgctgcgcacccaagatat

SEQ ID NO: 308432 - DNA, 19 bp, Homo sapiens
  siRNA target sequence for DLEC1 (NM_005106.2,313-331).
ggcgtcttccgcaacttgt

SEQ ID NO: 308433 - DNA, 19 bp, Homo sapiens
  siRNA target sequence for DLEC1 (NM_005106.2,314-332).
gcgtcttccgcaacttgta

SEQ ID NO: 308434 - DNA, 19 bp, Homo sapiens
  siRNA target sequence for DLEC1 (NM_005106.2,316-334).
gtcttccgcaacttgtact

SEQ ID NO: 308435 - DNA, 19 bp, Homo sapiens
  siRNA target sequence for DLEC1 (NM_005106.2,358-376).
gtgagcgcaagcttgatca

SEQ ID NO: 308436 - DNA, 19 bp, Homo sapiens
  siRNA target sequence for DLEC1 (NM_005106.2,430-448).
cagattcgggagctctata

SEQ ID NO: 308437 - DNA, 19 bp, Homo sapiens
  siRNA target sequence for DLEC1 (NM_005106.2,455-473).
ggctggatgagtttgaaat

SEQ ID NO: 308438 - DNA, 19 bp, Homo sapiens
  siRNA target sequence for DLEC1 (NM_005106.2,506-524).
gggctattgcggaaaatga

SEQ ID NO: 308439 - DNA, 19 bp, Homo sapiens
  siRNA target sequence for DLEC1 (NM_005106.2,615-633).
cgagttgctacggaaacat

SEQ ID NO: 308440 - DNA, 19 bp, Homo sapiens
  siRNA target sequence for DLEC1 (NM_005106.2,618-636).
gttgctacggaaacatcat

SEQ ID NO: 308441 - DNA, 19 bp, Homo sapiens
  siRNA target sequence for DLEC1 (NM_005106.2,625-643).
cggaaacatcatttgatct

SEQ ID NO: 308442 - DNA, 19 bp, Homo sapiens
  siRNA target sequence for DLEC1 (NM_005106.2,675-693).
gtttcactctgcacctaaa

SEQ ID NO: 308443 - DNA, 19 bp, Homo sapiens
  siRNA target sequence for DLEC1 (NM_005106.2,701-719).
ccctacctggatgttcaaa

SEQ ID NO: 308444 - DNA, 19 bp, Homo sapiens
  siRNA target sequence for DLEC1 (NM_005106.2,702-720).
cctacctggatgttcaaaa

SEQ ID NO: 308445 - DNA, 19 bp, Homo sapiens
  siRNA target sequence for DLEC1 (NM_005106.2,706-724).
cctggatgttcaaaactga

SEQ ID NO: 308446 - DNA, 19 bp, Homo sapiens
  siRNA target sequence for DLEC1 (NM_005106.2,743-761).
gttccgtccagaagaaaga

SEQ ID NO: 308447 - DNA, 19 bp, Homo sapiens
  siRNA target sequence for DLEC1 (NM_005106.2,834-852).
ggacagcctgacatggaat

SEQ ID NO: 308448 - DNA, 19 bp, Homo sapiens
  siRNA target sequence for DLEC1 (NM_005106.2,840-858).
cctgacatggaatttaact

SEQ ID NO: 308449 - DNA, 19 bp, Homo sapiens
  siRNA target sequence for DLEC1 (NM_005106.2,986-1004).
gtcggaaccacttcctaaa

SEQ ID NO: 308450 - DNA, 19 bp, Homo sapiens
  siRNA target sequence for DLEC1 (NM_005106.2,988-1006).
cggaaccacttcctaaaaa

SEQ ID NO: 308451 - DNA, 19 bp, Homo sapiens
  siRNA target sequence for DLEC1 (NM_005106.2,1039-1057).
ggaggcaagtctcttgttt

SEQ ID NO: 308452 - DNA, 19 bp, Homo sapiens
  siRNA target sequence for DLEC1 (NM_005106.2,1040-1058).
gaggcaagtctcttgtttt

SEQ ID NO: 308453 - DNA, 19 bp, Homo sapiens
  siRNA target sequence for DLEC1 (NM_005106.2,1076-1094).
caccgataggagaattcca

SEQ ID NO: 308454 - DNA, 19 bp, Homo sapiens
  siRNA target sequence for DLEC1 (NM_005106.2,1121-1139).
ctgatactccagtgtttct

SEQ ID NO: 308455 - DNA, 19 bp, Homo sapiens
  siRNA target sequence for DLEC1 (NM_005106.2,1183-1201).
ccagtttatgagatggtaa

SEQ ID NO: 308456 - DNA, 19 bp, Homo sapiens
  siRNA target sequence for DLEC1 (NM_005106.2,1184-1202).
cagtttatgagatggtaat

SEQ ID NO: 308457 - DNA, 19 bp, Homo sapiens
  siRNA target sequence for DLEC1 (NM_005106.2,1250-1268).
cgccttccacgccatactt

SEQ ID NO: 308458 - DNA, 19 bp, Homo sapiens
  siRNA target sequence for DLEC1 (NM_005106.2,1281-1299).
ggggatgttcccaggaaaa

SEQ ID NO: 308459 - DNA, 19 bp, Homo sapiens
  siRNA target sequence for DLEC1 (NM_005106.2,1360-1378).
cttggggattttgatgatt

SEQ ID NO: 308460 - DNA, 19 bp, Homo sapiens
  siRNA target sequence for DLEC1 (NM_005106.2,1498-1516).
gtcaagatgaccagattca

SEQ ID NO: 308461 - DNA, 19 bp, Homo sapiens
  siRNA target sequence for DLEC1 (NM_005106.2,1540-1558).
gttggcaggttctgcatta

SEQ ID NO: 308462 - DNA, 19 bp, Homo sapiens
  siRNA target sequence for DLEC1 (NM_005106.2,1571-1589).
gctggccaccactaagttt

SEQ ID NO: 308463 - DNA, 19 bp, Homo sapiens
  siRNA target sequence for DLEC1 (NM_005106.2,1601-1619).
caaccgtcggctttgttga

SEQ ID NO: 308464 - DNA, 19 bp, Homo sapiens
  siRNA target sequence for DLEC1 (NM_005106.2,1604-1622).
ccgtcggctttgttgaaca

SEQ ID NO: 308465 - DNA, 19 bp, Homo sapiens
  siRNA target sequence for DLEC1 (NM_005106.2,1605-1623).
cgtcggctttgttgaacaa

SEQ ID NO: 308466 - DNA, 19 bp, Homo sapiens
  siRNA target sequence for DLEC1 (NM_005106.2,1664-1682).
cgggacatgctatattagt

SEQ ID NO: 308467 - DNA, 19 bp, Homo sapiens
  siRNA target sequence for DLEC1 (NM_005106.2,1764-1782).
gctggtgaccataggaatt

SEQ ID NO: 308468 - DNA, 19 bp, Homo sapiens
  siRNA target sequence for DLEC1 (NM_005106.2,1796-1814).
ctttggatctgatctatat

SEQ ID NO: 308469 - DNA, 19 bp, Homo sapiens
  siRNA target sequence for DLEC1 (NM_005106.2,1800-1818).
ggatctgatctatatttct

SEQ ID NO: 308470 - DNA, 19 bp, Homo sapiens
  siRNA target sequence for DLEC1 (NM_005106.2,1864-1882).
gcccagcacttcatacgat

SEQ ID NO: 308471 - DNA, 19 bp, Homo sapiens
  siRNA target sequence for DLEC1 (NM_005106.2,1865-1883).
cccagcacttcatacgatt

SEQ ID NO: 308472 - DNA, 19 bp, Homo sapiens
  siRNA target sequence for DLEC1 (NM_005106.2,1866-1884).
ccagcacttcatacgattt

SEQ ID NO: 308473 - DNA, 19 bp, Homo sapiens
  siRNA target sequence for DLEC1 (NM_005106.2,1914-1932).
gaagcagctgattattaga

SEQ ID NO: 308474 - DNA, 19 bp, Homo sapiens
  siRNA target sequence for DLEC1 (NM_005106.2,1921-1939).
ctgattattagaaatgcta

SEQ ID NO: 308475 - DNA, 19 bp, Homo sapiens
  siRNA target sequence for DLEC1 (NM_005106.2,2176-2194).
gtcccagagcctgtaagtt

SEQ ID NO: 308476 - DNA, 19 bp, Homo sapiens
  siRNA target sequence for DLEC1 (NM_005106.2,2228-2246).
ctgtggatgatgtgattgt

SEQ ID NO: 308477 - DNA, 19 bp, Homo sapiens
  siRNA target sequence for DLEC1 (NM_005106.2,2325-2343).
gaactacattgggataaat

SEQ ID NO: 308478 - DNA, 19 bp, Homo sapiens
  siRNA target sequence for DLEC1 (NM_005106.2,2409-2427).
cagcgactgccacatcatt

SEQ ID NO: 308479 - DNA, 19 bp, Homo sapiens
  siRNA target sequence for DLEC1 (NM_005106.2,2411-2429).
gcgactgccacatcattga

SEQ ID NO: 308480 - DNA, 19 bp, Homo sapiens
  siRNA target sequence for DLEC1 (NM_005106.2,2462-2480).
gtgaggtcggggattttga

SEQ ID NO: 308481 - DNA, 19 bp, Homo sapiens
  siRNA target sequence for DLEC1 (NM_005106.2,2464-2482).
gaggtcggggattttgagt

SEQ ID NO: 308482 - DNA, 19 bp, Homo sapiens
  siRNA target sequence for DLEC1 (NM_005106.2,2470-2488).
ggggattttgagttgaact

SEQ ID NO: 308483 - DNA, 19 bp, Homo sapiens
  siRNA target sequence for DLEC1 (NM_005106.2,2549-2567).
cctcgccagtggtgttaca

SEQ ID NO: 308484 - DNA, 19 bp, Homo sapiens
  siRNA target sequence for DLEC1 (NM_005106.2,2552-2570).
cgccagtggtgttacacat

SEQ ID NO: 308485 - DNA, 19 bp, Homo sapiens
  siRNA target sequence for DLEC1 (NM_005106.2,2553-2571).
gccagtggtgttacacatt

SEQ ID NO: 308486 - DNA, 19 bp, Homo sapiens
  siRNA target sequence for DLEC1 (NM_005106.2,2555-2573).
cagtggtgttacacattga

SEQ ID NO: 308487 - DNA, 19 bp, Homo sapiens
  siRNA target sequence for DLEC1 (NM_005106.2,2588-2606).
ggcctgccctcatcatcaa

SEQ ID NO: 308488 - DNA, 19 bp, Homo sapiens
  siRNA target sequence for DLEC1 (NM_005106.2,2883-2901).
gagctaccttcctgtgtat

SEQ ID NO: 308489 - DNA, 19 bp, Homo sapiens
  siRNA target sequence for DLEC1 (NM_005106.2,2939-2957).
gccaggtggaggttagaaa

SEQ ID NO: 308490 - DNA, 19 bp, Homo sapiens
  siRNA target sequence for DLEC1 (NM_005106.2,2968-2986).
ggtgtgcccacgaagacaa

SEQ ID NO: 308491 - DNA, 19 bp, Homo sapiens
  siRNA target sequence for DLEC1 (NM_005106.2,3401-3419).
gtttctccctcaagtttga

SEQ ID NO: 308492 - DNA, 19 bp, Homo sapiens
  siRNA target sequence for DLEC1 (NM_005106.2,3523-3541).
cgagagcagctggatttta

SEQ ID NO: 308493 - DNA, 19 bp, Homo sapiens
  siRNA target sequence for DLEC1 (NM_005106.2,3758-3776).
ggaccacctcctacactat

SEQ ID NO: 308494 - DNA, 19 bp, Homo sapiens
  siRNA target sequence for DLEC1 (NM_005106.2,3759-3777).
gaccacctcctacactatt

SEQ ID NO: 308495 - DNA, 19 bp, Homo sapiens
  siRNA target sequence for DLEC1 (NM_005106.2,3761-3779).
ccacctcctacactattga

SEQ ID NO: 308496 - DNA, 19 bp, Homo sapiens
  siRNA target sequence for DLEC1 (NM_005106.2,3844-3862).
cgaacccttcgcctgaata

SEQ ID NO: 308497 - DNA, 19 bp, Homo sapiens
  siRNA target sequence for DLEC1 (NM_005106.2,3845-3863).
gaacccttcgcctgaataa

SEQ ID NO: 308498 - DNA, 19 bp, Homo sapiens
  siRNA target sequence for DLEC1 (NM_005106.2,3888-3906).
ggattgggagacctatgtt

SEQ ID NO: 308499 - DNA, 19 bp, Homo sapiens
  siRNA target sequence for DLEC1 (NM_005106.2,4168-4186).
ggccacctgtactgtatca

SEQ ID NO: 308500 - DNA, 19 bp, Homo sapiens
  siRNA target sequence for DLEC1 (NM_005106.2,4292-4310).
gctacgccctgggtttcat

SEQ ID NO: 308501 - DNA, 19 bp, Homo sapiens
  siRNA target sequence for DLEC1 (NM_005106.2,4373-4391).
cggtgggacccctgaaact

SEQ ID NO: 308502 - DNA, 19 bp, Homo sapiens
  siRNA target sequence for DLEC1 (NM_005106.2,4412-4430).
ggcctgcacagctaagtgt

SEQ ID NO: 308503 - DNA, 19 bp, Homo sapiens
  siRNA target sequence for DLEC1 (NM_005106.2,4556-4574).
cagagatcccacactactt

SEQ ID NO: 308504 - DNA, 19 bp, Homo sapiens
  siRNA target sequence for DLEC1 (NM_005106.2,4596-4614).
cttctccgtttctcaagat

SEQ ID NO: 308505 - DNA, 19 bp, Homo sapiens
  siRNA target sequence for DLEC1 (NM_005106.2,4985-5003).
gggaggtctacctgatgaa

SEQ ID NO: 308506 - DNA, 19 bp, Homo sapiens
  siRNA target sequence for DLEC1 (NM_005106.2,5249-5267).
gctcctatgatgagagata

SEQ ID NO: 308507 - DNA, 19 bp, Homo sapiens
  siRNA target sequence for DLEC1 (NM_005106.2,5252-5270).
cctatgatgagagatacat

SEQ ID NO: 308508 - DNA, 19 bp, Homo sapiens
  siRNA target sequence for DLEC1 (NM_007337.1,5211-5229).
cattgcccagggattagga

SEQ ID NO: 308509 - DNA, 19 bp, Homo sapiens
  siRNA target sequence for DLEC1 (NM_007337.1,5278-5296).
ggcagctcctggaatggaa

SEQ ID NO: 308510 - DNA, 19 bp, Homo sapiens
  siRNA target sequence for DRIM (NM_014503.1,177-195).
gaacacctaccggtttctt

SEQ ID NO: 308511 - DNA, 19 bp, Homo sapiens
  siRNA target sequence for DRIM (NM_014503.1,182-200).
cctaccggtttcttacatt

SEQ ID NO: 308512 - DNA, 19 bp, Homo sapiens
  siRNA target sequence for DRIM (NM_014503.1,183-201).
ctaccggtttcttacattt

SEQ ID NO: 308513 - DNA, 19 bp, Homo sapiens
  siRNA target sequence for DRIM (NM_014503.1,208-226).
cgactggggaatgttaata

SEQ ID NO: 308514 - DNA, 19 bp, Homo sapiens
  siRNA target sequence for DRIM (NM_014503.1,209-227).
gactggggaatgttaatat

SEQ ID NO: 308515 - DNA, 19 bp, Homo sapiens
  siRNA target sequence for DRIM (NM_014503.1,270-288).
ggaggttgaaacctacttt

SEQ ID NO: 308516 - DNA, 19 bp, Homo sapiens
  siRNA target sequence for DRIM (NM_014503.1,271-289).
gaggttgaaacctactttt

SEQ ID NO: 308517 - DNA, 19 bp, Homo sapiens
  siRNA target sequence for DRIM (NM_014503.1,336-354).
cggaaaattttacaaagaa

SEQ ID NO: 308518 - DNA, 19 bp, Homo sapiens
  siRNA target sequence for DRIM (NM_014503.1,368-386).
gccaatcattcaatcagtt

SEQ ID NO: 308519 - DNA, 19 bp, Homo sapiens
  siRNA target sequence for DRIM (NM_014503.1,427-445).
cacctgcaagttaagaaca

SEQ ID NO: 308520 - DNA, 19 bp, Homo sapiens
  siRNA target sequence for DRIM (NM_014503.1,441-459).
gaacagttttgcctatcaa

SEQ ID NO: 308521 - DNA, 19 bp, Homo sapiens
  siRNA target sequence for DRIM (NM_014503.1,452-470).
cctatcaaccccttttgga

SEQ ID NO: 308522 - DNA, 19 bp, Homo sapiens
  siRNA target sequence for DRIM (NM_014503.1,453-471).
ctatcaaccccttttggat

SEQ ID NO: 308523 - DNA, 19 bp, Homo sapiens
  siRNA target sequence for DRIM (NM_014503.1,504-522).
ggatttctacccacacttt

SEQ ID NO: 308524 - DNA, 19 bp, Homo sapiens
  siRNA target sequence for DRIM (NM_014503.1,523-541).
ccagagttttttttgacta

SEQ ID NO: 308525 - DNA, 19 bp, Homo sapiens
  siRNA target sequence for DRIM (NM_014503.1,524-542).
cagagttttttttgactat

SEQ ID NO: 308526 - DNA, 19 bp, Homo sapiens
  siRNA target sequence for DRIM (NM_014503.1,564-582).
ggacacagagttgttagaa

SEQ ID NO: 308527 - DNA, 19 bp, Homo sapiens
  siRNA target sequence for DRIM (NM_014503.1,585-603).
ggctttcacctcgttatca

SEQ ID NO: 308528 - DNA, 19 bp, Homo sapiens
  siRNA target sequence for DRIM (NM_014503.1,586-604).
gctttcacctcgttatcat

SEQ ID NO: 308529 - DNA, 19 bp, Homo sapiens
  siRNA target sequence for DRIM (NM_014503.1,587-605).
ctttcacctcgttatcata

SEQ ID NO: 308530 - DNA, 19 bp, Homo sapiens
  siRNA target sequence for DRIM (NM_014503.1,591-609).
cacctcgttatcatatctt

SEQ ID NO: 308531 - DNA, 19 bp, Homo sapiens
  siRNA target sequence for DRIM (NM_014503.1,596-614).
cgttatcatatctttataa

SEQ ID NO: 308532 - DNA, 19 bp, Homo sapiens
  siRNA target sequence for DRIM (NM_014503.1,636-654).
gaaggacatgtccagtata

SEQ ID NO: 308533 - DNA, 19 bp, Homo sapiens
  siRNA target sequence for DRIM (NM_014503.1,746-764).
ctgataaaaacgcactttt

SEQ ID NO: 308534 - DNA, 19 bp, Homo sapiens
  siRNA target sequence for DRIM (NM_014503.1,748-766).
gataaaaacgcacttttca

SEQ ID NO: 308535 - DNA, 19 bp, Homo sapiens
  siRNA target sequence for DRIM (NM_014503.1,839-857).
gcaaaggagttagaaatat

SEQ ID NO: 308536 - DNA, 19 bp, Homo sapiens
  siRNA target sequence for DRIM (NM_014503.1,845-863).
gagttagaaatatgtttca

SEQ ID NO: 308537 - DNA, 19 bp, Homo sapiens
  siRNA target sequence for DRIM (NM_014503.1,888-906).
gctaattttgcgaaagcta

SEQ ID NO: 308538 - DNA, 19 bp, Homo sapiens
  siRNA target sequence for DRIM (NM_014503.1,908-926).
gaccagtcactgaaacaga

SEQ ID NO: 308539 - DNA, 19 bp, Homo sapiens
  siRNA target sequence for DRIM (NM_014503.1,996-1014).
ctccaaggaacattttggt

SEQ ID NO: 308540 - DNA, 19 bp, Homo sapiens
  siRNA target sequence for DRIM (NM_014503.1,1082-1100).
gtgaaagttctgaacagat

SEQ ID NO: 308541 - DNA, 19 bp, Homo sapiens
  siRNA target sequence for DRIM (NM_014503.1,1091-1109).
ctgaacagattaaaaggtt

SEQ ID NO: 308542 - DNA, 19 bp, Homo sapiens
  siRNA target sequence for DRIM (NM_014503.1,1107-1125).
gttgttggaaacatacctt

SEQ ID NO: 308543 - DNA, 19 bp, Homo sapiens
  siRNA target sequence for DRIM (NM_014503.1,1110-1128).
gttggaaacataccttata

SEQ ID NO: 308544 - DNA, 19 bp, Homo sapiens
  siRNA target sequence for DRIM (NM_014503.1,1113-1131).
ggaaacataccttatactt

SEQ ID NO: 308545 - DNA, 19 bp, Homo sapiens
  siRNA target sequence for DRIM (NM_014503.1,1122-1140).
ccttatacttgtaaaacat

SEQ ID NO: 308546 - DNA, 19 bp, Homo sapiens
  siRNA target sequence for DRIM (NM_014503.1,1171-1189).
gatgtctgtaaggtgttat

SEQ ID NO: 308547 - DNA, 19 bp, Homo sapiens
  siRNA target sequence for DRIM (NM_014503.1,1176-1194).
ctgtaaggtgttatctcaa

SEQ ID NO: 308548 - DNA, 19 bp, Homo sapiens
  siRNA target sequence for DRIM (NM_014503.1,1284-1302).
gccggagaccctcatcaaa

SEQ ID NO: 308549 - DNA, 19 bp, Homo sapiens
  siRNA target sequence for DRIM (NM_014503.1,1286-1304).
cggagaccctcatcaaaga

SEQ ID NO: 308550 - DNA, 19 bp, Homo sapiens
  siRNA target sequence for DRIM (NM_014503.1,1292-1310).
ccctcatcaaagaaaccat

SEQ ID NO: 308551 - DNA, 19 bp, Homo sapiens
  siRNA target sequence for DRIM (NM_014503.1,1395-1413).
gctttttctaccaagcttt

SEQ ID NO: 308552 - DNA, 19 bp, Homo sapiens
  siRNA target sequence for DRIM (NM_014503.1,1405-1423).
ccaagctttctgtcatata

SEQ ID NO: 308553 - DNA, 19 bp, Homo sapiens
  siRNA target sequence for DRIM (NM_014503.1,1526-1544).
cgatggcaattgaaaagta

SEQ ID NO: 308554 - DNA, 19 bp, Homo sapiens
  siRNA target sequence for DRIM (NM_014503.1,1542-1560).
gtaccctctggttttctca

SEQ ID NO: 308555 - DNA, 19 bp, Homo sapiens
  siRNA target sequence for DRIM (NM_014503.1,1562-1580).
cgcagatggtgggattcta

SEQ ID NO: 308556 - DNA, 19 bp, Homo sapiens
  siRNA target sequence for DRIM (NM_014503.1,1563-1581).
gcagatggtgggattctat

SEQ ID NO: 308557 - DNA, 19 bp, Homo sapiens
  siRNA target sequence for DRIM (NM_014503.1,1564-1582).
cagatggtgggattctata

SEQ ID NO: 308558 - DNA, 19 bp, Homo sapiens
  siRNA target sequence for DRIM (NM_014503.1,1566-1584).
gatggtgggattctatata

SEQ ID NO: 308559 - DNA, 19 bp, Homo sapiens
  siRNA target sequence for DRIM (NM_014503.1,1598-1616).
ctagatccaagggaagaaa

SEQ ID NO: 308560 - DNA, 19 bp, Homo sapiens
  siRNA target sequence for DRIM (NM_014503.1,1630-1648).
gtattggaccatcttttat

SEQ ID NO: 308561 - DNA, 19 bp, Homo sapiens
  siRNA target sequence for DRIM (NM_014503.1,1636-1654).
gaccatcttttatctataa

SEQ ID NO: 308562 - DNA, 19 bp, Homo sapiens
  siRNA target sequence for DRIM (NM_014503.1,1638-1656).
ccatcttttatctataatt

SEQ ID NO: 308563 - DNA, 19 bp, Homo sapiens
  siRNA target sequence for DRIM (NM_014503.1,1665-1683).
cccaaataaagatactact

SEQ ID NO: 308564 - DNA, 19 bp, Homo sapiens
  siRNA target sequence for DRIM (NM_014503.1,1710-1728).
cgtggtgttacctcatatt

SEQ ID NO: 308565 - DNA, 19 bp, Homo sapiens
  siRNA target sequence for DRIM (NM_014503.1,1711-1729).
gtggtgttacctcatatta

SEQ ID NO: 308566 - DNA, 19 bp, Homo sapiens
  siRNA target sequence for DRIM (NM_014503.1,1713-1731).
ggtgttacctcatattaga

SEQ ID NO: 308567 - DNA, 19 bp, Homo sapiens
  siRNA target sequence for DRIM (NM_014503.1,1838-1856).
gtcaagctgtaaatactct

SEQ ID NO: 308568 - DNA, 19 bp, Homo sapiens
  siRNA target sequence for DRIM (NM_014503.1,1855-1873).
ctactaagtttggaagaat

SEQ ID NO: 308569 - DNA, 19 bp, Homo sapiens
  siRNA target sequence for DRIM (NM_014503.1,1900-1918).
gtggaacgtgtgaagaatt

SEQ ID NO: 308570 - DNA, 19 bp, Homo sapiens
  siRNA target sequence for DRIM (NM_014503.1,1906-1924).
cgtgtgaagaatttagtat

SEQ ID NO: 308571 - DNA, 19 bp, Homo sapiens
  siRNA target sequence for DRIM (NM_014503.1,1907-1925).
gtgtgaagaatttagtatt

SEQ ID NO: 308572 - DNA, 19 bp, Homo sapiens
  siRNA target sequence for DRIM (NM_014503.1,1953-1971).
gctgttgactgatctctat

SEQ ID NO: 308573 - DNA, 19 bp, Homo sapiens
  siRNA target sequence for DRIM (NM_014503.1,2014-2032).
caggaggctttaatggaat

SEQ ID NO: 308574 - DNA, 19 bp, Homo sapiens
  siRNA target sequence for DRIM (NM_014503.1,2080-2098).
cggcttttgacaataagga

SEQ ID NO: 308575 - DNA, 19 bp, Homo sapiens
  siRNA target sequence for DRIM (NM_014503.1,2081-2099).
ggcttttgacaataaggat

SEQ ID NO: 308576 - DNA, 19 bp, Homo sapiens
  siRNA target sequence for DRIM (NM_014503.1,2116-2134).
gtccagcttccagaatcaa

SEQ ID NO: 308577 - DNA, 19 bp, Homo sapiens
  siRNA target sequence for DRIM (NM_014503.1,2203-2221).
gcaactgtgaatgattata

SEQ ID NO: 308578 - DNA, 19 bp, Homo sapiens
  siRNA target sequence for DRIM (NM_014503.1,2226-2244).
gaagcttcttcatttgaga

SEQ ID NO: 308579 - DNA, 19 bp, Homo sapiens
  siRNA target sequence for DRIM (NM_014503.1,2296-2314).
gaggtgccgcttcgttatt

SEQ ID NO: 308580 - DNA, 19 bp, Homo sapiens
  siRNA target sequence for DRIM (NM_014503.1,2299-2317).
gtgccgcttcgttatttgt

SEQ ID NO: 308581 - DNA, 19 bp, Homo sapiens
  siRNA target sequence for DRIM (NM_014503.1,2316-2334).
gttaggcatgctatatatt

SEQ ID NO: 308582 - DNA, 19 bp, Homo sapiens
  siRNA target sequence for DRIM (NM_014503.1,2325-2343).
gctatatattaatttcagt

SEQ ID NO: 308583 - DNA, 19 bp, Homo sapiens
  siRNA target sequence for DRIM (NM_014503.1,2345-2363).
cactctgggatcctgttat

SEQ ID NO: 308584 - DNA, 19 bp, Homo sapiens
  siRNA target sequence for DRIM (NM_014503.1,2349-2367).
ctgggatcctgttattgaa

SEQ ID NO: 308585 - DNA, 19 bp, Homo sapiens
  siRNA target sequence for DRIM (NM_014503.1,2356-2374).
cctgttattgaactcataa

SEQ ID NO: 308586 - DNA, 19 bp, Homo sapiens
  siRNA target sequence for DRIM (NM_014503.1,2375-2393).
gttctcatgcacacgaaat

SEQ ID NO: 308587 - DNA, 19 bp, Homo sapiens
  siRNA target sequence for DRIM (NM_014503.1,2378-2396).
ctcatgcacacgaaatgga

SEQ ID NO: 308588 - DNA, 19 bp, Homo sapiens
  siRNA target sequence for DRIM (NM_014503.1,2421-2439).
ctatgagcatctagaaaaa

SEQ ID NO: 308589 - DNA, 19 bp, Homo sapiens
  siRNA target sequence for DRIM (NM_014503.1,2487-2505).
gaagtccgttggagatgaa

SEQ ID NO: 308590 - DNA, 19 bp, Homo sapiens
  siRNA target sequence for DRIM (NM_014503.1,2490-2508).
gtccgttggagatgaaagt

SEQ ID NO: 308591 - DNA, 19 bp, Homo sapiens
  siRNA target sequence for DRIM (NM_014503.1,2528-2546).
gagatgttggagctcttta

SEQ ID NO: 308592 - DNA, 19 bp, Homo sapiens
  siRNA target sequence for DRIM (NM_014503.1,2618-2636).
ggagagctctgaccaaatt

SEQ ID NO: 308593 - DNA, 19 bp, Homo sapiens
  siRNA target sequence for DRIM (NM_014503.1,2665-2683).
gagctttccccgcttttct

SEQ ID NO: 308594 - DNA, 19 bp, Homo sapiens
  siRNA target sequence for DRIM (NM_014503.1,2672-2690).
ccccgcttttcttgagatt

SEQ ID NO: 308595 - DNA, 19 bp, Homo sapiens
  siRNA target sequence for DRIM (NM_014503.1,2675-2693).
cgcttttcttgagatttat

SEQ ID NO: 308596 - DNA, 19 bp, Homo sapiens
  siRNA target sequence for DRIM (NM_014503.1,2736-2754).
ccaggatctacggagaaaa

SEQ ID NO: 308597 - DNA, 19 bp, Homo sapiens
  siRNA target sequence for DRIM (NM_014503.1,2766-2784).
ggtggcagaggaaatcgaa

SEQ ID NO: 308598 - DNA, 19 bp, Homo sapiens
  siRNA target sequence for DRIM (NM_014503.1,2921-2939).
caaatccacgggccttata

SEQ ID NO: 308599 - DNA, 19 bp, Homo sapiens
  siRNA target sequence for DRIM (NM_014503.1,2944-2962).
gaatccaaactatatgagt

SEQ ID NO: 308600 - DNA, 19 bp, Homo sapiens
  siRNA target sequence for DRIM (NM_014503.1,2976-2994).
gttgctacaccaagatcaa

SEQ ID NO: 308601 - DNA, 19 bp, Homo sapiens
  siRNA target sequence for DRIM (NM_014503.1,3012-3030).
cttggattgcataatgaca

SEQ ID NO: 308602 - DNA, 19 bp, Homo sapiens
  siRNA target sequence for DRIM (NM_014503.1,3051-3069).
cccttacagggaaaactta

SEQ ID NO: 308603 - DNA, 19 bp, Homo sapiens
  siRNA target sequence for DRIM (NM_014503.1,3089-3107).
gaagctttaaggaagagat

SEQ ID NO: 308604 - DNA, 19 bp, Homo sapiens
  siRNA target sequence for DRIM (NM_014503.1,3103-3121).
gagatagtgcattttagca

SEQ ID NO: 308605 - DNA, 19 bp, Homo sapiens
  siRNA target sequence for DRIM (NM_014503.1,3163-3181).
gatctatttcctattctga

SEQ ID NO: 308606 - DNA, 19 bp, Homo sapiens
  siRNA target sequence for DRIM (NM_014503.1,3198-3216).
gcgaatgaagaataagact

SEQ ID NO: 308607 - DNA, 19 bp, Homo sapiens
  siRNA target sequence for DRIM (NM_014503.1,3328-3346).
gaacctgtgaggcatttca

SEQ ID NO: 308608 - DNA, 19 bp, Homo sapiens
  siRNA target sequence for DRIM (NM_014503.1,3331-3349).
cctgtgaggcatttcaaga

SEQ ID NO: 308609 - DNA, 19 bp, Homo sapiens
  siRNA target sequence for DRIM (NM_014503.1,3390-3408).
cttggatttgtctaaagtt

SEQ ID NO: 308610 - DNA, 19 bp, Homo sapiens
  siRNA target sequence for DRIM (NM_014503.1,3399-3417).
gtctaaagttcttccttta

SEQ ID NO: 308611 - DNA, 19 bp, Homo sapiens
  siRNA target sequence for DRIM (NM_014503.1,3419-3437).
gtcgtcagcacggtatctt

SEQ ID NO: 308612 - DNA, 19 bp, Homo sapiens
  siRNA target sequence for DRIM (NM_014503.1,3421-3439).
cgtcagcacggtatcttaa

SEQ ID NO: 308613 - DNA, 19 bp, Homo sapiens
  siRNA target sequence for DRIM (NM_014503.1,3422-3440).
gtcagcacggtatcttaaa

SEQ ID NO: 308614 - DNA, 19 bp, Homo sapiens
  siRNA target sequence for DRIM (NM_014503.1,3424-3442).
cagcacggtatcttaaaca

SEQ ID NO: 308615 - DNA, 19 bp, Homo sapiens
  siRNA target sequence for DRIM (NM_014503.1,3435-3453).
cttaaacagccttgagata

SEQ ID NO: 308616 - DNA, 19 bp, Homo sapiens
  siRNA target sequence for DRIM (NM_014503.1,3443-3461).
gccttgagatagtattgaa

SEQ ID NO: 308617 - DNA, 19 bp, Homo sapiens
  siRNA target sequence for DRIM (NM_014503.1,3444-3462).
ccttgagatagtattgaaa

SEQ ID NO: 308618 - DNA, 19 bp, Homo sapiens
  siRNA target sequence for DRIM (NM_014503.1,3483-3501).
cgcatacctgccgaagatt

SEQ ID NO: 308619 - DNA, 19 bp, Homo sapiens
  siRNA target sequence for DRIM (NM_014503.1,3485-3503).
catacctgccgaagatttt

SEQ ID NO: 308620 - DNA, 19 bp, Homo sapiens
  siRNA target sequence for DRIM (NM_014503.1,3494-3512).
cgaagattttgcagatact

SEQ ID NO: 308621 - DNA, 19 bp, Homo sapiens
  siRNA target sequence for DRIM (NM_014503.1,3544-3562).
cttgaccaacgagaaaaga

SEQ ID NO: 308622 - DNA, 19 bp, Homo sapiens
  siRNA target sequence for DRIM (NM_014503.1,3568-3586).
ctgagatttattaatccat

SEQ ID NO: 308623 - DNA, 19 bp, Homo sapiens
  siRNA target sequence for DRIM (NM_014503.1,3599-3617).
gacgtcttggaatcaaaat

SEQ ID NO: 308624 - DNA, 19 bp, Homo sapiens
  siRNA target sequence for DRIM (NM_014503.1,3602-3620).
gtcttggaatcaaaatggt

SEQ ID NO: 308625 - DNA, 19 bp, Homo sapiens
  siRNA target sequence for DRIM (NM_014503.1,3642-3660).
ggaatcatatcagtttaga

SEQ ID NO: 308626 - DNA, 19 bp, Homo sapiens
  siRNA target sequence for DRIM (NM_014503.1,3643-3661).
gaatcatatcagtttagaa

SEQ ID NO: 308627 - DNA, 19 bp, Homo sapiens
  siRNA target sequence for DRIM (NM_014503.1,3715-3733).
cttggatctgagagtcaat

SEQ ID NO: 308628 - DNA, 19 bp, Homo sapiens
  siRNA target sequence for DRIM (NM_014503.1,3718-3736).
ggatctgagagtcaatatt

SEQ ID NO: 308629 - DNA, 19 bp, Homo sapiens
  siRNA target sequence for DRIM (NM_014503.1,3771-3789).
gagcagaaacgcaagatat

SEQ ID NO: 308630 - DNA, 19 bp, Homo sapiens
  siRNA target sequence for DRIM (NM_014503.1,3884-3902).
ccacagccagtattgtaat

SEQ ID NO: 308631 - DNA, 19 bp, Homo sapiens
  siRNA target sequence for DRIM (NM_014503.1,3934-3952).
gatttcgagcctacagaaa

SEQ ID NO: 308632 - DNA, 19 bp, Homo sapiens
  siRNA target sequence for DRIM (NM_014503.1,3939-3957).
cgagcctacagaaacagtt

SEQ ID NO: 308633 - DNA, 19 bp, Homo sapiens
  siRNA target sequence for DRIM (NM_014503.1,3967-3985).
ctggtaactggatgtgtat

SEQ ID NO: 308634 - DNA, 19 bp, Homo sapiens
  siRNA target sequence for DRIM (NM_014503.1,4005-4023).
catcggtgagtctatcaca

SEQ ID NO: 308635 - DNA, 19 bp, Homo sapiens
  siRNA target sequence for DRIM (NM_014503.1,4008-4026).
cggtgagtctatcacaata

SEQ ID NO: 308636 - DNA, 19 bp, Homo sapiens
  siRNA target sequence for DRIM (NM_014503.1,4020-4038).
cacaataggaggaagatta

SEQ ID NO: 308637 - DNA, 19 bp, Homo sapiens
  siRNA target sequence for DRIM (NM_014503.1,4085-4103).
caataagcgcagaaaaggt

SEQ ID NO: 308638 - DNA, 19 bp, Homo sapiens
  siRNA target sequence for DRIM (NM_014503.1,4141-4159).
cttggcattctttcaaaga

SEQ ID NO: 308639 - DNA, 19 bp, Homo sapiens
  siRNA target sequence for DRIM (NM_014503.1,4154-4172).
caaagatcagcaagtttat

SEQ ID NO: 308640 - DNA, 19 bp, Homo sapiens
  siRNA target sequence for DRIM (NM_014503.1,4186-4204).
caaagttctgtactcatta

SEQ ID NO: 308641 - DNA, 19 bp, Homo sapiens
  siRNA target sequence for DRIM (NM_014503.1,4224-4242).
ccaccgtggcaatattgct

SEQ ID NO: 308642 - DNA, 19 bp, Homo sapiens
  siRNA target sequence for DRIM (NM_014503.1,4269-4287).
gacagtacaaaacttgtta

SEQ ID NO: 308643 - DNA, 19 bp, Homo sapiens
  siRNA target sequence for DRIM (NM_014503.1,4372-4390).
ctttgtacggtttttgaga

SEQ ID NO: 308644 - DNA, 19 bp, Homo sapiens
  siRNA target sequence for DRIM (NM_014503.1,4441-4459).
cttaacgccttcgatcaaa

SEQ ID NO: 308645 - DNA, 19 bp, Homo sapiens
  siRNA target sequence for DRIM (NM_014503.1,4446-4464).
cgccttcgatcaaagacat

SEQ ID NO: 308646 - DNA, 19 bp, Homo sapiens
  siRNA target sequence for DRIM (NM_014503.1,4449-4467).
cttcgatcaaagacatctt

SEQ ID NO: 308647 - DNA, 19 bp, Homo sapiens
  siRNA target sequence for DRIM (NM_014503.1,4452-4470).
cgatcaaagacatcttgat

SEQ ID NO: 308648 - DNA, 19 bp, Homo sapiens
  siRNA target sequence for DRIM (NM_014503.1,4508-4526).
ccatcacctcttacattaa

SEQ ID NO: 308649 - DNA, 19 bp, Homo sapiens
  siRNA target sequence for DRIM (NM_014503.1,4534-4552).
caaattgtggatgttaact

SEQ ID NO: 308650 - DNA, 19 bp, Homo sapiens
  siRNA target sequence for DRIM (NM_014503.1,4542-4560).
ggatgttaactacctaatt

SEQ ID NO: 308651 - DNA, 19 bp, Homo sapiens
  siRNA target sequence for DRIM (NM_014503.1,4569-4587).
gcataattgtttctataat

SEQ ID NO: 308652 - DNA, 19 bp, Homo sapiens
  siRNA target sequence for DRIM (NM_014503.1,4577-4595).
gtttctataatctagagtt

SEQ ID NO: 308653 - DNA, 19 bp, Homo sapiens
  siRNA target sequence for DRIM (NM_014503.1,4593-4611).
gttaggagatatgagttta

SEQ ID NO: 308654 - DNA, 19 bp, Homo sapiens
  siRNA target sequence for DRIM (NM_014503.1,4598-4616).
gagatatgagtttaagtga

SEQ ID NO: 308655 - DNA, 19 bp, Homo sapiens
  siRNA target sequence for DRIM (NM_014503.1,4632-4650).
cctgatgagtatcatcaaa

SEQ ID NO: 308656 - DNA, 19 bp, Homo sapiens
  siRNA target sequence for DRIM (NM_014503.1,4758-4776).
gcaggattataccacaata

SEQ ID NO: 308657 - DNA, 19 bp, Homo sapiens
  siRNA target sequence for DRIM (NM_014503.1,4761-4779).
ggattataccacaatactt

SEQ ID NO: 308658 - DNA, 19 bp, Homo sapiens
  siRNA target sequence for DRIM (NM_014503.1,4802-4820).
caaaccaactggaattcaa

SEQ ID NO: 308659 - DNA, 19 bp, Homo sapiens
  siRNA target sequence for DRIM (NM_014503.1,4824-4842).
cttggtacaacttactcat

SEQ ID NO: 308660 - DNA, 19 bp, Homo sapiens
  siRNA target sequence for DRIM (NM_014503.1,4901-4919).
gagcaagagccttgaagaa

SEQ ID NO: 308661 - DNA, 19 bp, Homo sapiens
  siRNA target sequence for DRIM (NM_014503.1,4967-4985).
ctcttcagaattacatcat

SEQ ID NO: 308662 - DNA, 19 bp, Homo sapiens
  siRNA target sequence for DRIM (NM_014503.1,5066-5084).
gagccatttgcaaacatct

SEQ ID NO: 308663 - DNA, 19 bp, Homo sapiens
  siRNA target sequence for DRIM (NM_014503.1,5087-5105).
cttggtcagcgtatatgta

SEQ ID NO: 308664 - DNA, 19 bp, Homo sapiens
  siRNA target sequence for DRIM (NM_014503.1,5090-5108).
ggtcagcgtatatgtatta

SEQ ID NO: 308665 - DNA, 19 bp, Homo sapiens
  siRNA target sequence for DRIM (NM_014503.1,5095-5113).
gcgtatatgtattacttga

SEQ ID NO: 308666 - DNA, 19 bp, Homo sapiens
  siRNA target sequence for DRIM (NM_014503.1,5096-5114).
cgtatatgtattacttgaa

SEQ ID NO: 308667 - DNA, 19 bp, Homo sapiens
  siRNA target sequence for DRIM (NM_014503.1,5138-5156).
cgggacagatcaatcaaaa

SEQ ID NO: 308668 - DNA, 19 bp, Homo sapiens
  siRNA target sequence for DRIM (NM_014503.1,5224-5242).
caaatgggaaaaattgaga

SEQ ID NO: 308669 - DNA, 19 bp, Homo sapiens
  siRNA target sequence for DRIM (NM_014503.1,5280-5298).
gcctgaggccatggaatta

SEQ ID NO: 308670 - DNA, 19 bp, Homo sapiens
  siRNA target sequence for DRIM (NM_014503.1,5489-5507).
ccataaccggggatattct

SEQ ID NO: 308671 - DNA, 19 bp, Homo sapiens
  siRNA target sequence for DRIM (NM_014503.1,5527-5545).
cttgcatctacgactaaaa

SEQ ID NO: 308672 - DNA, 19 bp, Homo sapiens
  siRNA target sequence for DRIM (NM_014503.1,5562-5580).
gcttgtcaagtcaaaggtt

SEQ ID NO: 308673 - DNA, 19 bp, Homo sapiens
  siRNA target sequence for DRIM (NM_014503.1,5568-5586).
caagtcaaaggttgtgaat

SEQ ID NO: 308674 - DNA, 19 bp, Homo sapiens
  siRNA target sequence for DRIM (NM_014503.1,5598-5616).
cgttcgagttccattagct

SEQ ID NO: 308675 - DNA, 19 bp, Homo sapiens
  siRNA target sequence for DRIM (NM_014503.1,5599-5617).
gttcgagttccattagctt

SEQ ID NO: 308676 - DNA, 19 bp, Homo sapiens
  siRNA target sequence for DRIM (NM_014503.1,5741-5759).
gcagcactcttgcgaaaat

SEQ ID NO: 308677 - DNA, 19 bp, Homo sapiens
  siRNA target sequence for DRIM (NM_014503.1,5744-5762).
gcactcttgcgaaaataat

SEQ ID NO: 308678 - DNA, 19 bp, Homo sapiens
  siRNA target sequence for DRIM (NM_014503.1,5745-5763).
cactcttgcgaaaataata

SEQ ID NO: 308679 - DNA, 19 bp, Homo sapiens
  siRNA target sequence for DRIM (NM_014503.1,5747-5765).
ctcttgcgaaaataataga

SEQ ID NO: 308680 - DNA, 19 bp, Homo sapiens
  siRNA target sequence for DRIM (NM_014503.1,5869-5887).
ctgcaaggcctcaccaata

SEQ ID NO: 308681 - DNA, 19 bp, Homo sapiens
  siRNA target sequence for DRIM (NM_014503.1,5907-5925).
ggactcttgtttagatata

SEQ ID NO: 308682 - DNA, 19 bp, Homo sapiens
  siRNA target sequence for DRIM (NM_014503.1,5908-5926).
gactcttgtttagatataa

SEQ ID NO: 308683 - DNA, 19 bp, Homo sapiens
  siRNA target sequence for DRIM (NM_014503.1,5928-5946).
gattgagatttttaaccat

SEQ ID NO: 308684 - DNA, 19 bp, Homo sapiens
  siRNA target sequence for DRIM (NM_014503.1,6020-6038).
gcaaaagttacgactctta

SEQ ID NO: 308685 - DNA, 19 bp, Homo sapiens
  siRNA target sequence for DRIM (NM_014503.1,6021-6039).
caaaagttacgactcttat

SEQ ID NO: 308686 - DNA, 19 bp, Homo sapiens
  siRNA target sequence for DRIM (NM_014503.1,6026-6044).
gttacgactcttatgaaat

SEQ ID NO: 308687 - DNA, 19 bp, Homo sapiens
  siRNA target sequence for DRIM (NM_014503.1,6061-6079).
ggaaaagatcaggttacaa

SEQ ID NO: 308688 - DNA, 19 bp, Homo sapiens
  siRNA target sequence for DRIM (NM_014503.1,6067-6085).
gatcaggttacaaaactca

SEQ ID NO: 308689 - DNA, 19 bp, Homo sapiens
  siRNA target sequence for DRIM (NM_014503.1,6135-6153).
ccggaaagttcatgaaact

SEQ ID NO: 308690 - DNA, 19 bp, Homo sapiens
  siRNA target sequence for DRIM (NM_014503.1,6195-6213).
gacagctgaatccattcta

SEQ ID NO: 308691 - DNA, 19 bp, Homo sapiens
  siRNA target sequence for DRIM (NM_014503.1,6197-6215).
cagctgaatccattctatt

SEQ ID NO: 308692 - DNA, 19 bp, Homo sapiens
  siRNA target sequence for DRIM (NM_014503.1,6200-6218).
ctgaatccattctattact

SEQ ID NO: 308693 - DNA, 19 bp, Homo sapiens
  siRNA target sequence for DRIM (NM_014503.1,6206-6224).
ccattctattactcagtta

SEQ ID NO: 308694 - DNA, 19 bp, Homo sapiens
  siRNA target sequence for DRIM (NM_014503.1,6238-6256).
gaaaatcttcccctgttaa

SEQ ID NO: 308695 - DNA, 19 bp, Homo sapiens
  siRNA target sequence for DRIM (NM_014503.1,6444-6462).
caagtcttcaggtgaatgt

SEQ ID NO: 308696 - DNA, 19 bp, Homo sapiens
  siRNA target sequence for DRIM (NM_014503.1,6468-6486).
ggaaatgctggatcctttt

SEQ ID NO: 308697 - DNA, 19 bp, Homo sapiens
  siRNA target sequence for DRIM (NM_014503.1,6487-6505).
gtgtctctcctcatagact

SEQ ID NO: 308698 - DNA, 19 bp, Homo sapiens
  siRNA target sequence for DRIM (NM_014503.1,6570-6588).
gttcccgctaccttccata

SEQ ID NO: 308699 - DNA, 19 bp, Homo sapiens
  siRNA target sequence for DRIM (NM_014503.1,6573-6591).
cccgctaccttccatagaa

SEQ ID NO: 308700 - DNA, 19 bp, Homo sapiens
  siRNA target sequence for DRIM (NM_014503.1,6675-6693).
ccaccttgtggtcaattgt

SEQ ID NO: 308701 - DNA, 19 bp, Homo sapiens
  siRNA target sequence for DRIM (NM_014503.1,6676-6694).
caccttgtggtcaattgtt

SEQ ID NO: 308702 - DNA, 19 bp, Homo sapiens
  siRNA target sequence for DRIM (NM_014503.1,6701-6719).
gtgtgaccatacttgtcaa

SEQ ID NO: 308703 - DNA, 19 bp, Homo sapiens
  siRNA target sequence for DRIM (NM_014503.1,6729-6747).
gtcttaccagataactgaa

SEQ ID NO: 308704 - DNA, 19 bp, Homo sapiens
  siRNA target sequence for DRIM (NM_014503.1,6731-6749).
cttaccagataactgaaaa

SEQ ID NO: 308705 - DNA, 19 bp, Homo sapiens
  siRNA target sequence for DRIM (NM_014503.1,6820-6838).
ggtcttctgaaggcaattt

SEQ ID NO: 308706 - DNA, 19 bp, Homo sapiens
  siRNA target sequence for DRIM (NM_014503.1,6852-6870).
gttggtcccagaaatcgat

SEQ ID NO: 308707 - DNA, 19 bp, Homo sapiens
  siRNA target sequence for DRIM (NM_014503.1,6935-6953).
gtagacaggtttttctgaa

SEQ ID NO: 308708 - DNA, 19 bp, Homo sapiens
  siRNA target sequence for DRIM (NM_014503.1,6989-7007).
gaccaaacttggaattcat

SEQ ID NO: 308709 - DNA, 19 bp, Homo sapiens
  siRNA target sequence for DRIM (NM_014503.1,7005-7023).
catgctcgctcaactgaat

SEQ ID NO: 308710 - DNA, 19 bp, Homo sapiens
  siRNA target sequence for DRIM (NM_014503.1,7011-7029).
cgctcaactgaattacgaa

SEQ ID NO: 308711 - DNA, 19 bp, Homo sapiens
  siRNA target sequence for DRIM (NM_014503.1,7043-7061).
gagagtccaccttggaaat

SEQ ID NO: 308712 - DNA, 19 bp, Homo sapiens
  siRNA target sequence for DRIM (NM_014503.1,7057-7075).
gaaatgatcgcctatctct

SEQ ID NO: 308713 - DNA, 19 bp, Homo sapiens
  siRNA target sequence for DRIM (NM_014503.1,7136-7154).
gtctaatgacgatcaatga

SEQ ID NO: 308714 - DNA, 19 bp, Homo sapiens
  siRNA target sequence for DRIM (NM_014503.1,7156-7174).
gactctgccacgtgcaaaa

SEQ ID NO: 308715 - DNA, 19 bp, Homo sapiens
  siRNA target sequence for DRIM (NM_014503.1,7194-7212).
caagtccctacttggtaaa

SEQ ID NO: 308716 - DNA, 19 bp, Homo sapiens
  siRNA target sequence for DRIM (NM_014503.1,7265-7283).
gagcaaaaaagcgcttaaa

SEQ ID NO: 308717 - DNA, 19 bp, Homo sapiens
  siRNA target sequence for DRIM (NM_014503.1,7275-7293).
gcgcttaaatagacaactt

SEQ ID NO: 308718 - DNA, 19 bp, Homo sapiens
  siRNA target sequence for DRIM (NM_014503.1,7438-7456).
gatcgccttctgtttagtt

SEQ ID NO: 308719 - DNA, 19 bp, Homo sapiens
  siRNA target sequence for DRIM (NM_014503.1,7442-7460).
gccttctgtttagttttct

SEQ ID NO: 308720 - DNA, 19 bp, Homo sapiens
  siRNA target sequence for DRIM (NM_014503.1,7463-7481).
cactgataactaaacttat

SEQ ID NO: 308721 - DNA, 19 bp, Homo sapiens
  siRNA target sequence for DRIM (NM_014503.1,7508-7526).
ccaaacccgctgagacttt

SEQ ID NO: 308722 - DNA, 19 bp, Homo sapiens
  siRNA target sequence for DRIM (NM_014503.1,7514-7532).
ccgctgagactttgagtaa

SEQ ID NO: 308723 - DNA, 19 bp, Homo sapiens
  siRNA target sequence for DRIM (NM_014503.1,7515-7533).
cgctgagactttgagtaaa

SEQ ID NO: 308724 - DNA, 19 bp, Homo sapiens
  siRNA target sequence for DRIM (NM_014503.1,7585-7603).
ctcacagcagcccagattt

SEQ ID NO: 308725 - DNA, 19 bp, Homo sapiens
  siRNA target sequence for DRIM (NM_014503.1,7597-7615).
cagatttttggattactct

SEQ ID NO: 308726 - DNA, 19 bp, Homo sapiens
  siRNA target sequence for DRIM (NM_014503.1,7599-7617).
gatttttggattactcttt

SEQ ID NO: 308727 - DNA, 19 bp, Homo sapiens
  siRNA target sequence for DRIM (NM_014503.1,7625-7643).
gccagccagaggagcttat

SEQ ID NO: 308728 - DNA, 19 bp, Homo sapiens
  siRNA target sequence for DRIM (NM_014503.1,7636-7654).
gagcttattcaaaaatgga

SEQ ID NO: 308729 - DNA, 19 bp, Homo sapiens
  siRNA target sequence for DRIM (NM_014503.1,7639-7657).
cttattcaaaaatggaata

SEQ ID NO: 308730 - DNA, 19 bp, Homo sapiens
  siRNA target sequence for DRIM (NM_014503.1,7709-7727).
ccagtgaccttgaccaaaa

SEQ ID NO: 308731 - DNA, 19 bp, Homo sapiens
  siRNA target sequence for DRIM (NM_014503.1,7712-7730).
gtgaccttgaccaaaagat

SEQ ID NO: 308732 - DNA, 19 bp, Homo sapiens
  siRNA target sequence for DRIM (NM_014503.1,7744-7762).
ctcgcctcttgccatcaat

SEQ ID NO: 308733 - DNA, 19 bp, Homo sapiens
  siRNA target sequence for DRIM (NM_014503.1,7755-7773).
ccatcaattgcattccaaa

SEQ ID NO: 308734 - DNA, 19 bp, Homo sapiens
  siRNA target sequence for DRIM (NM_014503.1,8054-8072).
cgccgagaaaccccttaaa

SEQ ID NO: 308735 - DNA, 19 bp, Homo sapiens
  siRNA target sequence for DRIM (NM_014503.1,8116-8134).
cttgggatagacaaggtaa

SEQ ID NO: 308736 - DNA, 19 bp, Homo sapiens
  siRNA target sequence for DRIM (NM_014503.1,8151-8169).
gatcatagctcctttgttt

SEQ ID NO: 308737 - DNA, 19 bp, Homo sapiens
  siRNA target sequence for DRIM (NM_014503.1,8173-8191).
gaactcaacagcacctatt

SEQ ID NO: 308738 - DNA, 19 bp, Homo sapiens
  siRNA target sequence for DRIM (NM_014503.1,8257-8275).
gggcttgagagcttctcat

SEQ ID NO: 308739 - DNA, 19 bp, Homo sapiens
  siRNA target sequence for DRIM (NM_014503.1,8279-8297).
cctttgcctctgtacagaa

SEQ ID NO: 308740 - DNA, 19 bp, Homo sapiens
  siRNA target sequence for DRIM (NM_014503.1,8280-8298).
ctttgcctctgtacagaaa

SEQ ID NO: 308741 - DNA, 19 bp, Homo sapiens
  siRNA target sequence for DRIM (NM_014503.1,8293-8311).
cagaaacaggctaatgaga

SEQ ID NO: 308742 - DNA, 19 bp, Homo sapiens
  siRNA target sequence for DRIM (NM_014503.1,8340-8358).
cctggagtttgtaactaat

SEQ ID NO: 308743 - DNA, 19 bp, Homo sapiens
  siRNA target sequence for DRIM (NM_014503.1,8343-8361).
ggagtttgtaactaatcct

SEQ ID NO: 308744 - DNA, 19 bp, Homo sapiens
  siRNA target sequence for DRIM (NM_014503.1,8430-8448).
gttcctgcgtccaggatat

SEQ ID NO: 308745 - DNA, 19 bp, Homo sapiens
  siRNA target sequence for DRIM (NM_014503.1,8468-8486).
gccatagcctgaaagattt

SEQ ID NO: 308746 - DNA, 19 bp, Homo sapiens
  siRNA target sequence for EMP3 (NM_001425.1,376-394).
gaacaacgacaccaaaaca

SEQ ID NO: 308747 - DNA, 19 bp, Homo sapiens
  siRNA target sequence for EMP3 (NM_001425.1,393-411).
catgggcctgcagtaatgt

SEQ ID NO: 308748 - DNA, 19 bp, Homo sapiens
  siRNA target sequence for EMP3 (NM_001425.1,562-580).
cagcgtggcggtgtttact

SEQ ID NO: 308749 - DNA, 19 bp, Homo sapiens
  siRNA target sequence for GPNMB (NM_002510.1,153-171).
ccgccaaacgatttcatga

SEQ ID NO: 308750 - DNA, 19 bp, Homo sapiens
  siRNA target sequence for GPNMB (NM_002510.1,154-172).
cgccaaacgatttcatgat

SEQ ID NO: 308751 - DNA, 19 bp, Homo sapiens
  siRNA target sequence for GPNMB (NM_002510.1,156-174).
ccaaacgatttcatgatgt

SEQ ID NO: 308752 - DNA, 19 bp, Homo sapiens
  siRNA target sequence for GPNMB (NM_002510.1,248-266).
gactggaatgaaaaactct

SEQ ID NO: 308753 - DNA, 19 bp, Homo sapiens
  siRNA target sequence for GPNMB (NM_002510.1,353-371).
gccctcgtgggctcaaata

SEQ ID NO: 308754 - DNA, 19 bp, Homo sapiens
  siRNA target sequence for GPNMB (NM_002510.1,354-372).
ccctcgtgggctcaaatat

SEQ ID NO: 308755 - DNA, 19 bp, Homo sapiens
  siRNA target sequence for GPNMB (NM_002510.1,355-373).
cctcgtgggctcaaatata

SEQ ID NO: 308756 - DNA, 19 bp, Homo sapiens
  siRNA target sequence for GPNMB (NM_002510.1,356-374).
ctcgtgggctcaaatataa

SEQ ID NO: 308757 - DNA, 19 bp, Homo sapiens
  siRNA target sequence for GPNMB (NM_002510.1,358-376).
cgtgggctcaaatataaca

SEQ ID NO: 308758 - DNA, 19 bp, Homo sapiens
  siRNA target sequence for GPNMB (NM_002510.1,359-377).
gtgggctcaaatataacat

SEQ ID NO: 308759 - DNA, 19 bp, Homo sapiens
  siRNA target sequence for GPNMB (NM_002510.1,419-437).
gccaatggcaacatagtct

SEQ ID NO: 308760 - DNA, 19 bp, Homo sapiens
  siRNA target sequence for GPNMB (NM_002510.1,421-439).
caatggcaacatagtctat

SEQ ID NO: 308761 - DNA, 19 bp, Homo sapiens
  siRNA target sequence for GPNMB (NM_002510.1,426-444).
gcaacatagtctatgagaa

SEQ ID NO: 308762 - DNA, 19 bp, Homo sapiens
  siRNA target sequence for GPNMB (NM_002510.1,451-469).
cagaaatgaggctggttta

SEQ ID NO: 308763 - DNA, 19 bp, Homo sapiens
  siRNA target sequence for GPNMB (NM_002510.1,534-552).
ccggccaaagccatcataa

SEQ ID NO: 308764 - DNA, 19 bp, Homo sapiens
  siRNA target sequence for GPNMB (NM_002510.1,584-602).
caccccggatggagaagat

SEQ ID NO: 308765 - DNA, 19 bp, Homo sapiens
  siRNA target sequence for GPNMB (NM_002510.1,633-651).
gtcagtatttccagaaatt

SEQ ID NO: 308766 - DNA, 19 bp, Homo sapiens
  siRNA target sequence for GPNMB (NM_002510.1,646-664).
gaaattgggacgatgttca

SEQ ID NO: 308767 - DNA, 19 bp, Homo sapiens
  siRNA target sequence for GPNMB (NM_002510.1,735-753).
gacatggacgggcatatgt

SEQ ID NO: 308768 - DNA, 19 bp, Homo sapiens
  siRNA target sequence for GPNMB (NM_002510.1,756-774).
ccatcgcacaagtgaaaga

SEQ ID NO: 308769 - DNA, 19 bp, Homo sapiens
  siRNA target sequence for GPNMB (NM_002510.1,762-780).
cacaagtgaaagatgtgta

SEQ ID NO: 308770 - DNA, 19 bp, Homo sapiens
  siRNA target sequence for GPNMB (NM_002510.1,781-799).
cgtggtaacagatcagatt

SEQ ID NO: 308771 - DNA, 19 bp, Homo sapiens
  siRNA target sequence for GPNMB (NM_002510.1,800-818).
cctgtgtttgtgactatgt

SEQ ID NO: 308772 - DNA, 19 bp, Homo sapiens
  siRNA target sequence for GPNMB (NM_002510.1,823-841).
gaagaacgatcgaaattca

SEQ ID NO: 308773 - DNA, 19 bp, Homo sapiens
  siRNA target sequence for GPNMB (NM_002510.1,847-865).
cgaaaccttcctcaaagat

SEQ ID NO: 308774 - DNA, 19 bp, Homo sapiens
  siRNA target sequence for GPNMB (NM_002510.1,899-917).
cctagccacttcctcaatt

SEQ ID NO: 308775 - DNA, 19 bp, Homo sapiens
  siRNA target sequence for GPNMB (NM_002510.1,900-918).
ctagccacttcctcaatta

SEQ ID NO: 308776 - DNA, 19 bp, Homo sapiens
  siRNA target sequence for GPNMB (NM_002510.1,910-928).
cctcaattattctaccatt

SEQ ID NO: 308777 - DNA, 19 bp, Homo sapiens
  siRNA target sequence for GPNMB (NM_002510.1,911-929).
ctcaattattctaccatta

SEQ ID NO: 308778 - DNA, 19 bp, Homo sapiens
  siRNA target sequence for GPNMB (NM_002510.1,940-958).
gagcttcggggataatact

SEQ ID NO: 308779 - DNA, 19 bp, Homo sapiens
  siRNA target sequence for GPNMB (NM_002510.1,1191-1209).
ccaccatcacaattgtaga

SEQ ID NO: 308780 - DNA, 19 bp, Homo sapiens
  siRNA target sequence for GPNMB (NM_002510.1,1200-1218).
caattgtagagggaatctt

SEQ ID NO: 308781 - DNA, 19 bp, Homo sapiens
  siRNA target sequence for GPNMB (NM_002510.1,1267-1285).
gcctgaaagctccctaata

SEQ ID NO: 308782 - DNA, 19 bp, Homo sapiens
  siRNA target sequence for GPNMB (NM_002510.1,1275-1293).
gctccctaatagactttgt

SEQ ID NO: 308783 - DNA, 19 bp, Homo sapiens
  siRNA target sequence for GPNMB (NM_002510.1,1321-1339).
ggaggtctgtaccatcatt

SEQ ID NO: 308784 - DNA, 19 bp, Homo sapiens
  siRNA target sequence for GPNMB (NM_002510.1,1322-1340).
gaggtctgtaccatcattt

SEQ ID NO: 308785 - DNA, 19 bp, Homo sapiens
  siRNA target sequence for GPNMB (NM_002510.1,1492-1510).
gagcaccctgatttctgtt

SEQ ID NO: 308786 - DNA, 19 bp, Homo sapiens
  siRNA target sequence for GPNMB (NM_002510.1,1524-1542).
cagcctcgcctttaaggat

SEQ ID NO: 308787 - DNA, 19 bp, Homo sapiens
  siRNA target sequence for GPNMB (NM_002510.1,1600-1618).
cctcttggtgtacaaaaaa

SEQ ID NO: 308788 - DNA, 19 bp, Homo sapiens
  siRNA target sequence for GPNMB (NM_002510.1,1630-1648).
caacccaatagaaaatagt

SEQ ID NO: 308789 - DNA, 19 bp, Homo sapiens
  siRNA target sequence for GPNMB (NM_002510.1,1654-1672).
gaatgtggtcagaagcaaa

SEQ ID NO: 308790 - DNA, 19 bp, Homo sapiens
  siRNA target sequence for GPNMB (NM_002510.1,1674-1692).
gcctgagtgtctttctcaa

SEQ ID NO: 308791 - DNA, 19 bp, Homo sapiens
  siRNA target sequence for GPNMB (NM_002510.1,1695-1713).
gtgcaaaagccgtgttctt

SEQ ID NO: 308792 - DNA, 19 bp, Homo sapiens
  siRNA target sequence for LDOC1 (NM_012317.2,257-275).
gcccttccccgaaacgttt

SEQ ID NO: 308793 - DNA, 19 bp, Homo sapiens
  siRNA target sequence for LDOC1 (NM_012317.2,259-277).
ccttccccgaaacgtttaa

SEQ ID NO: 308794 - DNA, 19 bp, Homo sapiens
  siRNA target sequence for LDOC1 (NM_012317.2,260-278).
cttccccgaaacgtttaat

SEQ ID NO: 308795 - DNA, 19 bp, Homo sapiens
  siRNA target sequence for LDOC1 (NM_012317.2,309-327).
gtgcagacggcgtcttaca

SEQ ID NO: 308796 - DNA, 19 bp, Homo sapiens
  siRNA target sequence for LDOC1 (NM_012317.2,362-380).
catgaaggtggcattccta

SEQ ID NO: 308797 - DNA, 19 bp, Homo sapiens
  siRNA target sequence for LDOC1 (NM_012317.2,420-438).
ccctacatcgagatggata

SEQ ID NO: 308798 - DNA, 19 bp, Homo sapiens
  siRNA target sequence for MDM4 (NM_002393.1,175-193).
ctcctggacaaatcaatca

SEQ ID NO: 308799 - DNA, 19 bp, Homo sapiens
  siRNA target sequence for MDM4 (NM_002393.1,188-206).
caatcaggtacgaccaaaa

SEQ ID NO: 308800 - DNA, 19 bp, Homo sapiens
  siRNA target sequence for MDM4 (NM_002393.1,207-225).
ctgccgcttttgaagattt

SEQ ID NO: 308801 - DNA, 19 bp, Homo sapiens
  siRNA target sequence for MDM4 (NM_002393.1,211-229).
cgcttttgaagattttgca

SEQ ID NO: 308802 - DNA, 19 bp, Homo sapiens
  siRNA target sequence for MDM4 (NM_002393.1,237-255).
ggtgcgcaaggtgaaatgt

SEQ ID NO: 308803 - DNA, 19 bp, Homo sapiens
  siRNA target sequence for MDM4 (NM_002393.1,246-264).
ggtgaaatgttcactgtta

SEQ ID NO: 308804 - DNA, 19 bp, Homo sapiens
  siRNA target sequence for MDM4 (NM_002393.1,269-287).
ggtcatgcactatttaggt

SEQ ID NO: 308805 - DNA, 19 bp, Homo sapiens
  siRNA target sequence for MDM4 (NM_002393.1,299-317).
ggtgaagcaactttatgat

SEQ ID NO: 308806 - DNA, 19 bp, Homo sapiens
  siRNA target sequence for MDM4 (NM_002393.1,323-341).
ggagcagcatatggtatat

SEQ ID NO: 308807 - DNA, 19 bp, Homo sapiens
  siRNA target sequence for MDM4 (NM_002393.1,324-342).
gagcagcatatggtatatt

SEQ ID NO: 308808 - DNA, 19 bp, Homo sapiens
  siRNA target sequence for MDM4 (NM_002393.1,326-344).
gcagcatatggtatattgt

SEQ ID NO: 308809 - DNA, 19 bp, Homo sapiens
  siRNA target sequence for MDM4 (NM_002393.1,403-421).
gccctctctatgatatgct

SEQ ID NO: 308810 - DNA, 19 bp, Homo sapiens
  siRNA target sequence for MDM4 (NM_002393.1,404-422).
ccctctctatgatatgcta

SEQ ID NO: 308811 - DNA, 19 bp, Homo sapiens
  siRNA target sequence for MDM4 (NM_002393.1,408-426).
ctctatgatatgctaagaa

SEQ ID NO: 308812 - DNA, 19 bp, Homo sapiens
  siRNA target sequence for MDM4 (NM_002393.1,488-506).
ggatcacagtatggatatt

SEQ ID NO: 308813 - DNA, 19 bp, Homo sapiens
  siRNA target sequence for MDM4 (NM_002393.1,562-580).
gaactacagaagacgatat

SEQ ID NO: 308814 - DNA, 19 bp, Homo sapiens
  siRNA target sequence for MDM4 (NM_002393.1,595-613).
cctcagagcataaatgcat

SEQ ID NO: 308815 - DNA, 19 bp, Homo sapiens
  siRNA target sequence for MDM4 (NM_002393.1,667-685).
ctaggctggaccttggatt

SEQ ID NO: 308816 - DNA, 19 bp, Homo sapiens
  siRNA target sequence for MDM4 (NM_002393.1,707-725).
cctgccttggtggttttta

SEQ ID NO: 308817 - DNA, 19 bp, Homo sapiens
  siRNA target sequence for MDM4 (NM_002393.1,710-728).
gccttggtggtttttagga

SEQ ID NO: 308818 - DNA, 19 bp, Homo sapiens
  siRNA target sequence for MDM4 (NM_002393.1,711-729).
ccttggtggtttttaggaa

SEQ ID NO: 308819 - DNA, 19 bp, Homo sapiens
  siRNA target sequence for MDM4 (NM_002393.1,740-758).
caactatacacctagaagt

SEQ ID NO: 308820 - DNA, 19 bp, Homo sapiens
  siRNA target sequence for MDM4 (NM_002393.1,757-775).
gtaatggctcaactgattt

SEQ ID NO: 308821 - DNA, 19 bp, Homo sapiens
  siRNA target sequence for MDM4 (NM_002393.1,762-780).
ggctcaactgatttacaga

SEQ ID NO: 308822 - DNA, 19 bp, Homo sapiens
  siRNA target sequence for MDM4 (NM_002393.1,794-812).
gggtactgccattgtttca

SEQ ID NO: 308823 - DNA, 19 bp, Homo sapiens
  siRNA target sequence for MDM4 (NM_002393.1,796-814).
gtactgccattgtttcaga

SEQ ID NO: 308824 - DNA, 19 bp, Homo sapiens
  siRNA target sequence for MDM4 (NM_002393.1,865-883).
gtgttggaataaaagttga

SEQ ID NO: 308825 - DNA, 19 bp, Homo sapiens
  siRNA target sequence for MDM4 (NM_002393.1,963-981).
gacctggaggactctaagt

SEQ ID NO: 308826 - DNA, 19 bp, Homo sapiens
  siRNA target sequence for MDM4 (NM_002393.1,969-987).
gaggactctaagtccttaa

SEQ ID NO: 308827 - DNA, 19 bp, Homo sapiens
  siRNA target sequence for MDM4 (NM_002393.1,974-992).
ctctaagtccttaagtgat

SEQ ID NO: 308828 - DNA, 19 bp, Homo sapiens
  siRNA target sequence for MDM4 (NM_002393.1,988-1006).
gtgatgataccgatgtaga

SEQ ID NO: 308829 - DNA, 19 bp, Homo sapiens
  siRNA target sequence for MDM4 (NM_002393.1,1064-1082).
caagaggtactgttttcgt

SEQ ID NO: 308830 - DNA, 19 bp, Homo sapiens
  siRNA target sequence for MDM4 (NM_002393.1,1100-1118).
ggattggtattcagattgt

SEQ ID NO: 308831 - DNA, 19 bp, Homo sapiens
  siRNA target sequence for MDM4 (NM_002393.1,1101-1119).
gattggtattcagattgtt

SEQ ID NO: 308832 - DNA, 19 bp, Homo sapiens
  siRNA target sequence for MDM4 (NM_002393.1,1120-1138).
caaagttaacccattctct

SEQ ID NO: 308833 - DNA, 19 bp, Homo sapiens
  siRNA target sequence for MDM4 (NM_002393.1,1137-1155).
ctctccacgtctgatatca

SEQ ID NO: 308834 - DNA, 19 bp, Homo sapiens
  siRNA target sequence for MDM4 (NM_002393.1,1139-1157).
ctccacgtctgatatcact

SEQ ID NO: 308835 - DNA, 19 bp, Homo sapiens
  siRNA target sequence for MDM4 (NM_002393.1,1156-1174).
ctgccatacctgaaaagga

SEQ ID NO: 308836 - DNA, 19 bp, Homo sapiens
  siRNA target sequence for MDM4 (NM_002393.1,1231-1249).
gacctaaagatgcgtatat

SEQ ID NO: 308837 - DNA, 19 bp, Homo sapiens
  siRNA target sequence for MDM4 (NM_002393.1,1233-1251).
cctaaagatgcgtatataa

SEQ ID NO: 308838 - DNA, 19 bp, Homo sapiens
  siRNA target sequence for MDM4 (NM_002393.1,1234-1252).
ctaaagatgcgtatataaa

SEQ ID NO: 308839 - DNA, 19 bp, Homo sapiens
  siRNA target sequence for MDM4 (NM_002393.1,1348-1366).
gagaacagttagataacct

SEQ ID NO: 308840 - DNA, 19 bp, Homo sapiens
  siRNA target sequence for MDM4 (NM_002393.1,1350-1368).
gaacagttagataaccttt

SEQ ID NO: 308841 - DNA, 19 bp, Homo sapiens
  siRNA target sequence for MDM4 (NM_002393.1,1415-1433).
cttgaagccatgtagctta

SEQ ID NO: 308842 - DNA, 19 bp, Homo sapiens
  siRNA target sequence for MDM4 (NM_002393.1,1418-1436).
gaagccatgtagcttatgt

SEQ ID NO: 308843 - DNA, 19 bp, Homo sapiens
  siRNA target sequence for MDM4 (NM_002393.1,1446-1464).
ccacgagacgggaacatta

SEQ ID NO: 308844 - DNA, 19 bp, Homo sapiens
  siRNA target sequence for MDM4 (NM_002393.1,1447-1465).
cacgagacgggaacattat

SEQ ID NO: 308845 - DNA, 19 bp, Homo sapiens
  siRNA target sequence for MDM4 (NM_002393.1,1485-1503).
cttgtcacttgttttcact

SEQ ID NO: 308846 - DNA, 19 bp, Homo sapiens
  siRNA target sequence for MDM4 (NM_002393.1,1500-1518).
cactgtgccagaagactaa

SEQ ID NO: 308847 - DNA, 19 bp, Homo sapiens
  siRNA target sequence for MDM4 (NM_002393.1,1531-1549).
cttcatgccctatttgcaa

SEQ ID NO: 308848 - DNA, 19 bp, Homo sapiens
  siRNA target sequence for MDM4 (NM_002393.1,1554-1572).
gagattcagctggttatta

SEQ ID NO: 308849 - DNA, 19 bp, Homo sapiens
  siRNA target sequence for MDM4 (NM_002393.1,1560-1578).
cagctggttattaaggttt

SEQ ID NO: 308850 - DNA, 19 bp, Homo sapiens
  siRNA target sequence for NCK2 (NM_003581.1,163-181).
caacaggacgggctatgta

SEQ ID NO: 308851 - DNA, 19 bp, Homo sapiens
  siRNA target sequence for NCK2 (NM_003581.1,727-745).
gtggtggaaatgcaaaaat

SEQ ID NO: 308852 - DNA, 19 bp, Homo sapiens
  siRNA target sequence for NCK2 (NM_003581.1,818-836).
gcgcacgccccacagataa

SEQ ID NO: 308853 - DNA, 19 bp, Homo sapiens
  siRNA target sequence for NCK2 (NM_003581.1,985-1003).
cttctccgtgtcccttaaa

SEQ ID NO: 308854 - DNA, 19 bp, Homo sapiens
  siRNA target sequence for PMP22 (NM_000304.2,276-294).
cgatcgtcagccaatggat

SEQ ID NO: 308855 - DNA, 19 bp, Homo sapiens
  siRNA target sequence for PMP22 (NM_000304.2,301-319).
caatggacacgcaactgat

SEQ ID NO: 308856 - DNA, 19 bp, Homo sapiens
  siRNA target sequence for PMP22 (NM_000304.2,351-369).
gaaatgtccaccactgttt

SEQ ID NO: 308857 - DNA, 19 bp, Homo sapiens
  siRNA target sequence for PMP22 (NM_000304.2,504-522).
ctggaatcttccaaattct

SEQ ID NO: 308858 - DNA, 19 bp, Homo sapiens
  siRNA target sequence for PMP22 (NM_000304.2,581-599).
catctcaactcggattact

SEQ ID NO: 308859 - DNA, 19 bp, Homo sapiens
  siRNA target sequence for RARRES1 (NM_002888.1,232-250).
gcgcttcacttcttcaact

SEQ ID NO: 308860 - DNA, 19 bp, Homo sapiens
  siRNA target sequence for RARRES1 (NM_002888.1,306-324).
cgcgtggattaatccaaaa

SEQ ID NO: 308861 - DNA, 19 bp, Homo sapiens
  siRNA target sequence for RARRES1 (NM_002888.1,362-380).
gctacaacccagagtcttt

SEQ ID NO: 308862 - DNA, 19 bp, Homo sapiens
  siRNA target sequence for RARRES1 (NM_002888.1,363-381).
ctacaacccagagtcttta

SEQ ID NO: 308863 - DNA, 19 bp, Homo sapiens
  siRNA target sequence for RARRES1 (NM_002888.1,366-384).
caacccagagtctttactt

SEQ ID NO: 308864 - DNA, 19 bp, Homo sapiens
  siRNA target sequence for RARRES1 (NM_002888.1,397-415).
ggacgtttggggaaatgtt

SEQ ID NO: 308865 - DNA, 19 bp, Homo sapiens
  siRNA target sequence for RARRES1 (NM_002888.1,416-434).
ctgctcgagtgtttttcaa

SEQ ID NO: 308866 - DNA, 19 bp, Homo sapiens
  siRNA target sequence for RARRES1 (NM_002888.1,418-436).
gctcgagtgtttttcaaga

SEQ ID NO: 308867 - DNA, 19 bp, Homo sapiens
  siRNA target sequence for RARRES1 (NM_002888.1,419-437).
ctcgagtgtttttcaagaa

SEQ ID NO: 308868 - DNA, 19 bp, Homo sapiens
  siRNA target sequence for RARRES1 (NM_002888.1,422-440).
gagtgtttttcaagaatca

SEQ ID NO: 308869 - DNA, 19 bp, Homo sapiens
  siRNA target sequence for RARRES1 (NM_002888.1,424-442).
gtgtttttcaagaatcaga

SEQ ID NO: 308870 - DNA, 19 bp, Homo sapiens
  siRNA target sequence for RARRES1 (NM_002888.1,446-464).
ccagaccaaccatcaatgt

SEQ ID NO: 308871 - DNA, 19 bp, Homo sapiens
  siRNA target sequence for RARRES1 (NM_002888.1,447-465).
cagaccaaccatcaatgta

SEQ ID NO: 308872 - DNA, 19 bp, Homo sapiens
  siRNA target sequence for RARRES1 (NM_002888.1,451-469).
ccaaccatcaatgtaactt

SEQ ID NO: 308873 - DNA, 19 bp, Homo sapiens
  siRNA target sequence for RARRES1 (NM_002888.1,456-474).
catcaatgtaacttgtaca

SEQ ID NO: 308874 - DNA, 19 bp, Homo sapiens
  siRNA target sequence for RARRES1 (NM_002888.1,639-657).
cgtgatgtgggaaatgaca

SEQ ID NO: 308875 - DNA, 19 bp, Homo sapiens
  siRNA target sequence for RARRES1 (NM_002888.1,640-658).
gtgatgtgggaaatgacaa

SEQ ID NO: 308876 - DNA, 19 bp, Homo sapiens
  siRNA target sequence for RARRES1 (NM_002888.1,659-677).
cacaggtgtcacactacta

SEQ ID NO: 308877 - DNA, 19 bp, Homo sapiens
  siRNA target sequence for RARRES1 (NM_002888.1,661-679).
caggtgtcacactactact

SEQ ID NO: 308878 - DNA, 19 bp, Homo sapiens
  siRNA target sequence for TP53I11 (NM_006034.2,348-366).
gtgcatcgctccaagatca

SEQ ID NO: 308879 - DNA, 19 bp, Homo sapiens
  siRNA target sequence for TP53I11 (NM_006034.2,606-624).
gagaaggtcatcattcgat

SEQ ID NO: 308880 - DNA, 19 bp, Homo sapiens
  siRNA target sequence for TP53I11 (NM_006034.2,757-775).
gcatttactactattacca

SEQ ID NO: 308881 - DNA, 19 bp, Homo sapiens
  siRNA target sequence for AMSH (NM_006463.2,298-316).
ccgctctggagttgagatt

SEQ ID NO: 308882 - DNA, 19 bp, Homo sapiens
  siRNA target sequence for AMSH (NM_006463.2,299-317).
cgctctggagttgagatta

SEQ ID NO: 308883 - DNA, 19 bp, Homo sapiens
  siRNA target sequence for AMSH (NM_006463.2,300-318).
gctctggagttgagattat

SEQ ID NO: 308884 - DNA, 19 bp, Homo sapiens
  siRNA target sequence for AMSH (NM_006463.2,339-357).
ctgaggaaggcaacattga

SEQ ID NO: 308885 - DNA, 19 bp, Homo sapiens
  siRNA target sequence for AMSH (NM_006463.2,382-400).
gtatatcacgctctttatt

SEQ ID NO: 308886 - DNA, 19 bp, Homo sapiens
  siRNA target sequence for AMSH (NM_006463.2,390-408).
cgctctttattgagaaact

SEQ ID NO: 308887 - DNA, 19 bp, Homo sapiens
  siRNA target sequence for AMSH (NM_006463.2,391-409).
gctctttattgagaaacta

SEQ ID NO: 308888 - DNA, 19 bp, Homo sapiens
  siRNA target sequence for AMSH (NM_006463.2,512-530).
gagctgttaaaacgatata

SEQ ID NO: 308889 - DNA, 19 bp, Homo sapiens
  siRNA target sequence for AMSH (NM_006463.2,524-542).
cgatataccaaagaatata

SEQ ID NO: 308890 - DNA, 19 bp, Homo sapiens
  siRNA target sequence for AMSH (NM_006463.2,803-821).
gatgtgttccccaccttaa

SEQ ID NO: 308891 - DNA, 19 bp, Homo sapiens
  siRNA target sequence for AMSH (NM_006463.2,817-835).
cttaacagtctcatccata

SEQ ID NO: 308892 - DNA, 19 bp, Homo sapiens
  siRNA target sequence for AMSH (NM_006463.2,883-901).
ggtggacaggtccttgaaa

SEQ ID NO: 308893 - DNA, 19 bp, Homo sapiens
  siRNA target sequence for AMSH (NM_006463.2,1245-1263).
gctcttaccagatgatgtt

SEQ ID NO: 308894 - DNA, 19 bp, Homo sapiens
  siRNA target sequence for AMSH (NM_006463.2,1268-1286).
gagtcagtagccattgttt

SEQ ID NO: 308895 - DNA, 19 bp, Homo sapiens
  siRNA target sequence for AMSH (NM_006463.2,1311-1329).
gattctttaaactaactga

SEQ ID NO: 308896 - DNA, 19 bp, Homo sapiens
  siRNA target sequence for AMSH (NM_006463.2,1354-1372).
ctgtcgccagaaaggattt

SEQ ID NO: 308897 - DNA, 19 bp, Homo sapiens
  siRNA target sequence for EDN1 (NM_001955.2,367-385).
gctcgtccctgatggataa

SEQ ID NO: 308898 - DNA, 19 bp, Homo sapiens
  siRNA target sequence for EDN1 (NM_001955.2,368-386).
ctcgtccctgatggataaa

SEQ ID NO: 308899 - DNA, 19 bp, Homo sapiens
  siRNA target sequence for EDN1 (NM_001955.2,370-388).
cgtccctgatggataaaga

SEQ ID NO: 308900 - DNA, 19 bp, Homo sapiens
  siRNA target sequence for EDN1 (NM_001955.2,551-569).
caagaagtgctggaatttt

SEQ ID NO: 308901 - DNA, 19 bp, Homo sapiens
  siRNA target sequence for EDN1 (NM_001955.2,611-629).
gaaagactggaataatcat

SEQ ID NO: 308902 - DNA, 19 bp, Homo sapiens
  siRNA target sequence for EDN1 (NM_001955.2,650-668).
caagcttgggaaaaagtgt

SEQ ID NO: 308903 - DNA, 19 bp, Homo sapiens
  siRNA target sequence for EDN1 (NM_001955.2,755-773).
cagcgtcaaatcatctttt

SEQ ID NO: 308904 - DNA, 19 bp, Homo sapiens
  siRNA target sequence for FGA (NM_000508.2,186-204).
gcccttctgctctgatgaa

SEQ ID NO: 308905 - DNA, 19 bp, Homo sapiens
  siRNA target sequence for FGA (NM_000508.2,249-267).
gattgatgaagtcaatcaa

SEQ ID NO: 308906 - DNA, 19 bp, Homo sapiens
  siRNA target sequence for FGA (NM_000508.2,259-277).
gtcaatcaagattttacaa

SEQ ID NO: 308907 - DNA, 19 bp, Homo sapiens
  siRNA target sequence for FGA (NM_000508.2,337-355).
cattcgttgaccactaata

SEQ ID NO: 308908 - DNA, 19 bp, Homo sapiens
  siRNA target sequence for FGA (NM_000508.2,341-359).
cgttgaccactaatataat

SEQ ID NO: 308909 - DNA, 19 bp, Homo sapiens
  siRNA target sequence for FGA (NM_000508.2,386-404).
cagccaataaccgtgataa

SEQ ID NO: 308910 - DNA, 19 bp, Homo sapiens
  siRNA target sequence for FGA (NM_000508.2,388-406).
gccaataaccgtgataata

SEQ ID NO: 308911 - DNA, 19 bp, Homo sapiens
  siRNA target sequence for FGA (NM_000508.2,453-471).
gaagcgcaaagtcatagaa

SEQ ID NO: 308912 - DNA, 19 bp, Homo sapiens
  siRNA target sequence for FGA (NM_000508.2,509-527).
gagctcagttggttgatat

SEQ ID NO: 308913 - DNA, 19 bp, Homo sapiens
  siRNA target sequence for FGA (NM_000508.2,511-529).
gctcagttggttgatatga

SEQ ID NO: 308914 - DNA, 19 bp, Homo sapiens
  siRNA target sequence for FGA (NM_000508.2,537-555).
ggaggtggacattgatatt

SEQ ID NO: 308915 - DNA, 19 bp, Homo sapiens
  siRNA target sequence for FGA (NM_000508.2,596-614).
ctcgtgaagtagatctgaa

SEQ ID NO: 308916 - DNA, 19 bp, Homo sapiens
  siRNA target sequence for FGA (NM_000508.2,648-666).
ggtcattgccaaagactta

SEQ ID NO: 308917 - DNA, 19 bp, Homo sapiens
  siRNA target sequence for FGA (NM_000508.2,651-669).
cattgccaaagacttactt

SEQ ID NO: 308918 - DNA, 19 bp, Homo sapiens
  siRNA target sequence for FGA (NM_000508.2,663-681).
cttacttccctctagagat

SEQ ID NO: 308919 - DNA, 19 bp, Homo sapiens
  siRNA target sequence for FGA (NM_000508.2,674-692).
ctagagataggcaacactt

SEQ ID NO: 308920 - DNA, 19 bp, Homo sapiens
  siRNA target sequence for FGA (NM_000508.2,688-706).
cacttaccactgataaaaa

SEQ ID NO: 308921 - DNA, 19 bp, Homo sapiens
  siRNA target sequence for FGA (NM_000508.2,721-739).
gacttggttcccggaaatt

SEQ ID NO: 308922 - DNA, 19 bp, Homo sapiens
  siRNA target sequence for FGA (NM_000508.2,847-865).
ggctccacctcttatggaa

SEQ ID NO: 308923 - DNA, 19 bp, Homo sapiens
  siRNA target sequence for FGA (NM_000508.2,1180-1198).
ggacaatggcactctgaat

SEQ ID NO: 308924 - DNA, 19 bp, Homo sapiens
  siRNA target sequence for FGA (NM_000508.2,1232-1250).
ggaacgcgaggcctaacaa

SEQ ID NO: 308925 - DNA, 19 bp, Homo sapiens
  siRNA target sequence for FGA (NM_000508.2,1275-1293).
ggtgtcaggaaatgtaagt

SEQ ID NO: 308926 - DNA, 19 bp, Homo sapiens
  siRNA target sequence for FGA (NM_000508.2,1354-1372).
ctcaggactggtaaagaga

SEQ ID NO: 308927 - DNA, 19 bp, Homo sapiens
  siRNA target sequence for FGA (NM_000508.2,1401-1419).
gcgtcgttcatgctctaaa

SEQ ID NO: 308928 - DNA, 19 bp, Homo sapiens
  siRNA target sequence for FGA (NM_000508.2,1412-1430).
gctctaaaaccgttactaa

SEQ ID NO: 308929 - DNA, 19 bp, Homo sapiens
  siRNA target sequence for FGA (NM_000508.2,1447-1465).
gatggtcacaaagaagtta

SEQ ID NO: 308930 - DNA, 19 bp, Homo sapiens
  siRNA target sequence for FGA (NM_000508.2,1500-1518).
ctgtcccgaggcaatggat

SEQ ID NO: 308931 - DNA, 19 bp, Homo sapiens
  siRNA target sequence for FGA (NM_000508.2,1515-1533).
ggatttaggcacattgtct

SEQ ID NO: 308932 - DNA, 19 bp, Homo sapiens
  siRNA target sequence for FGA (NM_000508.2,1634-1652).
ctatgttaggagagtttgt

SEQ ID NO: 308933 - DNA, 19 bp, Homo sapiens
  siRNA target sequence for FGA (NM_000508.2,1665-1683).
gtctaggggctcagaatct

SEQ ID NO: 308934 - DNA, 19 bp, Homo sapiens
  siRNA target sequence for FGA (NM_000508.2,1886-1904).
ccaagagaggccatgctaa

SEQ ID NO: 308935 - DNA, 19 bp, Homo sapiens
  siRNA target sequence for FGA (NM_000508.2,1890-1908).
gagaggccatgctaaatct

SEQ ID NO: 308936 - DNA, 19 bp, Homo sapiens
  siRNA target sequence for FGA (NM_000508.2,1984-2002).
ctaccgggatccagtaaga

SEQ ID NO: 308937 - DNA, 19 bp, Homo sapiens
  siRNA target sequence for FGA (NM_000508.2,2009-2027).
ctgtttattgcgatcaaga

SEQ ID NO: 308938 - DNA, 19 bp, Homo sapiens
  siRNA target sequence for FGA (NM_000508.2,2067-2085).
ggatggatcactgaatttt

SEQ ID NO: 308939 - DNA, 19 bp, Homo sapiens
  siRNA target sequence for FGA (NM_000508.2,2114-2132).
gtttcggcagcctgaatga

SEQ ID NO: 308940 - DNA, 19 bp, Homo sapiens
  siRNA target sequence for FGA (NM_000508.2,2164-2182).
gactacctccacttactaa

SEQ ID NO: 308941 - DNA, 19 bp, Homo sapiens
  siRNA target sequence for FGA (NM_000508.2,2195-2213).
ctgttcttagggttgaatt

SEQ ID NO: 308942 - DNA, 19 bp, Homo sapiens
  siRNA target sequence for FGA (NM_000508.2,2237-2255).
cttatgcagaatatcactt

SEQ ID NO: 308943 - DNA, 19 bp, Homo sapiens
  siRNA target sequence for FGA (NM_000508.2,2421-2439).
gaactgtgcagaagtctat

SEQ ID NO: 308944 - DNA, 19 bp, Homo sapiens
  siRNA target sequence for FGA (NM_000508.2,2519-2537).
ggaataacagtccttatga

SEQ ID NO: 308945 - DNA, 19 bp, Homo sapiens
  siRNA target sequence for FGA (NM_000508.2,2553-2571).
ggtctgggtttcctttaga

SEQ ID NO: 308946 - DNA, 19 bp, Homo sapiens
  siRNA target sequence for FGA (NM_000508.2,2592-2610).
ggctgttcgcatgaaaatt

SEQ ID NO: 308947 - DNA, 19 bp, Homo sapiens
  siRNA target sequence for FGA (NM_000508.2,2593-2611).
gctgttcgcatgaaaatta

SEQ ID NO: 308948 - DNA, 19 bp, Homo sapiens
  siRNA target sequence for FGB (NM_005141.1,53-71).
gaaacatctattattgcta

SEQ ID NO: 308949 - DNA, 19 bp, Homo sapiens
  siRNA target sequence for FGB (NM_005141.1,147-165).
cgaccccttgacaagaaga

SEQ ID NO: 308950 - DNA, 19 bp, Homo sapiens
  siRNA target sequence for FGB (NM_005141.1,341-359).
gttgcaagaggctttgcta

SEQ ID NO: 308951 - DNA, 19 bp, Homo sapiens
  siRNA target sequence for FGB (NM_005141.1,370-388).
ggccaatcagaaatagtgt

SEQ ID NO: 308952 - DNA, 19 bp, Homo sapiens
  siRNA target sequence for FGB (NM_005141.1,436-454).
cttcctttcagtacatgta

SEQ ID NO: 308953 - DNA, 19 bp, Homo sapiens
  siRNA target sequence for FGB (NM_005141.1,488-506).
gcaagtaaaagataatgaa

SEQ ID NO: 308954 - DNA, 19 bp, Homo sapiens
  siRNA target sequence for FGB (NM_005141.1,711-729).
gtggtgtctggcaaagaat

SEQ ID NO: 308955 - DNA, 19 bp, Homo sapiens
  siRNA target sequence for FGB (NM_005141.1,713-731).
ggtgtctggcaaagaatgt

SEQ ID NO: 308956 - DNA, 19 bp, Homo sapiens
  siRNA target sequence for FGB (NM_005141.1,763-781).
ctgaaatgtatctcattca

SEQ ID NO: 308957 - DNA, 19 bp, Homo sapiens
  siRNA target sequence for FGB (NM_005141.1,793-811).
ctgtcaaaccgtatagagt

SEQ ID NO: 308958 - DNA, 19 bp, Homo sapiens
  siRNA target sequence for FGB (NM_005141.1,795-813).
gtcaaaccgtatagagtat

SEQ ID NO: 308959 - DNA, 19 bp, Homo sapiens
  siRNA target sequence for FGB (NM_005141.1,860-878).
ccgtcaagacggtagtgtt

SEQ ID NO: 308960 - DNA, 19 bp, Homo sapiens
  siRNA target sequence for FGB (NM_005141.1,889-907).
ggaaatgggatccatataa

SEQ ID NO: 308961 - DNA, 19 bp, Homo sapiens
  siRNA target sequence for FGB (NM_005141.1,890-908).
gaaatgggatccatataaa

SEQ ID NO: 308962 - DNA, 19 bp, Homo sapiens
  siRNA target sequence for FGB (NM_005141.1,932-950).
caacacagatgggaagaat

SEQ ID NO: 308963 - DNA, 19 bp, Homo sapiens
  siRNA target sequence for FGB (NM_005141.1,957-975).
ggcctaccaggtgaatatt

SEQ ID NO: 308964 - DNA, 19 bp, Homo sapiens
  siRNA target sequence for FGB (NM_005141.1,1015-1033).
gacccacagaacttttgat

SEQ ID NO: 308965 - DNA, 19 bp, Homo sapiens
  siRNA target sequence for FGB (NM_005141.1,1078-1096).
gaggattcactgtacagaa

SEQ ID NO: 308966 - DNA, 19 bp, Homo sapiens
  siRNA target sequence for FGB (NM_005141.1,1192-1210).
ggaccatgaccattcacaa

SEQ ID NO: 308967 - DNA, 19 bp, Homo sapiens
  siRNA target sequence for FGB (NM_005141.1,1226-1244).
cacgtatgacagagacaat

SEQ ID NO: 308968 - DNA, 19 bp, Homo sapiens
  siRNA target sequence for FGB (NM_005141.1,1241-1259).
caatgacggctggttaaca

SEQ ID NO: 308969 - DNA, 19 bp, Homo sapiens
  siRNA target sequence for FGB (NM_005141.1,1247-1265).
cggctggttaacatcagat

SEQ ID NO: 308970 - DNA, 19 bp, Homo sapiens
  siRNA target sequence for FGB (NM_005141.1,1267-1285).
ccagaaaacagtgttctaa

SEQ ID NO: 308971 - DNA, 19 bp, Homo sapiens
  siRNA target sequence for FGB (NM_005141.1,1299-1317).
ggatggtggtataatagat

SEQ ID NO: 308972 - DNA, 19 bp, Homo sapiens
  siRNA target sequence for FGB (NM_005141.1,1318-1336).
gtcatgcagccaatccaaa

SEQ ID NO: 308973 - DNA, 19 bp, Homo sapiens
  siRNA target sequence for FGB (NM_005141.1,1332-1350).
ccaaacggcagatactact

SEQ ID NO: 308974 - DNA, 19 bp, Homo sapiens
  siRNA target sequence for FGB (NM_005141.1,1398-1416).
ggtgtagtatggatgaatt

SEQ ID NO: 308975 - DNA, 19 bp, Homo sapiens
  siRNA target sequence for FGB (NM_005141.1,1422-1440).
gggtcatggtactcaatga

SEQ ID NO: 308976 - DNA, 19 bp, Homo sapiens
  siRNA target sequence for FGFR1OP (NM_007045.2,288-306).
ccaaagacggtcgtttagt

SEQ ID NO: 308977 - DNA, 19 bp, Homo sapiens
  siRNA target sequence for FGFR1OP (NM_007045.2,409-427).
gaatttagcccgagattta

SEQ ID NO: 308978 - DNA, 19 bp, Homo sapiens
  siRNA target sequence for FGFR1OP (NM_007045.2,452-470).
gtgggtggacccttattat

SEQ ID NO: 308979 - DNA, 19 bp, Homo sapiens
  siRNA target sequence for FGFR1OP (NM_007045.2,454-472).
gggtggacccttattatta

SEQ ID NO: 308980 - DNA, 19 bp, Homo sapiens
  siRNA target sequence for FGFR1OP (NM_007045.2,456-474).
gtggacccttattattaga

SEQ ID NO: 308981 - DNA, 19 bp, Homo sapiens
  siRNA target sequence for FGFR1OP (NM_007045.2,483-501).
ggcgctgtcaacagaaaga

SEQ ID NO: 308982 - DNA, 19 bp, Homo sapiens
  siRNA target sequence for FGFR1OP (NM_007045.2,521-539).
gaaggtgcacttgatctat

SEQ ID NO: 308983 - DNA, 19 bp, Homo sapiens
  siRNA target sequence for FGFR1OP (NM_007045.2,525-543).
gtgcacttgatctatctga

SEQ ID NO: 308984 - DNA, 19 bp, Homo sapiens
  siRNA target sequence for FGFR1OP (NM_007045.2,533-551).
gatctatctgatgtacatt

SEQ ID NO: 308985 - DNA, 19 bp, Homo sapiens
  siRNA target sequence for FGFR1OP (NM_007045.2,612-630).
ggtataaaggacaaggtaa

SEQ ID NO: 308986 - DNA, 19 bp, Homo sapiens
  siRNA target sequence for FGFR1OP (NM_007045.2,679-697).
ggccaatcagagtgataca

SEQ ID NO: 308987 - DNA, 19 bp, Homo sapiens
  siRNA target sequence for FGFR1OP (NM_007045.2,680-698).
gccaatcagagtgatacaa

SEQ ID NO: 308988 - DNA, 19 bp, Homo sapiens
  siRNA target sequence for FGFR1OP (NM_007045.2,867-885).
ctaagccagagaaaactta

SEQ ID NO: 308989 - DNA, 19 bp, Homo sapiens
  siRNA target sequence for FGFR1OP (NM_007045.2,936-954).
cggatgcaccccccttaaa

SEQ ID NO: 308990 - DNA, 19 bp, Homo sapiens
  siRNA target sequence for FGFR1OP (NM_007045.2,937-955).
ggatgcaccccccttaaaa

SEQ ID NO: 308991 - DNA, 19 bp, Homo sapiens
  siRNA target sequence for FGFR1OP (NM_007045.2,938-956).
gatgcaccccccttaaaaa

SEQ ID NO: 308992 - DNA, 19 bp, Homo sapiens
  siRNA target sequence for FGFR1OP (NM_007045.2,973-991).
ggcgggagccccttcttta

SEQ ID NO: 308993 - DNA, 19 bp, Homo sapiens
  siRNA target sequence for FGFR1OP (NM_007045.2,974-992).
gcgggagccccttctttaa

SEQ ID NO: 308994 - DNA, 19 bp, Homo sapiens
  siRNA target sequence for FGFR1OP (NM_007045.2,978-996).
gagccccttctttaaaaga

SEQ ID NO: 308995 - DNA, 19 bp, Homo sapiens
  siRNA target sequence for FGFR1OP (NM_007045.2,980-998).
gccccttctttaaaagact

SEQ ID NO: 308996 - DNA, 19 bp, Homo sapiens
  siRNA target sequence for FGFR1OP (NM_007045.2,1034-1052).
ctgaaattgatcagtgata

SEQ ID NO: 308997 - DNA, 19 bp, Homo sapiens
  siRNA target sequence for FGFR1OP (NM_007045.2,1251-1269).
gtgatgttgcggattatct

SEQ ID NO: 308998 - DNA, 19 bp, Homo sapiens
  siRNA target sequence for FGG (NM_000509.3,141-159).
ctgctgcatcttagatgaa

SEQ ID NO: 308999 - DNA, 19 bp, Homo sapiens
  siRNA target sequence for FGG (NM_000509.3,157-175).
gaaagattcggtagttatt

SEQ ID NO: 309000 - DNA, 19 bp, Homo sapiens
  siRNA target sequence for FGG (NM_000509.3,207-225).
gtctacttatcaaaccaaa

SEQ ID NO: 309001 - DNA, 19 bp, Homo sapiens
  siRNA target sequence for FGG (NM_000509.3,249-267).
ggaagacatcttacatcaa

SEQ ID NO: 309002 - DNA, 19 bp, Homo sapiens
  siRNA target sequence for FGG (NM_000509.3,358-376).
gacgctgctactttgaagt

SEQ ID NO: 309003 - DNA, 19 bp, Homo sapiens
  siRNA target sequence for FGG (NM_000509.3,402-420).
gaaatatgaagcatcgatt

SEQ ID NO: 309004 - DNA, 19 bp, Homo sapiens
  siRNA target sequence for FGG (NM_000509.3,427-445).
catgactcaagtattcgat

SEQ ID NO: 309005 - DNA, 19 bp, Homo sapiens
  siRNA target sequence for FGG (NM_000509.3,430-448).
gactcaagtattcgatatt

SEQ ID NO: 309006 - DNA, 19 bp, Homo sapiens
  siRNA target sequence for FGG (NM_000509.3,434-452).
caagtattcgatatttgca

SEQ ID NO: 309007 - DNA, 19 bp, Homo sapiens
  siRNA target sequence for FGG (NM_000509.3,442-460).
cgatatttgcaggaaatat

SEQ ID NO: 309008 - DNA, 19 bp, Homo sapiens
  siRNA target sequence for FGG (NM_000509.3,545-563).
cggtgcaaatccatgatat

SEQ ID NO: 309009 - DNA, 19 bp, Homo sapiens
  siRNA target sequence for FGG (NM_000509.3,559-577).
gatatcactgggaaagatt

SEQ ID NO: 309010 - DNA, 19 bp, Homo sapiens
  siRNA target sequence for FGG (NM_000509.3,569-587).
ggaaagattgtcaagacat

SEQ ID NO: 309011 - DNA, 19 bp, Homo sapiens
  siRNA target sequence for FGG (NM_000509.3,570-588).
gaaagattgtcaagacatt

SEQ ID NO: 309012 - DNA, 19 bp, Homo sapiens
  siRNA target sequence for FGG (NM_000509.3,611-629).
gcgggctttactttattaa

SEQ ID NO: 309013 - DNA, 19 bp, Homo sapiens
  siRNA target sequence for FGG (NM_000509.3,612-630).
cgggctttactttattaaa

SEQ ID NO: 309014 - DNA, 19 bp, Homo sapiens
  siRNA target sequence for FGG (NM_000509.3,641-659).
ctaaccagcaattcttagt

SEQ ID NO: 309015 - DNA, 19 bp, Homo sapiens
  siRNA target sequence for FGG (NM_000509.3,672-690).
cgatgggtctggaaatgga

SEQ ID NO: 309016 - DNA, 19 bp, Homo sapiens
  siRNA target sequence for FGG (NM_000509.3,673-691).
gatgggtctggaaatggat

SEQ ID NO: 309017 - DNA, 19 bp, Homo sapiens
  siRNA target sequence for FGG (NM_000509.3,712-730).
cttgatggcagtgtagatt

SEQ ID NO: 309018 - DNA, 19 bp, Homo sapiens
  siRNA target sequence for FGG (NM_000509.3,778-796).
cctactggcacaacagaat

SEQ ID NO: 309019 - DNA, 19 bp, Homo sapiens
  siRNA target sequence for FGG (NM_000509.3,841-859).
gccatcccatatgcattaa

SEQ ID NO: 309020 - DNA, 19 bp, Homo sapiens
  siRNA target sequence for FGG (NM_000509.3,923-941).
gacctgaagctgacaagta

SEQ ID NO: 309021 - DNA, 19 bp, Homo sapiens
  siRNA target sequence for FGG (NM_000509.3,936-954).
caagtaccgcctaacatat

SEQ ID NO: 309022 - DNA, 19 bp, Homo sapiens
  siRNA target sequence for FGG (NM_000509.3,1012-1030).
gatcctagtgacaagtttt

SEQ ID NO: 309023 - DNA, 19 bp, Homo sapiens
  siRNA target sequence for FGG (NM_000509.3,1015-1033).
cctagtgacaagtttttca

SEQ ID NO: 309024 - DNA, 19 bp, Homo sapiens
  siRNA target sequence for FGG (NM_000509.3,1145-1163).
gccatctcaatggagttta

SEQ ID NO: 309025 - DNA, 19 bp, Homo sapiens
  siRNA target sequence for FGG (NM_000509.3,1167-1185).
ccaaggtggcacttactca

SEQ ID NO: 309026 - DNA, 19 bp, Homo sapiens
  siRNA target sequence for FGG (NM_000509.3,1168-1186).
caaggtggcacttactcaa

SEQ ID NO: 309027 - DNA, 19 bp, Homo sapiens
  siRNA target sequence for FGG (NM_000509.3,1174-1192).
ggcacttactcaaaagcat

SEQ ID NO: 309028 - DNA, 19 bp, Homo sapiens
  siRNA target sequence for FGG (NM_000509.3,1243-1261).
cggtggtattccatgaaga

SEQ ID NO: 309029 - DNA, 19 bp, Homo sapiens
  siRNA target sequence for FGG (NM_021870.1,1356-1374).
ccctgcggaaacagaatat

SEQ ID NO: 309030 - DNA, 19 bp, Homo sapiens
  siRNA target sequence for FGG (NM_021870.1,1360-1378).
gcggaaacagaatatgact

SEQ ID NO: 309031 - DNA, 19 bp, Homo sapiens
  siRNA target sequence for SAS (NM_005981.2,198-216).
ctctcaacgtggtctacat

SEQ ID NO: 309032 - DNA, 19 bp, Homo sapiens
  siRNA target sequence for SAS (NM_005981.2,286-304).
catcatcggcggagtcatt

SEQ ID NO: 309033 - DNA, 19 bp, Homo sapiens
  siRNA target sequence for SAS (NM_005981.2,371-389).
gtcctgctgttcttttaca

SEQ ID NO: 309034 - DNA, 19 bp, Homo sapiens
  siRNA target sequence for SAS (NM_005981.2,374-392).
ctgctgttcttttacatga

SEQ ID NO: 309035 - DNA, 19 bp, Homo sapiens
  siRNA target sequence for SAS (NM_005981.2,536-554).
gattgttgtggcttattca

SEQ ID NO: 309036 - DNA, 19 bp, Homo sapiens
  siRNA target sequence for SAS (NM_005981.2,556-574).
cctcacaaccctgtatcaa

SEQ ID NO: 309037 - DNA, 19 bp, Homo sapiens
  siRNA target sequence for SAS (NM_005981.2,564-582).
ccctgtatcaacaagatta

SEQ ID NO: 309038 - DNA, 19 bp, Homo sapiens
  siRNA target sequence for SAS (NM_005981.2,565-583).
cctgtatcaacaagattat

SEQ ID NO: 309039 - DNA, 19 bp, Homo sapiens
  siRNA target sequence for SAS (NM_005981.2,568-586).
gtatcaacaagattatgat

SEQ ID NO: 309040 - DNA, 19 bp, Homo sapiens
  siRNA target sequence for SAS (NM_005981.2,631-649).
gtgtggagaaaagtttctt

SEQ ID NO: 309041 - DNA, 19 bp, Homo sapiens
  siRNA target sequence for SAS (NM_005981.2,766-784).
caaccccagtgcctttcta

SEQ ID NO: 309042 - DNA, 19 bp, Homo sapiens
  siRNA target sequence for TBC1D8 (NM_007063.2,793-811).
gagcacagaatgagttctt

SEQ ID NO: 309043 - DNA, 19 bp, Homo sapiens
  siRNA target sequence for TBC1D8 (NM_007063.2,1022-1040).
gctgccgcatcccatcatt

SEQ ID NO: 309044 - DNA, 19 bp, Homo sapiens
  siRNA target sequence for TBC1D8 (NM_007063.2,1181-1199).
ggcttcactcgtgtttcat

SEQ ID NO: 309045 - DNA, 19 bp, Homo sapiens
  siRNA target sequence for TBC1D8 (NM_007063.2,1188-1206).
ctcgtgtttcattcaacaa

SEQ ID NO: 309046 - DNA, 19 bp, Homo sapiens
  siRNA target sequence for TBC1D8 (NM_007063.2,1230-1248).
ggggatcttgaaatgatgt

SEQ ID NO: 309047 - DNA, 19 bp, Homo sapiens
  siRNA target sequence for TBC1D8 (NM_007063.2,1410-1428).
ggcagaaccgtgtgtatgt

SEQ ID NO: 309048 - DNA, 19 bp, Homo sapiens
  siRNA target sequence for TBC1D8 (NM_007063.2,1427-1445).
gtttcgcacagagaagatt

SEQ ID NO: 309049 - DNA, 19 bp, Homo sapiens
  siRNA target sequence for TBC1D8 (NM_007063.2,1528-1546).
cctcacaccctggttacta

SEQ ID NO: 309050 - DNA, 19 bp, Homo sapiens
  siRNA target sequence for TBC1D8 (NM_007063.2,1646-1664).
gaacgaaacgggaattgct

SEQ ID NO: 309051 - DNA, 19 bp, Homo sapiens
  siRNA target sequence for TBC1D8 (NM_007063.2,1807-1825).
ggatgctgcccgattactt

SEQ ID NO: 309052 - DNA, 19 bp, Homo sapiens
  siRNA target sequence for TBC1D8 (NM_007063.2,2128-2146).
ggtttctagatcacattaa

SEQ ID NO: 309053 - DNA, 19 bp, Homo sapiens
  siRNA target sequence for TBC1D8 (NM_007063.2,2211-2229).
ccctaccctgtgactgata

SEQ ID NO: 309054 - DNA, 19 bp, Homo sapiens
  siRNA target sequence for TBC1D8 (NM_007063.2,2213-2231).
ctaccctgtgactgatatt

SEQ ID NO: 309055 - DNA, 19 bp, Homo sapiens
  siRNA target sequence for TBC1D8 (NM_007063.2,2237-2255).
cctgatccgggattcctat

SEQ ID NO: 309056 - DNA, 19 bp, Homo sapiens
  siRNA target sequence for TBC1D8 (NM_007063.2,2246-2264).
ggattcctatgagaaattt

SEQ ID NO: 309057 - DNA, 19 bp, Homo sapiens
  siRNA target sequence for TBC1D8 (NM_007063.2,2372-2390).
cccggaagtctcaattctt

SEQ ID NO: 309058 - DNA, 19 bp, Homo sapiens
  siRNA target sequence for TBC1D8 (NM_007063.2,2406-2424).
gagctctacgacttattca

SEQ ID NO: 309059 - DNA, 19 bp, Homo sapiens
  siRNA target sequence for TBC1D8 (NM_007063.2,2409-2427).
ctctacgacttattcaaga

SEQ ID NO: 309060 - DNA, 19 bp, Homo sapiens
  siRNA target sequence for TBC1D8 (NM_007063.2,2417-2435).
cttattcaagagagaacat

SEQ ID NO: 309061 - DNA, 19 bp, Homo sapiens
  siRNA target sequence for TBC1D8 (NM_007063.2,2655-2673).
gtgagctgcctcgatatta

SEQ ID NO: 309062 - DNA, 19 bp, Homo sapiens
  siRNA target sequence for TBC1D8 (NM_007063.2,2659-2677).
gctgcctcgatattatgta

SEQ ID NO: 309063 - DNA, 19 bp, Homo sapiens
  siRNA target sequence for TBC1D8 (NM_007063.2,2660-2678).
ctgcctcgatattatgtat

SEQ ID NO: 309064 - DNA, 19 bp, Homo sapiens
  siRNA target sequence for TBC1D8 (NM_007063.2,2662-2680).
gcctcgatattatgtataa

SEQ ID NO: 309065 - DNA, 19 bp, Homo sapiens
  siRNA target sequence for TBC1D8 (NM_007063.2,2791-2809).
catcgagacccctggtttt

SEQ ID NO: 309066 - DNA, 19 bp, Homo sapiens
  siRNA target sequence for TBC1D8 (NM_007063.2,2847-2865).
cagctgaagcagatgatta

SEQ ID NO: 309067 - DNA, 19 bp, Homo sapiens
  siRNA target sequence for TBC1D8 (NM_007063.2,3196-3214).
ctgtctcccttgaacatat

SEQ ID NO: 309068 - DNA, 19 bp, Homo sapiens
  siRNA target sequence for TBC1D8 (NM_007063.2,3232-3250).
ctgaacagtcattagtcaa

SEQ ID NO: 309069 - DNA, 19 bp, Homo sapiens
  siRNA target sequence for TBC1D8 (NM_007063.2,3306-3324).
cagtacaatctcaaaactt

SEQ ID NO: 309070 - DNA, 19 bp, Homo sapiens
  siRNA target sequence for TBC1D8 (NM_007063.2,3338-3356).
ccaatcacaatctgaactt

SEQ ID NO: 309071 - DNA, 19 bp, Homo sapiens
  siRNA target sequence for TBC1D8 (NM_007063.2,3339-3357).
caatcacaatctgaactta

SEQ ID NO: 309072 - DNA, 19 bp, Homo sapiens
  siRNA target sequence for TBC1D8 (NM_007063.2,3343-3361).
cacaatctgaacttaagct

SEQ ID NO: 309073 - DNA, 19 bp, Homo sapiens
  siRNA target sequence for BST2 (NM_004335.2,13-31).
gcatctacttcgtatgact

SEQ ID NO: 309074 - DNA, 19 bp, Homo sapiens
  siRNA target sequence for BST2 (NM_004335.2,57-75).
ggataagcgctgtaagctt

SEQ ID NO: 309075 - DNA, 19 bp, Homo sapiens
  siRNA target sequence for BST2 (NM_004335.2,73-91).
cttctgctggggataggaa

SEQ ID NO: 309076 - DNA, 19 bp, Homo sapiens
  siRNA target sequence for BST2 (NM_004335.2,122-140).
gggtgcccttgattatctt

SEQ ID NO: 309077 - DNA, 19 bp, Homo sapiens
  siRNA target sequence for BST2 (NM_004335.2,361-379).
ggagagatcactacattaa

SEQ ID NO: 309078 - DNA, 19 bp, Homo sapiens
  siRNA target sequence for BST2 (NM_004335.2,366-384).
gatcactacattaaaccat

SEQ ID NO: 309079 - DNA, 19 bp, Homo sapiens
  siRNA target sequence for C6orf108 (NM_006443.2,472-490).
ccctgctggatcgatactt

SEQ ID NO: 309080 - DNA, 19 bp, Homo sapiens
  siRNA target sequence for DAB2 (NM_001343.1,147-165).
gtctaacgaagtagaaaca

SEQ ID NO: 309081 - DNA, 19 bp, Homo sapiens
  siRNA target sequence for DAB2 (NM_001343.1,350-368).
gccaagactctatgatgaa

SEQ ID NO: 309082 - DNA, 19 bp, Homo sapiens
  siRNA target sequence for DAB2 (NM_001343.1,351-369).
ccaagactctatgatgaaa

SEQ ID NO: 309083 - DNA, 19 bp, Homo sapiens
  siRNA target sequence for DAB2 (NM_001343.1,396-414).
gtctcagggacaacacaaa

SEQ ID NO: 309084 - DNA, 19 bp, Homo sapiens
  siRNA target sequence for DAB2 (NM_001343.1,474-492).
ggtaatagagcatgaacat

SEQ ID NO: 309085 - DNA, 19 bp, Homo sapiens
  siRNA target sequence for DAB2 (NM_001343.1,483-501).
gcatgaacatccagtaaat

SEQ ID NO: 309086 - DNA, 19 bp, Homo sapiens
  siRNA target sequence for DAB2 (NM_001343.1,532-550).
gacaaccgggcatttggtt

SEQ ID NO: 309087 - DNA, 19 bp, Homo sapiens
  siRNA target sequence for DAB2 (NM_001343.1,600-618).
gcaacaggctgaaccatta

SEQ ID NO: 309088 - DNA, 19 bp, Homo sapiens
  siRNA target sequence for DAB2 (NM_001343.1,606-624).
ggctgaaccattagttgtt

SEQ ID NO: 309089 - DNA, 19 bp, Homo sapiens
  siRNA target sequence for DAB2 (NM_001343.1,613-631).
ccattagttgttgatctta

SEQ ID NO: 309090 - DNA, 19 bp, Homo sapiens
  siRNA target sequence for DAB2 (NM_001343.1,847-865).
ctgttagtggatctaaact

SEQ ID NO: 309091 - DNA, 19 bp, Homo sapiens
  siRNA target sequence for DAB2 (NM_001343.1,849-867).
gttagtggatctaaactct

SEQ ID NO: 309092 - DNA, 19 bp, Homo sapiens
  siRNA target sequence for DAB2 (NM_001343.1,879-897).
caatcagaattctttaaga

SEQ ID NO: 309093 - DNA, 19 bp, Homo sapiens
  siRNA target sequence for DAB2 (NM_001343.1,1062-1080).
gacaccttcttcgtttgat

SEQ ID NO: 309094 - DNA, 19 bp, Homo sapiens
  siRNA target sequence for DAB2 (NM_001343.1,1124-1142).
cgtctactccgctgagtaa

SEQ ID NO: 309095 - DNA, 19 bp, Homo sapiens
  siRNA target sequence for DAB2 (NM_001343.1,1125-1143).
gtctactccgctgagtaat

SEQ ID NO: 309096 - DNA, 19 bp, Homo sapiens
  siRNA target sequence for DAB2 (NM_001343.1,1260-1278).
gccagcagtgagaactcaa

SEQ ID NO: 309097 - DNA, 19 bp, Homo sapiens
  siRNA target sequence for DAB2 (NM_001343.1,1261-1279).
ccagcagtgagaactcaaa

SEQ ID NO: 309098 - DNA, 19 bp, Homo sapiens
  siRNA target sequence for DAB2 (NM_001343.1,1302-1320).
gaacggcttctctgtcaaa

SEQ ID NO: 309099 - DNA, 19 bp, Homo sapiens
  siRNA target sequence for DAB2 (NM_001343.1,1470-1488).
cagaaggactgctaagtct

SEQ ID NO: 309100 - DNA, 19 bp, Homo sapiens
  siRNA target sequence for DAB2 (NM_001343.1,1503-1521).
gcttgcatcagacatcttt

SEQ ID NO: 309101 - DNA, 19 bp, Homo sapiens
  siRNA target sequence for DAB2 (NM_001343.1,1586-1604).
ccaaccctctggatctctt

SEQ ID NO: 309102 - DNA, 19 bp, Homo sapiens
  siRNA target sequence for DAB2 (NM_001343.1,1641-1659).
gggtctaggtggtgtaact

SEQ ID NO: 309103 - DNA, 19 bp, Homo sapiens
  siRNA target sequence for DAB2 (NM_001343.1,1643-1661).
gtctaggtggtgtaactgt

SEQ ID NO: 309104 - DNA, 19 bp, Homo sapiens
  siRNA target sequence for DAB2 (NM_001343.1,1747-1765).
ggtcaaccttcaggtttta

SEQ ID NO: 309105 - DNA, 19 bp, Homo sapiens
  siRNA target sequence for DAB2 (NM_001343.1,1773-1791).
cgtcatttttggtacaagt

SEQ ID NO: 309106 - DNA, 19 bp, Homo sapiens
  siRNA target sequence for DAB2 (NM_001343.1,1885-1903).
cccaatgcttggtcaacaa

SEQ ID NO: 309107 - DNA, 19 bp, Homo sapiens
  siRNA target sequence for DAB2 (NM_001343.1,1887-1905).
caatgcttggtcaacaaca

SEQ ID NO: 309108 - DNA, 19 bp, Homo sapiens
  siRNA target sequence for DAB2 (NM_001343.1,2181-2199).
gagtgcctttgccagttat

SEQ ID NO: 309109 - DNA, 19 bp, Homo sapiens
  siRNA target sequence for DAB2 (NM_001343.1,2247-2265).
ctttgatgctaatcaacta

SEQ ID NO: 309110 - DNA, 19 bp, Homo sapiens
  siRNA target sequence for DAB2 (NM_001343.1,2254-2272).
gctaatcaactattgaaca

SEQ ID NO: 309111 - DNA, 19 bp, Homo sapiens
  siRNA target sequence for DAB2 (NM_001343.1,2255-2273).
ctaatcaactattgaacaa

SEQ ID NO: 309112 - DNA, 19 bp, Homo sapiens
  siRNA target sequence for DAB2 (NM_001343.1,2314-2332).
ctgccagttaccaaatcta

SEQ ID NO: 309113 - DNA, 19 bp, Homo sapiens
  siRNA target sequence for DAB2 (NM_001343.1,2316-2334).
gccagttaccaaatctact

SEQ ID NO: 309114 - DNA, 19 bp, Homo sapiens
  siRNA target sequence for DAB2 (NM_001343.1,2330-2348).
ctactgacaatgcatttga

SEQ ID NO: 309115 - DNA, 19 bp, Homo sapiens
  siRNA target sequence for DAB2 (NM_001343.1,2408-2426).
ctgtatcttctgagatgta

SEQ ID NO: 309116 - DNA, 19 bp, Homo sapiens
  siRNA target sequence for DAB2 (NM_001343.1,2421-2439).
gatgtatagggatccattt

SEQ ID NO: 309117 - DNA, 19 bp, Homo sapiens
  siRNA target sequence for DAB2 (NM_001343.1,2424-2442).
gtatagggatccatttgga

SEQ ID NO: 309118 - DNA, 19 bp, Homo sapiens
  siRNA target sequence for EMP1 (NM_001423.1,248-266).
ggtccacatcgctactgtt

SEQ ID NO: 309119 - DNA, 19 bp, Homo sapiens
  siRNA target sequence for EMP1 (NM_001423.1,251-269).
ccacatcgctactgttatt

SEQ ID NO: 309120 - DNA, 19 bp, Homo sapiens
  siRNA target sequence for EMP1 (NM_001423.1,252-270).
cacatcgctactgttatta

SEQ ID NO: 309121 - DNA, 19 bp, Homo sapiens
  siRNA target sequence for EMP1 (NM_001423.1,257-275).
cgctactgttattatgcta

SEQ ID NO: 309122 - DNA, 19 bp, Homo sapiens
  siRNA target sequence for EMP1 (NM_001423.1,258-276).
gctactgttattatgctat

SEQ ID NO: 309123 - DNA, 19 bp, Homo sapiens
  siRNA target sequence for EMP1 (NM_001423.1,291-309).
gccaatgtctggttggttt

SEQ ID NO: 309124 - DNA, 19 bp, Homo sapiens
  siRNA target sequence for EMP1 (NM_001423.1,297-315).
gtctggttggtttccaata

SEQ ID NO: 309125 - DNA, 19 bp, Homo sapiens
  siRNA target sequence for EMP1 (NM_001423.1,325-343).
catcagtaggtctttggaa

SEQ ID NO: 309126 - DNA, 19 bp, Homo sapiens
  siRNA target sequence for EMP1 (NM_001423.1,365-383).
cagtgacagcctgtcatat

SEQ ID NO: 309127 - DNA, 19 bp, Homo sapiens
  siRNA target sequence for EMP1 (NM_001423.1,549-567).
gtgggggtgtccatctaca

SEQ ID NO: 309128 - DNA, 19 bp, Homo sapiens
  siRNA target sequence for EMP1 (NM_001423.1,557-575).
gtccatctacactagtcat

SEQ ID NO: 309129 - DNA, 19 bp, Homo sapiens
  siRNA target sequence for EMP1 (NM_001423.1,559-577).
ccatctacactagtcatta

SEQ ID NO: 309130 - DNA, 19 bp, Homo sapiens
  siRNA target sequence for EMP1 (NM_001423.1,560-578).
catctacactagtcattat

SEQ ID NO: 309131 - DNA, 19 bp, Homo sapiens
  siRNA target sequence for EMP1 (NM_001423.1,586-604).
gtgatggaacgcagtatca

SEQ ID NO: 309132 - DNA, 19 bp, Homo sapiens
  siRNA target sequence for EMP2 (NM_001424.2,256-274).
cgaattgcacagtcatcaa

SEQ ID NO: 309133 - DNA, 19 bp, Homo sapiens
  siRNA target sequence for EMP2 (NM_001424.2,449-467).
gattgcggcctccatttat

SEQ ID NO: 309134 - DNA, 19 bp, Homo sapiens
  siRNA target sequence for EMP2 (NM_001424.2,454-472).
cggcctccatttatacaga

SEQ ID NO: 309135 - DNA, 19 bp, Homo sapiens
  siRNA target sequence for EMP2 (NM_001424.2,469-487).
cagacaggcgtgaagacat

SEQ ID NO: 309136 - DNA, 19 bp, Homo sapiens
  siRNA target sequence for EMP2 (NM_001424.2,492-510).
gacaaaaacgcgaaattct

SEQ ID NO: 309137 - DNA, 19 bp, Homo sapiens
  siRNA target sequence for EMP2 (NM_001424.2,494-512).
caaaaacgcgaaattctat

SEQ ID NO: 309138 - DNA, 19 bp, Homo sapiens
  siRNA target sequence for HDGFRP3 (NM_016073.2,277-295).
caaacaagtatcctatctt

SEQ ID NO: 309139 - DNA, 19 bp, Homo sapiens
  siRNA target sequence for HDGFRP3 (NM_016073.2,308-326).
ccatgaaactgcatttcta

SEQ ID NO: 309140 - DNA, 19 bp, Homo sapiens
  siRNA target sequence for HDGFRP3 (NM_016073.2,331-349).
ccaaagacctttttccata

SEQ ID NO: 309141 - DNA, 19 bp, Homo sapiens
  siRNA target sequence for HDGFRP3 (NM_016073.2,401-419).
cgaaggattgtgggaaata

SEQ ID NO: 309142 - DNA, 19 bp, Homo sapiens
  siRNA target sequence for HDGFRP3 (NM_016073.2,405-423).
ggattgtgggaaatagaaa

SEQ ID NO: 309143 - DNA, 19 bp, Homo sapiens
  siRNA target sequence for HDGFRP3 (NM_016073.2,580-598).
caggctcaaaacggaaaaa

SEQ ID NO: 309144 - DNA, 19 bp, Homo sapiens
  siRNA target sequence for LAMP3 (NM_014398.2,406-424).
caaacagcggccacagtaa

SEQ ID NO: 309145 - DNA, 19 bp, Homo sapiens
  siRNA target sequence for LAMP3 (NM_014398.2,559-577).
cctagcttagccccttatt

SEQ ID NO: 309146 - DNA, 19 bp, Homo sapiens
  siRNA target sequence for LAMP3 (NM_014398.2,563-581).
gcttagccccttattcact

SEQ ID NO: 309147 - DNA, 19 bp, Homo sapiens
  siRNA target sequence for LAMP3 (NM_014398.2,856-874).
ggaatttatcaggttctaa

SEQ ID NO: 309148 - DNA, 19 bp, Homo sapiens
  siRNA target sequence for LAMP3 (NM_014398.2,928-946).
gacaaggagtcggtttttt

SEQ ID NO: 309149 - DNA, 19 bp, Homo sapiens
  siRNA target sequence for LAMP3 (NM_014398.2,930-948).
caaggagtcggttttttca

SEQ ID NO: 309150 - DNA, 19 bp, Homo sapiens
  siRNA target sequence for LAMP3 (NM_014398.2,947-965).
cacctcggagatacttcaa

SEQ ID NO: 309151 - DNA, 19 bp, Homo sapiens
  siRNA target sequence for LAMP3 (NM_014398.2,950-968).
ctcggagatacttcaacat

SEQ ID NO: 309152 - DNA, 19 bp, Homo sapiens
  siRNA target sequence for LAMP3 (NM_014398.2,1001-1019).
gtggcacccgaaaatccaa

SEQ ID NO: 309153 - DNA, 19 bp, Homo sapiens
  siRNA target sequence for LAMP3 (NM_014398.2,1016-1034).
ccaaccttctgttgaattt

SEQ ID NO: 309154 - DNA, 19 bp, Homo sapiens
  siRNA target sequence for LAMP3 (NM_014398.2,1039-1057).
ggcggatttgtgaatctca

SEQ ID NO: 309155 - DNA, 19 bp, Homo sapiens
  siRNA target sequence for LAMP3 (NM_014398.2,1064-1082).
ccaaggatgaagaatcata

SEQ ID NO: 309156 - DNA, 19 bp, Homo sapiens
  siRNA target sequence for LAMP3 (NM_014398.2,1091-1109).
gtgaagtgggagcctattt

SEQ ID NO: 309157 - DNA, 19 bp, Homo sapiens
  siRNA target sequence for LAMP3 (NM_014398.2,1130-1148).
caatttaccaaggaatcaa

SEQ ID NO: 309158 - DNA, 19 bp, Homo sapiens
  siRNA target sequence for LAMP3 (NM_014398.2,1177-1195).
gtcgggcattccttcaagt

SEQ ID NO: 309159 - DNA, 19 bp, Homo sapiens
  siRNA target sequence for LAMP3 (NM_014398.2,1225-1243).
gcccacctgcaggtgaaaa

SEQ ID NO: 309160 - DNA, 19 bp, Homo sapiens
  siRNA target sequence for LAMP3 (NM_014398.2,1228-1246).
cacctgcaggtgaaaacaa

SEQ ID NO: 309161 - DNA, 19 bp, Homo sapiens
  siRNA target sequence for LAMP3 (NM_014398.2,1244-1262).
caaccgatgtccaacttca

SEQ ID NO: 309162 - DNA, 19 bp, Homo sapiens
  siRNA target sequence for LAMP3 (NM_014398.2,1307-1325).
gctcgtctgactacacaat

SEQ ID NO: 309163 - DNA, 19 bp, Homo sapiens
  siRNA target sequence for LAMP3 (NM_014398.2,1310-1328).
cgtctgactacacaattgt

SEQ ID NO: 309164 - DNA, 19 bp, Homo sapiens
  siRNA target sequence for LAMP3 (NM_014398.2,1392-1410).
ccgcctaaggtgtcaatca

SEQ ID NO: 309165 - DNA, 19 bp, Homo sapiens
  siRNA target sequence for LAMP3 (NM_014398.2,1393-1411).
cgcctaaggtgtcaatcat

SEQ ID NO: 309166 - DNA, 19 bp, Homo sapiens
  siRNA target sequence for LAMP3 (NM_014398.2,1395-1413).
cctaaggtgtcaatcatct

SEQ ID NO: 309167 - DNA, 19 bp, Homo sapiens
  siRNA target sequence for LGI1 (NM_005097.1,260-278).
ctgcattcccctgaaaaga

SEQ ID NO: 309168 - DNA, 19 bp, Homo sapiens
  siRNA target sequence for LGI1 (NM_005097.1,262-280).
gcattcccctgaaaagaat

SEQ ID NO: 309169 - DNA, 19 bp, Homo sapiens
  siRNA target sequence for LGI1 (NM_005097.1,350-368).
ccctgccgtgtgtacttgt

SEQ ID NO: 309170 - DNA, 19 bp, Homo sapiens
  siRNA target sequence for LGI1 (NM_005097.1,351-369).
cctgccgtgtgtacttgta

SEQ ID NO: 309171 - DNA, 19 bp, Homo sapiens
  siRNA target sequence for LGI1 (NM_005097.1,356-374).
cgtgtgtacttgtaccaaa

SEQ ID NO: 309172 - DNA, 19 bp, Homo sapiens
  siRNA target sequence for LGI1 (NM_005097.1,359-377).
gtgtacttgtaccaaagat

SEQ ID NO: 309173 - DNA, 19 bp, Homo sapiens
  siRNA target sequence for LGI1 (NM_005097.1,371-389).
caaagataatgctttatgt

SEQ ID NO: 309174 - DNA, 19 bp, Homo sapiens
  siRNA target sequence for LGI1 (NM_005097.1,413-431).
caccgttcctcctgatgtt

SEQ ID NO: 309175 - DNA, 19 bp, Homo sapiens
  siRNA target sequence for LGI1 (NM_005097.1,415-433).
ccgttcctcctgatgttat

SEQ ID NO: 309176 - DNA, 19 bp, Homo sapiens
  siRNA target sequence for LGI1 (NM_005097.1,421-439).
ctcctgatgttatctcatt

SEQ ID NO: 309177 - DNA, 19 bp, Homo sapiens
  siRNA target sequence for LGI1 (NM_005097.1,443-461).
ctttgtgagatctggtttt

SEQ ID NO: 309178 - DNA, 19 bp, Homo sapiens
  siRNA target sequence for LGI1 (NM_005097.1,451-469).
gatctggttttactgaaat

SEQ ID NO: 309179 - DNA, 19 bp, Homo sapiens
  siRNA target sequence for LGI1 (NM_005097.1,470-488).
ctcagaagggagtttttta

SEQ ID NO: 309180 - DNA, 19 bp, Homo sapiens
  siRNA target sequence for LGI1 (NM_005097.1,496-514).
catcgctgcagctcttgtt

SEQ ID NO: 309181 - DNA, 19 bp, Homo sapiens
  siRNA target sequence for LGI1 (NM_005097.1,518-536).
cacatcgaactcctttgat

SEQ ID NO: 309182 - DNA, 19 bp, Homo sapiens
  siRNA target sequence for LGI1 (NM_005097.1,520-538).
catcgaactcctttgatgt

SEQ ID NO: 309183 - DNA, 19 bp, Homo sapiens
  siRNA target sequence for LGI1 (NM_005097.1,523-541).
cgaactcctttgatgtgat

SEQ ID NO: 309184 - DNA, 19 bp, Homo sapiens
  siRNA target sequence for LGI1 (NM_005097.1,562-580).
gtcttccacatctagagta

SEQ ID NO: 309185 - DNA, 19 bp, Homo sapiens
  siRNA target sequence for LGI1 (NM_005097.1,596-614).
caacaacatcaagtcaatt

SEQ ID NO: 309186 - DNA, 19 bp, Homo sapiens
  siRNA target sequence for LGI1 (NM_005097.1,630-648).
cggggactaaagtcattaa

SEQ ID NO: 309187 - DNA, 19 bp, Homo sapiens
  siRNA target sequence for LGI1 (NM_005097.1,632-650).
gggactaaagtcattaatt

SEQ ID NO: 309188 - DNA, 19 bp, Homo sapiens
  siRNA target sequence for LGI1 (NM_005097.1,731-749).
cctgaggggtaattcattt

SEQ ID NO: 309189 - DNA, 19 bp, Homo sapiens
  siRNA target sequence for LGI1 (NM_005097.1,732-750).
ctgaggggtaattcattta

SEQ ID NO: 309190 - DNA, 19 bp, Homo sapiens
  siRNA target sequence for LGI1 (NM_005097.1,794-812).
caccaatgcaactgttgaa

SEQ ID NO: 309191 - DNA, 19 bp, Homo sapiens
  siRNA target sequence for LGI1 (NM_005097.1,802-820).
caactgttgaagacatcta

SEQ ID NO: 309192 - DNA, 19 bp, Homo sapiens
  siRNA target sequence for LGI1 (NM_005097.1,842-860).
caagaagcgcaaaatcaat

SEQ ID NO: 309193 - DNA, 19 bp, Homo sapiens
  siRNA target sequence for LGI1 (NM_005097.1,845-863).
gaagcgcaaaatcaatagt

SEQ ID NO: 309194 - DNA, 19 bp, Homo sapiens
  siRNA target sequence for LGI1 (NM_005097.1,862-880).
gtctctcctcgaaggattt

SEQ ID NO: 309195 - DNA, 19 bp, Homo sapiens
  siRNA target sequence for LGI1 (NM_005097.1,927-945).
caatcattgtccatagaca

SEQ ID NO: 309196 - DNA, 19 bp, Homo sapiens
  siRNA target sequence for LGI1 (NM_005097.1,975-993).
gtcatcgctcagcctttta

SEQ ID NO: 309197 - DNA, 19 bp, Homo sapiens
  siRNA target sequence for LGI1 (NM_005097.1,1036-1054).
ccttccggaattatgacaa

SEQ ID NO: 309198 - DNA, 19 bp, Homo sapiens
  siRNA target sequence for LGI1 (NM_005097.1,1062-1080).
ggcacatccactgtagtat

SEQ ID NO: 309199 - DNA, 19 bp, Homo sapiens
  siRNA target sequence for LGI1 (NM_005097.1,1066-1084).
catccactgtagtatgcaa

SEQ ID NO: 309200 - DNA, 19 bp, Homo sapiens
  siRNA target sequence for LGI1 (NM_005097.1,1077-1095).
gtatgcaagcctatagtca

SEQ ID NO: 309201 - DNA, 19 bp, Homo sapiens
  siRNA target sequence for LGI1 (NM_005097.1,1081-1099).
gcaagcctatagtcattga

SEQ ID NO: 309202 - DNA, 19 bp, Homo sapiens
  siRNA target sequence for LGI1 (NM_005097.1,1082-1100).
caagcctatagtcattgaa

SEQ ID NO: 309203 - DNA, 19 bp, Homo sapiens
  siRNA target sequence for LGI1 (NM_005097.1,1085-1103).
gcctatagtcattgaaact

SEQ ID NO: 309204 - DNA, 19 bp, Homo sapiens
  siRNA target sequence for LGI1 (NM_005097.1,1098-1116).
gaaactcagctctatgtta

SEQ ID NO: 309205 - DNA, 19 bp, Homo sapiens
  siRNA target sequence for LGI1 (NM_005097.1,1102-1120).
ctcagctctatgttattgt

SEQ ID NO: 309206 - DNA, 19 bp, Homo sapiens
  siRNA target sequence for LGI1 (NM_005097.1,1148-1166).
ctataagcgagacagtttt

SEQ ID NO: 309207 - DNA, 19 bp, Homo sapiens
  siRNA target sequence for LGI1 (NM_005097.1,1188-1206).
caggatattgaaattctca

SEQ ID NO: 309208 - DNA, 19 bp, Homo sapiens
  siRNA target sequence for LGI1 (NM_005097.1,1218-1236).
cccaatgacattgaaacat

SEQ ID NO: 309209 - DNA, 19 bp, Homo sapiens
  siRNA target sequence for LGI1 (NM_005097.1,1284-1302).
gctggttttactaccattt

SEQ ID NO: 309210 - DNA, 19 bp, Homo sapiens
  siRNA target sequence for LGI1 (NM_005097.1,1287-1305).
ggttttactaccatttaca

SEQ ID NO: 309211 - DNA, 19 bp, Homo sapiens
  siRNA target sequence for LGI1 (NM_005097.1,1309-1327).
ggaacggaaacggattcta

SEQ ID NO: 309212 - DNA, 19 bp, Homo sapiens
  siRNA target sequence for LGI1 (NM_005097.1,1325-1343).
ctactcccatcaatcctta

SEQ ID NO: 309213 - DNA, 19 bp, Homo sapiens
  siRNA target sequence for LGI1 (NM_005097.1,1363-1381).
ctgatgtggaatatctaga

SEQ ID NO: 309214 - DNA, 19 bp, Homo sapiens
  siRNA target sequence for LGI1 (NM_005097.1,1365-1383).
gatgtggaatatctagaaa

SEQ ID NO: 309215 - DNA, 19 bp, Homo sapiens
  siRNA target sequence for LGI1 (NM_005097.1,1402-1420).
cactcagaacgcctcattt

SEQ ID NO: 309216 - DNA, 19 bp, Homo sapiens
  siRNA target sequence for LGI1 (NM_005097.1,1404-1422).
ctcagaacgcctcatttaa

SEQ ID NO: 309217 - DNA, 19 bp, Homo sapiens
  siRNA target sequence for LGI1 (NM_005097.1,1406-1424).
cagaacgcctcatttaatt

SEQ ID NO: 309218 - DNA, 19 bp, Homo sapiens
  siRNA target sequence for LGI1 (NM_005097.1,1408-1426).
gaacgcctcatttaattct

SEQ ID NO: 309219 - DNA, 19 bp, Homo sapiens
  siRNA target sequence for LGI1 (NM_005097.1,1435-1453).
gttcccagcgtcctgtaat

SEQ ID NO: 309220 - DNA, 19 bp, Homo sapiens
  siRNA target sequence for LGI1 (NM_005097.1,1438-1456).
cccagcgtcctgtaattta

SEQ ID NO: 309221 - DNA, 19 bp, Homo sapiens
  siRNA target sequence for LGI1 (NM_005097.1,1439-1457).
ccagcgtcctgtaatttat

SEQ ID NO: 309222 - DNA, 19 bp, Homo sapiens
  siRNA target sequence for LGI1 (NM_005097.1,1443-1461).
cgtcctgtaatttatcagt

SEQ ID NO: 309223 - DNA, 19 bp, Homo sapiens
  siRNA target sequence for LGI1 (NM_005097.1,1476-1494).
caattattcactaaccaaa

SEQ ID NO: 309224 - DNA, 19 bp, Homo sapiens
  siRNA target sequence for LGI1 (NM_005097.1,1484-1502).
cactaaccaaactgacatt

SEQ ID NO: 309225 - DNA, 19 bp, Homo sapiens
  siRNA target sequence for LGI1 (NM_005097.1,1504-1522).
ctaacatggaggatgtgta

SEQ ID NO: 309226 - DNA, 19 bp, Homo sapiens
  siRNA target sequence for LGI1 (NM_005097.1,1544-1562).
gaaaggggacgtgtacatt

SEQ ID NO: 309227 - DNA, 19 bp, Homo sapiens
  siRNA target sequence for LGI1 (NM_005097.1,1548-1566).
ggggacgtgtacatttgct

SEQ ID NO: 309228 - DNA, 19 bp, Homo sapiens
  siRNA target sequence for LGI1 (NM_005097.1,1582-1600).
gtgattccaaagtcatgaa

SEQ ID NO: 309229 - DNA, 19 bp, Homo sapiens
  siRNA target sequence for LGI1 (NM_005097.1,1612-1630).
cctcgttccaggatattca

SEQ ID NO: 309230 - DNA, 19 bp, Homo sapiens
  siRNA target sequence for LGI1 (NM_005097.1,1661-1679).
ccagcctcttcaaataaat

SEQ ID NO: 309231 - DNA, 19 bp, Homo sapiens
  siRNA target sequence for LGI1 (NM_005097.1,1692-1710).
gcaattcttggaagtgatt

SEQ ID NO: 309232 - DNA, 19 bp, Homo sapiens
  siRNA target sequence for LGI1 (NM_005097.1,1712-1730).
ctcctttactcaagtgtat

SEQ ID NO: 309233 - DNA, 19 bp, Homo sapiens
  siRNA target sequence for LGI1 (NM_005097.1,1714-1732).
cctttactcaagtgtataa

SEQ ID NO: 309234 - DNA, 19 bp, Homo sapiens
  siRNA target sequence for LGI1 (NM_005097.1,1801-1819).
cacatgtgtccattaataa

SEQ ID NO: 309235 - DNA, 19 bp, Homo sapiens
  siRNA target sequence for LGI1 (NM_005097.1,1841-1859).
cagttttaagggaaataca

SEQ ID NO: 309236 - DNA, 19 bp, Homo sapiens
  siRNA target sequence for LGI1 (NM_005097.1,1872-1890).
catgtcatagttgacttaa

SEQ ID NO: 309237 - DNA, 19 bp, Homo sapiens
  siRNA target sequence for PDCD1LG1 (NM_014143.2,117-135).
cggttcccaaggacctata

SEQ ID NO: 309238 - DNA, 19 bp, Homo sapiens
  siRNA target sequence for PDCD1LG1 (NM_014143.2,118-136).
ggttcccaaggacctatat

SEQ ID NO: 309239 - DNA, 19 bp, Homo sapiens
  siRNA target sequence for PDCD1LG1 (NM_014143.2,130-148).
cctatatgtggtagagtat

SEQ ID NO: 309240 - DNA, 19 bp, Homo sapiens
  siRNA target sequence for PDCD1LG1 (NM_014143.2,139-157).
ggtagagtatggtagcaat

SEQ ID NO: 309241 - DNA, 19 bp, Homo sapiens
  siRNA target sequence for PDCD1LG1 (NM_014143.2,140-158).
gtagagtatggtagcaata

SEQ ID NO: 309242 - DNA, 19 bp, Homo sapiens
  siRNA target sequence for PDCD1LG1 (NM_014143.2,145-163).
gtatggtagcaatatgaca

SEQ ID NO: 309243 - DNA, 19 bp, Homo sapiens
  siRNA target sequence for PDCD1LG1 (NM_014143.2,150-168).
gtagcaatatgacaattga

SEQ ID NO: 309244 - DNA, 19 bp, Homo sapiens
  siRNA target sequence for PDCD1LG1 (NM_014143.2,200-218).
ctggctgcactaattgtct

SEQ ID NO: 309245 - DNA, 19 bp, Homo sapiens
  siRNA target sequence for PDCD1LG1 (NM_014143.2,202-220).
ggctgcactaattgtctat

SEQ ID NO: 309246 - DNA, 19 bp, Homo sapiens
  siRNA target sequence for PDCD1LG1 (NM_014143.2,232-250).
ggataagaacattattcaa

SEQ ID NO: 309247 - DNA, 19 bp, Homo sapiens
  siRNA target sequence for PDCD1LG1 (NM_014143.2,272-290).
ctgaaggttcagcatagta

SEQ ID NO: 309248 - DNA, 19 bp, Homo sapiens
  siRNA target sequence for PDCD1LG1 (NM_014143.2,383-401).
gtgtaccgctgcatgatca

SEQ ID NO: 309249 - DNA, 19 bp, Homo sapiens
  siRNA target sequence for PDCD1LG1 (NM_014143.2,413-431).
gccgactacaagcgaatta

SEQ ID NO: 309250 - DNA, 19 bp, Homo sapiens
  siRNA target sequence for PDCD1LG1 (NM_014143.2,415-433).
cgactacaagcgaattact

SEQ ID NO: 309251 - DNA, 19 bp, Homo sapiens
  siRNA target sequence for PDCD1LG1 (NM_014143.2,421-439).
caagcgaattactgtgaaa

SEQ ID NO: 309252 - DNA, 19 bp, Homo sapiens
  siRNA target sequence for PDCD1LG1 (NM_014143.2,425-443).
cgaattactgtgaaagtca

SEQ ID NO: 309253 - DNA, 19 bp, Homo sapiens
  siRNA target sequence for PDCD1LG1 (NM_014143.2,426-444).
gaattactgtgaaagtcaa

SEQ ID NO: 309254 - DNA, 19 bp, Homo sapiens
  siRNA target sequence for PDCD1LG1 (NM_014143.2,440-458).
gtcaatgccccatacaaca

SEQ ID NO: 309255 - DNA, 19 bp, Homo sapiens
  siRNA target sequence for PDCD1LG1 (NM_014143.2,442-460).
caatgccccatacaacaaa

SEQ ID NO: 309256 - DNA, 19 bp, Homo sapiens
  siRNA target sequence for PDCD1LG1 (NM_014143.2,446-464).
gccccatacaacaaaatca

SEQ ID NO: 309257 - DNA, 19 bp, Homo sapiens
  siRNA target sequence for PDCD1LG1 (NM_014143.2,447-465).
ccccatacaacaaaatcaa

SEQ ID NO: 309258 - DNA, 19 bp, Homo sapiens
  siRNA target sequence for PDCD1LG1 (NM_014143.2,555-573).
caagcagtgaccatcaagt

SEQ ID NO: 309259 - DNA, 19 bp, Homo sapiens
  siRNA target sequence for PDCD1LG1 (NM_014143.2,745-763).
ggcacatcctccaaatgaa

SEQ ID NO: 309260 - DNA, 19 bp, Homo sapiens
  siRNA target sequence for PDCD1LG1 (NM_014143.2,765-783).
ggactcacttggtaattct

SEQ ID NO: 309261 - DNA, 19 bp, Homo sapiens
  siRNA target sequence for PDCD1LG1 (NM_014143.2,782-800).
ctgggagccatcttattat

SEQ ID NO: 309262 - DNA, 19 bp, Homo sapiens
  siRNA target sequence for PDCD1LG1 (NM_014143.2,806-824).
ggtgtagcactgacattca

SEQ ID NO: 309263 - DNA, 19 bp, Homo sapiens
  siRNA target sequence for PDCD1LG1 (NM_014143.2,823-841).
catcttccgtttaagaaaa

SEQ ID NO: 309264 - DNA, 19 bp, Homo sapiens
  siRNA target sequence for PDCD1LG1 (NM_014143.2,846-864).
gaatgatggatgtgaaaaa

SEQ ID NO: 309265 - DNA, 19 bp, Homo sapiens
  siRNA target sequence for PRG4 (NM_005807.1,84-102).
cgtgattcagcaagtttca

SEQ ID NO: 309266 - DNA, 19 bp, Homo sapiens
  siRNA target sequence for PRG4 (NM_005807.1,85-103).
gtgattcagcaagtttcat

SEQ ID NO: 309267 - DNA, 19 bp, Homo sapiens
  siRNA target sequence for PRG4 (NM_005807.1,87-105).
gattcagcaagtttcatct

SEQ ID NO: 309268 - DNA, 19 bp, Homo sapiens
  siRNA target sequence for PRG4 (NM_005807.1,159-177).
cacctgcaactgtgattat

SEQ ID NO: 309269 - DNA, 19 bp, Homo sapiens
  siRNA target sequence for PRG4 (NM_005807.1,161-179).
cctgcaactgtgattataa

SEQ ID NO: 309270 - DNA, 19 bp, Homo sapiens
  siRNA target sequence for PRG4 (NM_005807.1,165-183).
caactgtgattataactgt

SEQ ID NO: 309271 - DNA, 19 bp, Homo sapiens
  siRNA target sequence for PRG4 (NM_005807.1,196-214).
gagtgctgccctgatttca

SEQ ID NO: 309272 - DNA, 19 bp, Homo sapiens
  siRNA target sequence for PRG4 (NM_005807.1,286-304).
gactgcgacgcccaatgta

SEQ ID NO: 309273 - DNA, 19 bp, Homo sapiens
  siRNA target sequence for PRG4 (NM_005807.1,290-308).
gcgacgcccaatgtaagaa

SEQ ID NO: 309274 - DNA, 19 bp, Homo sapiens
  siRNA target sequence for PRG4 (NM_005807.1,292-310).
gacgcccaatgtaagaagt

SEQ ID NO: 309275 - DNA, 19 bp, Homo sapiens
  siRNA target sequence for PRG4 (NM_005807.1,323-341).
gtcccgattatgagagttt

SEQ ID NO: 309276 - DNA, 19 bp, Homo sapiens
  siRNA target sequence for PRG4 (NM_005807.1,327-345).
cgattatgagagtttctgt

SEQ ID NO: 309277 - DNA, 19 bp, Homo sapiens
  siRNA target sequence for PRG4 (NM_005807.1,342-360).
ctgtgcagaagtgcataat

SEQ ID NO: 309278 - DNA, 19 bp, Homo sapiens
  siRNA target sequence for PRG4 (NM_005807.1,406-424).
gcatctcaaaccatcaaat

SEQ ID NO: 309279 - DNA, 19 bp, Homo sapiens
  siRNA target sequence for PRG4 (NM_005807.1,465-483).
gactaagaaagttatagaa

SEQ ID NO: 309280 - DNA, 19 bp, Homo sapiens
  siRNA target sequence for PRG4 (NM_005807.1,579-597).
caagtcttccaaaaattca

SEQ ID NO: 309281 - DNA, 19 bp, Homo sapiens
  siRNA target sequence for PRG4 (NM_005807.1,601-619).
gctaatagagaattacaga

SEQ ID NO: 309282 - DNA, 19 bp, Homo sapiens
  siRNA target sequence for PRG4 (NM_005807.1,675-693).
caaaccaccagttgtagat

SEQ ID NO: 309283 - DNA, 19 bp, Homo sapiens
  siRNA target sequence for PRG4 (NM_005807.1,746-764).
cgtctaccacccaacacaa

SEQ ID NO: 309284 - DNA, 19 bp, Homo sapiens
  siRNA target sequence for PRG4 (NM_005807.1,747-765).
gtctaccacccaacacaat

SEQ ID NO: 309285 - DNA, 19 bp, Homo sapiens
  siRNA target sequence for PRG4 (NM_005807.1,789-807).
cacaacagcaaaaccaata

SEQ ID NO: 309286 - DNA, 19 bp, Homo sapiens
  siRNA target sequence for PRG4 (NM_005807.1,817-835).
cccagtcttccacctaatt

SEQ ID NO: 309287 - DNA, 19 bp, Homo sapiens
  siRNA target sequence for PRG4 (NM_005807.1,823-841).
cttccacctaattctgata

SEQ ID NO: 309288 - DNA, 19 bp, Homo sapiens
  siRNA target sequence for PRG4 (NM_005807.1,826-844).
ccacctaattctgatacat

SEQ ID NO: 309289 - DNA, 19 bp, Homo sapiens
  siRNA target sequence for PRG4 (NM_005807.1,829-847).
cctaattctgatacatcta

SEQ ID NO: 309290 - DNA, 19 bp, Homo sapiens
  siRNA target sequence for PRG4 (NM_005807.1,830-848).
ctaattctgatacatctaa

SEQ ID NO: 309291 - DNA, 19 bp, Homo sapiens
  siRNA target sequence for PRG4 (NM_005807.1,867-885).
gaataaagagacaacagtt

SEQ ID NO: 309292 - DNA, 19 bp, Homo sapiens
  siRNA target sequence for PRG4 (NM_005807.1,991-1009).
gatttagcacccacatcta

SEQ ID NO: 309293 - DNA, 19 bp, Homo sapiens
  siRNA target sequence for PRG4 (NM_005807.1,2629-2647).
cctaccactatccacaaaa

SEQ ID NO: 309294 - DNA, 19 bp, Homo sapiens
  siRNA target sequence for PRG4 (NM_005807.1,2806-2824).
cgtactacacctgaaacta

SEQ ID NO: 309295 - DNA, 19 bp, Homo sapiens
  siRNA target sequence for PRG4 (NM_005807.1,2830-2848).
gctgcacctaagatgacaa

SEQ ID NO: 309296 - DNA, 19 bp, Homo sapiens
  siRNA target sequence for PRG4 (NM_005807.1,3187-3205).
ccccgcaagatgacatcaa

SEQ ID NO: 309297 - DNA, 19 bp, Homo sapiens
  siRNA target sequence for PRG4 (NM_005807.1,3189-3207).
ccgcaagatgacatcaaca

SEQ ID NO: 309298 - DNA, 19 bp, Homo sapiens
  siRNA target sequence for PRG4 (NM_005807.1,3190-3208).
cgcaagatgacatcaacaa

SEQ ID NO: 309299 - DNA, 19 bp, Homo sapiens
  siRNA target sequence for PRG4 (NM_005807.1,3370-3388).
gtgttcatgcctgaagtta

SEQ ID NO: 309300 - DNA, 19 bp, Homo sapiens
  siRNA target sequence for PRG4 (NM_005807.1,3372-3390).
gttcatgcctgaagttact

SEQ ID NO: 309301 - DNA, 19 bp, Homo sapiens
  siRNA target sequence for PRG4 (NM_005807.1,3461-3479).
ccaatatatgcaatggtaa

SEQ ID NO: 309302 - DNA, 19 bp, Homo sapiens
  siRNA target sequence for PRG4 (NM_005807.1,3471-3489).
caatggtaagccagtagat

SEQ ID NO: 309303 - DNA, 19 bp, Homo sapiens
  siRNA target sequence for PRG4 (NM_005807.1,3484-3502).
gtagatggactgactactt

SEQ ID NO: 309304 - DNA, 19 bp, Homo sapiens
  siRNA target sequence for PRG4 (NM_005807.1,3546-3564).
gatgctaagtccattcagt

SEQ ID NO: 309305 - DNA, 19 bp, Homo sapiens
  siRNA target sequence for PRG4 (NM_005807.1,3575-3593).
cagctcgcagaattactga

SEQ ID NO: 309306 - DNA, 19 bp, Homo sapiens
  siRNA target sequence for PRG4 (NM_005807.1,3580-3598).
cgcagaattactgaagttt

SEQ ID NO: 309307 - DNA, 19 bp, Homo sapiens
  siRNA target sequence for PRG4 (NM_005807.1,3608-3626).
cttcccccattgatactgt

SEQ ID NO: 309308 - DNA, 19 bp, Homo sapiens
  siRNA target sequence for PRG4 (NM_005807.1,3676-3694).
cagtactggcgttttacca

SEQ ID NO: 309309 - DNA, 19 bp, Homo sapiens
  siRNA target sequence for PRG4 (NM_005807.1,3678-3696).
gtactggcgttttaccaat

SEQ ID NO: 309310 - DNA, 19 bp, Homo sapiens
  siRNA target sequence for PRG4 (NM_005807.1,3683-3701).
ggcgttttaccaatgatat

SEQ ID NO: 309311 - DNA, 19 bp, Homo sapiens
  siRNA target sequence for PRG4 (NM_005807.1,3684-3702).
gcgttttaccaatgatata

SEQ ID NO: 309312 - DNA, 19 bp, Homo sapiens
  siRNA target sequence for PRG4 (NM_005807.1,3709-3727).
gcagggtaccccaaaccaa

SEQ ID NO: 309313 - DNA, 19 bp, Homo sapiens
  siRNA target sequence for PRG4 (NM_005807.1,3713-3731).
ggtaccccaaaccaatttt

SEQ ID NO: 309314 - DNA, 19 bp, Homo sapiens
  siRNA target sequence for PRG4 (NM_005807.1,3717-3735).
ccccaaaccaattttcaaa

SEQ ID NO: 309315 - DNA, 19 bp, Homo sapiens
  siRNA target sequence for PRG4 (NM_005807.1,3769-3787).
gcgctttcaacagctaaat

SEQ ID NO: 309316 - DNA, 19 bp, Homo sapiens
  siRNA target sequence for PRG4 (NM_005807.1,3770-3788).
cgctttcaacagctaaata

SEQ ID NO: 309317 - DNA, 19 bp, Homo sapiens
  siRNA target sequence for PRG4 (NM_005807.1,3771-3789).
gctttcaacagctaaatat

SEQ ID NO: 309318 - DNA, 19 bp, Homo sapiens
  siRNA target sequence for PRG4 (NM_005807.1,3772-3790).
ctttcaacagctaaatata

SEQ ID NO: 309319 - DNA, 19 bp, Homo sapiens
  siRNA target sequence for PRG4 (NM_005807.1,3795-3813).
ctggcctgaatctgtgtat

SEQ ID NO: 309320 - DNA, 19 bp, Homo sapiens
  siRNA target sequence for PRG4 (NM_005807.1,3881-3899).
gaagaaggcctgctctaaa

SEQ ID NO: 309321 - DNA, 19 bp, Homo sapiens
  siRNA target sequence for PRG4 (NM_005807.1,3942-3960).
ctttgaacgtgctatagga

SEQ ID NO: 309322 - DNA, 19 bp, Homo sapiens
  siRNA target sequence for PRG4 (NM_005807.1,3952-3970).
gctataggaccttctcaaa

SEQ ID NO: 309323 - DNA, 19 bp, Homo sapiens
  siRNA target sequence for PRG4 (NM_005807.1,3973-3991).
cacaccatcagaattcaat

SEQ ID NO: 309324 - DNA, 19 bp, Homo sapiens
  siRNA target sequence for PRG4 (NM_005807.1,4001-4019).
ccagactggcttatcaaga

SEQ ID NO: 309325 - DNA, 19 bp, Homo sapiens
  siRNA target sequence for PRG4 (NM_005807.1,4018-4036).
gacaaaggtgtccttcata

SEQ ID NO: 309326 - DNA, 19 bp, Homo sapiens
  siRNA target sequence for PRG4 (NM_005807.1,4025-4043).
gtgtccttcataatgaagt

SEQ ID NO: 309327 - DNA, 19 bp, Homo sapiens
  siRNA target sequence for PRG4 (NM_005807.1,4027-4045).
gtccttcataatgaagtta

SEQ ID NO: 309328 - DNA, 19 bp, Homo sapiens
  siRNA target sequence for PRG4 (NM_005807.1,4029-4047).
ccttcataatgaagttaaa

SEQ ID NO: 309329 - DNA, 19 bp, Homo sapiens
  siRNA target sequence for PRG4 (NM_005807.1,4059-4077).
gtggagaggacttccaaat

SEQ ID NO: 309330 - DNA, 19 bp, Homo sapiens
  siRNA target sequence for PRG4 (NM_005807.1,4117-4135).
cctgacggctatgattact

SEQ ID NO: 309331 - DNA, 19 bp, Homo sapiens
  siRNA target sequence for PRG4 (NM_005807.1,4118-4136).
ctgacggctatgattacta

SEQ ID NO: 309332 - DNA, 19 bp, Homo sapiens
  siRNA target sequence for PRG4 (NM_005807.1,4134-4152).
ctatgccttttctaaagat

SEQ ID NO: 309333 - DNA, 19 bp, Homo sapiens
  siRNA target sequence for PRG4 (NM_005807.1,4138-4156).
gccttttctaaagatcaat

SEQ ID NO: 309334 - DNA, 19 bp, Homo sapiens
  siRNA target sequence for PRG4 (NM_005807.1,4139-4157).
ccttttctaaagatcaata

SEQ ID NO: 309335 - DNA, 19 bp, Homo sapiens
  siRNA target sequence for PRG4 (NM_005807.1,4145-4163).
ctaaagatcaatactataa

SEQ ID NO: 309336 - DNA, 19 bp, Homo sapiens
  siRNA target sequence for PRG4 (NM_005807.1,4164-4182).
cattgatgtgcctagtaga

SEQ ID NO: 309337 - DNA, 19 bp, Homo sapiens
  siRNA target sequence for PRG4 (NM_005807.1,4204-4222).
cgttctgggcagaccttat

SEQ ID NO: 309338 - DNA, 19 bp, Homo sapiens
  siRNA target sequence for PRG4 (NM_005807.1,4208-4226).
ctgggcagaccttatccaa

SEQ ID NO: 309339 - DNA, 19 bp, Homo sapiens
  siRNA target sequence for RBBP7 (NM_002893.2,290-308).
ggcgagtaaagagatgttt

SEQ ID NO: 309340 - DNA, 19 bp, Homo sapiens
  siRNA target sequence for RBBP7 (NM_002893.2,292-310).
cgagtaaagagatgtttga

SEQ ID NO: 309341 - DNA, 19 bp, Homo sapiens
  siRNA target sequence for RBBP7 (NM_002893.2,320-338).
ggaggagcgtgtcatcaat

SEQ ID NO: 309342 - DNA, 19 bp, Homo sapiens
  siRNA target sequence for RBBP7 (NM_002893.2,323-341).
ggagcgtgtcatcaatgaa

SEQ ID NO: 309343 - DNA, 19 bp, Homo sapiens
  siRNA target sequence for RBBP7 (NM_002893.2,326-344).
gcgtgtcatcaatgaagaa

SEQ ID NO: 309344 - DNA, 19 bp, Homo sapiens
  siRNA target sequence for RBBP7 (NM_002893.2,327-345).
cgtgtcatcaatgaagaat

SEQ ID NO: 309345 - DNA, 19 bp, Homo sapiens
  siRNA target sequence for RBBP7 (NM_002893.2,328-346).
gtgtcatcaatgaagaata

SEQ ID NO: 309346 - DNA, 19 bp, Homo sapiens
  siRNA target sequence for RBBP7 (NM_002893.2,362-380).
gaatacaccgtttctatat

SEQ ID NO: 309347 - DNA, 19 bp, Homo sapiens
  siRNA target sequence for RBBP7 (NM_002893.2,480-498).
ctagtgctggggactcata

SEQ ID NO: 309348 - DNA, 19 bp, Homo sapiens
  siRNA target sequence for RBBP7 (NM_002893.2,521-539).
ggtggttgctcgagtacat

SEQ ID NO: 309349 - DNA, 19 bp, Homo sapiens
  siRNA target sequence for RBBP7 (NM_002893.2,524-542).
ggttgctcgagtacatatt

SEQ ID NO: 309350 - DNA, 19 bp, Homo sapiens
  siRNA target sequence for RBBP7 (NM_002893.2,581-599).
cagtgacaagggtgaattt

SEQ ID NO: 309351 - DNA, 19 bp, Homo sapiens
  siRNA target sequence for RBBP7 (NM_002893.2,685-703).
cgcagaatcctcacatcat

SEQ ID NO: 309352 - DNA, 19 bp, Homo sapiens
  siRNA target sequence for RBBP7 (NM_002893.2,686-704).
gcagaatcctcacatcatt

SEQ ID NO: 309353 - DNA, 19 bp, Homo sapiens
  siRNA target sequence for RBBP7 (NM_002893.2,770-788).
cccaagtggagaatgtaat

SEQ ID NO: 309354 - DNA, 19 bp, Homo sapiens
  siRNA target sequence for RBBP7 (NM_002893.2,871-889).
catctgatgaccatactgt

SEQ ID NO: 309355 - DNA, 19 bp, Homo sapiens
  siRNA target sequence for RBBP7 (NM_002893.2,888-906).
gtttgtctgtgggatataa

SEQ ID NO: 309356 - DNA, 19 bp, Homo sapiens
  siRNA target sequence for RBBP7 (NM_002893.2,925-943).
gcaaaattgtggatgctaa

SEQ ID NO: 309357 - DNA, 19 bp, Homo sapiens
  siRNA target sequence for RBBP7 (NM_002893.2,926-944).
caaaattgtggatgctaaa

SEQ ID NO: 309358 - DNA, 19 bp, Homo sapiens
  siRNA target sequence for RBBP7 (NM_002893.2,936-954).
gatgctaaagccatcttta

SEQ ID NO: 309359 - DNA, 19 bp, Homo sapiens
  siRNA target sequence for RBBP7 (NM_002893.2,993-1011).
ctgctgcacgagtcattgt

SEQ ID NO: 309360 - DNA, 19 bp, Homo sapiens
  siRNA target sequence for RBBP7 (NM_002893.2,995-1013).
gctgcacgagtcattgttt

SEQ ID NO: 309361 - DNA, 19 bp, Homo sapiens
  siRNA target sequence for RBBP7 (NM_002893.2,999-1017).
cacgagtcattgtttggat

SEQ ID NO: 309362 - DNA, 19 bp, Homo sapiens
  siRNA target sequence for RBBP7 (NM_002893.2,1050-1068).
gacaccaggtccaatacca

SEQ ID NO: 309363 - DNA, 19 bp, Homo sapiens
  siRNA target sequence for RBBP7 (NM_002893.2,1096-1114).
cgcacactgccgaagtcaa

SEQ ID NO: 309364 - DNA, 19 bp, Homo sapiens
  siRNA target sequence for RBBP7 (NM_002893.2,1110-1128).
gtcaactgcctctcattca

SEQ ID NO: 309365 - DNA, 19 bp, Homo sapiens
  siRNA target sequence for RBBP7 (NM_002893.2,1112-1130).
caactgcctctcattcaat

SEQ ID NO: 309366 - DNA, 19 bp, Homo sapiens
  siRNA target sequence for RBBP7 (NM_002893.2,1127-1145).
caatccctacagcgaattt

SEQ ID NO: 309367 - DNA, 19 bp, Homo sapiens
  siRNA target sequence for RBBP7 (NM_002893.2,1132-1150).
cctacagcgaatttattct

SEQ ID NO: 309368 - DNA, 19 bp, Homo sapiens
  siRNA target sequence for RBBP7 (NM_002893.2,1133-1151).
ctacagcgaatttattcta

SEQ ID NO: 309369 - DNA, 19 bp, Homo sapiens
  siRNA target sequence for RBBP7 (NM_002893.2,1165-1183).
cggataagaccgtagcttt

SEQ ID NO: 309370 - DNA, 19 bp, Homo sapiens
  siRNA target sequence for RBBP7 (NM_002893.2,1166-1184).
ggataagaccgtagcttta

SEQ ID NO: 309371 - DNA, 19 bp, Homo sapiens
  siRNA target sequence for RBBP7 (NM_002893.2,1167-1185).
gataagaccgtagctttat

SEQ ID NO: 309372 - DNA, 19 bp, Homo sapiens
  siRNA target sequence for RBBP7 (NM_002893.2,1186-1204).
gggatctgcgtaacttaaa

SEQ ID NO: 309373 - DNA, 19 bp, Homo sapiens
  siRNA target sequence for RBBP7 (NM_002893.2,1187-1205).
ggatctgcgtaacttaaaa

SEQ ID NO: 309374 - DNA, 19 bp, Homo sapiens
  siRNA target sequence for RBBP7 (NM_002893.2,1188-1206).
gatctgcgtaacttaaaat

SEQ ID NO: 309375 - DNA, 19 bp, Homo sapiens
  siRNA target sequence for RBBP7 (NM_002893.2,1191-1209).
ctgcgtaacttaaaattaa

SEQ ID NO: 309376 - DNA, 19 bp, Homo sapiens
  siRNA target sequence for RBBP7 (NM_002893.2,1214-1232).
ccataccttcgaatctcat

SEQ ID NO: 309377 - DNA, 19 bp, Homo sapiens
  siRNA target sequence for RBBP7 (NM_002893.2,1220-1238).
cttcgaatctcataaagat

SEQ ID NO: 309378 - DNA, 19 bp, Homo sapiens
  siRNA target sequence for RBBP7 (NM_002893.2,1223-1241).
cgaatctcataaagatgaa

SEQ ID NO: 309379 - DNA, 19 bp, Homo sapiens
  siRNA target sequence for RBBP7 (NM_002893.2,1253-1271).
ccactggtctccacataat

SEQ ID NO: 309380 - DNA, 19 bp, Homo sapiens
  siRNA target sequence for RBBP7 (NM_002893.2,1459-1477).
cagtgtctgaggataacat

SEQ ID NO: 309381 - DNA, 19 bp, Homo sapiens
  siRNA target sequence for SIL (NM_003035.1,383-401).
ggagcctatatatcctttt

SEQ ID NO: 309382 - DNA, 19 bp, Homo sapiens
  siRNA target sequence for SIL (NM_003035.1,386-404).
gcctatatatccttttgca

SEQ ID NO: 309383 - DNA, 19 bp, Homo sapiens
  siRNA target sequence for SIL (NM_003035.1,490-508).
cgccaactggagatttcat

SEQ ID NO: 309384 - DNA, 19 bp, Homo sapiens
  siRNA target sequence for SIL (NM_003035.1,492-510).
ccaactggagatttcatct

SEQ ID NO: 309385 - DNA, 19 bp, Homo sapiens
  siRNA target sequence for SIL (NM_003035.1,516-534).
catctcagttactacagaa

SEQ ID NO: 309386 - DNA, 19 bp, Homo sapiens
  siRNA target sequence for SIL (NM_003035.1,560-578).
gaccatccgacttgcttat

SEQ ID NO: 309387 - DNA, 19 bp, Homo sapiens
  siRNA target sequence for SIL (NM_003035.1,563-581).
catccgacttgcttatcgt

SEQ ID NO: 309388 - DNA, 19 bp, Homo sapiens
  siRNA target sequence for SIL (NM_003035.1,648-666).
gaagaaggtgtaacattga

SEQ ID NO: 309389 - DNA, 19 bp, Homo sapiens
  siRNA target sequence for SIL (NM_003035.1,665-683).
gacagtagatcgctttgat

SEQ ID NO: 309390 - DNA, 19 bp, Homo sapiens
  siRNA target sequence for SIL (NM_003035.1,696-714).
gtacctgaatgcctagaaa

SEQ ID NO: 309391 - DNA, 19 bp, Homo sapiens
  siRNA target sequence for SIL (NM_003035.1,781-799).
gttcaagagaaatgatagt

SEQ ID NO: 309392 - DNA, 19 bp, Homo sapiens
  siRNA target sequence for SIL (NM_003035.1,794-812).
gatagttcacagtgtagat

SEQ ID NO: 309393 - DNA, 19 bp, Homo sapiens
  siRNA target sequence for SIL (NM_003035.1,833-851).
ggctctacagtgccatata

SEQ ID NO: 309394 - DNA, 19 bp, Homo sapiens
  siRNA target sequence for SIL (NM_003035.1,834-852).
gctctacagtgccatatat

SEQ ID NO: 309395 - DNA, 19 bp, Homo sapiens
  siRNA target sequence for SIL (NM_003035.1,837-855).
ctacagtgccatatatgta

SEQ ID NO: 309396 - DNA, 19 bp, Homo sapiens
  siRNA target sequence for SIL (NM_003035.1,890-908).
cctaagagttcatatcact

SEQ ID NO: 309397 - DNA, 19 bp, Homo sapiens
  siRNA target sequence for SIL (NM_003035.1,930-948).
gtggaatttgacttgcatt

SEQ ID NO: 309398 - DNA, 19 bp, Homo sapiens
  siRNA target sequence for SIL (NM_003035.1,957-975).
gtaactctagcaaataact

SEQ ID NO: 309399 - DNA, 19 bp, Homo sapiens
  siRNA target sequence for SIL (NM_003035.1,961-979).
ctctagcaaataactttaa

SEQ ID NO: 309400 - DNA, 19 bp, Homo sapiens
  siRNA target sequence for SIL (NM_003035.1,1034-1052).
gagcagtaatctgaatatt

SEQ ID NO: 309401 - DNA, 19 bp, Homo sapiens
  siRNA target sequence for SIL (NM_003035.1,1037-1055).
cagtaatctgaatatttct

SEQ ID NO: 309402 - DNA, 19 bp, Homo sapiens
  siRNA target sequence for SIL (NM_003035.1,1065-1083).
gggacttataaatatggat

SEQ ID NO: 309403 - DNA, 19 bp, Homo sapiens
  siRNA target sequence for SIL (NM_003035.1,1066-1084).
ggacttataaatatggata

SEQ ID NO: 309404 - DNA, 19 bp, Homo sapiens
  siRNA target sequence for SIL (NM_003035.1,1102-1120).
cacgcaaattgttactttt

SEQ ID NO: 309405 - DNA, 19 bp, Homo sapiens
  siRNA target sequence for SIL (NM_003035.1,1104-1122).
cgcaaattgttacttttgt

SEQ ID NO: 309406 - DNA, 19 bp, Homo sapiens
  siRNA target sequence for SIL (NM_003035.1,1169-1187).
gctgtctggaattacacat

SEQ ID NO: 309407 - DNA, 19 bp, Homo sapiens
  siRNA target sequence for SIL (NM_003035.1,1176-1194).
ggaattacacatatctata

SEQ ID NO: 309408 - DNA, 19 bp, Homo sapiens
  siRNA target sequence for SIL (NM_003035.1,1213-1231).
gctgtttgcgatacatatt

SEQ ID NO: 309409 - DNA, 19 bp, Homo sapiens
  siRNA target sequence for SIL (NM_003035.1,1216-1234).
gtttgcgatacatattcaa

SEQ ID NO: 309410 - DNA, 19 bp, Homo sapiens
  siRNA target sequence for SIL (NM_003035.1,1220-1238).
gcgatacatattcaattct

SEQ ID NO: 309411 - DNA, 19 bp, Homo sapiens
  siRNA target sequence for SIL (NM_003035.1,1221-1239).
cgatacatattcaattctt

SEQ ID NO: 309412 - DNA, 19 bp, Homo sapiens
  siRNA target sequence for SIL (NM_003035.1,1287-1305).
ctctattctatgacacata

SEQ ID NO: 309413 - DNA, 19 bp, Homo sapiens
  siRNA target sequence for SIL (NM_003035.1,1351-1369).
ctgactttcggtttcagtt

SEQ ID NO: 309414 - DNA, 19 bp, Homo sapiens
  siRNA target sequence for SIL (NM_003035.1,1367-1385).
gttgctaaccagtaaggaa

SEQ ID NO: 309415 - DNA, 19 bp, Homo sapiens
  siRNA target sequence for SIL (NM_003035.1,1375-1393).
ccagtaaggaaacattaca

SEQ ID NO: 309416 - DNA, 19 bp, Homo sapiens
  siRNA target sequence for SIL (NM_003035.1,1407-1425).
gttgaacctcctgacaaaa

SEQ ID NO: 309417 - DNA, 19 bp, Homo sapiens
  siRNA target sequence for SIL (NM_003035.1,1414-1432).
ctcctgacaaaaatccaat

SEQ ID NO: 309418 - DNA, 19 bp, Homo sapiens
  siRNA target sequence for SIL (NM_003035.1,1511-1529).
gaggtcttcccaaaagtta

SEQ ID NO: 309419 - DNA, 19 bp, Homo sapiens
  siRNA target sequence for SIL (NM_003035.1,1537-1555).
ggaagatgccaatacatga

SEQ ID NO: 309420 - DNA, 19 bp, Homo sapiens
  siRNA target sequence for SIL (NM_003035.1,1559-1577).
cgactctggtgttgaagat

SEQ ID NO: 309421 - DNA, 19 bp, Homo sapiens
  siRNA target sequence for SIL (NM_003035.1,1617-1635).
gtgagtcagaagatttcta

SEQ ID NO: 309422 - DNA, 19 bp, Homo sapiens
  siRNA target sequence for SIL (NM_003035.1,1621-1639).
gtcagaagatttctaagat

SEQ ID NO: 309423 - DNA, 19 bp, Homo sapiens
  siRNA target sequence for SIL (NM_003035.1,1644-1662).
ccatcagttcctgaacttt

SEQ ID NO: 309424 - DNA, 19 bp, Homo sapiens
  siRNA target sequence for SIL (NM_003035.1,1668-1686).
gtgttggatggcaatttca

SEQ ID NO: 309425 - DNA, 19 bp, Homo sapiens
  siRNA target sequence for SIL (NM_003035.1,1826-1844).
gccttccttgagaggaata

SEQ ID NO: 309426 - DNA, 19 bp, Homo sapiens
  siRNA target sequence for SIL (NM_003035.1,1831-1849).
ccttgagaggaataccaaa

SEQ ID NO: 309427 - DNA, 19 bp, Homo sapiens
  siRNA target sequence for SIL (NM_003035.1,1863-1881).
gataaaccagctcttttga

SEQ ID NO: 309428 - DNA, 19 bp, Homo sapiens
  siRNA target sequence for SIL (NM_003035.1,1901-1919).
gccacctgcctataagaaa

SEQ ID NO: 309429 - DNA, 19 bp, Homo sapiens
  siRNA target sequence for SIL (NM_003035.1,1926-1944).
ccccataccaggaacagta

SEQ ID NO: 309430 - DNA, 19 bp, Homo sapiens
  siRNA target sequence for SIL (NM_003035.1,1927-1945).
cccataccaggaacagtat

SEQ ID NO: 309431 - DNA, 19 bp, Homo sapiens
  siRNA target sequence for SIL (NM_003035.1,1928-1946).
ccataccaggaacagtatt

SEQ ID NO: 309432 - DNA, 19 bp, Homo sapiens
  siRNA target sequence for SIL (NM_003035.1,1929-1947).
cataccaggaacagtatta

SEQ ID NO: 309433 - DNA, 19 bp, Homo sapiens
  siRNA target sequence for SIL (NM_003035.1,1965-1983).
gggccatctcatgatatat

SEQ ID NO: 309434 - DNA, 19 bp, Homo sapiens
  siRNA target sequence for SIL (NM_003035.1,1967-1985).
gccatctcatgatatattt

SEQ ID NO: 309435 - DNA, 19 bp, Homo sapiens
  siRNA target sequence for SIL (NM_003035.1,2019-2037).
caaaacgaagagtatccta

SEQ ID NO: 309436 - DNA, 19 bp, Homo sapiens
  siRNA target sequence for SIL (NM_003035.1,2024-2042).
cgaagagtatcctataaga

SEQ ID NO: 309437 - DNA, 19 bp, Homo sapiens
  siRNA target sequence for SIL (NM_003035.1,2084-2102).
gtcccaaccacacgatttt

SEQ ID NO: 309438 - DNA, 19 bp, Homo sapiens
  siRNA target sequence for SIL (NM_003035.1,2086-2104).
cccaaccacacgattttgt

SEQ ID NO: 309439 - DNA, 19 bp, Homo sapiens
  siRNA target sequence for SIL (NM_003035.1,2088-2106).
caaccacacgattttgttt

SEQ ID NO: 309440 - DNA, 19 bp, Homo sapiens
  siRNA target sequence for SIL (NM_003035.1,2125-2143).
gaagaccaatggaacttca

SEQ ID NO: 309441 - DNA, 19 bp, Homo sapiens
  siRNA target sequence for SIL (NM_003035.1,2192-2210).
gtgttgtcagcatcatagt

SEQ ID NO: 309442 - DNA, 19 bp, Homo sapiens
  siRNA target sequence for SIL (NM_003035.1,2197-2215).
gtcagcatcatagtcatat

SEQ ID NO: 309443 - DNA, 19 bp, Homo sapiens
  siRNA target sequence for SIL (NM_003035.1,2201-2219).
gcatcatagtcatattcaa

SEQ ID NO: 309444 - DNA, 19 bp, Homo sapiens
  siRNA target sequence for SIL (NM_003035.1,2205-2223).
catagtcatattcaatata

SEQ ID NO: 309445 - DNA, 19 bp, Homo sapiens
  siRNA target sequence for SIL (NM_003035.1,2217-2235).
caatatagtccgctaaatt

SEQ ID NO: 309446 - DNA, 19 bp, Homo sapiens
  siRNA target sequence for SIL (NM_003035.1,2252-2270).
cacagttggatccattcaa

SEQ ID NO: 309447 - DNA, 19 bp, Homo sapiens
  siRNA target sequence for SIL (NM_003035.1,2277-2295).
cagtctgaagcccttcaaa

SEQ ID NO: 309448 - DNA, 19 bp, Homo sapiens
  siRNA target sequence for SIL (NM_003035.1,2329-2347).
ccctgtactgtaatgcatt

SEQ ID NO: 309449 - DNA, 19 bp, Homo sapiens
  siRNA target sequence for SIL (NM_003035.1,2404-2422).
ctccccacagcaatattga

SEQ ID NO: 309450 - DNA, 19 bp, Homo sapiens
  siRNA target sequence for SIL (NM_003035.1,2437-2455).
caagaccgccttcacatat

SEQ ID NO: 309451 - DNA, 19 bp, Homo sapiens
  siRNA target sequence for SIL (NM_003035.1,2440-2458).
gaccgccttcacatatgga

SEQ ID NO: 309452 - DNA, 19 bp, Homo sapiens
  siRNA target sequence for SIL (NM_003035.1,2449-2467).
cacatatggacttatgtaa

SEQ ID NO: 309453 - DNA, 19 bp, Homo sapiens
  siRNA target sequence for SIL (NM_003035.1,2501-2519).
caagactgagtcagataat

SEQ ID NO: 309454 - DNA, 19 bp, Homo sapiens
  siRNA target sequence for SIL (NM_003035.1,2819-2837).
gaagcaagatgataccaaa

SEQ ID NO: 309455 - DNA, 19 bp, Homo sapiens
  siRNA target sequence for SIL (NM_003035.1,2826-2844).
gatgataccaaaatttcca

SEQ ID NO: 309456 - DNA, 19 bp, Homo sapiens
  siRNA target sequence for SIL (NM_003035.1,2863-2881).
ctgtcgatattaataatga

SEQ ID NO: 309457 - DNA, 19 bp, Homo sapiens
  siRNA target sequence for SIL (NM_003035.1,2899-2917).
gtagtgcatcttcattaaa

SEQ ID NO: 309458 - DNA, 19 bp, Homo sapiens
  siRNA target sequence for SIL (NM_003035.1,2992-3010).
ccaactcttctctagttgt

SEQ ID NO: 309459 - DNA, 19 bp, Homo sapiens
  siRNA target sequence for SIL (NM_003035.1,3001-3019).
ctctagttgtgagaaaaga

SEQ ID NO: 309460 - DNA, 19 bp, Homo sapiens
  siRNA target sequence for SIL (NM_003035.1,3050-3068).
ccagctggcagaaagtgta

SEQ ID NO: 309461 - DNA, 19 bp, Homo sapiens
  siRNA target sequence for SIL (NM_003035.1,3060-3078).
gaaagtgtaagcatgtgtt

SEQ ID NO: 309462 - DNA, 19 bp, Homo sapiens
  siRNA target sequence for SIL (NM_003035.1,3094-3112).
cagggggtgccagtaacaa

SEQ ID NO: 309463 - DNA, 19 bp, Homo sapiens
  siRNA target sequence for SIL (NM_003035.1,3096-3114).
gggggtgccagtaacaatt

SEQ ID NO: 309464 - DNA, 19 bp, Homo sapiens
  siRNA target sequence for SIL (NM_003035.1,3098-3116).
gggtgccagtaacaattct

SEQ ID NO: 309465 - DNA, 19 bp, Homo sapiens
  siRNA target sequence for SIL (NM_003035.1,3197-3215).
ggatttattgggtcaagta

SEQ ID NO: 309466 - DNA, 19 bp, Homo sapiens
  siRNA target sequence for SIL (NM_003035.1,3198-3216).
gatttattgggtcaagtaa

SEQ ID NO: 309467 - DNA, 19 bp, Homo sapiens
  siRNA target sequence for SIL (NM_003035.1,3213-3231).
gtaaaccacctattaaata

SEQ ID NO: 309468 - DNA, 19 bp, Homo sapiens
  siRNA target sequence for SIL (NM_003035.1,3256-3274).
cgtctaccaaagcagtaat

SEQ ID NO: 309469 - DNA, 19 bp, Homo sapiens
  siRNA target sequence for SIL (NM_003035.1,3295-3313).
gaacccaaaacgtttacca

SEQ ID NO: 309470 - DNA, 19 bp, Homo sapiens
  siRNA target sequence for SIL (NM_003035.1,3300-3318).
caaaacgtttaccatacaa

SEQ ID NO: 309471 - DNA, 19 bp, Homo sapiens
  siRNA target sequence for SIL (NM_003035.1,3360-3378).
gtccttaatgcaactctta

SEQ ID NO: 309472 - DNA, 19 bp, Homo sapiens
  siRNA target sequence for SIL (NM_003035.1,3391-3409).
gccttggagtaaaaattga

SEQ ID NO: 309473 - DNA, 19 bp, Homo sapiens
  siRNA target sequence for SIL (NM_003035.1,3486-3504).
gtgatctctggattaaact

SEQ ID NO: 309474 - DNA, 19 bp, Homo sapiens
  siRNA target sequence for SIL (NM_003035.1,3543-3561).
cccaatggtgtggatttga

SEQ ID NO: 309475 - DNA, 19 bp, Homo sapiens
  siRNA target sequence for SIL (NM_003035.1,3560-3578).
gagcatggaggcaaatgct

SEQ ID NO: 309476 - DNA, 19 bp, Homo sapiens
  siRNA target sequence for SIL (NM_003035.1,3576-3594).
gctatagctctgaaatatt

SEQ ID NO: 309477 - DNA, 19 bp, Homo sapiens
  siRNA target sequence for SIL (NM_003035.1,3624-3642).
gtcactcgatcgaaccaaa

SEQ ID NO: 309478 - DNA, 19 bp, Homo sapiens
  siRNA target sequence for SIL (NM_003035.1,3626-3644).
cactcgatcgaaccaaaat

SEQ ID NO: 309479 - DNA, 19 bp, Homo sapiens
  siRNA target sequence for SIL (NM_003035.1,3628-3646).
ctcgatcgaaccaaaataa

SEQ ID NO: 309480 - DNA, 19 bp, Homo sapiens
  siRNA target sequence for SIL (NM_003035.1,3630-3648).
cgatcgaaccaaaataatt

SEQ ID NO: 309481 - DNA, 19 bp, Homo sapiens
  siRNA target sequence for SIL (NM_003035.1,3659-3677).
cagccttctccatattaat

SEQ ID NO: 309482 - DNA, 19 bp, Homo sapiens
  siRNA target sequence for SIL (NM_003035.1,3688-3706).
gcacagtggggcttagttt

SEQ ID NO: 309483 - DNA, 19 bp, Homo sapiens
  siRNA target sequence for SIL (NM_003035.1,3689-3707).
cacagtggggcttagttta

SEQ ID NO: 309484 - DNA, 19 bp, Homo sapiens
  siRNA target sequence for SIL (NM_003035.1,3695-3713).
ggggcttagtttaatttca

SEQ ID NO: 309485 - DNA, 19 bp, Homo sapiens
  siRNA target sequence for SIL (NM_003035.1,3764-3782).
cctacaaagcagtgacaat

SEQ ID NO: 309486 - DNA, 19 bp, Homo sapiens
  siRNA target sequence for SIL (NM_003035.1,3765-3783).
ctacaaagcagtgacaata

SEQ ID NO: 309487 - DNA, 19 bp, Homo sapiens
  siRNA target sequence for SIL (NM_003035.1,3805-3823).
ccgacaatgcagatagcaa

SEQ ID NO: 309488 - DNA, 19 bp, Homo sapiens
  siRNA target sequence for SIL (NM_003035.1,3919-3937).
gttctaactgtgaatctgt

SEQ ID NO: 309489 - DNA, 19 bp, Homo sapiens
  siRNA target sequence for SIL (NM_003035.1,3948-3966).
gcagatacgccagtattga

SEQ ID NO: 309490 - DNA, 19 bp, Homo sapiens
  siRNA target sequence for SIL (NM_003035.1,3951-3969).
gatacgccagtattgagaa

SEQ ID NO: 309491 - DNA, 19 bp, Homo sapiens
  siRNA target sequence for SIL (NM_003035.1,3955-3973).
cgccagtattgagaaatat

SEQ ID NO: 309492 - DNA, 19 bp, Homo sapiens
  siRNA target sequence for SIL (NM_003035.1,3956-3974).
gccagtattgagaaatatt

SEQ ID NO: 309493 - DNA, 19 bp, Homo sapiens
  siRNA target sequence for SIL (NM_003035.1,4023-4041).
ccagctttcttagtaaaga

SEQ ID NO: 309494 - DNA, 19 bp, Homo sapiens
  siRNA target sequence for SIL (NM_003035.1,4031-4049).
cttagtaaagaaccttaaa

SEQ ID NO: 309495 - DNA, 19 bp, Homo sapiens
  siRNA target sequence for SIL (NM_003035.1,4035-4053).
gtaaagaaccttaaaccaa

SEQ ID NO: 309496 - DNA, 19 bp, Homo sapiens
  siRNA target sequence for SIL (NM_003035.1,4172-4190).
gatgaatagcatgaattca

SEQ ID NO: 309497 - DNA, 19 bp, Homo sapiens
  siRNA target sequence for SIL (NM_003035.1,4195-4213).
gcaccttcttagatgtaaa

SEQ ID NO: 309498 - DNA, 19 bp, Homo sapiens
  siRNA target sequence for SIL (NM_003035.1,4215-4233).
cgtctcagacagttaccaa

SEQ ID NO: 309499 - DNA, 19 bp, Homo sapiens
  siRNA target sequence for SIL (NM_003035.1,4216-4234).
gtctcagacagttaccaaa

SEQ ID NO: 309500 - DNA, 19 bp, Homo sapiens
  siRNA target sequence for SPOCK (NM_004598.2,227-245).
caaccacggcaatttccta

SEQ ID NO: 309501 - DNA, 19 bp, Homo sapiens
  siRNA target sequence for SPOCK (NM_004598.2,233-251).
cggcaatttcctagacaat

SEQ ID NO: 309502 - DNA, 19 bp, Homo sapiens
  siRNA target sequence for SPOCK (NM_004598.2,303-321).
cgctttcgagacgatgatt

SEQ ID NO: 309503 - DNA, 19 bp, Homo sapiens
  siRNA target sequence for SPOCK (NM_004598.2,304-322).
gctttcgagacgatgatta

SEQ ID NO: 309504 - DNA, 19 bp, Homo sapiens
  siRNA target sequence for SPOCK (NM_004598.2,305-323).
ctttcgagacgatgattat

SEQ ID NO: 309505 - DNA, 19 bp, Homo sapiens
  siRNA target sequence for SPOCK (NM_004598.2,309-327).
cgagacgatgattatttca

SEQ ID NO: 309506 - DNA, 19 bp, Homo sapiens
  siRNA target sequence for SPOCK (NM_004598.2,508-526).
gggttggaccttcgaattt

SEQ ID NO: 309507 - DNA, 19 bp, Homo sapiens
  siRNA target sequence for SPOCK (NM_004598.2,579-597).
gatggccactcctacacat

SEQ ID NO: 309508 - DNA, 19 bp, Homo sapiens
  siRNA target sequence for SPOCK (NM_004598.2,611-629).
ggagttccatgcttgttct

SEQ ID NO: 309509 - DNA, 19 bp, Homo sapiens
  siRNA target sequence for SPOCK (NM_004598.2,614-632).
gttccatgcttgttctact

SEQ ID NO: 309510 - DNA, 19 bp, Homo sapiens
  siRNA target sequence for SPOCK (NM_004598.2,747-765).
gcctcccggctgaaggatt

SEQ ID NO: 309511 - DNA, 19 bp, Homo sapiens
  siRNA target sequence for SPOCK (NM_004598.2,752-770).
ccggctgaaggattggttt

SEQ ID NO: 309512 - DNA, 19 bp, Homo sapiens
  siRNA target sequence for SPOCK (NM_004598.2,1057-1075).
gtctcccttgccagaatga

SEQ ID NO: 309513 - DNA, 19 bp, Homo sapiens
  siRNA target sequence for SPOCK (NM_004598.2,1124-1142).
cttcatacctcggtgtaat

SEQ ID NO: 309514 - DNA, 19 bp, Homo sapiens
  siRNA target sequence for SPOCK (NM_004598.2,1138-1156).
gtaatgaggagggctatta

SEQ ID NO: 309515 - DNA, 19 bp, Homo sapiens
  siRNA target sequence for SPOCK (NM_004598.2,1268-1286).
ggaaacctcaggggatttt

SEQ ID NO: 309516 - DNA, 19 bp, Homo sapiens
  siRNA target sequence for SPOCK (NM_004598.2,1424-1442).
ggatgaggtcgggtacata

SEQ ID NO: 309517 - DNA, 19 bp, Homo sapiens
  siRNA target sequence for SPOCK (NM_004598.2,1425-1443).
gatgaggtcgggtacatat

SEQ ID NO: 309518 - DNA, 19 bp, Homo sapiens
  siRNA target sequence for SPOCK (NM_004598.2,1428-1446).
gaggtcgggtacatatggt

SEQ ID NO: 309519 - DNA, 19 bp, Homo sapiens
  siRNA target sequence for TM4SF8 (NM_005724.4,461-479).
ggacttgccacgtttgtca

SEQ ID NO: 309520 - DNA, 19 bp, Homo sapiens
  siRNA target sequence for TM4SF8 (NM_005724.4,570-588).
gcattcagaaagtgtataa

SEQ ID NO: 309521 - DNA, 19 bp, Homo sapiens
  siRNA target sequence for TM4SF8 (NM_005724.4,624-642).
gggctattgattatgtaca

SEQ ID NO: 309522 - DNA, 19 bp, Homo sapiens
  siRNA target sequence for TM4SF8 (NM_005724.4,653-671).
cattgttgtggaattcaca

SEQ ID NO: 309523 - DNA, 19 bp, Homo sapiens
  siRNA target sequence for TM4SF8 (NM_005724.4,680-698).
gactgggaaaatacagatt

SEQ ID NO: 309524 - DNA, 19 bp, Homo sapiens
  siRNA target sequence for TM4SF8 (NM_005724.4,802-820).
ggggtgtgaggctctagta

SEQ ID NO: 309525 - DNA, 19 bp, Homo sapiens
  siRNA target sequence for TM4SF8 (NM_005724.4,804-822).
ggtgtgaggctctagtagt

SEQ ID NO: 309526 - DNA, 19 bp, Homo sapiens
  siRNA target sequence for TM4SF8 (NM_005724.4,955-973).
catcactggcggaacctat

SEQ ID NO: 309527 - DNA, 19 bp, Homo sapiens
  siRNA target sequence for TM4SF8 (NM_198902.1,462-480).
gacttgccacggtggaaaa

SEQ ID NO: 309528 - DNA, 19 bp, Homo sapiens
  siRNA target sequence for TM4SF9 (NM_005723.2,385-403).
gttgttgcatcaaatactt

SEQ ID NO: 309529 - DNA, 19 bp, Homo sapiens
  siRNA target sequence for TM4SF9 (NM_005723.2,388-406).
gttgcatcaaatacttcat

SEQ ID NO: 309530 - DNA, 19 bp, Homo sapiens
  siRNA target sequence for TM4SF9 (NM_005723.2,392-410).
catcaaatacttcatattt

SEQ ID NO: 309531 - DNA, 19 bp, Homo sapiens
  siRNA target sequence for TM4SF9 (NM_005723.2,670-688).
ctgccggagttctagcatt

SEQ ID NO: 309532 - DNA, 19 bp, Homo sapiens
  siRNA target sequence for TM4SF9 (NM_005723.2,673-691).
ccggagttctagcatttgt

SEQ ID NO: 309533 - DNA, 19 bp, Homo sapiens
  siRNA target sequence for TM4SF9 (NM_005723.2,674-692).
cggagttctagcatttgtt

SEQ ID NO: 309534 - DNA, 19 bp, Homo sapiens
  siRNA target sequence for TM4SF9 (NM_005723.2,745-763).
gagcatatcgggatgacat

SEQ ID NO: 309535 - DNA, 19 bp, Homo sapiens
  siRNA target sequence for TM4SF9 (NM_005723.2,748-766).
catatcgggatgacattga

SEQ ID NO: 309536 - DNA, 19 bp, Homo sapiens
  siRNA target sequence for TM4SF9 (NM_005723.2,825-843).
gctgatgattggaacctaa

SEQ ID NO: 309537 - DNA, 19 bp, Homo sapiens
  siRNA target sequence for TM4SF9 (NM_005723.2,828-846).
gatgattggaacctaaata

SEQ ID NO: 309538 - DNA, 19 bp, Homo sapiens
  siRNA target sequence for TM4SF9 (NM_005723.2,854-872).
caattgcacagattccaat

SEQ ID NO: 309539 - DNA, 19 bp, Homo sapiens
  siRNA target sequence for TM4SF9 (NM_005723.2,984-1002).
cagcagattgtaatctaca

SEQ ID NO: 309540 - DNA, 19 bp, Homo sapiens
  siRNA target sequence for TM4SF9 (NM_005723.2,1051-1069).
ccatcgttgctggtatttt

SEQ ID NO: 309541 - DNA, 19 bp, Homo sapiens
  siRNA target sequence for TPD52L2 (NM_003288.2,435-453).
ctctagcgcctatgtgaaa

SEQ ID NO: 309542 - DNA, 19 bp, Homo sapiens
  siRNA target sequence for TPD52L2 (NM_003288.2,493-511).
cagtcagacctctacaaga

SEQ ID NO: 309543 - DNA, 19 bp, Homo sapiens
  siRNA target sequence for TPD52L2 (NM_003288.2,634-652).
gaccgagttgggaccataa

SEQ ID NO: 309544 - DNA, 19 bp, Homo sapiens
  siRNA target sequence for TPD52L2 (NM_003288.2,637-655).
cgagttgggaccataaagt

SEQ ID NO: 309545 - DNA, 19 bp, Homo sapiens
  siRNA target sequence for TPD52L2 (NM_003288.2,640-658).
gttgggaccataaagtcta

SEQ ID NO: 309546 - DNA, 19 bp, Homo sapiens
  siRNA target sequence for TSPAN-1 (NM_005727.2,214-232).
catctgggtgtcaatcgat

SEQ ID NO: 309547 - DNA, 19 bp, Homo sapiens
  siRNA target sequence for TSPAN-1 (NM_005727.2,230-248).
gatggggcatcctttctga

SEQ ID NO: 309548 - DNA, 19 bp, Homo sapiens
  siRNA target sequence for TSPAN-1 (NM_005727.2,491-509).
gtagtgcctgccatcaaga

SEQ ID NO: 309549 - DNA, 19 bp, Homo sapiens
  siRNA target sequence for TSPAN-1 (NM_005727.2,585-603).
ccaactatacggattttga

SEQ ID NO: 309550 - DNA, 19 bp, Homo sapiens
  siRNA target sequence for TSPAN-1 (NM_005727.2,604-622).
ggactcaccctacttcaaa

SEQ ID NO: 309551 - DNA, 19 bp, Homo sapiens
  siRNA target sequence for TSPAN-1 (NM_005727.2,700-718).
ggctcacgaccaaaaagta

SEQ ID NO: 309552 - DNA, 19 bp, Homo sapiens
  siRNA target sequence for TSPAN-1 (NM_005727.2,742-760).
gtatgacatccgaactaat

SEQ ID NO: 309553 - DNA, 19 bp, Homo sapiens
  siRNA target sequence for TSPAN-1 (NM_005727.2,829-847).
gtatctgtactgcaatcta

SEQ ID NO: 309554 - DNA, 19 bp, Homo sapiens
  siRNA target sequence for TSPAN-2 (NM_005725.2,52-70).
gcctgcggtgcatcaagta

SEQ ID NO: 309555 - DNA, 19 bp, Homo sapiens
  siRNA target sequence for TSPAN-2 (NM_005725.2,108-126).
ggatcggccgtcattgctt

SEQ ID NO: 309556 - DNA, 19 bp, Homo sapiens
  siRNA target sequence for TSPAN-2 (NM_005725.2,109-127).
gatcggccgtcattgcttt

SEQ ID NO: 309557 - DNA, 19 bp, Homo sapiens
  siRNA target sequence for TSPAN-2 (NM_005725.2,113-131).
ggccgtcattgcttttgga

SEQ ID NO: 309558 - DNA, 19 bp, Homo sapiens
  siRNA target sequence for TSPAN-2 (NM_005725.2,142-160).
ggttcggaggtgccataaa

SEQ ID NO: 309559 - DNA, 19 bp, Homo sapiens
  siRNA target sequence for TSPAN-2 (NM_005725.2,311-329).
ctgcctcctggtgatattt

SEQ ID NO: 309560 - DNA, 19 bp, Homo sapiens
  siRNA target sequence for TSPAN-2 (NM_005725.2,314-332).
cctcctggtgatatttgct

SEQ ID NO: 309561 - DNA, 19 bp, Homo sapiens
  siRNA target sequence for TSPAN-2 (NM_005725.2,401-419).
gtatgaagaggcttacaat

SEQ ID NO: 309562 - DNA, 19 bp, Homo sapiens
  siRNA target sequence for TSPAN-2 (NM_005725.2,410-428).
ggcttacaatgattacctt

SEQ ID NO: 309563 - DNA, 19 bp, Homo sapiens
  siRNA target sequence for TSPAN-2 (NM_005725.2,411-429).
gcttacaatgattacctta

SEQ ID NO: 309564 - DNA, 19 bp, Homo sapiens
  siRNA target sequence for TSPAN-2 (NM_005725.2,533-551).
gcttctaggacacaagaat

SEQ ID NO: 309565 - DNA, 19 bp, Homo sapiens
  siRNA target sequence for TSPAN-2 (NM_005725.2,534-552).
cttctaggacacaagaatt

SEQ ID NO: 309566 - DNA, 19 bp, Homo sapiens
  siRNA target sequence for TSPAN-2 (NM_005725.2,548-566).
gaattgcatcgatgaaatt

SEQ ID NO: 309567 - DNA, 19 bp, Homo sapiens
  siRNA target sequence for TSPAN-2 (NM_005725.2,571-589).
ccataatcagtgttaagct

SEQ ID NO: 309568 - DNA, 19 bp, Homo sapiens
  siRNA target sequence for TSPAN-2 (NM_005725.2,601-619).
gaattgtcggtattggaat

SEQ ID NO: 309569 - DNA, 19 bp, Homo sapiens
  siRNA target sequence for TSPAN-2 (NM_005725.2,660-678).
ctctgctgtgcgatacgaa

SEQ ID NO: 309570 - DNA, 19 bp, Homo sapiens
  siRNA target sequence for TSPAN-2 (NM_005725.2,665-683).
ctgtgcgatacgaaactca

SEQ ID NO: 309571 - DNA, 19 bp, Homo sapiens
  siRNA target sequence for TSPAN-2 (NM_005725.2,676-694).
gaaactcacgagatgtgat

SEQ ID NO: 309572 - DNA, 19 bp, Homo sapiens
  siRNA target sequence for FLJ32871 (NM_144674.1,201-219).
gtaccgctacctcaattca

SEQ ID NO: 309573 - DNA, 19 bp, Homo sapiens
  siRNA target sequence for FLJ32871 (NM_144674.1,226-244).
cctagcctcttctacaaga

SEQ ID NO: 309574 - DNA, 19 bp, Homo sapiens
  siRNA target sequence for FLJ32871 (NM_144674.1,227-245).
ctagcctcttctacaagat

SEQ ID NO: 309575 - DNA, 19 bp, Homo sapiens
  siRNA target sequence for FLJ32871 (NM_144674.1,767-785).
ctcaaagaattgatatcca

SEQ ID NO: 309576 - DNA, 19 bp, Homo sapiens
  siRNA target sequence for FLJ32871 (NM_144674.1,826-844).
gacctcgaagacaaaagct

SEQ ID NO: 309577 - DNA, 19 bp, Homo sapiens
  siRNA target sequence for FLJ32871 (NM_144674.1,843-861).
ctcggcccagtgtatcgat

SEQ ID NO: 309578 - DNA, 19 bp, Homo sapiens
  siRNA target sequence for FLJ32871 (NM_144674.1,968-986).
gtaacgacaacatcaaaca

SEQ ID NO: 309579 - DNA, 19 bp, Homo sapiens
  siRNA target sequence for FLJ32871 (NM_144674.1,1121-1139).
cggatgtgaagaataagct

SEQ ID NO: 309580 - DNA, 19 bp, Homo sapiens
  siRNA target sequence for FLJ32871 (NM_144674.1,1295-1313).
gggacatcccgcagttgaa

SEQ ID NO: 309581 - DNA, 19 bp, Homo sapiens
  siRNA target sequence for EML1 (NM_004434.1,555-573).
gctcttccagtggcaaaaa

SEQ ID NO: 309582 - DNA, 19 bp, Homo sapiens
  siRNA target sequence for EML1 (NM_004434.1,662-680).
gtacatgcccaaagatcaa

SEQ ID NO: 309583 - DNA, 19 bp, Homo sapiens
  siRNA target sequence for EML1 (NM_004434.1,675-693).
gatcaagtggattcttaca

SEQ ID NO: 309584 - DNA, 19 bp, Homo sapiens
  siRNA target sequence for EML1 (NM_004434.1,688-706).
cttacagcttggaagcaaa

SEQ ID NO: 309585 - DNA, 19 bp, Homo sapiens
  siRNA target sequence for EML1 (NM_004434.1,760-778).
gtcgagactgccgtaacaa

SEQ ID NO: 309586 - DNA, 19 bp, Homo sapiens
  siRNA target sequence for EML1 (NM_004434.1,798-816).
ggagagaccgtctacttca

SEQ ID NO: 309587 - DNA, 19 bp, Homo sapiens
  siRNA target sequence for EML1 (NM_004434.1,799-817).
gagagaccgtctacttcat

SEQ ID NO: 309588 - DNA, 19 bp, Homo sapiens
  siRNA target sequence for EML1 (NM_004434.1,823-841).
ccgtggtggtgttatacaa

SEQ ID NO: 309589 - DNA, 19 bp, Homo sapiens
  siRNA target sequence for EML1 (NM_004434.1,890-908).
gaagtgcctagcagttcat

SEQ ID NO: 309590 - DNA, 19 bp, Homo sapiens
  siRNA target sequence for EML1 (NM_004434.1,912-930).
gatcggatcacgatagcaa

SEQ ID NO: 309591 - DNA, 19 bp, Homo sapiens
  siRNA target sequence for EML1 (NM_004434.1,946-964).
gcacatcgaaggatggaaa

SEQ ID NO: 309592 - DNA, 19 bp, Homo sapiens
  siRNA target sequence for EML1 (NM_004434.1,947-965).
cacatcgaaggatggaaaa

SEQ ID NO: 309593 - DNA, 19 bp, Homo sapiens
  siRNA target sequence for EML1 (NM_004434.1,991-1009).
gggattctgtgacattgaa

SEQ ID NO: 309594 - DNA, 19 bp, Homo sapiens
  siRNA target sequence for EML1 (NM_004434.1,1012-1030).
ctctccacgtcattggaat

SEQ ID NO: 309595 - DNA, 19 bp, Homo sapiens
  siRNA target sequence for EML1 (NM_004434.1,1016-1034).
ccacgtcattggaataggt

SEQ ID NO: 309596 - DNA, 19 bp, Homo sapiens
  siRNA target sequence for EML1 (NM_004434.1,1017-1035).
cacgtcattggaataggtt

SEQ ID NO: 309597 - DNA, 19 bp, Homo sapiens
  siRNA target sequence for EML1 (NM_004434.1,1048-1066).
cagtcacctgtattgcatt

SEQ ID NO: 309598 - DNA, 19 bp, Homo sapiens
  siRNA target sequence for EML1 (NM_004434.1,1116-1134).
gaccatgtgctctctgtat

SEQ ID NO: 309599 - DNA, 19 bp, Homo sapiens
  siRNA target sequence for EML1 (NM_004434.1,1213-1231).
cggacaccaacatcatagt

SEQ ID NO: 309600 - DNA, 19 bp, Homo sapiens
  siRNA target sequence for EML1 (NM_004434.1,1214-1232).
ggacaccaacatcatagtt

SEQ ID NO: 309601 - DNA, 19 bp, Homo sapiens
  siRNA target sequence for EML1 (NM_004434.1,1350-1368).
gaaaacggtgacaccatta

SEQ ID NO: 309602 - DNA, 19 bp, Homo sapiens
  siRNA target sequence for EML1 (NM_004434.1,1374-1392).
gattcaagtggcaacatct

SEQ ID NO: 309603 - DNA, 19 bp, Homo sapiens
  siRNA target sequence for EML1 (NM_004434.1,1400-1418).
gggaaaaggtacaaatcga

SEQ ID NO: 309604 - DNA, 19 bp, Homo sapiens
  siRNA target sequence for EML1 (NM_004434.1,1401-1419).
ggaaaaggtacaaatcgaa

SEQ ID NO: 309605 - DNA, 19 bp, Homo sapiens
  siRNA target sequence for EML1 (NM_004434.1,1407-1425).
ggtacaaatcgaataagct

SEQ ID NO: 309606 - DNA, 19 bp, Homo sapiens
  siRNA target sequence for EML1 (NM_004434.1,1525-1543).
cttggagcggaaactatca

SEQ ID NO: 309607 - DNA, 19 bp, Homo sapiens
  siRNA target sequence for EML1 (NM_004434.1,1528-1546).
ggagcggaaactatcaaaa

SEQ ID NO: 309608 - DNA, 19 bp, Homo sapiens
  siRNA target sequence for EML1 (NM_004434.1,1529-1547).
gagcggaaactatcaaaaa

SEQ ID NO: 309609 - DNA, 19 bp, Homo sapiens
  siRNA target sequence for EML1 (NM_004434.1,1531-1549).
gcggaaactatcaaaaact

SEQ ID NO: 309610 - DNA, 19 bp, Homo sapiens
  siRNA target sequence for EML1 (NM_004434.1,1558-1576).
cggagattccagaacagtt

SEQ ID NO: 309611 - DNA, 19 bp, Homo sapiens
  siRNA target sequence for EML1 (NM_004434.1,1603-1621).
ggaaaggcgatgtgatctt

SEQ ID NO: 309612 - DNA, 19 bp, Homo sapiens
  siRNA target sequence for EML1 (NM_004434.1,1667-1685).
ggacttcacacccattact

SEQ ID NO: 309613 - DNA, 19 bp, Homo sapiens
  siRNA target sequence for EML1 (NM_004434.1,1794-1812).
cgtcccgtctgggacaaaa

SEQ ID NO: 309614 - DNA, 19 bp, Homo sapiens
  siRNA target sequence for EML1 (NM_004434.1,1798-1816).
ccgtctgggacaaaataat

SEQ ID NO: 309615 - DNA, 19 bp, Homo sapiens
  siRNA target sequence for EML1 (NM_004434.1,1799-1817).
cgtctgggacaaaataata

SEQ ID NO: 309616 - DNA, 19 bp, Homo sapiens
  siRNA target sequence for EML1 (NM_004434.1,1927-1945).
ccgttcacacagatggaaa

SEQ ID NO: 309617 - DNA, 19 bp, Homo sapiens
  siRNA target sequence for EML1 (NM_004434.1,2004-2022).
catgacaactgcatctata

SEQ ID NO: 309618 - DNA, 19 bp, Homo sapiens
  siRNA target sequence for EML1 (NM_004434.1,2097-2115).
cacctggactggtctgtaa

SEQ ID NO: 309619 - DNA, 19 bp, Homo sapiens
  siRNA target sequence for EML1 (NM_004434.1,2119-2137).
cacagttcctcgtgtcaaa

SEQ ID NO: 309620 - DNA, 19 bp, Homo sapiens
  siRNA target sequence for EML1 (NM_004434.1,2140-2158).
ccggagactacgaaatcct

SEQ ID NO: 309621 - DNA, 19 bp, Homo sapiens
  siRNA target sequence for EML1 (NM_004434.1,2187-2205).
gtcgtaagtgtggaaacta

SEQ ID NO: 309622 - DNA, 19 bp, Homo sapiens
  siRNA target sequence for EML1 (NM_004434.1,2213-2231).
cattgaatgggctacctat

SEQ ID NO: 309623 - DNA, 19 bp, Homo sapiens
  siRNA target sequence for EML1 (NM_004434.1,2243-2261).
gggattccatgtttttgga

SEQ ID NO: 309624 - DNA, 19 bp, Homo sapiens
  siRNA target sequence for EML1 (NM_004434.1,2278-2296).
cggacggaaccgacatcaa

SEQ ID NO: 309625 - DNA, 19 bp, Homo sapiens
  siRNA target sequence for EML1 (NM_004434.1,2279-2297).
ggacggaaccgacatcaat

SEQ ID NO: 309626 - DNA, 19 bp, Homo sapiens
  siRNA target sequence for SPRY2 (NM_005842.2,667-685).
cactcgcaggtccattctt

SEQ ID NO: 309627 - DNA, 19 bp, Homo sapiens
  siRNA target sequence for SPRY2 (NM_005842.2,669-687).
ctcgcaggtccattcttct

SEQ ID NO: 309628 - DNA, 19 bp, Homo sapiens
  siRNA target sequence for SPRY2 (NM_005842.2,697-715).
cctctgtccagatccataa

SEQ ID NO: 309629 - DNA, 19 bp, Homo sapiens
  siRNA target sequence for SPRY2 (NM_005842.2,833-851).
gggtgcaacccaaatctga

SEQ ID NO: 309630 - DNA, 19 bp, Homo sapiens
  siRNA target sequence for SPRY2 (NM_005842.2,1004-1022).
cggcccagaacgtgattga

SEQ ID NO: 309631 - DNA, 19 bp, Homo sapiens
  siRNA target sequence for SPRY2 (NM_005842.2,1006-1024).
gcccagaacgtgattgact

SEQ ID NO: 309632 - DNA, 19 bp, Homo sapiens
  siRNA target sequence for SPRY2 (NM_005842.2,1007-1025).
cccagaacgtgattgacta

SEQ ID NO: 309633 - DNA, 19 bp, Homo sapiens
  siRNA target sequence for SPRY2 (NM_005842.2,1059-1077).
ctatcactgttctaatgat

SEQ ID NO: 309634 - DNA, 19 bp, Homo sapiens
  siRNA target sequence for SPRY2 (NM_005842.2,1150-1168).
ggtgtcatgtccctctttt

SEQ ID NO: 309635 - DNA, 19 bp, Homo sapiens
  siRNA target sequence for SPRY2 (NM_005842.2,1151-1169).
gtgtcatgtccctcttttt

SEQ ID NO: 309636 - DNA, 19 bp, Homo sapiens
  siRNA target sequence for SPRY2 (NM_005842.2,1195-1213).
gccaagggttgccttaaat

SEQ ID NO: 309637 - DNA, 19 bp, Homo sapiens
  siRNA target sequence for SPRY2 (NM_005842.2,1196-1214).
ccaagggttgccttaaatt

SEQ ID NO: 309638 - DNA, 19 bp, Homo sapiens
  siRNA target sequence for SPRY2 (NM_005842.2,1245-1263).
gcctggttgccgctgtaaa

SEQ ID NO: 309639 - DNA, 19 bp, Homo sapiens
  siRNA target sequence for SPRY2 (NM_005842.2,1246-1264).
cctggttgccgctgtaaaa

SEQ ID NO: 309640 - DNA, 19 bp, Homo sapiens
  siRNA target sequence for SPRY2 (NM_005842.2,1247-1265).
ctggttgccgctgtaaaaa

SEQ ID NO: 309641 - DNA, 19 bp, Homo sapiens
  siRNA target sequence for SPRY2 (NM_005842.2,1249-1267).
ggttgccgctgtaaaaact

SEQ ID NO: 309642 - DNA, 19 bp, Homo sapiens
  siRNA target sequence for SPRY2 (NM_005842.2,1257-1275).
ctgtaaaaactcaaacaca

SEQ ID NO: 309643 - DNA, 19 bp, Homo sapiens
  siRNA target sequence for SPRY2 (NM_005842.2,1272-1290).
cacagtttgctgcaaagtt

SEQ ID NO: 309644 - DNA, 19 bp, Homo sapiens
  siRNA target sequence for TUBGCP2 (NM_006659.1,134-152).
gggctgaggtctacattga

SEQ ID NO: 309645 - DNA, 19 bp, Homo sapiens
  siRNA target sequence for TUBGCP2 (NM_006659.1,151-169).
gacctgcttcaaaagaaca

SEQ ID NO: 309646 - DNA, 19 bp, Homo sapiens
  siRNA target sequence for TUBGCP2 (NM_006659.1,200-218).
ctcacagtgccaaggttaa

SEQ ID NO: 309647 - DNA, 19 bp, Homo sapiens
  siRNA target sequence for TUBGCP2 (NM_006659.1,304-322).
ctggtgtacctgttgtcaa

SEQ ID NO: 309648 - DNA, 19 bp, Homo sapiens
  siRNA target sequence for TUBGCP2 (NM_006659.1,342-360).
gactctgcagtacttacaa

SEQ ID NO: 309649 - DNA, 19 bp, Homo sapiens
  siRNA target sequence for TUBGCP2 (NM_006659.1,547-565).
cgagacaagcagaacaaaa

SEQ ID NO: 309650 - DNA, 19 bp, Homo sapiens
  siRNA target sequence for TUBGCP2 (NM_006659.1,595-613).
ccagcatgggtgtatgaga

SEQ ID NO: 309651 - DNA, 19 bp, Homo sapiens
  siRNA target sequence for TUBGCP2 (NM_006659.1,876-894).
cgctgtgaccaggttcatt

SEQ ID NO: 309652 - DNA, 19 bp, Homo sapiens
  siRNA target sequence for TUBGCP2 (NM_006659.1,878-896).
ctgtgaccaggttcattga

SEQ ID NO: 309653 - DNA, 19 bp, Homo sapiens
  siRNA target sequence for TUBGCP2 (NM_006659.1,1027-1045).
cagaagctctggttctaca

SEQ ID NO: 309654 - DNA, 19 bp, Homo sapiens
  siRNA target sequence for TUBGCP2 (NM_006659.1,1183-1201).
gagctatgcctgtacctaa

SEQ ID NO: 309655 - DNA, 19 bp, Homo sapiens
  siRNA target sequence for TUBGCP2 (NM_006659.1,1260-1278).
catccacgacccatacagt

SEQ ID NO: 309656 - DNA, 19 bp, Homo sapiens
  siRNA target sequence for TUBGCP2 (NM_006659.1,1266-1284).
cgacccatacagtgagttt

SEQ ID NO: 309657 - DNA, 19 bp, Homo sapiens
  siRNA target sequence for TUBGCP2 (NM_006659.1,1316-1334).
ggatccaggaggattacaa

SEQ ID NO: 309658 - DNA, 19 bp, Homo sapiens
  siRNA target sequence for TUBGCP2 (NM_006659.1,1327-1345).
gattacaacgacaagtact

SEQ ID NO: 309659 - DNA, 19 bp, Homo sapiens
  siRNA target sequence for TUBGCP2 (NM_006659.1,1410-1428).
gatcctcagcacaggaaaa

SEQ ID NO: 309660 - DNA, 19 bp, Homo sapiens
  siRNA target sequence for TUBGCP2 (NM_006659.1,1466-1484).
cctgcccggtggctaaaga

SEQ ID NO: 309661 - DNA, 19 bp, Homo sapiens
  siRNA target sequence for TUBGCP2 (NM_006659.1,1469-1487).
gcccggtggctaaagagat

SEQ ID NO: 309662 - DNA, 19 bp, Homo sapiens
  siRNA target sequence for TUBGCP2 (NM_006659.1,1472-1490).
cggtggctaaagagatcat

SEQ ID NO: 309663 - DNA, 19 bp, Homo sapiens
  siRNA target sequence for TUBGCP2 (NM_006659.1,1474-1492).
gtggctaaagagatcatct

SEQ ID NO: 309664 - DNA, 19 bp, Homo sapiens
  siRNA target sequence for TUBGCP2 (NM_006659.1,1485-1503).
gatcatctacacgttaaaa

SEQ ID NO: 309665 - DNA, 19 bp, Homo sapiens
  siRNA target sequence for TUBGCP2 (NM_006659.1,1907-1925).
ccttctctttcgactacat

SEQ ID NO: 309666 - DNA, 19 bp, Homo sapiens
  siRNA target sequence for TUBGCP2 (NM_006659.1,2111-2129).
ggcagcgaatgctcaactt

SEQ ID NO: 309667 - DNA, 19 bp, Homo sapiens
  siRNA target sequence for TUBGCP2 (NM_006659.1,2122-2140).
ctcaacttcgtccagaata

SEQ ID NO: 309668 - DNA, 19 bp, Homo sapiens
  siRNA target sequence for TUBGCP2 (NM_006659.1,2124-2142).
caacttcgtccagaatatt

SEQ ID NO: 309669 - DNA, 19 bp, Homo sapiens
  siRNA target sequence for TUBGCP2 (NM_006659.1,2360-2378).
cacagagcatgaaattaga

SEQ ID NO: 309670 - DNA, 19 bp, Homo sapiens
  siRNA target sequence for TUBGCP2 (NM_006659.1,2578-2596).
cggctgagcatctatagca

SEQ ID NO: 309671 - DNA, 19 bp, Homo sapiens
  siRNA target sequence for TUBGCP2 (NM_006659.1,2631-2649).
ctccaggcttgacttcaat

SEQ ID NO: 309672 - DNA, 19 bp, Homo sapiens
  siRNA target sequence for TUBGCP3 (NM_006322.3,311-329).
caacttcgccccaactgtt

SEQ ID NO: 309673 - DNA, 19 bp, Homo sapiens
  siRNA target sequence for TUBGCP3 (NM_006322.3,314-332).
cttcgccccaactgttgaa

SEQ ID NO: 309674 - DNA, 19 bp, Homo sapiens
  siRNA target sequence for TUBGCP3 (NM_006322.3,317-335).
cgccccaactgttgaaaga

SEQ ID NO: 309675 - DNA, 19 bp, Homo sapiens
  siRNA target sequence for TUBGCP3 (NM_006322.3,319-337).
ccccaactgttgaaagaga

SEQ ID NO: 309676 - DNA, 19 bp, Homo sapiens
  siRNA target sequence for TUBGCP3 (NM_006322.3,320-338).
cccaactgttgaaagagat

SEQ ID NO: 309677 - DNA, 19 bp, Homo sapiens
  siRNA target sequence for TUBGCP3 (NM_006322.3,417-435).
ctccacagaaaacttcatt

SEQ ID NO: 309678 - DNA, 19 bp, Homo sapiens
  siRNA target sequence for TUBGCP3 (NM_006322.3,432-450).
cattcacagggagttttga

SEQ ID NO: 309679 - DNA, 19 bp, Homo sapiens
  siRNA target sequence for TUBGCP3 (NM_006322.3,507-525).
cagccaagcaaggtttcta

SEQ ID NO: 309680 - DNA, 19 bp, Homo sapiens
  siRNA target sequence for TUBGCP3 (NM_006322.3,527-545).
ctatgctacgttatttgct

SEQ ID NO: 309681 - DNA, 19 bp, Homo sapiens
  siRNA target sequence for TUBGCP3 (NM_006322.3,709-727).
cgcctgcgccacaatctct

SEQ ID NO: 309682 - DNA, 19 bp, Homo sapiens
  siRNA target sequence for TUBGCP3 (NM_006322.3,792-810).
cgactcgcatggactttaa

SEQ ID NO: 309683 - DNA, 19 bp, Homo sapiens
  siRNA target sequence for TUBGCP3 (NM_006322.3,898-916).
gggatacgggtggtactat

SEQ ID NO: 309684 - DNA, 19 bp, Homo sapiens
  siRNA target sequence for TUBGCP3 (NM_006322.3,904-922).
cgggtggtactatggaaat

SEQ ID NO: 309685 - DNA, 19 bp, Homo sapiens
  siRNA target sequence for TUBGCP3 (NM_006322.3,905-923).
gggtggtactatggaaatt

SEQ ID NO: 309686 - DNA, 19 bp, Homo sapiens
  siRNA target sequence for TUBGCP3 (NM_006322.3,906-924).
ggtggtactatggaaatta

SEQ ID NO: 309687 - DNA, 19 bp, Homo sapiens
  siRNA target sequence for TUBGCP3 (NM_006322.3,910-928).
gtactatggaaattacaga

SEQ ID NO: 309688 - DNA, 19 bp, Homo sapiens
  siRNA target sequence for TUBGCP3 (NM_006322.3,933-951).
gctctggtaagggacattt

SEQ ID NO: 309689 - DNA, 19 bp, Homo sapiens
  siRNA target sequence for TUBGCP3 (NM_006322.3,934-952).
ctctggtaagggacatttt

SEQ ID NO: 309690 - DNA, 19 bp, Homo sapiens
  siRNA target sequence for TUBGCP3 (NM_006322.3,936-954).
ctggtaagggacattttgt

SEQ ID NO: 309691 - DNA, 19 bp, Homo sapiens
  siRNA target sequence for TUBGCP3 (NM_006322.3,956-974).
cgtctttcagggcatagat

SEQ ID NO: 309692 - DNA, 19 bp, Homo sapiens
  siRNA target sequence for TUBGCP3 (NM_006322.3,966-984).
ggcatagatggcaaaaaca

SEQ ID NO: 309693 - DNA, 19 bp, Homo sapiens
  siRNA target sequence for TUBGCP3 (NM_006322.3,992-1010).
gaacaacactgaaaattgt

SEQ ID NO: 309694 - DNA, 19 bp, Homo sapiens
  siRNA target sequence for TUBGCP3 (NM_006322.3,1009-1027).
gttacaaagtagaaggaaa

SEQ ID NO: 309695 - DNA, 19 bp, Homo sapiens
  siRNA target sequence for TUBGCP3 (NM_006322.3,1057-1075).
cagcagtcaggctttctga

SEQ ID NO: 309696 - DNA, 19 bp, Homo sapiens
  siRNA target sequence for TUBGCP3 (NM_006322.3,1076-1094).
gttgggatggttgcataat

SEQ ID NO: 309697 - DNA, 19 bp, Homo sapiens
  siRNA target sequence for TUBGCP3 (NM_006322.3,1143-1161).
ctcgtcgggcagagctttt

SEQ ID NO: 309698 - DNA, 19 bp, Homo sapiens
  siRNA target sequence for TUBGCP3 (NM_006322.3,1182-1200).
ctcagagaatactatcgat

SEQ ID NO: 309699 - DNA, 19 bp, Homo sapiens
  siRNA target sequence for TUBGCP3 (NM_006322.3,1256-1274).
gggacttgagagtagttta

SEQ ID NO: 309700 - DNA, 19 bp, Homo sapiens
  siRNA target sequence for TUBGCP3 (NM_006322.3,1257-1275).
ggacttgagagtagtttaa

SEQ ID NO: 309701 - DNA, 19 bp, Homo sapiens
  siRNA target sequence for TUBGCP3 (NM_006322.3,1289-1307).
cctggtttggacctatgat

SEQ ID NO: 309702 - DNA, 19 bp, Homo sapiens
  siRNA target sequence for TUBGCP3 (NM_006322.3,1301-1319).
ctatgatcccaaaatacga

SEQ ID NO: 309703 - DNA, 19 bp, Homo sapiens
  siRNA target sequence for TUBGCP3 (NM_006322.3,1384-1402).
ctgtccacgcctacacaaa

SEQ ID NO: 309704 - DNA, 19 bp, Homo sapiens
  siRNA target sequence for TUBGCP3 (NM_006322.3,1386-1404).
gtccacgcctacacaaaaa

SEQ ID NO: 309705 - DNA, 19 bp, Homo sapiens
  siRNA target sequence for TUBGCP3 (NM_006322.3,1475-1493).
cctgtaccgctggatatat

SEQ ID NO: 309706 - DNA, 19 bp, Homo sapiens
  siRNA target sequence for TUBGCP3 (NM_006322.3,1478-1496).
gtaccgctggatatatgat

SEQ ID NO: 309707 - DNA, 19 bp, Homo sapiens
  siRNA target sequence for TUBGCP3 (NM_006322.3,1508-1526).
ggacacttaccacgaattt

SEQ ID NO: 309708 - DNA, 19 bp, Homo sapiens
  siRNA target sequence for TUBGCP3 (NM_006322.3,1509-1527).
gacacttaccacgaatttt

SEQ ID NO: 309709 - DNA, 19 bp, Homo sapiens
  siRNA target sequence for TUBGCP3 (NM_006322.3,1511-1529).
cacttaccacgaatttttt

SEQ ID NO: 309710 - DNA, 19 bp, Homo sapiens
  siRNA target sequence for TUBGCP3 (NM_006322.3,1513-1531).
cttaccacgaattttttgt

SEQ ID NO: 309711 - DNA, 19 bp, Homo sapiens
  siRNA target sequence for TUBGCP3 (NM_006322.3,1533-1551).
gcatcagatccaacagtta

SEQ ID NO: 309712 - DNA, 19 bp, Homo sapiens
  siRNA target sequence for TUBGCP3 (NM_006322.3,1534-1552).
catcagatccaacagttaa

SEQ ID NO: 309713 - DNA, 19 bp, Homo sapiens
  siRNA target sequence for TUBGCP3 (NM_006322.3,1561-1579).
gactgtggcacgacaagta

SEQ ID NO: 309714 - DNA, 19 bp, Homo sapiens
  siRNA target sequence for TUBGCP3 (NM_006322.3,1563-1581).
ctgtggcacgacaagtata

SEQ ID NO: 309715 - DNA, 19 bp, Homo sapiens
  siRNA target sequence for TUBGCP3 (NM_006322.3,1565-1583).
gtggcacgacaagtatact

SEQ ID NO: 309716 - DNA, 19 bp, Homo sapiens
  siRNA target sequence for TUBGCP3 (NM_006322.3,1567-1585).
ggcacgacaagtatacttt

SEQ ID NO: 309717 - DNA, 19 bp, Homo sapiens
  siRNA target sequence for TUBGCP3 (NM_006322.3,1594-1612).
cgatgattccttcgtttat

SEQ ID NO: 309718 - DNA, 19 bp, Homo sapiens
  siRNA target sequence for TUBGCP3 (NM_006322.3,1634-1652).
ggtccttttgataggaaaa

SEQ ID NO: 309719 - DNA, 19 bp, Homo sapiens
  siRNA target sequence for TUBGCP3 (NM_006322.3,1635-1653).
gtccttttgataggaaaat

SEQ ID NO: 309720 - DNA, 19 bp, Homo sapiens
  siRNA target sequence for TUBGCP3 (NM_006322.3,1664-1682).
cttgcaccaagtttgtcat

SEQ ID NO: 309721 - DNA, 19 bp, Homo sapiens
  siRNA target sequence for TUBGCP3 (NM_006322.3,1740-1758).
gacgctgcagacctattca

SEQ ID NO: 309722 - DNA, 19 bp, Homo sapiens
  siRNA target sequence for TUBGCP3 (NM_006322.3,1742-1760).
cgctgcagacctattcaca

SEQ ID NO: 309723 - DNA, 19 bp, Homo sapiens
  siRNA target sequence for TUBGCP3 (NM_006322.3,1784-1802).
gaagattgatgctgcttat

SEQ ID NO: 309724 - DNA, 19 bp, Homo sapiens
  siRNA target sequence for TUBGCP3 (NM_006322.3,1820-1838).
cctgttggatgttctcaat

SEQ ID NO: 309725 - DNA, 19 bp, Homo sapiens
  siRNA target sequence for TUBGCP3 (NM_006322.3,1890-1908).
cttggtcaaggagacttta

SEQ ID NO: 309726 - DNA, 19 bp, Homo sapiens
  siRNA target sequence for TUBGCP3 (NM_006322.3,1893-1911).
ggtcaaggagactttataa

SEQ ID NO: 309727 - DNA, 19 bp, Homo sapiens
  siRNA target sequence for TUBGCP3 (NM_006322.3,1925-1943).
cttgctaaaaccagaactt

SEQ ID NO: 309728 - DNA, 19 bp, Homo sapiens
  siRNA target sequence for TUBGCP3 (NM_006322.3,1947-1965).
cgtccagctacgactttgt

SEQ ID NO: 309729 - DNA, 19 bp, Homo sapiens
  siRNA target sequence for TUBGCP3 (NM_006322.3,1948-1966).
gtccagctacgactttgta

SEQ ID NO: 309730 - DNA, 19 bp, Homo sapiens
  siRNA target sequence for TUBGCP3 (NM_006322.3,1951-1969).
cagctacgactttgtatca

SEQ ID NO: 309731 - DNA, 19 bp, Homo sapiens
  siRNA target sequence for TUBGCP3 (NM_006322.3,1957-1975).
cgactttgtatcagcataa

SEQ ID NO: 309732 - DNA, 19 bp, Homo sapiens
  siRNA target sequence for TUBGCP3 (NM_006322.3,2008-2026).
ccaccaacgcacagtttga

SEQ ID NO: 309733 - DNA, 19 bp, Homo sapiens
  siRNA target sequence for TUBGCP3 (NM_006322.3,2104-2122).
gcctcgattatcatgttga

SEQ ID NO: 309734 - DNA, 19 bp, Homo sapiens
  siRNA target sequence for TUBGCP3 (NM_006322.3,2118-2136).
gttgacggaccaattgcaa

SEQ ID NO: 309735 - DNA, 19 bp, Homo sapiens
  siRNA target sequence for TUBGCP3 (NM_006322.3,2159-2177).
gagccactacctaagagta

SEQ ID NO: 309736 - DNA, 19 bp, Homo sapiens
  siRNA target sequence for TUBGCP3 (NM_006322.3,2161-2179).
gccactacctaagagtatt

SEQ ID NO: 309737 - DNA, 19 bp, Homo sapiens
  siRNA target sequence for TUBGCP3 (NM_006322.3,2163-2181).
cactacctaagagtattta

SEQ ID NO: 309738 - DNA, 19 bp, Homo sapiens
  siRNA target sequence for TUBGCP3 (NM_006322.3,2194-2212).
gggcgaagcggatggaata

SEQ ID NO: 309739 - DNA, 19 bp, Homo sapiens
  siRNA target sequence for TUBGCP3 (NM_006322.3,2196-2214).
gcgaagcggatggaataca

SEQ ID NO: 309740 - DNA, 19 bp, Homo sapiens
  siRNA target sequence for TUBGCP3 (NM_006322.3,2197-2215).
cgaagcggatggaatacat

SEQ ID NO: 309741 - DNA, 19 bp, Homo sapiens
  siRNA target sequence for TUBGCP3 (NM_006322.3,2288-2306).
gctgcaccagtgtcacatt

SEQ ID NO: 309742 - DNA, 19 bp, Homo sapiens
  siRNA target sequence for TUBGCP3 (NM_006322.3,2311-2329).
cctctgagatggtccattt

SEQ ID NO: 309743 - DNA, 19 bp, Homo sapiens
  siRNA target sequence for TUBGCP3 (NM_006322.3,2314-2332).
ctgagatggtccatttcat

SEQ ID NO: 309744 - DNA, 19 bp, Homo sapiens
  siRNA target sequence for TUBGCP3 (NM_006322.3,2318-2336).
gatggtccatttcattcat

SEQ ID NO: 309745 - DNA, 19 bp, Homo sapiens
  siRNA target sequence for TUBGCP3 (NM_006322.3,2334-2352).
catcagatgcagtattaca

SEQ ID NO: 309746 - DNA, 19 bp, Homo sapiens
  siRNA target sequence for TUBGCP3 (NM_006322.3,2361-2379).
gaggtgcttgaatgttctt

SEQ ID NO: 309747 - DNA, 19 bp, Homo sapiens
  siRNA target sequence for TUBGCP3 (NM_006322.3,2434-2452).
ctgcacacgaggtgttctt

SEQ ID NO: 309748 - DNA, 19 bp, Homo sapiens
  siRNA target sequence for TUBGCP3 (NM_006322.3,2437-2455).
cacacgaggtgttcttaga

SEQ ID NO: 309749 - DNA, 19 bp, Homo sapiens
  siRNA target sequence for TUBGCP3 (NM_006322.3,2439-2457).
cacgaggtgttcttagaca

SEQ ID NO: 309750 - DNA, 19 bp, Homo sapiens
  siRNA target sequence for TUBGCP3 (NM_006322.3,2487-2505).
gactccagggcacttttaa

SEQ ID NO: 309751 - DNA, 19 bp, Homo sapiens
  siRNA target sequence for TUBGCP3 (NM_006322.3,2492-2510).
cagggcacttttaaatcaa

SEQ ID NO: 309752 - DNA, 19 bp, Homo sapiens
  siRNA target sequence for TUBGCP3 (NM_006322.3,2494-2512).
gggcacttttaaatcaact

SEQ ID NO: 309753 - DNA, 19 bp, Homo sapiens
  siRNA target sequence for TUBGCP3 (NM_006322.3,2495-2513).
ggcacttttaaatcaactt

SEQ ID NO: 309754 - DNA, 19 bp, Homo sapiens
  siRNA target sequence for TUBGCP3 (NM_006322.3,2515-2533).
gagctgtgtttgatcaaat

SEQ ID NO: 309755 - DNA, 19 bp, Homo sapiens
  siRNA target sequence for TUBGCP3 (NM_006322.3,2593-2611).
gacgattacagtttgaaga

SEQ ID NO: 309756 - DNA, 19 bp, Homo sapiens
  siRNA target sequence for TUBGCP3 (NM_006322.3,2719-2737).
gctcacagttgcgaatatt

SEQ ID NO: 309757 - DNA, 19 bp, Homo sapiens
  siRNA target sequence for TUBGCP3 (NM_006322.3,2730-2748).
cgaatattgacccatttct

SEQ ID NO: 309758 - DNA, 19 bp, Homo sapiens
  siRNA target sequence for PLEK2 (NM_016445.1,231-249).
gcccctgcctggagtatga

SEQ ID NO: 309759 - DNA, 19 bp, Homo sapiens
  siRNA target sequence for PLEK2 (NM_016445.1,232-250).
cccctgcctggagtatgaa

SEQ ID NO: 309760 - DNA, 19 bp, Homo sapiens
  siRNA target sequence for PLEK2 (NM_016445.1,255-273).
gaccgctcctcattaagct

SEQ ID NO: 309761 - DNA, 19 bp, Homo sapiens
  siRNA target sequence for PLEK2 (NM_016445.1,703-721).
cacagccctgtacactttt

SEQ ID NO: 309762 - DNA, 19 bp, Homo sapiens
  siRNA target sequence for PLEK2 (NM_016445.1,767-785).
ctgagcactgtggagttaa

SEQ ID NO: 309763 - DNA, 19 bp, Homo sapiens
  siRNA target sequence for PLEK2 (NM_016445.1,769-787).
gagcactgtggagttaagt

SEQ ID NO: 309764 - DNA, 19 bp, Homo sapiens
  siRNA target sequence for PLEK2 (NM_016445.1,786-804).
gtggcacggtggtgaaaca

SEQ ID NO: 309765 - DNA, 19 bp, Homo sapiens
  siRNA target sequence for PLEK2 (NM_016445.1,844-862).
gaaggtgcgtcgctttgtt

SEQ ID NO: 309766 - DNA, 19 bp, Homo sapiens
  siRNA target sequence for PLEK2 (NM_016445.1,847-865).
ggtgcgtcgctttgttcta

SEQ ID NO: 309767 - DNA, 19 bp, Homo sapiens
  siRNA target sequence for PLEK2 (NM_016445.1,848-866).
gtgcgtcgctttgttctaa

SEQ ID NO: 309768 - DNA, 19 bp, Homo sapiens
  siRNA target sequence for PLEK2 (NM_016445.1,852-870).
gtcgctttgttctaaggaa

SEQ ID NO: 309769 - DNA, 19 bp, Homo sapiens
  siRNA target sequence for PLEK2 (NM_016445.1,876-894).
cagctttcctgcattacta

SEQ ID NO: 309770 - DNA, 19 bp, Homo sapiens
  siRNA target sequence for PLEK2 (NM_016445.1,879-897).
ctttcctgcattactatga

SEQ ID NO: 309771 - DNA, 19 bp, Homo sapiens
  siRNA target sequence for PLEK2 (NM_016445.1,892-910).
ctatgacccttccaaagaa

SEQ ID NO: 309772 - DNA, 19 bp, Homo sapiens
  siRNA target sequence for PLEK2 (NM_016445.1,976-994).
cgttcccactggggttaaa

SEQ ID NO: 309773 - DNA, 19 bp, Homo sapiens
  siRNA target sequence for PLEK2 (NM_016445.1,1075-1093).
gcgagccgagtggattgaa

SEQ ID NO: 309774 - DNA, 19 bp, Homo sapiens
  siRNA target sequence for PLEK2 (NM_016445.1,1080-1098).
ccgagtggattgaagctat

SEQ ID NO: 309775 - DNA, 19 bp, Homo sapiens
  siRNA target sequence for CAP1 (NM_006367.2,113-131).
cctggaggcagtatctcat

SEQ ID NO: 309776 - DNA, 19 bp, Homo sapiens
  siRNA target sequence for CAP1 (NM_006367.2,222-240).
cctgtggcagagtacttga

SEQ ID NO: 309777 - DNA, 19 bp, Homo sapiens
  siRNA target sequence for CAP1 (NM_006367.2,233-251).
gtacttgaagatcagtaaa

SEQ ID NO: 309778 - DNA, 19 bp, Homo sapiens
  siRNA target sequence for CAP1 (NM_006367.2,309-327).
gagcgagctctgttggtta

SEQ ID NO: 309779 - DNA, 19 bp, Homo sapiens
  siRNA target sequence for CAP1 (NM_006367.2,347-365).
gccagcagaaaataagctt

SEQ ID NO: 309780 - DNA, 19 bp, Homo sapiens
  siRNA target sequence for CAP1 (NM_006367.2,428-446).
ccgaggcagcaagttgttt

SEQ ID NO: 309781 - DNA, 19 bp, Homo sapiens
  siRNA target sequence for CAP1 (NM_006367.2,430-448).
gaggcagcaagttgtttaa

SEQ ID NO: 309782 - DNA, 19 bp, Homo sapiens
  siRNA target sequence for CAP1 (NM_006367.2,457-475).
cagctgtcagcgaaagtat

SEQ ID NO: 309783 - DNA, 19 bp, Homo sapiens
  siRNA target sequence for CAP1 (NM_006367.2,511-529).
ctggcccttatgtgaaaga

SEQ ID NO: 309784 - DNA, 19 bp, Homo sapiens
  siRNA target sequence for CAP1 (NM_006367.2,533-551).
gaatgatgccgccatgttt

SEQ ID NO: 309785 - DNA, 19 bp, Homo sapiens
  siRNA target sequence for CAP1 (NM_006367.2,541-559).
ccgccatgttttatacaaa

SEQ ID NO: 309786 - DNA, 19 bp, Homo sapiens
  siRNA target sequence for CAP1 (NM_006367.2,672-690).
ggactggcctggagcaaaa

SEQ ID NO: 309787 - DNA, 19 bp, Homo sapiens
  siRNA target sequence for CAP2 (NM_006366.1,173-191).
gaactgcggggaagtcaat

SEQ ID NO: 309788 - DNA, 19 bp, Homo sapiens
  siRNA target sequence for CAP2 (NM_006366.1,182-200).
ggaagtcaatggtgtcatt

SEQ ID NO: 309789 - DNA, 19 bp, Homo sapiens
  siRNA target sequence for CAP2 (NM_006366.1,247-265).
gtatggtggccgagttttt

SEQ ID NO: 309790 - DNA, 19 bp, Homo sapiens
  siRNA target sequence for CAP2 (NM_006366.1,252-270).
gtggccgagtttttaaaga

SEQ ID NO: 309791 - DNA, 19 bp, Homo sapiens
  siRNA target sequence for CAP2 (NM_006366.1,389-407).
cgtggccgcacttctgaaa

SEQ ID NO: 309792 - DNA, 19 bp, Homo sapiens
  siRNA target sequence for CAP2 (NM_006366.1,409-427).
ccatatcggaaaagattca

SEQ ID NO: 309793 - DNA, 19 bp, Homo sapiens
  siRNA target sequence for CAP2 (NM_006366.1,484-502).
cggccgtcagcgaaagcat

SEQ ID NO: 309794 - DNA, 19 bp, Homo sapiens
  siRNA target sequence for CAP2 (NM_006366.1,503-521).
ccctgcccttggatggata

SEQ ID NO: 309795 - DNA, 19 bp, Homo sapiens
  siRNA target sequence for CAP2 (NM_006366.1,566-584).
cgctgccaccttttacact

SEQ ID NO: 309796 - DNA, 19 bp, Homo sapiens
  siRNA target sequence for CAP2 (NM_006366.1,567-585).
gctgccaccttttacacta

SEQ ID NO: 309797 - DNA, 19 bp, Homo sapiens
  siRNA target sequence for CAP2 (NM_006366.1,568-586).
ctgccaccttttacactaa

SEQ ID NO: 309798 - DNA, 19 bp, Homo sapiens
  siRNA target sequence for CAP2 (NM_006366.1,570-588).
gccaccttttacactaaca

SEQ ID NO: 309799 - DNA, 19 bp, Homo sapiens
  siRNA target sequence for CAP2 (NM_006366.1,589-607).
gggtcttaaaggactacaa

SEQ ID NO: 309800 - DNA, 19 bp, Homo sapiens
  siRNA target sequence for CAP2 (NM_006366.1,590-608).
ggtcttaaaggactacaaa

SEQ ID NO: 309801 - DNA, 19 bp, Homo sapiens
  siRNA target sequence for CAP2 (NM_006366.1,600-618).
gactacaaacacagtgatt

SEQ ID NO: 309802 - DNA, 19 bp, Homo sapiens
  siRNA target sequence for CAP2 (NM_006366.1,629-647).
ggattgggtgaagtcatat

SEQ ID NO: 309803 - DNA, 19 bp, Homo sapiens
  siRNA target sequence for CAP2 (NM_006366.1,650-668).
gaacatttggagtgaactt

SEQ ID NO: 309804 - DNA, 19 bp, Homo sapiens
  siRNA target sequence for CAP2 (NM_006366.1,734-752).
cacagtatcagcgttttct

SEQ ID NO: 309805 - DNA, 19 bp, Homo sapiens
  siRNA target sequence for CAP2 (NM_006366.1,736-754).
cagtatcagcgttttctgt

SEQ ID NO: 309806 - DNA, 19 bp, Homo sapiens
  siRNA target sequence for CAP2 (NM_006366.1,805-823).
cagggccacctccactttt

SEQ ID NO: 309807 - DNA, 19 bp, Homo sapiens
  siRNA target sequence for CAP2 (NM_006366.1,814-832).
ctccacttttcgagaatga

SEQ ID NO: 309808 - DNA, 19 bp, Homo sapiens
  siRNA target sequence for CAP2 (NM_006366.1,855-873).
ccttcacgctcagctttat

SEQ ID NO: 309809 - DNA, 19 bp, Homo sapiens
  siRNA target sequence for CAP2 (NM_006366.1,867-885).
gctttatttgcccaactta

SEQ ID NO: 309810 - DNA, 19 bp, Homo sapiens
  siRNA target sequence for CAP2 (NM_006366.1,868-886).
ctttatttgcccaacttaa

SEQ ID NO: 309811 - DNA, 19 bp, Homo sapiens
  siRNA target sequence for CAP2 (NM_006366.1,888-906).
cagggagaagcaattacaa

SEQ ID NO: 309812 - DNA, 19 bp, Homo sapiens
  siRNA target sequence for CAP2 (NM_006366.1,890-908).
gggagaagcaattacaaaa

SEQ ID NO: 309813 - DNA, 19 bp, Homo sapiens
  siRNA target sequence for CAP2 (NM_006366.1,966-984).
caaggagggcaaactcaat

SEQ ID NO: 309814 - DNA, 19 bp, Homo sapiens
  siRNA target sequence for CAP2 (NM_006366.1,1103-1121).
gaatgaccttgtgatttca

SEQ ID NO: 309815 - DNA, 19 bp, Homo sapiens
  siRNA target sequence for CAP2 (NM_006366.1,1273-1291).
cccaggacattcaaatcca

SEQ ID NO: 309816 - DNA, 19 bp, Homo sapiens
  siRNA target sequence for CAP2 (NM_006366.1,1303-1321).
gagtgccaacaatttccat

SEQ ID NO: 309817 - DNA, 19 bp, Homo sapiens
  siRNA target sequence for CAP2 (NM_006366.1,1307-1325).
gccaacaatttccattaat

SEQ ID NO: 309818 - DNA, 19 bp, Homo sapiens
  siRNA target sequence for CAP2 (NM_006366.1,1330-1348).
cagaaggttgccacatata

SEQ ID NO: 309819 - DNA, 19 bp, Homo sapiens
  siRNA target sequence for CAP2 (NM_006366.1,1382-1400).
gagcgccaagtcatctgaa

SEQ ID NO: 309820 - DNA, 19 bp, Homo sapiens
  siRNA target sequence for CAP2 (NM_006366.1,1384-1402).
gcgccaagtcatctgaaat

SEQ ID NO: 309821 - DNA, 19 bp, Homo sapiens
  siRNA target sequence for CAP2 (NM_006366.1,1393-1411).
catctgaaatgaacatact

SEQ ID NO: 309822 - DNA, 19 bp, Homo sapiens
  siRNA target sequence for CAP2 (NM_006366.1,1415-1433).
ccctcaggatggtgattat

SEQ ID NO: 309823 - DNA, 19 bp, Homo sapiens
  siRNA target sequence for CAP2 (NM_006366.1,1490-1508).
cactgaacctgcagaaatt

SEQ ID NO: 309824 - DNA, 19 bp, Homo sapiens
  siRNA target sequence for KISS1 (NM_002256.2,205-223).
gggagccattagaaaaggt

SEQ ID NO: 309825 - DNA, 19 bp, Homo sapiens
  siRNA target sequence for KISS1 (NM_002256.2,471-489).
gacctgccgaactacaact

SEQ ID NO: 309826 - DNA, 19 bp, Homo sapiens
  siRNA target sequence for PEX11A (NM_003847.1,205-223).
gcaaagagaaggtggtaat

SEQ ID NO: 309827 - DNA, 19 bp, Homo sapiens
  siRNA target sequence for PEX11A (NM_003847.1,249-267).
gtgagcactggtcgtaaat

SEQ ID NO: 309828 - DNA, 19 bp, Homo sapiens
  siRNA target sequence for PEX11A (NM_003847.1,253-271).
gcactggtcgtaaatggtt

SEQ ID NO: 309829 - DNA, 19 bp, Homo sapiens
  siRNA target sequence for PEX11A (NM_003847.1,333-351).
ctggtacctcgcttatgct

SEQ ID NO: 309830 - DNA, 19 bp, Homo sapiens
  siRNA target sequence for PEX11A (NM_003847.1,335-353).
ggtacctcgcttatgctta

SEQ ID NO: 309831 - DNA, 19 bp, Homo sapiens
  siRNA target sequence for PEX11A (NM_003847.1,336-354).
gtacctcgcttatgcttaa

SEQ ID NO: 309832 - DNA, 19 bp, Homo sapiens
  siRNA target sequence for PEX11A (NM_003847.1,339-357).
cctcgcttatgcttaacat

SEQ ID NO: 309833 - DNA, 19 bp, Homo sapiens
  siRNA target sequence for PEX11A (NM_003847.1,340-358).
ctcgcttatgcttaacatt

SEQ ID NO: 309834 - DNA, 19 bp, Homo sapiens
  siRNA target sequence for PEX11A (NM_003847.1,362-380).
caacctgaaccgtgtgatt

SEQ ID NO: 309835 - DNA, 19 bp, Homo sapiens
  siRNA target sequence for PEX11A (NM_003847.1,425-443).
cacctctggcatcaacaaa

SEQ ID NO: 309836 - DNA, 19 bp, Homo sapiens
  siRNA target sequence for PEX11A (NM_003847.1,463-481).
ctgctcaccactactacta

SEQ ID NO: 309837 - DNA, 19 bp, Homo sapiens
  siRNA target sequence for PEX11A (NM_003847.1,501-519).
gtcagggatctgtatgaaa

SEQ ID NO: 309838 - DNA, 19 bp, Homo sapiens
  siRNA target sequence for PEX11A (NM_003847.1,528-546).
cagatgaaacgagttacat

SEQ ID NO: 309839 - DNA, 19 bp, Homo sapiens
  siRNA target sequence for PEX11A (NM_003847.1,530-548).
gatgaaacgagttacatgt

SEQ ID NO: 309840 - DNA, 19 bp, Homo sapiens
  siRNA target sequence for PEX11A (NM_003847.1,616-634).
cagaatggctccaatcctt

SEQ ID NO: 309841 - DNA, 19 bp, Homo sapiens
  siRNA target sequence for PEX11A (NM_003847.1,622-640).
ggctccaatcctttctact

SEQ ID NO: 309842 - DNA, 19 bp, Homo sapiens
  siRNA target sequence for PEX11A (NM_003847.1,722-740).
ggaccagctggggatctat

SEQ ID NO: 309843 - DNA, 19 bp, Homo sapiens
  siRNA target sequence for PEX11A (NM_003847.1,723-741).
gaccagctggggatctata

SEQ ID NO: 309844 - DNA, 19 bp, Homo sapiens
  siRNA target sequence for PEX11A (NM_003847.1,726-744).
cagctggggatctataaat

SEQ ID NO: 309845 - DNA, 19 bp, Homo sapiens
  siRNA target sequence for PEX11A (NM_003847.1,729-747).
ctggggatctataaatcca

SEQ ID NO: 309846 - DNA, 19 bp, Homo sapiens
  siRNA target sequence for PEX11B (NM_003846.1,84-102).
gtatgcttgctctcttctt

SEQ ID NO: 309847 - DNA, 19 bp, Homo sapiens
  siRNA target sequence for PEX11B (NM_003846.1,125-143).
gagccagtcctgagttaca

SEQ ID NO: 309848 - DNA, 19 bp, Homo sapiens
  siRNA target sequence for PEX11B (NM_003846.1,127-145).
gccagtcctgagttacaga

SEQ ID NO: 309849 - DNA, 19 bp, Homo sapiens
  siRNA target sequence for PEX11B (NM_003846.1,174-192).
gagccttggaagaaagctt

SEQ ID NO: 309850 - DNA, 19 bp, Homo sapiens
  siRNA target sequence for PEX11B (NM_003846.1,251-269).
cagatgttgtcctgagatt

SEQ ID NO: 309851 - DNA, 19 bp, Homo sapiens
  siRNA target sequence for PEX11B (NM_003846.1,253-271).
gatgttgtcctgagattct

SEQ ID NO: 309852 - DNA, 19 bp, Homo sapiens
  siRNA target sequence for PEX11B (NM_003846.1,289-307).
ctcaatcgagccttgtact

SEQ ID NO: 309853 - DNA, 19 bp, Homo sapiens
  siRNA target sequence for PEX11B (NM_003846.1,303-321).
gtacttcgcctgtgacaat

SEQ ID NO: 309854 - DNA, 19 bp, Homo sapiens
  siRNA target sequence for PEX11B (NM_003846.1,381-399).
gcgttcattcaggtactat

SEQ ID NO: 309855 - DNA, 19 bp, Homo sapiens
  siRNA target sequence for PEX11B (NM_003846.1,382-400).
cgttcattcaggtactatt

SEQ ID NO: 309856 - DNA, 19 bp, Homo sapiens
  siRNA target sequence for PEX11B (NM_003846.1,402-420).
gttttccctcatcatgaat

SEQ ID NO: 309857 - DNA, 19 bp, Homo sapiens
  siRNA target sequence for PEX11B (NM_003846.1,425-443).
gccgtgatgcttatgagat

SEQ ID NO: 309858 - DNA, 19 bp, Homo sapiens
  siRNA target sequence for PEX11B (NM_003846.1,567-585).
gccccaactggctctgaaa

SEQ ID NO: 309859 - DNA, 19 bp, Homo sapiens
  siRNA target sequence for PEX11B (NM_003846.1,642-660).
gctagacgtggtcagaaat

SEQ ID NO: 309860 - DNA, 19 bp, Homo sapiens
  siRNA target sequence for PEX16 (NM_004813.1,652-670).
gacttcaccccctatcgtt

SEQ ID NO: 309861 - DNA, 19 bp, Homo sapiens
  siRNA target sequence for PEX16 (NM_004813.1,893-911).
gagaccatcgcagagtttt

SEQ ID NO: 309862 - DNA, 19 bp, Homo sapiens
  siRNA target sequence for PEX16 (NM_004813.1,1194-1212).
caaggccgctcatggatta

SEQ ID NO: 309863 - DNA, 19 bp, Homo sapiens
  siRNA target sequence for PEX16 (NM_004813.1,1224-1242).
ggcagaaaatctacttcta

SEQ ID NO: 309864 - DNA, 19 bp, Homo sapiens
  siRNA target sequence for PEX3 (NM_003630.1,66-84).
gctgaggtctgtatggaat

SEQ ID NO: 309865 - DNA, 19 bp, Homo sapiens
  siRNA target sequence for PEX3 (NM_003630.1,69-87).
gaggtctgtatggaatttt

SEQ ID NO: 309866 - DNA, 19 bp, Homo sapiens
  siRNA target sequence for PEX3 (NM_003630.1,125-143).
cggtccttggaggagtata

SEQ ID NO: 309867 - DNA, 19 bp, Homo sapiens
  siRNA target sequence for PEX3 (NM_003630.1,126-144).
ggtccttggaggagtatat

SEQ ID NO: 309868 - DNA, 19 bp, Homo sapiens
  siRNA target sequence for PEX3 (NM_003630.1,212-230).
cccaagcacgacgacaata

SEQ ID NO: 309869 - DNA, 19 bp, Homo sapiens
  siRNA target sequence for PEX3 (NM_003630.1,213-231).
ccaagcacgacgacaatat

SEQ ID NO: 309870 - DNA, 19 bp, Homo sapiens
  siRNA target sequence for PEX3 (NM_003630.1,217-235).
gcacgacgacaatatcatt

SEQ ID NO: 309871 - DNA, 19 bp, Homo sapiens
  siRNA target sequence for PEX3 (NM_003630.1,218-236).
cacgacgacaatatcattt

SEQ ID NO: 309872 - DNA, 19 bp, Homo sapiens
  siRNA target sequence for PEX3 (NM_003630.1,247-265).
cagaggacttgcaatatga

SEQ ID NO: 309873 - DNA, 19 bp, Homo sapiens
  siRNA target sequence for PEX3 (NM_003630.1,287-305).
cactgagagaggccttaat

SEQ ID NO: 309874 - DNA, 19 bp, Homo sapiens
  siRNA target sequence for PEX3 (NM_003630.1,300-318).
cttaatgcagcaactgaat

SEQ ID NO: 309875 - DNA, 19 bp, Homo sapiens
  siRNA target sequence for PEX3 (NM_003630.1,428-446).
cctgtatgctggttgttct

SEQ ID NO: 309876 - DNA, 19 bp, Homo sapiens
  siRNA target sequence for PEX3 (NM_003630.1,429-447).
ctgtatgctggttgttctt

SEQ ID NO: 309877 - DNA, 19 bp, Homo sapiens
  siRNA target sequence for PEX3 (NM_003630.1,445-463).
cttttgcgggtccagttaa

SEQ ID NO: 309878 - DNA, 19 bp, Homo sapiens
  siRNA target sequence for PEX3 (NM_003630.1,450-468).
gcgggtccagttaaacata

SEQ ID NO: 309879 - DNA, 19 bp, Homo sapiens
  siRNA target sequence for PEX3 (NM_003630.1,451-469).
cgggtccagttaaacataa

SEQ ID NO: 309880 - DNA, 19 bp, Homo sapiens
  siRNA target sequence for PEX3 (NM_003630.1,452-470).
gggtccagttaaacataat

SEQ ID NO: 309881 - DNA, 19 bp, Homo sapiens
  siRNA target sequence for PEX3 (NM_003630.1,456-474).
ccagttaaacataattggt

SEQ ID NO: 309882 - DNA, 19 bp, Homo sapiens
  siRNA target sequence for PEX3 (NM_003630.1,476-494).
gatatatttacctggataa

SEQ ID NO: 309883 - DNA, 19 bp, Homo sapiens
  siRNA target sequence for PEX3 (NM_003630.1,538-556).
gatgtccaacagcagtatt

SEQ ID NO: 309884 - DNA, 19 bp, Homo sapiens
  siRNA target sequence for PEX3 (NM_003630.1,547-565).
cagcagtatttatcaagta

SEQ ID NO: 309885 - DNA, 19 bp, Homo sapiens
  siRNA target sequence for PEX3 (NM_003630.1,549-567).
gcagtatttatcaagtatt

SEQ ID NO: 309886 - DNA, 19 bp, Homo sapiens
  siRNA target sequence for PEX3 (NM_003630.1,581-599).
gagatggcctgacagaatt

SEQ ID NO: 309887 - DNA, 19 bp, Homo sapiens
  siRNA target sequence for PEX3 (NM_003630.1,586-604).
ggcctgacagaattgatca

SEQ ID NO: 309888 - DNA, 19 bp, Homo sapiens
  siRNA target sequence for PEX3 (NM_003630.1,622-640).
gtgcagaaggttttaggaa

SEQ ID NO: 309889 - DNA, 19 bp, Homo sapiens
  siRNA target sequence for PEX3 (NM_003630.1,706-724).
ctcgttgagcagcataagt

SEQ ID NO: 309890 - DNA, 19 bp, Homo sapiens
  siRNA target sequence for PEX3 (NM_003630.1,708-726).
cgttgagcagcataagtct

SEQ ID NO: 309891 - DNA, 19 bp, Homo sapiens
  siRNA target sequence for PEX3 (NM_003630.1,725-743).
cttcttcttggattaataa

SEQ ID NO: 309892 - DNA, 19 bp, Homo sapiens
  siRNA target sequence for PEX3 (NM_003630.1,829-847).
cgagacattaccactatta

SEQ ID NO: 309893 - DNA, 19 bp, Homo sapiens
  siRNA target sequence for PEX3 (NM_003630.1,873-891).
gttggaaagcccagatttt

SEQ ID NO: 309894 - DNA, 19 bp, Homo sapiens
  siRNA target sequence for PEX3 (NM_003630.1,909-927).
ctgtttaaaccgaggtttt

SEQ ID NO: 309895 - DNA, 19 bp, Homo sapiens
  siRNA target sequence for PEX3 (NM_003630.1,929-947).
gtagacttctagacaatat

SEQ ID NO: 309896 - DNA, 19 bp, Homo sapiens
  siRNA target sequence for PEX3 (NM_003630.1,954-972).
gttctttcgacctactgaa

SEQ ID NO: 309897 - DNA, 19 bp, Homo sapiens
  siRNA target sequence for PEX3 (NM_003630.1,982-1000).
caacatggtaactctatga

SEQ ID NO: 309898 - DNA, 19 bp, Homo sapiens
  siRNA target sequence for PEX3 (NM_003630.1,985-1003).
catggtaactctatgaata

SEQ ID NO: 309899 - DNA, 19 bp, Homo sapiens
  siRNA target sequence for PEX3 (NM_003630.1,1015-1033).
gtcagcctgcctttagcta

SEQ ID NO: 309900 - DNA, 19 bp, Homo sapiens
  siRNA target sequence for PEX3 (NM_003630.1,1020-1038).
cctgcctttagctaagata

SEQ ID NO: 309901 - DNA, 19 bp, Homo sapiens
  siRNA target sequence for PEX3 (NM_003630.1,1023-1041).
gcctttagctaagataatt

SEQ ID NO: 309902 - DNA, 19 bp, Homo sapiens
  siRNA target sequence for PEX3 (NM_003630.1,1048-1066).
gtaaacggacagatccatt

SEQ ID NO: 309903 - DNA, 19 bp, Homo sapiens
  siRNA target sequence for PEX3 (NM_003630.1,1053-1071).
cggacagatccattcagtt

SEQ ID NO: 309904 - DNA, 19 bp, Homo sapiens
  siRNA target sequence for PEX3 (NM_003630.1,1054-1072).
ggacagatccattcagttt

SEQ ID NO: 309905 - DNA, 19 bp, Homo sapiens
  siRNA target sequence for PEX3 (NM_003630.1,1076-1094).
gtgaaacacctagtcattt

SEQ ID NO: 309906 - DNA, 19 bp, Homo sapiens
  siRNA target sequence for PEX3 (NM_003630.1,1129-1147).
gactttgctgctaatgtgt

SEQ ID NO: 309907 - DNA, 19 bp, Homo sapiens
  siRNA target sequence for PXF (NM_002857.1,77-95).
gaaagtgctcttgatgatt

SEQ ID NO: 309908 - DNA, 19 bp, Homo sapiens
  siRNA target sequence for PXF (NM_002857.1,81-99).
gtgctcttgatgatttcga

SEQ ID NO: 309909 - DNA, 19 bp, Homo sapiens
  siRNA target sequence for PXF (NM_002857.1,83-101).
gctcttgatgatttcgata

SEQ ID NO: 309910 - DNA, 19 bp, Homo sapiens
  siRNA target sequence for PXF (NM_002857.1,385-403).
cacttcttgcctaaaggaa

SEQ ID NO: 309911 - DNA, 19 bp, Homo sapiens
  siRNA target sequence for PXF (NM_002857.1,400-418).
ggaaacactaagtggatta

SEQ ID NO: 309912 - DNA, 19 bp, Homo sapiens
  siRNA target sequence for PXF (NM_002857.1,527-545).
cccatcatgcagagtatta

SEQ ID NO: 309913 - DNA, 19 bp, Homo sapiens
  siRNA target sequence for PXF (NM_002857.1,528-546).
ccatcatgcagagtattat

SEQ ID NO: 309914 - DNA, 19 bp, Homo sapiens
  siRNA target sequence for PXF (NM_002857.1,676-694).
cagcgtcatgtgcaaaata

SEQ ID NO: 309915 - DNA, 19 bp, Homo sapiens
  siRNA target sequence for PXF (NM_002857.1,738-756).
ctcaaaaggctcgttttga

SEQ ID NO: 309916 - DNA, 19 bp, Homo sapiens
  siRNA target sequence for PXF (NM_002857.1,740-758).
caaaaggctcgttttgaga

SEQ ID NO: 309917 - DNA, 19 bp, Homo sapiens
  siRNA target sequence for PXMP3 (NM_000318.1,427-445).
ccagttggatgcacttgaa

SEQ ID NO: 309918 - DNA, 19 bp, Homo sapiens
  siRNA target sequence for PXMP3 (NM_000318.1,467-485).
ctagtttggtcccagttta

SEQ ID NO: 309919 - DNA, 19 bp, Homo sapiens
  siRNA target sequence for PXMP3 (NM_000318.1,490-508).
gtgctttcatggatttaaa

SEQ ID NO: 309920 - DNA, 19 bp, Homo sapiens
  siRNA target sequence for PXMP3 (NM_000318.1,493-511).
ctttcatggatttaaacct

SEQ ID NO: 309921 - DNA, 19 bp, Homo sapiens
  siRNA target sequence for PXMP3 (NM_000318.1,536-554).
gaggtgaaagcgtgcttat

SEQ ID NO: 309922 - DNA, 19 bp, Homo sapiens
  siRNA target sequence for PXMP3 (NM_000318.1,545-563).
gcgtgcttatgggttttct

SEQ ID NO: 309923 - DNA, 19 bp, Homo sapiens
  siRNA target sequence for PXMP3 (NM_000318.1,546-564).
cgtgcttatgggttttctt

SEQ ID NO: 309924 - DNA, 19 bp, Homo sapiens
  siRNA target sequence for PXMP3 (NM_000318.1,574-592).
caccatctactccaaaaat

SEQ ID NO: 309925 - DNA, 19 bp, Homo sapiens
  siRNA target sequence for PXMP3 (NM_000318.1,642-660).
cccctaacctgagatatca

SEQ ID NO: 309926 - DNA, 19 bp, Homo sapiens
  siRNA target sequence for PXMP3 (NM_000318.1,718-736).
gttagaagaacgatgctat

SEQ ID NO: 309927 - DNA, 19 bp, Homo sapiens
  siRNA target sequence for PXMP3 (NM_000318.1,722-740).
gaagaacgatgctatgatt

SEQ ID NO: 309928 - DNA, 19 bp, Homo sapiens
  siRNA target sequence for PXMP3 (NM_000318.1,732-750).
gctatgatttgtttcgaaa

SEQ ID NO: 309929 - DNA, 19 bp, Homo sapiens
  siRNA target sequence for PXMP3 (NM_000318.1,746-764).
cgaaaccatcatttagcat

SEQ ID NO: 309930 - DNA, 19 bp, Homo sapiens
  siRNA target sequence for PXMP3 (NM_000318.1,821-839).
gggctgattaattttttga

SEQ ID NO: 309931 - DNA, 19 bp, Homo sapiens
  siRNA target sequence for PXMP3 (NM_000318.1,873-891).
cagaacgtctcctaggtat

SEQ ID NO: 309932 - DNA, 19 bp, Homo sapiens
  siRNA target sequence for PXMP3 (NM_000318.1,878-896).
cgtctcctaggtattcatt

SEQ ID NO: 309933 - DNA, 19 bp, Homo sapiens
  siRNA target sequence for PXMP3 (NM_000318.1,883-901).
cctaggtattcattctgta

SEQ ID NO: 309934 - DNA, 19 bp, Homo sapiens
  siRNA target sequence for PXMP3 (NM_000318.1,1052-1070).
cttactggtgcacctaata

SEQ ID NO: 309935 - DNA, 19 bp, Homo sapiens
  siRNA target sequence for PXMP3 (NM_000318.1,1056-1074).
ctggtgcacctaatagtga

SEQ ID NO: 309936 - DNA, 19 bp, Homo sapiens
  siRNA target sequence for PXMP3 (NM_000318.1,1061-1079).
gcacctaatagtgacaata

SEQ ID NO: 309937 - DNA, 19 bp, Homo sapiens
  siRNA target sequence for PXMP3 (NM_000318.1,1064-1082).
cctaatagtgacaatacat

SEQ ID NO: 309938 - DNA, 19 bp, Homo sapiens
  siRNA target sequence for PXMP3 (NM_000318.1,1065-1083).
ctaatagtgacaatacatt

SEQ ID NO: 309939 - DNA, 19 bp, Homo sapiens
  siRNA target sequence for PXMP3 (NM_000318.1,1085-1103).
gccaccagtggcaaagaat

SEQ ID NO: 309940 - DNA, 19 bp, Homo sapiens
  siRNA target sequence for PXMP3 (NM_000318.1,1096-1114).
caaagaatgcgctctatgt

SEQ ID NO: 309941 - DNA, 19 bp, Homo sapiens
  siRNA target sequence for PXMP3 (NM_000318.1,1141-1159).
cataggatgtgagcatatt

SEQ ID NO: 309942 - DNA, 19 bp, Homo sapiens
  siRNA target sequence for PXMP3 (NM_000318.1,1149-1167).
gtgagcatattttctgtta

SEQ ID NO: 309943 - DNA, 19 bp, Homo sapiens
  siRNA target sequence for PXMP3 (NM_000318.1,1173-1191).
gtgctaagagtagtttctt

SEQ ID NO: 309944 - DNA, 19 bp, Homo sapiens
  siRNA target sequence for PXMP3 (NM_000318.1,1189-1207).
cttatttgacgtgtacttt

SEQ ID NO: 309945 - DNA, 19 bp, Homo sapiens
  siRNA target sequence for PXMP3 (NM_000318.1,1264-1282).
cgagatgtcagaagtaaat

SEQ ID NO: 309946 - DNA, 19 bp, Homo sapiens
  siRNA target sequence for PXMP3 (NM_000318.1,1267-1285).
gatgtcagaagtaaatgct

SEQ ID NO: 309947 - DNA, 19 bp, Homo sapiens
  siRNA target sequence for HPS1 (NM_000195.2,513-531).
cctgttcattgccatcaat

SEQ ID NO: 309948 - DNA, 19 bp, Homo sapiens
  siRNA target sequence for HPS1 (NM_000195.2,615-633).
gactgtggacggtcatctt

SEQ ID NO: 309949 - DNA, 19 bp, Homo sapiens
  siRNA target sequence for HPS1 (NM_000195.2,617-635).
ctgtggacggtcatcttat

SEQ ID NO: 309950 - DNA, 19 bp, Homo sapiens
  siRNA target sequence for HPS1 (NM_000195.2,755-773).
ccctggagcgactgattca

SEQ ID NO: 309951 - DNA, 19 bp, Homo sapiens
  siRNA target sequence for HPS1 (NM_000195.2,890-908).
ccaagctgctggcattcta

SEQ ID NO: 309952 - DNA, 19 bp, Homo sapiens
  siRNA target sequence for HPS1 (NM_000195.2,1218-1236).
catggatgcccttcagata

SEQ ID NO: 309953 - DNA, 19 bp, Homo sapiens
  siRNA target sequence for HPS1 (NM_000195.2,1310-1328).
ccaacgtgaaggaaagcta

SEQ ID NO: 309954 - DNA, 19 bp, Homo sapiens
  siRNA target sequence for HPS1 (NM_000195.2,1538-1556).
ggatggacaagtttgtcaa

SEQ ID NO: 309955 - DNA, 19 bp, Homo sapiens
  siRNA target sequence for HPS1 (NM_000195.2,1685-1703).
ccatctaccggctgaactt

SEQ ID NO: 309956 - DNA, 19 bp, Homo sapiens
  siRNA target sequence for HPS1 (NM_000195.2,1686-1704).
catctaccggctgaacttt

SEQ ID NO: 309957 - DNA, 19 bp, Homo sapiens
  siRNA target sequence for HPS1 (NM_000195.2,1790-1808).
cggactggaaggacttctt

SEQ ID NO: 309958 - DNA, 19 bp, Homo sapiens
  siRNA target sequence for HPS1 (NM_000195.2,1865-1883).
gcttggtgcacttcatcta

SEQ ID NO: 309959 - DNA, 19 bp, Homo sapiens
  siRNA target sequence for HPS1 (NM_000195.2,1866-1884).
cttggtgcacttcatctat

SEQ ID NO: 309960 - DNA, 19 bp, Homo sapiens
  siRNA target sequence for HPS1 (NM_000195.2,2167-2185).
ctgggaggagactactaca

SEQ ID NO: 309961 - DNA, 19 bp, Homo sapiens
  siRNA target sequence for GOLGB1 (NM_004487.1,132-150).
gagccgattatcaggatta

SEQ ID NO: 309962 - DNA, 19 bp, Homo sapiens
  siRNA target sequence for GOLGB1 (NM_004487.1,135-153).
ccgattatcaggattagca

SEQ ID NO: 309963 - DNA, 19 bp, Homo sapiens
  siRNA target sequence for GOLGB1 (NM_004487.1,136-154).
cgattatcaggattagcaa

SEQ ID NO: 309964 - DNA, 19 bp, Homo sapiens
  siRNA target sequence for GOLGB1 (NM_004487.1,220-238).
cctgaattacaccaagaat

SEQ ID NO: 309965 - DNA, 19 bp, Homo sapiens
  siRNA target sequence for GOLGB1 (NM_004487.1,279-297).
ggagcgcctggcttatgca

SEQ ID NO: 309966 - DNA, 19 bp, Homo sapiens
  siRNA target sequence for GOLGB1 (NM_004487.1,307-325).
gtggtggagctaaaagata

SEQ ID NO: 309967 - DNA, 19 bp, Homo sapiens
  siRNA target sequence for GOLGB1 (NM_004487.1,309-327).
ggtggagctaaaagatatt

SEQ ID NO: 309968 - DNA, 19 bp, Homo sapiens
  siRNA target sequence for GOLGB1 (NM_004487.1,310-328).
gtggagctaaaagatatta

SEQ ID NO: 309969 - DNA, 19 bp, Homo sapiens
  siRNA target sequence for GOLGB1 (NM_004487.1,383-401).
gaaaagctgctgataacaa

SEQ ID NO: 309970 - DNA, 19 bp, Homo sapiens
  siRNA target sequence for GOLGB1 (NM_004487.1,421-439).
catgcgaaggccaaattaa

SEQ ID NO: 309971 - DNA, 19 bp, Homo sapiens
  siRNA target sequence for GOLGB1 (NM_004487.1,424-442).
gcgaaggccaaattaactt

SEQ ID NO: 309972 - DNA, 19 bp, Homo sapiens
  siRNA target sequence for GOLGB1 (NM_004487.1,789-807).
gaaagatgcccgctttgaa

SEQ ID NO: 309973 - DNA, 19 bp, Homo sapiens
  siRNA target sequence for GOLGB1 (NM_004487.1,809-827).
cacaagttcgtcttcatga

SEQ ID NO: 309974 - DNA, 19 bp, Homo sapiens
  siRNA target sequence for GOLGB1 (NM_004487.1,938-956).
gtgctcaggtcgttgactt

SEQ ID NO: 309975 - DNA, 19 bp, Homo sapiens
  siRNA target sequence for GOLGB1 (NM_004487.1,1023-1041).
ggaagctgagcataatact

SEQ ID NO: 309976 - DNA, 19 bp, Homo sapiens
  siRNA target sequence for GOLGB1 (NM_004487.1,1027-1045).
gctgagcataatactttga

SEQ ID NO: 309977 - DNA, 19 bp, Homo sapiens
  siRNA target sequence for GOLGB1 (NM_004487.1,1067-1085).
gagaggagtccaagattct

SEQ ID NO: 309978 - DNA, 19 bp, Homo sapiens
  siRNA target sequence for GOLGB1 (NM_004487.1,1249-1267).
gaagagaagacctctcata

SEQ ID NO: 309979 - DNA, 19 bp, Homo sapiens
  siRNA target sequence for GOLGB1 (NM_004487.1,1257-1275).
gacctctcatattttgagt

SEQ ID NO: 309980 - DNA, 19 bp, Homo sapiens
  siRNA target sequence for GOLGB1 (NM_004487.1,1304-1322).
ctgcctgtgatgctctaaa

SEQ ID NO: 309981 - DNA, 19 bp, Homo sapiens
  siRNA target sequence for GOLGB1 (NM_004487.1,1308-1326).
ctgtgatgctctaaaggat

SEQ ID NO: 309982 - DNA, 19 bp, Homo sapiens
  siRNA target sequence for GOLGB1 (NM_004487.1,1312-1330).
gatgctctaaaggatcaaa

SEQ ID NO: 309983 - DNA, 19 bp, Homo sapiens
  siRNA target sequence for GOLGB1 (NM_004487.1,1548-1566).
gaagagagtggtagaacta

SEQ ID NO: 309984 - DNA, 19 bp, Homo sapiens
  siRNA target sequence for GOLGB1 (NM_004487.1,1583-1601).
ccttgctccttagttctat

SEQ ID NO: 309985 - DNA, 19 bp, Homo sapiens
  siRNA target sequence for GOLGB1 (NM_004487.1,1656-1674).
cctagaggctcagaataga

SEQ ID NO: 309986 - DNA, 19 bp, Homo sapiens
  siRNA target sequence for GOLGB1 (NM_004487.1,1702-1720).
gagatcagcattgttgata

SEQ ID NO: 309987 - DNA, 19 bp, Homo sapiens
  siRNA target sequence for GOLGB1 (NM_004487.1,1899-1917).
ggtccttgaccagaaagaa

SEQ ID NO: 309988 - DNA, 19 bp, Homo sapiens
  siRNA target sequence for GOLGB1 (NM_004487.1,1939-1957).
ggaatagctccaattaaaa

SEQ ID NO: 309989 - DNA, 19 bp, Homo sapiens
  siRNA target sequence for GOLGB1 (NM_004487.1,1940-1958).
gaatagctccaattaaaat

SEQ ID NO: 309990 - DNA, 19 bp, Homo sapiens
  siRNA target sequence for GOLGB1 (NM_004487.1,1982-2000).
ggcaagattttcccttaat

SEQ ID NO: 309991 - DNA, 19 bp, Homo sapiens
  siRNA target sequence for GOLGB1 (NM_004487.1,1994-2012).
ccttaatgccaaatgaaga

SEQ ID NO: 309992 - DNA, 19 bp, Homo sapiens
  siRNA target sequence for GOLGB1 (NM_004487.1,2175-2193).
ggatgagttggaaaggtta

SEQ ID NO: 309993 - DNA, 19 bp, Homo sapiens
  siRNA target sequence for GOLGB1 (NM_004487.1,2208-2226).
ggagctcgagctaaacttt

SEQ ID NO: 309994 - DNA, 19 bp, Homo sapiens
  siRNA target sequence for GOLGB1 (NM_004487.1,2211-2229).
gctcgagctaaactttcat

SEQ ID NO: 309995 - DNA, 19 bp, Homo sapiens
  siRNA target sequence for GOLGB1 (NM_004487.1,2212-2230).
ctcgagctaaactttcata

SEQ ID NO: 309996 - DNA, 19 bp, Homo sapiens
  siRNA target sequence for GOLGB1 (NM_004487.1,2214-2232).
cgagctaaactttcataaa

SEQ ID NO: 309997 - DNA, 19 bp, Homo sapiens
  siRNA target sequence for GOLGB1 (NM_004487.1,2233-2251).
gcacaagaaatctatgaga

SEQ ID NO: 309998 - DNA, 19 bp, Homo sapiens
  siRNA target sequence for GOLGB1 (NM_004487.1,2234-2252).
cacaagaaatctatgagaa

SEQ ID NO: 309999 - DNA, 19 bp, Homo sapiens
  siRNA target sequence for GOLGB1 (NM_004487.1,2459-2477).
ggcaaagaagacttgatta

SEQ ID NO: 310000 - DNA, 19 bp, Homo sapiens
  siRNA target sequence for GOLGB1 (NM_004487.1,2460-2478).
gcaaagaagacttgattat

SEQ ID NO: 310001 - DNA, 19 bp, Homo sapiens
  siRNA target sequence for GOLGB1 (NM_004487.1,2483-2501).
gccaaactgcccatgacaa

SEQ ID NO: 310002 - DNA, 19 bp, Homo sapiens
  siRNA target sequence for GOLGB1 (NM_004487.1,2529-2547).
cagcatagaagccaaatct

SEQ ID NO: 310003 - DNA, 19 bp, Homo sapiens
  siRNA target sequence for GOLGB1 (NM_004487.1,2531-2549).
gcatagaagccaaatctaa

SEQ ID NO: 310004 - DNA, 19 bp, Homo sapiens
  siRNA target sequence for GOLGB1 (NM_004487.1,2587-2605).
gatgtgcagcttcagtttt

SEQ ID NO: 310005 - DNA, 19 bp, Homo sapiens
  siRNA target sequence for GOLGB1 (NM_004487.1,2683-2701).
cgtgtaaggcatatctcaa

SEQ ID NO: 310006 - DNA, 19 bp, Homo sapiens
  siRNA target sequence for GOLGB1 (NM_004487.1,2686-2704).
gtaaggcatatctcaagta

SEQ ID NO: 310007 - DNA, 19 bp, Homo sapiens
  siRNA target sequence for GOLGB1 (NM_004487.1,2690-2708).
ggcatatctcaagtaaagt

SEQ ID NO: 310008 - DNA, 19 bp, Homo sapiens
  siRNA target sequence for GOLGB1 (NM_004487.1,2814-2832).
cgaggagaaggatcaacaa

SEQ ID NO: 310009 - DNA, 19 bp, Homo sapiens
  siRNA target sequence for GOLGB1 (NM_004487.1,2837-2855).
cagaaatcagctttagtat

SEQ ID NO: 310010 - DNA, 19 bp, Homo sapiens
  siRNA target sequence for GOLGB1 (NM_004487.1,2862-2880).
gaaaatggttcagcttaat

SEQ ID NO: 310011 - DNA, 19 bp, Homo sapiens
  siRNA target sequence for GOLGB1 (NM_004487.1,2875-2893).
cttaatgaagagaagtttt

SEQ ID NO: 310012 - DNA, 19 bp, Homo sapiens
  siRNA target sequence for GOLGB1 (NM_004487.1,2902-2920).
gttgaaattaagactctta

SEQ ID NO: 310013 - DNA, 19 bp, Homo sapiens
  siRNA target sequence for GOLGB1 (NM_004487.1,3112-3130).
caggcagctcttattaaca

SEQ ID NO: 310014 - DNA, 19 bp, Homo sapiens
  siRNA target sequence for GOLGB1 (NM_004487.1,3175-3193).
gccaacttgaaagatgaat

SEQ ID NO: 310015 - DNA, 19 bp, Homo sapiens
  siRNA target sequence for GOLGB1 (NM_004487.1,3177-3195).
caacttgaaagatgaatct

SEQ ID NO: 310016 - DNA, 19 bp, Homo sapiens
  siRNA target sequence for GOLGB1 (NM_004487.1,3337-3355).
gtggaactacagcatataa

SEQ ID NO: 310017 - DNA, 19 bp, Homo sapiens
  siRNA target sequence for GOLGB1 (NM_004487.1,3397-3415).
caggctctggtcaaacaga

SEQ ID NO: 310018 - DNA, 19 bp, Homo sapiens
  siRNA target sequence for GOLGB1 (NM_004487.1,3552-3570).
ggaaacagtggtgataagt

SEQ ID NO: 310019 - DNA, 19 bp, Homo sapiens
  siRNA target sequence for GOLGB1 (NM_004487.1,3564-3582).
gataagtccaccttgtaca

SEQ ID NO: 310020 - DNA, 19 bp, Homo sapiens
  siRNA target sequence for GOLGB1 (NM_004487.1,3680-3698).
cctcccgcaaggcaattct

SEQ ID NO: 310021 - DNA, 19 bp, Homo sapiens
  siRNA target sequence for GOLGB1 (NM_004487.1,3681-3699).
ctcccgcaaggcaattctt

SEQ ID NO: 310022 - DNA, 19 bp, Homo sapiens
  siRNA target sequence for GOLGB1 (NM_004487.1,3683-3701).
cccgcaaggcaattcttaa

SEQ ID NO: 310023 - DNA, 19 bp, Homo sapiens
  siRNA target sequence for GOLGB1 (NM_004487.1,3684-3702).
ccgcaaggcaattcttaaa

SEQ ID NO: 310024 - DNA, 19 bp, Homo sapiens
  siRNA target sequence for GOLGB1 (NM_004487.1,3745-3763).
caacagaaagatgactata

SEQ ID NO: 310025 - DNA, 19 bp, Homo sapiens
  siRNA target sequence for GOLGB1 (NM_004487.1,3767-3785).
gcttgcaagaacagtttga

SEQ ID NO: 310026 - DNA, 19 bp, Homo sapiens
  siRNA target sequence for GOLGB1 (NM_004487.1,3768-3786).
cttgcaagaacagtttgat

SEQ ID NO: 310027 - DNA, 19 bp, Homo sapiens
  siRNA target sequence for GOLGB1 (NM_004487.1,3827-3845).
ggcaactccagattcaagt

SEQ ID NO: 310028 - DNA, 19 bp, Homo sapiens
  siRNA target sequence for GOLGB1 (NM_004487.1,3899-3917).
cttccactccaggtttaga

SEQ ID NO: 310029 - DNA, 19 bp, Homo sapiens
  siRNA target sequence for GOLGB1 (NM_004487.1,4020-4038).
gcagggcggaacttctgtt

SEQ ID NO: 310030 - DNA, 19 bp, Homo sapiens
  siRNA target sequence for GOLGB1 (NM_004487.1,4031-4049).
cttctgttgcccagattaa

SEQ ID NO: 310031 - DNA, 19 bp, Homo sapiens
  siRNA target sequence for GOLGB1 (NM_004487.1,4071-4089).
ggctgagaaagtagagtta

SEQ ID NO: 310032 - DNA, 19 bp, Homo sapiens
  siRNA target sequence for GOLGB1 (NM_004487.1,4086-4104).
gttagaattgaaagttagt

SEQ ID NO: 310033 - DNA, 19 bp, Homo sapiens
  siRNA target sequence for GOLGB1 (NM_004487.1,4090-4108).
gaattgaaagttagttcta

SEQ ID NO: 310034 - DNA, 19 bp, Homo sapiens
  siRNA target sequence for GOLGB1 (NM_004487.1,4112-4130).
caagtgagcttactaaaaa

SEQ ID NO: 310035 - DNA, 19 bp, Homo sapiens
  siRNA target sequence for GOLGB1 (NM_004487.1,4149-4167).
gttacaagagcagataaat

SEQ ID NO: 310036 - DNA, 19 bp, Homo sapiens
  siRNA target sequence for GOLGB1 (NM_004487.1,4270-4288).
gctggcctagaacatctaa

SEQ ID NO: 310037 - DNA, 19 bp, Homo sapiens
  siRNA target sequence for GOLGB1 (NM_004487.1,4342-4360).
gaagacgttagctaccttt

SEQ ID NO: 310038 - DNA, 19 bp, Homo sapiens
  siRNA target sequence for GOLGB1 (NM_004487.1,4356-4374).
cctttctggacaacttagt

SEQ ID NO: 310039 - DNA, 19 bp, Homo sapiens
  siRNA target sequence for GOLGB1 (NM_004487.1,4364-4382).
gacaacttagtgagaaaga

SEQ ID NO: 310040 - DNA, 19 bp, Homo sapiens
  siRNA target sequence for GOLGB1 (NM_004487.1,4387-4405).
gctctcactaaaatacaga

SEQ ID NO: 310041 - DNA, 19 bp, Homo sapiens
  siRNA target sequence for GOLGB1 (NM_004487.1,4404-4422).
gacagagataatagaacaa

SEQ ID NO: 310042 - DNA, 19 bp, Homo sapiens
  siRNA target sequence for GOLGB1 (NM_004487.1,4550-4568).
gtagagcaaagcaacaaat

SEQ ID NO: 310043 - DNA, 19 bp, Homo sapiens
  siRNA target sequence for GOLGB1 (NM_004487.1,4589-4607).
cccttatttcccgaaaaga

SEQ ID NO: 310044 - DNA, 19 bp, Homo sapiens
  siRNA target sequence for GOLGB1 (NM_004487.1,4650-4668).
ggccagaggtaccattgaa

SEQ ID NO: 310045 - DNA, 19 bp, Homo sapiens
  siRNA target sequence for GOLGB1 (NM_004487.1,4742-4760).
gaaggttagctcttcttca

SEQ ID NO: 310046 - DNA, 19 bp, Homo sapiens
  siRNA target sequence for GOLGB1 (NM_004487.1,4746-4764).
gttagctcttcttcaagaa

SEQ ID NO: 310047 - DNA, 19 bp, Homo sapiens
  siRNA target sequence for GOLGB1 (NM_004487.1,4791-4809).
ggacaggtctttattggaa

SEQ ID NO: 310048 - DNA, 19 bp, Homo sapiens
  siRNA target sequence for GOLGB1 (NM_004487.1,4792-4810).
gacaggtctttattggaaa

SEQ ID NO: 310049 - DNA, 19 bp, Homo sapiens
  siRNA target sequence for GOLGB1 (NM_004487.1,4819-4837).
ctcagcagctcctgtgaaa

SEQ ID NO: 310050 - DNA, 19 bp, Homo sapiens
  siRNA target sequence for GOLGB1 (NM_004487.1,4824-4842).
cagctcctgtgaaagtcta

SEQ ID NO: 310051 - DNA, 19 bp, Homo sapiens
  siRNA target sequence for GOLGB1 (NM_004487.1,4826-4844).
gctcctgtgaaagtctaaa

SEQ ID NO: 310052 - DNA, 19 bp, Homo sapiens
  siRNA target sequence for GOLGB1 (NM_004487.1,4827-4845).
ctcctgtgaaagtctaaaa

SEQ ID NO: 310053 - DNA, 19 bp, Homo sapiens
  siRNA target sequence for GOLGB1 (NM_004487.1,4850-4868).
ctctagagggtcttactga

SEQ ID NO: 310054 - DNA, 19 bp, Homo sapiens
  siRNA target sequence for GOLGB1 (NM_004487.1,4928-4946).
gtactgagtggcaagagaa

SEQ ID NO: 310055 - DNA, 19 bp, Homo sapiens
  siRNA target sequence for GOLGB1 (NM_004487.1,4953-4971).
ggagctacaaaaagagtat

SEQ ID NO: 310056 - DNA, 19 bp, Homo sapiens
  siRNA target sequence for GOLGB1 (NM_004487.1,5059-5077).
gaactgtatggcaagttaa

SEQ ID NO: 310057 - DNA, 19 bp, Homo sapiens
  siRNA target sequence for GOLGB1 (NM_004487.1,5062-5080).
ctgtatggcaagttaagaa

SEQ ID NO: 310058 - DNA, 19 bp, Homo sapiens
  siRNA target sequence for GOLGB1 (NM_004487.1,5078-5096).
gaagcacagaggcaaacaa

SEQ ID NO: 310059 - DNA, 19 bp, Homo sapiens
  siRNA target sequence for GOLGB1 (NM_004487.1,5332-5350).
gaaaccctttctaagaagt

SEQ ID NO: 310060 - DNA, 19 bp, Homo sapiens
  siRNA target sequence for GOLGB1 (NM_004487.1,5342-5360).
ctaagaagtttcagtcttt

SEQ ID NO: 310061 - DNA, 19 bp, Homo sapiens
  siRNA target sequence for GOLGB1 (NM_004487.1,5448-5466).
ggccaccgagaaacatgat

SEQ ID NO: 310062 - DNA, 19 bp, Homo sapiens
  siRNA target sequence for GOLGB1 (NM_004487.1,5449-5467).
gccaccgagaaacatgata

SEQ ID NO: 310063 - DNA, 19 bp, Homo sapiens
  siRNA target sequence for GOLGB1 (NM_004487.1,5450-5468).
ccaccgagaaacatgataa

SEQ ID NO: 310064 - DNA, 19 bp, Homo sapiens
  siRNA target sequence for GOLGB1 (NM_004487.1,5464-5482).
gataaccaaacgaatgtca

SEQ ID NO: 310065 - DNA, 19 bp, Homo sapiens
  siRNA target sequence for GOLGB1 (NM_004487.1,5490-5508).
gggaacacagtctatacca

SEQ ID NO: 310066 - DNA, 19 bp, Homo sapiens
  siRNA target sequence for GOLGB1 (NM_004487.1,5706-5724).
ggaatttagccagacttta

SEQ ID NO: 310067 - DNA, 19 bp, Homo sapiens
  siRNA target sequence for GOLGB1 (NM_004487.1,5742-5760).
cttactgagtcagatatca

SEQ ID NO: 310068 - DNA, 19 bp, Homo sapiens
  siRNA target sequence for GOLGB1 (NM_004487.1,5841-5859).
ctccagagttaccaaacta

SEQ ID NO: 310069 - DNA, 19 bp, Homo sapiens
  siRNA target sequence for GOLGB1 (NM_004487.1,5843-5861).
ccagagttaccaaactaaa

SEQ ID NO: 310070 - DNA, 19 bp, Homo sapiens
  siRNA target sequence for GOLGB1 (NM_004487.1,5896-5914).
gagaggcttatgaatcaat

SEQ ID NO: 310071 - DNA, 19 bp, Homo sapiens
  siRNA target sequence for GOLGB1 (NM_004487.1,5898-5916).
gaggcttatgaatcaatta

SEQ ID NO: 310072 - DNA, 19 bp, Homo sapiens
  siRNA target sequence for GOLGB1 (NM_004487.1,5901-5919).
gcttatgaatcaattagca

SEQ ID NO: 310073 - DNA, 19 bp, Homo sapiens
  siRNA target sequence for GOLGB1 (NM_004487.1,5929-5947).
ggaagcattgggaattact

SEQ ID NO: 310074 - DNA, 19 bp, Homo sapiens
  siRNA target sequence for GOLGB1 (NM_004487.1,5946-5964).
ctgtcaggatgttacagat

SEQ ID NO: 310075 - DNA, 19 bp, Homo sapiens
  siRNA target sequence for GOLGB1 (NM_004487.1,5956-5974).
gttacagatgcccaaataa

SEQ ID NO: 310076 - DNA, 19 bp, Homo sapiens
  siRNA target sequence for GOLGB1 (NM_004487.1,6140-6158).
gccatgcaaaggaacttca

SEQ ID NO: 310077 - DNA, 19 bp, Homo sapiens
  siRNA target sequence for GOLGB1 (NM_004487.1,6209-6227).
gcatcaggtatcaagagaa

SEQ ID NO: 310078 - DNA, 19 bp, Homo sapiens
  siRNA target sequence for GOLGB1 (NM_004487.1,6210-6228).
catcaggtatcaagagaaa

SEQ ID NO: 310079 - DNA, 19 bp, Homo sapiens
  siRNA target sequence for GOLGB1 (NM_004487.1,6235-6253).
gctctggagagaactgtta

SEQ ID NO: 310080 - DNA, 19 bp, Homo sapiens
  siRNA target sequence for GOLGB1 (NM_004487.1,6248-6266).
ctgttaaagctctagaatt

SEQ ID NO: 310081 - DNA, 19 bp, Homo sapiens
  siRNA target sequence for GOLGB1 (NM_004487.1,6256-6274).
gctctagaatttgttcaaa

SEQ ID NO: 310082 - DNA, 19 bp, Homo sapiens
  siRNA target sequence for GOLGB1 (NM_004487.1,6323-6341).
cagttgaacaccgcaaaaa

SEQ ID NO: 310083 - DNA, 19 bp, Homo sapiens
  siRNA target sequence for GOLGB1 (NM_004487.1,6404-6422).
gggtcctagcagacaatct

SEQ ID NO: 310084 - DNA, 19 bp, Homo sapiens
  siRNA target sequence for GOLGB1 (NM_004487.1,6435-6453).
ggaacttcagtcaaataaa

SEQ ID NO: 310085 - DNA, 19 bp, Homo sapiens
  siRNA target sequence for GOLGB1 (NM_004487.1,6458-6476).
cagttaaaagccagatgaa

SEQ ID NO: 310086 - DNA, 19 bp, Homo sapiens
  siRNA target sequence for GOLGB1 (NM_004487.1,6588-6606).
cttggaagagacaattgga

SEQ ID NO: 310087 - DNA, 19 bp, Homo sapiens
  siRNA target sequence for GOLGB1 (NM_004487.1,6604-6622).
ggagagattcaggttactt

SEQ ID NO: 310088 - DNA, 19 bp, Homo sapiens
  siRNA target sequence for GOLGB1 (NM_004487.1,6605-6623).
gagagattcaggttacttt

SEQ ID NO: 310089 - DNA, 19 bp, Homo sapiens
  siRNA target sequence for GOLGB1 (NM_004487.1,6607-6625).
gagattcaggttactttga

SEQ ID NO: 310090 - DNA, 19 bp, Homo sapiens
  siRNA target sequence for GOLGB1 (NM_004487.1,6613-6631).
caggttactttgaacaaga

SEQ ID NO: 310091 - DNA, 19 bp, Homo sapiens
  siRNA target sequence for GOLGB1 (NM_004487.1,6734-6752).
gggtgatagatgaagctaa

SEQ ID NO: 310092 - DNA, 19 bp, Homo sapiens
  siRNA target sequence for GOLGB1 (NM_004487.1,6768-6786).
gtttagtgatgcgattcaa

SEQ ID NO: 310093 - DNA, 19 bp, Homo sapiens
  siRNA target sequence for GOLGB1 (NM_004487.1,6808-6826).
ctcaaagaagataattgca

SEQ ID NO: 310094 - DNA, 19 bp, Homo sapiens
  siRNA target sequence for GOLGB1 (NM_004487.1,6827-6845).
gtgttctaaaggatcaact

SEQ ID NO: 310095 - DNA, 19 bp, Homo sapiens
  siRNA target sequence for GOLGB1 (NM_004487.1,6829-6847).
gttctaaaggatcaactta

SEQ ID NO: 310096 - DNA, 19 bp, Homo sapiens
  siRNA target sequence for GOLGB1 (NM_004487.1,6868-6886).
gaagaattaaagattaaca

SEQ ID NO: 310097 - DNA, 19 bp, Homo sapiens
  siRNA target sequence for GOLGB1 (NM_004487.1,6885-6903).
catttccaggcttgaacat

SEQ ID NO: 310098 - DNA, 19 bp, Homo sapiens
  siRNA target sequence for GOLGB1 (NM_004487.1,6898-6916).
gaacatgacaagcagattt

SEQ ID NO: 310099 - DNA, 19 bp, Homo sapiens
  siRNA target sequence for GOLGB1 (NM_004487.1,6949-6967).
cagcagaaggtctgtgata

SEQ ID NO: 310100 - DNA, 19 bp, Homo sapiens
  siRNA target sequence for GOLGB1 (NM_004487.1,6954-6972).
gaaggtctgtgatactcta

SEQ ID NO: 310101 - DNA, 19 bp, Homo sapiens
  siRNA target sequence for GOLGB1 (NM_004487.1,7034-7052).
ctcagaatgaattagctaa

SEQ ID NO: 310102 - DNA, 19 bp, Homo sapiens
  siRNA target sequence for GOLGB1 (NM_004487.1,7081-7099).
gaccagttgactgatttaa

SEQ ID NO: 310103 - DNA, 19 bp, Homo sapiens
  siRNA target sequence for GOLGB1 (NM_004487.1,7083-7101).
ccagttgactgatttaagt

SEQ ID NO: 310104 - DNA, 19 bp, Homo sapiens
  siRNA target sequence for GOLGB1 (NM_004487.1,7165-7183).
gctgatattcaaaattcta

SEQ ID NO: 310105 - DNA, 19 bp, Homo sapiens
  siRNA target sequence for GOLGB1 (NM_004487.1,7305-7323).
ggcaatccaagtagctatt

SEQ ID NO: 310106 - DNA, 19 bp, Homo sapiens
  siRNA target sequence for GOLGB1 (NM_004487.1,7332-7350).
gcgtcagcaacatgataaa

SEQ ID NO: 310107 - DNA, 19 bp, Homo sapiens
  siRNA target sequence for GOLGB1 (NM_004487.1,7504-7522).
gattcctttgttaaatcca

SEQ ID NO: 310108 - DNA, 19 bp, Homo sapiens
  siRNA target sequence for GOLGB1 (NM_004487.1,7548-7566).
ccgcatagtgggtgactat

SEQ ID NO: 310109 - DNA, 19 bp, Homo sapiens
  siRNA target sequence for GOLGB1 (NM_004487.1,7550-7568).
gcatagtgggtgactatca

SEQ ID NO: 310110 - DNA, 19 bp, Homo sapiens
  siRNA target sequence for GOLGB1 (NM_004487.1,7579-7597).
gagcgacatctctctataa

SEQ ID NO: 310111 - DNA, 19 bp, Homo sapiens
  siRNA target sequence for GOLGB1 (NM_004487.1,7582-7600).
cgacatctctctataatct

SEQ ID NO: 310112 - DNA, 19 bp, Homo sapiens
  siRNA target sequence for GOLGB1 (NM_004487.1,7631-7649).
ctgcagagaataataagct

SEQ ID NO: 310113 - DNA, 19 bp, Homo sapiens
  siRNA target sequence for GOLGB1 (NM_004487.1,7663-7681).
cgaggcttgagaagtcata

SEQ ID NO: 310114 - DNA, 19 bp, Homo sapiens
  siRNA target sequence for GOLGB1 (NM_004487.1,7664-7682).
gaggcttgagaagtcatat

SEQ ID NO: 310115 - DNA, 19 bp, Homo sapiens
  siRNA target sequence for GOLGB1 (NM_004487.1,7673-7691).
gaagtcatatggatgatct

SEQ ID NO: 310116 - DNA, 19 bp, Homo sapiens
  siRNA target sequence for GOLGB1 (NM_004487.1,7678-7696).
catatggatgatctcaatt

SEQ ID NO: 310117 - DNA, 19 bp, Homo sapiens
  siRNA target sequence for GOLGB1 (NM_004487.1,7741-7759).
gacctgaaccaagtgataa

SEQ ID NO: 310118 - DNA, 19 bp, Homo sapiens
  siRNA target sequence for GOLGB1 (NM_004487.1,7743-7761).
cctgaaccaagtgataaca

SEQ ID NO: 310119 - DNA, 19 bp, Homo sapiens
  siRNA target sequence for GOLGB1 (NM_004487.1,7782-7800).
gcagcttcttgaagttcaa

SEQ ID NO: 310120 - DNA, 19 bp, Homo sapiens
  siRNA target sequence for GOLGB1 (NM_004487.1,7785-7803).
gcttcttgaagttcaactt

SEQ ID NO: 310121 - DNA, 19 bp, Homo sapiens
  siRNA target sequence for GOLGB1 (NM_004487.1,7879-7897).
gatctgcggaggtccttta

SEQ ID NO: 310122 - DNA, 19 bp, Homo sapiens
  siRNA target sequence for GOLGB1 (NM_004487.1,7892-7910).
cctttaatgccctacaaga

SEQ ID NO: 310123 - DNA, 19 bp, Homo sapiens
  siRNA target sequence for GOLGB1 (NM_004487.1,7893-7911).
ctttaatgccctacaagaa

SEQ ID NO: 310124 - DNA, 19 bp, Homo sapiens
  siRNA target sequence for GOLGB1 (NM_004487.1,7928-7946).
ctaaagagattgagagttt

SEQ ID NO: 310125 - DNA, 19 bp, Homo sapiens
  siRNA target sequence for GOLGB1 (NM_004487.1,7935-7953).
gattgagagtttgaaagta

SEQ ID NO: 310126 - DNA, 19 bp, Homo sapiens
  siRNA target sequence for GOLGB1 (NM_004487.1,7962-7980).
ccagctaacaagacaagta

SEQ ID NO: 310127 - DNA, 19 bp, Homo sapiens
  siRNA target sequence for GOLGB1 (NM_004487.1,7963-7981).
cagctaacaagacaagtaa

SEQ ID NO: 310128 - DNA, 19 bp, Homo sapiens
  siRNA target sequence for GOLGB1 (NM_004487.1,7965-7983).
gctaacaagacaagtaaca

SEQ ID NO: 310129 - DNA, 19 bp, Homo sapiens
  siRNA target sequence for GOLGB1 (NM_004487.1,7989-8007).
gcaagaagaaggtacttta

SEQ ID NO: 310130 - DNA, 19 bp, Homo sapiens
  siRNA target sequence for GOLGB1 (NM_004487.1,8000-8018).
gtactttaggactctatca

SEQ ID NO: 310131 - DNA, 19 bp, Homo sapiens
  siRNA target sequence for GOLGB1 (NM_004487.1,8041-8059).
gaagaggtacacaggttaa

SEQ ID NO: 310132 - DNA, 19 bp, Homo sapiens
  siRNA target sequence for GOLGB1 (NM_004487.1,8135-8153).
ccaagaaggtaggtgaaat

SEQ ID NO: 310133 - DNA, 19 bp, Homo sapiens
  siRNA target sequence for GOLGB1 (NM_004487.1,8143-8161).
gtaggtgaaattgaagata

SEQ ID NO: 310134 - DNA, 19 bp, Homo sapiens
  siRNA target sequence for GOLGB1 (NM_004487.1,8200-8218).
gggataatgagaaatgaaa

SEQ ID NO: 310135 - DNA, 19 bp, Homo sapiens
  siRNA target sequence for GOLGB1 (NM_004487.1,8241-8259).
ggcagagctagcaagagat

SEQ ID NO: 310136 - DNA, 19 bp, Homo sapiens
  siRNA target sequence for GOLGB1 (NM_004487.1,8242-8260).
gcagagctagcaagagatt

SEQ ID NO: 310137 - DNA, 19 bp, Homo sapiens
  siRNA target sequence for GOLGB1 (NM_004487.1,8243-8261).
cagagctagcaagagattt

SEQ ID NO: 310138 - DNA, 19 bp, Homo sapiens
  siRNA target sequence for GOLGB1 (NM_004487.1,8342-8360).
ctatgagttccttgcaaaa

SEQ ID NO: 310139 - DNA, 19 bp, Homo sapiens
  siRNA target sequence for GOLGB1 (NM_004487.1,8346-8364).
gagttccttgcaaaatagt

SEQ ID NO: 310140 - DNA, 19 bp, Homo sapiens
  siRNA target sequence for GOLGB1 (NM_004487.1,8376-8394).
caatgaggaacttgatgaa

SEQ ID NO: 310141 - DNA, 19 bp, Homo sapiens
  siRNA target sequence for GOLGB1 (NM_004487.1,8522-8540).
gcttgtctcaccttgagaa

SEQ ID NO: 310142 - DNA, 19 bp, Homo sapiens
  siRNA target sequence for GOLGB1 (NM_004487.1,8523-8541).
cttgtctcaccttgagaaa

SEQ ID NO: 310143 - DNA, 19 bp, Homo sapiens
  siRNA target sequence for GOLGB1 (NM_004487.1,8526-8544).
gtctcaccttgagaaactt

SEQ ID NO: 310144 - DNA, 19 bp, Homo sapiens
  siRNA target sequence for GOLGB1 (NM_004487.1,8528-8546).
ctcaccttgagaaacttaa

SEQ ID NO: 310145 - DNA, 19 bp, Homo sapiens
  siRNA target sequence for GOLGB1 (NM_004487.1,8532-8550).
ccttgagaaacttaaccaa

SEQ ID NO: 310146 - DNA, 19 bp, Homo sapiens
  siRNA target sequence for GOLGB1 (NM_004487.1,8547-8565).
ccaacagctcctatccaaa

SEQ ID NO: 310147 - DNA, 19 bp, Homo sapiens
  siRNA target sequence for GOLGB1 (NM_004487.1,8562-8580).
caaagatgagcaattgctt

SEQ ID NO: 310148 - DNA, 19 bp, Homo sapiens
  siRNA target sequence for GOLGB1 (NM_004487.1,8586-8604).
gtcctcacaactagaagat

SEQ ID NO: 310149 - DNA, 19 bp, Homo sapiens
  siRNA target sequence for GOLGB1 (NM_004487.1,8677-8695).
gagctggagaaatttcgaa

SEQ ID NO: 310150 - DNA, 19 bp, Homo sapiens
  siRNA target sequence for GOLGB1 (NM_004487.1,8746-8764).
gctgaagtacagagtttaa

SEQ ID NO: 310151 - DNA, 19 bp, Homo sapiens
  siRNA target sequence for GOLGB1 (NM_004487.1,8887-8905).
cttcaggagtatcaagata

SEQ ID NO: 310152 - DNA, 19 bp, Homo sapiens
  siRNA target sequence for GOLGB1 (NM_004487.1,9033-9051).
gtaccttatggctatctca

SEQ ID NO: 310153 - DNA, 19 bp, Homo sapiens
  siRNA target sequence for GOLGB1 (NM_004487.1,9125-9143).
ctctcaaagtgcaatacca

SEQ ID NO: 310154 - DNA, 19 bp, Homo sapiens
  siRNA target sequence for GOLGB1 (NM_004487.1,9173-9191).
ccccagatgggtcacaaaa

SEQ ID NO: 310155 - DNA, 19 bp, Homo sapiens
  siRNA target sequence for GOLGB1 (NM_004487.1,9174-9192).
cccagatgggtcacaaaat

SEQ ID NO: 310156 - DNA, 19 bp, Homo sapiens
  siRNA target sequence for GOLGB1 (NM_004487.1,9176-9194).
cagatgggtcacaaaatct

SEQ ID NO: 310157 - DNA, 19 bp, Homo sapiens
  siRNA target sequence for GOLGB1 (NM_004487.1,9369-9387).
gcactatggtgacctttta

SEQ ID NO: 310158 - DNA, 19 bp, Homo sapiens
  siRNA target sequence for GOLGB1 (NM_004487.1,9434-9452).
ggccactaaatatagatgt

SEQ ID NO: 310159 - DNA, 19 bp, Homo sapiens
  siRNA target sequence for GOLGB1 (NM_004487.1,9516-9534).
ggaaccgcagcaaagcttt

SEQ ID NO: 310160 - DNA, 19 bp, Homo sapiens
  siRNA target sequence for GOLGB1 (NM_004487.1,9517-9535).
gaaccgcagcaaagctttt

SEQ ID NO: 310161 - DNA, 19 bp, Homo sapiens
  siRNA target sequence for GOLGB1 (NM_004487.1,9542-9560).
ctcagcagcagctatgcaa

SEQ ID NO: 310162 - DNA, 19 bp, Homo sapiens
  siRNA target sequence for GOLGB1 (NM_004487.1,9689-9707).
cttcccggactcctatcat

SEQ ID NO: 310163 - DNA, 19 bp, Homo sapiens
  siRNA target sequence for GOLGB1 (NM_004487.1,9726-9744).
ggagcaggcactgttaata

SEQ ID NO: 310164 - DNA, 19 bp, Homo sapiens
  siRNA target sequence for GOLGB1 (NM_004487.1,9732-9750).
ggcactgttaatagatctt

SEQ ID NO: 310165 - DNA, 19 bp, Homo sapiens
  siRNA target sequence for GOLGB1 (NM_004487.1,9736-9754).
ctgttaatagatcttacaa

SEQ ID NO: 310166 - DNA, 19 bp, Homo sapiens
  siRNA target sequence for GOLGB1 (NM_004487.1,9745-9763).
gatcttacaagcaacagtt

SEQ ID NO: 310167 - DNA, 19 bp, Homo sapiens
  siRNA target sequence for GOLGB1 (NM_004487.1,9802-9820).
ctgcgttcactctgtcatt

SEQ ID NO: 310168 - DNA, 19 bp, Homo sapiens
  siRNA target sequence for GOLGB1 (NM_004487.1,9804-9822).
gcgttcactctgtcattca

SEQ ID NO: 310169 - DNA, 19 bp, Homo sapiens
  siRNA target sequence for GOLGB1 (NM_004487.1,9825-9843).
gacccgagtgccacttcta

SEQ ID NO: 310170 - DNA, 19 bp, Homo sapiens
  siRNA target sequence for GOLGB1 (NM_004487.1,9844-9862).
gcagccatctactttctaa

SEQ ID NO: 310171 - DNA, 19 bp, Homo sapiens
  siRNA target sequence for GOLGB1 (NM_004487.1,9845-9863).
cagccatctactttctaat

SEQ ID NO: 310172 - DNA, 19 bp, Homo sapiens
  siRNA target sequence for EBNA1BP2 (NM_006824.1,396-414).
cgccagcacctcagaacaa

SEQ ID NO: 310173 - DNA, 19 bp, Homo sapiens
  siRNA target sequence for EBNA1BP2 (NM_006824.1,531-549).
cgaagcgacccactgatta

SEQ ID NO: 310174 - DNA, 19 bp, Homo sapiens
  siRNA target sequence for EBNA1BP2 (NM_006824.1,532-550).
gaagcgacccactgattat

SEQ ID NO: 310175 - DNA, 19 bp, Homo sapiens
  siRNA target sequence for EBNA1BP2 (NM_006824.1,535-553).
gcgacccactgattatttt

SEQ ID NO: 310176 - DNA, 19 bp, Homo sapiens
  siRNA target sequence for EBNA1BP2 (NM_006824.1,719-737).
gcccatatgatgaatgcta

SEQ ID NO: 310177 - DNA, 19 bp, Homo sapiens
  siRNA target sequence for EBNA1BP2 (NM_006824.1,721-739).
ccatatgatgaatgctatt

SEQ ID NO: 310178 - DNA, 19 bp, Homo sapiens
  siRNA target sequence for EBNA1BP2 (NM_006824.1,855-873).
gtgctaaacgacggtataa

SEQ ID NO: 310179 - DNA, 19 bp, Homo sapiens
  siRNA target sequence for EBNA1BP2 (NM_006824.1,857-875).
gctaaacgacggtataaaa

SEQ ID NO: 310180 - DNA, 19 bp, Homo sapiens
  siRNA target sequence for EBNA1BP2 (NM_006824.1,887-905).
ggttttggtggaaagaaga

SEQ ID NO: 310181 - DNA, 19 bp, Homo sapiens
  siRNA target sequence for EBNA1BP2 (NM_006824.1,922-940).
cactcgggagagctatgat

SEQ ID NO: 310182 - DNA, 19 bp, Homo sapiens
  siRNA target sequence for EBNA1BP2 (NM_006824.1,928-946).
ggagagctatgatgatgta

SEQ ID NO: 310183 - DNA, 19 bp, Homo sapiens
  siRNA target sequence for EBNA1BP2 (NM_006824.1,929-947).
gagagctatgatgatgtat

SEQ ID NO: 310184 - DNA, 19 bp, Homo sapiens
  siRNA target sequence for EBNA1BP2 (NM_006824.1,931-949).
gagctatgatgatgtatct

SEQ ID NO: 310185 - DNA, 19 bp, Homo sapiens
  siRNA target sequence for RRS1 (NM_015169.2,454-472).
gcatccgtcccaagaagaa

SEQ ID NO: 310186 - DNA, 19 bp, Homo sapiens
  siRNA target sequence for RRS1 (NM_015169.2,537-555).
cgggacgacaccaaagaat

SEQ ID NO: 310187 - DNA, 19 bp, Homo sapiens
  siRNA target sequence for RRS1 (NM_015169.2,715-733).
ctaccggacaccagagtaa

SEQ ID NO: 310188 - DNA, 19 bp, Homo sapiens
  siRNA target sequence for RRS1 (NM_015169.2,943-961).
ctagggccaccaataagca

SEQ ID NO: 310189 - DNA, 19 bp, Homo sapiens
  siRNA target sequence for RRS1 (NM_015169.2,1103-1121).
gggaggcaagatgaattct

SEQ ID NO: 310190 - DNA, 19 bp, Homo sapiens
  siRNA target sequence for TINF2 (NM_012461.1,335-353).
ggacgctgcgtggaacatt

SEQ ID NO: 310191 - DNA, 19 bp, Homo sapiens
  siRNA target sequence for TINF2 (NM_012461.1,336-354).
gacgctgcgtggaacattt

SEQ ID NO: 310192 - DNA, 19 bp, Homo sapiens
  siRNA target sequence for TINF2 (NM_012461.1,357-375).
cgcgagtactggagtttct

SEQ ID NO: 310193 - DNA, 19 bp, Homo sapiens
  siRNA target sequence for TINF2 (NM_012461.1,419-437).
caccacgaacgcctttgta

SEQ ID NO: 310194 - DNA, 19 bp, Homo sapiens
  siRNA target sequence for TINF2 (NM_012461.1,794-812).
cagcctggagtctctatca

SEQ ID NO: 310195 - DNA, 19 bp, Homo sapiens
  siRNA target sequence for TINF2 (NM_012461.1,819-837).
ctcttgcctggagacaata

SEQ ID NO: 310196 - DNA, 19 bp, Homo sapiens
  siRNA target sequence for TINF2 (NM_012461.1,964-982).
caagcctggcacacatctt

SEQ ID NO: 310197 - DNA, 19 bp, Homo sapiens
  siRNA target sequence for TINF2 (NM_012461.1,1023-1041).
ctggccgacacttcaatct

SEQ ID NO: 310198 - DNA, 19 bp, Homo sapiens
  siRNA target sequence for TINF2 (NM_012461.1,1086-1104).
ctaggggaggccataagga

SEQ ID NO: 310199 - DNA, 19 bp, Homo sapiens
  siRNA target sequence for TINF2 (NM_012461.1,1148-1166).
ccaacccaggtcatatcta

SEQ ID NO: 310200 - DNA, 19 bp, Homo sapiens
  siRNA target sequence for TINF2 (NM_012461.1,1149-1167).
caacccaggtcatatctaa

SEQ ID NO: 310201 - DNA, 19 bp, Homo sapiens
  siRNA target sequence for TINF2 (NM_012461.1,1181-1199).
gaagaacatgcgatataca

SEQ ID NO: 310202 - DNA, 19 bp, Homo sapiens
  siRNA target sequence for PALM (NM_002579.1,572-590).
gtgggcacgcccaaagaca

SEQ ID NO: 310203 - DNA, 19 bp, Homo sapiens
  siRNA target sequence for PALM (NM_002579.1,648-666).
ccatgtactcggttgagat

SEQ ID NO: 310204 - DNA, 19 bp, Homo sapiens
  siRNA target sequence for PALM (NM_002579.1,834-852).
ccgaggtggacgaactcat

SEQ ID NO: 310205 - DNA, 19 bp, Homo sapiens
  siRNA target sequence for PALM (NM_002579.1,1259-1277).
caggacctcgacatgaaga

SEQ ID NO: 310206 - DNA, 19 bp, Homo sapiens
  siRNA target sequence for SOCS2 (NM_003877.3,739-757).
ggggaagtatgactgttaa

SEQ ID NO: 310207 - DNA, 19 bp, Homo sapiens
  siRNA target sequence for SOCS2 (NM_003877.3,740-758).
gggaagtatgactgttaat

SEQ ID NO: 310208 - DNA, 19 bp, Homo sapiens
  siRNA target sequence for SOCS2 (NM_003877.3,742-760).
gaagtatgactgttaatga

SEQ ID NO: 310209 - DNA, 19 bp, Homo sapiens
  siRNA target sequence for SOCS2 (NM_003877.3,789-807).
gaaggaactttcttgatta

SEQ ID NO: 310210 - DNA, 19 bp, Homo sapiens
  siRNA target sequence for SOCS2 (NM_003877.3,808-826).
gagatagctcgcattcaga

SEQ ID NO: 310211 - DNA, 19 bp, Homo sapiens
  siRNA target sequence for SOCS2 (NM_003877.3,823-841).
cagactacctactaacaat

SEQ ID NO: 310212 - DNA, 19 bp, Homo sapiens
  siRNA target sequence for SOCS2 (NM_003877.3,827-845).
ctacctactaacaatatct

SEQ ID NO: 310213 - DNA, 19 bp, Homo sapiens
  siRNA target sequence for SOCS2 (NM_003877.3,853-871).
catcagctggaccaactaa

SEQ ID NO: 310214 - DNA, 19 bp, Homo sapiens
  siRNA target sequence for SOCS2 (NM_003877.3,862-880).
gaccaactaatcttcgaat

SEQ ID NO: 310215 - DNA, 19 bp, Homo sapiens
  siRNA target sequence for SOCS2 (NM_003877.3,868-886).
ctaatcttcgaatcgaata

SEQ ID NO: 310216 - DNA, 19 bp, Homo sapiens
  siRNA target sequence for SOCS2 (NM_003877.3,882-900).
gaataccaagacggaaaat

SEQ ID NO: 310217 - DNA, 19 bp, Homo sapiens
  siRNA target sequence for SOCS2 (NM_003877.3,902-920).
cagattggactctatcata

SEQ ID NO: 310218 - DNA, 19 bp, Homo sapiens
  siRNA target sequence for SOCS2 (NM_003877.3,922-940).
gtgtcaaatccaagcttaa

SEQ ID NO: 310219 - DNA, 19 bp, Homo sapiens
  siRNA target sequence for SOCS3 (NM_003955.2,585-603).
cccccagaagagcctatta

SEQ ID NO: 310220 - DNA, 19 bp, Homo sapiens
  siRNA target sequence for SOCS3 (NM_003955.2,591-609).
gaagagcctattacatcta

SEQ ID NO: 310221 - DNA, 19 bp, Homo sapiens
  siRNA target sequence for SOCS3 (NM_003955.2,704-722).
cacctggactcctatgaga

SEQ ID NO: 310222 - DNA, 19 bp, Homo sapiens
  siRNA target sequence for SOCS4 (NM_004232.2,218-236).
cggaaatcttttaacttga

SEQ ID NO: 310223 - DNA, 19 bp, Homo sapiens
  siRNA target sequence for SOCS4 (NM_004232.2,255-273).
ctgatttcatggtagtaca

SEQ ID NO: 310224 - DNA, 19 bp, Homo sapiens
  siRNA target sequence for SOCS4 (NM_004232.2,324-342).
gctgctatggtaaagatat

SEQ ID NO: 310225 - DNA, 19 bp, Homo sapiens
  siRNA target sequence for SOCS4 (NM_004232.2,352-370).
cgatatcaacggtgaagat

SEQ ID NO: 310226 - DNA, 19 bp, Homo sapiens
  siRNA target sequence for SOCS4 (NM_004232.2,379-397).
cggaaaaaacagatcaaaa

SEQ ID NO: 310227 - DNA, 19 bp, Homo sapiens
  siRNA target sequence for SOCS4 (NM_004232.2,406-424).
cctgatgggtacgctaaaa

SEQ ID NO: 310228 - DNA, 19 bp, Homo sapiens
  siRNA target sequence for SOCS4 (NM_004232.2,407-425).
ctgatgggtacgctaaaaa

SEQ ID NO: 310229 - DNA, 19 bp, Homo sapiens
  siRNA target sequence for SOCS4 (NM_004232.2,426-444).
ggcggctttctgcaaaaca

SEQ ID NO: 310230 - DNA, 19 bp, Homo sapiens
  siRNA target sequence for SOCS4 (NM_004232.2,428-446).
cggctttctgcaaaacaga

SEQ ID NO: 310231 - DNA, 19 bp, Homo sapiens
  siRNA target sequence for SOCS4 (NM_004232.2,511-529).
ctcagcacccatagtcttt

SEQ ID NO: 310232 - DNA, 19 bp, Homo sapiens
  siRNA target sequence for SOCS4 (NM_004232.2,513-531).
cagcacccatagtctttaa

SEQ ID NO: 310233 - DNA, 19 bp, Homo sapiens
  siRNA target sequence for SOCS4 (NM_004232.2,516-534).
cacccatagtctttaaaga

SEQ ID NO: 310234 - DNA, 19 bp, Homo sapiens
  siRNA target sequence for SOCS4 (NM_004232.2,542-560).
gctcagaggccgataaggt

SEQ ID NO: 310235 - DNA, 19 bp, Homo sapiens
  siRNA target sequence for SOCS4 (NM_004232.2,567-585).
cgctccgcagccatcacta

SEQ ID NO: 310236 - DNA, 19 bp, Homo sapiens
  siRNA target sequence for SOCS4 (NM_004232.2,742-760).
ccaggagcaagccaattca

SEQ ID NO: 310237 - DNA, 19 bp, Homo sapiens
  siRNA target sequence for SOCS4 (NM_004232.2,763-781).
gaagagctcggcttctcat

SEQ ID NO: 310238 - DNA, 19 bp, Homo sapiens
  siRNA target sequence for SOCS4 (NM_004232.2,766-784).
gagctcggcttctcataat

SEQ ID NO: 310239 - DNA, 19 bp, Homo sapiens
  siRNA target sequence for SOCS4 (NM_004232.2,769-787).
ctcggcttctcataatgga

SEQ ID NO: 310240 - DNA, 19 bp, Homo sapiens
  siRNA target sequence for SOCS4 (NM_004232.2,819-837).
ctgtcgttattggacttat

SEQ ID NO: 310241 - DNA, 19 bp, Homo sapiens
  siRNA target sequence for SOCS4 (NM_004232.2,839-857).
cctcaggactacattcagt

SEQ ID NO: 310242 - DNA, 19 bp, Homo sapiens
  siRNA target sequence for SOCS4 (NM_004232.2,856-874).
gtatactgtgcctttagat

SEQ ID NO: 310243 - DNA, 19 bp, Homo sapiens
  siRNA target sequence for SOCS4 (NM_004232.2,872-890).
gatgaggggatgtatcctt

SEQ ID NO: 310244 - DNA, 19 bp, Homo sapiens
  siRNA target sequence for SOCS4 (NM_004232.2,877-895).
ggggatgtatcctttggaa

SEQ ID NO: 310245 - DNA, 19 bp, Homo sapiens
  siRNA target sequence for SOCS4 (NM_004232.2,893-911).
gaaggatcacggagctatt

SEQ ID NO: 310246 - DNA, 19 bp, Homo sapiens
  siRNA target sequence for SOCS4 (NM_004232.2,897-915).
gatcacggagctattgtct

SEQ ID NO: 310247 - DNA, 19 bp, Homo sapiens
  siRNA target sequence for SOCS4 (NM_004232.2,1041-1059).
ccgtgaatggcttgttgat

SEQ ID NO: 310248 - DNA, 19 bp, Homo sapiens
  siRNA target sequence for SOCS4 (NM_004232.2,1042-1060).
cgtgaatggcttgttgatt

SEQ ID NO: 310249 - DNA, 19 bp, Homo sapiens
  siRNA target sequence for SOCS4 (NM_004232.2,1130-1148).
ctacctccaatgcagaata

SEQ ID NO: 310250 - DNA, 19 bp, Homo sapiens
  siRNA target sequence for SOCS4 (NM_004232.2,1202-1220).
gaaagtatgcgctgtcatt

SEQ ID NO: 310251 - DNA, 19 bp, Homo sapiens
  siRNA target sequence for SOCS4 (NM_004232.2,1206-1224).
gtatgcgctgtcatttgaa

SEQ ID NO: 310252 - DNA, 19 bp, Homo sapiens
  siRNA target sequence for SOCS4 (NM_004232.2,1210-1228).
gcgctgtcatttgaatttt

SEQ ID NO: 310253 - DNA, 19 bp, Homo sapiens
  siRNA target sequence for SOCS4 (NM_004232.2,1390-1408).
cgtgccagatggttctttt

SEQ ID NO: 310254 - DNA, 19 bp, Homo sapiens
  siRNA target sequence for SOCS4 (NM_004232.2,1425-1443).
ctgacgaccgttacctttt

SEQ ID NO: 310255 - DNA, 19 bp, Homo sapiens
  siRNA target sequence for SOCS4 (NM_004232.2,1503-1521).
gtaggtttagcttttatga

SEQ ID NO: 310256 - DNA, 19 bp, Homo sapiens
  siRNA target sequence for SOCS4 (NM_004232.2,1539-1557).
gacatacgtccatagttga

SEQ ID NO: 310257 - DNA, 19 bp, Homo sapiens
  siRNA target sequence for SOCS4 (NM_004232.2,1545-1563).
cgtccatagttgatctaat

SEQ ID NO: 310258 - DNA, 19 bp, Homo sapiens
  siRNA target sequence for SOCS4 (NM_004232.2,1546-1564).
gtccatagttgatctaatt

SEQ ID NO: 310259 - DNA, 19 bp, Homo sapiens
  siRNA target sequence for SOCS4 (NM_004232.2,1548-1566).
ccatagttgatctaattga

SEQ ID NO: 310260 - DNA, 19 bp, Homo sapiens
  siRNA target sequence for SOCS4 (NM_004232.2,1690-1708).
gcagtacctgtgtcgtttt

SEQ ID NO: 310261 - DNA, 19 bp, Homo sapiens
  siRNA target sequence for SOCS4 (NM_004232.2,1696-1714).
cctgtgtcgttttgttata

SEQ ID NO: 310262 - DNA, 19 bp, Homo sapiens
  siRNA target sequence for SOCS4 (NM_004232.2,1699-1717).
gtgtcgttttgttatacgt

SEQ ID NO: 310263 - DNA, 19 bp, Homo sapiens
  siRNA target sequence for SOCS4 (NM_004232.2,1709-1727).
gttatacgtcagtatacca

SEQ ID NO: 310264 - DNA, 19 bp, Homo sapiens
  siRNA target sequence for SOCS4 (NM_004232.2,1716-1734).
gtcagtataccagaataga

SEQ ID NO: 310265 - DNA, 19 bp, Homo sapiens
  siRNA target sequence for SOCS4 (NM_004232.2,1725-1743).
ccagaatagacttaattca

SEQ ID NO: 310266 - DNA, 19 bp, Homo sapiens
  siRNA target sequence for SOCS7 (NM_080867.2,473-491).
gatgtaaggcccaaaacta

SEQ ID NO: 310267 - DNA, 19 bp, Homo sapiens
  siRNA target sequence for SOCS7 (NM_080867.2,529-547).
gtggagtggaaagaagtta

SEQ ID NO: 310268 - DNA, 19 bp, Homo sapiens
  siRNA target sequence for SOCS7 (NM_080867.2,581-599).
gctgagacagtgaatggta

SEQ ID NO: 310269 - DNA, 19 bp, Homo sapiens
  siRNA target sequence for SOCS7 (NM_080867.2,604-622).
gaaaaccgaagtgtcttta

SEQ ID NO: 310270 - DNA, 19 bp, Homo sapiens
  siRNA target sequence for SOCS7 (NM_080867.2,645-663).
gctgttcatccattgagtt

SEQ ID NO: 310271 - DNA, 19 bp, Homo sapiens
  siRNA target sequence for SOCS7 (NM_080867.2,659-677).
gagttggacttagatcatt

SEQ ID NO: 310272 - DNA, 19 bp, Homo sapiens
  siRNA target sequence for SOCS7 (NM_080867.2,678-696).
cctgtgggcatcgattttt

SEQ ID NO: 310273 - DNA, 19 bp, Homo sapiens
  siRNA target sequence for SOCS7 (NM_080867.2,698-716).
ggccgatctcttaaacaga

SEQ ID NO: 310274 - DNA, 19 bp, Homo sapiens
  siRNA target sequence for SOCS7 (NM_080867.2,699-717).
gccgatctcttaaacagaa

SEQ ID NO: 310275 - DNA, 19 bp, Homo sapiens
  siRNA target sequence for SOCS7 (NM_080867.2,730-748).
cgtggggcagtgttttcca

SEQ ID NO: 310276 - DNA, 19 bp, Homo sapiens
  siRNA target sequence for SOCS7 (NM_080867.2,779-797).
gggcttccgtctaaaagga

SEQ ID NO: 310277 - DNA, 19 bp, Homo sapiens
  siRNA target sequence for SOCS7 (NM_080867.2,810-828).
gtgaactcatgttagataa

SEQ ID NO: 310278 - DNA, 19 bp, Homo sapiens
  siRNA target sequence for SOCS7 (NM_080867.2,865-883).
gtggcattttattaaacga

SEQ ID NO: 310279 - DNA, 19 bp, Homo sapiens
  siRNA target sequence for SOCS7 (NM_080867.2,881-899).
cgacacactgctcctataa

SEQ ID NO: 310280 - DNA, 19 bp, Homo sapiens
  siRNA target sequence for SOCS7 (NM_080867.2,882-900).
gacacactgctcctataaa

SEQ ID NO: 310281 - DNA, 19 bp, Homo sapiens
  siRNA target sequence for SOCS7 (NM_080867.2,884-902).
cacactgctcctataaatt

SEQ ID NO: 310282 - DNA, 19 bp, Homo sapiens
  siRNA target sequence for SOCS7 (NM_080867.2,888-906).
ctgctcctataaattccaa

SEQ ID NO: 310283 - DNA, 19 bp, Homo sapiens
  siRNA target sequence for SOCS7 (NM_080867.2,890-908).
gctcctataaattccaaat

SEQ ID NO: 310284 - DNA, 19 bp, Homo sapiens
  siRNA target sequence for SOCS7 (NM_080867.2,949-967).
gagggatggtcagctaaaa

SEQ ID NO: 310285 - DNA, 19 bp, Homo sapiens
  siRNA target sequence for SOCS7 (NM_080867.2,952-970).
ggatggtcagctaaaacga

SEQ ID NO: 310286 - DNA, 19 bp, Homo sapiens
  siRNA target sequence for SOCS7 (NM_080867.2,953-971).
gatggtcagctaaaacgaa

SEQ ID NO: 310287 - DNA, 19 bp, Homo sapiens
  siRNA target sequence for SOCS7 (NM_080867.2,1033-1051).
caccgacaatgctttgtgt

SEQ ID NO: 310288 - DNA, 19 bp, Homo sapiens
  siRNA target sequence for SOCS7 (NM_080867.2,1076-1094).
gtgatgaacctggtttcaa

SEQ ID NO: 310289 - DNA, 19 bp, Homo sapiens
  siRNA target sequence for SOCS7 (NM_080867.2,1087-1105).
ggtttcaaataacagtata

SEQ ID NO: 310290 - DNA, 19 bp, Homo sapiens
  siRNA target sequence for SOCS7 (NM_080867.2,1099-1117).
cagtatagaagatagtgat

SEQ ID NO: 310291 - DNA, 19 bp, Homo sapiens
  siRNA target sequence for SOCS7 (NM_080867.2,1126-1144).
cgatgatgaaattctaaca

SEQ ID NO: 310292 - DNA, 19 bp, Homo sapiens
  siRNA target sequence for SOCS7 (NM_080867.2,1139-1157).
ctaacactttgcacaagtt

SEQ ID NO: 310293 - DNA, 19 bp, Homo sapiens
  siRNA target sequence for SOCS7 (NM_080867.2,1299-1317).
ggggagtgatggataaata

SEQ ID NO: 310294 - DNA, 19 bp, Homo sapiens
  siRNA target sequence for SOCS7 (NM_080867.2,1381-1399).
ggaagactatttattctct

SEQ ID NO: 310295 - DNA, 19 bp, Homo sapiens
  siRNA target sequence for SOCS7 (NM_080867.2,1414-1432).
ctatagtcgttctcttcat

SEQ ID NO: 310296 - DNA, 19 bp, Homo sapiens
  siRNA target sequence for SOCS7 (NM_080867.2,1422-1440).
gttctcttcatgctagaat

SEQ ID NO: 310297 - DNA, 19 bp, Homo sapiens
  siRNA target sequence for SOCS7 (NM_080867.2,1492-1510).
ccattctcctgacattact

SEQ ID NO: 310298 - DNA, 19 bp, Homo sapiens
  siRNA target sequence for SOCS7 (NM_080867.2,1509-1527).
ctgggctcctagaacatta

SEQ ID NO: 310299 - DNA, 19 bp, Homo sapiens
  siRNA target sequence for SOCS7 (NM_080867.2,1511-1529).
gggctcctagaacattata

SEQ ID NO: 310300 - DNA, 19 bp, Homo sapiens
  siRNA target sequence for SOCS7 (NM_080867.2,1512-1530).
ggctcctagaacattataa

SEQ ID NO: 310301 - DNA, 19 bp, Homo sapiens
  siRNA target sequence for SOCS7 (NM_080867.2,1532-1550).
gacccaagcgcctgtatgt

SEQ ID NO: 310302 - DNA, 19 bp, Homo sapiens
  siRNA target sequence for SOCS7 (NM_080867.2,1536-1554).
caagcgcctgtatgttctt

SEQ ID NO: 310303 - DNA, 19 bp, Homo sapiens
  siRNA target sequence for SOCS7 (NM_080867.2,1539-1557).
gcgcctgtatgttctttga

SEQ ID NO: 310304 - DNA, 19 bp, Homo sapiens
  siRNA target sequence for SOCS7 (NM_080867.2,1629-1647).
gtaactgtacaacttatga

SEQ ID NO: 310305 - DNA, 19 bp, Homo sapiens
  siRNA target sequence for SOCS7 (NM_080867.2,1650-1668).
gcatcgatgcccttccaat

SEQ ID NO: 310306 - DNA, 19 bp, Homo sapiens
  siRNA target sequence for SOCS7 (NM_080867.2,1651-1669).
catcgatgcccttccaatt

SEQ ID NO: 310307 - DNA, 19 bp, Homo sapiens
  siRNA target sequence for SOCS7 (NM_080867.2,1654-1672).
cgatgcccttccaattcct

SEQ ID NO: 310308 - DNA, 19 bp, Homo sapiens
  siRNA target sequence for SOCS7 (NM_080867.2,1677-1695).
ctatgaaattatatctgaa

SEQ ID NO: 310309 - DNA, 19 bp, Homo sapiens
  siRNA target sequence for NDRG4 (NM_020465.1,289-307).
gggcctcaaccacaaacta

SEQ ID NO: 310310 - DNA, 19 bp, Homo sapiens
  siRNA target sequence for NDRG4 (NM_020465.1,290-308).
ggcctcaaccacaaactat

SEQ ID NO: 310311 - DNA, 19 bp, Homo sapiens
  siRNA target sequence for NDRG4 (NM_020465.1,299-317).
cacaaactatgcttcaaca

SEQ ID NO: 310312 - DNA, 19 bp, Homo sapiens
  siRNA target sequence for NDRG4 (NM_020465.1,475-493).
gcatttcgggttcaagtat

SEQ ID NO: 310313 - DNA, 19 bp, Homo sapiens
  siRNA target sequence for NDRG4 (NM_020465.1,481-499).
cgggttcaagtatgtgatt

SEQ ID NO: 310314 - DNA, 19 bp, Homo sapiens
  siRNA target sequence for NDRG4 (NM_020465.1,599-617).
ggcaaaggctggatagact

SEQ ID NO: 310315 - DNA, 19 bp, Homo sapiens
  siRNA target sequence for NDRG4 (NM_020465.1,637-655).
cggcctaactagcacttta

SEQ ID NO: 310316 - DNA, 19 bp, Homo sapiens
  siRNA target sequence for NDRG4 (NM_020465.1,794-812).
cgcagagacctggacatta

SEQ ID NO: 310317 - DNA, 19 bp, Homo sapiens
  siRNA target sequence for NDRG4 (NM_020465.1,865-883).
ggtggttggggataatgca

SEQ ID NO: 310318 - DNA, 19 bp, Homo sapiens
  siRNA target sequence for NDRG4 (NM_022910.1,880-898).
ctacgaccttcctgaagat

SEQ ID NO: 310319 - DNA, 19 bp, Homo sapiens
  siRNA target sequence for PLEKHC1 (NM_006832.1,85-103).
gctctggacgggataagga

SEQ ID NO: 310320 - DNA, 19 bp, Homo sapiens
  siRNA target sequence for PLEKHC1 (NM_006832.1,86-104).
ctctggacgggataaggat

SEQ ID NO: 310321 - DNA, 19 bp, Homo sapiens
  siRNA target sequence for PLEKHC1 (NM_006832.1,206-224).
gaggcgtgatgcttaagct

SEQ ID NO: 310322 - DNA, 19 bp, Homo sapiens
  siRNA target sequence for PLEKHC1 (NM_006832.1,226-244).
gtggagaaactcgatgtaa

SEQ ID NO: 310323 - DNA, 19 bp, Homo sapiens
  siRNA target sequence for PLEKHC1 (NM_006832.1,229-247).
gagaaactcgatgtaaaaa

SEQ ID NO: 310324 - DNA, 19 bp, Homo sapiens
  siRNA target sequence for PLEKHC1 (NM_006832.1,235-253).
ctcgatgtaaaaaaagatt

SEQ ID NO: 310325 - DNA, 19 bp, Homo sapiens
  siRNA target sequence for PLEKHC1 (NM_006832.1,314-332).
ccttagataagtatggtat

SEQ ID NO: 310326 - DNA, 19 bp, Homo sapiens
  siRNA target sequence for PLEKHC1 (NM_006832.1,315-333).
cttagataagtatggtatt

SEQ ID NO: 310327 - DNA, 19 bp, Homo sapiens
  siRNA target sequence for PLEKHC1 (NM_006832.1,329-347).
gtattcaggcagatgctaa

SEQ ID NO: 310328 - DNA, 19 bp, Homo sapiens
  siRNA target sequence for PLEKHC1 (NM_006832.1,391-409).
cccaacatgaagtatgtga

SEQ ID NO: 310329 - DNA, 19 bp, Homo sapiens
  siRNA target sequence for PLEKHC1 (NM_006832.1,452-470).
ctgacatctgtaagacttt

SEQ ID NO: 310330 - DNA, 19 bp, Homo sapiens
  siRNA target sequence for PLEKHC1 (NM_006832.1,487-505).
gaagaactttctctcttaa

SEQ ID NO: 310331 - DNA, 19 bp, Homo sapiens
  siRNA target sequence for PLEKHC1 (NM_006832.1,511-529).
cccagagatccaacaaaga

SEQ ID NO: 310332 - DNA, 19 bp, Homo sapiens
  siRNA target sequence for PLEKHC1 (NM_006832.1,512-530).
ccagagatccaacaaagaa

SEQ ID NO: 310333 - DNA, 19 bp, Homo sapiens
  siRNA target sequence for PLEKHC1 (NM_006832.1,623-641).
gcccaggactgtatagtaa

SEQ ID NO: 310334 - DNA, 19 bp, Homo sapiens
  siRNA target sequence for PLEKHC1 (NM_006832.1,624-642).
cccaggactgtatagtaaa

SEQ ID NO: 310335 - DNA, 19 bp, Homo sapiens
  siRNA target sequence for PLEKHC1 (NM_006832.1,625-643).
ccaggactgtatagtaaaa

SEQ ID NO: 310336 - DNA, 19 bp, Homo sapiens
  siRNA target sequence for PLEKHC1 (NM_006832.1,628-646).
ggactgtatagtaaaacaa

SEQ ID NO: 310337 - DNA, 19 bp, Homo sapiens
  siRNA target sequence for PLEKHC1 (NM_006832.1,631-649).
ctgtatagtaaaacaatga

SEQ ID NO: 310338 - DNA, 19 bp, Homo sapiens
  siRNA target sequence for PLEKHC1 (NM_006832.1,758-776).
caatcacgtcaccagaaat

SEQ ID NO: 310339 - DNA, 19 bp, Homo sapiens
  siRNA target sequence for PLEKHC1 (NM_006832.1,796-814).
cctcaagctcttcttgata

SEQ ID NO: 310340 - DNA, 19 bp, Homo sapiens
  siRNA target sequence for PLEKHC1 (NM_006832.1,797-815).
ctcaagctcttcttgataa

SEQ ID NO: 310341 - DNA, 19 bp, Homo sapiens
  siRNA target sequence for PLEKHC1 (NM_006832.1,887-905).
ccttgctgctccgattcaa

SEQ ID NO: 310342 - DNA, 19 bp, Homo sapiens
  siRNA target sequence for PLEKHC1 (NM_006832.1,891-909).
gctgctccgattcaagtat

SEQ ID NO: 310343 - DNA, 19 bp, Homo sapiens
  siRNA target sequence for PLEKHC1 (NM_006832.1,892-910).
ctgctccgattcaagtatt

SEQ ID NO: 310344 - DNA, 19 bp, Homo sapiens
  siRNA target sequence for PLEKHC1 (NM_006832.1,906-924).
gtattacagcttttttgat

SEQ ID NO: 310345 - DNA, 19 bp, Homo sapiens
  siRNA target sequence for PLEKHC1 (NM_006832.1,1068-1086).
catgacatcagagaatcat

SEQ ID NO: 310346 - DNA, 19 bp, Homo sapiens
  siRNA target sequence for PLEKHC1 (NM_006832.1,1150-1168).
ctggaagggggtaaaacgt

SEQ ID NO: 310347 - DNA, 19 bp, Homo sapiens
  siRNA target sequence for PLEKHC1 (NM_006832.1,1156-1174).
gggggtaaaacgtcaacaa

SEQ ID NO: 310348 - DNA, 19 bp, Homo sapiens
  siRNA target sequence for PLEKHC1 (NM_006832.1,1207-1225).
gctgactacattaaagttt

SEQ ID NO: 310349 - DNA, 19 bp, Homo sapiens
  siRNA target sequence for PLEKHC1 (NM_006832.1,1246-1264).
ctgaaaggttacaaacaat

SEQ ID NO: 310350 - DNA, 19 bp, Homo sapiens
  siRNA target sequence for PLEKHC1 (NM_006832.1,1443-1461).
ctggcttcgttgtgacaat

SEQ ID NO: 310351 - DNA, 19 bp, Homo sapiens
  siRNA target sequence for PLEKHC1 (NM_006832.1,1445-1463).
ggcttcgttgtgacaatga

SEQ ID NO: 310352 - DNA, 19 bp, Homo sapiens
  siRNA target sequence for PLEKHC1 (NM_006832.1,1446-1464).
gcttcgttgtgacaatgaa

SEQ ID NO: 310353 - DNA, 19 bp, Homo sapiens
  siRNA target sequence for PLEKHC1 (NM_006832.1,1517-1535).
ccatggcggacagttctta

SEQ ID NO: 310354 - DNA, 19 bp, Homo sapiens
  siRNA target sequence for PLEKHC1 (NM_006832.1,1587-1605).
cccagatcctcagttaata

SEQ ID NO: 310355 - DNA, 19 bp, Homo sapiens
  siRNA target sequence for PLEKHC1 (NM_006832.1,1611-1629).
gcagatcacgactgatata

SEQ ID NO: 310356 - DNA, 19 bp, Homo sapiens
  siRNA target sequence for PLEKHC1 (NM_006832.1,1612-1630).
cagatcacgactgatataa

SEQ ID NO: 310357 - DNA, 19 bp, Homo sapiens
  siRNA target sequence for PLEKHC1 (NM_006832.1,1624-1642).
gatataactcctgaatgtt

SEQ ID NO: 310358 - DNA, 19 bp, Homo sapiens
  siRNA target sequence for PLEKHC1 (NM_006832.1,1649-1667).
ctccccgctatctaaaaaa

SEQ ID NO: 310359 - DNA, 19 bp, Homo sapiens
  siRNA target sequence for PLEKHC1 (NM_006832.1,1651-1669).
ccccgctatctaaaaaagt

SEQ ID NO: 310360 - DNA, 19 bp, Homo sapiens
  siRNA target sequence for PLEKHC1 (NM_006832.1,1653-1671).
ccgctatctaaaaaagtat

SEQ ID NO: 310361 - DNA, 19 bp, Homo sapiens
  siRNA target sequence for PLEKHC1 (NM_006832.1,1681-1699).
cagataacagcgagaatct

SEQ ID NO: 310362 - DNA, 19 bp, Homo sapiens
  siRNA target sequence for PLEKHC1 (NM_006832.1,1701-1719).
ggaggcccatcagaatgta

SEQ ID NO: 310363 - DNA, 19 bp, Homo sapiens
  siRNA target sequence for PLEKHC1 (NM_006832.1,1808-1826).
ggttccaagggggcaaaaa

SEQ ID NO: 310364 - DNA, 19 bp, Homo sapiens
  siRNA target sequence for PLEKHC1 (NM_006832.1,1831-1849).
gaacttattggaattgcat

SEQ ID NO: 310365 - DNA, 19 bp, Homo sapiens
  siRNA target sequence for PLEKHC1 (NM_006832.1,1956-1974).
cgtagagtttgcagatgaa

SEQ ID NO: 310366 - DNA, 19 bp, Homo sapiens
  siRNA target sequence for PLEKHC1 (NM_006832.1,1978-1996).
cgattgtccttcatttgta

SEQ ID NO: 310367 - DNA, 19 bp, Homo sapiens
  siRNA target sequence for PLEKHC1 (NM_006832.1,2078-2096).
gtttagatgaagagatgtt

SEQ ID NO: 310368 - DNA, 19 bp, Homo sapiens
  siRNA target sequence for APG5L (NM_004849.1,366-384).
ggacgaattccaacttgtt

SEQ ID NO: 310369 - DNA, 19 bp, Homo sapiens
  siRNA target sequence for APG5L (NM_004849.1,367-385).
gacgaattccaacttgttt

SEQ ID NO: 310370 - DNA, 19 bp, Homo sapiens
  siRNA target sequence for APG5L (NM_004849.1,369-387).
cgaattccaacttgtttca

SEQ ID NO: 310371 - DNA, 19 bp, Homo sapiens
  siRNA target sequence for APG5L (NM_004849.1,379-397).
cttgtttcacgctatatca

SEQ ID NO: 310372 - DNA, 19 bp, Homo sapiens
  siRNA target sequence for APG5L (NM_004849.1,388-406).
cgctatatcaggatgagat

SEQ ID NO: 310373 - DNA, 19 bp, Homo sapiens
  siRNA target sequence for APG5L (NM_004849.1,389-407).
gctatatcaggatgagata

SEQ ID NO: 310374 - DNA, 19 bp, Homo sapiens
  siRNA target sequence for APG5L (NM_004849.1,396-414).
caggatgagataactgaaa

SEQ ID NO: 310375 - DNA, 19 bp, Homo sapiens
  siRNA target sequence for APG5L (NM_004849.1,421-439).
cagaaccatactatttgct

SEQ ID NO: 310376 - DNA, 19 bp, Homo sapiens
  siRNA target sequence for APG5L (NM_004849.1,463-481).
cgttggtaactgacaaagt

SEQ ID NO: 310377 - DNA, 19 bp, Homo sapiens
  siRNA target sequence for APG5L (NM_004849.1,467-485).
ggtaactgacaaagtgaaa

SEQ ID NO: 310378 - DNA, 19 bp, Homo sapiens
  siRNA target sequence for APG5L (NM_004849.1,491-509).
ctttcagaaggttatgaga

SEQ ID NO: 310379 - DNA, 19 bp, Homo sapiens
  siRNA target sequence for APG5L (NM_004849.1,516-534).
gacattagtgagatatggt

SEQ ID NO: 310380 - DNA, 19 bp, Homo sapiens
  siRNA target sequence for APG5L (NM_004849.1,562-580).
ggcattatccaattggttt

SEQ ID NO: 310381 - DNA, 19 bp, Homo sapiens
  siRNA target sequence for APG5L (NM_004849.1,571-589).
caattggtttgctatttga

SEQ ID NO: 310382 - DNA, 19 bp, Homo sapiens
  siRNA target sequence for APG5L (NM_004849.1,577-595).
gtttgctatttgatcttct

SEQ ID NO: 310383 - DNA, 19 bp, Homo sapiens
  siRNA target sequence for APG5L (NM_004849.1,588-606).
gatcttcttgcatcaagtt

SEQ ID NO: 310384 - DNA, 19 bp, Homo sapiens
  siRNA target sequence for APG5L (NM_004849.1,665-683).
gcactgtccatctaaggat

SEQ ID NO: 310385 - DNA, 19 bp, Homo sapiens
  siRNA target sequence for APG5L (NM_004849.1,673-691).
catctaaggatgcaattga

SEQ ID NO: 310386 - DNA, 19 bp, Homo sapiens
  siRNA target sequence for APG5L (NM_004849.1,696-714).
cattttatgtcatgtatga

SEQ ID NO: 310387 - DNA, 19 bp, Homo sapiens
  siRNA target sequence for APG5L (NM_004849.1,783-801).
ctctggatgggattgcaaa

SEQ ID NO: 310388 - DNA, 19 bp, Homo sapiens
  siRNA target sequence for APG5L (NM_004849.1,804-822).
gacagatttgaccagtttt

SEQ ID NO: 310389 - DNA, 19 bp, Homo sapiens
  siRNA target sequence for APG5L (NM_004849.1,815-833).
ccagttttgggccatcaat

SEQ ID NO: 310390 - DNA, 19 bp, Homo sapiens
  siRNA target sequence for APG5L (NM_004849.1,836-854).
gaaactcatggaatatcct

SEQ ID NO: 310391 - DNA, 19 bp, Homo sapiens
  siRNA target sequence for APG5L (NM_004849.1,973-991).
gagatctcctcaaagaagt

SEQ ID NO: 310392 - DNA, 19 bp, Homo sapiens
  siRNA target sequence for APG5L (NM_004849.1,1100-1118).
gagctacccggataatttt

SEQ ID NO: 310393 - DNA, 19 bp, Homo sapiens
  siRNA target sequence for APG5L (NM_004849.1,1102-1120).
gctacccggataattttct

SEQ ID NO: 310394 - DNA, 19 bp, Homo sapiens
  siRNA target sequence for APG5L (NM_004849.1,1106-1124).
cccggataattttcttcat

SEQ ID NO: 310395 - DNA, 19 bp, Homo sapiens
  siRNA target sequence for APG5L (NM_004849.1,1108-1126).
cggataattttcttcatat

SEQ ID NO: 310396 - DNA, 19 bp, Homo sapiens
  siRNA target sequence for APG5L (NM_004849.1,1109-1127).
ggataattttcttcatatt

SEQ ID NO: 310397 - DNA, 19 bp, Homo sapiens
  siRNA target sequence for BCAS3 (NM_017679.2,138-156).
gtcctacatggaaagtgtt

SEQ ID NO: 310398 - DNA, 19 bp, Homo sapiens
  siRNA target sequence for BCAS3 (NM_017679.2,229-247).
gtctgggtcagatttgaaa

SEQ ID NO: 310399 - DNA, 19 bp, Homo sapiens
  siRNA target sequence for BCAS3 (NM_017679.2,310-328).
gaaccgcctttgttgatta

SEQ ID NO: 310400 - DNA, 19 bp, Homo sapiens
  siRNA target sequence for BCAS3 (NM_017679.2,357-375).
ctggagcatccctatcagt

SEQ ID NO: 310401 - DNA, 19 bp, Homo sapiens
  siRNA target sequence for BCAS3 (NM_017679.2,447-465).
gtttggtgctcaaaaatgt

SEQ ID NO: 310402 - DNA, 19 bp, Homo sapiens
  siRNA target sequence for BCAS3 (NM_017679.2,452-470).
gtgctcaaaaatgtgataa

SEQ ID NO: 310403 - DNA, 19 bp, Homo sapiens
  siRNA target sequence for BCAS3 (NM_017679.2,454-472).
gctcaaaaatgtgataact

SEQ ID NO: 310404 - DNA, 19 bp, Homo sapiens
  siRNA target sequence for BCAS3 (NM_017679.2,545-563).
gtgtggatctgtattcact

SEQ ID NO: 310405 - DNA, 19 bp, Homo sapiens
  siRNA target sequence for BCAS3 (NM_017679.2,576-594).
gatggtcaagtccattcaa

SEQ ID NO: 310406 - DNA, 19 bp, Homo sapiens
  siRNA target sequence for BCAS3 (NM_017679.2,580-598).
gtcaagtccattcaattta

SEQ ID NO: 310407 - DNA, 19 bp, Homo sapiens
  siRNA target sequence for BCAS3 (NM_017679.2,678-696).
ctgtactttcacgaagaaa

SEQ ID NO: 310408 - DNA, 19 bp, Homo sapiens
  siRNA target sequence for BCAS3 (NM_017679.2,680-698).
gtactttcacgaagaaatt

SEQ ID NO: 310409 - DNA, 19 bp, Homo sapiens
  siRNA target sequence for BCAS3 (NM_017679.2,687-705).
cacgaagaaattctttgtt

SEQ ID NO: 310410 - DNA, 19 bp, Homo sapiens
  siRNA target sequence for BCAS3 (NM_017679.2,719-737).
catgtccagggccaaacat

SEQ ID NO: 310411 - DNA, 19 bp, Homo sapiens
  siRNA target sequence for BCAS3 (NM_017679.2,722-740).
gtccagggccaaacatgaa

SEQ ID NO: 310412 - DNA, 19 bp, Homo sapiens
  siRNA target sequence for BCAS3 (NM_017679.2,727-745).
gggccaaacatgaatccta

SEQ ID NO: 310413 - DNA, 19 bp, Homo sapiens
  siRNA target sequence for BCAS3 (NM_017679.2,755-773).
ggagccgctggcttgctta

SEQ ID NO: 310414 - DNA, 19 bp, Homo sapiens
  siRNA target sequence for BCAS3 (NM_017679.2,756-774).
gagccgctggcttgcttat

SEQ ID NO: 310415 - DNA, 19 bp, Homo sapiens
  siRNA target sequence for BCAS3 (NM_017679.2,818-836).
cctgtggagacaacattca

SEQ ID NO: 310416 - DNA, 19 bp, Homo sapiens
  siRNA target sequence for BCAS3 (NM_017679.2,824-842).
gagacaacattcagtctta

SEQ ID NO: 310417 - DNA, 19 bp, Homo sapiens
  siRNA target sequence for BCAS3 (NM_017679.2,826-844).
gacaacattcagtcttata

SEQ ID NO: 310418 - DNA, 19 bp, Homo sapiens
  siRNA target sequence for BCAS3 (NM_017679.2,995-1013).
caggcatcatcacagttat

SEQ ID NO: 310419 - DNA, 19 bp, Homo sapiens
  siRNA target sequence for BCAS3 (NM_017679.2,1110-1128).
gtgctgcatggcttttaat

SEQ ID NO: 310420 - DNA, 19 bp, Homo sapiens
  siRNA target sequence for BCAS3 (NM_017679.2,1130-1148).
caagtggaatgcttctagt

SEQ ID NO: 310421 - DNA, 19 bp, Homo sapiens
  siRNA target sequence for BCAS3 (NM_017679.2,1227-1245).
ccaccatctgtatactctt

SEQ ID NO: 310422 - DNA, 19 bp, Homo sapiens
  siRNA target sequence for BCAS3 (NM_017679.2,1368-1386).
gccttgtgttcgtacacat

SEQ ID NO: 310423 - DNA, 19 bp, Homo sapiens
  siRNA target sequence for BCAS3 (NM_017679.2,1389-1407).
gtcaccacgagtagtgaat

SEQ ID NO: 310424 - DNA, 19 bp, Homo sapiens
  siRNA target sequence for BCAS3 (NM_017679.2,1430-1448).
gtgctggactggaagagat

SEQ ID NO: 310425 - DNA, 19 bp, Homo sapiens
  siRNA target sequence for BCAS3 (NM_017679.2,1488-1506).
ccctgttccaggtctatca

SEQ ID NO: 310426 - DNA, 19 bp, Homo sapiens
  siRNA target sequence for BCAS3 (NM_017679.2,1489-1507).
cctgttccaggtctatcaa

SEQ ID NO: 310427 - DNA, 19 bp, Homo sapiens
  siRNA target sequence for BCAS3 (NM_017679.2,1549-1567).
caagactcctataacaatt

SEQ ID NO: 310428 - DNA, 19 bp, Homo sapiens
  siRNA target sequence for BCAS3 (NM_017679.2,1674-1692).
caaacgaaccggcaaagtt

SEQ ID NO: 310429 - DNA, 19 bp, Homo sapiens
  siRNA target sequence for BCAS3 (NM_017679.2,1725-1743).
gatgggcggagaattttgt

SEQ ID NO: 310430 - DNA, 19 bp, Homo sapiens
  siRNA target sequence for BCAS3 (NM_017679.2,1766-1784).
ccaggtcatggtttgcaaa

SEQ ID NO: 310431 - DNA, 19 bp, Homo sapiens
  siRNA target sequence for BCAS3 (NM_017679.2,1767-1785).
caggtcatggtttgcaaat

SEQ ID NO: 310432 - DNA, 19 bp, Homo sapiens
  siRNA target sequence for BCAS3 (NM_017679.2,1815-1833).
gtccaaacaagttgtagtt

SEQ ID NO: 310433 - DNA, 19 bp, Homo sapiens
  siRNA target sequence for BCAS3 (NM_017679.2,1817-1835).
ccaaacaagttgtagttga

SEQ ID NO: 310434 - DNA, 19 bp, Homo sapiens
  siRNA target sequence for BCAS3 (NM_017679.2,1834-1852).
gagtccctgtacattatca

SEQ ID NO: 310435 - DNA, 19 bp, Homo sapiens
  siRNA target sequence for BCAS3 (NM_017679.2,1836-1854).
gtccctgtacattatcagt

SEQ ID NO: 310436 - DNA, 19 bp, Homo sapiens
  siRNA target sequence for BCAS3 (NM_017679.2,1842-1860).
gtacattatcagttgctat

SEQ ID NO: 310437 - DNA, 19 bp, Homo sapiens
  siRNA target sequence for BCAS3 (NM_017679.2,1865-1883).
ccttagtggaacacatgat

SEQ ID NO: 310438 - DNA, 19 bp, Homo sapiens
  siRNA target sequence for BCAS3 (NM_017679.2,1924-1942).
gacacaccactggaaatga

SEQ ID NO: 310439 - DNA, 19 bp, Homo sapiens
  siRNA target sequence for BCAS3 (NM_017679.2,1998-2016).
gcagccaccgtttaatgca

SEQ ID NO: 310440 - DNA, 19 bp, Homo sapiens
  siRNA target sequence for BCAS3 (NM_017679.2,1999-2017).
cagccaccgtttaatgcaa

SEQ ID NO: 310441 - DNA, 19 bp, Homo sapiens
  siRNA target sequence for BCAS3 (NM_017679.2,2036-2054).
ctgcagatgcagtacagta

SEQ ID NO: 310442 - DNA, 19 bp, Homo sapiens
  siRNA target sequence for BCAS3 (NM_017679.2,2039-2057).
cagatgcagtacagtatta

SEQ ID NO: 310443 - DNA, 19 bp, Homo sapiens
  siRNA target sequence for BCAS3 (NM_017679.2,2045-2063).
cagtacagtattatcagtt

SEQ ID NO: 310444 - DNA, 19 bp, Homo sapiens
  siRNA target sequence for BCAS3 (NM_017679.2,2118-2136).
gtcttacgacagtttagct

SEQ ID NO: 310445 - DNA, 19 bp, Homo sapiens
  siRNA target sequence for BCAS3 (NM_017679.2,2168-2186).
ggctttcccaggttgaaat

SEQ ID NO: 310446 - DNA, 19 bp, Homo sapiens
  siRNA target sequence for BCAS3 (NM_017679.2,2260-2278).
ggccaaaccacagttatct

SEQ ID NO: 310447 - DNA, 19 bp, Homo sapiens
  siRNA target sequence for BCAS3 (NM_017679.2,2322-2340).
gccacagcctcttttggat

SEQ ID NO: 310448 - DNA, 19 bp, Homo sapiens
  siRNA target sequence for BCAS3 (NM_017679.2,2328-2346).
gcctcttttggattttgat

SEQ ID NO: 310449 - DNA, 19 bp, Homo sapiens
  siRNA target sequence for BCAS3 (NM_017679.2,2348-2366).
cagatgatcttgatctcaa

SEQ ID NO: 310450 - DNA, 19 bp, Homo sapiens
  siRNA target sequence for BCAS3 (NM_017679.2,2444-2462).
gagtttccacagtgattga

SEQ ID NO: 310451 - DNA, 19 bp, Homo sapiens
  siRNA target sequence for BCAS3 (NM_017679.2,2628-2646).
gggatccggaacagaactt

SEQ ID NO: 310452 - DNA, 19 bp, Homo sapiens
  siRNA target sequence for BCAS3 (NM_017679.2,2630-2648).
gatccggaacagaacttca

SEQ ID NO: 310453 - DNA, 19 bp, Homo sapiens
  siRNA target sequence for BCAS3 (NM_017679.2,2698-2716).
ggcagcataccaagaaact

SEQ ID NO: 310454 - DNA, 19 bp, Homo sapiens
  siRNA target sequence for BCAS3 (NM_017679.2,2702-2720).
gcataccaagaaactttga

SEQ ID NO: 310455 - DNA, 19 bp, Homo sapiens
  siRNA target sequence for BCAS4 (NM_017843.2,210-228).
gacctgatcaggagtgata

SEQ ID NO: 310456 - DNA, 19 bp, Homo sapiens
  siRNA target sequence for BCAS4 (NM_017843.2,215-233).
gatcaggagtgatacttca

SEQ ID NO: 310457 - DNA, 19 bp, Homo sapiens
  siRNA target sequence for BCAS4 (NM_017843.2,258-276).
gtccttaaggccaaactga

SEQ ID NO: 310458 - DNA, 19 bp, Homo sapiens
  siRNA target sequence for BCAS4 (NM_198799.1,486-504).
ctgcccacactgtatagga

SEQ ID NO: 310459 - DNA, 19 bp, Homo sapiens
  siRNA target sequence for BCAS4 (NM_198799.1,503-521).
gacggaggactattttcct

SEQ ID NO: 310460 - DNA, 19 bp, Homo sapiens
  siRNA target sequence for BCL9 (NM_004326.1,769-787).
ctctccatcaggaaacaca

SEQ ID NO: 310461 - DNA, 19 bp, Homo sapiens
  siRNA target sequence for BCL9 (NM_004326.1,788-806).
cagagtagccctaagtcaa

SEQ ID NO: 310462 - DNA, 19 bp, Homo sapiens
  siRNA target sequence for BCL9 (NM_004326.1,857-875).
ccccagctggattccaaat

SEQ ID NO: 310463 - DNA, 19 bp, Homo sapiens
  siRNA target sequence for BCL9 (NM_004326.1,1029-1047).
ggaaaagggagcgaagtat

SEQ ID NO: 310464 - DNA, 19 bp, Homo sapiens
  siRNA target sequence for BCL9 (NM_004326.1,1050-1068).
ccgccgactcctttgatca

SEQ ID NO: 310465 - DNA, 19 bp, Homo sapiens
  siRNA target sequence for BCL9 (NM_004326.1,1162-1180).
ctcgatgaccccatcaaat

SEQ ID NO: 310466 - DNA, 19 bp, Homo sapiens
  siRNA target sequence for BCL9 (NM_004326.1,1165-1183).
gatgaccccatcaaatgct

SEQ ID NO: 310467 - DNA, 19 bp, Homo sapiens
  siRNA target sequence for BCL9 (NM_004326.1,1205-1223).
ccctcccatggccaaacta

SEQ ID NO: 310468 - DNA, 19 bp, Homo sapiens
  siRNA target sequence for BCL9 (NM_004326.1,1207-1225).
ctcccatggccaaactact

SEQ ID NO: 310469 - DNA, 19 bp, Homo sapiens
  siRNA target sequence for BCL9 (NM_004326.1,1265-1283).
gtggtgtacgtgttttcta

SEQ ID NO: 310470 - DNA, 19 bp, Homo sapiens
  siRNA target sequence for BCL9 (NM_004326.1,1267-1285).
ggtgtacgtgttttctact

SEQ ID NO: 310471 - DNA, 19 bp, Homo sapiens
  siRNA target sequence for BCL9 (NM_004326.1,1281-1299).
ctactgagatggccaataa

SEQ ID NO: 310472 - DNA, 19 bp, Homo sapiens
  siRNA target sequence for BCL9 (NM_004326.1,1318-1336).
gaagggccaggttgaaact

SEQ ID NO: 310473 - DNA, 19 bp, Homo sapiens
  siRNA target sequence for BCL9 (NM_004326.1,1344-1362).
ctttccacatccagaacat

SEQ ID NO: 310474 - DNA, 19 bp, Homo sapiens
  siRNA target sequence for BCL9 (NM_004326.1,1654-1672).
caactcaactcccaacaat

SEQ ID NO: 310475 - DNA, 19 bp, Homo sapiens
  siRNA target sequence for BCL9 (NM_004326.1,1814-1832).
cgggagcgctccttacaaa

SEQ ID NO: 310476 - DNA, 19 bp, Homo sapiens
  siRNA target sequence for BCL9 (NM_004326.1,1816-1834).
ggagcgctccttacaaact

SEQ ID NO: 310477 - DNA, 19 bp, Homo sapiens
  siRNA target sequence for BCL9 (NM_004326.1,1841-1859).
gatatccagcgcatgcttt

SEQ ID NO: 310478 - DNA, 19 bp, Homo sapiens
  siRNA target sequence for BCL9 (NM_004326.1,1909-1927).
gaatcctggggtattagat

SEQ ID NO: 310479 - DNA, 19 bp, Homo sapiens
  siRNA target sequence for BCL9 (NM_004326.1,2032-2050).
ccctcaaggacatagagat

SEQ ID NO: 310480 - DNA, 19 bp, Homo sapiens
  siRNA target sequence for BCL9 (NM_004326.1,2075-2093).
gttccaccttctatgaact

SEQ ID NO: 310481 - DNA, 19 bp, Homo sapiens
  siRNA target sequence for BCL9 (NM_004326.1,2115-2133).
ccgaccaccttgaccatat

SEQ ID NO: 310482 - DNA, 19 bp, Homo sapiens
  siRNA target sequence for BCL9 (NM_004326.1,2117-2135).
gaccaccttgaccatatga

SEQ ID NO: 310483 - DNA, 19 bp, Homo sapiens
  siRNA target sequence for BCL9 (NM_004326.1,2119-2137).
ccaccttgaccatatgact

SEQ ID NO: 310484 - DNA, 19 bp, Homo sapiens
  siRNA target sequence for BCL9 (NM_004326.1,2337-2355).
cattttctgatggtatcaa

SEQ ID NO: 310485 - DNA, 19 bp, Homo sapiens
  siRNA target sequence for BCL9 (NM_004326.1,2430-2448).
gatttgcaggcatgataaa

SEQ ID NO: 310486 - DNA, 19 bp, Homo sapiens
  siRNA target sequence for BCL9 (NM_004326.1,2439-2457).
gcatgataaactctgaaat

SEQ ID NO: 310487 - DNA, 19 bp, Homo sapiens
  siRNA target sequence for BCL9 (NM_004326.1,2516-2534).
ccagatgatgtgccaaaaa

SEQ ID NO: 310488 - DNA, 19 bp, Homo sapiens
  siRNA target sequence for BCL9 (NM_004326.1,2616-2634).
gattgtctgaagagatgtt

SEQ ID NO: 310489 - DNA, 19 bp, Homo sapiens
  siRNA target sequence for BCL9 (NM_004326.1,2761-2779).
ccccattttccctcgaata

SEQ ID NO: 310490 - DNA, 19 bp, Homo sapiens
  siRNA target sequence for BCL9 (NM_004326.1,2805-2823).
ctaggggtgactttccaaa

SEQ ID NO: 310491 - DNA, 19 bp, Homo sapiens
  siRNA target sequence for BCL9 (NM_004326.1,2844-2862).
gccctggtcgggaacttga

SEQ ID NO: 310492 - DNA, 19 bp, Homo sapiens
  siRNA target sequence for BCL9 (NM_004326.1,2847-2865).
ctggtcgggaacttgagtt

SEQ ID NO: 310493 - DNA, 19 bp, Homo sapiens
  siRNA target sequence for BCL9 (NM_004326.1,2887-2905).
gaagggagatgtcaatcta

SEQ ID NO: 310494 - DNA, 19 bp, Homo sapiens
  siRNA target sequence for BCL9 (NM_004326.1,2890-2908).
gggagatgtcaatctaaat

SEQ ID NO: 310495 - DNA, 19 bp, Homo sapiens
  siRNA target sequence for BCL9 (NM_004326.1,2919-2937).
gatccaactctcagatgat

SEQ ID NO: 310496 - DNA, 19 bp, Homo sapiens
  siRNA target sequence for BCL9 (NM_004326.1,3133-3151).
gaatctcagagaaccaatt

SEQ ID NO: 310497 - DNA, 19 bp, Homo sapiens
  siRNA target sequence for BCL9 (NM_004326.1,3265-3283).
gcggaagcccttggatata

SEQ ID NO: 310498 - DNA, 19 bp, Homo sapiens
  siRNA target sequence for BCL9 (NM_004326.1,3573-3591).
ggatccctccaaaccataa

SEQ ID NO: 310499 - DNA, 19 bp, Homo sapiens
  siRNA target sequence for BCL9 (NM_004326.1,3577-3595).
ccctccaaaccataaagca

SEQ ID NO: 310500 - DNA, 19 bp, Homo sapiens
  siRNA target sequence for BCL9 (NM_004326.1,3618-3636).
ccatgctgggaaatgtaga

SEQ ID NO: 310501 - DNA, 19 bp, Homo sapiens
  siRNA target sequence for BCL9 (NM_004326.1,3682-3700).
gaatatccctggaagtctt

SEQ ID NO: 310502 - DNA, 19 bp, Homo sapiens
  siRNA target sequence for BCL9 (NM_004326.1,3692-3710).
ggaagtcttccctctagta

SEQ ID NO: 310503 - DNA, 19 bp, Homo sapiens
  siRNA target sequence for BCL9 (NM_004326.1,3701-3719).
ccctctagtacaccttata

SEQ ID NO: 310504 - DNA, 19 bp, Homo sapiens
  siRNA target sequence for BCL9 (NM_004326.1,3705-3723).
ctagtacaccttataccat

SEQ ID NO: 310505 - DNA, 19 bp, Homo sapiens
  siRNA target sequence for BCL9 (NM_004326.1,3752-3770).
ccactctctattatgatgt

SEQ ID NO: 310506 - DNA, 19 bp, Homo sapiens
  siRNA target sequence for BCL9 (NM_004326.1,3769-3787).
gtctcgaatgtccaagttt

SEQ ID NO: 310507 - DNA, 19 bp, Homo sapiens
  siRNA target sequence for BCL9 (NM_004326.1,3773-3791).
cgaatgtccaagtttgcaa

SEQ ID NO: 310508 - DNA, 19 bp, Homo sapiens
  siRNA target sequence for BCL9 (NM_004326.1,3774-3792).
gaatgtccaagtttgcaat

SEQ ID NO: 310509 - DNA, 19 bp, Homo sapiens
  siRNA target sequence for BCL9 (NM_004326.1,3795-3813).
ccagttccaccccgttata

SEQ ID NO: 310510 - DNA, 19 bp, Homo sapiens
  siRNA target sequence for BCL9 (NM_004326.1,3798-3816).
gttccaccccgttatacca

SEQ ID NO: 310511 - DNA, 19 bp, Homo sapiens
  siRNA target sequence for BCL9 (NM_004326.1,3807-3825).
cgttataccatgatgctat

SEQ ID NO: 310512 - DNA, 19 bp, Homo sapiens
  siRNA target sequence for BCL9 (NM_004326.1,3874-3892).
caacttgccatcaatgaat

SEQ ID NO: 310513 - DNA, 19 bp, Homo sapiens
  siRNA target sequence for BCL9 (NM_004326.1,3877-3895).
cttgccatcaatgaataat

SEQ ID NO: 310514 - DNA, 19 bp, Homo sapiens
  siRNA target sequence for BCL9 (NM_004326.1,3903-3921).
gaatgggcattaatacaca

SEQ ID NO: 310515 - DNA, 19 bp, Homo sapiens
  siRNA target sequence for BCL9 (NM_004326.1,4369-4387).
catgccttcggtgtttaca

SEQ ID NO: 310516 - DNA, 19 bp, Homo sapiens
  siRNA target sequence for BCL9 (NM_004326.1,4423-4441).
caccggaatacctgagttt

SEQ ID NO: 310517 - DNA, 19 bp, Homo sapiens
  siRNA target sequence for BCL9 (NM_004326.1,4425-4443).
ccggaatacctgagtttga

SEQ ID NO: 310518 - DNA, 19 bp, Homo sapiens
  siRNA target sequence for BCL9 (NM_004326.1,4426-4444).
cggaatacctgagtttgat

SEQ ID NO: 310519 - DNA, 19 bp, Homo sapiens
  siRNA target sequence for BCL9 (NM_004326.1,4428-4446).
gaatacctgagtttgatct

SEQ ID NO: 310520 - DNA, 19 bp, Homo sapiens
  siRNA target sequence for BCL9 (NM_004326.1,4445-4463).
ctatcccgcattattccat

SEQ ID NO: 310521 - DNA, 19 bp, Homo sapiens
  siRNA target sequence for BCL9 (NM_004326.1,4476-4494).
gccagacgctgcaatattt

SEQ ID NO: 310522 - DNA, 19 bp, Homo sapiens
  siRNA target sequence for BCL9 (NM_004326.1,4584-4602).
ccagaatgggactagcatt

SEQ ID NO: 310523 - DNA, 19 bp, Homo sapiens
  siRNA target sequence for BCL9 (NM_004326.1,4585-4603).
cagaatgggactagcatta

SEQ ID NO: 310524 - DNA, 19 bp, Homo sapiens
  siRNA target sequence for BCL9 (NM_004326.1,4741-4759).
gtcaccagcacaatctaca

SEQ ID NO: 310525 - DNA, 19 bp, Homo sapiens
  siRNA target sequence for BCL9 (NM_004326.1,4743-4761).
caccagcacaatctacaat

SEQ ID NO: 310526 - DNA, 19 bp, Homo sapiens
  siRNA target sequence for CDR1 (NM_004065.1,170-188).
caagtaggctggaagacat

SEQ ID NO: 310527 - DNA, 19 bp, Homo sapiens
  siRNA target sequence for CDR1 (NM_004065.1,464-482).
cattggaagatgtggattt

SEQ ID NO: 310528 - DNA, 19 bp, Homo sapiens
  siRNA target sequence for CDR1 (NM_004065.1,530-548).
caaattatccggaagactt

SEQ ID NO: 310529 - DNA, 19 bp, Homo sapiens
  siRNA target sequence for CDR1 (NM_004065.1,584-602).
ggaggttactggaagacat

SEQ ID NO: 310530 - DNA, 19 bp, Homo sapiens
  siRNA target sequence for CDR1 (NM_004065.1,639-657).
ggatcttcaggaagacata

SEQ ID NO: 310531 - DNA, 19 bp, Homo sapiens
  siRNA target sequence for CDR1 (NM_004065.1,640-658).
gatcttcaggaagacatat

SEQ ID NO: 310532 - DNA, 19 bp, Homo sapiens
  siRNA target sequence for CDR1 (NM_004065.1,676-694).
gattttttccggaagatgt

SEQ ID NO: 310533 - DNA, 19 bp, Homo sapiens
  siRNA target sequence for CLN5 (NM_006493.1,1606-1624).
cctacaagcgctttgactt

SEQ ID NO: 310534 - DNA, 19 bp, Homo sapiens
  siRNA target sequence for CLN5 (NM_006493.1,1616-1634).
ctttgacttccgtccaaaa

SEQ ID NO: 310535 - DNA, 19 bp, Homo sapiens
  siRNA target sequence for CLN5 (NM_006493.1,1627-1645).
gtccaaaacctgatcctta

SEQ ID NO: 310536 - DNA, 19 bp, Homo sapiens
  siRNA target sequence for CLN5 (NM_006493.1,1642-1660).
cttattgtcaagctaagta

SEQ ID NO: 310537 - DNA, 19 bp, Homo sapiens
  siRNA target sequence for CLN5 (NM_006493.1,1648-1666).
gtcaagctaagtatacttt

SEQ ID NO: 310538 - DNA, 19 bp, Homo sapiens
  siRNA target sequence for CLN5 (NM_006493.1,1650-1668).
caagctaagtatactttct

SEQ ID NO: 310539 - DNA, 19 bp, Homo sapiens
  siRNA target sequence for CLN5 (NM_006493.1,1678-1696).
gctcacctatcccagttat

SEQ ID NO: 310540 - DNA, 19 bp, Homo sapiens
  siRNA target sequence for CLN5 (NM_006493.1,1681-1699).
cacctatcccagttatgga

SEQ ID NO: 310541 - DNA, 19 bp, Homo sapiens
  siRNA target sequence for CLN5 (NM_006493.1,1771-1789).
gacacttgaaaattatgca

SEQ ID NO: 310542 - DNA, 19 bp, Homo sapiens
  siRNA target sequence for CLN5 (NM_006493.1,1819-1837).
ctggcaagaactacacaat

SEQ ID NO: 310543 - DNA, 19 bp, Homo sapiens
  siRNA target sequence for CLN5 (NM_006493.1,1834-1852).
caatggaatggtatgaact

SEQ ID NO: 310544 - DNA, 19 bp, Homo sapiens
  siRNA target sequence for CLN5 (NM_006493.1,1903-1921).
cccctttctggtgtaatca

SEQ ID NO: 310545 - DNA, 19 bp, Homo sapiens
  siRNA target sequence for CLN5 (NM_006493.1,1983-2001).
gttcaagtagcaactatat

SEQ ID NO: 310546 - DNA, 19 bp, Homo sapiens
  siRNA target sequence for CLN5 (NM_006493.1,1996-2014).
ctatatcaggaaacatgtt

SEQ ID NO: 310547 - DNA, 19 bp, Homo sapiens
  siRNA target sequence for CLN5 (NM_006493.1,2032-2050).
gggtgaaacaggacaatga

SEQ ID NO: 310548 - DNA, 19 bp, Homo sapiens
  siRNA target sequence for CLN5 (NM_006493.1,2122-2140).
cctacgactgttccaaatt

SEQ ID NO: 310549 - DNA, 19 bp, Homo sapiens
  siRNA target sequence for CLN5 (NM_006493.1,2123-2141).
ctacgactgttccaaattt

SEQ ID NO: 310550 - DNA, 19 bp, Homo sapiens
  siRNA target sequence for CLN5 (NM_006493.1,2127-2145).
gactgttccaaatttgtgt

SEQ ID NO: 310551 - DNA, 19 bp, Homo sapiens
  siRNA target sequence for CLN5 (NM_006493.1,2181-2199).
gagttcaagaacatagaaa

SEQ ID NO: 310552 - DNA, 19 bp, Homo sapiens
  siRNA target sequence for CLN5 (NM_006493.1,2189-2207).
gaacatagaaaccaactat

SEQ ID NO: 310553 - DNA, 19 bp, Homo sapiens
  siRNA target sequence for CLN5 (NM_006493.1,2196-2214).
gaaaccaactatacaagaa

SEQ ID NO: 310554 - DNA, 19 bp, Homo sapiens
  siRNA target sequence for CLN5 (NM_006493.1,2204-2222).
ctatacaagaatatttctt

SEQ ID NO: 310555 - DNA, 19 bp, Homo sapiens
  siRNA target sequence for CLN5 (NM_006493.1,2268-2286).
gggccaacaggaaacaaga

SEQ ID NO: 310556 - DNA, 19 bp, Homo sapiens
  siRNA target sequence for CLN5 (NM_006493.1,2287-2305).
ctcttggtttagccataaa

SEQ ID NO: 310557 - DNA, 19 bp, Homo sapiens
  siRNA target sequence for CLN5 (NM_006493.1,2292-2310).
ggtttagccataaaaagat

SEQ ID NO: 310558 - DNA, 19 bp, Homo sapiens
  siRNA target sequence for CLN5 (NM_006493.1,2293-2311).
gtttagccataaaaagatt

SEQ ID NO: 310559 - DNA, 19 bp, Homo sapiens
  siRNA target sequence for CLN5 (NM_006493.1,2485-2503).
ctatcagaaacaaaacact

SEQ ID NO: 310560 - DNA, 19 bp, Homo sapiens
  siRNA target sequence for DACH (NM_004392.2,1149-1167).
gtgcaatgtggaacaagtt

SEQ ID NO: 310561 - DNA, 19 bp, Homo sapiens
  siRNA target sequence for DACH (NM_004392.2,1236-1254).
cttcgagaccctctacaat

SEQ ID NO: 310562 - DNA, 19 bp, Homo sapiens
  siRNA target sequence for DACH (NM_004392.2,1257-1275).
ctgcaccaacgcaagttct

SEQ ID NO: 310563 - DNA, 19 bp, Homo sapiens
  siRNA target sequence for DACH (NM_004392.2,1260-1278).
caccaacgcaagttctaga

SEQ ID NO: 310564 - DNA, 19 bp, Homo sapiens
  siRNA target sequence for DACH (NM_004392.2,1288-1306).
cctcctaagaggactcaaa

SEQ ID NO: 310565 - DNA, 19 bp, Homo sapiens
  siRNA target sequence for DACH (NM_004392.2,1362-1380).
gtctcctgggataattcca

SEQ ID NO: 310566 - DNA, 19 bp, Homo sapiens
  siRNA target sequence for DACH (NM_004392.2,1418-1436).
gagacagccttgacaaact

SEQ ID NO: 310567 - DNA, 19 bp, Homo sapiens
  siRNA target sequence for DACH (NM_004392.2,1420-1438).
gacagccttgacaaactct

SEQ ID NO: 310568 - DNA, 19 bp, Homo sapiens
  siRNA target sequence for DACH (NM_004392.2,1518-1536).
gactcttctgactaacata

SEQ ID NO: 310569 - DNA, 19 bp, Homo sapiens
  siRNA target sequence for DACH (NM_004392.2,1533-1551).
catacaggggctgttgaaa

SEQ ID NO: 310570 - DNA, 19 bp, Homo sapiens
  siRNA target sequence for DACH (NM_004392.2,1660-1678).
cagttggctatggaacaaa

SEQ ID NO: 310571 - DNA, 19 bp, Homo sapiens
  siRNA target sequence for DACH (NM_004392.2,1758-1776).
gacgaaacggcgtgaacaa

SEQ ID NO: 310572 - DNA, 19 bp, Homo sapiens
  siRNA target sequence for DACH (NM_004392.2,1810-1828).
gatagtctcagggtcttaa

SEQ ID NO: 310573 - DNA, 19 bp, Homo sapiens
  siRNA target sequence for DACH (NM_004392.2,1816-1834).
ctcagggtcttaaatgact

SEQ ID NO: 310574 - DNA, 19 bp, Homo sapiens
  siRNA target sequence for DACH (NM_004392.2,1897-1915).
caagatggaagactgtatt

SEQ ID NO: 310575 - DNA, 19 bp, Homo sapiens
  siRNA target sequence for DACH (NM_080759.1,1527-1545).
cggggacatgaattcaagt

SEQ ID NO: 310576 - DNA, 19 bp, Homo sapiens
  siRNA target sequence for DACH (NM_080759.1,1548-1566).
cggactggaacttcctttt

SEQ ID NO: 310577 - DNA, 19 bp, Homo sapiens
  siRNA target sequence for DACH (NM_080759.1,1549-1567).
ggactggaacttcctttta

SEQ ID NO: 310578 - DNA, 19 bp, Homo sapiens
  siRNA target sequence for DACH (NM_080759.1,1642-1660).
cacctcagcaccattgcaa

SEQ ID NO: 310579 - DNA, 19 bp, Homo sapiens
  siRNA target sequence for DACH (NM_080759.1,1853-1871).
gaatcccggtccatcagaa

SEQ ID NO: 310580 - DNA, 19 bp, Homo sapiens
  siRNA target sequence for DACH (NM_080759.1,1896-1914).
gatgggcttatcaccaaat

SEQ ID NO: 310581 - DNA, 19 bp, Homo sapiens
  siRNA target sequence for DACH (NM_080759.1,1960-1978).
ggacatgagtcaaaaagga

SEQ ID NO: 310582 - DNA, 19 bp, Homo sapiens
  siRNA target sequence for DACH (NM_080759.1,1970-1988).
caaaaaggatgcatattga

SEQ ID NO: 310583 - DNA, 19 bp, Homo sapiens
  siRNA target sequence for DACH2 (NM_053281.2,110-128).
gtcttactcctaatatgat

SEQ ID NO: 310584 - DNA, 19 bp, Homo sapiens
  siRNA target sequence for DACH2 (NM_053281.2,129-147).
caatagtttcgtggttaat

SEQ ID NO: 310585 - DNA, 19 bp, Homo sapiens
  siRNA target sequence for DACH2 (NM_053281.2,134-152).
gtttcgtggttaataacca

SEQ ID NO: 310586 - DNA, 19 bp, Homo sapiens
  siRNA target sequence for DACH2 (NM_053281.2,269-287).
gcctgccgcaagtctttga

SEQ ID NO: 310587 - DNA, 19 bp, Homo sapiens
  siRNA target sequence for DACH2 (NM_053281.2,357-375).
ccccgtggtgtgtactgtt

SEQ ID NO: 310588 - DNA, 19 bp, Homo sapiens
  siRNA target sequence for DACH2 (NM_053281.2,657-675).
gatggctgaggcgatgaaa

SEQ ID NO: 310589 - DNA, 19 bp, Homo sapiens
  siRNA target sequence for DACH2 (NM_053281.2,660-678).
ggctgaggcgatgaaactt

SEQ ID NO: 310590 - DNA, 19 bp, Homo sapiens
  siRNA target sequence for DACH2 (NM_053281.2,662-680).
ctgaggcgatgaaacttca

SEQ ID NO: 310591 - DNA, 19 bp, Homo sapiens
  siRNA target sequence for DACH2 (NM_053281.2,788-806).
cctgggataaagataagat

SEQ ID NO: 310592 - DNA, 19 bp, Homo sapiens
  siRNA target sequence for DACH2 (NM_053281.2,827-845).
ctggaccccaacatggaat

SEQ ID NO: 310593 - DNA, 19 bp, Homo sapiens
  siRNA target sequence for DACH2 (NM_053281.2,932-950).
gactggatctgccatttat

SEQ ID NO: 310594 - DNA, 19 bp, Homo sapiens
  siRNA target sequence for DACH2 (NM_053281.2,1020-1038).
gaaccatctcaatactatt

SEQ ID NO: 310595 - DNA, 19 bp, Homo sapiens
  siRNA target sequence for DACH2 (NM_053281.2,1082-1100).
gagctggtacctctgttat

SEQ ID NO: 310596 - DNA, 19 bp, Homo sapiens
  siRNA target sequence for DACH2 (NM_053281.2,1084-1102).
gctggtacctctgttataa

SEQ ID NO: 310597 - DNA, 19 bp, Homo sapiens
  siRNA target sequence for DACH2 (NM_053281.2,1085-1103).
ctggtacctctgttataaa

SEQ ID NO: 310598 - DNA, 19 bp, Homo sapiens
  siRNA target sequence for DACH2 (NM_053281.2,1088-1106).
gtacctctgttataaagga

SEQ ID NO: 310599 - DNA, 19 bp, Homo sapiens
  siRNA target sequence for DACH2 (NM_053281.2,1219-1237).
gatcatcatttggaaagaa

SEQ ID NO: 310600 - DNA, 19 bp, Homo sapiens
  siRNA target sequence for DACH2 (NM_053281.2,1250-1268).
cagttcaaattccaataat

SEQ ID NO: 310601 - DNA, 19 bp, Homo sapiens
  siRNA target sequence for DACH2 (NM_053281.2,1252-1270).
gttcaaattccaataatga

SEQ ID NO: 310602 - DNA, 19 bp, Homo sapiens
  siRNA target sequence for DACH2 (NM_053281.2,1255-1273).
caaattccaataatgaagt

SEQ ID NO: 310603 - DNA, 19 bp, Homo sapiens
  siRNA target sequence for DACH2 (NM_053281.2,1322-1340).
gattccctggaccattcat

SEQ ID NO: 310604 - DNA, 19 bp, Homo sapiens
  siRNA target sequence for DACH2 (NM_053281.2,1461-1479).
gcgactggagctctataga

SEQ ID NO: 310605 - DNA, 19 bp, Homo sapiens
  siRNA target sequence for DACH2 (NM_053281.2,1463-1481).
gactggagctctatagaga

SEQ ID NO: 310606 - DNA, 19 bp, Homo sapiens
  siRNA target sequence for DACH2 (NM_053281.2,1524-1542).
gcttcaaagcagaactact

SEQ ID NO: 310607 - DNA, 19 bp, Homo sapiens
  siRNA target sequence for DACH2 (NM_053281.2,1532-1550).
gcagaactactatgcaaaa

SEQ ID NO: 310608 - DNA, 19 bp, Homo sapiens
  siRNA target sequence for DACH2 (NM_053281.2,1677-1695).
gttaaaagatactggaatt

SEQ ID NO: 310609 - DNA, 19 bp, Homo sapiens
  siRNA target sequence for DACH2 (NM_053281.2,1716-1734).
caatgggactcctcatgat

SEQ ID NO: 310610 - DNA, 19 bp, Homo sapiens
  siRNA target sequence for DACH2 (NM_053281.2,1747-1765).
caaggaggtaactattact

SEQ ID NO: 310611 - DNA, 19 bp, Homo sapiens
  siRNA target sequence for DACH2 (NM_053281.2,1750-1768).
ggaggtaactattactgtt

SEQ ID NO: 310612 - DNA, 19 bp, Homo sapiens
  siRNA target sequence for DACH2 (NM_053281.2,1751-1769).
gaggtaactattactgttt

SEQ ID NO: 310613 - DNA, 19 bp, Homo sapiens
  siRNA target sequence for DACH2 (NM_053281.2,1754-1772).
gtaactattactgtttaga

SEQ ID NO: 310614 - DNA, 19 bp, Homo sapiens
  siRNA target sequence for FRAT1 (NM_005479.2,835-853).
gccgtgcgaaggcttcatt

SEQ ID NO: 310615 - DNA, 19 bp, Homo sapiens
  siRNA target sequence for FRAT1 (NM_005479.2,864-882).
gcagttacgtgcaaagctt

SEQ ID NO: 310616 - DNA, 19 bp, Homo sapiens
  siRNA target sequence for FRAT1 (NM_005479.2,998-1016).
ctggcgacggcgttcttgt

SEQ ID NO: 310617 - DNA, 19 bp, Homo sapiens
  siRNA target sequence for FSTL3 (NM_005860.1,190-208).
ctgtgcctccggcaacatt

SEQ ID NO: 310618 - DNA, 19 bp, Homo sapiens
  siRNA target sequence for FSTL3 (NM_005860.1,192-210).
gtgcctccggcaacattga

SEQ ID NO: 310619 - DNA, 19 bp, Homo sapiens
  siRNA target sequence for FSTL3 (NM_005860.1,194-212).
gcctccggcaacattgaca

SEQ ID NO: 310620 - DNA, 19 bp, Homo sapiens
  siRNA target sequence for GPC3 (NM_004484.2,356-374).
cccgtgccaggatcagatt

SEQ ID NO: 310621 - DNA, 19 bp, Homo sapiens
  siRNA target sequence for GPC3 (NM_004484.2,357-375).
ccgtgccaggatcagattt

SEQ ID NO: 310622 - DNA, 19 bp, Homo sapiens
  siRNA target sequence for GPC3 (NM_004484.2,365-383).
ggatcagatttgcaagtat

SEQ ID NO: 310623 - DNA, 19 bp, Homo sapiens
  siRNA target sequence for GPC3 (NM_004484.2,437-455).
ctaacagcacgattgaaca

SEQ ID NO: 310624 - DNA, 19 bp, Homo sapiens
  siRNA target sequence for GPC3 (NM_004484.2,485-503).
gagctcaagttcttaatta

SEQ ID NO: 310625 - DNA, 19 bp, Homo sapiens
  siRNA target sequence for GPC3 (NM_004484.2,508-526).
gaatgctgcggttttccaa

SEQ ID NO: 310626 - DNA, 19 bp, Homo sapiens
  siRNA target sequence for GPC3 (NM_004484.2,548-566).
cgccatgccaagaactaca

SEQ ID NO: 310627 - DNA, 19 bp, Homo sapiens
  siRNA target sequence for GPC3 (NM_004484.2,641-659).
gatgtgtctctctacatct

SEQ ID NO: 310628 - DNA, 19 bp, Homo sapiens
  siRNA target sequence for GPC3 (NM_004484.2,708-726).
gcctgtttccagtcatcta

SEQ ID NO: 310629 - DNA, 19 bp, Homo sapiens
  siRNA target sequence for GPC3 (NM_004484.2,792-810).
caagacgtgacctgaaagt

SEQ ID NO: 310630 - DNA, 19 bp, Homo sapiens
  siRNA target sequence for GPC3 (NM_004484.2,795-813).
gacgtgacctgaaagtatt

SEQ ID NO: 310631 - DNA, 19 bp, Homo sapiens
  siRNA target sequence for GPC3 (NM_004484.2,915-933).
caactgatcacctgaagtt

SEQ ID NO: 310632 - DNA, 19 bp, Homo sapiens
  siRNA target sequence for GPC3 (NM_004484.2,950-968).
cgaatgctcaccagaatgt

SEQ ID NO: 310633 - DNA, 19 bp, Homo sapiens
  siRNA target sequence for GPC3 (NM_004484.2,988-1006).
gggactgatgatggttaaa

SEQ ID NO: 310634 - DNA, 19 bp, Homo sapiens
  siRNA target sequence for GPC3 (NM_004484.2,1050-1068).
caggtgtggtggagattga

SEQ ID NO: 310635 - DNA, 19 bp, Homo sapiens
  siRNA target sequence for GPC3 (NM_004484.2,1067-1085).
gacaagtactggagagaat

SEQ ID NO: 310636 - DNA, 19 bp, Homo sapiens
  siRNA target sequence for GPC3 (NM_004484.2,1072-1090).
gtactggagagaatacatt

SEQ ID NO: 310637 - DNA, 19 bp, Homo sapiens
  siRNA target sequence for GPC3 (NM_004484.2,1096-1114).
ccttgaagaacttgtgaat

SEQ ID NO: 310638 - DNA, 19 bp, Homo sapiens
  siRNA target sequence for GPC3 (NM_004484.2,1109-1127).
gtgaatggcatgtacagaa

SEQ ID NO: 310639 - DNA, 19 bp, Homo sapiens
  siRNA target sequence for GPC3 (NM_004484.2,1116-1134).
gcatgtacagaatctatga

SEQ ID NO: 310640 - DNA, 19 bp, Homo sapiens
  siRNA target sequence for GPC3 (NM_004484.2,1144-1162).
cgtactgcttggtctcttt

SEQ ID NO: 310641 - DNA, 19 bp, Homo sapiens
  siRNA target sequence for GPC3 (NM_004484.2,1150-1168).
gcttggtctcttttcaaca

SEQ ID NO: 310642 - DNA, 19 bp, Homo sapiens
  siRNA target sequence for GPC3 (NM_004484.2,1164-1182).
caacaatccatgattctat

SEQ ID NO: 310643 - DNA, 19 bp, Homo sapiens
  siRNA target sequence for GPC3 (NM_004484.2,1183-1201).
ccagtatgtccagaagaat

SEQ ID NO: 310644 - DNA, 19 bp, Homo sapiens
  siRNA target sequence for GPC3 (NM_004484.2,1219-1237).
cactattggcaagttatgt

SEQ ID NO: 310645 - DNA, 19 bp, Homo sapiens
  siRNA target sequence for GPC3 (NM_004484.2,1247-1265).
caacaacgccaatatagat

SEQ ID NO: 310646 - DNA, 19 bp, Homo sapiens
  siRNA target sequence for GPC3 (NM_004484.2,1256-1274).
caatatagatctgcttatt

SEQ ID NO: 310647 - DNA, 19 bp, Homo sapiens
  siRNA target sequence for GPC3 (NM_004484.2,1347-1365).
gccgaagaagggaactaat

SEQ ID NO: 310648 - DNA, 19 bp, Homo sapiens
  siRNA target sequence for GPC3 (NM_004484.2,1378-1396).
gtctttcatcagcttctat

SEQ ID NO: 310649 - DNA, 19 bp, Homo sapiens
  siRNA target sequence for GPC3 (NM_004484.2,1400-1418).
gctttgcctggctacatct

SEQ ID NO: 310650 - DNA, 19 bp, Homo sapiens
  siRNA target sequence for GPC3 (NM_004484.2,1469-1487).
gaactcgtggagagataca

SEQ ID NO: 310651 - DNA, 19 bp, Homo sapiens
  siRNA target sequence for GPC3 (NM_004484.2,1503-1521).
ggaatggaatgaaaaacca

SEQ ID NO: 310652 - DNA, 19 bp, Homo sapiens
  siRNA target sequence for GPC3 (NM_004484.2,1509-1527).
gaatgaaaaaccagttcaa

SEQ ID NO: 310653 - DNA, 19 bp, Homo sapiens
  siRNA target sequence for GPC3 (NM_004484.2,1529-1547).
ctccatgagctgaaaatga

SEQ ID NO: 310654 - DNA, 19 bp, Homo sapiens
  siRNA target sequence for GPC3 (NM_004484.2,1556-1574).
gagccagtggtcagtcaaa

SEQ ID NO: 310655 - DNA, 19 bp, Homo sapiens
  siRNA target sequence for GPC3 (NM_004484.2,1558-1576).
gccagtggtcagtcaaatt

SEQ ID NO: 310656 - DNA, 19 bp, Homo sapiens
  siRNA target sequence for GPC3 (NM_004484.2,1559-1577).
ccagtggtcagtcaaatta

SEQ ID NO: 310657 - DNA, 19 bp, Homo sapiens
  siRNA target sequence for GPC3 (NM_004484.2,1560-1578).
cagtggtcagtcaaattat

SEQ ID NO: 310658 - DNA, 19 bp, Homo sapiens
  siRNA target sequence for GPC3 (NM_004484.2,1580-1598).
gacaaactgaagcacatta

SEQ ID NO: 310659 - DNA, 19 bp, Homo sapiens
  siRNA target sequence for GPC3 (NM_004484.2,1604-1622).
ctcctgagaaccatgtcta

SEQ ID NO: 310660 - DNA, 19 bp, Homo sapiens
  siRNA target sequence for GPC3 (NM_004484.2,1635-1653).
gagttctggataaaaacct

SEQ ID NO: 310661 - DNA, 19 bp, Homo sapiens
  siRNA target sequence for GPC3 (NM_004484.2,1714-1732).
ctctggtgatggaatgata

SEQ ID NO: 310662 - DNA, 19 bp, Homo sapiens
  siRNA target sequence for GPC3 (NM_004484.2,1761-1779).
cagaactggcctatgatct

SEQ ID NO: 310663 - DNA, 19 bp, Homo sapiens
  siRNA target sequence for GPC3 (NM_004484.2,1820-1838).
ccgaaggacaacgagataa

SEQ ID NO: 310664 - DNA, 19 bp, Homo sapiens
  siRNA target sequence for HHCM (NM_006543.1,8-26).
ccttcacttgtggaagaaa

SEQ ID NO: 310665 - DNA, 19 bp, Homo sapiens
  siRNA target sequence for HHCM (NM_006543.1,224-242).
ctccaggacacatgcaaat

SEQ ID NO: 310666 - DNA, 19 bp, Homo sapiens
  siRNA target sequence for HHCM (NM_006543.1,227-245).
caggacacatgcaaatgga

SEQ ID NO: 310667 - DNA, 19 bp, Homo sapiens
  siRNA target sequence for HHCM (NM_006543.1,246-264).
cactctgatcataaaatta

SEQ ID NO: 310668 - DNA, 19 bp, Homo sapiens
  siRNA target sequence for HHCM (NM_006543.1,501-519).
cagggatcttgcctctaat

SEQ ID NO: 310669 - DNA, 19 bp, Homo sapiens
  siRNA target sequence for HHCM (NM_006543.1,503-521).
gggatcttgcctctaatca

SEQ ID NO: 310670 - DNA, 19 bp, Homo sapiens
  siRNA target sequence for HHCM (NM_006543.1,505-523).
gatcttgcctctaatcaga

SEQ ID NO: 310671 - DNA, 19 bp, Homo sapiens
  siRNA target sequence for HHCM (NM_006543.1,508-526).
cttgcctctaatcagataa

SEQ ID NO: 310672 - DNA, 19 bp, Homo sapiens
  siRNA target sequence for HHCM (NM_006543.1,511-529).
gcctctaatcagataagct

SEQ ID NO: 310673 - DNA, 19 bp, Homo sapiens
  siRNA target sequence for HHCM (NM_006543.1,556-574).
gccacgggtctttttctct

SEQ ID NO: 310674 - DNA, 19 bp, Homo sapiens
  siRNA target sequence for HHCM (NM_006543.1,604-622).
ggtcgaagagggagaaagt

SEQ ID NO: 310675 - DNA, 19 bp, Homo sapiens
  siRNA target sequence for HHCM (NM_006543.1,621-639).
gtgtgagcaccgtgacata

SEQ ID NO: 310676 - DNA, 19 bp, Homo sapiens
  siRNA target sequence for HHCM (NM_006543.1,625-643).
gagcaccgtgacataatga

SEQ ID NO: 310677 - DNA, 19 bp, Homo sapiens
  siRNA target sequence for HHCM (NM_006543.1,646-664).
cgcagccttctgactagat

SEQ ID NO: 310678 - DNA, 19 bp, Homo sapiens
  siRNA target sequence for HHCM (NM_006543.1,657-675).
gactagatgccccaaagaa

SEQ ID NO: 310679 - DNA, 19 bp, Homo sapiens
  siRNA target sequence for HHCM (NM_006543.1,740-758).
ccatcgtgttgtcagtaaa

SEQ ID NO: 310680 - DNA, 19 bp, Homo sapiens
  siRNA target sequence for HHCM (NM_006543.1,882-900).
ccatgaggctttaaagact

SEQ ID NO: 310681 - DNA, 19 bp, Homo sapiens
  siRNA target sequence for HHCM (NM_006543.1,934-952).
gctctgcacttgcaacata

SEQ ID NO: 310682 - DNA, 19 bp, Homo sapiens
  siRNA target sequence for HHCM (NM_006543.1,935-953).
ctctgcacttgcaacataa

SEQ ID NO: 310683 - DNA, 19 bp, Homo sapiens
  siRNA target sequence for HHCM (NM_006543.1,995-1013).
ctccataccacttaaataa

SEQ ID NO: 310684 - DNA, 19 bp, Homo sapiens
  siRNA target sequence for HHCM (NM_006543.1,1016-1034).
cacagagtctcacaacatt

SEQ ID NO: 310685 - DNA, 19 bp, Homo sapiens
  siRNA target sequence for HHCM (NM_006543.1,1040-1058).
cgcccaggacacaatccaa

SEQ ID NO: 310686 - DNA, 19 bp, Homo sapiens
  siRNA target sequence for HHCM (NM_006543.1,1201-1219).
gcaaacactcttgagataa

SEQ ID NO: 310687 - DNA, 19 bp, Homo sapiens
  siRNA target sequence for IER3 (NM_003897.2,274-292).
cagccaaaaggcttctctt

SEQ ID NO: 310688 - DNA, 19 bp, Homo sapiens
  siRNA target sequence for IER3 (NM_003897.2,277-295).
ccaaaaggcttctctttct

SEQ ID NO: 310689 - DNA, 19 bp, Homo sapiens
  siRNA target sequence for IER3 (NM_003897.2,409-427).
ccgtcctcgagccctttaa

SEQ ID NO: 310690 - DNA, 19 bp, Homo sapiens
  siRNA target sequence for IER3 (NM_003897.2,410-428).
cgtcctcgagccctttaat

SEQ ID NO: 310691 - DNA, 19 bp, Homo sapiens
  siRNA target sequence for IER3 (NM_003897.2,414-432).
ctcgagccctttaatctga

SEQ ID NO: 310692 - DNA, 19 bp, Homo sapiens
  siRNA target sequence for LMO2 (NM_005574.2,1041-1059).
cctcggccatcgaaaggaa

SEQ ID NO: 310693 - DNA, 19 bp, Homo sapiens
  siRNA target sequence for LMO2 (NM_005574.2,1270-1288).
gctctgccggagagactat

SEQ ID NO: 310694 - DNA, 19 bp, Homo sapiens
  siRNA target sequence for LMO2 (NM_005574.2,1341-1359).
gtgcctatgagatgacaat

SEQ ID NO: 310695 - DNA, 19 bp, Homo sapiens
  siRNA target sequence for LMO2 (NM_005574.2,1361-1379).
cgggtgaaagacaaagtgt

SEQ ID NO: 310696 - DNA, 19 bp, Homo sapiens
  siRNA target sequence for LMO2 (NM_005574.2,1376-1394).
gtgtatcacctggaatgtt

SEQ ID NO: 310697 - DNA, 19 bp, Homo sapiens
  siRNA target sequence for LMO2 (NM_005574.2,1483-1501).
cgagtggactaagatcaat

SEQ ID NO: 310698 - DNA, 19 bp, Homo sapiens
  siRNA target sequence for OS-9 (NM_006812.1,266-284).
gtgattgtctcctctaagt

SEQ ID NO: 310699 - DNA, 19 bp, Homo sapiens
  siRNA target sequence for OS-9 (NM_006812.1,374-392).
gggatccctgagttgttga

SEQ ID NO: 310700 - DNA, 19 bp, Homo sapiens
  siRNA target sequence for OS-9 (NM_006812.1,459-477).
gacgccacatccagcaata

SEQ ID NO: 310701 - DNA, 19 bp, Homo sapiens
  siRNA target sequence for OS-9 (NM_006812.1,473-491).
caataccacatggaagatt

SEQ ID NO: 310702 - DNA, 19 bp, Homo sapiens
  siRNA target sequence for OS-9 (NM_006812.1,537-555).
ccttcgactgggatgatga

SEQ ID NO: 310703 - DNA, 19 bp, Homo sapiens
  siRNA target sequence for OS-9 (NM_006812.1,538-556).
cttcgactgggatgatgaa

SEQ ID NO: 310704 - DNA, 19 bp, Homo sapiens
  siRNA target sequence for OS-9 (NM_006812.1,541-559).
cgactgggatgatgaaaca

SEQ ID NO: 310705 - DNA, 19 bp, Homo sapiens
  siRNA target sequence for OS-9 (NM_006812.1,570-588).
ccaagcagcatcgtcttaa

SEQ ID NO: 310706 - DNA, 19 bp, Homo sapiens
  siRNA target sequence for OS-9 (NM_006812.1,571-589).
caagcagcatcgtcttaaa

SEQ ID NO: 310707 - DNA, 19 bp, Homo sapiens
  siRNA target sequence for OS-9 (NM_006812.1,618-636).
ggtccaagtgcgaccttaa

SEQ ID NO: 310708 - DNA, 19 bp, Homo sapiens
  siRNA target sequence for OS-9 (NM_006812.1,619-637).
gtccaagtgcgaccttaat

SEQ ID NO: 310709 - DNA, 19 bp, Homo sapiens
  siRNA target sequence for OS-9 (NM_006812.1,687-705).
gtatctctggggactacat

SEQ ID NO: 310710 - DNA, 19 bp, Homo sapiens
  siRNA target sequence for OS-9 (NM_006812.1,723-741).
ccttgtcctgctcttatgt

SEQ ID NO: 310711 - DNA, 19 bp, Homo sapiens
  siRNA target sequence for OS-9 (NM_006812.1,987-1005).
cgaccaaggatgacagtaa

SEQ ID NO: 310712 - DNA, 19 bp, Homo sapiens
  siRNA target sequence for OS-9 (NM_006812.1,998-1016).
gacagtaaggactcagatt

SEQ ID NO: 310713 - DNA, 19 bp, Homo sapiens
  siRNA target sequence for OS-9 (NM_006812.1,1119-1137).
gtgctcccaatgattttca

SEQ ID NO: 310714 - DNA, 19 bp, Homo sapiens
  siRNA target sequence for OS-9 (NM_006812.1,1121-1139).
gctcccaatgattttcaga

SEQ ID NO: 310715 - DNA, 19 bp, Homo sapiens
  siRNA target sequence for OS-9 (NM_006812.1,1122-1140).
ctcccaatgattttcagaa

SEQ ID NO: 310716 - DNA, 19 bp, Homo sapiens
  siRNA target sequence for OS-9 (NM_006812.1,1148-1166).
caggtcaaagtcattcgaa

SEQ ID NO: 310717 - DNA, 19 bp, Homo sapiens
  siRNA target sequence for OS-9 (NM_006812.1,1163-1181).
cgaagccctgcggatttga

SEQ ID NO: 310718 - DNA, 19 bp, Homo sapiens
  siRNA target sequence for OS-9 (NM_006812.1,1164-1182).
gaagccctgcggatttgat

SEQ ID NO: 310719 - DNA, 19 bp, Homo sapiens
  siRNA target sequence for OS-9 (NM_006812.1,1169-1187).
cctgcggatttgattcgat

SEQ ID NO: 310720 - DNA, 19 bp, Homo sapiens
  siRNA target sequence for OS-9 (NM_006812.1,1170-1188).
ctgcggatttgattcgatt

SEQ ID NO: 310721 - DNA, 19 bp, Homo sapiens
  siRNA target sequence for OS-9 (NM_006812.1,1173-1191).
cggatttgattcgattcat

SEQ ID NO: 310722 - DNA, 19 bp, Homo sapiens
  siRNA target sequence for OS-9 (NM_006812.1,1566-1584).
catccactctcaacaaact

SEQ ID NO: 310723 - DNA, 19 bp, Homo sapiens
  siRNA target sequence for OS-9 (NM_006812.1,1731-1749).
gtctcggaggccctaatca

SEQ ID NO: 310724 - DNA, 19 bp, Homo sapiens
  siRNA target sequence for OS-9 (NM_006812.1,2066-2084).
gacctggacgaatttgact

SEQ ID NO: 310725 - DNA, 19 bp, Homo sapiens
  siRNA target sequence for SEMA3C (NM_006379.2,582-600).
gcgtgttggttggagtatt

SEQ ID NO: 310726 - DNA, 19 bp, Homo sapiens
  siRNA target sequence for SEMA3C (NM_006379.2,634-652).
gccccaagcaagagtttat

SEQ ID NO: 310727 - DNA, 19 bp, Homo sapiens
  siRNA target sequence for SEMA3C (NM_006379.2,705-723).
cccaccatcctttagacta

SEQ ID NO: 310728 - DNA, 19 bp, Homo sapiens
  siRNA target sequence for SEMA3C (NM_006379.2,724-742).
caggattttattaatggat

SEQ ID NO: 310729 - DNA, 19 bp, Homo sapiens
  siRNA target sequence for SEMA3C (NM_006379.2,785-803).
ctttccctgaatattaaca

SEQ ID NO: 310730 - DNA, 19 bp, Homo sapiens
  siRNA target sequence for SEMA3C (NM_006379.2,793-811).
gaatattaacaatataagt

SEQ ID NO: 310731 - DNA, 19 bp, Homo sapiens
  siRNA target sequence for SEMA3C (NM_006379.2,837-855).
cagcatctacaatcaaagt

SEQ ID NO: 310732 - DNA, 19 bp, Homo sapiens
  siRNA target sequence for SEMA3C (NM_006379.2,840-858).
catctacaatcaaagttga

SEQ ID NO: 310733 - DNA, 19 bp, Homo sapiens
  siRNA target sequence for SEMA3C (NM_006379.2,900-918).
ggaactttgtccgtgtaat

SEQ ID NO: 310734 - DNA, 19 bp, Homo sapiens
  siRNA target sequence for SEMA3C (NM_006379.2,901-919).
gaactttgtccgtgtaatt

SEQ ID NO: 310735 - DNA, 19 bp, Homo sapiens
  siRNA target sequence for SEMA3C (NM_006379.2,928-946).
caatcgcacacatttgtat

SEQ ID NO: 310736 - DNA, 19 bp, Homo sapiens
  siRNA target sequence for SEMA3C (NM_006379.2,932-950).
cgcacacatttgtatgtct

SEQ ID NO: 310737 - DNA, 19 bp, Homo sapiens
  siRNA target sequence for SEMA3C (NM_006379.2,969-987).
gtcctgtctgtacttactt

SEQ ID NO: 310738 - DNA, 19 bp, Homo sapiens
  siRNA target sequence for SEMA3C (NM_006379.2,1033-1051).
caagtgtgaatctggaaaa

SEQ ID NO: 310739 - DNA, 19 bp, Homo sapiens
  siRNA target sequence for SEMA3C (NM_006379.2,1139-1157).
gggacagatgctgctattt

SEQ ID NO: 310740 - DNA, 19 bp, Homo sapiens
  siRNA target sequence for SEMA3C (NM_006379.2,1140-1158).
ggacagatgctgctatttt

SEQ ID NO: 310741 - DNA, 19 bp, Homo sapiens
  siRNA target sequence for SEMA3C (NM_006379.2,1149-1167).
ctgctatttttcgaagttt

SEQ ID NO: 310742 - DNA, 19 bp, Homo sapiens
  siRNA target sequence for SEMA3C (NM_006379.2,1177-1195).
gaatgcggtcagaactgat

SEQ ID NO: 310743 - DNA, 19 bp, Homo sapiens
  siRNA target sequence for SEMA3C (NM_006379.2,1183-1201).
ggtcagaactgatcaacat

SEQ ID NO: 310744 - DNA, 19 bp, Homo sapiens
  siRNA target sequence for SEMA3C (NM_006379.2,1212-1230).
ggctaagtgaacctatgtt

SEQ ID NO: 310745 - DNA, 19 bp, Homo sapiens
  siRNA target sequence for SEMA3C (NM_006379.2,1271-1289).
gatgctaaggtgtacttct

SEQ ID NO: 310746 - DNA, 19 bp, Homo sapiens
  siRNA target sequence for SEMA3C (NM_006379.2,1298-1316).
gaaaaactgactgacaata

SEQ ID NO: 310747 - DNA, 19 bp, Homo sapiens
  siRNA target sequence for SEMA3C (NM_006379.2,1320-1338).
ggagcacgaaacagattca

SEQ ID NO: 310748 - DNA, 19 bp, Homo sapiens
  siRNA target sequence for SEMA3C (NM_006379.2,1321-1339).
gagcacgaaacagattcat

SEQ ID NO: 310749 - DNA, 19 bp, Homo sapiens
  siRNA target sequence for SEMA3C (NM_006379.2,1326-1344).
cgaaacagattcattccat

SEQ ID NO: 310750 - DNA, 19 bp, Homo sapiens
  siRNA target sequence for SEMA3C (NM_006379.2,1342-1360).
catgattgctcgaatatgt

SEQ ID NO: 310751 - DNA, 19 bp, Homo sapiens
  siRNA target sequence for SEMA3C (NM_006379.2,1350-1368).
ctcgaatatgtcctaatga

SEQ ID NO: 310752 - DNA, 19 bp, Homo sapiens
  siRNA target sequence for SEMA3C (NM_006379.2,1377-1395).
gactgcgtagccttgtcaa

SEQ ID NO: 310753 - DNA, 19 bp, Homo sapiens
  siRNA target sequence for SEMA3C (NM_006379.2,1429-1447).
gtgctcggtaacagatgaa

SEQ ID NO: 310754 - DNA, 19 bp, Homo sapiens
  siRNA target sequence for SEMA3C (NM_006379.2,1431-1449).
gctcggtaacagatgaaga

SEQ ID NO: 310755 - DNA, 19 bp, Homo sapiens
  siRNA target sequence for SEMA3C (NM_006379.2,1450-1468).
cggcccagaaacacacttt

SEQ ID NO: 310756 - DNA, 19 bp, Homo sapiens
  siRNA target sequence for SEMA3C (NM_006379.2,1452-1470).
gcccagaaacacactttga

SEQ ID NO: 310757 - DNA, 19 bp, Homo sapiens
  siRNA target sequence for SEMA3C (NM_006379.2,1453-1471).
cccagaaacacactttgat

SEQ ID NO: 310758 - DNA, 19 bp, Homo sapiens
  siRNA target sequence for SEMA3C (NM_006379.2,1509-1527).
cgaggacaacactagtgta

SEQ ID NO: 310759 - DNA, 19 bp, Homo sapiens
  siRNA target sequence for SEMA3C (NM_006379.2,1510-1528).
gaggacaacactagtgtat

SEQ ID NO: 310760 - DNA, 19 bp, Homo sapiens
  siRNA target sequence for SEMA3C (NM_006379.2,1518-1536).
cactagtgtatggcatttt

SEQ ID NO: 310761 - DNA, 19 bp, Homo sapiens
  siRNA target sequence for SEMA3C (NM_006379.2,1520-1538).
ctagtgtatggcattttta

SEQ ID NO: 310762 - DNA, 19 bp, Homo sapiens
  siRNA target sequence for SEMA3C (NM_006379.2,1525-1543).
gtatggcatttttacaaca

SEQ ID NO: 310763 - DNA, 19 bp, Homo sapiens
  siRNA target sequence for SEMA3C (NM_006379.2,1569-1587).
ccgtgtgtgtgtatcattt

SEQ ID NO: 310764 - DNA, 19 bp, Homo sapiens
  siRNA target sequence for SEMA3C (NM_006379.2,1577-1595).
gtgtatcatttatctgata

SEQ ID NO: 310765 - DNA, 19 bp, Homo sapiens
  siRNA target sequence for SEMA3C (NM_006379.2,1637-1655).
cccaatcatcagctgattt

SEQ ID NO: 310766 - DNA, 19 bp, Homo sapiens
  siRNA target sequence for SEMA3C (NM_006379.2,1657-1675).
ctatcagggcagaattcca

SEQ ID NO: 310767 - DNA, 19 bp, Homo sapiens
  siRNA target sequence for SEMA3C (NM_006379.2,1704-1722).
gagcatttacacccaatat

SEQ ID NO: 310768 - DNA, 19 bp, Homo sapiens
  siRNA target sequence for SEMA3C (NM_006379.2,1745-1763).
gatgatgttgtcactttta

SEQ ID NO: 310769 - DNA, 19 bp, Homo sapiens
  siRNA target sequence for SEMA3C (NM_006379.2,1772-1790).
catcctctcatgtacaatt

SEQ ID NO: 310770 - DNA, 19 bp, Homo sapiens
  siRNA target sequence for SEMA3C (NM_006379.2,1776-1794).
ctctcatgtacaattccat

SEQ ID NO: 310771 - DNA, 19 bp, Homo sapiens
  siRNA target sequence for SEMA3C (NM_006379.2,1812-1830).
ggcctttgattgttcgtat

SEQ ID NO: 310772 - DNA, 19 bp, Homo sapiens
  siRNA target sequence for SEMA3C (NM_006379.2,1813-1831).
gcctttgattgttcgtatt

SEQ ID NO: 310773 - DNA, 19 bp, Homo sapiens
  siRNA target sequence for SEMA3C (NM_006379.2,1827-1845).
gtattggcactgactacaa

SEQ ID NO: 310774 - DNA, 19 bp, Homo sapiens
  siRNA target sequence for SEMA3C (NM_006379.2,1836-1854).
ctgactacaagtatacaaa

SEQ ID NO: 310775 - DNA, 19 bp, Homo sapiens
  siRNA target sequence for SEMA3C (NM_006379.2,1838-1856).
gactacaagtatacaaaga

SEQ ID NO: 310776 - DNA, 19 bp, Homo sapiens
  siRNA target sequence for SEMA3C (NM_006379.2,1840-1858).
ctacaagtatacaaagata

SEQ ID NO: 310777 - DNA, 19 bp, Homo sapiens
  siRNA target sequence for SEMA3C (NM_006379.2,1943-1961).
gttcttcctactaacaact

SEQ ID NO: 310778 - DNA, 19 bp, Homo sapiens
  siRNA target sequence for SEMA3C (NM_006379.2,2005-2023).
gaatcatgctcctataaca

SEQ ID NO: 310779 - DNA, 19 bp, Homo sapiens
  siRNA target sequence for SEMA3C (NM_006379.2,2009-2027).
catgctcctataacaacaa

SEQ ID NO: 310780 - DNA, 19 bp, Homo sapiens
  siRNA target sequence for SEMA3C (NM_006379.2,2037-2055).
catctaaaaagcaacagtt

SEQ ID NO: 310781 - DNA, 19 bp, Homo sapiens
  siRNA target sequence for SEMA3C (NM_006379.2,2099-2117).
cgctgccacatctatggta

SEQ ID NO: 310782 - DNA, 19 bp, Homo sapiens
  siRNA target sequence for SEMA3C (NM_006379.2,2245-2263).
gactcaatgcagaggattt

SEQ ID NO: 310783 - DNA, 19 bp, Homo sapiens
  siRNA target sequence for SEMA3C (NM_006379.2,2349-2367).
ctccgcaggcatctatcaa

SEQ ID NO: 310784 - DNA, 19 bp, Homo sapiens
  siRNA target sequence for SEMA3C (NM_006379.2,2361-2379).
ctatcaagtggctgttaca

SEQ ID NO: 310785 - DNA, 19 bp, Homo sapiens
  siRNA target sequence for SEMA3C (NM_006379.2,2564-2582).
gctgttgtgacggacaaat

SEQ ID NO: 310786 - DNA, 19 bp, Homo sapiens
  siRNA target sequence for SEMA3C (NM_006379.2,2567-2585).
gttgtgacggacaaatggt

SEQ ID NO: 310787 - DNA, 19 bp, Homo sapiens
  siRNA target sequence for SEMA3C (NM_006379.2,2755-2773).
gttaaaggccctcatcaat

SEQ ID NO: 310788 - DNA, 19 bp, Homo sapiens
  siRNA target sequence for SEMA3C (NM_006379.2,2767-2785).
catcaatagtcggaaaagt

SEQ ID NO: 310789 - DNA, 19 bp, Homo sapiens
  siRNA target sequence for SEMA3C (NM_006379.2,2770-2788).
caatagtcggaaaagtaga

SEQ ID NO: 310790 - DNA, 19 bp, Homo sapiens
  siRNA target sequence for SEMA3C (NM_006379.2,2787-2805).
gaaacaggaggaatcagtt

SEQ ID NO: 310791 - DNA, 19 bp, Homo sapiens
  siRNA target sequence for SS18 (NM_005637.1,70-88).
gctgcgattcagaagatgt

SEQ ID NO: 310792 - DNA, 19 bp, Homo sapiens
  siRNA target sequence for SS18 (NM_005637.1,87-105).
gttggatgacaataaccat

SEQ ID NO: 310793 - DNA, 19 bp, Homo sapiens
  siRNA target sequence for SS18 (NM_005637.1,91-109).
gatgacaataaccatctta

SEQ ID NO: 310794 - DNA, 19 bp, Homo sapiens
  siRNA target sequence for SS18 (NM_005637.1,147-165).
ctcagagtgttctcagtat

SEQ ID NO: 310795 - DNA, 19 bp, Homo sapiens
  siRNA target sequence for SS18 (NM_005637.1,189-207).
ggtataccttgctacaata

SEQ ID NO: 310796 - DNA, 19 bp, Homo sapiens
  siRNA target sequence for SS18 (NM_005637.1,200-218).
ctacaatagcagattctaa

SEQ ID NO: 310797 - DNA, 19 bp, Homo sapiens
  siRNA target sequence for SS18 (NM_005637.1,203-221).
caatagcagattctaatca

SEQ ID NO: 310798 - DNA, 19 bp, Homo sapiens
  siRNA target sequence for SS18 (NM_005637.1,308-326).
ctccacgctctcacaacat

SEQ ID NO: 310799 - DNA, 19 bp, Homo sapiens
  siRNA target sequence for SS18 (NM_005637.1,423-441).
gggacctggacccaatcaa

SEQ ID NO: 310800 - DNA, 19 bp, Homo sapiens
  siRNA target sequence for SS18 (NM_005637.1,425-443).
gacctggacccaatcaact

SEQ ID NO: 310801 - DNA, 19 bp, Homo sapiens
  siRNA target sequence for SS18 (NM_005637.1,428-446).
ctggacccaatcaactcaa

SEQ ID NO: 310802 - DNA, 19 bp, Homo sapiens
  siRNA target sequence for SS18 (NM_005637.1,433-451).
cccaatcaactcaatatga

SEQ ID NO: 310803 - DNA, 19 bp, Homo sapiens
  siRNA target sequence for SS18 (NM_005637.1,450-468).
gacaaacagttccatgaat

SEQ ID NO: 310804 - DNA, 19 bp, Homo sapiens
  siRNA target sequence for SS18 (NM_005637.1,462-480).
catgaatatgccttcaagt

SEQ ID NO: 310805 - DNA, 19 bp, Homo sapiens
  siRNA target sequence for SS18 (NM_005637.1,488-506).
gatccatgggaggttacaa

SEQ ID NO: 310806 - DNA, 19 bp, Homo sapiens
  siRNA target sequence for SS18 (NM_005637.1,528-546).
gagcatgccagtacagaat

SEQ ID NO: 310807 - DNA, 19 bp, Homo sapiens
  siRNA target sequence for SS18 (NM_005637.1,530-548).
gcatgccagtacagaatca

SEQ ID NO: 310808 - DNA, 19 bp, Homo sapiens
  siRNA target sequence for SS18 (NM_005637.1,566-584).
gacaaccaatgggaaacta

SEQ ID NO: 310809 - DNA, 19 bp, Homo sapiens
  siRNA target sequence for SS18 (NM_005637.1,589-607).
cccagaccaaatatgagta

SEQ ID NO: 310810 - DNA, 19 bp, Homo sapiens
  siRNA target sequence for SS18 (NM_005637.1,590-608).
ccagaccaaatatgagtat

SEQ ID NO: 310811 - DNA, 19 bp, Homo sapiens
  siRNA target sequence for SS18 (NM_005637.1,614-632).
caaaccaaggtccaatgat

SEQ ID NO: 310812 - DNA, 19 bp, Homo sapiens
  siRNA target sequence for SS18 (NM_005637.1,647-665).
cttctcagcaatacaatat

SEQ ID NO: 310813 - DNA, 19 bp, Homo sapiens
  siRNA target sequence for SS18 (NM_005637.1,712-730).
ggaatgatgggtcaagtta

SEQ ID NO: 310814 - DNA, 19 bp, Homo sapiens
  siRNA target sequence for SS18 (NM_005637.1,717-735).
gatgggtcaagttaaccaa

SEQ ID NO: 310815 - DNA, 19 bp, Homo sapiens
  siRNA target sequence for SS18 (NM_005637.1,747-765).
gatgggtcagagacagatt

SEQ ID NO: 310816 - DNA, 19 bp, Homo sapiens
  siRNA target sequence for SS18 (NM_005637.1,1040-1058).
gtcctcagtatcctaacta

SEQ ID NO: 310817 - DNA, 19 bp, Homo sapiens
  siRNA target sequence for SS18 (NM_005637.1,1075-1093).
cagcagtatggaggatata

SEQ ID NO: 310818 - DNA, 19 bp, Homo sapiens
  siRNA target sequence for SS18 (NM_005637.1,1077-1095).
gcagtatggaggatataga

SEQ ID NO: 310819 - DNA, 19 bp, Homo sapiens
  siRNA target sequence for SS18 (NM_005637.1,1126-1144).
cagcagaggccttatggat

SEQ ID NO: 310820 - DNA, 19 bp, Homo sapiens
  siRNA target sequence for SS18 (NM_005637.1,1128-1146).
gcagaggccttatggatat

SEQ ID NO: 310821 - DNA, 19 bp, Homo sapiens
  siRNA target sequence for TACC3 (NM_006342.1,113-131).
gtctgcaggtcttaaacga

SEQ ID NO: 310822 - DNA, 19 bp, Homo sapiens
  siRNA target sequence for TACC3 (NM_006342.1,118-136).
caggtcttaaacgacaaaa

SEQ ID NO: 310823 - DNA, 19 bp, Homo sapiens
  siRNA target sequence for TACC3 (NM_006342.1,198-216).
cggaagatcgtctgttctt

SEQ ID NO: 310824 - DNA, 19 bp, Homo sapiens
  siRNA target sequence for TACC3 (NM_006342.1,303-321).
gacgcacaggattctaagt

SEQ ID NO: 310825 - DNA, 19 bp, Homo sapiens
  siRNA target sequence for TACC3 (NM_006342.1,430-448).
gaagtggatgccaaaacta

SEQ ID NO: 310826 - DNA, 19 bp, Homo sapiens
  siRNA target sequence for TACC3 (NM_006342.1,446-464).
ctactcatggaattctaca

SEQ ID NO: 310827 - DNA, 19 bp, Homo sapiens
  siRNA target sequence for TACC3 (NM_006342.1,596-614).
gttctgagaaccaaatggt

SEQ ID NO: 310828 - DNA, 19 bp, Homo sapiens
  siRNA target sequence for TACC3 (NM_006342.1,652-670).
gtggaggaaaaccttagtt

SEQ ID NO: 310829 - DNA, 19 bp, Homo sapiens
  siRNA target sequence for TACC3 (NM_006342.1,658-676).
gaaaaccttagttcctatt

SEQ ID NO: 310830 - DNA, 19 bp, Homo sapiens
  siRNA target sequence for TACC3 (NM_006342.1,663-681).
ccttagttcctattcctta

SEQ ID NO: 310831 - DNA, 19 bp, Homo sapiens
  siRNA target sequence for TACC3 (NM_006342.1,764-782).
gagccgaggaagaatgcaa

SEQ ID NO: 310832 - DNA, 19 bp, Homo sapiens
  siRNA target sequence for TACC3 (NM_006342.1,1104-1122).
gagcggacctgtaaaacta

SEQ ID NO: 310833 - DNA, 19 bp, Homo sapiens
  siRNA target sequence for TACC3 (NM_006342.1,1106-1124).
gcggacctgtaaaactaga

SEQ ID NO: 310834 - DNA, 19 bp, Homo sapiens
  siRNA target sequence for TACC3 (NM_006342.1,1107-1125).
cggacctgtaaaactagaa

SEQ ID NO: 310835 - DNA, 19 bp, Homo sapiens
  siRNA target sequence for TACC3 (NM_006342.1,1109-1127).
gacctgtaaaactagaatt

SEQ ID NO: 310836 - DNA, 19 bp, Homo sapiens
  siRNA target sequence for TACC3 (NM_006342.1,1742-1760).
gaacttcctcgtttaagga

SEQ ID NO: 310837 - DNA, 19 bp, Homo sapiens
  siRNA target sequence for TACC3 (NM_006342.1,1772-1790).
ggaagcagtccttatacct

SEQ ID NO: 310838 - DNA, 19 bp, Homo sapiens
  siRNA target sequence for TACC3 (NM_006342.1,1854-1872).
cagcatgcacggtgcaaat

SEQ ID NO: 310839 - DNA, 19 bp, Homo sapiens
  siRNA target sequence for TACC3 (NM_006342.1,1856-1874).
gcatgcacggtgcaaatga

SEQ ID NO: 310840 - DNA, 19 bp, Homo sapiens
  siRNA target sequence for TACC3 (NM_006342.1,1906-1924).
cttgtggagttcgatttct

SEQ ID NO: 310841 - DNA, 19 bp, Homo sapiens
  siRNA target sequence for TACC3 (NM_006342.1,1989-2007).
cctgtccaccggacctata

SEQ ID NO: 310842 - DNA, 19 bp, Homo sapiens
  siRNA target sequence for TACC3 (NM_006342.1,2141-2159).
ggttcgaagaggttgtgta

SEQ ID NO: 310843 - DNA, 19 bp, Homo sapiens
  siRNA target sequence for TACC3 (NM_006342.1,2211-2229).
ccagaaagttctaaaagaa

SEQ ID NO: 310844 - DNA, 19 bp, Homo sapiens
  siRNA target sequence for TACC3 (NM_006342.1,2281-2299).
ctcttcaagcgttttgaga

SEQ ID NO: 310845 - DNA, 19 bp, Homo sapiens
  siRNA target sequence for TCL1A (NM_021966.1,142-160).
gcctggctgcccttaacca

SEQ ID NO: 310846 - DNA, 19 bp, Homo sapiens
  siRNA target sequence for TCL1A (NM_021966.1,162-180).
cgagataaaggataggtta

SEQ ID NO: 310847 - DNA, 19 bp, Homo sapiens
  siRNA target sequence for TCL1A (NM_021966.1,251-269).
caagcctgctgcctatcat

SEQ ID NO: 310848 - DNA, 19 bp, Homo sapiens
  siRNA target sequence for TCL1A (NM_021966.1,314-332).
gtttctggcgcttagtgta

SEQ ID NO: 310849 - DNA, 19 bp, Homo sapiens
  siRNA target sequence for TCL1B (NM_004918.2,104-122).
ctggcatctacgaagatga

SEQ ID NO: 310850 - DNA, 19 bp, Homo sapiens
  siRNA target sequence for TCL1B (NM_004918.2,191-209).
cccagggcagcagatatga

SEQ ID NO: 310851 - DNA, 19 bp, Homo sapiens
  siRNA target sequence for TCL1B (NM_004918.2,409-427).
cagccggagaggaaagact

SEQ ID NO: 310852 - DNA, 19 bp, Homo sapiens
  siRNA target sequence for CRADD (NM_003805.2,107-125).
ggccagagacaaacaagta

SEQ ID NO: 310853 - DNA, 19 bp, Homo sapiens
  siRNA target sequence for CRADD (NM_003805.2,211-229).
cggaaaaccatattcaaga

SEQ ID NO: 310854 - DNA, 19 bp, Homo sapiens
  siRNA target sequence for CRADD (NM_003805.2,245-263).
cacaggcctccggaaaaca

SEQ ID NO: 310855 - DNA, 19 bp, Homo sapiens
  siRNA target sequence for CRADD (NM_003805.2,247-265).
caggcctccggaaaacaat

SEQ ID NO: 310856 - DNA, 19 bp, Homo sapiens
  siRNA target sequence for CRADD (NM_003805.2,262-280).
caatgctcctgctggatat

SEQ ID NO: 310857 - DNA, 19 bp, Homo sapiens
  siRNA target sequence for CRADD (NM_003805.2,297-315).
cctaaagcatttgatacat

SEQ ID NO: 310858 - DNA, 19 bp, Homo sapiens
  siRNA target sequence for CRADD (NM_003805.2,519-537).
ctgtcccagacggatatct

SEQ ID NO: 310859 - DNA, 19 bp, Homo sapiens
  siRNA target sequence for CRADD (NM_003805.2,676-694).
cgctgctcctgcacatgtt

SEQ ID NO: 310860 - DNA, 19 bp, Homo sapiens
  siRNA target sequence for DIABLO (NM_019887.2,49-67).
ctgtcgcgcagcgtaactt

SEQ ID NO: 310861 - DNA, 19 bp, Homo sapiens
  siRNA target sequence for DIABLO (NM_019887.2,51-69).
gtcgcgcagcgtaacttca

SEQ ID NO: 310862 - DNA, 19 bp, Homo sapiens
  siRNA target sequence for DIABLO (NM_019887.2,53-71).
cgcgcagcgtaacttcatt

SEQ ID NO: 310863 - DNA, 19 bp, Homo sapiens
  siRNA target sequence for DIABLO (NM_019887.2,146-164).
gaccatggcacaaaactgt

SEQ ID NO: 310864 - DNA, 19 bp, Homo sapiens
  siRNA target sequence for DIABLO (NM_019887.2,185-203).
ccctgtgtgcggttcctat

SEQ ID NO: 310865 - DNA, 19 bp, Homo sapiens
  siRNA target sequence for DIABLO (NM_019887.2,186-204).
cctgtgtgcggttcctatt

SEQ ID NO: 310866 - DNA, 19 bp, Homo sapiens
  siRNA target sequence for DIABLO (NM_019887.2,189-207).
gtgtgcggttcctattgca

SEQ ID NO: 310867 - DNA, 19 bp, Homo sapiens
  siRNA target sequence for DIABLO (NM_019887.2,195-213).
ggttcctattgcacagaaa

SEQ ID NO: 310868 - DNA, 19 bp, Homo sapiens
  siRNA target sequence for DIABLO (NM_019887.2,217-235).
gagcctcattcccttagta

SEQ ID NO: 310869 - DNA, 19 bp, Homo sapiens
  siRNA target sequence for DIABLO (NM_019887.2,227-245).
cccttagtagtgaagcatt

SEQ ID NO: 310870 - DNA, 19 bp, Homo sapiens
  siRNA target sequence for DIABLO (NM_019887.2,257-275).
cagtgtctttggtaacaga

SEQ ID NO: 310871 - DNA, 19 bp, Homo sapiens
  siRNA target sequence for DIABLO (NM_019887.2,300-318).
gaccacatatgcgttgatt

SEQ ID NO: 310872 - DNA, 19 bp, Homo sapiens
  siRNA target sequence for DIABLO (NM_019887.2,303-321).
cacatatgcgttgattgaa

SEQ ID NO: 310873 - DNA, 19 bp, Homo sapiens
  siRNA target sequence for DIABLO (NM_019887.2,310-328).
gcgttgattgaagctatta

SEQ ID NO: 310874 - DNA, 19 bp, Homo sapiens
  siRNA target sequence for DIABLO (NM_019887.2,315-333).
gattgaagctattactgaa

SEQ ID NO: 310875 - DNA, 19 bp, Homo sapiens
  siRNA target sequence for DIABLO (NM_019887.2,322-340).
gctattactgaatatacta

SEQ ID NO: 310876 - DNA, 19 bp, Homo sapiens
  siRNA target sequence for DIABLO (NM_019887.2,323-341).
ctattactgaatatactaa

SEQ ID NO: 310877 - DNA, 19 bp, Homo sapiens
  siRNA target sequence for DIABLO (NM_019887.2,343-361).
gctgtttataccttaactt

SEQ ID NO: 310878 - DNA, 19 bp, Homo sapiens
  siRNA target sequence for DIABLO (NM_019887.2,359-377).
cttctctttaccgacaata

SEQ ID NO: 310879 - DNA, 19 bp, Homo sapiens
  siRNA target sequence for DIABLO (NM_019887.2,364-382).
ctttaccgacaatatacaa

SEQ ID NO: 310880 - DNA, 19 bp, Homo sapiens
  siRNA target sequence for DIABLO (NM_019887.2,369-387).
ccgacaatatacaagttta

SEQ ID NO: 310881 - DNA, 19 bp, Homo sapiens
  siRNA target sequence for DIABLO (NM_019887.2,552-570).
cgcagatcaggcctctata

SEQ ID NO: 310882 - DNA, 19 bp, Homo sapiens
  siRNA target sequence for DIABLO (NM_019887.2,553-571).
gcagatcaggcctctataa

SEQ ID NO: 310883 - DNA, 19 bp, Homo sapiens
  siRNA target sequence for DIABLO (NM_019887.2,572-590).
ccgccaggaatcacattca

SEQ ID NO: 310884 - DNA, 19 bp, Homo sapiens
  siRNA target sequence for DIABLO (NM_019887.2,629-647).
cccggaaagcagaaaccaa

SEQ ID NO: 310885 - DNA, 19 bp, Homo sapiens
  siRNA target sequence for FADD (NM_003824.2,592-610).
gcagcatttaacgtcatat

SEQ ID NO: 310886 - DNA, 19 bp, Homo sapiens
  siRNA target sequence for FADD (NM_003824.2,596-614).
catttaacgtcatatgtga

SEQ ID NO: 310887 - DNA, 19 bp, Homo sapiens
  siRNA target sequence for FADD (NM_003824.2,613-631).
gataatgtggggaaagatt

SEQ ID NO: 310888 - DNA, 19 bp, Homo sapiens
  siRNA target sequence for FADD (NM_003824.2,643-661).
gctcgtcagctcaaagtct

SEQ ID NO: 310889 - DNA, 19 bp, Homo sapiens
  siRNA target sequence for FADD (NM_003824.2,721-739).
cgggagtcactgagaatct

SEQ ID NO: 310890 - DNA, 19 bp, Homo sapiens
  siRNA target sequence for FADD (NM_003824.2,871-889).
gccatgtccccgatgtcat

SEQ ID NO: 310891 - DNA, 19 bp, Homo sapiens
  siRNA target sequence for DAP (NM_004394.1,221-239).
ctggtggaatgcgaattgt

SEQ ID NO: 310892 - DNA, 19 bp, Homo sapiens
  siRNA target sequence for CIDEB (NM_014430.1,1211-1229).
gacttactcaggtcagtat

SEQ ID NO: 310893 - DNA, 19 bp, Homo sapiens
  siRNA target sequence for CIDEB (NM_014430.1,1213-1231).
cttactcaggtcagtatct

SEQ ID NO: 310894 - DNA, 19 bp, Homo sapiens
  siRNA target sequence for CIDEB (NM_014430.1,1217-1235).
ctcaggtcagtatctaata

SEQ ID NO: 310895 - DNA, 19 bp, Homo sapiens
  siRNA target sequence for CIDEB (NM_014430.1,1352-1370).
gagctgctagccaaagcat

SEQ ID NO: 310896 - DNA, 19 bp, Homo sapiens
  siRNA target sequence for CIDEB (NM_014430.1,1651-1669).
cgggctctactctatgagt

SEQ ID NO: 310897 - DNA, 19 bp, Homo sapiens
  siRNA target sequence for CIDEB (NM_014430.1,1660-1678).
ctctatgagttgtgacttt

SEQ ID NO: 310898 - DNA, 19 bp, Homo sapiens
  siRNA target sequence for CIDEB (NM_014430.1,1683-1701).
gacttggcccaaagaaagt

SEQ ID NO: 310899 - DNA, 19 bp, Homo sapiens
  siRNA target sequence for BAK1 (NM_001188.2,311-329).
gttttccgcagctacgttt

SEQ ID NO: 310900 - DNA, 19 bp, Homo sapiens
  siRNA target sequence for BAK1 (NM_001188.2,678-696).
gcttcgtggtcgacttcat

SEQ ID NO: 310901 - DNA, 19 bp, Homo sapiens
  siRNA target sequence for BCL2L11 (NM_006538.1,3-21).
ggcaaagcaaccttctgat

SEQ ID NO: 310902 - DNA, 19 bp, Homo sapiens
  siRNA target sequence for BCL2L11 (NM_006538.1,37-55).
gaccgagaaggtagacaat

SEQ ID NO: 310903 - DNA, 19 bp, Homo sapiens
  siRNA target sequence for BCL2L11 (NM_006538.1,139-157).
cccatgagttgtgacaaat

SEQ ID NO: 310904 - DNA, 19 bp, Homo sapiens
  siRNA target sequence for BCL2L11 (NM_006538.1,141-159).
catgagttgtgacaaatca

SEQ ID NO: 310905 - DNA, 19 bp, Homo sapiens
  siRNA target sequence for BCL2L11 (NM_006538.1,241-259).
gatatgcgcccagagatat

SEQ ID NO: 310906 - DNA, 19 bp, Homo sapiens
  siRNA target sequence for BCL2L11 (NM_006538.1,291-309).
cgagtttaacgcttactat

SEQ ID NO: 310907 - DNA, 19 bp, Homo sapiens
  siRNA target sequence for BCL2L11 (NM_006538.1,314-332).
ggagggtatttttgaataa

SEQ ID NO: 310908 - DNA, 19 bp, Homo sapiens
  siRNA target sequence for BCL2L11 (NM_006538.1,352-370).
cacccacgaatggttatct

SEQ ID NO: 310909 - DNA, 19 bp, Homo sapiens
  siRNA target sequence for BCL2L11 (NM_006538.1,354-372).
cccacgaatggttatctta

SEQ ID NO: 310910 - DNA, 19 bp, Homo sapiens
  siRNA target sequence for BCL2L11 (NM_006538.1,363-381).
ggttatcttacgactgtta

SEQ ID NO: 310911 - DNA, 19 bp, Homo sapiens
  siRNA target sequence for BCL2L11 (NM_006538.1,374-392).
gactgttacgttacattgt

SEQ ID NO: 310912 - DNA, 19 bp, Homo sapiens
  siRNA target sequence for BCL2L11 (NM_138627.1,111-129).
gacagagccacaaggtatt

SEQ ID NO: 310913 - DNA, 19 bp, Homo sapiens
  siRNA target sequence for BIK (NM_001197.3,189-207).
ggacttcgattctttggaa

SEQ ID NO: 310914 - DNA, 19 bp, Homo sapiens
  siRNA target sequence for BIK (NM_001197.3,357-375).
catcagggatgttcttaga

SEQ ID NO: 310915 - DNA, 19 bp, Homo sapiens
  siRNA target sequence for BIK (NM_001197.3,385-403).
gacggtttcaccacactta

SEQ ID NO: 310916 - DNA, 19 bp, Homo sapiens
  siRNA target sequence for BIK (NM_001197.3,389-407).
gtttcaccacacttaagga

SEQ ID NO: 310917 - DNA, 19 bp, Homo sapiens
  siRNA target sequence for BNIP3L (NM_004331.1,130-148).
caacaactgcgaggaaaat

SEQ ID NO: 310918 - DNA, 19 bp, Homo sapiens
  siRNA target sequence for BNIP3L (NM_004331.1,366-384).
gcccttcgccacaagaaga

SEQ ID NO: 310919 - DNA, 19 bp, Homo sapiens
  siRNA target sequence for BNIP3L (NM_004331.1,367-385).
cccttcgccacaagaagat

SEQ ID NO: 310920 - DNA, 19 bp, Homo sapiens
  siRNA target sequence for BNIP3L (NM_004331.1,492-510).
gtgcggactgggtatcaga

SEQ ID NO: 310921 - DNA, 19 bp, Homo sapiens
  siRNA target sequence for BNIP3L (NM_004331.1,516-534).
ccagtagacccgaaaacat

SEQ ID NO: 310922 - DNA, 19 bp, Homo sapiens
  siRNA target sequence for BNIP3L (NM_004331.1,517-535).
cagtagacccgaaaacatt

SEQ ID NO: 310923 - DNA, 19 bp, Homo sapiens
  siRNA target sequence for BNIP3L (NM_004331.1,638-656).
ctgaaggtgttcattccat

SEQ ID NO: 310924 - DNA, 19 bp, Homo sapiens
  siRNA target sequence for BNIP3L (NM_004331.1,685-703).
ggggctaggcatctatatt

SEQ ID NO: 310925 - DNA, 19 bp, Homo sapiens
  siRNA target sequence for BNIP3L (NM_004331.1,689-707).
ctaggcatctatattggaa

SEQ ID NO: 310926 - DNA, 19 bp, Homo sapiens
  siRNA target sequence for CIAS1 (NM_004895.3,903-921).
gatctagccacgctaatga

SEQ ID NO: 310927 - DNA, 19 bp, Homo sapiens
  siRNA target sequence for CIAS1 (NM_004895.3,913-931).
cgctaatgatcgacttcaa

SEQ ID NO: 310928 - DNA, 19 bp, Homo sapiens
  siRNA target sequence for CIAS1 (NM_004895.3,914-932).
gctaatgatcgacttcaat

SEQ ID NO: 310929 - DNA, 19 bp, Homo sapiens
  siRNA target sequence for CIAS1 (NM_004895.3,980-998).
caacaggagagacctttat

SEQ ID NO: 310930 - DNA, 19 bp, Homo sapiens
  siRNA target sequence for CIAS1 (NM_004895.3,1019-1037).
gccgaagtggggttcagat

SEQ ID NO: 310931 - DNA, 19 bp, Homo sapiens
  siRNA target sequence for CIAS1 (NM_004895.3,1020-1038).
ccgaagtggggttcagata

SEQ ID NO: 310932 - DNA, 19 bp, Homo sapiens
  siRNA target sequence for CIAS1 (NM_004895.3,1021-1039).
cgaagtggggttcagataa

SEQ ID NO: 310933 - DNA, 19 bp, Homo sapiens
  siRNA target sequence for CIAS1 (NM_004895.3,1110-1128).
gagtacctttcgagaatct

SEQ ID NO: 310934 - DNA, 19 bp, Homo sapiens
  siRNA target sequence for CIAS1 (NM_004895.3,1112-1130).
gtacctttcgagaatctct

SEQ ID NO: 310935 - DNA, 19 bp, Homo sapiens
  siRNA target sequence for CIAS1 (NM_004895.3,1120-1138).
cgagaatctctatttgtaa

SEQ ID NO: 310936 - DNA, 19 bp, Homo sapiens
  siRNA target sequence for CIAS1 (NM_004895.3,1149-1167).
gattaccgtaagaagtaca

SEQ ID NO: 310937 - DNA, 19 bp, Homo sapiens
  siRNA target sequence for CIAS1 (NM_004895.3,1155-1173).
cgtaagaagtacagaaagt

SEQ ID NO: 310938 - DNA, 19 bp, Homo sapiens
  siRNA target sequence for CIAS1 (NM_004895.3,1339-1357).
gccccgtgagtcccattaa

SEQ ID NO: 310939 - DNA, 19 bp, Homo sapiens
  siRNA target sequence for CIAS1 (NM_004895.3,1341-1359).
cccgtgagtcccattaaga

SEQ ID NO: 310940 - DNA, 19 bp, Homo sapiens
  siRNA target sequence for CIAS1 (NM_004895.3,1342-1360).
ccgtgagtcccattaagat

SEQ ID NO: 310941 - DNA, 19 bp, Homo sapiens
  siRNA target sequence for CIAS1 (NM_004895.3,1378-1396).
ccgatgatgagcattctga

SEQ ID NO: 310942 - DNA, 19 bp, Homo sapiens
  siRNA target sequence for CIAS1 (NM_004895.3,1428-1446).
gcagggattgggaaaacaa

SEQ ID NO: 310943 - DNA, 19 bp, Homo sapiens
  siRNA target sequence for CIAS1 (NM_004895.3,1429-1447).
cagggattgggaaaacaat

SEQ ID NO: 310944 - DNA, 19 bp, Homo sapiens
  siRNA target sequence for CIAS1 (NM_004895.3,1493-1511).
ccaagacaggtttgactat

SEQ ID NO: 310945 - DNA, 19 bp, Homo sapiens
  siRNA target sequence for CIAS1 (NM_004895.3,1501-1519).
ggtttgactatctgttcta

SEQ ID NO: 310946 - DNA, 19 bp, Homo sapiens
  siRNA target sequence for CIAS1 (NM_004895.3,1718-1736).
ggccgagcggggagacatt

SEQ ID NO: 310947 - DNA, 19 bp, Homo sapiens
  siRNA target sequence for CIAS1 (NM_004895.3,1720-1738).
ccgagcggggagacattct

SEQ ID NO: 310948 - DNA, 19 bp, Homo sapiens
  siRNA target sequence for CIAS1 (NM_004895.3,1884-1902).
gagtacttcttcaagtact

SEQ ID NO: 310949 - DNA, 19 bp, Homo sapiens
  siRNA target sequence for CIAS1 (NM_004895.3,1925-1943).
ggcagccttcagtctgatt

SEQ ID NO: 310950 - DNA, 19 bp, Homo sapiens
  siRNA target sequence for CIAS1 (NM_004895.3,2070-2088).
gtgtacgtcttcttccttt

SEQ ID NO: 310951 - DNA, 19 bp, Homo sapiens
  siRNA target sequence for CIAS1 (NM_004895.3,2450-2468).
cgaaaaggggtatttgatt

SEQ ID NO: 310952 - DNA, 19 bp, Homo sapiens
  siRNA target sequence for CIAS1 (NM_004895.3,2519-2537).
cttggagaagaaattaagt

SEQ ID NO: 310953 - DNA, 19 bp, Homo sapiens
  siRNA target sequence for CIAS1 (NM_004895.3,2539-2557).
gcaagatctctcagcaaat

SEQ ID NO: 310954 - DNA, 19 bp, Homo sapiens
  siRNA target sequence for CIAS1 (NM_004895.3,2787-2805).
ctggggtttctccataaca

SEQ ID NO: 310955 - DNA, 19 bp, Homo sapiens
  siRNA target sequence for CIAS1 (NM_004895.3,2835-2853).
gaaggccgacaccttgata

SEQ ID NO: 310956 - DNA, 19 bp, Homo sapiens
  siRNA target sequence for CIAS1 (NM_004895.3,2839-2857).
gccgacaccttgatatggt

SEQ ID NO: 310957 - DNA, 19 bp, Homo sapiens
  siRNA target sequence for CIAS1 (NM_004895.3,3044-3062).
gcatcctggctgtaacatt

SEQ ID NO: 310958 - DNA, 19 bp, Homo sapiens
  siRNA target sequence for CIAS1 (NM_004895.3,3176-3194).
cggtgacttcggaatcaga

SEQ ID NO: 310959 - DNA, 19 bp, Homo sapiens
  siRNA target sequence for CIAS1 (NM_004895.3,3216-3234).
cacctgttgtgcaatctga

SEQ ID NO: 310960 - DNA, 19 bp, Homo sapiens
  siRNA target sequence for CIAS1 (NM_004895.3,3279-3297).
caggatcttgcatcagtat

SEQ ID NO: 310961 - DNA, 19 bp, Homo sapiens
  siRNA target sequence for CIAS1 (NM_004895.3,3313-3331).
ccctgaccagactctatgt

SEQ ID NO: 310962 - DNA, 19 bp, Homo sapiens
  siRNA target sequence for CIAS1 (NM_004895.3,3351-3369).
gactcaggagtcgcaattt

SEQ ID NO: 310963 - DNA, 19 bp, Homo sapiens
  siRNA target sequence for CIAS1 (NM_004895.3,3353-3371).
ctcaggagtcgcaatttta

SEQ ID NO: 310964 - DNA, 19 bp, Homo sapiens
  siRNA target sequence for CIAS1 (NM_004895.3,3358-3376).
gagtcgcaattttatgtga

SEQ ID NO: 310965 - DNA, 19 bp, Homo sapiens
  siRNA target sequence for CIAS1 (NM_004895.3,3360-3378).
gtcgcaattttatgtgaaa

SEQ ID NO: 310966 - DNA, 19 bp, Homo sapiens
  siRNA target sequence for CIAS1 (NM_004895.3,3432-3450).
cttacgtcagtctgttgtt

SEQ ID NO: 310967 - DNA, 19 bp, Homo sapiens
  siRNA target sequence for CIAS1 (NM_004895.3,3461-3479).
ctcggtactcagcactaat

SEQ ID NO: 310968 - DNA, 19 bp, Homo sapiens
  siRNA target sequence for CIAS1 (NM_004895.3,3465-3483).
gtactcagcactaatcaga

SEQ ID NO: 310969 - DNA, 19 bp, Homo sapiens
  siRNA target sequence for CIAS1 (NM_004895.3,3576-3594).
caggtgttggaattagaca

SEQ ID NO: 310970 - DNA, 19 bp, Homo sapiens
  siRNA target sequence for CIAS1 (NM_004895.3,3755-3773).
ggggttgtctgaaatgtat

SEQ ID NO: 310971 - DNA, 19 bp, Homo sapiens
  siRNA target sequence for CIAS1 (NM_004895.3,3756-3774).
gggttgtctgaaatgtatt

SEQ ID NO: 310972 - DNA, 19 bp, Homo sapiens
  siRNA target sequence for CIAS1 (NM_004895.3,3796-3814).
cgttagaaacacttcaaga

SEQ ID NO: 310973 - DNA, 19 bp, Homo sapiens
  siRNA target sequence for CIAS1 (NM_004895.3,3797-3815).
gttagaaacacttcaagaa

SEQ ID NO: 310974 - DNA, 19 bp, Homo sapiens
  siRNA target sequence for EI24 (NM_004879.2,94-112).
ctcctgtgtgtagttgata

SEQ ID NO: 310975 - DNA, 19 bp, Homo sapiens
  siRNA target sequence for EI24 (NM_004879.2,96-114).
cctgtgtgtagttgatagt

SEQ ID NO: 310976 - DNA, 19 bp, Homo sapiens
  siRNA target sequence for EI24 (NM_004879.2,97-115).
ctgtgtgtagttgatagtt

SEQ ID NO: 310977 - DNA, 19 bp, Homo sapiens
  siRNA target sequence for EI24 (NM_004879.2,129-147).
gatggctgacagtgtcaaa

SEQ ID NO: 310978 - DNA, 19 bp, Homo sapiens
  siRNA target sequence for EI24 (NM_004879.2,166-184).
gccagaggaatcaaagact

SEQ ID NO: 310979 - DNA, 19 bp, Homo sapiens
  siRNA target sequence for EI24 (NM_004879.2,193-211).
ggtatttgtaccatctcaa

SEQ ID NO: 310980 - DNA, 19 bp, Homo sapiens
  siRNA target sequence for EI24 (NM_004879.2,220-238).
gctcgaatccagcaaaaga

SEQ ID NO: 310981 - DNA, 19 bp, Homo sapiens
  siRNA target sequence for EI24 (NM_004879.2,322-340).
ccacgtattgttagtagaa

SEQ ID NO: 310982 - DNA, 19 bp, Homo sapiens
  siRNA target sequence for EI24 (NM_004879.2,323-341).
cacgtattgttagtagaat

SEQ ID NO: 310983 - DNA, 19 bp, Homo sapiens
  siRNA target sequence for EI24 (NM_004879.2,345-363).
ccagtgttgtgcttggaat

SEQ ID NO: 310984 - DNA, 19 bp, Homo sapiens
  siRNA target sequence for EI24 (NM_004879.2,492-510).
cctcacgtcaattttcagt

SEQ ID NO: 310985 - DNA, 19 bp, Homo sapiens
  siRNA target sequence for EI24 (NM_004879.2,527-545).
ccttgtttgtgcttagcaa

SEQ ID NO: 310986 - DNA, 19 bp, Homo sapiens
  siRNA target sequence for EI24 (NM_004879.2,558-576).
catttggtttcaggatata

SEQ ID NO: 310987 - DNA, 19 bp, Homo sapiens
  siRNA target sequence for EI24 (NM_004879.2,621-639).
ccctagtgtcagcaaaata

SEQ ID NO: 310988 - DNA, 19 bp, Homo sapiens
  siRNA target sequence for EI24 (NM_004879.2,736-754).
gttagtctcctgcatatgt

SEQ ID NO: 310989 - DNA, 19 bp, Homo sapiens
  siRNA target sequence for EI24 (NM_004879.2,767-785).
cactgtactgctttgaata

SEQ ID NO: 310990 - DNA, 19 bp, Homo sapiens
  siRNA target sequence for EI24 (NM_004879.2,781-799).
gaatatcgttggttcaata

SEQ ID NO: 310991 - DNA, 19 bp, Homo sapiens
  siRNA target sequence for EI24 (NM_004879.2,788-806).
gttggttcaataaaggaat

SEQ ID NO: 310992 - DNA, 19 bp, Homo sapiens
  siRNA target sequence for EI24 (NM_004879.2,814-832).
caccagcggttgtctaaca

SEQ ID NO: 310993 - DNA, 19 bp, Homo sapiens
  siRNA target sequence for EI24 (NM_004879.2,839-857).
ggaattggccttactactt

SEQ ID NO: 310994 - DNA, 19 bp, Homo sapiens
  siRNA target sequence for EI24 (NM_004879.2,840-858).
gaattggccttactacttt

SEQ ID NO: 310995 - DNA, 19 bp, Homo sapiens
  siRNA target sequence for EI24 (NM_004879.2,890-908).
caatgcagtcctcatatat

SEQ ID NO: 310996 - DNA, 19 bp, Homo sapiens
  siRNA target sequence for EI24 (NM_004879.2,976-994).
cctggcaaagcatatctct

SEQ ID NO: 310997 - DNA, 19 bp, Homo sapiens
  siRNA target sequence for EI24 (NM_004879.2,977-995).
ctggcaaagcatatctctt

SEQ ID NO: 310998 - DNA, 19 bp, Homo sapiens
  siRNA target sequence for PDCD5 (NM_004708.2,308-326).
caactaagtgagaaggtat

SEQ ID NO: 310999 - DNA, 19 bp, Homo sapiens
  siRNA target sequence for TRADD (NM_003789.2,111-129).
gcagcgcatacctgtttgt

SEQ ID NO: 311000 - DNA, 19 bp, Homo sapiens
  siRNA target sequence for TRADD (NM_003789.2,466-484).
cgaggagcgctgtttgagt

SEQ ID NO: 311001 - DNA, 19 bp, Homo sapiens
  siRNA target sequence for TRADD (NM_003789.2,467-485).
gaggagcgctgtttgagtt

SEQ ID NO: 311002 - DNA, 19 bp, Homo sapiens
  siRNA target sequence for TRADD (NM_003789.2,542-560).
gatgcgctgcgaaatctga

SEQ ID NO: 311003 - DNA, 19 bp, Homo sapiens
  siRNA target sequence for TRADD (NM_003789.2,742-760).
gcgctctgtgggtctcaaa

SEQ ID NO: 311004 - DNA, 19 bp, Homo sapiens
  siRNA target sequence for BCL2L1 (NM_001191.2,383-401).
gggagctggtggttgactt

SEQ ID NO: 311005 - DNA, 19 bp, Homo sapiens
  siRNA target sequence for BCL2L1 (NM_001191.2,432-450).
cagctggagtcagtttagt

SEQ ID NO: 311006 - DNA, 19 bp, Homo sapiens
  siRNA target sequence for BCL2L1 (NM_001191.2,434-452).
gctggagtcagtttagtga

SEQ ID NO: 311007 - DNA, 19 bp, Homo sapiens
  siRNA target sequence for BCL2L1 (NM_001191.2,644-662).
caggcgacgagtttgaact

SEQ ID NO: 311008 - DNA, 19 bp, Homo sapiens
  siRNA target sequence for BCL2L1 (NM_001191.2,708-726).
caccccagggacagcatat

SEQ ID NO: 311009 - DNA, 19 bp, Homo sapiens
  siRNA target sequence for BCL2L1 (NM_001191.2,710-728).
ccccagggacagcatatca

SEQ ID NO: 311010 - DNA, 19 bp, Homo sapiens
  siRNA target sequence for BCL2L1 (NM_001191.2,722-740).
catatcagagctttgaaca

SEQ ID NO: 311011 - DNA, 19 bp, Homo sapiens
  siRNA target sequence for BCL2L1 (NM_001191.2,731-749).
gctttgaacaggatacttt

SEQ ID NO: 311012 - DNA, 19 bp, Homo sapiens
  siRNA target sequence for API5 (NM_006595.1,137-155).
cgacagtagaggagcttta

SEQ ID NO: 311013 - DNA, 19 bp, Homo sapiens
  siRNA target sequence for API5 (NM_006595.1,147-165).
ggagctttaccgcaattat

SEQ ID NO: 311014 - DNA, 19 bp, Homo sapiens
  siRNA target sequence for API5 (NM_006595.1,201-219).
gcataaagatgcctatcaa

SEQ ID NO: 311015 - DNA, 19 bp, Homo sapiens
  siRNA target sequence for API5 (NM_006595.1,208-226).
gatgcctatcaagtgatat

SEQ ID NO: 311016 - DNA, 19 bp, Homo sapiens
  siRNA target sequence for API5 (NM_006595.1,212-230).
cctatcaagtgatattgga

SEQ ID NO: 311017 - DNA, 19 bp, Homo sapiens
  siRNA target sequence for API5 (NM_006595.1,213-231).
ctatcaagtgatattggat

SEQ ID NO: 311018 - DNA, 19 bp, Homo sapiens
  siRNA target sequence for API5 (NM_006595.1,237-255).
gaaaggtggtactaaggaa

SEQ ID NO: 311019 - DNA, 19 bp, Homo sapiens
  siRNA target sequence for API5 (NM_006595.1,309-327).
ggctgattctgctatcaat

SEQ ID NO: 311020 - DNA, 19 bp, Homo sapiens
  siRNA target sequence for API5 (NM_006595.1,320-338).
ctatcaatgcacagttaga

SEQ ID NO: 311021 - DNA, 19 bp, Homo sapiens
  siRNA target sequence for API5 (NM_006595.1,362-380).
ctattcgacgtcaagcaat

SEQ ID NO: 311022 - DNA, 19 bp, Homo sapiens
  siRNA target sequence for API5 (NM_006595.1,371-389).
gtcaagcaattaaagaact

SEQ ID NO: 311023 - DNA, 19 bp, Homo sapiens
  siRNA target sequence for API5 (NM_006595.1,419-437).
ctcgagtggcagatatact

SEQ ID NO: 311024 - DNA, 19 bp, Homo sapiens
  siRNA target sequence for API5 (NM_006595.1,421-439).
cgagtggcagatatactaa

SEQ ID NO: 311025 - DNA, 19 bp, Homo sapiens
  siRNA target sequence for API5 (NM_006595.1,462-480).
ctctgcagaatttaaccta

SEQ ID NO: 311026 - DNA, 19 bp, Homo sapiens
  siRNA target sequence for API5 (NM_006595.1,481-499).
gtgaacaatgccctattaa

SEQ ID NO: 311027 - DNA, 19 bp, Homo sapiens
  siRNA target sequence for API5 (NM_006595.1,486-504).
caatgccctattaagtata

SEQ ID NO: 311028 - DNA, 19 bp, Homo sapiens
  siRNA target sequence for API5 (NM_006595.1,490-508).
gccctattaagtatattta

SEQ ID NO: 311029 - DNA, 19 bp, Homo sapiens
  siRNA target sequence for API5 (NM_006595.1,491-509).
ccctattaagtatatttaa

SEQ ID NO: 311030 - DNA, 19 bp, Homo sapiens
  siRNA target sequence for API5 (NM_006595.1,513-531).
ggatgcaaaagggacttta

SEQ ID NO: 311031 - DNA, 19 bp, Homo sapiens
  siRNA target sequence for API5 (NM_006595.1,614-632).
ctttaccagatgaagtctt

SEQ ID NO: 311032 - DNA, 19 bp, Homo sapiens
  siRNA target sequence for API5 (NM_006595.1,645-663).
ggaagagcttatactaact

SEQ ID NO: 311033 - DNA, 19 bp, Homo sapiens
  siRNA target sequence for API5 (NM_006595.1,649-667).
gagcttatactaactgaat

SEQ ID NO: 311034 - DNA, 19 bp, Homo sapiens
  siRNA target sequence for API5 (NM_006595.1,833-851).
gtgtggacaggctcttaca

SEQ ID NO: 311035 - DNA, 19 bp, Homo sapiens
  siRNA target sequence for API5 (NM_006595.1,835-853).
gtggacaggctcttacagt

SEQ ID NO: 311036 - DNA, 19 bp, Homo sapiens
  siRNA target sequence for API5 (NM_006595.1,896-914).
ccacaaggtttgtgacata

SEQ ID NO: 311037 - DNA, 19 bp, Homo sapiens
  siRNA target sequence for API5 (NM_006595.1,897-915).
cacaaggtttgtgacatat

SEQ ID NO: 311038 - DNA, 19 bp, Homo sapiens
  siRNA target sequence for API5 (NM_006595.1,979-997).
cagttggaggtattgaaat

SEQ ID NO: 311039 - DNA, 19 bp, Homo sapiens
  siRNA target sequence for API5 (NM_006595.1,1025-1043).
gtgacatggaaaaactaga

SEQ ID NO: 311040 - DNA, 19 bp, Homo sapiens
  siRNA target sequence for API5 (NM_006595.1,1066-1084).
gataagttattggaataca

SEQ ID NO: 311041 - DNA, 19 bp, Homo sapiens
  siRNA target sequence for API5 (NM_006595.1,1115-1133).
gagagaatgctggtaatga

SEQ ID NO: 311042 - DNA, 19 bp, Homo sapiens
  siRNA target sequence for API5 (NM_006595.1,1159-1177).
gtggaatgtttgttgtaca

SEQ ID NO: 311043 - DNA, 19 bp, Homo sapiens
  siRNA target sequence for API5 (NM_006595.1,1329-1347).
gggtgaggccttaaaaaca

SEQ ID NO: 311044 - DNA, 19 bp, Homo sapiens
  siRNA target sequence for API5 (NM_006595.1,1368-1386).
cgttgcattgaaaataaca

SEQ ID NO: 311045 - DNA, 19 bp, Homo sapiens
  siRNA target sequence for API5 (NM_006595.1,1494-1512).
gagagccagtgaagataca

SEQ ID NO: 311046 - DNA, 19 bp, Homo sapiens
  siRNA target sequence for API5 (NM_006595.1,1579-1597).
cctcccagtgggaaatata

SEQ ID NO: 311047 - DNA, 19 bp, Homo sapiens
  siRNA target sequence for API5 (NM_006595.1,1589-1607).
ggaaatatagcagcaattt

SEQ ID NO: 311048 - DNA, 19 bp, Homo sapiens
  siRNA target sequence for API5 (NM_006595.1,1599-1617).
cagcaatttgggcaacttt

SEQ ID NO: 311049 - DNA, 19 bp, Homo sapiens
  siRNA target sequence for BCL2A1 (NM_004049.2,215-233).
ggctggctcaggactatct

SEQ ID NO: 311050 - DNA, 19 bp, Homo sapiens
  siRNA target sequence for BCL2A1 (NM_004049.2,234-252).
gcagtgcgtcctacagata

SEQ ID NO: 311051 - DNA, 19 bp, Homo sapiens
  siRNA target sequence for BCL2A1 (NM_004049.2,262-280).
ggatcaggtccaagcaaaa

SEQ ID NO: 311052 - DNA, 19 bp, Homo sapiens
  siRNA target sequence for BCL2A1 (NM_004049.2,281-299).
cgtccagagtgctacaaaa

SEQ ID NO: 311053 - DNA, 19 bp, Homo sapiens
  siRNA target sequence for BCL2A1 (NM_004049.2,282-300).
gtccagagtgctacaaaat

SEQ ID NO: 311054 - DNA, 19 bp, Homo sapiens
  siRNA target sequence for BCL2A1 (NM_004049.2,347-365).
gcttggacaatgttaatgt

SEQ ID NO: 311055 - DNA, 19 bp, Homo sapiens
  siRNA target sequence for BCL2A1 (NM_004049.2,380-398).
ctgccagaacactattcaa

SEQ ID NO: 311056 - DNA, 19 bp, Homo sapiens
  siRNA target sequence for BCL2A1 (NM_004049.2,389-407).
cactattcaaccaagtgat

SEQ ID NO: 311057 - DNA, 19 bp, Homo sapiens
  siRNA target sequence for BCL2A1 (NM_004049.2,421-439).
gaagacggcatcattaact

SEQ ID NO: 311058 - DNA, 19 bp, Homo sapiens
  siRNA target sequence for BCL2A1 (NM_004049.2,432-450).
cattaactggggaagaatt

SEQ ID NO: 311059 - DNA, 19 bp, Homo sapiens
  siRNA target sequence for BCL2A1 (NM_004049.2,441-459).
gggaagaattgtaaccata

SEQ ID NO: 311060 - DNA, 19 bp, Homo sapiens
  siRNA target sequence for BCL2A1 (NM_004049.2,463-481).
gcatttgaaggtattctca

SEQ ID NO: 311061 - DNA, 19 bp, Homo sapiens
  siRNA target sequence for BCL2A1 (NM_004049.2,511-529).
ccggatgtggatacctata

SEQ ID NO: 311062 - DNA, 19 bp, Homo sapiens
  siRNA target sequence for BCL2A1 (NM_004049.2,525-543).
ctataaggagatttcatat

SEQ ID NO: 311063 - DNA, 19 bp, Homo sapiens
  siRNA target sequence for BCL2A1 (NM_004049.2,547-565).
gttgcggagttcataatga

SEQ ID NO: 311064 - DNA, 19 bp, Homo sapiens
  siRNA target sequence for BCL2A1 (NM_004049.2,550-568).
gcggagttcataatgaata

SEQ ID NO: 311065 - DNA, 19 bp, Homo sapiens
  siRNA target sequence for BCL2L2 (NM_004050.2,219-237).
gcagactttgtaggttata

SEQ ID NO: 311066 - DNA, 19 bp, Homo sapiens
  siRNA target sequence for BCL2L2 (NM_004050.2,220-238).
cagactttgtaggttataa

SEQ ID NO: 311067 - DNA, 19 bp, Homo sapiens
  siRNA target sequence for BCL2L2 (NM_004050.2,415-433).
cccaggtctccgatgaact

SEQ ID NO: 311068 - DNA, 19 bp, Homo sapiens
  siRNA target sequence for BCL2L2 (NM_004050.2,416-434).
ccaggtctccgatgaactt

SEQ ID NO: 311069 - DNA, 19 bp, Homo sapiens
  siRNA target sequence for BCL2L2 (NM_004050.2,417-435).
caggtctccgatgaacttt

SEQ ID NO: 311070 - DNA, 19 bp, Homo sapiens
  siRNA target sequence for BCL2L2 (NM_004050.2,419-437).
ggtctccgatgaacttttt

SEQ ID NO: 311071 - DNA, 19 bp, Homo sapiens
  siRNA target sequence for BCL2L2 (NM_004050.2,422-440).
ctccgatgaactttttcaa

SEQ ID NO: 311072 - DNA, 19 bp, Homo sapiens
  siRNA target sequence for BCL2L2 (NM_004050.2,732-750).
gtaggggccttttttgcta

SEQ ID NO: 311073 - DNA, 19 bp, Homo sapiens
  siRNA target sequence for BECN1 (NM_003766.2,195-213).
gcagccagcccctgaaact

SEQ ID NO: 311074 - DNA, 19 bp, Homo sapiens
  siRNA target sequence for BECN1 (NM_003766.2,362-380).
ggtgtctctcgcagattca

SEQ ID NO: 311075 - DNA, 19 bp, Homo sapiens
  siRNA target sequence for BECN1 (NM_003766.2,363-381).
gtgtctctcgcagattcat

SEQ ID NO: 311076 - DNA, 19 bp, Homo sapiens
  siRNA target sequence for BECN1 (NM_003766.2,547-565).
ggaatgcacagatactctt

SEQ ID NO: 311077 - DNA, 19 bp, Homo sapiens
  siRNA target sequence for BECN1 (NM_003766.2,655-673).
ggatgacagtgaacagtta

SEQ ID NO: 311078 - DNA, 19 bp, Homo sapiens
  siRNA target sequence for BECN1 (NM_003766.2,928-946).
gaaaaccaacgtctttaat

SEQ ID NO: 311079 - DNA, 19 bp, Homo sapiens
  siRNA target sequence for BECN1 (NM_003766.2,971-989).
ggacagtttggcacaatca

SEQ ID NO: 311080 - DNA, 19 bp, Homo sapiens
  siRNA target sequence for BECN1 (NM_003766.2,972-990).
gacagtttggcacaatcaa

SEQ ID NO: 311081 - DNA, 19 bp, Homo sapiens
  siRNA target sequence for BECN1 (NM_003766.2,974-992).
cagtttggcacaatcaata

SEQ ID NO: 311082 - DNA, 19 bp, Homo sapiens
  siRNA target sequence for BECN1 (NM_003766.2,980-998).
ggcacaatcaataacttca

SEQ ID NO: 311083 - DNA, 19 bp, Homo sapiens
  siRNA target sequence for BECN1 (NM_003766.2,1017-1035).
gtgttcccgtggaatggaa

SEQ ID NO: 311084 - DNA, 19 bp, Homo sapiens
  siRNA target sequence for BECN1 (NM_003766.2,1022-1040).
cccgtggaatggaatgaga

SEQ ID NO: 311085 - DNA, 19 bp, Homo sapiens
  siRNA target sequence for BECN1 (NM_003766.2,1024-1042).
cgtggaatggaatgagatt

SEQ ID NO: 311086 - DNA, 19 bp, Homo sapiens
  siRNA target sequence for BECN1 (NM_003766.2,1027-1045).
ggaatggaatgagattaat

SEQ ID NO: 311087 - DNA, 19 bp, Homo sapiens
  siRNA target sequence for BECN1 (NM_003766.2,1113-1131).
gataccgacttgttcctta

SEQ ID NO: 311088 - DNA, 19 bp, Homo sapiens
  siRNA target sequence for BECN1 (NM_003766.2,1127-1145).
ccttacggaaaccattcat

SEQ ID NO: 311089 - DNA, 19 bp, Homo sapiens
  siRNA target sequence for BECN1 (NM_003766.2,1128-1146).
cttacggaaaccattcata

SEQ ID NO: 311090 - DNA, 19 bp, Homo sapiens
  siRNA target sequence for BECN1 (NM_003766.2,1153-1171).
gtctctgacagacaaatct

SEQ ID NO: 311091 - DNA, 19 bp, Homo sapiens
  siRNA target sequence for BECN1 (NM_003766.2,1170-1188).
ctaaggagctgccgttata

SEQ ID NO: 311092 - DNA, 19 bp, Homo sapiens
  siRNA target sequence for BECN1 (NM_003766.2,1285-1303).
gaaaggcgagacacgtttt

SEQ ID NO: 311093 - DNA, 19 bp, Homo sapiens
  siRNA target sequence for BECN1 (NM_003766.2,1290-1308).
gcgagacacgtttttgtct

SEQ ID NO: 311094 - DNA, 19 bp, Homo sapiens
  siRNA target sequence for BECN1 (NM_003766.2,1291-1309).
cgagacacgtttttgtctt

SEQ ID NO: 311095 - DNA, 19 bp, Homo sapiens
  siRNA target sequence for BECN1 (NM_003766.2,1355-1373).
ggcagtggcggctcctatt

SEQ ID NO: 311096 - DNA, 19 bp, Homo sapiens
  siRNA target sequence for BECN1 (NM_003766.2,1359-1377).
gtggcggctcctattccat

SEQ ID NO: 311097 - DNA, 19 bp, Homo sapiens
  siRNA target sequence for BECN1 (NM_003766.2,1363-1381).
cggctcctattccatcaaa

SEQ ID NO: 311098 - DNA, 19 bp, Homo sapiens
  siRNA target sequence for BECN1 (NM_003766.2,1364-1382).
ggctcctattccatcaaaa

SEQ ID NO: 311099 - DNA, 19 bp, Homo sapiens
  siRNA target sequence for BECN1 (NM_003766.2,1455-1473).
cttgggtgtcctcacaatt

SEQ ID NO: 311100 - DNA, 19 bp, Homo sapiens
  siRNA target sequence for BIRC2 (NM_001166.2,1189-1207).
cccaggtccctcgtatcaa

SEQ ID NO: 311101 - DNA, 19 bp, Homo sapiens
  siRNA target sequence for BIRC2 (NM_001166.2,1190-1208).
ccaggtccctcgtatcaaa

SEQ ID NO: 311102 - DNA, 19 bp, Homo sapiens
  siRNA target sequence for BIRC2 (NM_001166.2,1191-1209).
caggtccctcgtatcaaaa

SEQ ID NO: 311103 - DNA, 19 bp, Homo sapiens
  siRNA target sequence for BIRC2 (NM_001166.2,1194-1212).
gtccctcgtatcaaaacat

SEQ ID NO: 311104 - DNA, 19 bp, Homo sapiens
  siRNA target sequence for BIRC2 (NM_001166.2,1196-1214).
ccctcgtatcaaaacatta

SEQ ID NO: 311105 - DNA, 19 bp, Homo sapiens
  siRNA target sequence for BIRC2 (NM_001166.2,1205-1223).
caaaacattaagagtataa

SEQ ID NO: 311106 - DNA, 19 bp, Homo sapiens
  siRNA target sequence for BIRC2 (NM_001166.2,1226-1244).
gaagatagcacgatcttgt

SEQ ID NO: 311107 - DNA, 19 bp, Homo sapiens
  siRNA target sequence for BIRC2 (NM_001166.2,1455-1473).
ctattcaaaagcataaaca

SEQ ID NO: 311108 - DNA, 19 bp, Homo sapiens
  siRNA target sequence for BIRC2 (NM_001166.2,1520-1538).
ctgggatccacctctaaga

SEQ ID NO: 311109 - DNA, 19 bp, Homo sapiens
  siRNA target sequence for BIRC2 (NM_001166.2,1522-1540).
gggatccacctctaagaat

SEQ ID NO: 311110 - DNA, 19 bp, Homo sapiens
  siRNA target sequence for BIRC2 (NM_001166.2,1523-1541).
ggatccacctctaagaata

SEQ ID NO: 311111 - DNA, 19 bp, Homo sapiens
  siRNA target sequence for BIRC2 (NM_001166.2,1537-1555).
gaatacgtctccaatgaga

SEQ ID NO: 311112 - DNA, 19 bp, Homo sapiens
  siRNA target sequence for BIRC2 (NM_001166.2,1589-1607).
gaacatagtagcttgttca

SEQ ID NO: 311113 - DNA, 19 bp, Homo sapiens
  siRNA target sequence for BIRC2 (NM_001166.2,1677-1695).
ggactaacccctacagtta

SEQ ID NO: 311114 - DNA, 19 bp, Homo sapiens
  siRNA target sequence for BIRC2 (NM_001166.2,1687-1705).
ctacagttatgcaatgagt

SEQ ID NO: 311115 - DNA, 19 bp, Homo sapiens
  siRNA target sequence for BIRC2 (NM_001166.2,1733-1751).
catatgtggccattaactt

SEQ ID NO: 311116 - DNA, 19 bp, Homo sapiens
  siRNA target sequence for BIRC2 (NM_001166.2,1741-1759).
gccattaacttttttgtca

SEQ ID NO: 311117 - DNA, 19 bp, Homo sapiens
  siRNA target sequence for BIRC2 (NM_001166.2,1829-1847).
ggtgggaagctcagtaact

SEQ ID NO: 311118 - DNA, 19 bp, Homo sapiens
  siRNA target sequence for BIRC2 (NM_001166.2,1964-1982).
catgcagctcgaatgagaa

SEQ ID NO: 311119 - DNA, 19 bp, Homo sapiens
  siRNA target sequence for BIRC2 (NM_001166.2,1973-1991).
cgaatgagaacatttatgt

SEQ ID NO: 311120 - DNA, 19 bp, Homo sapiens
  siRNA target sequence for BIRC2 (NM_001166.2,2055-2073).
gtcgcaatgatgatgtcaa

SEQ ID NO: 311121 - DNA, 19 bp, Homo sapiens
  siRNA target sequence for BIRC2 (NM_001166.2,2057-2075).
cgcaatgatgatgtcaaat

SEQ ID NO: 311122 - DNA, 19 bp, Homo sapiens
  siRNA target sequence for BIRC2 (NM_001166.2,2161-2179).
gttcttgatacgaatgaaa

SEQ ID NO: 311123 - DNA, 19 bp, Homo sapiens
  siRNA target sequence for BIRC2 (NM_001166.2,2188-2206).
gtttgttgatgagattcaa

SEQ ID NO: 311124 - DNA, 19 bp, Homo sapiens
  siRNA target sequence for BIRC2 (NM_001166.2,2200-2218).
gattcaaggtagatatcct

SEQ ID NO: 311125 - DNA, 19 bp, Homo sapiens
  siRNA target sequence for BIRC2 (NM_001166.2,2208-2226).
gtagatatcctcatcttct

SEQ ID NO: 311126 - DNA, 19 bp, Homo sapiens
  siRNA target sequence for BIRC2 (NM_001166.2,2225-2243).
cttgaacagctgttgtcaa

SEQ ID NO: 311127 - DNA, 19 bp, Homo sapiens
  siRNA target sequence for BIRC2 (NM_001166.2,2228-2246).
gaacagctgttgtcaactt

SEQ ID NO: 311128 - DNA, 19 bp, Homo sapiens
  siRNA target sequence for BIRC2 (NM_001166.2,2233-2251).
gctgttgtcaacttcagat

SEQ ID NO: 311129 - DNA, 19 bp, Homo sapiens
  siRNA target sequence for BIRC2 (NM_001166.2,2234-2252).
ctgttgtcaacttcagata

SEQ ID NO: 311130 - DNA, 19 bp, Homo sapiens
  siRNA target sequence for BIRC2 (NM_001166.2,2271-2289).
ctgacccaccaattattca

SEQ ID NO: 311131 - DNA, 19 bp, Homo sapiens
  siRNA target sequence for BIRC2 (NM_001166.2,2273-2291).
gacccaccaattattcatt

SEQ ID NO: 311132 - DNA, 19 bp, Homo sapiens
  siRNA target sequence for BIRC2 (NM_001166.2,2519-2537).
gcatcagatgatttgtcat

SEQ ID NO: 311133 - DNA, 19 bp, Homo sapiens
  siRNA target sequence for BIRC2 (NM_001166.2,2520-2538).
catcagatgatttgtcatt

SEQ ID NO: 311134 - DNA, 19 bp, Homo sapiens
  siRNA target sequence for BIRC2 (NM_001166.2,2720-2738).
gccaacatcttcaaaaact

SEQ ID NO: 311135 - DNA, 19 bp, Homo sapiens
  siRNA target sequence for BIRC2 (NM_001166.2,2753-2771).
gactctacattgtataaga

SEQ ID NO: 311136 - DNA, 19 bp, Homo sapiens
  siRNA target sequence for BIRC2 (NM_001166.2,2966-2984).
cctatttgcaggggtataa

SEQ ID NO: 311137 - DNA, 19 bp, Homo sapiens
  siRNA target sequence for BIRC2 (NM_001166.2,2967-2985).
ctatttgcaggggtataat

SEQ ID NO: 311138 - DNA, 19 bp, Homo sapiens
  siRNA target sequence for BIRC3 (NM_001165.3,2829-2847).
gcgccaacacgtttgaact

SEQ ID NO: 311139 - DNA, 19 bp, Homo sapiens
  siRNA target sequence for BIRC3 (NM_001165.3,2846-2864).
ctgaaatacgacttgtcat

SEQ ID NO: 311140 - DNA, 19 bp, Homo sapiens
  siRNA target sequence for BIRC3 (NM_001165.3,2872-2890).
gtaccgaatgtctacgtat

SEQ ID NO: 311141 - DNA, 19 bp, Homo sapiens
  siRNA target sequence for BIRC3 (NM_001165.3,2881-2899).
gtctacgtattccactttt

SEQ ID NO: 311142 - DNA, 19 bp, Homo sapiens
  siRNA target sequence for BIRC3 (NM_001165.3,3038-3056).
cataaaaagttgtatccta

SEQ ID NO: 311143 - DNA, 19 bp, Homo sapiens
  siRNA target sequence for BIRC3 (NM_001165.3,3063-3081).
gattcgttcagagtctaaa

SEQ ID NO: 311144 - DNA, 19 bp, Homo sapiens
  siRNA target sequence for BIRC3 (NM_001165.3,3075-3093).
gtctaaattccgttaacaa

SEQ ID NO: 311145 - DNA, 19 bp, Homo sapiens
  siRNA target sequence for BIRC3 (NM_001165.3,3077-3095).
ctaaattccgttaacaact

SEQ ID NO: 311146 - DNA, 19 bp, Homo sapiens
  siRNA target sequence for BIRC3 (NM_001165.3,3102-3120).
ctacctctcagcctacttt

SEQ ID NO: 311147 - DNA, 19 bp, Homo sapiens
  siRNA target sequence for BIRC3 (NM_001165.3,3204-3222).
ctccatcaaatcctgtaaa

SEQ ID NO: 311148 - DNA, 19 bp, Homo sapiens
  siRNA target sequence for BIRC3 (NM_001165.3,3239-3257).
gatttttctgccttgatga

SEQ ID NO: 311149 - DNA, 19 bp, Homo sapiens
  siRNA target sequence for BIRC3 (NM_001165.3,3271-3289).
ctgtgcaatgaataacgaa

SEQ ID NO: 311150 - DNA, 19 bp, Homo sapiens
  siRNA target sequence for BIRC3 (NM_001165.3,3273-3291).
gtgcaatgaataacgaaaa

SEQ ID NO: 311151 - DNA, 19 bp, Homo sapiens
  siRNA target sequence for BIRC3 (NM_001165.3,3286-3304).
cgaaaatgccagattactt

SEQ ID NO: 311152 - DNA, 19 bp, Homo sapiens
  siRNA target sequence for BIRC3 (NM_001165.3,3401-3419).
gcctgtggtggaaaattga

SEQ ID NO: 311153 - DNA, 19 bp, Homo sapiens
  siRNA target sequence for BIRC3 (NM_001165.3,3471-3489).
ccaaatgcccatttataga

SEQ ID NO: 311154 - DNA, 19 bp, Homo sapiens
  siRNA target sequence for BIRC3 (NM_001165.3,3496-3514).
gcttcaagacacttcaaga

SEQ ID NO: 311155 - DNA, 19 bp, Homo sapiens
  siRNA target sequence for BIRC3 (NM_001165.3,3497-3515).
cttcaagacacttcaagat

SEQ ID NO: 311156 - DNA, 19 bp, Homo sapiens
  siRNA target sequence for BIRC3 (NM_001165.3,3543-3561).
cacatgcagcccgctttaa

SEQ ID NO: 311157 - DNA, 19 bp, Homo sapiens
  siRNA target sequence for BIRC3 (NM_001165.3,3549-3567).
cagcccgctttaaaacatt

SEQ ID NO: 311158 - DNA, 19 bp, Homo sapiens
  siRNA target sequence for BIRC3 (NM_001165.3,3552-3570).
cccgctttaaaacattctt

SEQ ID NO: 311159 - DNA, 19 bp, Homo sapiens
  siRNA target sequence for BIRC3 (NM_001165.3,3578-3596).
ccctctagtgttctagtta

SEQ ID NO: 311160 - DNA, 19 bp, Homo sapiens
  siRNA target sequence for BIRC3 (NM_001165.3,3580-3598).
ctctagtgttctagttaat

SEQ ID NO: 311161 - DNA, 19 bp, Homo sapiens
  siRNA target sequence for BIRC3 (NM_001165.3,3766-3784).
ggagttcatccgtcaagtt

SEQ ID NO: 311162 - DNA, 19 bp, Homo sapiens
  siRNA target sequence for BIRC3 (NM_001165.3,3769-3787).
gttcatccgtcaagttcaa

SEQ ID NO: 311163 - DNA, 19 bp, Homo sapiens
  siRNA target sequence for BIRC3 (NM_001165.3,3789-3807).
ccagttaccctcatctact

SEQ ID NO: 311164 - DNA, 19 bp, Homo sapiens
  siRNA target sequence for BIRC3 (NM_001165.3,3790-3808).
cagttaccctcatctactt

SEQ ID NO: 311165 - DNA, 19 bp, Homo sapiens
  siRNA target sequence for BIRC3 (NM_001165.3,3852-3870).
cagagtcatcaattatcca

SEQ ID NO: 311166 - DNA, 19 bp, Homo sapiens
  siRNA target sequence for BIRC3 (NM_001165.3,3854-3872).
gagtcatcaattatccatt

SEQ ID NO: 311167 - DNA, 19 bp, Homo sapiens
  siRNA target sequence for BIRC3 (NM_001165.3,3856-3874).
gtcatcaattatccatttt

SEQ ID NO: 311168 - DNA, 19 bp, Homo sapiens
  siRNA target sequence for BIRC3 (NM_001165.3,3858-3876).
catcaattatccattttga

SEQ ID NO: 311169 - DNA, 19 bp, Homo sapiens
  siRNA target sequence for BIRC3 (NM_001165.3,3954-3972).
gtagaagcctggtaaaaca

SEQ ID NO: 311170 - DNA, 19 bp, Homo sapiens
  siRNA target sequence for BIRC3 (NM_001165.3,3992-4010).
ctagcaactggagagaatt

SEQ ID NO: 311171 - DNA, 19 bp, Homo sapiens
  siRNA target sequence for BIRC3 (NM_001165.3,4006-4024).
gaattatagactagtcaat

SEQ ID NO: 311172 - DNA, 19 bp, Homo sapiens
  siRNA target sequence for BIRC3 (NM_001165.3,4014-4032).
gactagtcaatgatcttgt

SEQ ID NO: 311173 - DNA, 19 bp, Homo sapiens
  siRNA target sequence for BIRC3 (NM_001165.3,4174-4192).
cctggatagtctactaact

SEQ ID NO: 311174 - DNA, 19 bp, Homo sapiens
  siRNA target sequence for BIRC3 (NM_001165.3,4184-4202).
ctactaactgccggaatta

SEQ ID NO: 311175 - DNA, 19 bp, Homo sapiens
  siRNA target sequence for BIRC3 (NM_001165.3,4187-4205).
ctaactgccggaattatta

SEQ ID NO: 311176 - DNA, 19 bp, Homo sapiens
  siRNA target sequence for BIRC3 (NM_001165.3,4191-4209).
ctgccggaattattaatga

SEQ ID NO: 311177 - DNA, 19 bp, Homo sapiens
  siRNA target sequence for BIRC3 (NM_001165.3,4194-4212).
ccggaattattaatgaaca

SEQ ID NO: 311178 - DNA, 19 bp, Homo sapiens
  siRNA target sequence for BIRC3 (NM_001165.3,4195-4213).
cggaattattaatgaacaa

SEQ ID NO: 311179 - DNA, 19 bp, Homo sapiens
  siRNA target sequence for BIRC3 (NM_001165.3,4197-4215).
gaattattaatgaacaaga

SEQ ID NO: 311180 - DNA, 19 bp, Homo sapiens
  siRNA target sequence for BIRC3 (NM_001165.3,4237-4255).
gacacagacgtctttacaa

SEQ ID NO: 311181 - DNA, 19 bp, Homo sapiens
  siRNA target sequence for BIRC3 (NM_001165.3,4275-4293).
cgattttagtaaaaggaaa

SEQ ID NO: 311182 - DNA, 19 bp, Homo sapiens
  siRNA target sequence for BIRC3 (NM_001165.3,4298-4316).
gcagccactgtattcagaa

SEQ ID NO: 311183 - DNA, 19 bp, Homo sapiens
  siRNA target sequence for BIRC3 (NM_001165.3,4340-4358).
gtgttatatgagcatttat

SEQ ID NO: 311184 - DNA, 19 bp, Homo sapiens
  siRNA target sequence for BIRC3 (NM_001165.3,4361-4379).
gtgcaacaggacataaaat

SEQ ID NO: 311185 - DNA, 19 bp, Homo sapiens
  siRNA target sequence for BIRC3 (NM_001165.3,4363-4381).
gcaacaggacataaaatat

SEQ ID NO: 311186 - DNA, 19 bp, Homo sapiens
  siRNA target sequence for BIRC3 (NM_001165.3,4505-4523).
ctagtagtatgcaaagatt

SEQ ID NO: 311187 - DNA, 19 bp, Homo sapiens
  siRNA target sequence for BIRC3 (NM_001165.3,4526-4544).
gctccttctttaagaaagt

SEQ ID NO: 311188 - DNA, 19 bp, Homo sapiens
  siRNA target sequence for BIRC3 (NM_001165.3,4547-4565).
cctatttgtaggagtacaa

SEQ ID NO: 311189 - DNA, 19 bp, Homo sapiens
  siRNA target sequence for BIRC3 (NM_001165.3,4548-4566).
ctatttgtaggagtacaat

SEQ ID NO: 311190 - DNA, 19 bp, Homo sapiens
  siRNA target sequence for BIRC8 (NM_033341.2,1336-1354).
ctataggtcaagaggataa

SEQ ID NO: 311191 - DNA, 19 bp, Homo sapiens
  siRNA target sequence for BIRC8 (NM_033341.2,1509-1527).
gagggagctctggtacaaa

SEQ ID NO: 311192 - DNA, 19 bp, Homo sapiens
  siRNA target sequence for BIRC8 (NM_033341.2,1520-1538).
ggtacaaactaccaagaaa

SEQ ID NO: 311193 - DNA, 19 bp, Homo sapiens
  siRNA target sequence for BIRC8 (NM_033341.2,1579-1597).
ctaatcctatgctacaaga

SEQ ID NO: 311194 - DNA, 19 bp, Homo sapiens
  siRNA target sequence for BIRC8 (NM_033341.2,1600-1618).
ctatacgaatgggatttga

SEQ ID NO: 311195 - DNA, 19 bp, Homo sapiens
  siRNA target sequence for BIRC8 (NM_033341.2,1617-1635).
gatttcaaggacgttaaga

SEQ ID NO: 311196 - DNA, 19 bp, Homo sapiens
  siRNA target sequence for BIRC8 (NM_033341.2,1643-1661).
ggaggaaagaattcaaaca

SEQ ID NO: 311197 - DNA, 19 bp, Homo sapiens
  siRNA target sequence for BIRC8 (NM_033341.2,1838-1856).
cgctgttgtttttattcct

SEQ ID NO: 311198 - DNA, 19 bp, Homo sapiens
  siRNA target sequence for BIRC8 (NM_033341.2,1910-1928).
catgtgcagcgcggttatt

SEQ ID NO: 311199 - DNA, 19 bp, Homo sapiens
  siRNA target sequence for BIRC8 (NM_033341.2,1915-1933).
gcagcgcggttattgattt

SEQ ID NO: 311200 - DNA, 19 bp, Homo sapiens
  siRNA target sequence for BIRC8 (NM_033341.2,1918-1936).
gcgcggttattgatttcaa

SEQ ID NO: 311201 - DNA, 19 bp, Homo sapiens
  siRNA target sequence for BNIP1 (NM_001205.1,29-47).
gtccacgtccggatctgta

SEQ ID NO: 311202 - DNA, 19 bp, Homo sapiens
  siRNA target sequence for BNIP1 (NM_001205.1,34-52).
cgtccggatctgtaaccaa

SEQ ID NO: 311203 - DNA, 19 bp, Homo sapiens
  siRNA target sequence for BNIP1 (NM_001205.1,39-57).
ggatctgtaaccaagagat

SEQ ID NO: 311204 - DNA, 19 bp, Homo sapiens
  siRNA target sequence for BNIP1 (NM_001205.1,40-58).
gatctgtaaccaagagatt

SEQ ID NO: 311205 - DNA, 19 bp, Homo sapiens
  siRNA target sequence for BNIP1 (NM_001205.1,45-63).
gtaaccaagagattgtcaa

SEQ ID NO: 311206 - DNA, 19 bp, Homo sapiens
  siRNA target sequence for BNIP1 (NM_001205.1,92-110).
caggatatccgtgattgtt

SEQ ID NO: 311207 - DNA, 19 bp, Homo sapiens
  siRNA target sequence for BNIP1 (NM_001205.1,94-112).
ggatatccgtgattgttca

SEQ ID NO: 311208 - DNA, 19 bp, Homo sapiens
  siRNA target sequence for BNIP1 (NM_001205.1,123-141).
gtgctcttactgaactgaa

SEQ ID NO: 311209 - DNA, 19 bp, Homo sapiens
  siRNA target sequence for BNIP1 (NM_001205.1,128-146).
cttactgaactgaatacta

SEQ ID NO: 311210 - DNA, 19 bp, Homo sapiens
  siRNA target sequence for BNIP1 (NM_001205.1,225-243).
cagagaaacaacttctact

SEQ ID NO: 311211 - DNA, 19 bp, Homo sapiens
  siRNA target sequence for BNIP1 (NM_001205.1,302-320).
gctaatctcacctgcaaaa

SEQ ID NO: 311212 - DNA, 19 bp, Homo sapiens
  siRNA target sequence for BNIP1 (NM_001205.1,324-342).
caatcgacaatctagagaa

SEQ ID NO: 311213 - DNA, 19 bp, Homo sapiens
  siRNA target sequence for BNIP1 (NM_001205.1,356-374).
cagggaggagatctcttaa

SEQ ID NO: 311214 - DNA, 19 bp, Homo sapiens
  siRNA target sequence for BNIP1 (NM_001205.1,571-589).
ccggaagcttatcacaaaa

SEQ ID NO: 311215 - DNA, 19 bp, Homo sapiens
  siRNA target sequence for BNIP1 (NM_001205.1,572-590).
cggaagcttatcacaaaat

SEQ ID NO: 311216 - DNA, 19 bp, Homo sapiens
  siRNA target sequence for BNIP1 (NM_001205.1,573-591).
ggaagcttatcacaaaata

SEQ ID NO: 311217 - DNA, 19 bp, Homo sapiens
  siRNA target sequence for BNIP1 (NM_001205.1,647-665).
cttgctacggtcctctata

SEQ ID NO: 311218 - DNA, 19 bp, Homo sapiens
  siRNA target sequence for BNIP1 (NM_001205.1,651-669).
ctacggtcctctatattgt

SEQ ID NO: 311219 - DNA, 19 bp, Homo sapiens
  siRNA target sequence for BNIP1 (NM_001205.1,655-673).
ggtcctctatattgtgaaa

SEQ ID NO: 311220 - DNA, 19 bp, Homo sapiens
  siRNA target sequence for BNIP1 (NM_013979.1,194-212).
ctctatcaaagggcattta

SEQ ID NO: 311221 - DNA, 19 bp, Homo sapiens
  siRNA target sequence for BNIP1 (NM_013979.1,217-235).
gactgcttccacatttttt

SEQ ID NO: 311222 - DNA, 19 bp, Homo sapiens
  siRNA target sequence for BNIP1 (NM_013979.1,253-271).
cctgacagacttttcttca

SEQ ID NO: 311223 - DNA, 19 bp, Homo sapiens
  siRNA target sequence for BNIP1 (NM_013979.1,256-274).
gacagacttttcttcaact

SEQ ID NO: 311224 - DNA, 19 bp, Homo sapiens
  siRNA target sequence for BNIP1 (NM_013979.1,283-301).
cttcaactctccaactaca

SEQ ID NO: 311225 - DNA, 19 bp, Homo sapiens
  siRNA target sequence for BNIP1 (NM_013979.1,294-312).
caactacacctgttacctt

SEQ ID NO: 311226 - DNA, 19 bp, Homo sapiens
  siRNA target sequence for FAIM2 (NM_012306.2,420-438).
gctgggatgaccagaaagt

SEQ ID NO: 311227 - DNA, 19 bp, Homo sapiens
  siRNA target sequence for FAIM2 (NM_012306.2,433-451).
gaaagttcgtcgagtcttt

SEQ ID NO: 311228 - DNA, 19 bp, Homo sapiens
  siRNA target sequence for FAIM2 (NM_012306.2,437-455).
gttcgtcgagtctttgtca

SEQ ID NO: 311229 - DNA, 19 bp, Homo sapiens
  siRNA target sequence for FAIM2 (NM_012306.2,441-459).
gtcgagtctttgtcagaaa

SEQ ID NO: 311230 - DNA, 19 bp, Homo sapiens
  siRNA target sequence for FAIM2 (NM_012306.2,500-518).
gctgtcgtggctctcttta

SEQ ID NO: 311231 - DNA, 19 bp, Homo sapiens
  siRNA target sequence for FAIM2 (NM_012306.2,562-580).
ctggtactgggcatcctat

SEQ ID NO: 311232 - DNA, 19 bp, Homo sapiens
  siRNA target sequence for GG2-1 (NM_014350.1,502-520).
ctatgaccgtggtcagttt

SEQ ID NO: 311233 - DNA, 19 bp, Homo sapiens
  siRNA target sequence for GG2-1 (NM_014350.1,506-524).
gaccgtggtcagtttccat

SEQ ID NO: 311234 - DNA, 19 bp, Homo sapiens
  siRNA target sequence for GG2-1 (NM_014350.1,539-557).
ctttgaccggaatgtgtta

SEQ ID NO: 311235 - DNA, 19 bp, Homo sapiens
  siRNA target sequence for GG2-1 (NM_014350.1,543-561).
gaccggaatgtgttatcca

SEQ ID NO: 311236 - DNA, 19 bp, Homo sapiens
  siRNA target sequence for GG2-1 (NM_014350.1,552-570).
gtgttatccaggctgttaa

SEQ ID NO: 311237 - DNA, 19 bp, Homo sapiens
  siRNA target sequence for GG2-1 (NM_014350.1,584-602).
gatgctgcaccaaatcatt

SEQ ID NO: 311238 - DNA, 19 bp, Homo sapiens
  siRNA target sequence for GG2-1 (NM_014350.1,623-641).
gtcacatggacgggttaat

SEQ ID NO: 311239 - DNA, 19 bp, Homo sapiens
  siRNA target sequence for GG2-1 (NM_014350.1,625-643).
cacatggacgggttaataa

SEQ ID NO: 311240 - DNA, 19 bp, Homo sapiens
  siRNA target sequence for GG2-1 (NM_014350.1,713-731).
ccacttacaaaaactatgt

SEQ ID NO: 311241 - DNA, 19 bp, Homo sapiens
  siRNA target sequence for SNCA (NM_000345.2,144-162).
caaaagagggtgttctcta

SEQ ID NO: 311242 - DNA, 19 bp, Homo sapiens
  siRNA target sequence for SNCA (NM_000345.2,158-176).
ctctatgtaggctccaaaa

SEQ ID NO: 311243 - DNA, 19 bp, Homo sapiens
  siRNA target sequence for SNCA (NM_000345.2,374-392).
gaaggaattctggaagata

SEQ ID NO: 311244 - DNA, 19 bp, Homo sapiens
  siRNA target sequence for SNCA (NM_000345.2,396-414).
ctgtggatcctgacaatga

SEQ ID NO: 311245 - DNA, 19 bp, Homo sapiens
  siRNA target sequence for SNCA (NM_000345.2,407-425).
gacaatgaggcttatgaaa

SEQ ID NO: 311246 - DNA, 19 bp, Homo sapiens
  siRNA target sequence for SNCA (NM_007308.1,315-333).
gcaaggaagggtatcaaga

SEQ ID NO: 311247 - DNA, 19 bp, Homo sapiens
  siRNA target sequence for TAX1BP1 (NM_006024.4,132-150).
cccatgtcatctttcaaaa

SEQ ID NO: 311248 - DNA, 19 bp, Homo sapiens
  siRNA target sequence for TAX1BP1 (NM_006024.4,133-151).
ccatgtcatctttcaaaat

SEQ ID NO: 311249 - DNA, 19 bp, Homo sapiens
  siRNA target sequence for TAX1BP1 (NM_006024.4,156-174).
ccaagagttaccttcctaa

SEQ ID NO: 311250 - DNA, 19 bp, Homo sapiens
  siRNA target sequence for TAX1BP1 (NM_006024.4,157-175).
caagagttaccttcctaat

SEQ ID NO: 311251 - DNA, 19 bp, Homo sapiens
  siRNA target sequence for TAX1BP1 (NM_006024.4,160-178).
gagttaccttcctaatgca

SEQ ID NO: 311252 - DNA, 19 bp, Homo sapiens
  siRNA target sequence for TAX1BP1 (NM_006024.4,179-197).
cacctggaatgtcattaca

SEQ ID NO: 311253 - DNA, 19 bp, Homo sapiens
  siRNA target sequence for TAX1BP1 (NM_006024.4,185-203).
gaatgtcattacaccttaa

SEQ ID NO: 311254 - DNA, 19 bp, Homo sapiens
  siRNA target sequence for TAX1BP1 (NM_006024.4,258-276).
ggagtactgctcgtgatta

SEQ ID NO: 311255 - DNA, 19 bp, Homo sapiens
  siRNA target sequence for TAX1BP1 (NM_006024.4,259-277).
gagtactgctcgtgattat

SEQ ID NO: 311256 - DNA, 19 bp, Homo sapiens
  siRNA target sequence for TAX1BP1 (NM_006024.4,261-279).
gtactgctcgtgattatta

SEQ ID NO: 311257 - DNA, 19 bp, Homo sapiens
  siRNA target sequence for TAX1BP1 (NM_006024.4,269-287).
cgtgattattacacgtttt

SEQ ID NO: 311258 - DNA, 19 bp, Homo sapiens
  siRNA target sequence for TAX1BP1 (NM_006024.4,292-310).
gtcccctatgcctgaacat

SEQ ID NO: 311259 - DNA, 19 bp, Homo sapiens
  siRNA target sequence for TAX1BP1 (NM_006024.4,294-312).
cccctatgcctgaacatta

SEQ ID NO: 311260 - DNA, 19 bp, Homo sapiens
  siRNA target sequence for TAX1BP1 (NM_006024.4,295-313).
ccctatgcctgaacattat

SEQ ID NO: 311261 - DNA, 19 bp, Homo sapiens
  siRNA target sequence for TAX1BP1 (NM_006024.4,316-334).
ggaaggatcaacagtcaat

SEQ ID NO: 311262 - DNA, 19 bp, Homo sapiens
  siRNA target sequence for TAX1BP1 (NM_006024.4,321-339).
gatcaacagtcaattgtgt

SEQ ID NO: 311263 - DNA, 19 bp, Homo sapiens
  siRNA target sequence for TAX1BP1 (NM_006024.4,341-359).
ctagcattccaaggatatt

SEQ ID NO: 311264 - DNA, 19 bp, Homo sapiens
  siRNA target sequence for TAX1BP1 (NM_006024.4,345-363).
cattccaaggatattacct

SEQ ID NO: 311265 - DNA, 19 bp, Homo sapiens
  siRNA target sequence for TAX1BP1 (NM_006024.4,442-460).
ccagtttcgagcttcttct

SEQ ID NO: 311266 - DNA, 19 bp, Homo sapiens
  siRNA target sequence for TAX1BP1 (NM_006024.4,464-482).
gttgaagagctgcttacta

SEQ ID NO: 311267 - DNA, 19 bp, Homo sapiens
  siRNA target sequence for TAX1BP1 (NM_006024.4,508-526).
gttagtggtgaccacaaaa

SEQ ID NO: 311268 - DNA, 19 bp, Homo sapiens
  siRNA target sequence for TAX1BP1 (NM_006024.4,530-548).
ggccttcttgagttgaaaa

SEQ ID NO: 311269 - DNA, 19 bp, Homo sapiens
  siRNA target sequence for TAX1BP1 (NM_006024.4,710-728).
gaagtaacacaaagcttaa

SEQ ID NO: 311270 - DNA, 19 bp, Homo sapiens
  siRNA target sequence for TAX1BP1 (NM_006024.4,794-812).
gaagatattgtgtcagtaa

SEQ ID NO: 311271 - DNA, 19 bp, Homo sapiens
  siRNA target sequence for TAX1BP1 (NM_006024.4,805-823).
gtcagtaacacataaagca

SEQ ID NO: 311272 - DNA, 19 bp, Homo sapiens
  siRNA target sequence for TAX1BP1 (NM_006024.4,807-825).
cagtaacacataaagcaat

SEQ ID NO: 311273 - DNA, 19 bp, Homo sapiens
  siRNA target sequence for TAX1BP1 (NM_006024.4,837-855).
ccgaattagacagtttaaa

SEQ ID NO: 311274 - DNA, 19 bp, Homo sapiens
  siRNA target sequence for TAX1BP1 (NM_006024.4,885-903).
gagaacaacttgaatgtca

SEQ ID NO: 311275 - DNA, 19 bp, Homo sapiens
  siRNA target sequence for TAX1BP1 (NM_006024.4,929-947).
gaactttataaggtacatt

SEQ ID NO: 311276 - DNA, 19 bp, Homo sapiens
  siRNA target sequence for TAX1BP1 (NM_006024.4,932-950).
ctttataaggtacatttga

SEQ ID NO: 311277 - DNA, 19 bp, Homo sapiens
  siRNA target sequence for TAX1BP1 (NM_006024.4,965-983).
gaaaataccaagcttatgt

SEQ ID NO: 311278 - DNA, 19 bp, Homo sapiens
  siRNA target sequence for TAX1BP1 (NM_006024.4,984-1002).
cagaggtccagactttaaa

SEQ ID NO: 311279 - DNA, 19 bp, Homo sapiens
  siRNA target sequence for TAX1BP1 (NM_006024.4,1018-1036).
caaagaaagcgtgattact

SEQ ID NO: 311280 - DNA, 19 bp, Homo sapiens
  siRNA target sequence for TAX1BP1 (NM_006024.4,1022-1040).
gaaagcgtgattactcatt

SEQ ID NO: 311281 - DNA, 19 bp, Homo sapiens
  siRNA target sequence for TAX1BP1 (NM_006024.4,1026-1044).
gcgtgattactcatttcaa

SEQ ID NO: 311282 - DNA, 19 bp, Homo sapiens
  siRNA target sequence for TAX1BP1 (NM_006024.4,1108-1126).
gcttacaacctcaagtaaa

SEQ ID NO: 311283 - DNA, 19 bp, Homo sapiens
  siRNA target sequence for TAX1BP1 (NM_006024.4,1147-1165).
ggagcaacttcgtaaagca

SEQ ID NO: 311284 - DNA, 19 bp, Homo sapiens
  siRNA target sequence for TAX1BP1 (NM_006024.4,1180-1198).
ggcaactcggcaagaagtt

SEQ ID NO: 311285 - DNA, 19 bp, Homo sapiens
  siRNA target sequence for TAX1BP1 (NM_006024.4,1182-1200).
caactcggcaagaagttgt

SEQ ID NO: 311286 - DNA, 19 bp, Homo sapiens
  siRNA target sequence for TAX1BP1 (NM_006024.4,1185-1203).
ctcggcaagaagttgtctt

SEQ ID NO: 311287 - DNA, 19 bp, Homo sapiens
  siRNA target sequence for TAX1BP1 (NM_006024.4,1262-1280).
catactgcacgcttggaaa

SEQ ID NO: 311288 - DNA, 19 bp, Homo sapiens
  siRNA target sequence for TAX1BP1 (NM_006024.4,1266-1284).
ctgcacgcttggaaaacga

SEQ ID NO: 311289 - DNA, 19 bp, Homo sapiens
  siRNA target sequence for TAX1BP1 (NM_006024.4,1346-1364).
gatcaggacaagactgata

SEQ ID NO: 311290 - DNA, 19 bp, Homo sapiens
  siRNA target sequence for TAX1BP1 (NM_006024.4,1369-1387).
ggaacacgaactaagaaga

SEQ ID NO: 311291 - DNA, 19 bp, Homo sapiens
  siRNA target sequence for TAX1BP1 (NM_006024.4,1375-1393).
cgaactaagaagagaagtt

SEQ ID NO: 311292 - DNA, 19 bp, Homo sapiens
  siRNA target sequence for TAX1BP1 (NM_006024.4,1417-1435).
gatggctgcagaccattat

SEQ ID NO: 311293 - DNA, 19 bp, Homo sapiens
  siRNA target sequence for TAX1BP1 (NM_006024.4,1420-1438).
ggctgcagaccattataaa

SEQ ID NO: 311294 - DNA, 19 bp, Homo sapiens
  siRNA target sequence for TAX1BP1 (NM_006024.4,1488-1506).
cagatcaatcagctaataa

SEQ ID NO: 311295 - DNA, 19 bp, Homo sapiens
  siRNA target sequence for TAX1BP1 (NM_006024.4,1547-1565).
gtgaatgatgcttcagtaa

SEQ ID NO: 311296 - DNA, 19 bp, Homo sapiens
  siRNA target sequence for TAX1BP1 (NM_006024.4,1586-1604).
gcctctactgtagatgtaa

SEQ ID NO: 311297 - DNA, 19 bp, Homo sapiens
  siRNA target sequence for TAX1BP1 (NM_006024.4,1587-1605).
cctctactgtagatgtaaa

SEQ ID NO: 311298 - DNA, 19 bp, Homo sapiens
  siRNA target sequence for TAX1BP1 (NM_006024.4,1631-1649).
gattttgacatagtaacaa

SEQ ID NO: 311299 - DNA, 19 bp, Homo sapiens
  siRNA target sequence for TAX1BP1 (NM_006024.4,1652-1670).
gggcaagtctgtgaaatga

SEQ ID NO: 311300 - DNA, 19 bp, Homo sapiens
  siRNA target sequence for TAX1BP1 (NM_006024.4,1856-1874).
cttaaaaggagtctagaaa

SEQ ID NO: 311301 - DNA, 19 bp, Homo sapiens
  siRNA target sequence for TAX1BP1 (NM_006024.4,1910-1928).
cagagtcctcaatgtttca

SEQ ID NO: 311302 - DNA, 19 bp, Homo sapiens
  siRNA target sequence for TAX1BP1 (NM_006024.4,1912-1930).
gagtcctcaatgtttcaaa

SEQ ID NO: 311303 - DNA, 19 bp, Homo sapiens
  siRNA target sequence for TAX1BP1 (NM_006024.4,1974-1992).
cacaaccagttctgcaata

SEQ ID NO: 311304 - DNA, 19 bp, Homo sapiens
  siRNA target sequence for TAX1BP1 (NM_006024.4,1987-2005).
gcaatatggtaatccttat

SEQ ID NO: 311305 - DNA, 19 bp, Homo sapiens
  siRNA target sequence for TAX1BP1 (NM_006024.4,2089-2107).
gggactggaagacaatgtt

SEQ ID NO: 311306 - DNA, 19 bp, Homo sapiens
  siRNA target sequence for TAX1BP1 (NM_006024.4,2115-2133).
gccagcctgctcgaaactt

SEQ ID NO: 311307 - DNA, 19 bp, Homo sapiens
  siRNA target sequence for TAX1BP1 (NM_006024.4,2117-2135).
cagcctgctcgaaacttta

SEQ ID NO: 311308 - DNA, 19 bp, Homo sapiens
  siRNA target sequence for TAX1BP1 (NM_006024.4,2119-2137).
gcctgctcgaaactttagt

SEQ ID NO: 311309 - DNA, 19 bp, Homo sapiens
  siRNA target sequence for TAX1BP1 (NM_006024.4,2201-2219).
gatcctccaagtcaacatt

SEQ ID NO: 311310 - DNA, 19 bp, Homo sapiens
  siRNA target sequence for TAX1BP1 (NM_006024.4,2228-2246).
catgggacaggcttttgct

SEQ ID NO: 311311 - DNA, 19 bp, Homo sapiens
  siRNA target sequence for TAX1BP1 (NM_006024.4,2275-2293).
gtgtcccctctgtgagtta

SEQ ID NO: 311312 - DNA, 19 bp, Homo sapiens
  siRNA target sequence for TAX1BP1 (NM_006024.4,2277-2295).
gtcccctctgtgagttaat

SEQ ID NO: 311313 - DNA, 19 bp, Homo sapiens
  siRNA target sequence for TAX1BP1 (NM_006024.4,2279-2297).
cccctctgtgagttaatgt

SEQ ID NO: 311314 - DNA, 19 bp, Homo sapiens
  siRNA target sequence for TAX1BP1 (NM_006024.4,2280-2298).
ccctctgtgagttaatgtt

SEQ ID NO: 311315 - DNA, 19 bp, Homo sapiens
  siRNA target sequence for TAX1BP1 (NM_006024.4,2308-2326).
ctatgatcagagcaaattt

SEQ ID NO: 311316 - DNA, 19 bp, Homo sapiens
  siRNA target sequence for TAX1BP1 (NM_006024.4,2374-2392).
gcagttccctcctgactat

SEQ ID NO: 311317 - DNA, 19 bp, Homo sapiens
  siRNA target sequence for TAX1BP1 (NM_006024.4,2393-2411).
gaccagcaggtgtttgaaa

SEQ ID NO: 311318 - DNA, 19 bp, Homo sapiens
  siRNA target sequence for TAX1BP1 (NM_006024.4,2422-2440).
gacccattttgatcagaat

SEQ ID NO: 311319 - DNA, 19 bp, Homo sapiens
  siRNA target sequence for TAX1BP1 (NM_006024.4,2424-2442).
cccattttgatcagaatgt

SEQ ID NO: 311320 - DNA, 19 bp, Homo sapiens
  siRNA target sequence for TOSO (NM_005449.3,367-385).
cgagttactctgaagcaat

SEQ ID NO: 311321 - DNA, 19 bp, Homo sapiens
  siRNA target sequence for TOSO (NM_005449.3,368-386).
gagttactctgaagcaata

SEQ ID NO: 311322 - DNA, 19 bp, Homo sapiens
  siRNA target sequence for TOSO (NM_005449.3,550-568).
cctgagactccaaaatggt

SEQ ID NO: 311323 - DNA, 19 bp, Homo sapiens
  siRNA target sequence for TOSO (NM_005449.3,555-573).
gactccaaaatggtttcat

SEQ ID NO: 311324 - DNA, 19 bp, Homo sapiens
  siRNA target sequence for TOSO (NM_005449.3,585-603).
gttccagatgcctgcatat

SEQ ID NO: 311325 - DNA, 19 bp, Homo sapiens
  siRNA target sequence for TOSO (NM_005449.3,595-613).
cctgcatatgccagttctt

SEQ ID NO: 311326 - DNA, 19 bp, Homo sapiens
  siRNA target sequence for TOSO (NM_005449.3,606-624).
cagttcttccaaattcgta

SEQ ID NO: 311327 - DNA, 19 bp, Homo sapiens
  siRNA target sequence for TOSO (NM_005449.3,714-732).
gtccagagcatcttcagta

SEQ ID NO: 311328 - DNA, 19 bp, Homo sapiens
  siRNA target sequence for TOSO (NM_005449.3,1063-1081).
cgaccgcgctcccaaaaca

SEQ ID NO: 311329 - DNA, 19 bp, Homo sapiens
  siRNA target sequence for TOSO (NM_005449.3,1064-1082).
gaccgcgctcccaaaacaa

SEQ ID NO: 311330 - DNA, 19 bp, Homo sapiens
  siRNA target sequence for TOSO (NM_005449.3,1066-1084).
ccgcgctcccaaaacaaca

SEQ ID NO: 311331 - DNA, 19 bp, Homo sapiens
  siRNA target sequence for TOSO (NM_005449.3,1067-1085).
cgcgctcccaaaacaacat

SEQ ID NO: 311332 - DNA, 19 bp, Homo sapiens
  siRNA target sequence for TOSO (NM_005449.3,1069-1087).
cgctcccaaaacaacatct

SEQ ID NO: 311333 - DNA, 19 bp, Homo sapiens
  siRNA target sequence for TOSO (NM_005449.3,1070-1088).
gctcccaaaacaacatcta

SEQ ID NO: 311334 - DNA, 19 bp, Homo sapiens
  siRNA target sequence for TOSO (NM_005449.3,1180-1198).
ccgctgcaggtgtctgaat

SEQ ID NO: 311335 - DNA, 19 bp, Homo sapiens
  siRNA target sequence for MCL1 (NM_021960.3,568-586).
ggtcggggaatctggtaat

SEQ ID NO: 311336 - DNA, 19 bp, Homo sapiens
  siRNA target sequence for MCL1 (NM_021960.3,569-587).
gtcggggaatctggtaata

SEQ ID NO: 311337 - DNA, 19 bp, Homo sapiens
  siRNA target sequence for MCL1 (NM_021960.3,572-590).
ggggaatctggtaataaca

SEQ ID NO: 311338 - DNA, 19 bp, Homo sapiens
  siRNA target sequence for MCL1 (NM_021960.3,661-679).
gtcgctggagattatctct

SEQ ID NO: 311339 - DNA, 19 bp, Homo sapiens
  siRNA target sequence for MCL1 (NM_021960.3,848-866).
gaagacgatgtgaaatcgt

SEQ ID NO: 311340 - DNA, 19 bp, Homo sapiens
  siRNA target sequence for MCL1 (NM_021960.3,864-882).
cgttgtctcgagtgatgat

SEQ ID NO: 311341 - DNA, 19 bp, Homo sapiens
  siRNA target sequence for MCL1 (NM_021960.3,872-890).
cgagtgatgatccatgttt

SEQ ID NO: 311342 - DNA, 19 bp, Homo sapiens
  siRNA target sequence for MCL1 (NM_021960.3,873-891).
gagtgatgatccatgtttt

SEQ ID NO: 311343 - DNA, 19 bp, Homo sapiens
  siRNA target sequence for MCL1 (NM_021960.3,919-937).
gattgtgactctcatttct

SEQ ID NO: 311344 - DNA, 19 bp, Homo sapiens
  siRNA target sequence for MCL1 (NM_021960.3,945-963).
cctttgtggctaaacactt

SEQ ID NO: 311345 - DNA, 19 bp, Homo sapiens
  siRNA target sequence for MCL1 (NM_021960.3,950-968).
gtggctaaacacttgaaga

SEQ ID NO: 311346 - DNA, 19 bp, Homo sapiens
  siRNA target sequence for MCL1 (NM_021960.3,961-979).
cttgaagaccataaaccaa

SEQ ID NO: 311347 - DNA, 19 bp, Homo sapiens
  siRNA target sequence for MCL1 (NM_021960.3,985-1003).
ctgcatcgaaccattagca

SEQ ID NO: 311348 - DNA, 19 bp, Homo sapiens
  siRNA target sequence for MCL1 (NM_021960.3,991-1009).
cgaaccattagcagaaagt

SEQ ID NO: 311349 - DNA, 19 bp, Homo sapiens
  siRNA target sequence for MCL1 (NM_021960.3,1018-1036).
cgttctcgtaaggacaaaa

SEQ ID NO: 311350 - DNA, 19 bp, Homo sapiens
  siRNA target sequence for MCL1 (NM_021960.3,1038-1056).
gggactggctagttaaaca

SEQ ID NO: 311351 - DNA, 19 bp, Homo sapiens
  siRNA target sequence for MCL1 (NM_021960.3,1039-1057).
ggactggctagttaaacaa

SEQ ID NO: 311352 - DNA, 19 bp, Homo sapiens
  siRNA target sequence for MCL1 (NM_021960.3,1042-1060).
ctggctagttaaacaaaga

SEQ ID NO: 311353 - DNA, 19 bp, Homo sapiens
  siRNA target sequence for MCL1 (NM_021960.3,1157-1175).
gctggtttggcatatctaa

SEQ ID NO: 311354 - DNA, 19 bp, Homo sapiens
  siRNA target sequence for MCL1 (NM_021960.3,1158-1176).
ctggtttggcatatctaat

SEQ ID NO: 311355 - DNA, 19 bp, Homo sapiens
  siRNA target sequence for MCL1 (NM_021960.3,1160-1178).
ggtttggcatatctaataa

SEQ ID NO: 311356 - DNA, 19 bp, Homo sapiens
  siRNA target sequence for AXUD1 (NM_033027.2,410-428).
gtttcacccccctgtctat

SEQ ID NO: 311357 - DNA, 19 bp, Homo sapiens
  siRNA target sequence for AXUD1 (NM_033027.2,630-648).
gctccgccagcgcttgaaa

SEQ ID NO: 311358 - DNA, 19 bp, Homo sapiens
  siRNA target sequence for AXUD1 (NM_033027.2,1046-1064).
ccatgggccgtgtggaatt

SEQ ID NO: 311359 - DNA, 19 bp, Homo sapiens
  siRNA target sequence for AXUD1 (NM_033027.2,1047-1065).
catgggccgtgtggaattt

SEQ ID NO: 311360 - DNA, 19 bp, Homo sapiens
  siRNA target sequence for AXUD1 (NM_033027.2,1052-1070).
gccgtgtggaatttaatca

SEQ ID NO: 311361 - DNA, 19 bp, Homo sapiens
  siRNA target sequence for AXUD1 (NM_033027.2,1076-1094).
gagttcagacccatttcat

SEQ ID NO: 311362 - DNA, 19 bp, Homo sapiens
  siRNA target sequence for AXUD1 (NM_033027.2,1384-1402).
ctggcacgcatcttgagtt

SEQ ID NO: 311363 - DNA, 19 bp, Homo sapiens
  siRNA target sequence for AXUD1 (NM_033027.2,1387-1405).
gcacgcatcttgagtttca

SEQ ID NO: 311364 - DNA, 19 bp, Homo sapiens
  siRNA target sequence for AXUD1 (NM_033027.2,1486-1504).
ccagctgacatctttggta

SEQ ID NO: 311365 - DNA, 19 bp, Homo sapiens
  siRNA target sequence for AXUD1 (NM_033027.2,1530-1548).
ctggacccacagctattct

SEQ ID NO: 311366 - DNA, 19 bp, Homo sapiens
  siRNA target sequence for AXUD1 (NM_033027.2,1594-1612).
gatgccagctgcttcctaa

SEQ ID NO: 311367 - DNA, 19 bp, Homo sapiens
  siRNA target sequence for AXUD1 (NM_033027.2,1738-1756).
caggctctgccagattata

SEQ ID NO: 311368 - DNA, 19 bp, Homo sapiens
  siRNA target sequence for AXUD1 (NM_033027.2,1740-1758).
ggctctgccagattatagt

SEQ ID NO: 311369 - DNA, 19 bp, Homo sapiens
  siRNA target sequence for AXUD1 (NM_033027.2,1759-1777).
ctggggcctcactacacat

SEQ ID NO: 311370 - DNA, 19 bp, Homo sapiens
  siRNA target sequence for BCL2L12 (NM_052842.2,750-768).
gggagcgtcacatgcaaat

SEQ ID NO: 311371 - DNA, 19 bp, Homo sapiens
  siRNA target sequence for BCL2L12 (NM_052842.2,751-769).
ggagcgtcacatgcaaatt

SEQ ID NO: 311372 - DNA, 19 bp, Homo sapiens
  siRNA target sequence for BCL2L12 (NM_052842.2,781-799).
cagcgttccgccctttcta

SEQ ID NO: 311373 - DNA, 19 bp, Homo sapiens
  siRNA target sequence for BCL2L12 (NM_052842.2,838-856).
cgggaaagttgaactaata

SEQ ID NO: 311374 - DNA, 19 bp, Homo sapiens
  siRNA target sequence for BCL2L12 (NM_052842.2,876-894).
ggaggagaccgcaagttga

SEQ ID NO: 311375 - DNA, 19 bp, Homo sapiens
  siRNA target sequence for BCL2L12 (NM_052842.2,1045-1063).
cagctactccagacttcta

SEQ ID NO: 311376 - DNA, 19 bp, Homo sapiens
  siRNA target sequence for BCL2L12 (NM_138639.1,1075-1093).
gagccgccttcgaagatgt

SEQ ID NO: 311377 - DNA, 19 bp, Homo sapiens
  siRNA target sequence for BCL2L12 (NM_138639.1,1078-1096).
ccgccttcgaagatgtctt

SEQ ID NO: 311378 - DNA, 19 bp, Homo sapiens
  siRNA target sequence for BCL2L12 (NM_138639.1,1401-1419).
gcctgtcctccgactcttt

SEQ ID NO: 311379 - DNA, 19 bp, Homo sapiens
  siRNA target sequence for BCL2L12 (NM_138639.1,1656-1674).
cacccgtggacttgaactt

SEQ ID NO: 311380 - DNA, 19 bp, Homo sapiens
  siRNA target sequence for BCLG (NM_030766.1,247-265).
gacctaaacaccatagaat

SEQ ID NO: 311381 - DNA, 19 bp, Homo sapiens
  siRNA target sequence for BCLG (NM_030766.1,369-387).
ggggaattgttcagcaaat

SEQ ID NO: 311382 - DNA, 19 bp, Homo sapiens
  siRNA target sequence for BCLG (NM_030766.1,405-423).
gtcatggccttgcagaaat

SEQ ID NO: 311383 - DNA, 19 bp, Homo sapiens
  siRNA target sequence for BCLG (NM_030766.1,434-452).
gtgagaaggccataaacct

SEQ ID NO: 311384 - DNA, 19 bp, Homo sapiens
  siRNA target sequence for BCLG (NM_030766.1,542-560).
gtcaaaggacgttggaata

SEQ ID NO: 311385 - DNA, 19 bp, Homo sapiens
  siRNA target sequence for BCLG (NM_030766.1,584-602).
ggtccaggtgtctttctaa

SEQ ID NO: 311386 - DNA, 19 bp, Homo sapiens
  siRNA target sequence for BCLG (NM_030766.1,631-649).
gtggaccccaaagtcattt

SEQ ID NO: 311387 - DNA, 19 bp, Homo sapiens
  siRNA target sequence for BCLG (NM_030766.1,660-678).
ccgagtagctgaaattgtt

SEQ ID NO: 311388 - DNA, 19 bp, Homo sapiens
  siRNA target sequence for BCLG (NM_030766.1,661-679).
cgagtagctgaaattgttt

SEQ ID NO: 311389 - DNA, 19 bp, Homo sapiens
  siRNA target sequence for BCLG (NM_030766.1,664-682).
gtagctgaaattgtttact

SEQ ID NO: 311390 - DNA, 19 bp, Homo sapiens
  siRNA target sequence for BCLG (NM_030766.1,716-734).
gcttcaagtccaaagagat

SEQ ID NO: 311391 - DNA, 19 bp, Homo sapiens
  siRNA target sequence for BCLG (NM_030766.1,717-735).
cttcaagtccaaagagatt

SEQ ID NO: 311392 - DNA, 19 bp, Homo sapiens
  siRNA target sequence for BCLG (NM_030766.1,723-741).
gtccaaagagatttttgta

SEQ ID NO: 311393 - DNA, 19 bp, Homo sapiens
  siRNA target sequence for BCLG (NM_030766.1,774-792).
cgtgcctgtagcttcaagt

SEQ ID NO: 311394 - DNA, 19 bp, Homo sapiens
  siRNA target sequence for BCLG (NM_030766.1,775-793).
gtgcctgtagcttcaagtt

SEQ ID NO: 311395 - DNA, 19 bp, Homo sapiens
  siRNA target sequence for BCLG (NM_030766.1,777-795).
gcctgtagcttcaagttct

SEQ ID NO: 311396 - DNA, 19 bp, Homo sapiens
  siRNA target sequence for BCLG (NM_030766.1,778-796).
cctgtagcttcaagttcta

SEQ ID NO: 311397 - DNA, 19 bp, Homo sapiens
  siRNA target sequence for BCLG (NM_030766.1,788-806).
caagttctaagaaagatga

SEQ ID NO: 311398 - DNA, 19 bp, Homo sapiens
  siRNA target sequence for BCLG (NM_030766.1,934-952).
ggtttgatggcctgcattt

SEQ ID NO: 311399 - DNA, 19 bp, Homo sapiens
  siRNA target sequence for BCLG (NM_138722.1,913-931).
gggctgtcctactctgttt

SEQ ID NO: 311400 - DNA, 19 bp, Homo sapiens
  siRNA target sequence for BCLG (NM_138722.1,914-932).
ggctgtcctactctgtttt

SEQ ID NO: 311401 - DNA, 19 bp, Homo sapiens
  siRNA target sequence for BCLG (NM_138722.1,966-984).
ggaccccaggggagaatca

SEQ ID NO: 311402 - DNA, 19 bp, Homo sapiens
  siRNA target sequence for BCLG (NM_138722.1,1051-1069).
gacaaccacccgatgaaca

SEQ ID NO: 311403 - DNA, 19 bp, Homo sapiens
  siRNA target sequence for BCLG (NM_138722.1,1154-1172).
ggatatcacatgaagaagt

SEQ ID NO: 311404 - DNA, 19 bp, Homo sapiens
  siRNA target sequence for BCLG (NM_138724.1,756-774).
gacccagagttctgagtat

SEQ ID NO: 311405 - DNA, 19 bp, Homo sapiens
  siRNA target sequence for BCLG (NM_138724.1,771-789).
gtatacctgaggcatttat

SEQ ID NO: 311406 - DNA, 19 bp, Homo sapiens
  siRNA target sequence for BCLG (NM_138724.1,818-836).
ggcttctcagaacacaatt

SEQ ID NO: 311407 - DNA, 19 bp, Homo sapiens
  siRNA target sequence for CARD6 (NM_032587.2,218-236).
ccctcagagatcatagaaa

SEQ ID NO: 311408 - DNA, 19 bp, Homo sapiens
  siRNA target sequence for CARD6 (NM_032587.2,286-304).
cttagacacgttaacttct

SEQ ID NO: 311409 - DNA, 19 bp, Homo sapiens
  siRNA target sequence for CARD6 (NM_032587.2,303-321).
ctcggaggctgatttctga

SEQ ID NO: 311410 - DNA, 19 bp, Homo sapiens
  siRNA target sequence for CARD6 (NM_032587.2,332-350).
gagactctggagaatgtta

SEQ ID NO: 311411 - DNA, 19 bp, Homo sapiens
  siRNA target sequence for CARD6 (NM_032587.2,369-387).
gtcggaagctgttaatttt

SEQ ID NO: 311412 - DNA, 19 bp, Homo sapiens
  siRNA target sequence for CARD6 (NM_032587.2,406-424).
ggcgacctgtcagcatttt

SEQ ID NO: 311413 - DNA, 19 bp, Homo sapiens
  siRNA target sequence for CARD6 (NM_032587.2,468-486).
gcggcttaaggcatgaagt

SEQ ID NO: 311414 - DNA, 19 bp, Homo sapiens
  siRNA target sequence for CARD6 (NM_032587.2,469-487).
cggcttaaggcatgaagtt

SEQ ID NO: 311415 - DNA, 19 bp, Homo sapiens
  siRNA target sequence for CARD6 (NM_032587.2,471-489).
gcttaaggcatgaagtttt

SEQ ID NO: 311416 - DNA, 19 bp, Homo sapiens
  siRNA target sequence for CARD6 (NM_032587.2,523-541).
gggggcaagcagtaattca

SEQ ID NO: 311417 - DNA, 19 bp, Homo sapiens
  siRNA target sequence for CARD6 (NM_032587.2,643-661).
cagggacaagaaaactagt

SEQ ID NO: 311418 - DNA, 19 bp, Homo sapiens
  siRNA target sequence for CARD6 (NM_032587.2,645-663).
gggacaagaaaactagtta

SEQ ID NO: 311419 - DNA, 19 bp, Homo sapiens
  siRNA target sequence for CARD6 (NM_032587.2,646-664).
ggacaagaaaactagttat

SEQ ID NO: 311420 - DNA, 19 bp, Homo sapiens
  siRNA target sequence for CARD6 (NM_032587.2,647-665).
gacaagaaaactagttata

SEQ ID NO: 311421 - DNA, 19 bp, Homo sapiens
  siRNA target sequence for CARD6 (NM_032587.2,742-760).
gaaagttggatgtgaagtt

SEQ ID NO: 311422 - DNA, 19 bp, Homo sapiens
  siRNA target sequence for CARD6 (NM_032587.2,755-773).
gaagttccagcaactatta

SEQ ID NO: 311423 - DNA, 19 bp, Homo sapiens
  siRNA target sequence for CARD6 (NM_032587.2,764-782).
gcaactattacatatataa

SEQ ID NO: 311424 - DNA, 19 bp, Homo sapiens
  siRNA target sequence for CARD6 (NM_032587.2,802-820).
ggagctagatgattcttta

SEQ ID NO: 311425 - DNA, 19 bp, Homo sapiens
  siRNA target sequence for CARD6 (NM_032587.2,806-824).
ctagatgattctttatact

SEQ ID NO: 311426 - DNA, 19 bp, Homo sapiens
  siRNA target sequence for CARD6 (NM_032587.2,812-830).
gattctttatacttaggaa

SEQ ID NO: 311427 - DNA, 19 bp, Homo sapiens
  siRNA target sequence for CARD6 (NM_032587.2,934-952).
ggacttcgagaattcagaa

SEQ ID NO: 311428 - DNA, 19 bp, Homo sapiens
  siRNA target sequence for CARD6 (NM_032587.2,1061-1079).
gatgtcctgttatgtttga

SEQ ID NO: 311429 - DNA, 19 bp, Homo sapiens
  siRNA target sequence for CARD6 (NM_032587.2,1064-1082).
gtcctgttatgtttgaaca

SEQ ID NO: 311430 - DNA, 19 bp, Homo sapiens
  siRNA target sequence for CARD6 (NM_032587.2,1128-1146).
ccttagatcgaggatgtaa

SEQ ID NO: 311431 - DNA, 19 bp, Homo sapiens
  siRNA target sequence for CARD6 (NM_032587.2,1166-1184).
ggagacttagcctggaatt

SEQ ID NO: 311432 - DNA, 19 bp, Homo sapiens
  siRNA target sequence for CARD6 (NM_032587.2,1167-1185).
gagacttagcctggaattt

SEQ ID NO: 311433 - DNA, 19 bp, Homo sapiens
  siRNA target sequence for CARD6 (NM_032587.2,1179-1197).
ggaatttcctgatgaaagt

SEQ ID NO: 311434 - DNA, 19 bp, Homo sapiens
  siRNA target sequence for CARD6 (NM_032587.2,1295-1313).
gaaattcgagacatacaaa

SEQ ID NO: 311435 - DNA, 19 bp, Homo sapiens
  siRNA target sequence for CARD6 (NM_032587.2,1301-1319).
cgagacatacaaaccatta

SEQ ID NO: 311436 - DNA, 19 bp, Homo sapiens
  siRNA target sequence for CARD6 (NM_032587.2,1370-1388).
caacgccaagtcatgtcaa

SEQ ID NO: 311437 - DNA, 19 bp, Homo sapiens
  siRNA target sequence for CARD6 (NM_032587.2,1489-1507).
gcagtcaacacagttttca

SEQ ID NO: 311438 - DNA, 19 bp, Homo sapiens
  siRNA target sequence for CARD6 (NM_032587.2,1512-1530).
ggcctacagaggatacaga

SEQ ID NO: 311439 - DNA, 19 bp, Homo sapiens
  siRNA target sequence for CARD6 (NM_032587.2,1566-1584).
cttttgtgcgtctaggata

SEQ ID NO: 311440 - DNA, 19 bp, Homo sapiens
  siRNA target sequence for CARD6 (NM_032587.2,1580-1598).
ggatactgtagcttctcta

SEQ ID NO: 311441 - DNA, 19 bp, Homo sapiens
  siRNA target sequence for CARD6 (NM_032587.2,1626-1644).
gccctgcccagttgaaatt

SEQ ID NO: 311442 - DNA, 19 bp, Homo sapiens
  siRNA target sequence for CARD6 (NM_032587.2,1627-1645).
ccctgcccagttgaaatta

SEQ ID NO: 311443 - DNA, 19 bp, Homo sapiens
  siRNA target sequence for CARD6 (NM_032587.2,1629-1647).
ctgcccagttgaaattaca

SEQ ID NO: 311444 - DNA, 19 bp, Homo sapiens
  siRNA target sequence for CARD6 (NM_032587.2,1631-1649).
gcccagttgaaattacaca

SEQ ID NO: 311445 - DNA, 19 bp, Homo sapiens
  siRNA target sequence for CARD6 (NM_032587.2,1648-1666).
caaaatctttcttcatcaa

SEQ ID NO: 311446 - DNA, 19 bp, Homo sapiens
  siRNA target sequence for CARD6 (NM_032587.2,1703-1721).
gatggcctggttgagataa

SEQ ID NO: 311447 - DNA, 19 bp, Homo sapiens
  siRNA target sequence for CARD6 (NM_032587.2,1706-1724).
ggcctggttgagataacat

SEQ ID NO: 311448 - DNA, 19 bp, Homo sapiens
  siRNA target sequence for CARD6 (NM_032587.2,1733-1751).
cctgatagcgatgatagaa

SEQ ID NO: 311449 - DNA, 19 bp, Homo sapiens
  siRNA target sequence for CARD6 (NM_032587.2,1734-1752).
ctgatagcgatgatagaaa

SEQ ID NO: 311450 - DNA, 19 bp, Homo sapiens
  siRNA target sequence for CARD6 (NM_032587.2,1793-1811).
ctccgtggaaatctagaaa

SEQ ID NO: 311451 - DNA, 19 bp, Homo sapiens
  siRNA target sequence for CARD6 (NM_032587.2,1821-1839).
ctcagtttggttttttgat

SEQ ID NO: 311452 - DNA, 19 bp, Homo sapiens
  siRNA target sequence for CARD6 (NM_032587.2,1889-1907).
gaatgggacttgctaatgt

SEQ ID NO: 311453 - DNA, 19 bp, Homo sapiens
  siRNA target sequence for CARD6 (NM_032587.2,2045-2063).
ggggatagaaggaagaaca

SEQ ID NO: 311454 - DNA, 19 bp, Homo sapiens
  siRNA target sequence for CARD6 (NM_032587.2,2292-2310).
ctctaatgccaattcaaga

SEQ ID NO: 311455 - DNA, 19 bp, Homo sapiens
  siRNA target sequence for CARD6 (NM_032587.2,2342-2360).
cttcagaatctctatggta

SEQ ID NO: 311456 - DNA, 19 bp, Homo sapiens
  siRNA target sequence for CARD6 (NM_032587.2,2487-2505).
ctaagtggttccatccttt

SEQ ID NO: 311457 - DNA, 19 bp, Homo sapiens
  siRNA target sequence for CARD6 (NM_032587.2,2527-2545).
ccagggccgaggtaaaagt

SEQ ID NO: 311458 - DNA, 19 bp, Homo sapiens
  siRNA target sequence for CARD6 (NM_032587.2,2528-2546).
cagggccgaggtaaaagtt

SEQ ID NO: 311459 - DNA, 19 bp, Homo sapiens
  siRNA target sequence for CARD6 (NM_032587.2,2533-2551).
ccgaggtaaaagttttggt

SEQ ID NO: 311460 - DNA, 19 bp, Homo sapiens
  siRNA target sequence for CARD6 (NM_032587.2,2534-2552).
cgaggtaaaagttttggta

SEQ ID NO: 311461 - DNA, 19 bp, Homo sapiens
  siRNA target sequence for CARD6 (NM_032587.2,2535-2553).
gaggtaaaagttttggtat

SEQ ID NO: 311462 - DNA, 19 bp, Homo sapiens
  siRNA target sequence for CARD6 (NM_032587.2,2538-2556).
gtaaaagttttggtattca

SEQ ID NO: 311463 - DNA, 19 bp, Homo sapiens
  siRNA target sequence for CARD6 (NM_032587.2,2625-2643).
gtcactcgaatggaacatt

SEQ ID NO: 311464 - DNA, 19 bp, Homo sapiens
  siRNA target sequence for CARD6 (NM_032587.2,2688-2706).
ctgagagaccacaaatgat

SEQ ID NO: 311465 - DNA, 19 bp, Homo sapiens
  siRNA target sequence for CARD6 (NM_032587.2,2728-2746).
ggcagtagcctccaagata

SEQ ID NO: 311466 - DNA, 19 bp, Homo sapiens
  siRNA target sequence for CARD6 (NM_032587.2,2815-2833).
caccagggtaacagagtta

SEQ ID NO: 311467 - DNA, 19 bp, Homo sapiens
  siRNA target sequence for CARD6 (NM_032587.2,2820-2838).
gggtaacagagttaactga

SEQ ID NO: 311468 - DNA, 19 bp, Homo sapiens
  siRNA target sequence for CARD6 (NM_032587.2,2821-2839).
ggtaacagagttaactgaa

SEQ ID NO: 311469 - DNA, 19 bp, Homo sapiens
  siRNA target sequence for CARD6 (NM_032587.2,2854-2872).
gataagaacatcccatatt

SEQ ID NO: 311470 - DNA, 19 bp, Homo sapiens
  siRNA target sequence for CARD6 (NM_032587.2,2859-2877).
gaacatcccatattggaaa

SEQ ID NO: 311471 - DNA, 19 bp, Homo sapiens
  siRNA target sequence for CARD6 (NM_032587.2,2939-2957).
caaggagtccagatgaaga

SEQ ID NO: 311472 - DNA, 19 bp, Homo sapiens
  siRNA target sequence for CARD6 (NM_032587.2,3069-3087).
ctaaacccttccattctgt

SEQ ID NO: 311473 - DNA, 19 bp, Homo sapiens
  siRNA target sequence for CARD6 (NM_032587.2,3084-3102).
ctgtgccctctcaacctaa

SEQ ID NO: 311474 - DNA, 19 bp, Homo sapiens
  siRNA target sequence for CARD6 (NM_032587.2,3086-3104).
gtgccctctcaacctaaat

SEQ ID NO: 311475 - DNA, 19 bp, Homo sapiens
  siRNA target sequence for CARD6 (NM_032587.2,3133-3151).
gccctcccaaactaaacct

SEQ ID NO: 311476 - DNA, 19 bp, Homo sapiens
  siRNA target sequence for CARD6 (NM_032587.2,3249-3267).
ccaatccttcacaagctaa

SEQ ID NO: 311477 - DNA, 19 bp, Homo sapiens
  siRNA target sequence for CARD8 (NM_014959.1,449-467).
gagatcgaagaagattata

SEQ ID NO: 311478 - DNA, 19 bp, Homo sapiens
  siRNA target sequence for CARD8 (NM_014959.1,502-520).
ggatgttgagttgattgat

SEQ ID NO: 311479 - DNA, 19 bp, Homo sapiens
  siRNA target sequence for CARD8 (NM_014959.1,503-521).
gatgttgagttgattgata

SEQ ID NO: 311480 - DNA, 19 bp, Homo sapiens
  siRNA target sequence for CARD8 (NM_014959.1,617-635).
gtgacgattgcgtttggtt

SEQ ID NO: 311481 - DNA, 19 bp, Homo sapiens
  siRNA target sequence for CARD8 (NM_014959.1,935-953).
cccatcacttccaacacat

SEQ ID NO: 311482 - DNA, 19 bp, Homo sapiens
  siRNA target sequence for CARD8 (NM_014959.1,942-960).
cttccaacacattgatcta

SEQ ID NO: 311483 - DNA, 19 bp, Homo sapiens
  siRNA target sequence for CARD8 (NM_014959.1,968-986).
ccccaccccgaagatatta

SEQ ID NO: 311484 - DNA, 19 bp, Homo sapiens
  siRNA target sequence for CARD8 (NM_014959.1,969-987).
cccaccccgaagatattaa

SEQ ID NO: 311485 - DNA, 19 bp, Homo sapiens
  siRNA target sequence for CARD8 (NM_014959.1,971-989).
caccccgaagatattaagt

SEQ ID NO: 311486 - DNA, 19 bp, Homo sapiens
  siRNA target sequence for CARD8 (NM_014959.1,1021-1039).
gctaacaaaggcgatagat

SEQ ID NO: 311487 - DNA, 19 bp, Homo sapiens
  siRNA target sequence for CARD8 (NM_014959.1,1026-1044).
caaaggcgatagatgatga

SEQ ID NO: 311488 - DNA, 19 bp, Homo sapiens
  siRNA target sequence for CARD8 (NM_014959.1,1110-1128).
ccagttatattgtgtctaa

SEQ ID NO: 311489 - DNA, 19 bp, Homo sapiens
  siRNA target sequence for CARD8 (NM_014959.1,1131-1149).
ctgctaacctgaaagtaat

SEQ ID NO: 311490 - DNA, 19 bp, Homo sapiens
  siRNA target sequence for CARD8 (NM_014959.1,1476-1494).
cacggcagagcaagaatga

SEQ ID NO: 311491 - DNA, 19 bp, Homo sapiens
  siRNA target sequence for CARD8 (NM_014959.1,1535-1553).
ctggacgtgctcttcagaa

SEQ ID NO: 311492 - DNA, 19 bp, Homo sapiens
  siRNA target sequence for CARD8 (NM_014959.1,1540-1558).
cgtgctcttcagaagcatt

SEQ ID NO: 311493 - DNA, 19 bp, Homo sapiens
  siRNA target sequence for CARD8 (NM_014959.1,1576-1594).
cctcgtgtcctatcttaga

SEQ ID NO: 311494 - DNA, 19 bp, Homo sapiens
  siRNA target sequence for CARD9 (NM_022352.2,445-463).
cgcgtcttctccatgatca

SEQ ID NO: 311495 - DNA, 19 bp, Homo sapiens
  siRNA target sequence for CARD9 (NM_022352.2,446-464).
gcgtcttctccatgatcat

SEQ ID NO: 311496 - DNA, 19 bp, Homo sapiens
  siRNA target sequence for CARD9 (NM_022352.2,1213-1231).
cgggaccagagcacacaaa

SEQ ID NO: 311497 - DNA, 19 bp, Homo sapiens
  siRNA target sequence for CARD9 (NM_052813.1,1625-1643).
gcctcaaagagagttttga

SEQ ID NO: 311498 - DNA, 19 bp, Homo sapiens
  siRNA target sequence for COP (NM_052889.1,274-292).
ggtccgatacctggaaatt

SEQ ID NO: 311499 - DNA, 19 bp, Homo sapiens
  siRNA target sequence for CTNNAL1 (NM_003798.1,124-142).
ctcgggactggagatcaaa

SEQ ID NO: 311500 - DNA, 19 bp, Homo sapiens
  siRNA target sequence for CTNNAL1 (NM_003798.1,127-145).
gggactggagatcaaaact

SEQ ID NO: 311501 - DNA, 19 bp, Homo sapiens
  siRNA target sequence for CTNNAL1 (NM_003798.1,184-202).
gatcaccacgcttattaat

SEQ ID NO: 311502 - DNA, 19 bp, Homo sapiens
  siRNA target sequence for CTNNAL1 (NM_003798.1,187-205).
caccacgcttattaatcat

SEQ ID NO: 311503 - DNA, 19 bp, Homo sapiens
  siRNA target sequence for CTNNAL1 (NM_003798.1,190-208).
cacgcttattaatcataaa

SEQ ID NO: 311504 - DNA, 19 bp, Homo sapiens
  siRNA target sequence for CTNNAL1 (NM_003798.1,192-210).
cgcttattaatcataaaga

SEQ ID NO: 311505 - DNA, 19 bp, Homo sapiens
  siRNA target sequence for CTNNAL1 (NM_003798.1,193-211).
gcttattaatcataaagat

SEQ ID NO: 311506 - DNA, 19 bp, Homo sapiens
  siRNA target sequence for CTNNAL1 (NM_003798.1,305-323).
gctatagccaatgaaaact

SEQ ID NO: 311507 - DNA, 19 bp, Homo sapiens
  siRNA target sequence for CTNNAL1 (NM_003798.1,452-470).
gacaaaacaggagtgataa

SEQ ID NO: 311508 - DNA, 19 bp, Homo sapiens
  siRNA target sequence for CTNNAL1 (NM_003798.1,492-510).
cttcagtgacaaaagtgtt

SEQ ID NO: 311509 - DNA, 19 bp, Homo sapiens
  siRNA target sequence for CTNNAL1 (NM_003798.1,495-513).
cagtgacaaaagtgttgtt

SEQ ID NO: 311510 - DNA, 19 bp, Homo sapiens
  siRNA target sequence for CTNNAL1 (NM_003798.1,517-535).
ggcagaccgagtagtcatt

SEQ ID NO: 311511 - DNA, 19 bp, Homo sapiens
  siRNA target sequence for CTNNAL1 (NM_003798.1,518-536).
gcagaccgagtagtcatta

SEQ ID NO: 311512 - DNA, 19 bp, Homo sapiens
  siRNA target sequence for CTNNAL1 (NM_003798.1,519-537).
cagaccgagtagtcattaa

SEQ ID NO: 311513 - DNA, 19 bp, Homo sapiens
  siRNA target sequence for CTNNAL1 (NM_003798.1,524-542).
cgagtagtcattaaacaga

SEQ ID NO: 311514 - DNA, 19 bp, Homo sapiens
  siRNA target sequence for CTNNAL1 (NM_003798.1,525-543).
gagtagtcattaaacagat

SEQ ID NO: 311515 - DNA, 19 bp, Homo sapiens
  siRNA target sequence for CTNNAL1 (NM_003798.1,562-580).
ggttctcgcaactatggaa

SEQ ID NO: 311516 - DNA, 19 bp, Homo sapiens
  siRNA target sequence for CTNNAL1 (NM_003798.1,563-581).
gttctcgcaactatggaaa

SEQ ID NO: 311517 - DNA, 19 bp, Homo sapiens
  siRNA target sequence for CTNNAL1 (NM_003798.1,584-602).
ctagagaaagtgaatagct

SEQ ID NO: 311518 - DNA, 19 bp, Homo sapiens
  siRNA target sequence for CTNNAL1 (NM_003798.1,610-628).
gtttgtccaaatattcagt

SEQ ID NO: 311519 - DNA, 19 bp, Homo sapiens
  siRNA target sequence for CTNNAL1 (NM_003798.1,614-632).
gtccaaatattcagtcaat

SEQ ID NO: 311520 - DNA, 19 bp, Homo sapiens
  siRNA target sequence for CTNNAL1 (NM_003798.1,664-682).
gagtggagatagacaaaat

SEQ ID NO: 311521 - DNA, 19 bp, Homo sapiens
  siRNA target sequence for CTNNAL1 (NM_003798.1,671-689).
gatagacaaaatgatttga

SEQ ID NO: 311522 - DNA, 19 bp, Homo sapiens
  siRNA target sequence for CTNNAL1 (NM_003798.1,720-738).
cagctagggcagttcttga

SEQ ID NO: 311523 - DNA, 19 bp, Homo sapiens
  siRNA target sequence for CTNNAL1 (NM_003798.1,722-740).
gctagggcagttcttgaaa

SEQ ID NO: 311524 - DNA, 19 bp, Homo sapiens
  siRNA target sequence for CTNNAL1 (NM_003798.1,727-745).
ggcagttcttgaaaagtgt

SEQ ID NO: 311525 - DNA, 19 bp, Homo sapiens
  siRNA target sequence for CTNNAL1 (NM_003798.1,755-773).
cttctcacagcttcaaaga

SEQ ID NO: 311526 - DNA, 19 bp, Homo sapiens
  siRNA target sequence for CTNNAL1 (NM_003798.1,774-792).
catgtctgaggcatcctaa

SEQ ID NO: 311527 - DNA, 19 bp, Homo sapiens
  siRNA target sequence for CTNNAL1 (NM_003798.1,793-811).
ctgcgaatcagcccataaa

SEQ ID NO: 311528 - DNA, 19 bp, Homo sapiens
  siRNA target sequence for CTNNAL1 (NM_003798.1,795-813).
gcgaatcagcccataaaaa

SEQ ID NO: 311529 - DNA, 19 bp, Homo sapiens
  siRNA target sequence for CTNNAL1 (NM_003798.1,822-840).
gagtatttgaccgtatgaa

SEQ ID NO: 311530 - DNA, 19 bp, Homo sapiens
  siRNA target sequence for CTNNAL1 (NM_003798.1,846-864).
cattggataaggtcattga

SEQ ID NO: 311531 - DNA, 19 bp, Homo sapiens
  siRNA target sequence for CTNNAL1 (NM_003798.1,934-952).
ggaattcaagatgaatatt

SEQ ID NO: 311532 - DNA, 19 bp, Homo sapiens
  siRNA target sequence for CTNNAL1 (NM_003798.1,980-998).
cagtccaaagagaaccttt

SEQ ID NO: 311533 - DNA, 19 bp, Homo sapiens
  siRNA target sequence for CTNNAL1 (NM_003798.1,1022-1040).
gagcgtatggaggacttta

SEQ ID NO: 311534 - DNA, 19 bp, Homo sapiens
  siRNA target sequence for CTNNAL1 (NM_003798.1,1024-1042).
gcgtatggaggactttact

SEQ ID NO: 311535 - DNA, 19 bp, Homo sapiens
  siRNA target sequence for CTNNAL1 (NM_003798.1,1026-1044).
gtatggaggactttactga

SEQ ID NO: 311536 - DNA, 19 bp, Homo sapiens
  siRNA target sequence for CTNNAL1 (NM_003798.1,1178-1196).
ctggaactcagtattttga

SEQ ID NO: 311537 - DNA, 19 bp, Homo sapiens
  siRNA target sequence for CTNNAL1 (NM_003798.1,1203-1221).
gtcacagtcttaatgaact

SEQ ID NO: 311538 - DNA, 19 bp, Homo sapiens
  siRNA target sequence for CTNNAL1 (NM_003798.1,1250-1268).
cagctggcagcagatctat

SEQ ID NO: 311539 - DNA, 19 bp, Homo sapiens
  siRNA target sequence for CTNNAL1 (NM_003798.1,1253-1271).
ctggcagcagatctattaa

SEQ ID NO: 311540 - DNA, 19 bp, Homo sapiens
  siRNA target sequence for CTNNAL1 (NM_003798.1,1255-1273).
ggcagcagatctattaaaa

SEQ ID NO: 311541 - DNA, 19 bp, Homo sapiens
  siRNA target sequence for CTNNAL1 (NM_003798.1,1280-1298).
gctgatcatgtggttctaa

SEQ ID NO: 311542 - DNA, 19 bp, Homo sapiens
  siRNA target sequence for CTNNAL1 (NM_003798.1,1281-1299).
ctgatcatgtggttctaaa

SEQ ID NO: 311543 - DNA, 19 bp, Homo sapiens
  siRNA target sequence for CTNNAL1 (NM_003798.1,1289-1307).
gtggttctaaaagcattaa

SEQ ID NO: 311544 - DNA, 19 bp, Homo sapiens
  siRNA target sequence for CTNNAL1 (NM_003798.1,1342-1360).
ggctgaatatgcctgtaaa

SEQ ID NO: 311545 - DNA, 19 bp, Homo sapiens
  siRNA target sequence for CTNNAL1 (NM_003798.1,1424-1442).
gaacctctggaaataacct

SEQ ID NO: 311546 - DNA, 19 bp, Homo sapiens
  siRNA target sequence for CTNNAL1 (NM_003798.1,1493-1511).
gctgctgaaacattgacat

SEQ ID NO: 311547 - DNA, 19 bp, Homo sapiens
  siRNA target sequence for CTNNAL1 (NM_003798.1,1507-1525).
gacattgcatccatctagt

SEQ ID NO: 311548 - DNA, 19 bp, Homo sapiens
  siRNA target sequence for CTNNAL1 (NM_003798.1,1574-1592).
caaattagtgacatgtcaa

SEQ ID NO: 311549 - DNA, 19 bp, Homo sapiens
  siRNA target sequence for CTNNAL1 (NM_003798.1,1642-1660).
gtatggctacctttcactt

SEQ ID NO: 311550 - DNA, 19 bp, Homo sapiens
  siRNA target sequence for CTNNAL1 (NM_003798.1,1666-1684).
gccaatgaagaataatgca

SEQ ID NO: 311551 - DNA, 19 bp, Homo sapiens
  siRNA target sequence for CTNNAL1 (NM_003798.1,1667-1685).
ccaatgaagaataatgcaa

SEQ ID NO: 311552 - DNA, 19 bp, Homo sapiens
  siRNA target sequence for CTNNAL1 (NM_003798.1,1813-1831).
gaatgagattgttcaatat

SEQ ID NO: 311553 - DNA, 19 bp, Homo sapiens
  siRNA target sequence for CTNNAL1 (NM_003798.1,1826-1844).
caatatggacggaacatgt

SEQ ID NO: 311554 - DNA, 19 bp, Homo sapiens
  siRNA target sequence for CTNNAL1 (NM_003798.1,1843-1861).
gtccagtatggcctattct

SEQ ID NO: 311555 - DNA, 19 bp, Homo sapiens
  siRNA target sequence for CTNNAL1 (NM_003798.1,1853-1871).
gcctattctctgtatttat

SEQ ID NO: 311556 - DNA, 19 bp, Homo sapiens
  siRNA target sequence for CTNNAL1 (NM_003798.1,1951-1969).
gcttacttccagtgttcaa

SEQ ID NO: 311557 - DNA, 19 bp, Homo sapiens
  siRNA target sequence for CTNNAL1 (NM_003798.1,1960-1978).
cagtgttcaagctttttca

SEQ ID NO: 311558 - DNA, 19 bp, Homo sapiens
  siRNA target sequence for CTNNAL1 (NM_003798.1,1993-2011).
cgatgacaagcttatgctt

SEQ ID NO: 311559 - DNA, 19 bp, Homo sapiens
  siRNA target sequence for CTNNAL1 (NM_003798.1,2045-2063).
caccagctccagacagtaa

SEQ ID NO: 311560 - DNA, 19 bp, Homo sapiens
  siRNA target sequence for CTNNAL1 (NM_003798.1,2093-2111).
ctaaaggttgacaagtgta

SEQ ID NO: 311561 - DNA, 19 bp, Homo sapiens
  siRNA target sequence for CTNNAL1 (NM_003798.1,2099-2117).
gttgacaagtgtattacga

SEQ ID NO: 311562 - DNA, 19 bp, Homo sapiens
  siRNA target sequence for CTNNAL1 (NM_003798.1,2127-2145).
ccatgatggctctcttagt

SEQ ID NO: 311563 - DNA, 19 bp, Homo sapiens
  siRNA target sequence for CTNNAL1 (NM_003798.1,2200-2218).
cggatgggtctcagttaca

SEQ ID NO: 311564 - DNA, 19 bp, Homo sapiens
  siRNA target sequence for CTNNAL1 (NM_003798.1,2201-2219).
ggatgggtctcagttacaa

SEQ ID NO: 311565 - DNA, 19 bp, Homo sapiens
  siRNA target sequence for CTNNAL1 (NM_003798.1,2202-2220).
gatgggtctcagttacaaa

SEQ ID NO: 311566 - DNA, 19 bp, Homo sapiens
  siRNA target sequence for CTNNAL1 (NM_003798.1,2224-2242).
ggacactatggatagtaaa

SEQ ID NO: 311567 - DNA, 19 bp, Homo sapiens
  siRNA target sequence for CTNNAL1 (NM_003798.1,2225-2243).
gacactatggatagtaaaa

SEQ ID NO: 311568 - DNA, 19 bp, Homo sapiens
  siRNA target sequence for CTNNAL1 (NM_003798.1,2227-2245).
cactatggatagtaaaact

SEQ ID NO: 311569 - DNA, 19 bp, Homo sapiens
  siRNA target sequence for MAEA (NM_005882.2,63-81).
cctacgagacgctgaacaa

SEQ ID NO: 311570 - DNA, 19 bp, Homo sapiens
  siRNA target sequence for MAEA (NM_005882.2,64-82).
ctacgagacgctgaacaaa

SEQ ID NO: 311571 - DNA, 19 bp, Homo sapiens
  siRNA target sequence for MAEA (NM_005882.2,294-312).
ggatcgagcacctcaaaga

SEQ ID NO: 311572 - DNA, 19 bp, Homo sapiens
  siRNA target sequence for MAEA (NM_005882.2,389-407).
ctgcgttgcggctactaca

SEQ ID NO: 311573 - DNA, 19 bp, Homo sapiens
  siRNA target sequence for MAEA (NM_005882.2,466-484).
cagaatccaggagttcatt

SEQ ID NO: 311574 - DNA, 19 bp, Homo sapiens
  siRNA target sequence for MAEA (NM_005882.2,485-503).
gaactcatccggcagaata

SEQ ID NO: 311575 - DNA, 19 bp, Homo sapiens
  siRNA target sequence for MAEA (NM_005882.2,488-506).
ctcatccggcagaataaga

SEQ ID NO: 311576 - DNA, 19 bp, Homo sapiens
  siRNA target sequence for MAEA (NM_005882.2,490-508).
catccggcagaataagaga

SEQ ID NO: 311577 - DNA, 19 bp, Homo sapiens
  siRNA target sequence for MAEA (NM_005882.2,756-774).
ggcctctcagccatcaaga

SEQ ID NO: 311578 - DNA, 19 bp, Homo sapiens
  siRNA target sequence for MAEA (NM_005882.2,886-904).
ccgcctggtctgcaagatt

SEQ ID NO: 311579 - DNA, 19 bp, Homo sapiens
  siRNA target sequence for MAEA (NM_005882.2,887-905).
cgcctggtctgcaagattt

SEQ ID NO: 311580 - DNA, 19 bp, Homo sapiens
  siRNA target sequence for MAEA (NM_005882.2,913-931).
cgtgatgaacgagaacaat

SEQ ID NO: 311581 - DNA, 19 bp, Homo sapiens
  siRNA target sequence for MAEA (NM_005882.2,958-976).
cgtctacggctacaattct

SEQ ID NO: 311582 - DNA, 19 bp, Homo sapiens
  siRNA target sequence for MAEA (NM_005882.2,979-997).
gctttctatccgtcaagat

SEQ ID NO: 311583 - DNA, 19 bp, Homo sapiens
  siRNA target sequence for MAEA (NM_005882.2,984-1002).
ctatccgtcaagatgataa

SEQ ID NO: 311584 - DNA, 19 bp, Homo sapiens
  siRNA target sequence for MAEA (NM_005882.2,1006-1024).
cgtgtgcccgagaaccaaa

SEQ ID NO: 311585 - DNA, 19 bp, Homo sapiens
  siRNA target sequence for MAEA (NM_005882.2,1011-1029).
gcccgagaaccaaagaagt

SEQ ID NO: 311586 - DNA, 19 bp, Homo sapiens
  siRNA target sequence for MAEA (NM_005882.2,1182-1200).
gatccgtgagcaacgataa

SEQ ID NO: 311587 - DNA, 19 bp, Homo sapiens
  siRNA target sequence for MAEA (NM_005882.2,1185-1203).
ccgtgagcaacgataaata

SEQ ID NO: 311588 - DNA, 19 bp, Homo sapiens
  siRNA target sequence for MAEA (NM_005882.2,1187-1205).
gtgagcaacgataaatact

SEQ ID NO: 311589 - DNA, 19 bp, Homo sapiens
  siRNA target sequence for MAEA (NM_005882.2,1189-1207).
gagcaacgataaatactct

SEQ ID NO: 311590 - DNA, 19 bp, Homo sapiens
  siRNA target sequence for MGC13096 (NM_032346.1,205-223).
ctggtcgtgcaggtgtatt

SEQ ID NO: 311591 - DNA, 19 bp, Homo sapiens
  siRNA target sequence for MGC13096 (NM_032346.1,356-374).
cgcaggacgctcagaaaca

SEQ ID NO: 311592 - DNA, 19 bp, Homo sapiens
  siRNA target sequence for MGC13096 (NM_032346.1,442-460).
gggccttcaccacagttta

SEQ ID NO: 311593 - DNA, 19 bp, Homo sapiens
  siRNA target sequence for MGC13096 (NM_032346.1,445-463).
ccttcaccacagtttacct

SEQ ID NO: 311594 - DNA, 19 bp, Homo sapiens
  siRNA target sequence for MGC13096 (NM_032346.1,451-469).
ccacagtttaccttggatt

SEQ ID NO: 311595 - DNA, 19 bp, Homo sapiens
  siRNA target sequence for MGC13096 (NM_032346.1,659-677).
gccttctgagggactatca

SEQ ID NO: 311596 - DNA, 19 bp, Homo sapiens
  siRNA target sequence for MGC13096 (NM_032346.1,767-785).
gtggagatcagacgtttta

SEQ ID NO: 311597 - DNA, 19 bp, Homo sapiens
  siRNA target sequence for MGC13096 (NM_032346.1,772-790).
gatcagacgttttacaaat

SEQ ID NO: 311598 - DNA, 19 bp, Homo sapiens
  siRNA target sequence for MGC13096 (NM_032346.1,779-797).
cgttttacaaattcatgaa

SEQ ID NO: 311599 - DNA, 19 bp, Homo sapiens
  siRNA target sequence for MGC13096 (NM_032346.1,820-838).
cagattttgaggtattcct

SEQ ID NO: 311600 - DNA, 19 bp, Homo sapiens
  siRNA target sequence for MGC13096 (NM_032346.1,840-858).
gagtggagagccactcttt

SEQ ID NO: 311601 - DNA, 19 bp, Homo sapiens
  siRNA target sequence for MGC13096 (NM_032346.1,844-862).
ggagagccactctttttga

SEQ ID NO: 311602 - DNA, 19 bp, Homo sapiens
  siRNA target sequence for MGC13096 (NM_032346.1,913-931).
ggccaaaggatatttgagt

SEQ ID NO: 311603 - DNA, 19 bp, Homo sapiens
  siRNA target sequence for MGC13096 (NM_032346.1,957-975).
catgctcaagagtgctaat

SEQ ID NO: 311604 - DNA, 19 bp, Homo sapiens
  siRNA target sequence for MGC13096 (NM_032346.1,960-978).
gctcaagagtgctaattta

SEQ ID NO: 311605 - DNA, 19 bp, Homo sapiens
  siRNA target sequence for NCKAP1 (NM_013436.2,357-375).
cccgcctctacaacatcaa

SEQ ID NO: 311606 - DNA, 19 bp, Homo sapiens
  siRNA target sequence for NCKAP1 (NM_013436.2,397-415).
ggcaaaaccatcctatctt

SEQ ID NO: 311607 - DNA, 19 bp, Homo sapiens
  siRNA target sequence for NCKAP1 (NM_013436.2,398-416).
gcaaaaccatcctatctta

SEQ ID NO: 311608 - DNA, 19 bp, Homo sapiens
  siRNA target sequence for NCKAP1 (NM_013436.2,408-426).
cctatcttatcgacaaaaa

SEQ ID NO: 311609 - DNA, 19 bp, Homo sapiens
  siRNA target sequence for NCKAP1 (NM_013436.2,470-488).
gtagaaacccgcaacaaca

SEQ ID NO: 311610 - DNA, 19 bp, Homo sapiens
  siRNA target sequence for NCKAP1 (NM_013436.2,496-514).
gcttgcacaactacagaaa

SEQ ID NO: 311611 - DNA, 19 bp, Homo sapiens
  siRNA target sequence for NCKAP1 (NM_013436.2,687-705).
cctatacaacactaatgat

SEQ ID NO: 311612 - DNA, 19 bp, Homo sapiens
  siRNA target sequence for NCKAP1 (NM_013436.2,703-721).
gatactgctgtctcgaatt

SEQ ID NO: 311613 - DNA, 19 bp, Homo sapiens
  siRNA target sequence for NCKAP1 (NM_013436.2,714-732).
ctcgaattgaagaaaggaa

SEQ ID NO: 311614 - DNA, 19 bp, Homo sapiens
  siRNA target sequence for NCKAP1 (NM_013436.2,730-748).
gaaggcaatcattggatta

SEQ ID NO: 311615 - DNA, 19 bp, Homo sapiens
  siRNA target sequence for NCKAP1 (NM_013436.2,734-752).
gcaatcattggattataca

SEQ ID NO: 311616 - DNA, 19 bp, Homo sapiens
  siRNA target sequence for NCKAP1 (NM_013436.2,798-816).
cacgccttggccagatgat

SEQ ID NO: 311617 - DNA, 19 bp, Homo sapiens
  siRNA target sequence for NCKAP1 (NM_013436.2,801-819).
gccttggccagatgattgt

SEQ ID NO: 311618 - DNA, 19 bp, Homo sapiens
  siRNA target sequence for NCKAP1 (NM_013436.2,821-839).
gattatgaaaaccctttaa

SEQ ID NO: 311619 - DNA, 19 bp, Homo sapiens
  siRNA target sequence for NCKAP1 (NM_013436.2,863-881).
ccccatagcaagtctcttt

SEQ ID NO: 311620 - DNA, 19 bp, Homo sapiens
  siRNA target sequence for NCKAP1 (NM_013436.2,876-894).
ctctttcagatgcactaat

SEQ ID NO: 311621 - DNA, 19 bp, Homo sapiens
  siRNA target sequence for NCKAP1 (NM_013436.2,888-906).
cactaatttctcttcaaat

SEQ ID NO: 311622 - DNA, 19 bp, Homo sapiens
  siRNA target sequence for NCKAP1 (NM_013436.2,907-925).
ggtatatcctcgaaggaat

SEQ ID NO: 311623 - DNA, 19 bp, Homo sapiens
  siRNA target sequence for NCKAP1 (NM_013436.2,967-985).
catcagtgcacctagtaca

SEQ ID NO: 311624 - DNA, 19 bp, Homo sapiens
  siRNA target sequence for NCKAP1 (NM_013436.2,996-1014).
cagcacagtccgacactat

SEQ ID NO: 311625 - DNA, 19 bp, Homo sapiens
  siRNA target sequence for NCKAP1 (NM_013436.2,1006-1024).
cgacactatgccttgtgaa

SEQ ID NO: 311626 - DNA, 19 bp, Homo sapiens
  siRNA target sequence for NCKAP1 (NM_013436.2,1007-1025).
gacactatgccttgtgaat

SEQ ID NO: 311627 - DNA, 19 bp, Homo sapiens
  siRNA target sequence for NCKAP1 (NM_013436.2,1078-1096).
ccatgggatcctaaatact

SEQ ID NO: 311628 - DNA, 19 bp, Homo sapiens
  siRNA target sequence for NCKAP1 (NM_013436.2,1152-1170).
ctctctttcgggatgaagt

SEQ ID NO: 311629 - DNA, 19 bp, Homo sapiens
  siRNA target sequence for NCKAP1 (NM_013436.2,1154-1172).
ctctttcgggatgaagttt

SEQ ID NO: 311630 - DNA, 19 bp, Homo sapiens
  siRNA target sequence for NCKAP1 (NM_013436.2,1166-1184).
gaagttttccacattcaca

SEQ ID NO: 311631 - DNA, 19 bp, Homo sapiens
  siRNA target sequence for NCKAP1 (NM_013436.2,1214-1232).
cgaggctataataaacgta

SEQ ID NO: 311632 - DNA, 19 bp, Homo sapiens
  siRNA target sequence for NCKAP1 (NM_013436.2,1215-1233).
gaggctataataaacgtat

SEQ ID NO: 311633 - DNA, 19 bp, Homo sapiens
  siRNA target sequence for NCKAP1 (NM_013436.2,1219-1237).
ctataataaacgtattaat

SEQ ID NO: 311634 - DNA, 19 bp, Homo sapiens
  siRNA target sequence for NCKAP1 (NM_013436.2,1230-1248).
gtattaatgacataagaga

SEQ ID NO: 311635 - DNA, 19 bp, Homo sapiens
  siRNA target sequence for NCKAP1 (NM_013436.2,1292-1310).
gaaagacgcaagtttttaa

SEQ ID NO: 311636 - DNA, 19 bp, Homo sapiens
  siRNA target sequence for NCKAP1 (NM_013436.2,1365-1383).
gtcccaaggcactttttgt

SEQ ID NO: 311637 - DNA, 19 bp, Homo sapiens
  siRNA target sequence for NCKAP1 (NM_013436.2,1398-1416).
cctttgcccgtgatgaaat

SEQ ID NO: 311638 - DNA, 19 bp, Homo sapiens
  siRNA target sequence for NCKAP1 (NM_013436.2,1403-1421).
gcccgtgatgaaatcatct

SEQ ID NO: 311639 - DNA, 19 bp, Homo sapiens
  siRNA target sequence for NCKAP1 (NM_013436.2,1456-1474).
gagtgcagacgactttata

SEQ ID NO: 311640 - DNA, 19 bp, Homo sapiens
  siRNA target sequence for NCKAP1 (NM_013436.2,1480-1498).
gcacattgctgaattaata

SEQ ID NO: 311641 - DNA, 19 bp, Homo sapiens
  siRNA target sequence for NCKAP1 (NM_013436.2,1487-1505).
gctgaattaatattttaca

SEQ ID NO: 311642 - DNA, 19 bp, Homo sapiens
  siRNA target sequence for NCKAP1 (NM_013436.2,1530-1548).
ggaaatacggacctgtaat

SEQ ID NO: 311643 - DNA, 19 bp, Homo sapiens
  siRNA target sequence for NCKAP1 (NM_013436.2,1541-1559).
cctgtaatgcagaggtatt

SEQ ID NO: 311644 - DNA, 19 bp, Homo sapiens
  siRNA target sequence for NCKAP1 (NM_013436.2,1542-1560).
ctgtaatgcagaggtatta

SEQ ID NO: 311645 - DNA, 19 bp, Homo sapiens
  siRNA target sequence for NCKAP1 (NM_013436.2,1601-1619).
gaactcgtgcagaatcttt

SEQ ID NO: 311646 - DNA, 19 bp, Homo sapiens
  siRNA target sequence for NCKAP1 (NM_013436.2,1631-1649).
gaagatgaatcaatcatca

SEQ ID NO: 311647 - DNA, 19 bp, Homo sapiens
  siRNA target sequence for NCKAP1 (NM_013436.2,1668-1686).
ctatgacttccctaagtgt

SEQ ID NO: 311648 - DNA, 19 bp, Homo sapiens
  siRNA target sequence for NCKAP1 (NM_013436.2,1677-1695).
ccctaagtgtaaaacaagt

SEQ ID NO: 311649 - DNA, 19 bp, Homo sapiens
  siRNA target sequence for NCKAP1 (NM_013436.2,1725-1743).
gaatgagattagattggtt

SEQ ID NO: 311650 - DNA, 19 bp, Homo sapiens
  siRNA target sequence for NCKAP1 (NM_013436.2,1755-1773).
catatactagtgtctcaaa

SEQ ID NO: 311651 - DNA, 19 bp, Homo sapiens
  siRNA target sequence for NCKAP1 (NM_013436.2,1908-1926).
gtcgtgcttttgagaagat

SEQ ID NO: 311652 - DNA, 19 bp, Homo sapiens
  siRNA target sequence for NCKAP1 (NM_013436.2,1942-1960).
ggagttaccctctcaatca

SEQ ID NO: 311653 - DNA, 19 bp, Homo sapiens
  siRNA target sequence for NCKAP1 (NM_013436.2,1943-1961).
gagttaccctctcaatcaa

SEQ ID NO: 311654 - DNA, 19 bp, Homo sapiens
  siRNA target sequence for NCKAP1 (NM_013436.2,1945-1963).
gttaccctctcaatcaaga

SEQ ID NO: 311655 - DNA, 19 bp, Homo sapiens
  siRNA target sequence for NCKAP1 (NM_013436.2,1951-1969).
ctctcaatcaagatactca

SEQ ID NO: 311656 - DNA, 19 bp, Homo sapiens
  siRNA target sequence for NCKAP1 (NM_013436.2,1953-1971).
ctcaatcaagatactcaat

SEQ ID NO: 311657 - DNA, 19 bp, Homo sapiens
  siRNA target sequence for NCKAP1 (NM_013436.2,1959-1977).
caagatactcaattgcatt

SEQ ID NO: 311658 - DNA, 19 bp, Homo sapiens
  siRNA target sequence for NCKAP1 (NM_013436.2,2002-2020).
gagttgcacgcatgaacta

SEQ ID NO: 311659 - DNA, 19 bp, Homo sapiens
  siRNA target sequence for NCKAP1 (NM_013436.2,2024-2042).
ccagaagagcgacatcata

SEQ ID NO: 311660 - DNA, 19 bp, Homo sapiens
  siRNA target sequence for NCKAP1 (NM_013436.2,2025-2043).
cagaagagcgacatcatat

SEQ ID NO: 311661 - DNA, 19 bp, Homo sapiens
  siRNA target sequence for NCKAP1 (NM_013436.2,2048-2066).
gatcgcagtctttccttat

SEQ ID NO: 311662 - DNA, 19 bp, Homo sapiens
  siRNA target sequence for NCKAP1 (NM_013436.2,2051-2069).
cgcagtctttccttatgta

SEQ ID NO: 311663 - DNA, 19 bp, Homo sapiens
  siRNA target sequence for NCKAP1 (NM_013436.2,2052-2070).
gcagtctttccttatgtaa

SEQ ID NO: 311664 - DNA, 19 bp, Homo sapiens
  siRNA target sequence for NCKAP1 (NM_013436.2,2053-2071).
cagtctttccttatgtaat

SEQ ID NO: 311665 - DNA, 19 bp, Homo sapiens
  siRNA target sequence for NCKAP1 (NM_013436.2,2067-2085).
gtaatatgttcctagatga

SEQ ID NO: 311666 - DNA, 19 bp, Homo sapiens
  siRNA target sequence for NCKAP1 (NM_013436.2,2089-2107).
ggccaaacaagctcgaaat

SEQ ID NO: 311667 - DNA, 19 bp, Homo sapiens
  siRNA target sequence for NCKAP1 (NM_013436.2,2091-2109).
ccaaacaagctcgaaatct

SEQ ID NO: 311668 - DNA, 19 bp, Homo sapiens
  siRNA target sequence for NCKAP1 (NM_013436.2,2102-2120).
cgaaatctcatcactgata

SEQ ID NO: 311669 - DNA, 19 bp, Homo sapiens
  siRNA target sequence for NCKAP1 (NM_013436.2,2150-2168).
cagttgctacccaagcatt

SEQ ID NO: 311670 - DNA, 19 bp, Homo sapiens
  siRNA target sequence for NCKAP1 (NM_013436.2,2289-2307).
ccaaccttgataaattgca

SEQ ID NO: 311671 - DNA, 19 bp, Homo sapiens
  siRNA target sequence for NCKAP1 (NM_013436.2,2308-2326).
cactgcactttctgagtta

SEQ ID NO: 311672 - DNA, 19 bp, Homo sapiens
  siRNA target sequence for NCKAP1 (NM_013436.2,2312-2330).
gcactttctgagttatgct

SEQ ID NO: 311673 - DNA, 19 bp, Homo sapiens
  siRNA target sequence for NCKAP1 (NM_013436.2,2323-2341).
gttatgcttctctataaat

SEQ ID NO: 311674 - DNA, 19 bp, Homo sapiens
  siRNA target sequence for NCKAP1 (NM_013436.2,2328-2346).
gcttctctataaattatgt

SEQ ID NO: 311675 - DNA, 19 bp, Homo sapiens
  siRNA target sequence for NCKAP1 (NM_013436.2,2436-2454).
ggatgactatgtataatca

SEQ ID NO: 311676 - DNA, 19 bp, Homo sapiens
  siRNA target sequence for NCKAP1 (NM_013436.2,2512-2530).
gaccgtactccagtcaata

SEQ ID NO: 311677 - DNA, 19 bp, Homo sapiens
  siRNA target sequence for NCKAP1 (NM_013436.2,2515-2533).
cgtactccagtcaatagaa

SEQ ID NO: 311678 - DNA, 19 bp, Homo sapiens
  siRNA target sequence for NCKAP1 (NM_013436.2,2521-2539).
ccagtcaatagaaaactat

SEQ ID NO: 311679 - DNA, 19 bp, Homo sapiens
  siRNA target sequence for NCKAP1 (NM_013436.2,2542-2560).
gcagattgatattacaaga

SEQ ID NO: 311680 - DNA, 19 bp, Homo sapiens
  siRNA target sequence for NCKAP1 (NM_013436.2,2615-2633).
ccaaccattacaagtctat

SEQ ID NO: 311681 - DNA, 19 bp, Homo sapiens
  siRNA target sequence for NCKAP1 (NM_013436.2,2616-2634).
caaccattacaagtctata

SEQ ID NO: 311682 - DNA, 19 bp, Homo sapiens
  siRNA target sequence for NCKAP1 (NM_013436.2,2620-2638).
cattacaagtctatacaca

SEQ ID NO: 311683 - DNA, 19 bp, Homo sapiens
  siRNA target sequence for NCKAP1 (NM_013436.2,2628-2646).
gtctatacacaaattggta

SEQ ID NO: 311684 - DNA, 19 bp, Homo sapiens
  siRNA target sequence for NCKAP1 (NM_013436.2,2630-2648).
ctatacacaaattggtatt

SEQ ID NO: 311685 - DNA, 19 bp, Homo sapiens
  siRNA target sequence for NCKAP1 (NM_013436.2,2671-2689).
cagcaatggccatatagca

SEQ ID NO: 311686 - DNA, 19 bp, Homo sapiens
  siRNA target sequence for NCKAP1 (NM_013436.2,2704-2722).
gaaagcgtttgtgaactta

SEQ ID NO: 311687 - DNA, 19 bp, Homo sapiens
  siRNA target sequence for NCKAP1 (NM_013436.2,2795-2813).
ctactaggcccatatggta

SEQ ID NO: 311688 - DNA, 19 bp, Homo sapiens
  siRNA target sequence for NCKAP1 (NM_013436.2,2803-2821).
cccatatggtatgaagttt

SEQ ID NO: 311689 - DNA, 19 bp, Homo sapiens
  siRNA target sequence for NCKAP1 (NM_013436.2,2822-2840).
ctaagtgaaagccttatgt

SEQ ID NO: 311690 - DNA, 19 bp, Homo sapiens
  siRNA target sequence for NCKAP1 (NM_013436.2,2936-2954).
cagatggctgcactgttta

SEQ ID NO: 311691 - DNA, 19 bp, Homo sapiens
  siRNA target sequence for NCKAP1 (NM_013436.2,2945-2963).
gcactgtttaaaagattat

SEQ ID NO: 311692 - DNA, 19 bp, Homo sapiens
  siRNA target sequence for NCKAP1 (NM_013436.2,2969-2987).
gttgacagtgtcttgaaga

SEQ ID NO: 311693 - DNA, 19 bp, Homo sapiens
  siRNA target sequence for NCKAP1 (NM_013436.2,2978-2996).
gtcttgaagaggatgacaa

SEQ ID NO: 311694 - DNA, 19 bp, Homo sapiens
  siRNA target sequence for NCKAP1 (NM_013436.2,3019-3037).
ccgatcattggcacaagaa

SEQ ID NO: 311695 - DNA, 19 bp, Homo sapiens
  siRNA target sequence for NCKAP1 (NM_013436.2,3038-3056).
gcacttagagatgtcttat

SEQ ID NO: 311696 - DNA, 19 bp, Homo sapiens
  siRNA target sequence for NCKAP1 (NM_013436.2,3061-3079).
ccacattccttttcttgta

SEQ ID NO: 311697 - DNA, 19 bp, Homo sapiens
  siRNA target sequence for NCKAP1 (NM_013436.2,3077-3095).
gtaagttcaattgaagatt

SEQ ID NO: 311698 - DNA, 19 bp, Homo sapiens
  siRNA target sequence for NCKAP1 (NM_013436.2,3106-3124).
cattccaagggaaactgat

SEQ ID NO: 311699 - DNA, 19 bp, Homo sapiens
  siRNA target sequence for NCKAP1 (NM_013436.2,3110-3128).
ccaagggaaactgatatga

SEQ ID NO: 311700 - DNA, 19 bp, Homo sapiens
  siRNA target sequence for NCKAP1 (NM_013436.2,3120-3138).
ctgatatgaaggttgcaat

SEQ ID NO: 311701 - DNA, 19 bp, Homo sapiens
  siRNA target sequence for NCKAP1 (NM_013436.2,3130-3148).
ggttgcaatgaatgtgtat

SEQ ID NO: 311702 - DNA, 19 bp, Homo sapiens
  siRNA target sequence for NCKAP1 (NM_013436.2,3134-3152).
gcaatgaatgtgtatgagt

SEQ ID NO: 311703 - DNA, 19 bp, Homo sapiens
  siRNA target sequence for NCKAP1 (NM_013436.2,3166-3184).
cggattaccttgtgagatt

SEQ ID NO: 311704 - DNA, 19 bp, Homo sapiens
  siRNA target sequence for NCKAP1 (NM_013436.2,3168-3186).
gattaccttgtgagattga

SEQ ID NO: 311705 - DNA, 19 bp, Homo sapiens
  siRNA target sequence for NCKAP1 (NM_013436.2,3199-3217).
cgtagctctttcttcacaa

SEQ ID NO: 311706 - DNA, 19 bp, Homo sapiens
  siRNA target sequence for NCKAP1 (NM_013436.2,3203-3221).
gctctttcttcacaaaaat

SEQ ID NO: 311707 - DNA, 19 bp, Homo sapiens
  siRNA target sequence for NCKAP1 (NM_013436.2,3234-3252).
gtccagaagaagagtataa

SEQ ID NO: 311708 - DNA, 19 bp, Homo sapiens
  siRNA target sequence for NCKAP1 (NM_013436.2,3292-3310).
gccaacactggccagtaat

SEQ ID NO: 311709 - DNA, 19 bp, Homo sapiens
  siRNA target sequence for NCKAP1 (NM_013436.2,3322-3340).
gtacagccctgctatagaa

SEQ ID NO: 311710 - DNA, 19 bp, Homo sapiens
  siRNA target sequence for NCKAP1 (NM_013436.2,3333-3351).
ctatagaagggcattgcaa

SEQ ID NO: 311711 - DNA, 19 bp, Homo sapiens
  siRNA target sequence for NCKAP1 (NM_013436.2,3338-3356).
gaagggcattgcaacaaca

SEQ ID NO: 311712 - DNA, 19 bp, Homo sapiens
  siRNA target sequence for NCKAP1 (NM_013436.2,3348-3366).
gcaacaacatacattgctt

SEQ ID NO: 311713 - DNA, 19 bp, Homo sapiens
  siRNA target sequence for NCKAP1 (NM_013436.2,3421-3439).
cattgaagaccgtcttaaa

SEQ ID NO: 311714 - DNA, 19 bp, Homo sapiens
  siRNA target sequence for NCKAP1 (NM_013436.2,3425-3443).
gaagaccgtcttaaagaat

SEQ ID NO: 311715 - DNA, 19 bp, Homo sapiens
  siRNA target sequence for NCKAP1 (NM_013436.2,3456-3474).
catcctccagtctactgaa

SEQ ID NO: 311716 - DNA, 19 bp, Homo sapiens
  siRNA target sequence for NCKAP1 (NM_013436.2,3485-3503).
gagacagataaaactacaa

SEQ ID NO: 311717 - DNA, 19 bp, Homo sapiens
  siRNA target sequence for NCKAP1 (NM_013436.2,3487-3505).
gacagataaaactacaaca

SEQ ID NO: 311718 - DNA, 19 bp, Homo sapiens
  siRNA target sequence for NCKAP1 (NM_013436.2,3604-3622).
gctgagaaatgcataccat

SEQ ID NO: 311719 - DNA, 19 bp, Homo sapiens
  siRNA target sequence for NCKAP1 (NM_013436.2,3615-3633).
cataccatgctgtctacaa

SEQ ID NO: 311720 - DNA, 19 bp, Homo sapiens
  siRNA target sequence for NCKAP1 (NM_013436.2,3619-3637).
ccatgctgtctacaaacaa

SEQ ID NO: 311721 - DNA, 19 bp, Homo sapiens
  siRNA target sequence for NCKAP1 (NM_013436.2,3624-3642).
ctgtctacaaacaaagtgt

SEQ ID NO: 311722 - DNA, 19 bp, Homo sapiens
  siRNA target sequence for PDCD6IP (NM_013374.2,427-445).
ggatgctttcgataaaggt

SEQ ID NO: 311723 - DNA, 19 bp, Homo sapiens
  siRNA target sequence for PDCD6IP (NM_013374.2,428-446).
gatgctttcgataaaggtt

SEQ ID NO: 311724 - DNA, 19 bp, Homo sapiens
  siRNA target sequence for PDCD6IP (NM_013374.2,526-544).
cttagctagccaaattgca

SEQ ID NO: 311725 - DNA, 19 bp, Homo sapiens
  siRNA target sequence for PDCD6IP (NM_013374.2,716-734).
gcacaggctcaagaagtat

SEQ ID NO: 311726 - DNA, 19 bp, Homo sapiens
  siRNA target sequence for PDCD6IP (NM_013374.2,767-785).
gatgccatcatagctaaat

SEQ ID NO: 311727 - DNA, 19 bp, Homo sapiens
  siRNA target sequence for PDCD6IP (NM_013374.2,819-837).
ctttcaaacagtgtcaata

SEQ ID NO: 311728 - DNA, 19 bp, Homo sapiens
  siRNA target sequence for PDCD6IP (NM_013374.2,829-847).
gtgtcaatacaaagatact

SEQ ID NO: 311729 - DNA, 19 bp, Homo sapiens
  siRNA target sequence for PDCD6IP (NM_013374.2,831-849).
gtcaatacaaagatactct

SEQ ID NO: 311730 - DNA, 19 bp, Homo sapiens
  siRNA target sequence for PDCD6IP (NM_013374.2,974-992).
catgcagcagaactgatta

SEQ ID NO: 311731 - DNA, 19 bp, Homo sapiens
  siRNA target sequence for PDCD6IP (NM_013374.2,1000-1018).
ggcatctcgctatgatgaa

SEQ ID NO: 311732 - DNA, 19 bp, Homo sapiens
  siRNA target sequence for PDCD6IP (NM_013374.2,1001-1019).
gcatctcgctatgatgaat

SEQ ID NO: 311733 - DNA, 19 bp, Homo sapiens
  siRNA target sequence for PDCD6IP (NM_013374.2,1005-1023).
ctcgctatgatgaatatgt

SEQ ID NO: 311734 - DNA, 19 bp, Homo sapiens
  siRNA target sequence for PDCD6IP (NM_013374.2,1007-1025).
cgctatgatgaatatgtta

SEQ ID NO: 311735 - DNA, 19 bp, Homo sapiens
  siRNA target sequence for PDCD6IP (NM_013374.2,1030-1048).
gaaggatttttctgacaaa

SEQ ID NO: 311736 - DNA, 19 bp, Homo sapiens
  siRNA target sequence for PDCD6IP (NM_013374.2,1172-1190).
gtacccatcagtcagaaat

SEQ ID NO: 311737 - DNA, 19 bp, Homo sapiens
  siRNA target sequence for PDCD6IP (NM_013374.2,1177-1195).
catcagtcagaaatttact

SEQ ID NO: 311738 - DNA, 19 bp, Homo sapiens
  siRNA target sequence for PDCD6IP (NM_013374.2,1257-1275).
ggaaagccgatttggttaa

SEQ ID NO: 311739 - DNA, 19 bp, Homo sapiens
  siRNA target sequence for PDCD6IP (NM_013374.2,1262-1280).
gccgatttggttaacagat

SEQ ID NO: 311740 - DNA, 19 bp, Homo sapiens
  siRNA target sequence for PDCD6IP (NM_013374.2,1265-1283).
gatttggttaacagatcaa

SEQ ID NO: 311741 - DNA, 19 bp, Homo sapiens
  siRNA target sequence for PDCD6IP (NM_013374.2,2306-2324).
cctacacctgcgtatcagt

SEQ ID NO: 311742 - DNA, 19 bp, Homo sapiens
  siRNA target sequence for PDCD6IP (NM_013374.2,2373-2391).
gaaccatgccgcctactaa

SEQ ID NO: 311743 - DNA, 19 bp, Homo sapiens
  siRNA target sequence for PDCD6IP (NM_013374.2,2551-2569).
cacctatccaggatatcct

SEQ ID NO: 311744 - DNA, 19 bp, Homo sapiens
  siRNA target sequence for PDCD6IP (NM_013374.2,2586-2604).
ccatgcccatgggctataa

SEQ ID NO: 311745 - DNA, 19 bp, Homo sapiens
  siRNA target sequence for PDCD6IP (NM_013374.2,2590-2608).
gcccatgggctataatcct

SEQ ID NO: 311746 - DNA, 19 bp, Homo sapiens
  siRNA target sequence for PDCD6IP (NM_013374.2,2593-2611).
catgggctataatccttat

SEQ ID NO: 311747 - DNA, 19 bp, Homo sapiens
  siRNA target sequence for PDCD6IP (NM_013374.2,2612-2630).
gcgtatggccagtataata

SEQ ID NO: 311748 - DNA, 19 bp, Homo sapiens
  siRNA target sequence for PDCD6IP (NM_013374.2,2623-2641).
gtataatatgccatatcca

SEQ ID NO: 311749 - DNA, 19 bp, Homo sapiens
  siRNA target sequence for PDCD6IP (NM_013374.2,2715-2733).
ccccacagcagtcttacta

SEQ ID NO: 311750 - DNA, 19 bp, Homo sapiens
  siRNA target sequence for PDCD6IP (NM_013374.2,2716-2734).
cccacagcagtcttactat

SEQ ID NO: 311751 - DNA, 19 bp, Homo sapiens
  siRNA target sequence for PPP1R13B (NM_015316.1,161-179).
gatgccgatgatattaact

SEQ ID NO: 311752 - DNA, 19 bp, Homo sapiens
  siRNA target sequence for PPP1R13B (NM_015316.1,164-182).
gccgatgatattaactgtt

SEQ ID NO: 311753 - DNA, 19 bp, Homo sapiens
  siRNA target sequence for PPP1R13B (NM_015316.1,188-206).
gagcaacaatgaacagatt

SEQ ID NO: 311754 - DNA, 19 bp, Homo sapiens
  siRNA target sequence for PPP1R13B (NM_015316.1,190-208).
gcaacaatgaacagatttt

SEQ ID NO: 311755 - DNA, 19 bp, Homo sapiens
  siRNA target sequence for PPP1R13B (NM_015316.1,219-237).
cctataacaccggaaacaa

SEQ ID NO: 311756 - DNA, 19 bp, Homo sapiens
  siRNA target sequence for PPP1R13B (NM_015316.1,235-253).
caacctgtcgagatgttgt

SEQ ID NO: 311757 - DNA, 19 bp, Homo sapiens
  siRNA target sequence for PPP1R13B (NM_015316.1,239-257).
ctgtcgagatgttgtagaa

SEQ ID NO: 311758 - DNA, 19 bp, Homo sapiens
  siRNA target sequence for PPP1R13B (NM_015316.1,241-259).
gtcgagatgttgtagaatt

SEQ ID NO: 311759 - DNA, 19 bp, Homo sapiens
  siRNA target sequence for PPP1R13B (NM_015316.1,243-261).
cgagatgttgtagaatttt

SEQ ID NO: 311760 - DNA, 19 bp, Homo sapiens
  siRNA target sequence for PPP1R13B (NM_015316.1,319-337).
gtcccataccctttgatca

SEQ ID NO: 311761 - DNA, 19 bp, Homo sapiens
  siRNA target sequence for PPP1R13B (NM_015316.1,321-339).
cccataccctttgatcata

SEQ ID NO: 311762 - DNA, 19 bp, Homo sapiens
  siRNA target sequence for PPP1R13B (NM_015316.1,322-340).
ccataccctttgatcatat

SEQ ID NO: 311763 - DNA, 19 bp, Homo sapiens
  siRNA target sequence for PPP1R13B (NM_015316.1,327-345).
ccctttgatcatatgatgt

SEQ ID NO: 311764 - DNA, 19 bp, Homo sapiens
  siRNA target sequence for PPP1R13B (NM_015316.1,328-346).
cctttgatcatatgatgta

SEQ ID NO: 311765 - DNA, 19 bp, Homo sapiens
  siRNA target sequence for PPP1R13B (NM_015316.1,367-385).
gtccacggagggaagaagt

SEQ ID NO: 311766 - DNA, 19 bp, Homo sapiens
  siRNA target sequence for PPP1R13B (NM_015316.1,517-535).
ggaatccacgtgttgaact

SEQ ID NO: 311767 - DNA, 19 bp, Homo sapiens
  siRNA target sequence for PPP1R13B (NM_015316.1,518-536).
gaatccacgtgttgaactt

SEQ ID NO: 311768 - DNA, 19 bp, Homo sapiens
  siRNA target sequence for PPP1R13B (NM_015316.1,610-628).
ccaaggaacagcgtttaca

SEQ ID NO: 311769 - DNA, 19 bp, Homo sapiens
  siRNA target sequence for PPP1R13B (NM_015316.1,614-632).
ggaacagcgtttacatttt

SEQ ID NO: 311770 - DNA, 19 bp, Homo sapiens
  siRNA target sequence for PPP1R13B (NM_015316.1,650-668).
ccgtcagcagcagtctatt

SEQ ID NO: 311771 - DNA, 19 bp, Homo sapiens
  siRNA target sequence for PPP1R13B (NM_015316.1,651-669).
cgtcagcagcagtctattt

SEQ ID NO: 311772 - DNA, 19 bp, Homo sapiens
  siRNA target sequence for PPP1R13B (NM_015316.1,753-771).
caagtcgactacagcaaaa

SEQ ID NO: 311773 - DNA, 19 bp, Homo sapiens
  siRNA target sequence for PPP1R13B (NM_015316.1,781-799).
gcaatctgtctgctgaaat

SEQ ID NO: 311774 - DNA, 19 bp, Homo sapiens
  siRNA target sequence for PPP1R13B (NM_015316.1,782-800).
caatctgtctgctgaaata

SEQ ID NO: 311775 - DNA, 19 bp, Homo sapiens
  siRNA target sequence for PPP1R13B (NM_015316.1,850-868).
caattttaagggttgatca

SEQ ID NO: 311776 - DNA, 19 bp, Homo sapiens
  siRNA target sequence for PPP1R13B (NM_015316.1,859-877).
gggttgatcagcttagtca

SEQ ID NO: 311777 - DNA, 19 bp, Homo sapiens
  siRNA target sequence for PPP1R13B (NM_015316.1,869-887).
gcttagtcagcaattggaa

SEQ ID NO: 311778 - DNA, 19 bp, Homo sapiens
  siRNA target sequence for PPP1R13B (NM_015316.1,952-970).
cggtggagttaaaaagact

SEQ ID NO: 311779 - DNA, 19 bp, Homo sapiens
  siRNA target sequence for PPP1R13B (NM_015316.1,971-989).
gtaccaagaactacagatt

SEQ ID NO: 311780 - DNA, 19 bp, Homo sapiens
  siRNA target sequence for PPP1R13B (NM_015316.1,999-1017).
cttaaccaggaacaaaatt

SEQ ID NO: 311781 - DNA, 19 bp, Homo sapiens
  siRNA target sequence for PPP1R13B (NM_015316.1,1073-1091).
gatggacaagcgaatcagt

SEQ ID NO: 311782 - DNA, 19 bp, Homo sapiens
  siRNA target sequence for PPP1R13B (NM_015316.1,1192-1210).
ctgtggggccttatatcca

SEQ ID NO: 311783 - DNA, 19 bp, Homo sapiens
  siRNA target sequence for PPP1R13B (NM_015316.1,1256-1274).
gccccagtctctcagtatt

SEQ ID NO: 311784 - DNA, 19 bp, Homo sapiens
  siRNA target sequence for PPP1R13B (NM_015316.1,1297-1315).
gatccaaatccgctaatga

SEQ ID NO: 311785 - DNA, 19 bp, Homo sapiens
  siRNA target sequence for PPP1R13B (NM_015316.1,1478-1496).
gggcatcgagattggtaaa

SEQ ID NO: 311786 - DNA, 19 bp, Homo sapiens
  siRNA target sequence for PPP1R13B (NM_015316.1,1480-1498).
gcatcgagattggtaaagt

SEQ ID NO: 311787 - DNA, 19 bp, Homo sapiens
  siRNA target sequence for PPP1R13B (NM_015316.1,1526-1544).
gcagctgcctccaagctat

SEQ ID NO: 311788 - DNA, 19 bp, Homo sapiens
  siRNA target sequence for PPP1R13B (NM_015316.1,1878-1896).
gtgaattcaagttccatat

SEQ ID NO: 311789 - DNA, 19 bp, Homo sapiens
  siRNA target sequence for PPP1R13B (NM_015316.1,1917-1935).
gccacaccacctaagaatt

SEQ ID NO: 311790 - DNA, 19 bp, Homo sapiens
  siRNA target sequence for PPP1R13B (NM_015316.1,1918-1936).
ccacaccacctaagaatta

SEQ ID NO: 311791 - DNA, 19 bp, Homo sapiens
  siRNA target sequence for PPP1R13B (NM_015316.1,1947-1965).
gcacacagcgccttaaata

SEQ ID NO: 311792 - DNA, 19 bp, Homo sapiens
  siRNA target sequence for PPP1R13B (NM_015316.1,1948-1966).
cacacagcgccttaaataa

SEQ ID NO: 311793 - DNA, 19 bp, Homo sapiens
  siRNA target sequence for PPP1R13B (NM_015316.1,1950-1968).
cacagcgccttaaataagt

SEQ ID NO: 311794 - DNA, 19 bp, Homo sapiens
  siRNA target sequence for PPP1R13B (NM_015316.1,1971-1989).
gttaaagcagtgtatggta

SEQ ID NO: 311795 - DNA, 19 bp, Homo sapiens
  siRNA target sequence for PPP1R13B (NM_015316.1,1982-2000).
gtatggtaagcccgtttta

SEQ ID NO: 311796 - DNA, 19 bp, Homo sapiens
  siRNA target sequence for PPP1R13B (NM_015316.1,1986-2004).
ggtaagcccgttttacctt

SEQ ID NO: 311797 - DNA, 19 bp, Homo sapiens
  siRNA target sequence for PPP1R13B (NM_015316.1,2023-2041).
cgccgctgccgtttcttca

SEQ ID NO: 311798 - DNA, 19 bp, Homo sapiens
  siRNA target sequence for PPP1R13B (NM_015316.1,2075-2093).
gccaccttcagaaagtact

SEQ ID NO: 311799 - DNA, 19 bp, Homo sapiens
  siRNA target sequence for PPP1R13B (NM_015316.1,2425-2443).
ccgatgtggacaatggaaa

SEQ ID NO: 311800 - DNA, 19 bp, Homo sapiens
  siRNA target sequence for PPP1R13B (NM_015316.1,2510-2528).
gcctgccccgtcatcagat

SEQ ID NO: 311801 - DNA, 19 bp, Homo sapiens
  siRNA target sequence for PPP1R13B (NM_015316.1,2526-2544).
gatgccaatgataatgagt

SEQ ID NO: 311802 - DNA, 19 bp, Homo sapiens
  siRNA target sequence for PPP1R13B (NM_015316.1,2601-2619).
gagccggcagaggacaata

SEQ ID NO: 311803 - DNA, 19 bp, Homo sapiens
  siRNA target sequence for PPP1R13B (NM_015316.1,2800-2818).
ggctgagagtccggtttaa

SEQ ID NO: 311804 - DNA, 19 bp, Homo sapiens
  siRNA target sequence for PPP1R13B (NM_015316.1,3033-3051).
cactgcgctgcctcttgta

SEQ ID NO: 311805 - DNA, 19 bp, Homo sapiens
  siRNA target sequence for PPP1R13B (NM_015316.1,3106-3124).
caaccataagcgacattga

SEQ ID NO: 311806 - DNA, 19 bp, Homo sapiens
  siRNA target sequence for PPP1R13B (NM_015316.1,3110-3128).
cataagcgacattgaaact

SEQ ID NO: 311807 - DNA, 19 bp, Homo sapiens
  siRNA target sequence for PPP1R13B (NM_015316.1,3389-3407).
gctgtatccacggatcaaa

SEQ ID NO: 311808 - DNA, 19 bp, Homo sapiens
  siRNA target sequence for TAIP-2 (NM_024969.2,362-380).
ggggacagtgtcaatccat

SEQ ID NO: 311809 - DNA, 19 bp, Homo sapiens
  siRNA target sequence for TAIP-2 (NM_024969.2,377-395).
ccatccacttctagtcatt

SEQ ID NO: 311810 - DNA, 19 bp, Homo sapiens
  siRNA target sequence for TAIP-2 (NM_024969.2,456-474).
gttgtgtcaccgtgtacta

SEQ ID NO: 311811 - DNA, 19 bp, Homo sapiens
  siRNA target sequence for TAIP-2 (NM_024969.2,459-477).
gtgtcaccgtgtactactt

SEQ ID NO: 311812 - DNA, 19 bp, Homo sapiens
  siRNA target sequence for TAIP-2 (NM_024969.2,461-479).
gtcaccgtgtactacttca

SEQ ID NO: 311813 - DNA, 19 bp, Homo sapiens
  siRNA target sequence for TAIP-2 (NM_024969.2,597-615).
ggctccaccgggagatgtt

SEQ ID NO: 311814 - DNA, 19 bp, Homo sapiens
  siRNA target sequence for TAIP-2 (NM_024969.2,640-658).
gctgaactccttaaaacta

SEQ ID NO: 311815 - DNA, 19 bp, Homo sapiens
  siRNA target sequence for TAIP-2 (NM_024969.2,976-994).
cccatgcggctgcactaaa

SEQ ID NO: 311816 - DNA, 19 bp, Homo sapiens
  siRNA target sequence for TAIP-2 (NM_024969.2,988-1006).
cactaaagaaggatgtagt

SEQ ID NO: 311817 - DNA, 19 bp, Homo sapiens
  siRNA target sequence for TAIP-2 (NM_024969.2,1011-1029).
cagcaggtagaattgaatt

SEQ ID NO: 311818 - DNA, 19 bp, Homo sapiens
  siRNA target sequence for TAIP-2 (NM_024969.2,1013-1031).
gcaggtagaattgaattta

SEQ ID NO: 311819 - DNA, 19 bp, Homo sapiens
  siRNA target sequence for TAIP-2 (NM_024969.2,1041-1059).
gtgttcggactcacttttt

SEQ ID NO: 311820 - DNA, 19 bp, Homo sapiens
  siRNA target sequence for TAIP-2 (NM_024969.2,1060-1078).
gcacacaataatgaaactt

SEQ ID NO: 311821 - DNA, 19 bp, Homo sapiens
  siRNA target sequence for TAIP-2 (NM_024969.2,1140-1158).
gtgctcacagtagttctat

SEQ ID NO: 311822 - DNA, 19 bp, Homo sapiens
  siRNA target sequence for TAIP-2 (NM_024969.2,1166-1184).
gtcgctcactccgtagaat

SEQ ID NO: 311823 - DNA, 19 bp, Homo sapiens
  siRNA target sequence for TAIP-2 (NM_024969.2,1168-1186).
cgctcactccgtagaatat

SEQ ID NO: 311824 - DNA, 19 bp, Homo sapiens
  siRNA target sequence for TAIP-2 (NM_024969.2,1172-1190).
cactccgtagaatattcaa

SEQ ID NO: 311825 - DNA, 19 bp, Homo sapiens
  siRNA target sequence for TAIP-2 (NM_024969.2,1192-1210).
cgcagacagttttgagatt

SEQ ID NO: 311826 - DNA, 19 bp, Homo sapiens
  siRNA target sequence for TAIP-2 (NM_024969.2,1243-1261).
gcagtcggctgaagaatta

SEQ ID NO: 311827 - DNA, 19 bp, Homo sapiens
  siRNA target sequence for TAIP-2 (NM_024969.2,1246-1264).
gtcggctgaagaattagat

SEQ ID NO: 311828 - DNA, 19 bp, Homo sapiens
  siRNA target sequence for TAIP-2 (NM_024969.2,1312-1330).
cagcggagtcacagattct

SEQ ID NO: 311829 - DNA, 19 bp, Homo sapiens
  siRNA target sequence for TAIP-2 (NM_024969.2,1446-1464).
gcacccatgccgaagttgt

SEQ ID NO: 311830 - DNA, 19 bp, Homo sapiens
  siRNA target sequence for TAIP-2 (NM_024969.2,1556-1574).
ctgtattaccaaatagata

SEQ ID NO: 311831 - DNA, 19 bp, Homo sapiens
  siRNA target sequence for TAIP-2 (NM_024969.2,1603-1621).
ctctgagaactattctgaa

SEQ ID NO: 311832 - DNA, 19 bp, Homo sapiens
  siRNA target sequence for TAIP-2 (NM_024969.2,1669-1687).
gaccccggagcaattcgtt

SEQ ID NO: 311833 - DNA, 19 bp, Homo sapiens
  siRNA target sequence for TAIP-2 (NM_024969.2,1674-1692).
cggagcaattcgttgacta

SEQ ID NO: 311834 - DNA, 19 bp, Homo sapiens
  siRNA target sequence for TAIP-2 (NM_024969.2,1675-1693).
ggagcaattcgttgactat

SEQ ID NO: 311835 - DNA, 19 bp, Homo sapiens
  siRNA target sequence for TAIP-2 (NM_024969.2,1740-1758).
ccaacccctctgtaatcgt

SEQ ID NO: 311836 - DNA, 19 bp, Homo sapiens
  siRNA target sequence for TAIP-2 (NM_024969.2,1764-1782).
gctcctcttccgaaaatga

SEQ ID NO: 311837 - DNA, 19 bp, Homo sapiens
  siRNA target sequence for TAIP-2 (NM_024969.2,1786-1804).
cggtgtgccctgcaatagt

SEQ ID NO: 311838 - DNA, 19 bp, Homo sapiens
  siRNA target sequence for TAIP-2 (NM_024969.2,1792-1810).
gccctgcaatagtttatat

SEQ ID NO: 311839 - DNA, 19 bp, Homo sapiens
  siRNA target sequence for TAIP-2 (NM_024969.2,1795-1813).
ctgcaatagtttatatcct

SEQ ID NO: 311840 - DNA, 19 bp, Homo sapiens
  siRNA target sequence for TAIP-2 (NM_024969.2,1838-1856).
gtggaatttcactcatact

SEQ ID NO: 311841 - DNA, 19 bp, Homo sapiens
  siRNA target sequence for TAIP-2 (NM_024969.2,1878-1896).
ggtttgtctctgcattgaa

SEQ ID NO: 311842 - DNA, 19 bp, Homo sapiens
  siRNA target sequence for TAIP-2 (NM_024969.2,1918-1936).
gcatcctgctgaaaattct

SEQ ID NO: 311843 - DNA, 19 bp, Homo sapiens
  siRNA target sequence for TAIP-2 (NM_024969.2,1943-1961).
cttgcagaaaagagcatat

SEQ ID NO: 311844 - DNA, 19 bp, Homo sapiens
  siRNA target sequence for TAIP-2 (NM_024969.2,1964-1982).
catgaagagtgcatcaaat

SEQ ID NO: 311845 - DNA, 19 bp, Homo sapiens
  siRNA target sequence for TEGT (NM_003217.1,75-93).
cgcttttaaaattttctca

SEQ ID NO: 311846 - DNA, 19 bp, Homo sapiens
  siRNA target sequence for TEGT (NM_003217.1,119-137).
ctgaagaaggtctatgcaa

SEQ ID NO: 311847 - DNA, 19 bp, Homo sapiens
  siRNA target sequence for TEGT (NM_003217.1,510-528).
cttccctggggaatgtttt

SEQ ID NO: 311848 - DNA, 19 bp, Homo sapiens
  siRNA target sequence for TEGT (NM_003217.1,513-531).
ccctggggaatgttttctt

SEQ ID NO: 311849 - DNA, 19 bp, Homo sapiens
  siRNA target sequence for TEGT (NM_003217.1,606-624).
ctcaactcattattgaaaa

SEQ ID NO: 311850 - DNA, 19 bp, Homo sapiens
  siRNA target sequence for TEGT (NM_003217.1,625-643).
ggccgaacatggagatcaa

SEQ ID NO: 311851 - DNA, 19 bp, Homo sapiens
  siRNA target sequence for TEGT (NM_003217.1,654-672).
ggcactgcattgatctctt

SEQ ID NO: 311852 - DNA, 19 bp, Homo sapiens
  siRNA target sequence for TEGT (NM_003217.1,665-683).
gatctcttcttagatttca

SEQ ID NO: 311853 - DNA, 19 bp, Homo sapiens
  siRNA target sequence for TRIAD3 (NM_019011.3,575-593).
ccagtattcttacattgat

SEQ ID NO: 311854 - DNA, 19 bp, Homo sapiens
  siRNA target sequence for TRIAD3 (NM_019011.3,827-845).
ctgctatggggaatttcca

SEQ ID NO: 311855 - DNA, 19 bp, Homo sapiens
  siRNA target sequence for TRIAD3 (NM_019011.3,865-883).
gcgcagatgctcacttgtt

SEQ ID NO: 311856 - DNA, 19 bp, Homo sapiens
  siRNA target sequence for TRIAD3 (NM_019011.3,867-885).
gcagatgctcacttgttct

SEQ ID NO: 311857 - DNA, 19 bp, Homo sapiens
  siRNA target sequence for TRIAD3 (NM_019011.3,1088-1106).
gtgcccgtcctgtagcttt

SEQ ID NO: 311858 - DNA, 19 bp, Homo sapiens
  siRNA target sequence for TRIAD3 (NM_019011.3,1133-1151).
gaggttcagctgtcctaat

SEQ ID NO: 311859 - DNA, 19 bp, Homo sapiens
  siRNA target sequence for TRIAD3 (NM_019011.3,1152-1170).
cctcactgccgaaaggaaa

SEQ ID NO: 311860 - DNA, 19 bp, Homo sapiens
  siRNA target sequence for TRIAD3 (NM_019011.3,1250-1268).
gtaccgtacctctattgaa

SEQ ID NO: 311861 - DNA, 19 bp, Homo sapiens
  siRNA target sequence for TRIAD3 (NM_019011.3,1255-1273).
gtacctctattgaagaaaa

SEQ ID NO: 311862 - DNA, 19 bp, Homo sapiens
  siRNA target sequence for TRIAD3 (NM_019011.3,1277-1295).
gactgctgcccgcattaga

SEQ ID NO: 311863 - DNA, 19 bp, Homo sapiens
  siRNA target sequence for TRIAD3 (NM_019011.3,1281-1299).
gctgcccgcattagaaaat

SEQ ID NO: 311864 - DNA, 19 bp, Homo sapiens
  siRNA target sequence for TRIAD3 (NM_019011.3,1311-1329).
gggactggcctcatcaaat

SEQ ID NO: 311865 - DNA, 19 bp, Homo sapiens
  siRNA target sequence for TRIAD3 (NM_019011.3,1313-1331).
gactggcctcatcaaatct

SEQ ID NO: 311866 - DNA, 19 bp, Homo sapiens
  siRNA target sequence for TRIAD3 (NM_019011.3,1335-1353).
ggctgcaaccgcatgtctt

SEQ ID NO: 311867 - DNA, 19 bp, Homo sapiens
  siRNA target sequence for TRIAD3 (NM_019011.3,1379-1397).
cctctgtcgagtttctatt

SEQ ID NO: 311868 - DNA, 19 bp, Homo sapiens
  siRNA target sequence for TRIAD3 (NM_019011.3,1380-1398).
ctctgtcgagtttctatta

SEQ ID NO: 311869 - DNA, 19 bp, Homo sapiens
  siRNA target sequence for TRIAD3 (NM_019011.3,1386-1404).
cgagtttctattaatggat

SEQ ID NO: 311870 - DNA, 19 bp, Homo sapiens
  siRNA target sequence for TRIAD3 (NM_019011.3,1443-1461).
ccttgccaggagtgttcaa

SEQ ID NO: 311871 - DNA, 19 bp, Homo sapiens
  siRNA target sequence for TRIAD3 (NM_019011.3,1475-1493).
gaccgatcccactgaagat

SEQ ID NO: 311872 - DNA, 19 bp, Homo sapiens
  siRNA target sequence for TRIAD3 (NM_019011.3,1713-1731).
cggcctgtgttcaacaact

SEQ ID NO: 311873 - DNA, 19 bp, Homo sapiens
  siRNA target sequence for TRIAD3 (NM_019011.3,1780-1798).
ccaacgtgcgggtcaacta

SEQ ID NO: 311874 - DNA, 19 bp, Homo sapiens
  siRNA target sequence for TRIAD3 (NM_019011.3,1781-1799).
caacgtgcgggtcaactat

SEQ ID NO: 311875 - DNA, 19 bp, Homo sapiens
  siRNA target sequence for TRIAD3 (NM_019011.3,1785-1803).
gtgcgggtcaactatgact

SEQ ID NO: 311876 - DNA, 19 bp, Homo sapiens
  siRNA target sequence for C6 (NM_000065.1,163-181).
gacgctctgtcttgtactt

SEQ ID NO: 311877 - DNA, 19 bp, Homo sapiens
  siRNA target sequence for C6 (NM_000065.1,165-183).
cgctctgtcttgtacttca

SEQ ID NO: 311878 - DNA, 19 bp, Homo sapiens
  siRNA target sequence for C6 (NM_000065.1,217-235).
cctgcttctgtgatcacta

SEQ ID NO: 311879 - DNA, 19 bp, Homo sapiens
  siRNA target sequence for C6 (NM_000065.1,260-278).
ctcaaaaacttgcaattct

SEQ ID NO: 311880 - DNA, 19 bp, Homo sapiens
  siRNA target sequence for C6 (NM_000065.1,287-305).
gagcagacacagacaaata

SEQ ID NO: 311881 - DNA, 19 bp, Homo sapiens
  siRNA target sequence for C6 (NM_000065.1,292-310).
gacacagacaaatagtagt

SEQ ID NO: 311882 - DNA, 19 bp, Homo sapiens
  siRNA target sequence for C6 (NM_000065.1,296-314).
cagacaaatagtagtagat

SEQ ID NO: 311883 - DNA, 19 bp, Homo sapiens
  siRNA target sequence for C6 (NM_000065.1,300-318).
caaatagtagtagataagt

SEQ ID NO: 311884 - DNA, 19 bp, Homo sapiens
  siRNA target sequence for C6 (NM_000065.1,320-338).
ctaccaggaaaacttttgt

SEQ ID NO: 311885 - DNA, 19 bp, Homo sapiens
  siRNA target sequence for C6 (NM_000065.1,427-445).
cagactgtgacccttgtat

SEQ ID NO: 311886 - DNA, 19 bp, Homo sapiens
  siRNA target sequence for C6 (NM_000065.1,473-491).
cttgcgtcccagtcagttt

SEQ ID NO: 311887 - DNA, 19 bp, Homo sapiens
  siRNA target sequence for C6 (NM_000065.1,564-582).
gaggctgactgcaagaata

SEQ ID NO: 311888 - DNA, 19 bp, Homo sapiens
  siRNA target sequence for C6 (NM_000065.1,568-586).
ctgactgcaagaataaatt

SEQ ID NO: 311889 - DNA, 19 bp, Homo sapiens
  siRNA target sequence for C6 (NM_000065.1,690-708).
gtatgcacacggaagtata

SEQ ID NO: 311890 - DNA, 19 bp, Homo sapiens
  siRNA target sequence for C6 (NM_000065.1,731-749).
gatgggcaatgggtttcat

SEQ ID NO: 311891 - DNA, 19 bp, Homo sapiens
  siRNA target sequence for C6 (NM_000065.1,824-842).
cagtaggacaagtaatcca

SEQ ID NO: 311892 - DNA, 19 bp, Homo sapiens
  siRNA target sequence for C6 (NM_000065.1,826-844).
gtaggacaagtaatccata

SEQ ID NO: 311893 - DNA, 19 bp, Homo sapiens
  siRNA target sequence for C6 (NM_000065.1,870-888).
gtcggctttgaggtacaaa

SEQ ID NO: 311894 - DNA, 19 bp, Homo sapiens
  siRNA target sequence for C6 (NM_000065.1,872-890).
cggctttgaggtacaaact

SEQ ID NO: 311895 - DNA, 19 bp, Homo sapiens
  siRNA target sequence for C6 (NM_000065.1,912-930).
gatttctacaaggatttaa

SEQ ID NO: 311896 - DNA, 19 bp, Homo sapiens
  siRNA target sequence for C6 (NM_000065.1,985-1003).
gctctttcagtgtaccaat

SEQ ID NO: 311897 - DNA, 19 bp, Homo sapiens
  siRNA target sequence for C6 (NM_000065.1,986-1004).
ctctttcagtgtaccaatt

SEQ ID NO: 311898 - DNA, 19 bp, Homo sapiens
  siRNA target sequence for C6 (NM_000065.1,1090-1108).
gttttattaggatccataa

SEQ ID NO: 311899 - DNA, 19 bp, Homo sapiens
  siRNA target sequence for C6 (NM_000065.1,1104-1122).
cataaagtgatgaaagtct

SEQ ID NO: 311900 - DNA, 19 bp, Homo sapiens
  siRNA target sequence for C6 (NM_000065.1,1121-1139).
cttaaacttcacaacgaaa

SEQ ID NO: 311901 - DNA, 19 bp, Homo sapiens
  siRNA target sequence for C6 (NM_000065.1,1132-1150).
caacgaaagctaaagatct

SEQ ID NO: 311902 - DNA, 19 bp, Homo sapiens
  siRNA target sequence for C6 (NM_000065.1,1151-1169).
gcacctttctgatgtcttt

SEQ ID NO: 311903 - DNA, 19 bp, Homo sapiens
  siRNA target sequence for C6 (NM_000065.1,1185-1203).
catctgcctctagaataca

SEQ ID NO: 311904 - DNA, 19 bp, Homo sapiens
  siRNA target sequence for C6 (NM_000065.1,1209-1227).
gctttgtacagccgaatat

SEQ ID NO: 311905 - DNA, 19 bp, Homo sapiens
  siRNA target sequence for C6 (NM_000065.1,1214-1232).
gtacagccgaatattcgat

SEQ ID NO: 311906 - DNA, 19 bp, Homo sapiens
  siRNA target sequence for C6 (NM_000065.1,1219-1237).
gccgaatattcgatgactt

SEQ ID NO: 311907 - DNA, 19 bp, Homo sapiens
  siRNA target sequence for C6 (NM_000065.1,1220-1238).
ccgaatattcgatgacttt

SEQ ID NO: 311908 - DNA, 19 bp, Homo sapiens
  siRNA target sequence for C6 (NM_000065.1,1264-1282).
ccctgggaggcgtgtatga

SEQ ID NO: 311909 - DNA, 19 bp, Homo sapiens
  siRNA target sequence for C6 (NM_000065.1,1273-1291).
gcgtgtatgaccttctcta

SEQ ID NO: 311910 - DNA, 19 bp, Homo sapiens
  siRNA target sequence for C6 (NM_000065.1,1274-1292).
cgtgtatgaccttctctat

SEQ ID NO: 311911 - DNA, 19 bp, Homo sapiens
  siRNA target sequence for C6 (NM_000065.1,1300-1318).
gcagtgaggaactaaagaa

SEQ ID NO: 311912 - DNA, 19 bp, Homo sapiens
  siRNA target sequence for C6 (NM_000065.1,1347-1365).
cactgtgtcaggattgaaa

SEQ ID NO: 311913 - DNA, 19 bp, Homo sapiens
  siRNA target sequence for C6 (NM_000065.1,1349-1367).
ctgtgtcaggattgaaaca

SEQ ID NO: 311914 - DNA, 19 bp, Homo sapiens
  siRNA target sequence for C6 (NM_000065.1,1366-1384).
caaagaaacgcgttttatt

SEQ ID NO: 311915 - DNA, 19 bp, Homo sapiens
  siRNA target sequence for C6 (NM_000065.1,1564-1582).
ctgagtggttagaatcagt

SEQ ID NO: 311916 - DNA, 19 bp, Homo sapiens
  siRNA target sequence for C6 (NM_000065.1,1620-1638).
cccatcgtggacttggtaa

SEQ ID NO: 311917 - DNA, 19 bp, Homo sapiens
  siRNA target sequence for C6 (NM_000065.1,1626-1644).
gtggacttggtaagaaaca

SEQ ID NO: 311918 - DNA, 19 bp, Homo sapiens
  siRNA target sequence for C6 (NM_000065.1,1646-1664).
cccctgtgcagtgacaaaa

SEQ ID NO: 311919 - DNA, 19 bp, Homo sapiens
  siRNA target sequence for C6 (NM_000065.1,1818-1836).
cagtctccagattataaat

SEQ ID NO: 311920 - DNA, 19 bp, Homo sapiens
  siRNA target sequence for C6 (NM_000065.1,1879-1897).
gtacctgtgatgctactta

SEQ ID NO: 311921 - DNA, 19 bp, Homo sapiens
  siRNA target sequence for C6 (NM_000065.1,1882-1900).
cctgtgatgctacttataa

SEQ ID NO: 311922 - DNA, 19 bp, Homo sapiens
  siRNA target sequence for C6 (NM_000065.1,1906-1924).
cgagaacccgagaatgcaa

SEQ ID NO: 311923 - DNA, 19 bp, Homo sapiens
  siRNA target sequence for C6 (NM_000065.1,1907-1925).
gagaacccgagaatgcaat

SEQ ID NO: 311924 - DNA, 19 bp, Homo sapiens
  siRNA target sequence for C6 (NM_000065.1,1977-1995).
gaggaagactgcacatttt

SEQ ID NO: 311925 - DNA, 19 bp, Homo sapiens
  siRNA target sequence for C6 (NM_000065.1,2051-2069).
ggtcgatcttcctgagata

SEQ ID NO: 311926 - DNA, 19 bp, Homo sapiens
  siRNA target sequence for C6 (NM_000065.1,2054-2072).
cgatcttcctgagatagaa

SEQ ID NO: 311927 - DNA, 19 bp, Homo sapiens
  siRNA target sequence for C6 (NM_000065.1,2171-2189).
ccttactggctttgaaact

SEQ ID NO: 311928 - DNA, 19 bp, Homo sapiens
  siRNA target sequence for C6 (NM_000065.1,2179-2197).
gctttgaaactgttggata

SEQ ID NO: 311929 - DNA, 19 bp, Homo sapiens
  siRNA target sequence for C6 (NM_000065.1,2282-2300).
gcaggaagtcctgacaatt

SEQ ID NO: 311930 - DNA, 19 bp, Homo sapiens
  siRNA target sequence for C6 (NM_000065.1,2407-2425).
ggacaccacccatttcaaa

SEQ ID NO: 311931 - DNA, 19 bp, Homo sapiens
  siRNA target sequence for C6 (NM_000065.1,2445-2463).
gatactctaacaaaattaa

SEQ ID NO: 311932 - DNA, 19 bp, Homo sapiens
  siRNA target sequence for C6 (NM_000065.1,2531-2549).
ctgtagccatcattcagaa

SEQ ID NO: 311933 - DNA, 19 bp, Homo sapiens
  siRNA target sequence for C6 (NM_000065.1,2569-2587).
cagactccaacgattactt

SEQ ID NO: 311934 - DNA, 19 bp, Homo sapiens
  siRNA target sequence for C6 (NM_000065.1,2571-2589).
gactccaacgattacttta

SEQ ID NO: 311935 - DNA, 19 bp, Homo sapiens
  siRNA target sequence for C6 (NM_000065.1,2590-2608).
cttcacccgcttgtaagtt

SEQ ID NO: 311936 - DNA, 19 bp, Homo sapiens
  siRNA target sequence for C6 (NM_000065.1,2606-2624).
gtttttggctgagaaatgt

SEQ ID NO: 311937 - DNA, 19 bp, Homo sapiens
  siRNA target sequence for C6 (NM_000065.1,2733-2751).
gaatcctgtggctatgaca

SEQ ID NO: 311938 - DNA, 19 bp, Homo sapiens
  siRNA target sequence for C6 (NM_000065.1,2834-2852).
ccaactctactgtgtcaaa

SEQ ID NO: 311939 - DNA, 19 bp, Homo sapiens
  siRNA target sequence for C6 (NM_000065.1,2892-2910).
gaagtgggaactataagat

SEQ ID NO: 311940 - DNA, 19 bp, Homo sapiens
  siRNA target sequence for C7 (NM_000587.1,7-25).
gtgataagcttattcattt

SEQ ID NO: 311941 - DNA, 19 bp, Homo sapiens
  siRNA target sequence for C7 (NM_000587.1,43-61).
gagttccaaagtttttcaa

SEQ ID NO: 311942 - DNA, 19 bp, Homo sapiens
  siRNA target sequence for C7 (NM_000587.1,45-63).
gttccaaagtttttcaagt

SEQ ID NO: 311943 - DNA, 19 bp, Homo sapiens
  siRNA target sequence for C7 (NM_000587.1,101-119).
ccccttggtcagaatgcaa

SEQ ID NO: 311944 - DNA, 19 bp, Homo sapiens
  siRNA target sequence for C7 (NM_000587.1,147-165).
gcggtcagttgctgtgtat

SEQ ID NO: 311945 - DNA, 19 bp, Homo sapiens
  siRNA target sequence for C7 (NM_000587.1,179-197).
gccagccttgtgttggaaa

SEQ ID NO: 311946 - DNA, 19 bp, Homo sapiens
  siRNA target sequence for C7 (NM_000587.1,185-203).
cttgtgttggaaatgcttt

SEQ ID NO: 311947 - DNA, 19 bp, Homo sapiens
  siRNA target sequence for C7 (NM_000587.1,259-277).
gagcgtttcaggtgctttt

SEQ ID NO: 311948 - DNA, 19 bp, Homo sapiens
  siRNA target sequence for C7 (NM_000587.1,280-298).
ggtcagtgcatcagcaaat

SEQ ID NO: 311949 - DNA, 19 bp, Homo sapiens
  siRNA target sequence for C7 (NM_000587.1,288-306).
catcagcaaatcattggtt

SEQ ID NO: 311950 - DNA, 19 bp, Homo sapiens
  siRNA target sequence for C7 (NM_000587.1,293-311).
gcaaatcattggtttgcaa

SEQ ID NO: 311951 - DNA, 19 bp, Homo sapiens
  siRNA target sequence for C7 (NM_000587.1,294-312).
caaatcattggtttgcaat

SEQ ID NO: 311952 - DNA, 19 bp, Homo sapiens
  siRNA target sequence for C7 (NM_000587.1,374-392).
gaccttcctgtgatatcga

SEQ ID NO: 311953 - DNA, 19 bp, Homo sapiens
  siRNA target sequence for C7 (NM_000587.1,381-399).
ctgtgatatcgataaacct

SEQ ID NO: 311954 - DNA, 19 bp, Homo sapiens
  siRNA target sequence for C7 (NM_000587.1,400-418).
cctcctaacatagaactta

SEQ ID NO: 311955 - DNA, 19 bp, Homo sapiens
  siRNA target sequence for C7 (NM_000587.1,459-477).
cagagtcatcaataccaaa

SEQ ID NO: 311956 - DNA, 19 bp, Homo sapiens
  siRNA target sequence for C7 (NM_000587.1,528-546).
ctacaggctgagtggaaat

SEQ ID NO: 311957 - DNA, 19 bp, Homo sapiens
  siRNA target sequence for C7 (NM_000587.1,541-559).
ggaaatgtcctgtcctata

SEQ ID NO: 311958 - DNA, 19 bp, Homo sapiens
  siRNA target sequence for C7 (NM_000587.1,636-654).
gacagaacacacatcatct

SEQ ID NO: 311959 - DNA, 19 bp, Homo sapiens
  siRNA target sequence for C7 (NM_000587.1,656-674).
gtcggaagcgctccttttt

SEQ ID NO: 311960 - DNA, 19 bp, Homo sapiens
  siRNA target sequence for C7 (NM_000587.1,658-676).
cggaagcgctcctttttta

SEQ ID NO: 311961 - DNA, 19 bp, Homo sapiens
  siRNA target sequence for C7 (NM_000587.1,660-678).
gaagcgctccttttttaga

SEQ ID NO: 311962 - DNA, 19 bp, Homo sapiens
  siRNA target sequence for C7 (NM_000587.1,663-681).
gcgctccttttttagatct

SEQ ID NO: 311963 - DNA, 19 bp, Homo sapiens
  siRNA target sequence for C7 (NM_000587.1,664-682).
cgctccttttttagatctt

SEQ ID NO: 311964 - DNA, 19 bp, Homo sapiens
  siRNA target sequence for C7 (NM_000587.1,697-715).
cgcagttatacttcacata

SEQ ID NO: 311965 - DNA, 19 bp, Homo sapiens
  siRNA target sequence for C7 (NM_000587.1,701-719).
gttatacttcacataccaa

SEQ ID NO: 311966 - DNA, 19 bp, Homo sapiens
  siRNA target sequence for C7 (NM_000587.1,712-730).
cataccaatgaaatccata

SEQ ID NO: 311967 - DNA, 19 bp, Homo sapiens
  siRNA target sequence for C7 (NM_000587.1,872-890).
cctaccgaagattaatcga

SEQ ID NO: 311968 - DNA, 19 bp, Homo sapiens
  siRNA target sequence for C7 (NM_000587.1,889-907).
gaccagtacgggacacatt

SEQ ID NO: 311969 - DNA, 19 bp, Homo sapiens
  siRNA target sequence for C7 (NM_000587.1,891-909).
ccagtacgggacacattat

SEQ ID NO: 311970 - DNA, 19 bp, Homo sapiens
  siRNA target sequence for C7 (NM_000587.1,920-938).
ggtcgttaggaggagaata

SEQ ID NO: 311971 - DNA, 19 bp, Homo sapiens
  siRNA target sequence for C7 (NM_000587.1,994-1012).
gtcgaagaaaagaaatgta

SEQ ID NO: 311972 - DNA, 19 bp, Homo sapiens
  siRNA target sequence for C7 (NM_000587.1,1026-1044).
gcattttgtcgttaaattt

SEQ ID NO: 311973 - DNA, 19 bp, Homo sapiens
  siRNA target sequence for C7 (NM_000587.1,1035-1053).
cgttaaattttcaagtcat

SEQ ID NO: 311974 - DNA, 19 bp, Homo sapiens
  siRNA target sequence for C7 (NM_000587.1,1063-1081).
gaactggaaaacgctttaa

SEQ ID NO: 311975 - DNA, 19 bp, Homo sapiens
  siRNA target sequence for C7 (NM_000587.1,1088-1106).
cttcaggaacccagaacaa

SEQ ID NO: 311976 - DNA, 19 bp, Homo sapiens
  siRNA target sequence for C7 (NM_000587.1,1114-1132).
cgaggagaaccgttcatca

SEQ ID NO: 311977 - DNA, 19 bp, Homo sapiens
  siRNA target sequence for C7 (NM_000587.1,1182-1200).
caatcctgctggaaacaaa

SEQ ID NO: 311978 - DNA, 19 bp, Homo sapiens
  siRNA target sequence for C7 (NM_000587.1,1298-1316).
gtgcctctgtgaaaaaact

SEQ ID NO: 311979 - DNA, 19 bp, Homo sapiens
  siRNA target sequence for C7 (NM_000587.1,1300-1318).
gcctctgtgaaaaaactat

SEQ ID NO: 311980 - DNA, 19 bp, Homo sapiens
  siRNA target sequence for C7 (NM_000587.1,1328-1346).
gggctcttgaagagtatct

SEQ ID NO: 311981 - DNA, 19 bp, Homo sapiens
  siRNA target sequence for C7 (NM_000587.1,1431-1449).
caaaccgtacacatttggt

SEQ ID NO: 311982 - DNA, 19 bp, Homo sapiens
  siRNA target sequence for C7 (NM_000587.1,1625-1643).
gcacacaatgcgaagatga

SEQ ID NO: 311983 - DNA, 19 bp, Homo sapiens
  siRNA target sequence for C7 (NM_000587.1,1665-1683).
gcttgaaccacattgcttt

SEQ ID NO: 311984 - DNA, 19 bp, Homo sapiens
  siRNA target sequence for C7 (NM_000587.1,1695-1713).
ggttccaacagaattctgt

SEQ ID NO: 311985 - DNA, 19 bp, Homo sapiens
  siRNA target sequence for C7 (NM_000587.1,1805-1823).
gatactctcttattggaaa

SEQ ID NO: 311986 - DNA, 19 bp, Homo sapiens
  siRNA target sequence for C7 (NM_000587.1,1856-1874).
ggcttgttggggaaatgca

SEQ ID NO: 311987 - DNA, 19 bp, Homo sapiens
  siRNA target sequence for C7 (NM_000587.1,1892-1910).
gtgttctacctgtactgat

SEQ ID NO: 311988 - DNA, 19 bp, Homo sapiens
  siRNA target sequence for C7 (NM_000587.1,2057-2075).
cccgctgtgtacaaaaaga

SEQ ID NO: 311989 - DNA, 19 bp, Homo sapiens
  siRNA target sequence for C7 (NM_000587.1,2058-2076).
ccgctgtgtacaaaaagaa

SEQ ID NO: 311990 - DNA, 19 bp, Homo sapiens
  siRNA target sequence for C7 (NM_000587.1,2059-2077).
cgctgtgtacaaaaagaaa

SEQ ID NO: 311991 - DNA, 19 bp, Homo sapiens
  siRNA target sequence for C7 (NM_000587.1,2124-2142).
gcagaattcaagatgtgtt

SEQ ID NO: 311992 - DNA, 19 bp, Homo sapiens
  siRNA target sequence for C7 (NM_000587.1,2175-2193).
ggatgtatgtgctcaagat

SEQ ID NO: 311993 - DNA, 19 bp, Homo sapiens
  siRNA target sequence for C7 (NM_000587.1,2299-2317).
gcctcagctgagaaagctt

SEQ ID NO: 311994 - DNA, 19 bp, Homo sapiens
  siRNA target sequence for C8A (NM_000562.1,206-224).
ggtgaaccagagagtaaga

SEQ ID NO: 311995 - DNA, 19 bp, Homo sapiens
  siRNA target sequence for C8A (NM_000562.1,291-309).
ccgtgccaggacaaaaagt

SEQ ID NO: 311996 - DNA, 19 bp, Homo sapiens
  siRNA target sequence for C8A (NM_000562.1,292-310).
cgtgccaggacaaaaagta

SEQ ID NO: 311997 - DNA, 19 bp, Homo sapiens
  siRNA target sequence for C8A (NM_000562.1,389-407).
ctccagttctacaacttgt

SEQ ID NO: 311998 - DNA, 19 bp, Homo sapiens
  siRNA target sequence for C8A (NM_000562.1,392-410).
cagttctacaacttgtgta

SEQ ID NO: 311999 - DNA, 19 bp, Homo sapiens
  siRNA target sequence for C8A (NM_000562.1,556-574).
gcagccagtatgaaccaat

SEQ ID NO: 312000 - DNA, 19 bp, Homo sapiens
  siRNA target sequence for C8A (NM_000562.1,557-575).
cagccagtatgaaccaatt

SEQ ID NO: 312001 - DNA, 19 bp, Homo sapiens
  siRNA target sequence for C8A (NM_000562.1,592-610).
cagccttggggtacaatat

SEQ ID NO: 312002 - DNA, 19 bp, Homo sapiens
  siRNA target sequence for C8A (NM_000562.1,636-654).
gtgtacgatgccagttatt

SEQ ID NO: 312003 - DNA, 19 bp, Homo sapiens
  siRNA target sequence for C8A (NM_000562.1,638-656).
gtacgatgccagttattat

SEQ ID NO: 312004 - DNA, 19 bp, Homo sapiens
  siRNA target sequence for C8A (NM_000562.1,663-681).
cagtgtgagacggtataca

SEQ ID NO: 312005 - DNA, 19 bp, Homo sapiens
  siRNA target sequence for C8A (NM_000562.1,715-733).
cctgtgaacgtctctacta

SEQ ID NO: 312006 - DNA, 19 bp, Homo sapiens
  siRNA target sequence for C8A (NM_000562.1,716-734).
ctgtgaacgtctctactat

SEQ ID NO: 312007 - DNA, 19 bp, Homo sapiens
  siRNA target sequence for C8A (NM_000562.1,807-825).
ggaatctcctcagagtttt

SEQ ID NO: 312008 - DNA, 19 bp, Homo sapiens
  siRNA target sequence for C8A (NM_000562.1,840-858).
gaccttctttccaaagtta

SEQ ID NO: 312009 - DNA, 19 bp, Homo sapiens
  siRNA target sequence for C8A (NM_000562.1,842-860).
ccttctttccaaagttaaa

SEQ ID NO: 312010 - DNA, 19 bp, Homo sapiens
  siRNA target sequence for C8A (NM_000562.1,843-861).
cttctttccaaagttaaaa

SEQ ID NO: 312011 - DNA, 19 bp, Homo sapiens
  siRNA target sequence for C8A (NM_000562.1,907-925).
ccggcagccctttattggt

SEQ ID NO: 312012 - DNA, 19 bp, Homo sapiens
  siRNA target sequence for C8A (NM_000562.1,942-960).
cactcacaagacacttcat

SEQ ID NO: 312013 - DNA, 19 bp, Homo sapiens
  siRNA target sequence for C8A (NM_000562.1,948-966).
caagacacttcattcttga

SEQ ID NO: 312014 - DNA, 19 bp, Homo sapiens
  siRNA target sequence for C8A (NM_000562.1,955-973).
cttcattcttgaacgaatt

SEQ ID NO: 312015 - DNA, 19 bp, Homo sapiens
  siRNA target sequence for C8A (NM_000562.1,958-976).
cattcttgaacgaattaaa

SEQ ID NO: 312016 - DNA, 19 bp, Homo sapiens
  siRNA target sequence for C8A (NM_000562.1,968-986).
cgaattaaacaagtataat

SEQ ID NO: 312017 - DNA, 19 bp, Homo sapiens
  siRNA target sequence for C8A (NM_000562.1,1022-1040).
ggtgcagactgcacatttt

SEQ ID NO: 312018 - DNA, 19 bp, Homo sapiens
  siRNA target sequence for C8A (NM_000562.1,1023-1041).
gtgcagactgcacatttta

SEQ ID NO: 312019 - DNA, 19 bp, Homo sapiens
  siRNA target sequence for C8A (NM_000562.1,1048-1066).
ggaaggatgacattatgct

SEQ ID NO: 312020 - DNA, 19 bp, Homo sapiens
  siRNA target sequence for C8A (NM_000562.1,1097-1115).
gcttccagatcagtacaat

SEQ ID NO: 312021 - DNA, 19 bp, Homo sapiens
  siRNA target sequence for C8A (NM_000562.1,1120-1138).
gcatgtatgccaagttcat

SEQ ID NO: 312022 - DNA, 19 bp, Homo sapiens
  siRNA target sequence for C8A (NM_000562.1,1128-1146).
gccaagttcatcaatgact

SEQ ID NO: 312023 - DNA, 19 bp, Homo sapiens
  siRNA target sequence for C8A (NM_000562.1,1129-1147).
ccaagttcatcaatgacta

SEQ ID NO: 312024 - DNA, 19 bp, Homo sapiens
  siRNA target sequence for C8A (NM_000562.1,1149-1167).
ggcacccattacatcacat

SEQ ID NO: 312025 - DNA, 19 bp, Homo sapiens
  siRNA target sequence for C8A (NM_000562.1,1171-1189).
gatccatgggtggcattta

SEQ ID NO: 312026 - DNA, 19 bp, Homo sapiens
  siRNA target sequence for C8A (NM_000562.1,1174-1192).
ccatgggtggcatttatga

SEQ ID NO: 312027 - DNA, 19 bp, Homo sapiens
  siRNA target sequence for C8A (NM_000562.1,1175-1193).
catgggtggcatttatgaa

SEQ ID NO: 312028 - DNA, 19 bp, Homo sapiens
  siRNA target sequence for C8A (NM_000562.1,1200-1218).
ctggtgattgacaaagcaa

SEQ ID NO: 312029 - DNA, 19 bp, Homo sapiens
  siRNA target sequence for C8A (NM_000562.1,1224-1242).
gaatcccttggtattacca

SEQ ID NO: 312030 - DNA, 19 bp, Homo sapiens
  siRNA target sequence for C8A (NM_000562.1,1234-1252).
gtattaccagcagagatat

SEQ ID NO: 312031 - DNA, 19 bp, Homo sapiens
  siRNA target sequence for C8A (NM_000562.1,1246-1264).
gagatatcacgacatgttt

SEQ ID NO: 312032 - DNA, 19 bp, Homo sapiens
  siRNA target sequence for C8A (NM_000562.1,1273-1291).
ccttgggcattcaatatga

SEQ ID NO: 312033 - DNA, 19 bp, Homo sapiens
  siRNA target sequence for C8A (NM_000562.1,1443-1461).
cagaacaggagcaccatta

SEQ ID NO: 312034 - DNA, 19 bp, Homo sapiens
  siRNA target sequence for C8A (NM_000562.1,1475-1493).
ggggaggtcattaaagtat

SEQ ID NO: 312035 - DNA, 19 bp, Homo sapiens
  siRNA target sequence for C8A (NM_000562.1,1476-1494).
gggaggtcattaaagtata

SEQ ID NO: 312036 - DNA, 19 bp, Homo sapiens
  siRNA target sequence for C8A (NM_000562.1,1477-1495).
ggaggtcattaaagtataa

SEQ ID NO: 312037 - DNA, 19 bp, Homo sapiens
  siRNA target sequence for C8A (NM_000562.1,1498-1516).
ctgttgttatcgattttga

SEQ ID NO: 312038 - DNA, 19 bp, Homo sapiens
  siRNA target sequence for C8A (NM_000562.1,1500-1518).
gttgttatcgattttgaga

SEQ ID NO: 312039 - DNA, 19 bp, Homo sapiens
  siRNA target sequence for C8A (NM_000562.1,1593-1611).
gccttggaccagtatctga

SEQ ID NO: 312040 - DNA, 19 bp, Homo sapiens
  siRNA target sequence for C8A (NM_000562.1,1594-1612).
ccttggaccagtatctgat

SEQ ID NO: 312041 - DNA, 19 bp, Homo sapiens
  siRNA target sequence for C8A (NM_000562.1,1856-1874).
gtgtccagggcggaaagta

SEQ ID NO: 312042 - DNA, 19 bp, Homo sapiens
  siRNA target sequence for C8A (NM_000562.1,1858-1876).
gtccagggcggaaagtaca

SEQ ID NO: 312043 - DNA, 19 bp, Homo sapiens
  siRNA target sequence for C8B (NM_000066.1,89-107).
ccctgggctgtctcagttt

SEQ ID NO: 312044 - DNA, 19 bp, Homo sapiens
  siRNA target sequence for C8B (NM_000066.1,122-140).
gtgaaaggccacattcctt

SEQ ID NO: 312045 - DNA, 19 bp, Homo sapiens
  siRNA target sequence for C8B (NM_000066.1,204-222).
cctgatgcccattgattgt

SEQ ID NO: 312046 - DNA, 19 bp, Homo sapiens
  siRNA target sequence for C8B (NM_000066.1,316-334).
ggggaaccgtgcaacttct

SEQ ID NO: 312047 - DNA, 19 bp, Homo sapiens
  siRNA target sequence for C8B (NM_000066.1,432-450).
ccgcagacttctttgcaat

SEQ ID NO: 312048 - DNA, 19 bp, Homo sapiens
  siRNA target sequence for C8B (NM_000066.1,517-535).
catgaaatggaccaatact

SEQ ID NO: 312049 - DNA, 19 bp, Homo sapiens
  siRNA target sequence for C8B (NM_000066.1,548-566).
gtctggccagtgggataaa

SEQ ID NO: 312050 - DNA, 19 bp, Homo sapiens
  siRNA target sequence for C8B (NM_000066.1,550-568).
ctggccagtgggataaatt

SEQ ID NO: 312051 - DNA, 19 bp, Homo sapiens
  siRNA target sequence for C8B (NM_000066.1,553-571).
gccagtgggataaatttgt

SEQ ID NO: 312052 - DNA, 19 bp, Homo sapiens
  siRNA target sequence for C8B (NM_000066.1,554-572).
ccagtgggataaatttgtt

SEQ ID NO: 312053 - DNA, 19 bp, Homo sapiens
  siRNA target sequence for C8B (NM_000066.1,622-640).
ggatgctccccgcattaca

SEQ ID NO: 312054 - DNA, 19 bp, Homo sapiens
  siRNA target sequence for C8B (NM_000066.1,623-641).
gatgctccccgcattacat

SEQ ID NO: 312055 - DNA, 19 bp, Homo sapiens
  siRNA target sequence for C8B (NM_000066.1,643-661).
ctgaacacgaggtttagga

SEQ ID NO: 312056 - DNA, 19 bp, Homo sapiens
  siRNA target sequence for C8B (NM_000066.1,654-672).
gtttaggaagccctacaat

SEQ ID NO: 312057 - DNA, 19 bp, Homo sapiens
  siRNA target sequence for C8B (NM_000066.1,665-683).
cctacaatgtggaaagcta

SEQ ID NO: 312058 - DNA, 19 bp, Homo sapiens
  siRNA target sequence for C8B (NM_000066.1,693-711).
gacccaaggcaaatacgaa

SEQ ID NO: 312059 - DNA, 19 bp, Homo sapiens
  siRNA target sequence for C8B (NM_000066.1,695-713).
cccaaggcaaatacgaatt

SEQ ID NO: 312060 - DNA, 19 bp, Homo sapiens
  siRNA target sequence for C8B (NM_000066.1,700-718).
ggcaaatacgaattcatat

SEQ ID NO: 312061 - DNA, 19 bp, Homo sapiens
  siRNA target sequence for C8B (NM_000066.1,714-732).
catattaaaagagtatgaa

SEQ ID NO: 312062 - DNA, 19 bp, Homo sapiens
  siRNA target sequence for C8B (NM_000066.1,780-798).
gtctggtttcagttttggt

SEQ ID NO: 312063 - DNA, 19 bp, Homo sapiens
  siRNA target sequence for C8B (NM_000066.1,827-845).
gcatcagtagtcaaagtga

SEQ ID NO: 312064 - DNA, 19 bp, Homo sapiens
  siRNA target sequence for C8B (NM_000066.1,844-862).
gatcgaggcaaacactata

SEQ ID NO: 312065 - DNA, 19 bp, Homo sapiens
  siRNA target sequence for C8B (NM_000066.1,847-865).
cgaggcaaacactatatta

SEQ ID NO: 312066 - DNA, 19 bp, Homo sapiens
  siRNA target sequence for C8B (NM_000066.1,850-868).
ggcaaacactatattagga

SEQ ID NO: 312067 - DNA, 19 bp, Homo sapiens
  siRNA target sequence for C8B (NM_000066.1,867-885).
gagaaccaaacgattctct

SEQ ID NO: 312068 - DNA, 19 bp, Homo sapiens
  siRNA target sequence for C8B (NM_000066.1,873-891).
caaacgattctctcatact

SEQ ID NO: 312069 - DNA, 19 bp, Homo sapiens
  siRNA target sequence for C8B (NM_000066.1,877-895).
cgattctctcatactaaaa

SEQ ID NO: 312070 - DNA, 19 bp, Homo sapiens
  siRNA target sequence for C8B (NM_000066.1,922-940).
cttgaagtagcacattaca

SEQ ID NO: 312071 - DNA, 19 bp, Homo sapiens
  siRNA target sequence for C8B (NM_000066.1,953-971).
gaagcctcatgctccatta

SEQ ID NO: 312072 - DNA, 19 bp, Homo sapiens
  siRNA target sequence for C8B (NM_000066.1,956-974).
gcctcatgctccattacga

SEQ ID NO: 312073 - DNA, 19 bp, Homo sapiens
  siRNA target sequence for C8B (NM_000066.1,1074-1092).
gcttgggggcatttatgaa

SEQ ID NO: 312074 - DNA, 19 bp, Homo sapiens
  siRNA target sequence for C8B (NM_000066.1,1095-1113).
caccctcgttatgaacaaa

SEQ ID NO: 312075 - DNA, 19 bp, Homo sapiens
  siRNA target sequence for C8B (NM_000066.1,1229-1247).
gcaaatgcagaggtattct

SEQ ID NO: 312076 - DNA, 19 bp, Homo sapiens
  siRNA target sequence for C8B (NM_000066.1,1406-1424).
cagccatcatcaaagttaa

SEQ ID NO: 312077 - DNA, 19 bp, Homo sapiens
  siRNA target sequence for C8B (NM_000066.1,1428-1446).
ggagcctctgtatgaacta

SEQ ID NO: 312078 - DNA, 19 bp, Homo sapiens
  siRNA target sequence for C8B (NM_000066.1,1475-1493).
gcacagtgaggcagaacat

SEQ ID NO: 312079 - DNA, 19 bp, Homo sapiens
  siRNA target sequence for C8B (NM_000066.1,1541-1559).
gtgctccctgccaaggaaa

SEQ ID NO: 312080 - DNA, 19 bp, Homo sapiens
  siRNA target sequence for C8B (NM_000066.1,1633-1651).
gtctcctatcggaagaata

SEQ ID NO: 312081 - DNA, 19 bp, Homo sapiens
  siRNA target sequence for C8B (NM_000066.1,1772-1790).
gccctgcttcagaaacact

SEQ ID NO: 312082 - DNA, 19 bp, Homo sapiens
  siRNA target sequence for C9 (NM_001737.2,103-121).
ggagctttgcagttgcaat

SEQ ID NO: 312083 - DNA, 19 bp, Homo sapiens
  siRNA target sequence for C9 (NM_001737.2,196-214).
gctctgcatcacacataga

SEQ ID NO: 312084 - DNA, 19 bp, Homo sapiens
  siRNA target sequence for C9 (NM_001737.2,207-225).
cacatagactgcagaatga

SEQ ID NO: 312085 - DNA, 19 bp, Homo sapiens
  siRNA target sequence for C9 (NM_001737.2,252-270).
gatccttgtctcagacaaa

SEQ ID NO: 312086 - DNA, 19 bp, Homo sapiens
  siRNA target sequence for C9 (NM_001737.2,255-273).
ccttgtctcagacaaatgt

SEQ ID NO: 312087 - DNA, 19 bp, Homo sapiens
  siRNA target sequence for C9 (NM_001737.2,272-290).
gtttcgttcaagaagcatt

SEQ ID NO: 312088 - DNA, 19 bp, Homo sapiens
  siRNA target sequence for C9 (NM_001737.2,291-309).
gaggtctttggacaattta

SEQ ID NO: 312089 - DNA, 19 bp, Homo sapiens
  siRNA target sequence for C9 (NM_001737.2,293-311).
ggtctttggacaatttaat

SEQ ID NO: 312090 - DNA, 19 bp, Homo sapiens
  siRNA target sequence for C9 (NM_001737.2,389-407).
ctgcggaaatgactttcaa

SEQ ID NO: 312091 - DNA, 19 bp, Homo sapiens
  siRNA target sequence for C9 (NM_001737.2,431-449).
gatgcgacttcggtgtaat

SEQ ID NO: 312092 - DNA, 19 bp, Homo sapiens
  siRNA target sequence for C9 (NM_001737.2,555-573).
gcaggctatgggatcaaca

SEQ ID NO: 312093 - DNA, 19 bp, Homo sapiens
  siRNA target sequence for C9 (NM_001737.2,558-576).
ggctatgggatcaacattt

SEQ ID NO: 312094 - DNA, 19 bp, Homo sapiens
  siRNA target sequence for C9 (NM_001737.2,559-577).
gctatgggatcaacatttt

SEQ ID NO: 312095 - DNA, 19 bp, Homo sapiens
  siRNA target sequence for C9 (NM_001737.2,560-578).
ctatgggatcaacatttta

SEQ ID NO: 312096 - DNA, 19 bp, Homo sapiens
  siRNA target sequence for C9 (NM_001737.2,591-609).
ctaagcacaccttttgaca

SEQ ID NO: 312097 - DNA, 19 bp, Homo sapiens
  siRNA target sequence for C9 (NM_001737.2,598-616).
caccttttgacaatgagtt

SEQ ID NO: 312098 - DNA, 19 bp, Homo sapiens
  siRNA target sequence for C9 (NM_001737.2,649-667).
gaaacactctgacatacta

SEQ ID NO: 312099 - DNA, 19 bp, Homo sapiens
  siRNA target sequence for C9 (NM_001737.2,679-697).
ggaacgtggcttctttgat

SEQ ID NO: 312100 - DNA, 19 bp, Homo sapiens
  siRNA target sequence for C9 (NM_001737.2,683-701).
cgtggcttctttgatctat

SEQ ID NO: 312101 - DNA, 19 bp, Homo sapiens
  siRNA target sequence for C9 (NM_001737.2,706-724).
ccaaaggcgagaaaaattt

SEQ ID NO: 312102 - DNA, 19 bp, Homo sapiens
  siRNA target sequence for C9 (NM_001737.2,725-743).
cagaaccgaacattacgaa

SEQ ID NO: 312103 - DNA, 19 bp, Homo sapiens
  siRNA target sequence for C9 (NM_001737.2,890-908).
gggtagttttcggttttca

SEQ ID NO: 312104 - DNA, 19 bp, Homo sapiens
  siRNA target sequence for C9 (NM_001737.2,929-947).
ccaactatttttgtcatat

SEQ ID NO: 312105 - DNA, 19 bp, Homo sapiens
  siRNA target sequence for C9 (NM_001737.2,996-1014).
ctgggaagatttgtaatga

SEQ ID NO: 312106 - DNA, 19 bp, Homo sapiens
  siRNA target sequence for C9 (NM_001737.2,1026-1044).
gttgtgctcacaacaactt

SEQ ID NO: 312107 - DNA, 19 bp, Homo sapiens
  siRNA target sequence for C9 (NM_001737.2,1039-1057).
caacttttgtggatgatat

SEQ ID NO: 312108 - DNA, 19 bp, Homo sapiens
  siRNA target sequence for C9 (NM_001737.2,1139-1157).
gtctctaggaggactctat

SEQ ID NO: 312109 - DNA, 19 bp, Homo sapiens
  siRNA target sequence for C9 (NM_001737.2,1147-1165).
gaggactctatgaactaat

SEQ ID NO: 312110 - DNA, 19 bp, Homo sapiens
  siRNA target sequence for C9 (NM_001737.2,1150-1168).
gactctatgaactaatata

SEQ ID NO: 312111 - DNA, 19 bp, Homo sapiens
  siRNA target sequence for C9 (NM_001737.2,1194-1212).
cggaaaggtgttgaactaa

SEQ ID NO: 312112 - DNA, 19 bp, Homo sapiens
  siRNA target sequence for C9 (NM_001737.2,1195-1213).
ggaaaggtgttgaactaaa

SEQ ID NO: 312113 - DNA, 19 bp, Homo sapiens
  siRNA target sequence for C9 (NM_001737.2,1223-1241).
gagatgccttgggtatcat

SEQ ID NO: 312114 - DNA, 19 bp, Homo sapiens
  siRNA target sequence for C9 (NM_001737.2,1233-1251).
gggtatcatctggatgtat

SEQ ID NO: 312115 - DNA, 19 bp, Homo sapiens
  siRNA target sequence for C9 (NM_001737.2,1235-1253).
gtatcatctggatgtatct

SEQ ID NO: 312116 - DNA, 19 bp, Homo sapiens
  siRNA target sequence for C9 (NM_001737.2,1271-1289).
ctctgttggagctgaattt

SEQ ID NO: 312117 - DNA, 19 bp, Homo sapiens
  siRNA target sequence for C9 (NM_001737.2,1273-1291).
ctgttggagctgaatttaa

SEQ ID NO: 312118 - DNA, 19 bp, Homo sapiens
  siRNA target sequence for C9 (NM_001737.2,1315-1333).
gagagggtagagctgtaaa

SEQ ID NO: 312119 - DNA, 19 bp, Homo sapiens
  siRNA target sequence for C9 (NM_001737.2,1320-1338).
ggtagagctgtaaacatca

SEQ ID NO: 312120 - DNA, 19 bp, Homo sapiens
  siRNA target sequence for C9 (NM_001737.2,1339-1357).
ccagtgaaaacctcataga

SEQ ID NO: 312121 - DNA, 19 bp, Homo sapiens
  siRNA target sequence for C9 (NM_001737.2,1359-1377).
gatgttgtttcactcataa

SEQ ID NO: 312122 - DNA, 19 bp, Homo sapiens
  siRNA target sequence for C9 (NM_001737.2,1424-1442).
ccgaggaaccgtgattgat

SEQ ID NO: 312123 - DNA, 19 bp, Homo sapiens
  siRNA target sequence for C9 (NM_001737.2,1426-1444).
gaggaaccgtgattgatgt

SEQ ID NO: 312124 - DNA, 19 bp, Homo sapiens
  siRNA target sequence for C9 (NM_001737.2,1460-1478).
ctgggcctcttccataaat

SEQ ID NO: 312125 - DNA, 19 bp, Homo sapiens
  siRNA target sequence for C9 (NM_001737.2,1479-1497).
gatgctcctgttctcatta

SEQ ID NO: 312126 - DNA, 19 bp, Homo sapiens
  siRNA target sequence for C9 (NM_001737.2,1491-1509).
ctcattagtcaaaaactgt

SEQ ID NO: 312127 - DNA, 19 bp, Homo sapiens
  siRNA target sequence for C9 (NM_001737.2,1568-1586).
cttggaaagagccattgaa

SEQ ID NO: 312128 - DNA, 19 bp, Homo sapiens
  siRNA target sequence for C9 (NM_001737.2,1576-1594).
gagccattgaagactatat

SEQ ID NO: 312129 - DNA, 19 bp, Homo sapiens
  siRNA target sequence for C9 (NM_001737.2,1584-1602).
gaagactatatcaatgaat

SEQ ID NO: 312130 - DNA, 19 bp, Homo sapiens
  siRNA target sequence for C9 (NM_001737.2,1589-1607).
ctatatcaatgaatttagt

SEQ ID NO: 312131 - DNA, 19 bp, Homo sapiens
  siRNA target sequence for C9 (NM_001737.2,1670-1688).
gtgtgcctgcccattcaaa

SEQ ID NO: 312132 - DNA, 19 bp, Homo sapiens
  siRNA target sequence for C9 (NM_001737.2,1672-1690).
gtgcctgcccattcaaatt

SEQ ID NO: 312133 - DNA, 19 bp, Homo sapiens
  siRNA target sequence for C9 (NM_001737.2,1735-1753).
gattgccagccctagagtt

SEQ ID NO: 312134 - DNA, 19 bp, Homo sapiens
  siRNA target sequence for C9 (NM_001737.2,1745-1763).
cctagagttccccaatgaa

SEQ ID NO: 312135 - DNA, 19 bp, Homo sapiens
  siRNA target sequence for C9 (NM_001737.2,1746-1764).
ctagagttccccaatgaaa

SEQ ID NO: 312136 - DNA, 19 bp, Homo sapiens
  siRNA target sequence for C9 (NM_001737.2,1749-1767).
gagttccccaatgaaaaat

SEQ ID NO: 312137 - DNA, 19 bp, Homo sapiens
  siRNA target sequence for PAQR10 (NM_198403.1,192-210).
gcccacagagtatgaacat

SEQ ID NO: 312138 - DNA, 19 bp, Homo sapiens
  siRNA target sequence for PAQR10 (NM_198403.1,423-441).
cgaccggatggtcatctat

SEQ ID NO: 312139 - DNA, 19 bp, Homo sapiens
  siRNA target sequence for PAQR10 (NM_198403.1,424-442).
gaccggatggtcatctatt

SEQ ID NO: 312140 - DNA, 19 bp, Homo sapiens
  siRNA target sequence for PAQR10 (NM_198403.1,511-529).
cgctggctggtctggatta

SEQ ID NO: 312141 - DNA, 19 bp, Homo sapiens
  siRNA target sequence for PAQR10 (NM_198403.1,512-530).
gctggctggtctggattat

SEQ ID NO: 312142 - DNA, 19 bp, Homo sapiens
  siRNA target sequence for PAQR10 (NM_198403.1,749-767).
ggcatctctttgtagcatt

SEQ ID NO: 312143 - DNA, 19 bp, Homo sapiens
  siRNA target sequence for PAQR10 (NM_198403.1,770-788).
gtgctggtacccactacta

SEQ ID NO: 312144 - DNA, 19 bp, Homo sapiens
  siRNA target sequence for LIMS1 (NM_004987.2,1071-1089).
ctagctgagaccttaggaa

SEQ ID NO: 312145 - DNA, 19 bp, Homo sapiens
  siRNA target sequence for CLUL1 (NM_014410.4,153-171).
cgccactcttggtgtttat

SEQ ID NO: 312146 - DNA, 19 bp, Homo sapiens
  siRNA target sequence for CLUL1 (NM_014410.4,308-326).
ggtattaagcaaatgaaaa

SEQ ID NO: 312147 - DNA, 19 bp, Homo sapiens
  siRNA target sequence for CLUL1 (NM_014410.4,453-471).
ggctatgccgggagtcttt

SEQ ID NO: 312148 - DNA, 19 bp, Homo sapiens
  siRNA target sequence for CLUL1 (NM_014410.4,514-532).
ctgcatgagaatttataca

SEQ ID NO: 312149 - DNA, 19 bp, Homo sapiens
  siRNA target sequence for CLUL1 (NM_014410.4,549-567).
ggtcctctgtgaaaaataa

SEQ ID NO: 312150 - DNA, 19 bp, Homo sapiens
  siRNA target sequence for CLUL1 (NM_014410.4,576-594).
ggtttttcaggaagatata

SEQ ID NO: 312151 - DNA, 19 bp, Homo sapiens
  siRNA target sequence for CLUL1 (NM_014410.4,659-677).
gaggaagatgcacaattga

SEQ ID NO: 312152 - DNA, 19 bp, Homo sapiens
  siRNA target sequence for CLUL1 (NM_014410.4,678-696).
cccaaatggaggatgtgtt

SEQ ID NO: 312153 - DNA, 19 bp, Homo sapiens
  siRNA target sequence for CLUL1 (NM_014410.4,801-819).
cagatacagacctaactga

SEQ ID NO: 312154 - DNA, 19 bp, Homo sapiens
  siRNA target sequence for CLUL1 (NM_014410.4,843-861).
ctaaagagccgatgacaaa

SEQ ID NO: 312155 - DNA, 19 bp, Homo sapiens
  siRNA target sequence for CLUL1 (NM_014410.4,853-871).
gatgacaaaagcagatctt

SEQ ID NO: 312156 - DNA, 19 bp, Homo sapiens
  siRNA target sequence for CLUL1 (NM_014410.4,863-881).
gcagatcttgagcaatgtt

SEQ ID NO: 312157 - DNA, 19 bp, Homo sapiens
  siRNA target sequence for CLUL1 (NM_014410.4,912-930).
gtaatttcagtgtctctat

SEQ ID NO: 312158 - DNA, 19 bp, Homo sapiens
  siRNA target sequence for CLUL1 (NM_014410.4,965-983).
ctgaaggcaatagaagatt

SEQ ID NO: 312159 - DNA, 19 bp, Homo sapiens
  siRNA target sequence for CLUL1 (NM_014410.4,970-988).
ggcaatagaagatttacca

SEQ ID NO: 312160 - DNA, 19 bp, Homo sapiens
  siRNA target sequence for CLUL1 (NM_014410.4,1013-1031).
ggaggcctgatttcaaaga

SEQ ID NO: 312161 - DNA, 19 bp, Homo sapiens
  siRNA target sequence for CLUL1 (NM_014410.4,1014-1032).
gaggcctgatttcaaagat

SEQ ID NO: 312162 - DNA, 19 bp, Homo sapiens
  siRNA target sequence for CLUL1 (NM_014410.4,1061-1079).
ggggaacttgaccagaatt

SEQ ID NO: 312163 - DNA, 19 bp, Homo sapiens
  siRNA target sequence for CLUL1 (NM_014410.4,1081-1099).
gtcaagatgtttcaaattt

SEQ ID NO: 312164 - DNA, 19 bp, Homo sapiens
  siRNA target sequence for CLUL1 (NM_014410.4,1119-1137).
gtcaggctcacctatctga

SEQ ID NO: 312165 - DNA, 19 bp, Homo sapiens
  siRNA target sequence for CLUL1 (NM_014410.4,1182-1200).
cgatcaggttggtcaatgt

SEQ ID NO: 312166 - DNA, 19 bp, Homo sapiens
  siRNA target sequence for CLUL1 (NM_014410.4,1188-1206).
ggttggtcaatgtatccaa

SEQ ID NO: 312167 - DNA, 19 bp, Homo sapiens
  siRNA target sequence for CLUL1 (NM_014410.4,1189-1207).
gttggtcaatgtatccaat

SEQ ID NO: 312168 - DNA, 19 bp, Homo sapiens
  siRNA target sequence for CLUL1 (NM_014410.4,1322-1340).
ccagaaacagagatcatct

SEQ ID NO: 312169 - DNA, 19 bp, Homo sapiens
  siRNA target sequence for CLUL1 (NM_014410.4,1405-1423).
gatgacagacttaagcatt

SEQ ID NO: 312170 - DNA, 19 bp, Homo sapiens
  siRNA target sequence for CLUL1 (NM_014410.4,1434-1452).
ctaatttcacactcaagat

SEQ ID NO: 312171 - DNA, 19 bp, Homo sapiens
  siRNA target sequence for CLUL1 (NM_014410.4,1467-1485).
gtgctgagagttctaactt

SEQ ID NO: 312172 - DNA, 19 bp, Homo sapiens
  siRNA target sequence for CLUL1 (NM_014410.4,1492-1510).
ctacgtagtggcaaaagct

SEQ ID NO: 312173 - DNA, 19 bp, Homo sapiens
  siRNA target sequence for OPTN (NM_021980.3,233-251).
ccaaacctggacacgttta

SEQ ID NO: 312174 - DNA, 19 bp, Homo sapiens
  siRNA target sequence for OPTN (NM_021980.3,315-333).
ccatgaagctaaataatca

SEQ ID NO: 312175 - DNA, 19 bp, Homo sapiens
  siRNA target sequence for OPTN (NM_021980.3,316-334).
catgaagctaaataatcaa

SEQ ID NO: 312176 - DNA, 19 bp, Homo sapiens
  siRNA target sequence for OPTN (NM_021980.3,389-407).
gaacgccagttttttgaga

SEQ ID NO: 312177 - DNA, 19 bp, Homo sapiens
  siRNA target sequence for OPTN (NM_021980.3,393-411).
gccagttttttgagataca

SEQ ID NO: 312178 - DNA, 19 bp, Homo sapiens
  siRNA target sequence for OPTN (NM_021980.3,445-463).
gagtcatgagaatgagaaa

SEQ ID NO: 312179 - DNA, 19 bp, Homo sapiens
  siRNA target sequence for OPTN (NM_021980.3,546-564).
ccgaagcggagcaggaaaa

SEQ ID NO: 312180 - DNA, 19 bp, Homo sapiens
  siRNA target sequence for OPTN (NM_021980.3,655-673).
cagcggctcctcagaagat

SEQ ID NO: 312181 - DNA, 19 bp, Homo sapiens
  siRNA target sequence for OPTN (NM_021980.3,708-726).
cagaagggtcagtaaaaga

SEQ ID NO: 312182 - DNA, 19 bp, Homo sapiens
  siRNA target sequence for OPTN (NM_021980.3,765-783).
ctggcacggcattgtctaa

SEQ ID NO: 312183 - DNA, 19 bp, Homo sapiens
  siRNA target sequence for OPTN (NM_021980.3,768-786).
gcacggcattgtctaaata

SEQ ID NO: 312184 - DNA, 19 bp, Homo sapiens
  siRNA target sequence for OPTN (NM_021980.3,769-787).
cacggcattgtctaaatat

SEQ ID NO: 312185 - DNA, 19 bp, Homo sapiens
  siRNA target sequence for OPTN (NM_021980.3,773-791).
gcattgtctaaatatagga

SEQ ID NO: 312186 - DNA, 19 bp, Homo sapiens
  siRNA target sequence for OPTN (NM_021980.3,803-821).
gatggggccaagaattact

SEQ ID NO: 312187 - DNA, 19 bp, Homo sapiens
  siRNA target sequence for OPTN (NM_021980.3,823-841).
cgaacatgaggagttaact

SEQ ID NO: 312188 - DNA, 19 bp, Homo sapiens
  siRNA target sequence for OPTN (NM_021980.3,863-881).
ctaagggaagggaatcaga

SEQ ID NO: 312189 - DNA, 19 bp, Homo sapiens
  siRNA target sequence for OPTN (NM_021980.3,1081-1099).
gcttcaagaggctcataca

SEQ ID NO: 312190 - DNA, 19 bp, Homo sapiens
  siRNA target sequence for OPTN (NM_021980.3,1539-1557).
gggctcagatggaagttta

SEQ ID NO: 312191 - DNA, 19 bp, Homo sapiens
  siRNA target sequence for OPTN (NM_021980.3,1581-1599).
gagcagcgagagagaaaat

SEQ ID NO: 312192 - DNA, 19 bp, Homo sapiens
  siRNA target sequence for OPTN (NM_021980.3,1703-1721).
cgtcatggggcgagaacaa

SEQ ID NO: 312193 - DNA, 19 bp, Homo sapiens
  siRNA target sequence for OPTN (NM_021980.3,1786-1804).
gcggaatattccgattcat

SEQ ID NO: 312194 - DNA, 19 bp, Homo sapiens
  siRNA target sequence for OPTN (NM_021980.3,1787-1805).
cggaatattccgattcatt

SEQ ID NO: 312195 - DNA, 19 bp, Homo sapiens
  siRNA target sequence for OPTN (NM_021980.3,1826-1844).
gttctgcctgacatagaca

SEQ ID NO: 312196 - DNA, 19 bp, Homo sapiens
  siRNA target sequence for OPTN (NM_021980.3,1835-1853).
gacatagacacgttacaga

SEQ ID NO: 312197 - DNA, 19 bp, Homo sapiens
  siRNA target sequence for OPTN (NM_021980.3,1837-1855).
catagacacgttacagatt

SEQ ID NO: 312198 - DNA, 19 bp, Homo sapiens
  siRNA target sequence for OPTN (NM_021980.3,1850-1868).
cagattcacgtgatggatt

SEQ ID NO: 312199 - DNA, 19 bp, Homo sapiens
  siRNA target sequence for OPTN (NM_021980.3,1858-1876).
cgtgatggattgcatcatt

SEQ ID NO: 312200 - DNA, 19 bp, Homo sapiens
  siRNA target sequence for OPTN (NM_021980.3,1859-1877).
gtgatggattgcatcattt

SEQ ID NO: 312201 - DNA, 19 bp, Homo sapiens
  siRNA target sequence for SMPX (NM_014332.1,199-217).
cagccagtttccaatgtta

SEQ ID NO: 312202 - DNA, 19 bp, Homo sapiens
  siRNA target sequence for SMPX (NM_014332.1,225-243).
ccaggcaaatatcaatatt

SEQ ID NO: 312203 - DNA, 19 bp, Homo sapiens
  siRNA target sequence for SMPX (NM_014332.1,230-248).
caaatatcaatattccaat

SEQ ID NO: 312204 - DNA, 19 bp, Homo sapiens
  siRNA target sequence for SMPX (NM_014332.1,272-290).
gtcaaccccccagaagaaa

SEQ ID NO: 312205 - DNA, 19 bp, Homo sapiens
  siRNA target sequence for SMPX (NM_014332.1,376-394).
ggacctgcagtcaatctat

SEQ ID NO: 312206 - DNA, 19 bp, Homo sapiens
  siRNA target sequence for SMPX (NM_014332.1,391-409).
ctatcggaaatccagaata

SEQ ID NO: 312207 - DNA, 19 bp, Homo sapiens
  siRNA target sequence for TNNT2 (NM_000364.1,404-422).
ggagctcgtttctctcaaa

SEQ ID NO: 312208 - DNA, 19 bp, Homo sapiens
  siRNA target sequence for TNNT2 (NM_000364.1,626-644).
ccagacagagcggaaaagt

SEQ ID NO: 312209 - DNA, 19 bp, Homo sapiens
  siRNA target sequence for TNNT2 (NM_000364.1,654-672).
cagactgagcgggaaaaga

SEQ ID NO: 312210 - DNA, 19 bp, Homo sapiens
  siRNA target sequence for TNNT2 (NM_000364.1,760-778).
ggcagagcatctataactt

SEQ ID NO: 312211 - DNA, 19 bp, Homo sapiens
  siRNA target sequence for DYSF (NM_003494.2,491-509).
gcgtgaaccctgtatggaa

SEQ ID NO: 312212 - DNA, 19 bp, Homo sapiens
  siRNA target sequence for DYSF (NM_003494.2,492-510).
cgtgaaccctgtatggaat

SEQ ID NO: 312213 - DNA, 19 bp, Homo sapiens
  siRNA target sequence for DYSF (NM_003494.2,880-898).
gagccattcctggatcaaa

SEQ ID NO: 312214 - DNA, 19 bp, Homo sapiens
  siRNA target sequence for DYSF (NM_003494.2,918-936).
caccaccccaaggaaacta

SEQ ID NO: 312215 - DNA, 19 bp, Homo sapiens
  siRNA target sequence for DYSF (NM_003494.2,978-996).
gcgaagtgcgcctacatct

SEQ ID NO: 312216 - DNA, 19 bp, Homo sapiens
  siRNA target sequence for DYSF (NM_003494.2,983-1001).
gtgcgcctacatctagaaa

SEQ ID NO: 312217 - DNA, 19 bp, Homo sapiens
  siRNA target sequence for DYSF (NM_003494.2,1010-1028).
cagacaaaccgcaggattt

SEQ ID NO: 312218 - DNA, 19 bp, Homo sapiens
  siRNA target sequence for DYSF (NM_003494.2,1569-1587).
caacgtgaaacagatcttt

SEQ ID NO: 312219 - DNA, 19 bp, Homo sapiens
  siRNA target sequence for DYSF (NM_003494.2,1588-1606).
ggcttcgagagtaacaaga

SEQ ID NO: 312220 - DNA, 19 bp, Homo sapiens
  siRNA target sequence for DYSF (NM_003494.2,1589-1607).
gcttcgagagtaacaagaa

SEQ ID NO: 312221 - DNA, 19 bp, Homo sapiens
  siRNA target sequence for DYSF (NM_003494.2,1594-1612).
gagagtaacaagaagaact

SEQ ID NO: 312222 - DNA, 19 bp, Homo sapiens
  siRNA target sequence for DYSF (NM_003494.2,1726-1744).
ccctccatgtgcgaaaaaa

SEQ ID NO: 312223 - DNA, 19 bp, Homo sapiens
  siRNA target sequence for DYSF (NM_003494.2,1727-1745).
cctccatgtgcgaaaaaat

SEQ ID NO: 312224 - DNA, 19 bp, Homo sapiens
  siRNA target sequence for DYSF (NM_003494.2,1767-1785).
ggaccgcctgactcacaat

SEQ ID NO: 312225 - DNA, 19 bp, Homo sapiens
  siRNA target sequence for DYSF (NM_003494.2,1771-1789).
cgcctgactcacaatgaca

SEQ ID NO: 312226 - DNA, 19 bp, Homo sapiens
  siRNA target sequence for DYSF (NM_003494.2,1796-1814).
ctaccacctacctgagtat

SEQ ID NO: 312227 - DNA, 19 bp, Homo sapiens
  siRNA target sequence for DYSF (NM_003494.2,1807-1825).
ctgagtatgtcgaaaatct

SEQ ID NO: 312228 - DNA, 19 bp, Homo sapiens
  siRNA target sequence for DYSF (NM_003494.2,2113-2131).
cgggtggagaagtacctta

SEQ ID NO: 312229 - DNA, 19 bp, Homo sapiens
  siRNA target sequence for DYSF (NM_003494.2,2128-2146).
cttaggaggcgcaagtact

SEQ ID NO: 312230 - DNA, 19 bp, Homo sapiens
  siRNA target sequence for DYSF (NM_003494.2,2149-2167).
ctgtttgcggccttctact

SEQ ID NO: 312231 - DNA, 19 bp, Homo sapiens
  siRNA target sequence for DYSF (NM_003494.2,2296-2314).
gacgggtgccactactact

SEQ ID NO: 312232 - DNA, 19 bp, Homo sapiens
  siRNA target sequence for DYSF (NM_003494.2,2605-2623).
catcacctgagccaaatca

SEQ ID NO: 312233 - DNA, 19 bp, Homo sapiens
  siRNA target sequence for DYSF (NM_003494.2,2854-2872).
gggaagctacagacaatct

SEQ ID NO: 312234 - DNA, 19 bp, Homo sapiens
  siRNA target sequence for DYSF (NM_003494.2,2856-2874).
gaagctacagacaatcttt

SEQ ID NO: 312235 - DNA, 19 bp, Homo sapiens
  siRNA target sequence for DYSF (NM_003494.2,3064-3082).
ctcacctaccccaagtttt

SEQ ID NO: 312236 - DNA, 19 bp, Homo sapiens
  siRNA target sequence for DYSF (NM_003494.2,3254-3272).
gaggccagtggatctacat

SEQ ID NO: 312237 - DNA, 19 bp, Homo sapiens
  siRNA target sequence for DYSF (NM_003494.2,3512-3530).
gggatctcagccaaatgga

SEQ ID NO: 312238 - DNA, 19 bp, Homo sapiens
  siRNA target sequence for DYSF (NM_003494.2,3513-3531).
ggatctcagccaaatggaa

SEQ ID NO: 312239 - DNA, 19 bp, Homo sapiens
  siRNA target sequence for DYSF (NM_003494.2,3575-3593).
gggagtacgcctctctttt

SEQ ID NO: 312240 - DNA, 19 bp, Homo sapiens
  siRNA target sequence for DYSF (NM_003494.2,3576-3594).
ggagtacgcctctcttttt

SEQ ID NO: 312241 - DNA, 19 bp, Homo sapiens
  siRNA target sequence for DYSF (NM_003494.2,3787-3805).
cccacgatttcctgcatat

SEQ ID NO: 312242 - DNA, 19 bp, Homo sapiens
  siRNA target sequence for DYSF (NM_003494.2,3788-3806).
ccacgatttcctgcatatt

SEQ ID NO: 312243 - DNA, 19 bp, Homo sapiens
  siRNA target sequence for DYSF (NM_003494.2,3791-3809).
cgatttcctgcatattcga

SEQ ID NO: 312244 - DNA, 19 bp, Homo sapiens
  siRNA target sequence for DYSF (NM_003494.2,3826-3844).
catctacgctgctacatgt

SEQ ID NO: 312245 - DNA, 19 bp, Homo sapiens
  siRNA target sequence for DYSF (NM_003494.2,3866-3884).
cgatggacaaggactcttt

SEQ ID NO: 312246 - DNA, 19 bp, Homo sapiens
  siRNA target sequence for DYSF (NM_003494.2,4053-4071).
gtacgaccatgacacttat

SEQ ID NO: 312247 - DNA, 19 bp, Homo sapiens
  siRNA target sequence for DYSF (NM_003494.2,4056-4074).
cgaccatgacacttatggt

SEQ ID NO: 312248 - DNA, 19 bp, Homo sapiens
  siRNA target sequence for DYSF (NM_003494.2,4215-4233).
ggccatccaccatattcct

SEQ ID NO: 312249 - DNA, 19 bp, Homo sapiens
  siRNA target sequence for DYSF (NM_003494.2,4221-4239).
ccaccatattcctggtttt

SEQ ID NO: 312250 - DNA, 19 bp, Homo sapiens
  siRNA target sequence for DYSF (NM_003494.2,4390-4408).
ctgcggaacatgaagagtt

SEQ ID NO: 312251 - DNA, 19 bp, Homo sapiens
  siRNA target sequence for DYSF (NM_003494.2,4734-4752).
cgtgctcatcgacattgat

SEQ ID NO: 312252 - DNA, 19 bp, Homo sapiens
  siRNA target sequence for DYSF (NM_003494.2,4915-4933).
gagggcctgtctgactttt

SEQ ID NO: 312253 - DNA, 19 bp, Homo sapiens
  siRNA target sequence for DYSF (NM_003494.2,4919-4937).
gcctgtctgacttttgtaa

SEQ ID NO: 312254 - DNA, 19 bp, Homo sapiens
  siRNA target sequence for DYSF (NM_003494.2,4985-5003).
catctgtgattggtgaatt

SEQ ID NO: 312255 - DNA, 19 bp, Homo sapiens
  siRNA target sequence for DYSF (NM_003494.2,4988-5006).
ctgtgattggtgaatttaa

SEQ ID NO: 312256 - DNA, 19 bp, Homo sapiens
  siRNA target sequence for DYSF (NM_003494.2,5102-5120).
gcttggtccgtatctacat

SEQ ID NO: 312257 - DNA, 19 bp, Homo sapiens
  siRNA target sequence for DYSF (NM_003494.2,5103-5121).
cttggtccgtatctacatt

SEQ ID NO: 312258 - DNA, 19 bp, Homo sapiens
  siRNA target sequence for DYSF (NM_003494.2,5115-5133).
ctacattgtccgagcattt

SEQ ID NO: 312259 - DNA, 19 bp, Homo sapiens
  siRNA target sequence for DYSF (NM_003494.2,5148-5166).
ggaccccaatggaaagtgt

SEQ ID NO: 312260 - DNA, 19 bp, Homo sapiens
  siRNA target sequence for DYSF (NM_003494.2,5203-5221).
gtgagtgaccaggataact

SEQ ID NO: 312261 - DNA, 19 bp, Homo sapiens
  siRNA target sequence for DYSF (NM_003494.2,5242-5260).
cccgtatttggaaagatgt

SEQ ID NO: 312262 - DNA, 19 bp, Homo sapiens
  siRNA target sequence for DYSF (NM_003494.2,5243-5261).
ccgtatttggaaagatgtt

SEQ ID NO: 312263 - DNA, 19 bp, Homo sapiens
  siRNA target sequence for DYSF (NM_003494.2,5295-5313).
cctaaagatcactctctat

SEQ ID NO: 312264 - DNA, 19 bp, Homo sapiens
  siRNA target sequence for DYSF (NM_003494.2,5301-5319).
gatcactctctatgactat

SEQ ID NO: 312265 - DNA, 19 bp, Homo sapiens
  siRNA target sequence for DYSF (NM_003494.2,5518-5536).
cggacagaccgtgtaatgt

SEQ ID NO: 312266 - DNA, 19 bp, Homo sapiens
  siRNA target sequence for DYSF (NM_003494.2,5519-5537).
ggacagaccgtgtaatgtt

SEQ ID NO: 312267 - DNA, 19 bp, Homo sapiens
  siRNA target sequence for DYSF (NM_003494.2,5520-5538).
gacagaccgtgtaatgttt

SEQ ID NO: 312268 - DNA, 19 bp, Homo sapiens
  siRNA target sequence for DYSF (NM_003494.2,5522-5540).
cagaccgtgtaatgtttca

SEQ ID NO: 312269 - DNA, 19 bp, Homo sapiens
  siRNA target sequence for DYSF (NM_003494.2,5721-5739).
gatgtgggtcgacctattt

SEQ ID NO: 312270 - DNA, 19 bp, Homo sapiens
  siRNA target sequence for DYSF (NM_003494.2,5758-5776).
cctggacctcccttcaaca

SEQ ID NO: 312271 - DNA, 19 bp, Homo sapiens
  siRNA target sequence for DYSF (NM_003494.2,5759-5777).
ctggacctcccttcaacat

SEQ ID NO: 312272 - DNA, 19 bp, Homo sapiens
  siRNA target sequence for DYSF (NM_003494.2,5809-5827).
cgttgtattatctggaata

SEQ ID NO: 312273 - DNA, 19 bp, Homo sapiens
  siRNA target sequence for DYSF (NM_003494.2,5855-5873).
gcctcacgggggagaagat

SEQ ID NO: 312274 - DNA, 19 bp, Homo sapiens
  siRNA target sequence for DYSF (NM_003494.2,5928-5946).
gacagacgtgcattatcgt

SEQ ID NO: 312275 - DNA, 19 bp, Homo sapiens
  siRNA target sequence for DYSF (NM_003494.2,5954-5972).
gaggtgaaggcaacttcaa

SEQ ID NO: 312276 - DNA, 19 bp, Homo sapiens
  siRNA target sequence for DYSF (NM_003494.2,6140-6158).
ccctgcagctcgatctcaa

SEQ ID NO: 312277 - DNA, 19 bp, Homo sapiens
  siRNA target sequence for DYSF (NM_003494.2,6218-6236).
ctttccacccagaatggtt

SEQ ID NO: 312278 - DNA, 19 bp, Homo sapiens
  siRNA target sequence for DYSF (NM_003494.2,6449-6467).
ggtttacctccccatacaa

SEQ ID NO: 312279 - DNA, 19 bp, Homo sapiens
  siRNA target sequence for EMD (NM_000117.1,61-79).
ggacaactacgcagatctt

SEQ ID NO: 312280 - DNA, 19 bp, Homo sapiens
  siRNA target sequence for EMD (NM_000117.1,62-80).
gacaactacgcagatcttt

SEQ ID NO: 312281 - DNA, 19 bp, Homo sapiens
  siRNA target sequence for EMD (NM_000117.1,121-139).
cccgcacgggcctgtagta

SEQ ID NO: 312282 - DNA, 19 bp, Homo sapiens
  siRNA target sequence for EMD (NM_000117.1,130-148).
gcctgtagtaggatcaact

SEQ ID NO: 312283 - DNA, 19 bp, Homo sapiens
  siRNA target sequence for EMD (NM_000117.1,144-162).
caactcgtaggctttacga

SEQ ID NO: 312284 - DNA, 19 bp, Homo sapiens
  siRNA target sequence for EMD (NM_000117.1,153-171).
ggctttacgagaagaagat

SEQ ID NO: 312285 - DNA, 19 bp, Homo sapiens
  siRNA target sequence for EMD (NM_000117.1,277-295).
gtatgatcttcccaagaaa

SEQ ID NO: 312286 - DNA, 19 bp, Homo sapiens
  siRNA target sequence for EMD (NM_000117.1,313-331).
ccagagcaagggctacaat

SEQ ID NO: 312287 - DNA, 19 bp, Homo sapiens
  siRNA target sequence for EMD (NM_000117.1,324-342).
gctacaatgacgactacta

SEQ ID NO: 312288 - DNA, 19 bp, Homo sapiens
  siRNA target sequence for EMD (NM_000117.1,410-428).
cgccagtcagtgacttcat

SEQ ID NO: 312289 - DNA, 19 bp, Homo sapiens
  siRNA target sequence for EMD (NM_000117.1,461-479).
catgatgacgatcttttgt

SEQ ID NO: 312290 - DNA, 19 bp, Homo sapiens
  siRNA target sequence for EMD (NM_000117.1,464-482).
gatgacgatcttttgtctt

SEQ ID NO: 312291 - DNA, 19 bp, Homo sapiens
  siRNA target sequence for EMD (NM_000117.1,467-485).
gacgatcttttgtcttctt

SEQ ID NO: 312292 - DNA, 19 bp, Homo sapiens
  siRNA target sequence for EMD (NM_000117.1,553-571).
gcactaccgccctgtttca

SEQ ID NO: 312293 - DNA, 19 bp, Homo sapiens
  siRNA target sequence for FER1L3 (NM_013451.2,104-122).
gtggaatctgccagcaata

SEQ ID NO: 312294 - DNA, 19 bp, Homo sapiens
  siRNA target sequence for FER1L3 (NM_013451.2,113-131).
gccagcaatatccctaaaa

SEQ ID NO: 312295 - DNA, 19 bp, Homo sapiens
  siRNA target sequence for FER1L3 (NM_013451.2,117-135).
gcaatatccctaaaacgaa

SEQ ID NO: 312296 - DNA, 19 bp, Homo sapiens
  siRNA target sequence for FER1L3 (NM_013451.2,118-136).
caatatccctaaaacgaaa

SEQ ID NO: 312297 - DNA, 19 bp, Homo sapiens
  siRNA target sequence for FER1L3 (NM_013451.2,141-159).
gcaagccggatcctattgt

SEQ ID NO: 312298 - DNA, 19 bp, Homo sapiens
  siRNA target sequence for FER1L3 (NM_013451.2,142-160).
caagccggatcctattgtt

SEQ ID NO: 312299 - DNA, 19 bp, Homo sapiens
  siRNA target sequence for FER1L3 (NM_013451.2,219-237).
ctgtctggaatgagatttt

SEQ ID NO: 312300 - DNA, 19 bp, Homo sapiens
  siRNA target sequence for FER1L3 (NM_013451.2,273-291).
catcttcccttgggattat

SEQ ID NO: 312301 - DNA, 19 bp, Homo sapiens
  siRNA target sequence for FER1L3 (NM_013451.2,280-298).
ccttgggattattgtgaaa

SEQ ID NO: 312302 - DNA, 19 bp, Homo sapiens
  siRNA target sequence for FER1L3 (NM_013451.2,284-302).
gggattattgtgaaagatt

SEQ ID NO: 312303 - DNA, 19 bp, Homo sapiens
  siRNA target sequence for FER1L3 (NM_013451.2,305-323).
gagacaattggacaaaata

SEQ ID NO: 312304 - DNA, 19 bp, Homo sapiens
  siRNA target sequence for FER1L3 (NM_013451.2,394-412).
gctgatctccctgctaaat

SEQ ID NO: 312305 - DNA, 19 bp, Homo sapiens
  siRNA target sequence for FER1L3 (NM_013451.2,445-463).
cttggtgatcggctatgat

SEQ ID NO: 312306 - DNA, 19 bp, Homo sapiens
  siRNA target sequence for FER1L3 (NM_013451.2,626-644).
cggaggctcaccaaagtaa

SEQ ID NO: 312307 - DNA, 19 bp, Homo sapiens
  siRNA target sequence for FER1L3 (NM_013451.2,688-706).
gatccgcgtccgagtgatt

SEQ ID NO: 312308 - DNA, 19 bp, Homo sapiens
  siRNA target sequence for FER1L3 (NM_013451.2,703-721).
gattgagggccgacagtta

SEQ ID NO: 312309 - DNA, 19 bp, Homo sapiens
  siRNA target sequence for FER1L3 (NM_013451.2,849-867).
ctgaattgatggatgagat

SEQ ID NO: 312310 - DNA, 19 bp, Homo sapiens
  siRNA target sequence for FER1L3 (NM_013451.2,871-889).
cagcatccgggtttataat

SEQ ID NO: 312311 - DNA, 19 bp, Homo sapiens
  siRNA target sequence for FER1L3 (NM_013451.2,874-892).
catccgggtttataattct

SEQ ID NO: 312312 - DNA, 19 bp, Homo sapiens
  siRNA target sequence for FER1L3 (NM_013451.2,912-930).
gtctgatgggggaatttaa

SEQ ID NO: 312313 - DNA, 19 bp, Homo sapiens
  siRNA target sequence for FER1L3 (NM_013451.2,992-1010).
ctcaatgacccggaagata

SEQ ID NO: 312314 - DNA, 19 bp, Homo sapiens
  siRNA target sequence for FER1L3 (NM_013451.2,1012-1030).
cagttcaggttctaaaggt

SEQ ID NO: 312315 - DNA, 19 bp, Homo sapiens
  siRNA target sequence for FER1L3 (NM_013451.2,1019-1037).
ggttctaaaggttatatga

SEQ ID NO: 312316 - DNA, 19 bp, Homo sapiens
  siRNA target sequence for FER1L3 (NM_013451.2,1084-1102).
gagacgagatcgtgataat

SEQ ID NO: 312317 - DNA, 19 bp, Homo sapiens
  siRNA target sequence for FER1L3 (NM_013451.2,1088-1106).
cgagatcgtgataatgaca

SEQ ID NO: 312318 - DNA, 19 bp, Homo sapiens
  siRNA target sequence for FER1L3 (NM_013451.2,1112-1130).
gatgtggagagtaatttgt

SEQ ID NO: 312319 - DNA, 19 bp, Homo sapiens
  siRNA target sequence for FER1L3 (NM_013451.2,1164-1182).
ccttcttgctgaaaatcta

SEQ ID NO: 312320 - DNA, 19 bp, Homo sapiens
  siRNA target sequence for FER1L3 (NM_013451.2,1214-1232).
gccttctcacagacagtaa

SEQ ID NO: 312321 - DNA, 19 bp, Homo sapiens
  siRNA target sequence for FER1L3 (NM_013451.2,1244-1262).
ggaggcaatgcagataaga

SEQ ID NO: 312322 - DNA, 19 bp, Homo sapiens
  siRNA target sequence for FER1L3 (NM_013451.2,1270-1288).
cgtggatccttttgtagaa

SEQ ID NO: 312323 - DNA, 19 bp, Homo sapiens
  siRNA target sequence for FER1L3 (NM_013451.2,1350-1368).
ggaatcaggtcgtcaatct

SEQ ID NO: 312324 - DNA, 19 bp, Homo sapiens
  siRNA target sequence for FER1L3 (NM_013451.2,1351-1369).
gaatcaggtcgtcaatctt

SEQ ID NO: 312325 - DNA, 19 bp, Homo sapiens
  siRNA target sequence for FER1L3 (NM_013451.2,1367-1385).
cttcagatcaagtttcctt

SEQ ID NO: 312326 - DNA, 19 bp, Homo sapiens
  siRNA target sequence for FER1L3 (NM_013451.2,1418-1436).
gactgggaccgtcttacta

SEQ ID NO: 312327 - DNA, 19 bp, Homo sapiens
  siRNA target sequence for FER1L3 (NM_013451.2,1420-1438).
ctgggaccgtcttactaaa

SEQ ID NO: 312328 - DNA, 19 bp, Homo sapiens
  siRNA target sequence for FER1L3 (NM_013451.2,1422-1440).
gggaccgtcttactaaaaa

SEQ ID NO: 312329 - DNA, 19 bp, Homo sapiens
  siRNA target sequence for FER1L3 (NM_013451.2,1529-1547).
gctgcatcatatacagtaa

SEQ ID NO: 312330 - DNA, 19 bp, Homo sapiens
  siRNA target sequence for FER1L3 (NM_013451.2,1530-1548).
ctgcatcatatacagtaaa

SEQ ID NO: 312331 - DNA, 19 bp, Homo sapiens
  siRNA target sequence for FER1L3 (NM_013451.2,1578-1596).
caacgtttggaccttgtta

SEQ ID NO: 312332 - DNA, 19 bp, Homo sapiens
  siRNA target sequence for FER1L3 (NM_013451.2,1587-1605).
gaccttgttacctgaatct

SEQ ID NO: 312333 - DNA, 19 bp, Homo sapiens
  siRNA target sequence for FER1L3 (NM_013451.2,1589-1607).
ccttgttacctgaatcttt

SEQ ID NO: 312334 - DNA, 19 bp, Homo sapiens
  siRNA target sequence for FER1L3 (NM_013451.2,1645-1663).
ctatgatgagctgaatact

SEQ ID NO: 312335 - DNA, 19 bp, Homo sapiens
  siRNA target sequence for FER1L3 (NM_013451.2,1692-1710).
gcaggatcttggttgaatt

SEQ ID NO: 312336 - DNA, 19 bp, Homo sapiens
  siRNA target sequence for FER1L3 (NM_013451.2,1693-1711).
caggatcttggttgaatta

SEQ ID NO: 312337 - DNA, 19 bp, Homo sapiens
  siRNA target sequence for FER1L3 (NM_013451.2,1702-1720).
ggttgaattagccactttt

SEQ ID NO: 312338 - DNA, 19 bp, Homo sapiens
  siRNA target sequence for FER1L3 (NM_013451.2,1793-1811).
cagcgaaggcggaagtaca

SEQ ID NO: 312339 - DNA, 19 bp, Homo sapiens
  siRNA target sequence for FER1L3 (NM_013451.2,1812-1830).
gcctgtctgccgtgtttca

SEQ ID NO: 312340 - DNA, 19 bp, Homo sapiens
  siRNA target sequence for FER1L3 (NM_013451.2,1813-1831).
cctgtctgccgtgtttcat

SEQ ID NO: 312341 - DNA, 19 bp, Homo sapiens
  siRNA target sequence for FER1L3 (NM_013451.2,1837-1855).
caccatgttgcaagatgtt

SEQ ID NO: 312342 - DNA, 19 bp, Homo sapiens
  siRNA target sequence for FER1L3 (NM_013451.2,1961-1979).
gatggcaactactattatt

SEQ ID NO: 312343 - DNA, 19 bp, Homo sapiens
  siRNA target sequence for FER1L3 (NM_013451.2,1964-1982).
ggcaactactattattact

SEQ ID NO: 312344 - DNA, 19 bp, Homo sapiens
  siRNA target sequence for FER1L3 (NM_013451.2,1994-2012).
cacaccaagccagttgtta

SEQ ID NO: 312345 - DNA, 19 bp, Homo sapiens
  siRNA target sequence for FER1L3 (NM_013451.2,2006-2024).
gttgttaccctgacttcat

SEQ ID NO: 312346 - DNA, 19 bp, Homo sapiens
  siRNA target sequence for FER1L3 (NM_013451.2,2019-2037).
cttcatactgggaggatat

SEQ ID NO: 312347 - DNA, 19 bp, Homo sapiens
  siRNA target sequence for FER1L3 (NM_013451.2,2078-2096).
gcagaacggctgcaaacaa

SEQ ID NO: 312348 - DNA, 19 bp, Homo sapiens
  siRNA target sequence for FER1L3 (NM_013451.2,2081-2099).
gaacggctgcaaacaaata

SEQ ID NO: 312349 - DNA, 19 bp, Homo sapiens
  siRNA target sequence for FER1L3 (NM_013451.2,2139-2157).
caaaccagctggctgaatt

SEQ ID NO: 312350 - DNA, 19 bp, Homo sapiens
  siRNA target sequence for FER1L3 (NM_013451.2,2167-2185).
gctgatagatgaagttata

SEQ ID NO: 312351 - DNA, 19 bp, Homo sapiens
  siRNA target sequence for FER1L3 (NM_013451.2,2269-2287).
caggtctctctcccaaata

SEQ ID NO: 312352 - DNA, 19 bp, Homo sapiens
  siRNA target sequence for FER1L3 (NM_013451.2,2313-2331).
cggaagccacagatgtgaa

SEQ ID NO: 312353 - DNA, 19 bp, Homo sapiens
  siRNA target sequence for FER1L3 (NM_013451.2,2463-2481).
ccgcacatcaggtcttgta

SEQ ID NO: 312354 - DNA, 19 bp, Homo sapiens
  siRNA target sequence for FER1L3 (NM_013451.2,2465-2483).
gcacatcaggtcttgtact

SEQ ID NO: 312355 - DNA, 19 bp, Homo sapiens
  siRNA target sequence for FER1L3 (NM_013451.2,2585-2603).
gagttgcgagtgaacatct

SEQ ID NO: 312356 - DNA, 19 bp, Homo sapiens
  siRNA target sequence for FER1L3 (NM_013451.2,2599-2617).
catctggctaggcttaagt

SEQ ID NO: 312357 - DNA, 19 bp, Homo sapiens
  siRNA target sequence for FER1L3 (NM_013451.2,2726-2744).
gtaggacgtcataagtttt

SEQ ID NO: 312358 - DNA, 19 bp, Homo sapiens
  siRNA target sequence for FER1L3 (NM_013451.2,2745-2763).
ctgatgtcacaggaaaaat

SEQ ID NO: 312359 - DNA, 19 bp, Homo sapiens
  siRNA target sequence for FER1L3 (NM_013451.2,2950-2968).
ggatgcgaacggcgataaa

SEQ ID NO: 312360 - DNA, 19 bp, Homo sapiens
  siRNA target sequence for FER1L3 (NM_013451.2,3020-3038).
gatgcatggtcttatgaca

SEQ ID NO: 312361 - DNA, 19 bp, Homo sapiens
  siRNA target sequence for FER1L3 (NM_013451.2,3028-3046).
gtcttatgacataaatcga

SEQ ID NO: 312362 - DNA, 19 bp, Homo sapiens
  siRNA target sequence for FER1L3 (NM_013451.2,3092-3110).
gatcataagcccaaatcct

SEQ ID NO: 312363 - DNA, 19 bp, Homo sapiens
  siRNA target sequence for FER1L3 (NM_013451.2,3111-3129).
gggttgcagcagagaaaat

SEQ ID NO: 312364 - DNA, 19 bp, Homo sapiens
  siRNA target sequence for FER1L3 (NM_013451.2,3161-3179).
cgaaaacgcaagaaagatt

SEQ ID NO: 312365 - DNA, 19 bp, Homo sapiens
  siRNA target sequence for FER1L3 (NM_013451.2,3204-3222).
caagggccatggaggaatt

SEQ ID NO: 312366 - DNA, 19 bp, Homo sapiens
  siRNA target sequence for FER1L3 (NM_013451.2,3252-3270).
ctctaattggctggaaatt

SEQ ID NO: 312367 - DNA, 19 bp, Homo sapiens
  siRNA target sequence for FER1L3 (NM_013451.2,3274-3292).
ctggaaacaacgtagttca

SEQ ID NO: 312368 - DNA, 19 bp, Homo sapiens
  siRNA target sequence for FER1L3 (NM_013451.2,3277-3295).
gaaacaacgtagttcagat

SEQ ID NO: 312369 - DNA, 19 bp, Homo sapiens
  siRNA target sequence for FER1L3 (NM_013451.2,3467-3485).
cccattgtttcctgcaatt

SEQ ID NO: 312370 - DNA, 19 bp, Homo sapiens
  siRNA target sequence for FER1L3 (NM_013451.2,3506-3524).
catctgcgctgctatgtct

SEQ ID NO: 312371 - DNA, 19 bp, Homo sapiens
  siRNA target sequence for FER1L3 (NM_013451.2,3511-3529).
gcgctgctatgtctatcaa

SEQ ID NO: 312372 - DNA, 19 bp, Homo sapiens
  siRNA target sequence for FER1L3 (NM_013451.2,3541-3559).
cttggctttagataaggat

SEQ ID NO: 312373 - DNA, 19 bp, Homo sapiens
  siRNA target sequence for FER1L3 (NM_013451.2,3562-3580).
cttttcagatccatatgct

SEQ ID NO: 312374 - DNA, 19 bp, Homo sapiens
  siRNA target sequence for FER1L3 (NM_013451.2,3567-3585).
cagatccatatgctcatat

SEQ ID NO: 312375 - DNA, 19 bp, Homo sapiens
  siRNA target sequence for FER1L3 (NM_013451.2,3593-3611).
ctccatcggagcaaaacca

SEQ ID NO: 312376 - DNA, 19 bp, Homo sapiens
  siRNA target sequence for FER1L3 (NM_013451.2,3639-3657).
ccacgtgggaccaaacaat

SEQ ID NO: 312377 - DNA, 19 bp, Homo sapiens
  siRNA target sequence for FER1L3 (NM_013451.2,3640-3658).
cacgtgggaccaaacaatt

SEQ ID NO: 312378 - DNA, 19 bp, Homo sapiens
  siRNA target sequence for FER1L3 (NM_013451.2,3642-3660).
cgtgggaccaaacaattat

SEQ ID NO: 312379 - DNA, 19 bp, Homo sapiens
  siRNA target sequence for FER1L3 (NM_013451.2,3643-3661).
gtgggaccaaacaattata

SEQ ID NO: 312380 - DNA, 19 bp, Homo sapiens
  siRNA target sequence for FER1L3 (NM_013451.2,3645-3663).
gggaccaaacaattatatt

SEQ ID NO: 312381 - DNA, 19 bp, Homo sapiens
  siRNA target sequence for FER1L3 (NM_013451.2,3649-3667).
ccaaacaattatattcgat

SEQ ID NO: 312382 - DNA, 19 bp, Homo sapiens
  siRNA target sequence for FER1L3 (NM_013451.2,3690-3708).
cccaaacagttctacagaa

SEQ ID NO: 312383 - DNA, 19 bp, Homo sapiens
  siRNA target sequence for FER1L3 (NM_013451.2,3835-3853).
ctggcacccagtaatgaat

SEQ ID NO: 312384 - DNA, 19 bp, Homo sapiens
  siRNA target sequence for FER1L3 (NM_013451.2,3864-3882).
cctgcggggatgttcttgt

SEQ ID NO: 312385 - DNA, 19 bp, Homo sapiens
  siRNA target sequence for FER1L3 (NM_013451.2,3868-3886).
cggggatgttcttgtaact

SEQ ID NO: 312386 - DNA, 19 bp, Homo sapiens
  siRNA target sequence for FER1L3 (NM_013451.2,3994-4012).
gctcactgccattgagatt

SEQ ID NO: 312387 - DNA, 19 bp, Homo sapiens
  siRNA target sequence for FER1L3 (NM_013451.2,4016-4034).
gcttggggcttaagaaata

SEQ ID NO: 312388 - DNA, 19 bp, Homo sapiens
  siRNA target sequence for FER1L3 (NM_013451.2,4045-4063).
ccagatggcttctatcaca

SEQ ID NO: 312389 - DNA, 19 bp, Homo sapiens
  siRNA target sequence for FER1L3 (NM_013451.2,4062-4080).
catcccccagtcttgttgt

SEQ ID NO: 312390 - DNA, 19 bp, Homo sapiens
  siRNA target sequence for FER1L3 (NM_013451.2,4102-4120).
ggaatcggtggtgatcaaa

SEQ ID NO: 312391 - DNA, 19 bp, Homo sapiens
  siRNA target sequence for FER1L3 (NM_013451.2,4103-4121).
gaatcggtggtgatcaaaa

SEQ ID NO: 312392 - DNA, 19 bp, Homo sapiens
  siRNA target sequence for FER1L3 (NM_013451.2,4154-4172).
gttctcttcatgaaagtgt

SEQ ID NO: 312393 - DNA, 19 bp, Homo sapiens
  siRNA target sequence for FER1L3 (NM_013451.2,4358-4376).
ccatgccgggacatcgtta

SEQ ID NO: 312394 - DNA, 19 bp, Homo sapiens
  siRNA target sequence for FER1L3 (NM_013451.2,4359-4377).
catgccgggacatcgttat

SEQ ID NO: 312395 - DNA, 19 bp, Homo sapiens
  siRNA target sequence for FER1L3 (NM_013451.2,4362-4380).
gccgggacatcgttatcga

SEQ ID NO: 312396 - DNA, 19 bp, Homo sapiens
  siRNA target sequence for FER1L3 (NM_013451.2,4363-4381).
ccgggacatcgttatcgaa

SEQ ID NO: 312397 - DNA, 19 bp, Homo sapiens
  siRNA target sequence for FER1L3 (NM_013451.2,4364-4382).
cgggacatcgttatcgaaa

SEQ ID NO: 312398 - DNA, 19 bp, Homo sapiens
  siRNA target sequence for FER1L3 (NM_013451.2,4365-4383).
gggacatcgttatcgaaat

SEQ ID NO: 312399 - DNA, 19 bp, Homo sapiens
  siRNA target sequence for FER1L3 (NM_013451.2,4369-4387).
catcgttatcgaaatggaa

SEQ ID NO: 312400 - DNA, 19 bp, Homo sapiens
  siRNA target sequence for FER1L3 (NM_013451.2,4438-4456).
cgtggactggtggagtaaa

SEQ ID NO: 312401 - DNA, 19 bp, Homo sapiens
  siRNA target sequence for FER1L3 (NM_013451.2,4441-4459).
ggactggtggagtaaattt

SEQ ID NO: 312402 - DNA, 19 bp, Homo sapiens
  siRNA target sequence for FER1L3 (NM_013451.2,4447-4465).
gtggagtaaattttatgct

SEQ ID NO: 312403 - DNA, 19 bp, Homo sapiens
  siRNA target sequence for FER1L3 (NM_013451.2,4468-4486).
ctcaggggaacatgaaaaa

SEQ ID NO: 312404 - DNA, 19 bp, Homo sapiens
  siRNA target sequence for FER1L3 (NM_013451.2,4510-4528).
ctattccaagctcaagata

SEQ ID NO: 312405 - DNA, 19 bp, Homo sapiens
  siRNA target sequence for FER1L3 (NM_013451.2,4568-4586).
ctgacagacttctcagata

SEQ ID NO: 312406 - DNA, 19 bp, Homo sapiens
  siRNA target sequence for FER1L3 (NM_013451.2,4572-4590).
cagacttctcagatacgtt

SEQ ID NO: 312407 - DNA, 19 bp, Homo sapiens
  siRNA target sequence for FER1L3 (NM_013451.2,4601-4619).
cgaggcaagtcggatgaaa

SEQ ID NO: 312408 - DNA, 19 bp, Homo sapiens
  siRNA target sequence for FER1L3 (NM_013451.2,4605-4623).
gcaagtcggatgaaaatga

SEQ ID NO: 312409 - DNA, 19 bp, Homo sapiens
  siRNA target sequence for FER1L3 (NM_013451.2,4705-4723).
cagacagtttcgggaatta

SEQ ID NO: 312410 - DNA, 19 bp, Homo sapiens
  siRNA target sequence for FER1L3 (NM_013451.2,4741-4759).
ggaatgcacggttaggatt

SEQ ID NO: 312411 - DNA, 19 bp, Homo sapiens
  siRNA target sequence for FER1L3 (NM_013451.2,4742-4760).
gaatgcacggttaggattt

SEQ ID NO: 312412 - DNA, 19 bp, Homo sapiens
  siRNA target sequence for FER1L3 (NM_013451.2,4746-4764).
gcacggttaggatttacat

SEQ ID NO: 312413 - DNA, 19 bp, Homo sapiens
  siRNA target sequence for FER1L3 (NM_013451.2,4747-4765).
cacggttaggatttacatt

SEQ ID NO: 312414 - DNA, 19 bp, Homo sapiens
  siRNA target sequence for FER1L3 (NM_013451.2,4749-4767).
cggttaggatttacattgt

SEQ ID NO: 312415 - DNA, 19 bp, Homo sapiens
  siRNA target sequence for FER1L3 (NM_013451.2,4750-4768).
ggttaggatttacattgtt

SEQ ID NO: 312416 - DNA, 19 bp, Homo sapiens
  siRNA target sequence for FER1L3 (NM_013451.2,4804-4822).
cctgtgtgacccttacata

SEQ ID NO: 312417 - DNA, 19 bp, Homo sapiens
  siRNA target sequence for FER1L3 (NM_013451.2,4805-4823).
ctgtgtgacccttacataa

SEQ ID NO: 312418 - DNA, 19 bp, Homo sapiens
  siRNA target sequence for FER1L3 (NM_013451.2,4809-4827).
gtgacccttacataaaaat

SEQ ID NO: 312419 - DNA, 19 bp, Homo sapiens
  siRNA target sequence for FER1L3 (NM_013451.2,4811-4829).
gacccttacataaaaataa

SEQ ID NO: 312420 - DNA, 19 bp, Homo sapiens
  siRNA target sequence for FER1L3 (NM_013451.2,4830-4848).
cactgggcaaaaaagtcat

SEQ ID NO: 312421 - DNA, 19 bp, Homo sapiens
  siRNA target sequence for FER1L3 (NM_013451.2,4969-4987).
ctttacccgggatgaaaaa

SEQ ID NO: 312422 - DNA, 19 bp, Homo sapiens
  siRNA target sequence for FER1L3 (NM_013451.2,4992-5010).
gagaaacaattattgatct

SEQ ID NO: 312423 - DNA, 19 bp, Homo sapiens
  siRNA target sequence for FER1L3 (NM_013451.2,5009-5027).
ctggaaaaccgattccttt

SEQ ID NO: 312424 - DNA, 19 bp, Homo sapiens
  siRNA target sequence for FER1L3 (NM_013451.2,5069-5087).
gtttctggagtcaatacct

SEQ ID NO: 312425 - DNA, 19 bp, Homo sapiens
  siRNA target sequence for FER1L3 (NM_013451.2,5163-5181).
ccgaagatgggagtagaat

SEQ ID NO: 312426 - DNA, 19 bp, Homo sapiens
  siRNA target sequence for FER1L3 (NM_013451.2,5165-5183).
gaagatgggagtagaatca

SEQ ID NO: 312427 - DNA, 19 bp, Homo sapiens
  siRNA target sequence for FER1L3 (NM_013451.2,5303-5321).
cctgagcacgtggaaacaa

SEQ ID NO: 312428 - DNA, 19 bp, Homo sapiens
  siRNA target sequence for FER1L3 (NM_013451.2,5350-5368).
catttcccagggaaaactt

SEQ ID NO: 312429 - DNA, 19 bp, Homo sapiens
  siRNA target sequence for FER1L3 (NM_013451.2,5381-5399).
gatgttttccccaagagtt

SEQ ID NO: 312430 - DNA, 19 bp, Homo sapiens
  siRNA target sequence for FER1L3 (NM_013451.2,5472-5490).
ggaacaccaaggacgttat

SEQ ID NO: 312431 - DNA, 19 bp, Homo sapiens
  siRNA target sequence for FER1L3 (NM_013451.2,5655-5673).
cagccgaacaactctgtat

SEQ ID NO: 312432 - DNA, 19 bp, Homo sapiens
  siRNA target sequence for FER1L3 (NM_013451.2,5659-5677).
cgaacaactctgtatcgtt

SEQ ID NO: 312433 - DNA, 19 bp, Homo sapiens
  siRNA target sequence for FER1L3 (NM_013451.2,5668-5686).
ctgtatcgttgcgaaaaaa

SEQ ID NO: 312434 - DNA, 19 bp, Homo sapiens
  siRNA target sequence for FER1L3 (NM_013451.2,5670-5688).
gtatcgttgcgaaaaaaga

SEQ ID NO: 312435 - DNA, 19 bp, Homo sapiens
  siRNA target sequence for FER1L3 (NM_013451.2,5705-5723).
gaccaaacggaatttcgaa

SEQ ID NO: 312436 - DNA, 19 bp, Homo sapiens
  siRNA target sequence for FER1L3 (NM_013451.2,5727-5745).
cacccaggctgatcattca

SEQ ID NO: 312437 - DNA, 19 bp, Homo sapiens
  siRNA target sequence for FER1L3 (NM_013451.2,5812-5830).
cacgatcattcctgcaaaa

SEQ ID NO: 312438 - DNA, 19 bp, Homo sapiens
  siRNA target sequence for FER1L3 (NM_013451.2,5938-5956).
gccatgctacgcagagaaa

SEQ ID NO: 312439 - DNA, 19 bp, Homo sapiens
  siRNA target sequence for FER1L3 (NM_013451.2,5940-5958).
catgctacgcagagaaaga

SEQ ID NO: 312440 - DNA, 19 bp, Homo sapiens
  siRNA target sequence for FER1L3 (NM_013451.2,5979-5997).
ggaaagtggagatgacatt

SEQ ID NO: 312441 - DNA, 19 bp, Homo sapiens
  siRNA target sequence for FER1L3 (NM_013451.2,6069-6087).
ccaagctggacttaccaaa

SEQ ID NO: 312442 - DNA, 19 bp, Homo sapiens
  siRNA target sequence for FER1L3 (NM_013451.2,6073-6091).
gctggacttaccaaatcga

SEQ ID NO: 312443 - DNA, 19 bp, Homo sapiens
  siRNA target sequence for FER1L3 (NM_013451.2,6223-6241).
ctactctttgccgaactat

SEQ ID NO: 312444 - DNA, 19 bp, Homo sapiens
  siRNA target sequence for FER1L3 (NM_013451.2,6233-6251).
ccgaactatttgtcaatga

SEQ ID NO: 312445 - DNA, 19 bp, Homo sapiens
  siRNA target sequence for FER1L3 (NM_013451.2,6234-6252).
cgaactatttgtcaatgaa

SEQ ID NO: 312446 - DNA, 19 bp, Homo sapiens
  siRNA target sequence for SGCA (NM_000023.1,335-353).
caatcgggacagctttgat

SEQ ID NO: 312447 - DNA, 19 bp, Homo sapiens
  siRNA target sequence for SGCA (NM_000023.1,574-592).
ccattgagggccgaaaaga

SEQ ID NO: 312448 - DNA, 19 bp, Homo sapiens
  siRNA target sequence for SGCA (NM_000023.1,575-593).
cattgagggccgaaaagaa

SEQ ID NO: 312449 - DNA, 19 bp, Homo sapiens
  siRNA target sequence for SGCA (NM_000023.1,585-603).
cgaaaagaaggggtataca

SEQ ID NO: 312450 - DNA, 19 bp, Homo sapiens
  siRNA target sequence for SGCA (NM_000023.1,586-604).
gaaaagaaggggtatacat

SEQ ID NO: 312451 - DNA, 19 bp, Homo sapiens
  siRNA target sequence for SGCA (NM_000023.1,735-753).
gttgactggtgcaatgtga

SEQ ID NO: 312452 - DNA, 19 bp, Homo sapiens
  siRNA target sequence for SGCA (NM_000023.1,1085-1103).
caccctgcccatgttcaat

SEQ ID NO: 312453 - DNA, 19 bp, Homo sapiens
  siRNA target sequence for SLMAP (NM_007159.1,86-104).
caagctgataatgatttca

SEQ ID NO: 312454 - DNA, 19 bp, Homo sapiens
  siRNA target sequence for SLMAP (NM_007159.1,173-191).
ctgagtccaagcaaggaaa

SEQ ID NO: 312455 - DNA, 19 bp, Homo sapiens
  siRNA target sequence for SLMAP (NM_007159.1,281-299).
cagggtgcacagtcagaaa

SEQ ID NO: 312456 - DNA, 19 bp, Homo sapiens
  siRNA target sequence for SLMAP (NM_007159.1,283-301).
gggtgcacagtcagaaatt

SEQ ID NO: 312457 - DNA, 19 bp, Homo sapiens
  siRNA target sequence for SLMAP (NM_007159.1,349-367).
ccaggagctagctagaaca

SEQ ID NO: 312458 - DNA, 19 bp, Homo sapiens
  siRNA target sequence for SLMAP (NM_007159.1,350-368).
caggagctagctagaacaa

SEQ ID NO: 312459 - DNA, 19 bp, Homo sapiens
  siRNA target sequence for SLMAP (NM_007159.1,352-370).
ggagctagctagaacaagt

SEQ ID NO: 312460 - DNA, 19 bp, Homo sapiens
  siRNA target sequence for SLMAP (NM_007159.1,355-373).
gctagctagaacaagtaaa

SEQ ID NO: 312461 - DNA, 19 bp, Homo sapiens
  siRNA target sequence for SLMAP (NM_007159.1,420-438).
cctatcgaaatcaagttga

SEQ ID NO: 312462 - DNA, 19 bp, Homo sapiens
  siRNA target sequence for SLMAP (NM_007159.1,437-455).
gaggaatccactaaacaaa

SEQ ID NO: 312463 - DNA, 19 bp, Homo sapiens
  siRNA target sequence for SLMAP (NM_007159.1,479-497).
cagaggttacacatcgata

SEQ ID NO: 312464 - DNA, 19 bp, Homo sapiens
  siRNA target sequence for SLMAP (NM_007159.1,483-501).
ggttacacatcgatactga

SEQ ID NO: 312465 - DNA, 19 bp, Homo sapiens
  siRNA target sequence for SLMAP (NM_007159.1,532-550).
cacaagtactagagatgaa

SEQ ID NO: 312466 - DNA, 19 bp, Homo sapiens
  siRNA target sequence for SLMAP (NM_007159.1,553-571).
gcttagtgcccgagatgaa

SEQ ID NO: 312467 - DNA, 19 bp, Homo sapiens
  siRNA target sequence for SLMAP (NM_007159.1,554-572).
cttagtgcccgagatgaaa

SEQ ID NO: 312468 - DNA, 19 bp, Homo sapiens
  siRNA target sequence for SLMAP (NM_007159.1,558-576).
gtgcccgagatgaaatttt

SEQ ID NO: 312469 - DNA, 19 bp, Homo sapiens
  siRNA target sequence for SLMAP (NM_007159.1,614-632).
cgggacactgacattgctt

SEQ ID NO: 312470 - DNA, 19 bp, Homo sapiens
  siRNA target sequence for SLMAP (NM_007159.1,619-637).
cactgacattgcttcttta

SEQ ID NO: 312471 - DNA, 19 bp, Homo sapiens
  siRNA target sequence for SLMAP (NM_007159.1,621-639).
ctgacattgcttctttaca

SEQ ID NO: 312472 - DNA, 19 bp, Homo sapiens
  siRNA target sequence for SLMAP (NM_007159.1,633-651).
ctttacaagaagagcttaa

SEQ ID NO: 312473 - DNA, 19 bp, Homo sapiens
  siRNA target sequence for SLMAP (NM_007159.1,680-698).
cggaaagcagcgtctgaat

SEQ ID NO: 312474 - DNA, 19 bp, Homo sapiens
  siRNA target sequence for SLMAP (NM_007159.1,681-699).
ggaaagcagcgtctgaata

SEQ ID NO: 312475 - DNA, 19 bp, Homo sapiens
  siRNA target sequence for SLMAP (NM_007159.1,682-700).
gaaagcagcgtctgaatat

SEQ ID NO: 312476 - DNA, 19 bp, Homo sapiens
  siRNA target sequence for SLMAP (NM_007159.1,686-704).
gcagcgtctgaatatgaga

SEQ ID NO: 312477 - DNA, 19 bp, Homo sapiens
  siRNA target sequence for SLMAP (NM_007159.1,690-708).
cgtctgaatatgagaaaga

SEQ ID NO: 312478 - DNA, 19 bp, Homo sapiens
  siRNA target sequence for SLMAP (NM_007159.1,836-854).
gaatgccattctctaaaaa

SEQ ID NO: 312479 - DNA, 19 bp, Homo sapiens
  siRNA target sequence for SLMAP (NM_007159.1,878-896).
gaactgcaacggcaagaaa

SEQ ID NO: 312480 - DNA, 19 bp, Homo sapiens
  siRNA target sequence for SLMAP (NM_007159.1,944-962).
ctcagcatccttcaaatgt

SEQ ID NO: 312481 - DNA, 19 bp, Homo sapiens
  siRNA target sequence for SLMAP (NM_007159.1,1013-1031).
cgggattcagctgatttaa

SEQ ID NO: 312482 - DNA, 19 bp, Homo sapiens
  siRNA target sequence for SLMAP (NM_007159.1,1014-1032).
gggattcagctgatttaaa

SEQ ID NO: 312483 - DNA, 19 bp, Homo sapiens
  siRNA target sequence for SLMAP (NM_007159.1,1098-1116).
ctgtactctcagaactgaa

SEQ ID NO: 312484 - DNA, 19 bp, Homo sapiens
  siRNA target sequence for SLMAP (NM_007159.1,1195-1213).
gctccgagagaaaggaaat

SEQ ID NO: 312485 - DNA, 19 bp, Homo sapiens
  siRNA target sequence for SLMAP (NM_007159.1,1198-1216).
ccgagagaaaggaaataat

SEQ ID NO: 312486 - DNA, 19 bp, Homo sapiens
  siRNA target sequence for SLMAP (NM_007159.1,1209-1227).
gaaataatccttccatatt

SEQ ID NO: 312487 - DNA, 19 bp, Homo sapiens
  siRNA target sequence for SSPN (NM_005086.3,366-384).
ctgcttagtggcctatctt

SEQ ID NO: 312488 - DNA, 19 bp, Homo sapiens
  siRNA target sequence for SSPN (NM_005086.3,375-393).
ggcctatcttggcttgttt

SEQ ID NO: 312489 - DNA, 19 bp, Homo sapiens
  siRNA target sequence for SSPN (NM_005086.3,376-394).
gcctatcttggcttgttta

SEQ ID NO: 312490 - DNA, 19 bp, Homo sapiens
  siRNA target sequence for SSPN (NM_005086.3,377-395).
cctatcttggcttgtttat

SEQ ID NO: 312491 - DNA, 19 bp, Homo sapiens
  siRNA target sequence for SSPN (NM_005086.3,415-433).
gttgacgaacggacatgta

SEQ ID NO: 312492 - DNA, 19 bp, Homo sapiens
  siRNA target sequence for SSPN (NM_005086.3,420-438).
cgaacggacatgtattcaa

SEQ ID NO: 312493 - DNA, 19 bp, Homo sapiens
  siRNA target sequence for SSPN (NM_005086.3,421-439).
gaacggacatgtattcaat

SEQ ID NO: 312494 - DNA, 19 bp, Homo sapiens
  siRNA target sequence for SSPN (NM_005086.3,443-461).
ctatgaaactgttatactt

SEQ ID NO: 312495 - DNA, 19 bp, Homo sapiens
  siRNA target sequence for SSPN (NM_005086.3,642-660).
cgtcactggcactttcaaa

SEQ ID NO: 312496 - DNA, 19 bp, Homo sapiens
  siRNA target sequence for TRDN (NM_006073.1,66-84).
ctgtgatagacagcaaaaa

SEQ ID NO: 312497 - DNA, 19 bp, Homo sapiens
  siRNA target sequence for TRDN (NM_006073.1,207-225).
ctgttgccatcgttatgtt

SEQ ID NO: 312498 - DNA, 19 bp, Homo sapiens
  siRNA target sequence for TRDN (NM_006073.1,212-230).
gccatcgttatgtttgatt

SEQ ID NO: 312499 - DNA, 19 bp, Homo sapiens
  siRNA target sequence for TRDN (NM_006073.1,214-232).
catcgttatgtttgattta

SEQ ID NO: 312500 - DNA, 19 bp, Homo sapiens
  siRNA target sequence for TRDN (NM_006073.1,393-411).
gtgacgaagatactgataa

SEQ ID NO: 312501 - DNA, 19 bp, Homo sapiens
  siRNA target sequence for TRDN (NM_006073.1,425-443).
gagcctcccttgagaaaaa

SEQ ID NO: 312502 - DNA, 19 bp, Homo sapiens
  siRNA target sequence for TRDN (NM_006073.1,712-730).
gaagcaaacagctgcaaaa

SEQ ID NO: 312503 - DNA, 19 bp, Homo sapiens
  siRNA target sequence for TRDN (NM_006073.1,792-810).
ctgtgtcaaagcatgaaca

SEQ ID NO: 312504 - DNA, 19 bp, Homo sapiens
  siRNA target sequence for TRDN (NM_006073.1,820-838).
gtatgcattctgtcgatat

SEQ ID NO: 312505 - DNA, 19 bp, Homo sapiens
  siRNA target sequence for TRDN (NM_006073.1,831-849).
gtcgatatatgattgacat

SEQ ID NO: 312506 - DNA, 19 bp, Homo sapiens
  siRNA target sequence for TRDN (NM_006073.1,833-851).
cgatatatgattgacatat

SEQ ID NO: 312507 - DNA, 19 bp, Homo sapiens
  siRNA target sequence for TRDN (NM_006073.1,1075-1093).
gccgggaaaagcttctgaa

SEQ ID NO: 312508 - DNA, 19 bp, Homo sapiens
  siRNA target sequence for TRDN (NM_006073.1,1096-1114).
caaacaagggactgtaaaa

SEQ ID NO: 312509 - DNA, 19 bp, Homo sapiens
  siRNA target sequence for TRDN (NM_006073.1,1316-1334).
gagattggtgcggtttcaa

SEQ ID NO: 312510 - DNA, 19 bp, Homo sapiens
  siRNA target sequence for TRDN (NM_006073.1,1546-1564).
gcctaaacctccacaacta

SEQ ID NO: 312511 - DNA, 19 bp, Homo sapiens
  siRNA target sequence for TRDN (NM_006073.1,1548-1566).
ctaaacctccacaactaca

SEQ ID NO: 312512 - DNA, 19 bp, Homo sapiens
  siRNA target sequence for TRDN (NM_006073.1,1714-1732).
ggtaaaagctgtcacaata

SEQ ID NO: 312513 - DNA, 19 bp, Homo sapiens
  siRNA target sequence for TRDN (NM_006073.1,1782-1800).
gagaacctccatctataaa

SEQ ID NO: 312514 - DNA, 19 bp, Homo sapiens
  siRNA target sequence for TRDN (NM_006073.1,1983-2001).
ctgcaagagtatcaaaaga

SEQ ID NO: 312515 - DNA, 19 bp, Homo sapiens
  siRNA target sequence for TRDN (NM_006073.1,2109-2127).
ggtacaatggctatggatt

SEQ ID NO: 312516 - DNA, 19 bp, Homo sapiens
  siRNA target sequence for TRDN (NM_006073.1,2164-2182).
gagctctggtcaagcaaat

SEQ ID NO: 312517 - DNA, 19 bp, Homo sapiens
  siRNA target sequence for TRDN (NM_006073.1,2167-2185).
ctctggtcaagcaaattct

SEQ ID NO: 312518 - DNA, 19 bp, Homo sapiens
  siRNA target sequence for FEZ1 (NM_005103.3,279-297).
ctctccgagcttgagaatt

SEQ ID NO: 312519 - DNA, 19 bp, Homo sapiens
  siRNA target sequence for FEZ1 (NM_005103.3,281-299).
ctccgagcttgagaatttt

SEQ ID NO: 312520 - DNA, 19 bp, Homo sapiens
  siRNA target sequence for FEZ1 (NM_005103.3,284-302).
cgagcttgagaatttttct

SEQ ID NO: 312521 - DNA, 19 bp, Homo sapiens
  siRNA target sequence for FEZ1 (NM_005103.3,329-347).
ggaggacctcgtaaatgaa

SEQ ID NO: 312522 - DNA, 19 bp, Homo sapiens
  siRNA target sequence for FEZ1 (NM_005103.3,330-348).
gaggacctcgtaaatgaat

SEQ ID NO: 312523 - DNA, 19 bp, Homo sapiens
  siRNA target sequence for FEZ1 (NM_005103.3,332-350).
ggacctcgtaaatgaattt

SEQ ID NO: 312524 - DNA, 19 bp, Homo sapiens
  siRNA target sequence for FEZ1 (NM_005103.3,366-384).
gtctgctttcggaactaca

SEQ ID NO: 312525 - DNA, 19 bp, Homo sapiens
  siRNA target sequence for FEZ1 (NM_005103.3,474-492).
gctctgacagacaattaca

SEQ ID NO: 312526 - DNA, 19 bp, Homo sapiens
  siRNA target sequence for FEZ1 (NM_005103.3,638-656).
cacagcagatcaggtaatt

SEQ ID NO: 312527 - DNA, 19 bp, Homo sapiens
  siRNA target sequence for FEZ1 (NM_005103.3,640-658).
cagcagatcaggtaattga

SEQ ID NO: 312528 - DNA, 19 bp, Homo sapiens
  siRNA target sequence for FEZ1 (NM_005103.3,958-976).
cctttatcacggtgcttat

SEQ ID NO: 312529 - DNA, 19 bp, Homo sapiens
  siRNA target sequence for FEZ1 (NM_005103.3,959-977).
ctttatcacggtgcttatt

SEQ ID NO: 312530 - DNA, 19 bp, Homo sapiens
  siRNA target sequence for FEZ1 (NM_005103.3,1050-1068).
cagagcagccggatagaga

SEQ ID NO: 312531 - DNA, 19 bp, Homo sapiens
  siRNA target sequence for FEZ1 (NM_005103.3,1162-1180).
ctgacaaacagtatctgaa

SEQ ID NO: 312532 - DNA, 19 bp, Homo sapiens
  siRNA target sequence for FEZ1 (NM_005103.3,1238-1256).
gctgacaaacattctcttt

SEQ ID NO: 312533 - DNA, 19 bp, Homo sapiens
  siRNA target sequence for FEZ1 (NM_005103.3,1288-1306).
ctttgctaacggactacat

SEQ ID NO: 312534 - DNA, 19 bp, Homo sapiens
  siRNA target sequence for FEZ1 (NM_005103.3,1292-1310).
gctaacggactacatttta

SEQ ID NO: 312535 - DNA, 19 bp, Homo sapiens
  siRNA target sequence for SEMA3B (NM_004636.1,548-566).
gcagggaaggacattggta

SEQ ID NO: 312536 - DNA, 19 bp, Homo sapiens
  siRNA target sequence for SEMA3B (NM_004636.1,563-581).
ggtactgagtgcatgaact

SEQ ID NO: 312537 - DNA, 19 bp, Homo sapiens
  siRNA target sequence for SEMA3B (NM_004636.1,700-718).
gctggacccaggaaggata

SEQ ID NO: 312538 - DNA, 19 bp, Homo sapiens
  siRNA target sequence for SEMA3B (NM_004636.1,727-745).
caaggggaagagtccttat

SEQ ID NO: 312539 - DNA, 19 bp, Homo sapiens
  siRNA target sequence for SEMA3B (NM_004636.1,812-830).
ctcatgggacgagacttta

SEQ ID NO: 312540 - DNA, 19 bp, Homo sapiens
  siRNA target sequence for SEMA3B (NM_004636.1,902-920).
cccaagtttgtcaaggtat

SEQ ID NO: 312541 - DNA, 19 bp, Homo sapiens
  siRNA target sequence for SEMA3B (NM_004636.1,903-921).
ccaagtttgtcaaggtatt

SEQ ID NO: 312542 - DNA, 19 bp, Homo sapiens
  siRNA target sequence for SEMA3B (NM_004636.1,944-962).
ccagacgacgacaaaatct

SEQ ID NO: 312543 - DNA, 19 bp, Homo sapiens
  siRNA target sequence for SEMA3B (NM_004636.1,1554-1572).
ccgctgacggacactatga

SEQ ID NO: 312544 - DNA, 19 bp, Homo sapiens
  siRNA target sequence for F11R (NM_016946.3,86-104).
caagtcgagaggaaactgt

SEQ ID NO: 312545 - DNA, 19 bp, Homo sapiens
  siRNA target sequence for F11R (NM_016946.3,101-119).
ctgttgtgcctcttcatat

SEQ ID NO: 312546 - DNA, 19 bp, Homo sapiens
  siRNA target sequence for F11R (NM_016946.3,276-294).
ccaccagactcgtttgcta

SEQ ID NO: 312547 - DNA, 19 bp, Homo sapiens
  siRNA target sequence for F11R (NM_016946.3,277-295).
caccagactcgtttgctat

SEQ ID NO: 312548 - DNA, 19 bp, Homo sapiens
  siRNA target sequence for F11R (NM_016946.3,279-297).
ccagactcgtttgctataa

SEQ ID NO: 312549 - DNA, 19 bp, Homo sapiens
  siRNA target sequence for F11R (NM_016946.3,468-486).
ccaagcctacagttaacat

SEQ ID NO: 312550 - DNA, 19 bp, Homo sapiens
  siRNA target sequence for F11R (NM_016946.3,523-541).
gacatgctcagaacaagat

SEQ ID NO: 312551 - DNA, 19 bp, Homo sapiens
  siRNA target sequence for F11R (NM_016946.3,580-598).
gatagtgatgcctacgaat

SEQ ID NO: 312552 - DNA, 19 bp, Homo sapiens
  siRNA target sequence for F11R (NM_016946.3,590-608).
cctacgaatcccaaaagca

SEQ ID NO: 312553 - DNA, 19 bp, Homo sapiens
  siRNA target sequence for F11R (NM_016946.3,611-629).
cgtgccttcagcaactctt

SEQ ID NO: 312554 - DNA, 19 bp, Homo sapiens
  siRNA target sequence for F11R (NM_016946.3,671-689).
cccctgtcagcctctgata

SEQ ID NO: 312555 - DNA, 19 bp, Homo sapiens
  siRNA target sequence for F11R (NM_016946.3,673-691).
cctgtcagcctctgatact

SEQ ID NO: 312556 - DNA, 19 bp, Homo sapiens
  siRNA target sequence for F11R (NM_016946.3,726-744).
ggacacccatgacttcaaa

SEQ ID NO: 312557 - DNA, 19 bp, Homo sapiens
  siRNA target sequence for F11R (NM_016946.3,727-745).
gacacccatgacttcaaat

SEQ ID NO: 312558 - DNA, 19 bp, Homo sapiens
  siRNA target sequence for F11R (NM_016946.3,860-878).
ggccactttgacagaacaa

SEQ ID NO: 312559 - DNA, 19 bp, Homo sapiens
  siRNA target sequence for F11R (NM_016946.3,861-879).
gccactttgacagaacaaa

SEQ ID NO: 312560 - DNA, 19 bp, Homo sapiens
  siRNA target sequence for F11R (NM_016946.3,916-934).
gcctagtgcccgaagtgaa

SEQ ID NO: 312561 - DNA, 19 bp, Homo sapiens
  siRNA target sequence for F11R (NM_016946.3,932-950).
gaaggagaattcaaacaga

SEQ ID NO: 312562 - DNA, 19 bp, Homo sapiens
  siRNA target sequence for F11R (NM_144502.1,121-139).
ggcgatccttcctgagaat

SEQ ID NO: 312563 - DNA, 19 bp, Homo sapiens
  siRNA target sequence for F11R (NM_144502.1,122-140).
gcgatccttcctgagaata

SEQ ID NO: 312564 - DNA, 19 bp, Homo sapiens
  siRNA target sequence for F11R (NM_144502.1,123-141).
cgatccttcctgagaataa

SEQ ID NO: 312565 - DNA, 19 bp, Homo sapiens
  siRNA target sequence for NEO1 (NM_002499.1,278-296).
cgaacgttcactccatttt

SEQ ID NO: 312566 - DNA, 19 bp, Homo sapiens
  siRNA target sequence for NEO1 (NM_002499.1,316-334).
ggatacactctcagttaga

SEQ ID NO: 312567 - DNA, 19 bp, Homo sapiens
  siRNA target sequence for NEO1 (NM_002499.1,329-347).
gttagaggctcttctgtta

SEQ ID NO: 312568 - DNA, 19 bp, Homo sapiens
  siRNA target sequence for NEO1 (NM_002499.1,335-353).
ggctcttctgttatattaa

SEQ ID NO: 312569 - DNA, 19 bp, Homo sapiens
  siRNA target sequence for NEO1 (NM_002499.1,446-464).
ctcccggatggatctttat

SEQ ID NO: 312570 - DNA, 19 bp, Homo sapiens
  siRNA target sequence for NEO1 (NM_002499.1,448-466).
cccggatggatctttattt

SEQ ID NO: 312571 - DNA, 19 bp, Homo sapiens
  siRNA target sequence for NEO1 (NM_002499.1,449-467).
ccggatggatctttattta

SEQ ID NO: 312572 - DNA, 19 bp, Homo sapiens
  siRNA target sequence for NEO1 (NM_002499.1,450-468).
cggatggatctttatttat

SEQ ID NO: 312573 - DNA, 19 bp, Homo sapiens
  siRNA target sequence for NEO1 (NM_002499.1,472-490).
caatgtggtgcattccaaa

SEQ ID NO: 312574 - DNA, 19 bp, Homo sapiens
  siRNA target sequence for NEO1 (NM_002499.1,481-499).
gcattccaaacacaataaa

SEQ ID NO: 312575 - DNA, 19 bp, Homo sapiens
  siRNA target sequence for NEO1 (NM_002499.1,584-602).
ggtcttccaagatttacca

SEQ ID NO: 312576 - DNA, 19 bp, Homo sapiens
  siRNA target sequence for NEO1 (NM_002499.1,649-667).
gaattgtgaagttaatgca

SEQ ID NO: 312577 - DNA, 19 bp, Homo sapiens
  siRNA target sequence for NEO1 (NM_002499.1,716-734).
ctggatgatagagttatca

SEQ ID NO: 312578 - DNA, 19 bp, Homo sapiens
  siRNA target sequence for NEO1 (NM_002499.1,718-736).
ggatgatagagttatcaaa

SEQ ID NO: 312579 - DNA, 19 bp, Homo sapiens
  siRNA target sequence for NEO1 (NM_002499.1,812-830).
ggtgggccaccaaagtata

SEQ ID NO: 312580 - DNA, 19 bp, Homo sapiens
  siRNA target sequence for NEO1 (NM_002499.1,816-834).
ggccaccaaagtatagtga

SEQ ID NO: 312581 - DNA, 19 bp, Homo sapiens
  siRNA target sequence for NEO1 (NM_002499.1,817-835).
gccaccaaagtatagtgat

SEQ ID NO: 312582 - DNA, 19 bp, Homo sapiens
  siRNA target sequence for NEO1 (NM_002499.1,822-840).
caaagtatagtgatgaagt

SEQ ID NO: 312583 - DNA, 19 bp, Homo sapiens
  siRNA target sequence for NEO1 (NM_002499.1,857-875).
ccagatcctgaggtgatat

SEQ ID NO: 312584 - DNA, 19 bp, Homo sapiens
  siRNA target sequence for NEO1 (NM_002499.1,869-887).
gtgatatcagacttggtat

SEQ ID NO: 312585 - DNA, 19 bp, Homo sapiens
  siRNA target sequence for NEO1 (NM_002499.1,871-889).
gatatcagacttggtattt

SEQ ID NO: 312586 - DNA, 19 bp, Homo sapiens
  siRNA target sequence for NEO1 (NM_002499.1,896-914).
cagccttctcccttagtca

SEQ ID NO: 312587 - DNA, 19 bp, Homo sapiens
  siRNA target sequence for NEO1 (NM_002499.1,962-980).
cctactccaaccattaaat

SEQ ID NO: 312588 - DNA, 19 bp, Homo sapiens
  siRNA target sequence for NEO1 (NM_002499.1,972-990).
ccattaaatggatgaaaaa

SEQ ID NO: 312589 - DNA, 19 bp, Homo sapiens
  siRNA target sequence for NEO1 (NM_002499.1,1017-1035).
ctgaaagattggtattgct

SEQ ID NO: 312590 - DNA, 19 bp, Homo sapiens
  siRNA target sequence for NEO1 (NM_002499.1,1048-1066).
cctggagatcagtgatgtt

SEQ ID NO: 312591 - DNA, 19 bp, Homo sapiens
  siRNA target sequence for NEO1 (NM_002499.1,1079-1097).
gctgggacttatttttgta

SEQ ID NO: 312592 - DNA, 19 bp, Homo sapiens
  siRNA target sequence for NEO1 (NM_002499.1,1165-1183).
cctgaagcagcctactaat

SEQ ID NO: 312593 - DNA, 19 bp, Homo sapiens
  siRNA target sequence for NEO1 (NM_002499.1,1190-1208).
gctcacgaatctatggata

SEQ ID NO: 312594 - DNA, 19 bp, Homo sapiens
  siRNA target sequence for NEO1 (NM_002499.1,1195-1213).
cgaatctatggatattgta

SEQ ID NO: 312595 - DNA, 19 bp, Homo sapiens
  siRNA target sequence for NEO1 (NM_002499.1,1223-1241).
gaagtgactggaaaaccaa

SEQ ID NO: 312596 - DNA, 19 bp, Homo sapiens
  siRNA target sequence for NEO1 (NM_002499.1,1276-1294).
ggttatcccaagtgattat

SEQ ID NO: 312597 - DNA, 19 bp, Homo sapiens
  siRNA target sequence for NEO1 (NM_002499.1,1277-1295).
gttatcccaagtgattatt

SEQ ID NO: 312598 - DNA, 19 bp, Homo sapiens
  siRNA target sequence for NEO1 (NM_002499.1,1330-1348).
gggtctggtgaaatcagat

SEQ ID NO: 312599 - DNA, 19 bp, Homo sapiens
  siRNA target sequence for NEO1 (NM_002499.1,1401-1419).
gagcccaactgataatcct

SEQ ID NO: 312600 - DNA, 19 bp, Homo sapiens
  siRNA target sequence for NEO1 (NM_002499.1,1484-1502).
gtctctacccgcttcatca

SEQ ID NO: 312601 - DNA, 19 bp, Homo sapiens
  siRNA target sequence for NEO1 (NM_002499.1,1488-1506).
ctacccgcttcatcaaatt

SEQ ID NO: 312602 - DNA, 19 bp, Homo sapiens
  siRNA target sequence for NEO1 (NM_002499.1,1513-1531).
gcggacacctgcatcagat

SEQ ID NO: 312603 - DNA, 19 bp, Homo sapiens
  siRNA target sequence for NEO1 (NM_002499.1,1532-1550).
cctcacggagacaacctta

SEQ ID NO: 312604 - DNA, 19 bp, Homo sapiens
  siRNA target sequence for NEO1 (NM_002499.1,1584-1602).
ctagggaacgtgttgagaa

SEQ ID NO: 312605 - DNA, 19 bp, Homo sapiens
  siRNA target sequence for NEO1 (NM_002499.1,1589-1607).
gaacgtgttgagaatacca

SEQ ID NO: 312606 - DNA, 19 bp, Homo sapiens
  siRNA target sequence for NEO1 (NM_002499.1,1621-1639).
gatgcaagtaaccattcaa

SEQ ID NO: 312607 - DNA, 19 bp, Homo sapiens
  siRNA target sequence for NEO1 (NM_002499.1,1628-1646).
gtaaccattcaaaacctaa

SEQ ID NO: 312608 - DNA, 19 bp, Homo sapiens
  siRNA target sequence for NEO1 (NM_002499.1,1650-1668).
cagcgaccgtgtacatctt

SEQ ID NO: 312609 - DNA, 19 bp, Homo sapiens
  siRNA target sequence for NEO1 (NM_002499.1,1652-1670).
gcgaccgtgtacatcttta

SEQ ID NO: 312610 - DNA, 19 bp, Homo sapiens
  siRNA target sequence for NEO1 (NM_002499.1,1654-1672).
gaccgtgtacatctttaga

SEQ ID NO: 312611 - DNA, 19 bp, Homo sapiens
  siRNA target sequence for NEO1 (NM_002499.1,1657-1675).
cgtgtacatctttagagtt

SEQ ID NO: 312612 - DNA, 19 bp, Homo sapiens
  siRNA target sequence for NEO1 (NM_002499.1,1658-1676).
gtgtacatctttagagtta

SEQ ID NO: 312613 - DNA, 19 bp, Homo sapiens
  siRNA target sequence for NEO1 (NM_002499.1,1716-1734).
cactgcgagtagaaacaca

SEQ ID NO: 312614 - DNA, 19 bp, Homo sapiens
  siRNA target sequence for NEO1 (NM_002499.1,1790-1808).
cctacctccatcactgtta

SEQ ID NO: 312615 - DNA, 19 bp, Homo sapiens
  siRNA target sequence for NEO1 (NM_002499.1,1889-1907).
caggatgttgatgtttcaa

SEQ ID NO: 312616 - DNA, 19 bp, Homo sapiens
  siRNA target sequence for NEO1 (NM_002499.1,1920-1938).
ccattaatgggttgaaaaa

SEQ ID NO: 312617 - DNA, 19 bp, Homo sapiens
  siRNA target sequence for NEO1 (NM_002499.1,1957-1975).
ccgagtggtggcctacaat

SEQ ID NO: 312618 - DNA, 19 bp, Homo sapiens
  siRNA target sequence for NEO1 (NM_002499.1,1958-1976).
cgagtggtggcctacaata

SEQ ID NO: 312619 - DNA, 19 bp, Homo sapiens
  siRNA target sequence for NEO1 (NM_002499.1,1963-1981).
ggtggcctacaataaacat

SEQ ID NO: 312620 - DNA, 19 bp, Homo sapiens
  siRNA target sequence for NEO1 (NM_002499.1,2006-2024).
gttgctgttcgaacattgt

SEQ ID NO: 312621 - DNA, 19 bp, Homo sapiens
  siRNA target sequence for NEO1 (NM_002499.1,2056-2074).
gtccttggaagtgagaaat

SEQ ID NO: 312622 - DNA, 19 bp, Homo sapiens
  siRNA target sequence for NEO1 (NM_002499.1,2180-2198).
gtcactgagaccttggtaa

SEQ ID NO: 312623 - DNA, 19 bp, Homo sapiens
  siRNA target sequence for NEO1 (NM_002499.1,2209-2227).
gctgtctcagctgattgaa

SEQ ID NO: 312624 - DNA, 19 bp, Homo sapiens
  siRNA target sequence for NEO1 (NM_002499.1,2234-2252).
gatcgggggactgagtata

SEQ ID NO: 312625 - DNA, 19 bp, Homo sapiens
  siRNA target sequence for NEO1 (NM_002499.1,2237-2255).
cgggggactgagtataatt

SEQ ID NO: 312626 - DNA, 19 bp, Homo sapiens
  siRNA target sequence for NEO1 (NM_002499.1,2263-2281).
ggctgctctaacaatcaat

SEQ ID NO: 312627 - DNA, 19 bp, Homo sapiens
  siRNA target sequence for NEO1 (NM_002499.1,2267-2285).
gctctaacaatcaatggta

SEQ ID NO: 312628 - DNA, 19 bp, Homo sapiens
  siRNA target sequence for NEO1 (NM_002499.1,2304-2322).
ggctgtctgctgaaacttt

SEQ ID NO: 312629 - DNA, 19 bp, Homo sapiens
  siRNA target sequence for NEO1 (NM_002499.1,2442-2460).
gaggttacgccattggtta

SEQ ID NO: 312630 - DNA, 19 bp, Homo sapiens
  siRNA target sequence for NEO1 (NM_002499.1,2487-2505).
ccatcaaagtggactataa

SEQ ID NO: 312631 - DNA, 19 bp, Homo sapiens
  siRNA target sequence for NEO1 (NM_002499.1,2509-2527).
gcgctattacaccattgaa

SEQ ID NO: 312632 - DNA, 19 bp, Homo sapiens
  siRNA target sequence for NEO1 (NM_002499.1,2510-2528).
cgctattacaccattgaaa

SEQ ID NO: 312633 - DNA, 19 bp, Homo sapiens
  siRNA target sequence for NEO1 (NM_002499.1,2533-2551).
ggatcccagctctcactat

SEQ ID NO: 312634 - DNA, 19 bp, Homo sapiens
  siRNA target sequence for NEO1 (NM_002499.1,2554-2572).
gattaccctgaaagcattt

SEQ ID NO: 312635 - DNA, 19 bp, Homo sapiens
  siRNA target sequence for NEO1 (NM_002499.1,2632-2650).
cacttctgaagttgattta

SEQ ID NO: 312636 - DNA, 19 bp, Homo sapiens
  siRNA target sequence for NEO1 (NM_002499.1,2714-2732).
gttcaggcttccattctga

SEQ ID NO: 312637 - DNA, 19 bp, Homo sapiens
  siRNA target sequence for NEO1 (NM_002499.1,2738-2756).
gacaccatcaggattacgt

SEQ ID NO: 312638 - DNA, 19 bp, Homo sapiens
  siRNA target sequence for NEO1 (NM_002499.1,2806-2824).
ctacaccgtccgatggaaa

SEQ ID NO: 312639 - DNA, 19 bp, Homo sapiens
  siRNA target sequence for NEO1 (NM_002499.1,2811-2829).
ccgtccgatggaaaaccaa

SEQ ID NO: 312640 - DNA, 19 bp, Homo sapiens
  siRNA target sequence for NEO1 (NM_002499.1,2892-2910).
gtttaaagccgaatacact

SEQ ID NO: 312641 - DNA, 19 bp, Homo sapiens
  siRNA target sequence for NEO1 (NM_002499.1,2899-2917).
gccgaatacactctatgaa

SEQ ID NO: 312642 - DNA, 19 bp, Homo sapiens
  siRNA target sequence for NEO1 (NM_002499.1,2900-2918).
ccgaatacactctatgaat

SEQ ID NO: 312643 - DNA, 19 bp, Homo sapiens
  siRNA target sequence for NEO1 (NM_002499.1,2901-2919).
cgaatacactctatgaatt

SEQ ID NO: 312644 - DNA, 19 bp, Homo sapiens
  siRNA target sequence for NEO1 (NM_002499.1,2939-2957).
ggtcgaagatcaagtacat

SEQ ID NO: 312645 - DNA, 19 bp, Homo sapiens
  siRNA target sequence for NEO1 (NM_002499.1,3030-3048).
gtaaagaggggaaacctaa

SEQ ID NO: 312646 - DNA, 19 bp, Homo sapiens
  siRNA target sequence for NEO1 (NM_002499.1,3038-3056).
gggaaacctaagaccataa

SEQ ID NO: 312647 - DNA, 19 bp, Homo sapiens
  siRNA target sequence for NEO1 (NM_002499.1,3044-3062).
cctaagaccataattgtga

SEQ ID NO: 312648 - DNA, 19 bp, Homo sapiens
  siRNA target sequence for NEO1 (NM_002499.1,3045-3063).
ctaagaccataattgtgaa

SEQ ID NO: 312649 - DNA, 19 bp, Homo sapiens
  siRNA target sequence for NEO1 (NM_002499.1,3099-3117).
caggttacatcatatatta

SEQ ID NO: 312650 - DNA, 19 bp, Homo sapiens
  siRNA target sequence for NEO1 (NM_002499.1,3101-3119).
ggttacatcatatattaca

SEQ ID NO: 312651 - DNA, 19 bp, Homo sapiens
  siRNA target sequence for NEO1 (NM_002499.1,3139-3157).
gatacatgactgggttatt

SEQ ID NO: 312652 - DNA, 19 bp, Homo sapiens
  siRNA target sequence for NEO1 (NM_002499.1,3177-3195).
gactgactcaccagataca

SEQ ID NO: 312653 - DNA, 19 bp, Homo sapiens
  siRNA target sequence for NEO1 (NM_002499.1,3183-3201).
ctcaccagatacaagagtt

SEQ ID NO: 312654 - DNA, 19 bp, Homo sapiens
  siRNA target sequence for NEO1 (NM_002499.1,3185-3203).
caccagatacaagagttaa

SEQ ID NO: 312655 - DNA, 19 bp, Homo sapiens
  siRNA target sequence for NEO1 (NM_002499.1,3204-3222).
ctcttgacacaccatacta

SEQ ID NO: 312656 - DNA, 19 bp, Homo sapiens
  siRNA target sequence for NEO1 (NM_002499.1,3206-3224).
cttgacacaccatactact

SEQ ID NO: 312657 - DNA, 19 bp, Homo sapiens
  siRNA target sequence for NEO1 (NM_002499.1,3209-3227).
gacacaccatactacttca

SEQ ID NO: 312658 - DNA, 19 bp, Homo sapiens
  siRNA target sequence for NEO1 (NM_002499.1,3269-3287).
gaagctgtccaattcagaa

SEQ ID NO: 312659 - DNA, 19 bp, Homo sapiens
  siRNA target sequence for NEO1 (NM_002499.1,3296-3314).
gcggactcctctgataaaa

SEQ ID NO: 312660 - DNA, 19 bp, Homo sapiens
  siRNA target sequence for NEO1 (NM_002499.1,3297-3315).
cggactcctctgataaaat

SEQ ID NO: 312661 - DNA, 19 bp, Homo sapiens
  siRNA target sequence for NEO1 (NM_002499.1,3367-3385).
cctaggatccgactacaaa

SEQ ID NO: 312662 - DNA, 19 bp, Homo sapiens
  siRNA target sequence for NEO1 (NM_002499.1,3389-3407).
ccaatgagcggcagtaaca

SEQ ID NO: 312663 - DNA, 19 bp, Homo sapiens
  siRNA target sequence for NEO1 (NM_002499.1,3426-3444).
cctctcctctggacagtaa

SEQ ID NO: 312664 - DNA, 19 bp, Homo sapiens
  siRNA target sequence for NEO1 (NM_002499.1,3427-3445).
ctctcctctggacagtaat

SEQ ID NO: 312665 - DNA, 19 bp, Homo sapiens
  siRNA target sequence for NEO1 (NM_002499.1,3429-3447).
ctcctctggacagtaatat

SEQ ID NO: 312666 - DNA, 19 bp, Homo sapiens
  siRNA target sequence for NEO1 (NM_002499.1,3432-3450).
ctctggacagtaatatgct

SEQ ID NO: 312667 - DNA, 19 bp, Homo sapiens
  siRNA target sequence for NEO1 (NM_002499.1,3451-3469).
gctggtcataattgtttct

SEQ ID NO: 312668 - DNA, 19 bp, Homo sapiens
  siRNA target sequence for NEO1 (NM_002499.1,3497-3515).
gtgattatcgctgtctttt

SEQ ID NO: 312669 - DNA, 19 bp, Homo sapiens
  siRNA target sequence for NEO1 (NM_002499.1,3552-3570).
gagctgcctgcaaatcagt

SEQ ID NO: 312670 - DNA, 19 bp, Homo sapiens
  siRNA target sequence for NEO1 (NM_002499.1,3569-3587).
gtgaatggctctcataagt

SEQ ID NO: 312671 - DNA, 19 bp, Homo sapiens
  siRNA target sequence for NEO1 (NM_002499.1,3826-3844).
gcgaggaatgagaccaaaa

SEQ ID NO: 312672 - DNA, 19 bp, Homo sapiens
  siRNA target sequence for NEO1 (NM_002499.1,3827-3845).
cgaggaatgagaccaaaaa

SEQ ID NO: 312673 - DNA, 19 bp, Homo sapiens
  siRNA target sequence for NEO1 (NM_002499.1,3897-3915).
ccatccattccctcgataa

SEQ ID NO: 312674 - DNA, 19 bp, Homo sapiens
  siRNA target sequence for NEO1 (NM_002499.1,3954-3972).
cagctcgcagtcatctcta

SEQ ID NO: 312675 - DNA, 19 bp, Homo sapiens
  siRNA target sequence for NEO1 (NM_002499.1,4032-4050).
ccacagaatccgttcgaaa

SEQ ID NO: 312676 - DNA, 19 bp, Homo sapiens
  siRNA target sequence for NEO1 (NM_002499.1,4033-4051).
cacagaatccgttcgaaat

SEQ ID NO: 312677 - DNA, 19 bp, Homo sapiens
  siRNA target sequence for NEO1 (NM_002499.1,4076-4094).
gcctcttcgtctcaaacat

SEQ ID NO: 312678 - DNA, 19 bp, Homo sapiens
  siRNA target sequence for NEO1 (NM_002499.1,4124-4142).
gctaccagctcctcttact

SEQ ID NO: 312679 - DNA, 19 bp, Homo sapiens
  siRNA target sequence for NEO1 (NM_002499.1,4429-4447).
ctccgagagtagctatgaa

SEQ ID NO: 312680 - DNA, 19 bp, Homo sapiens
  siRNA target sequence for NEO1 (NM_002499.1,4473-4491).
cccacctggaaggactaat

SEQ ID NO: 312681 - DNA, 19 bp, Homo sapiens
  siRNA target sequence for NEO1 (NM_002499.1,4495-4513).
ggacctaaacgctatcaca

SEQ ID NO: 312682 - DNA, 19 bp, Homo sapiens
  siRNA target sequence for NEO1 (NM_002499.1,4496-4514).
gacctaaacgctatcacaa

SEQ ID NO: 312683 - DNA, 19 bp, Homo sapiens
  siRNA target sequence for PECAM1 (NM_000442.2,291-309).
caatcaacagtgttgacat

SEQ ID NO: 312684 - DNA, 19 bp, Homo sapiens
  siRNA target sequence for PECAM1 (NM_000442.2,321-339).
cggactggacggtgcaaaa

SEQ ID NO: 312685 - DNA, 19 bp, Homo sapiens
  siRNA target sequence for PECAM1 (NM_000442.2,322-340).
ggactggacggtgcaaaat

SEQ ID NO: 312686 - DNA, 19 bp, Homo sapiens
  siRNA target sequence for PECAM1 (NM_000442.2,428-446).
gacgtgctgttttacaaca

SEQ ID NO: 312687 - DNA, 19 bp, Homo sapiens
  siRNA target sequence for PECAM1 (NM_000442.2,457-475).
gaagagcacagagagttat

SEQ ID NO: 312688 - DNA, 19 bp, Homo sapiens
  siRNA target sequence for PECAM1 (NM_000442.2,485-503).
gaagtccggatctatgact

SEQ ID NO: 312689 - DNA, 19 bp, Homo sapiens
  siRNA target sequence for PECAM1 (NM_000442.2,662-680).
gaaaaggccccaatacact

SEQ ID NO: 312690 - DNA, 19 bp, Homo sapiens
  siRNA target sequence for PECAM1 (NM_000442.2,668-686).
gccccaatacacttcacaa

SEQ ID NO: 312691 - DNA, 19 bp, Homo sapiens
  siRNA target sequence for PECAM1 (NM_000442.2,669-687).
ccccaatacacttcacaat

SEQ ID NO: 312692 - DNA, 19 bp, Homo sapiens
  siRNA target sequence for PECAM1 (NM_000442.2,670-688).
cccaatacacttcacaatt

SEQ ID NO: 312693 - DNA, 19 bp, Homo sapiens
  siRNA target sequence for PECAM1 (NM_000442.2,741-759).
ctcgagaccagaattttgt

SEQ ID NO: 312694 - DNA, 19 bp, Homo sapiens
  siRNA target sequence for PECAM1 (NM_000442.2,743-761).
cgagaccagaattttgtga

SEQ ID NO: 312695 - DNA, 19 bp, Homo sapiens
  siRNA target sequence for PECAM1 (NM_000442.2,782-800).
gaacaggaccgcgttttat

SEQ ID NO: 312696 - DNA, 19 bp, Homo sapiens
  siRNA target sequence for PECAM1 (NM_000442.2,785-803).
caggaccgcgttttatcct

SEQ ID NO: 312697 - DNA, 19 bp, Homo sapiens
  siRNA target sequence for PECAM1 (NM_000442.2,836-854).
catatgcagacctcagaat

SEQ ID NO: 312698 - DNA, 19 bp, Homo sapiens
  siRNA target sequence for PECAM1 (NM_000442.2,915-933).
gccccaccggaatgatcat

SEQ ID NO: 312699 - DNA, 19 bp, Homo sapiens
  siRNA target sequence for PECAM1 (NM_000442.2,938-956).
ggagctcagctccacatta

SEQ ID NO: 312700 - DNA, 19 bp, Homo sapiens
  siRNA target sequence for PECAM1 (NM_000442.2,939-957).
gagctcagctccacattaa

SEQ ID NO: 312701 - DNA, 19 bp, Homo sapiens
  siRNA target sequence for PECAM1 (NM_000442.2,941-959).
gctcagctccacattaagt

SEQ ID NO: 312702 - DNA, 19 bp, Homo sapiens
  siRNA target sequence for PECAM1 (NM_000442.2,952-970).
cattaagtgcaccattcaa

SEQ ID NO: 312703 - DNA, 19 bp, Homo sapiens
  siRNA target sequence for PECAM1 (NM_000442.2,1144-1162).
cgtggtcaacataacagaa

SEQ ID NO: 312704 - DNA, 19 bp, Homo sapiens
  siRNA target sequence for PECAM1 (NM_000442.2,1150-1168).
caacataacagaactattt

SEQ ID NO: 312705 - DNA, 19 bp, Homo sapiens
  siRNA target sequence for PECAM1 (NM_000442.2,1270-1288).
ccagaaggaagatacgatt

SEQ ID NO: 312706 - DNA, 19 bp, Homo sapiens
  siRNA target sequence for PECAM1 (NM_000442.2,1329-1347).
cggacagtgggacgtatat

SEQ ID NO: 312707 - DNA, 19 bp, Homo sapiens
  siRNA target sequence for PECAM1 (NM_000442.2,1383-1401).
gcaacacagtccagatagt

SEQ ID NO: 312708 - DNA, 19 bp, Homo sapiens
  siRNA target sequence for PECAM1 (NM_000442.2,1393-1411).
ccagatagtcgtatgtgaa

SEQ ID NO: 312709 - DNA, 19 bp, Homo sapiens
  siRNA target sequence for PECAM1 (NM_000442.2,1394-1412).
cagatagtcgtatgtgaaa

SEQ ID NO: 312710 - DNA, 19 bp, Homo sapiens
  siRNA target sequence for PECAM1 (NM_000442.2,1423-1441).
gcccaggatttcttatgat

SEQ ID NO: 312711 - DNA, 19 bp, Homo sapiens
  siRNA target sequence for PECAM1 (NM_000442.2,1442-1460).
gcccagtttgaggtcataa

SEQ ID NO: 312712 - DNA, 19 bp, Homo sapiens
  siRNA target sequence for PECAM1 (NM_000442.2,1443-1461).
cccagtttgaggtcataaa

SEQ ID NO: 312713 - DNA, 19 bp, Homo sapiens
  siRNA target sequence for PECAM1 (NM_000442.2,1554-1572).
gtaccaagaactcaaatga

SEQ ID NO: 312714 - DNA, 19 bp, Homo sapiens
  siRNA target sequence for PECAM1 (NM_000442.2,1596-1614).
ccactgaagacgtcgaata

SEQ ID NO: 312715 - DNA, 19 bp, Homo sapiens
  siRNA target sequence for PECAM1 (NM_000442.2,1599-1617).
ctgaagacgtcgaatacca

SEQ ID NO: 312716 - DNA, 19 bp, Homo sapiens
  siRNA target sequence for PECAM1 (NM_000442.2,1635-1653).
gccattcccacgccaaaat

SEQ ID NO: 312717 - DNA, 19 bp, Homo sapiens
  siRNA target sequence for PECAM1 (NM_000442.2,1637-1655).
cattcccacgccaaaatgt

SEQ ID NO: 312718 - DNA, 19 bp, Homo sapiens
  siRNA target sequence for PECAM1 (NM_000442.2,1782-1800).
gtcccatcacctataagtt

SEQ ID NO: 312719 - DNA, 19 bp, Homo sapiens
  siRNA target sequence for PECAM1 (NM_000442.2,1784-1802).
cccatcacctataagtttt

SEQ ID NO: 312720 - DNA, 19 bp, Homo sapiens
  siRNA target sequence for PECAM1 (NM_000442.2,1785-1803).
ccatcacctataagtttta

SEQ ID NO: 312721 - DNA, 19 bp, Homo sapiens
  siRNA target sequence for PECAM1 (NM_000442.2,1789-1807).
cacctataagttttacaga

SEQ ID NO: 312722 - DNA, 19 bp, Homo sapiens
  siRNA target sequence for PECAM1 (NM_000442.2,1828-1846).
ctatcaaatgacctcaaat

SEQ ID NO: 312723 - DNA, 19 bp, Homo sapiens
  siRNA target sequence for PECAM1 (NM_000442.2,1847-1865).
gccacccaggcattttgga

SEQ ID NO: 312724 - DNA, 19 bp, Homo sapiens
  siRNA target sequence for PECAM1 (NM_000442.2,1889-1907).
caggagggagagtattact

SEQ ID NO: 312725 - DNA, 19 bp, Homo sapiens
  siRNA target sequence for PECAM1 (NM_000442.2,1990-2008).
gaagaaaggacttattgca

SEQ ID NO: 312726 - DNA, 19 bp, Homo sapiens
  siRNA target sequence for PECAM1 (NM_000442.2,1998-2016).
gacttattgcagtggttat

SEQ ID NO: 312727 - DNA, 19 bp, Homo sapiens
  siRNA target sequence for PECAM1 (NM_000442.2,2049-2067).
cggccaaatgttattttct

SEQ ID NO: 312728 - DNA, 19 bp, Homo sapiens
  siRNA target sequence for PECAM1 (NM_000442.2,2134-2152).
caacaacgagaaaatgtca

SEQ ID NO: 312729 - DNA, 19 bp, Homo sapiens
  siRNA target sequence for PECAM1 (NM_000442.2,2149-2167).
gtcagatcccaatatggaa

SEQ ID NO: 312730 - DNA, 19 bp, Homo sapiens
  siRNA target sequence for PECAM1 (NM_000442.2,2175-2193).
gtcattacggtcacaatga

SEQ ID NO: 312731 - DNA, 19 bp, Homo sapiens
  siRNA target sequence for SEMA3E (NM_012431.1,496-514).
gctcctgtggggttactta

SEQ ID NO: 312732 - DNA, 19 bp, Homo sapiens
  siRNA target sequence for SEMA3E (NM_012431.1,533-551).
ggtcatacagctgatacta

SEQ ID NO: 312733 - DNA, 19 bp, Homo sapiens
  siRNA target sequence for SEMA3E (NM_012431.1,560-578).
cggttacgcctgtcacata

SEQ ID NO: 312734 - DNA, 19 bp, Homo sapiens
  siRNA target sequence for SEMA3E (NM_012431.1,561-579).
ggttacgcctgtcacataa

SEQ ID NO: 312735 - DNA, 19 bp, Homo sapiens
  siRNA target sequence for SEMA3E (NM_012431.1,562-580).
gttacgcctgtcacataaa

SEQ ID NO: 312736 - DNA, 19 bp, Homo sapiens
  siRNA target sequence for SEMA3E (NM_012431.1,593-611).
ctgaacagaacatcaatat

SEQ ID NO: 312737 - DNA, 19 bp, Homo sapiens
  siRNA target sequence for SEMA3E (NM_012431.1,619-637).
cccttttggatttcttgat

SEQ ID NO: 312738 - DNA, 19 bp, Homo sapiens
  siRNA target sequence for SEMA3E (NM_012431.1,645-663).
caatgctgctggatgaata

SEQ ID NO: 312739 - DNA, 19 bp, Homo sapiens
  siRNA target sequence for SEMA3E (NM_012431.1,705-723).
ccctcagcttggagagaat

SEQ ID NO: 312740 - DNA, 19 bp, Homo sapiens
  siRNA target sequence for SEMA3E (NM_012431.1,707-725).
ctcagcttggagagaatca

SEQ ID NO: 312741 - DNA, 19 bp, Homo sapiens
  siRNA target sequence for SEMA3E (NM_012431.1,720-738).
gaatcagtgacggctataa

SEQ ID NO: 312742 - DNA, 19 bp, Homo sapiens
  siRNA target sequence for SEMA3E (NM_012431.1,726-744).
gtgacggctataaagagat

SEQ ID NO: 312743 - DNA, 19 bp, Homo sapiens
  siRNA target sequence for SEMA3E (NM_012431.1,750-768).
ggccgagtacagctctaaa

SEQ ID NO: 312744 - DNA, 19 bp, Homo sapiens
  siRNA target sequence for SEMA3E (NM_012431.1,751-769).
gccgagtacagctctaaaa

SEQ ID NO: 312745 - DNA, 19 bp, Homo sapiens
  siRNA target sequence for SEMA3E (NM_012431.1,753-771).
cgagtacagctctaaaaat

SEQ ID NO: 312746 - DNA, 19 bp, Homo sapiens
  siRNA target sequence for SEMA3E (NM_012431.1,756-774).
gtacagctctaaaaatgga

SEQ ID NO: 312747 - DNA, 19 bp, Homo sapiens
  siRNA target sequence for SEMA3E (NM_012431.1,801-819).
cgggtgaatgtgcaaatta

SEQ ID NO: 312748 - DNA, 19 bp, Homo sapiens
  siRNA target sequence for SEMA3E (NM_012431.1,802-820).
gggtgaatgtgcaaattat

SEQ ID NO: 312749 - DNA, 19 bp, Homo sapiens
  siRNA target sequence for SEMA3E (NM_012431.1,824-842).
cgggttttgcatcactata

SEQ ID NO: 312750 - DNA, 19 bp, Homo sapiens
  siRNA target sequence for SEMA3E (NM_012431.1,825-843).
gggttttgcatcactataa

SEQ ID NO: 312751 - DNA, 19 bp, Homo sapiens
  siRNA target sequence for SEMA3E (NM_012431.1,827-845).
gttttgcatcactataaca

SEQ ID NO: 312752 - DNA, 19 bp, Homo sapiens
  siRNA target sequence for SEMA3E (NM_012431.1,894-912).
ccttcatcagagttggata

SEQ ID NO: 312753 - DNA, 19 bp, Homo sapiens
  siRNA target sequence for SEMA3E (NM_012431.1,895-913).
cttcatcagagttggatat

SEQ ID NO: 312754 - DNA, 19 bp, Homo sapiens
  siRNA target sequence for SEMA3E (NM_012431.1,898-916).
catcagagttggatatcat

SEQ ID NO: 312755 - DNA, 19 bp, Homo sapiens
  siRNA target sequence for SEMA3E (NM_012431.1,903-921).
gagttggatatcatttgga

SEQ ID NO: 312756 - DNA, 19 bp, Homo sapiens
  siRNA target sequence for SEMA3E (NM_012431.1,997-1015).
cttcatctccactttaatt

SEQ ID NO: 312757 - DNA, 19 bp, Homo sapiens
  siRNA target sequence for SEMA3E (NM_012431.1,1006-1024).
cactttaattggtagtgaa

SEQ ID NO: 312758 - DNA, 19 bp, Homo sapiens
  siRNA target sequence for SEMA3E (NM_012431.1,1117-1135).
cgatgagcgtctgttgaaa

SEQ ID NO: 312759 - DNA, 19 bp, Homo sapiens
  siRNA target sequence for SEMA3E (NM_012431.1,1180-1198).
cagagatgacaacaaagta

SEQ ID NO: 312760 - DNA, 19 bp, Homo sapiens
  siRNA target sequence for SEMA3E (NM_012431.1,1264-1282).
cgggcgactctgtgtgaat

SEQ ID NO: 312761 - DNA, 19 bp, Homo sapiens
  siRNA target sequence for SEMA3E (NM_012431.1,1295-1313).
cagagaatactggtgaata

SEQ ID NO: 312762 - DNA, 19 bp, Homo sapiens
  siRNA target sequence for SEMA3E (NM_012431.1,1388-1406).
gaattagaggacgtttttt

SEQ ID NO: 312763 - DNA, 19 bp, Homo sapiens
  siRNA target sequence for SEMA3E (NM_012431.1,1408-1426).
gctacctaccagagatcat

SEQ ID NO: 312764 - DNA, 19 bp, Homo sapiens
  siRNA target sequence for SEMA3E (NM_012431.1,1409-1427).
ctacctaccagagatcata

SEQ ID NO: 312765 - DNA, 19 bp, Homo sapiens
  siRNA target sequence for SEMA3E (NM_012431.1,1412-1430).
cctaccagagatcataaga

SEQ ID NO: 312766 - DNA, 19 bp, Homo sapiens
  siRNA target sequence for SEMA3E (NM_012431.1,1413-1431).
ctaccagagatcataagaa

SEQ ID NO: 312767 - DNA, 19 bp, Homo sapiens
  siRNA target sequence for SEMA3E (NM_012431.1,1436-1454).
gtgatatttggactcttta

SEQ ID NO: 312768 - DNA, 19 bp, Homo sapiens
  siRNA target sequence for SEMA3E (NM_012431.1,1450-1468).
ctttaacactaccagtaat

SEQ ID NO: 312769 - DNA, 19 bp, Homo sapiens
  siRNA target sequence for SEMA3E (NM_012431.1,1476-1494).
gagggcatgctatatgtgt

SEQ ID NO: 312770 - DNA, 19 bp, Homo sapiens
  siRNA target sequence for SEMA3E (NM_012431.1,1480-1498).
gcatgctatatgtgtctat

SEQ ID NO: 312771 - DNA, 19 bp, Homo sapiens
  siRNA target sequence for SEMA3E (NM_012431.1,1484-1502).
gctatatgtgtctatcaca

SEQ ID NO: 312772 - DNA, 19 bp, Homo sapiens
  siRNA target sequence for SEMA3E (NM_012431.1,1485-1503).
ctatatgtgtctatcacat

SEQ ID NO: 312773 - DNA, 19 bp, Homo sapiens
  siRNA target sequence for SEMA3E (NM_012431.1,1495-1513).
ctatcacatgtctagcatt

SEQ ID NO: 312774 - DNA, 19 bp, Homo sapiens
  siRNA target sequence for SEMA3E (NM_012431.1,1522-1540).
cttcaacggaccatatgca

SEQ ID NO: 312775 - DNA, 19 bp, Homo sapiens
  siRNA target sequence for SEMA3E (NM_012431.1,1683-1701).
gaagtcatccactaatgta

SEQ ID NO: 312776 - DNA, 19 bp, Homo sapiens
  siRNA target sequence for SEMA3E (NM_012431.1,1718-1736).
gcccataaaaaaccaatat

SEQ ID NO: 312777 - DNA, 19 bp, Homo sapiens
  siRNA target sequence for SEMA3E (NM_012431.1,1803-1821).
gccaatatgacgtcttgtt

SEQ ID NO: 312778 - DNA, 19 bp, Homo sapiens
  siRNA target sequence for SEMA3E (NM_012431.1,1804-1822).
ccaatatgacgtcttgttt

SEQ ID NO: 312779 - DNA, 19 bp, Homo sapiens
  siRNA target sequence for SEMA3E (NM_012431.1,1805-1823).
caatatgacgtcttgttta

SEQ ID NO: 312780 - DNA, 19 bp, Homo sapiens
  siRNA target sequence for SEMA3E (NM_012431.1,1819-1837).
gtttattgggacagataat

SEQ ID NO: 312781 - DNA, 19 bp, Homo sapiens
  siRNA target sequence for SEMA3E (NM_012431.1,1839-1857).
gaattgtgctgaaagtaat

SEQ ID NO: 312782 - DNA, 19 bp, Homo sapiens
  siRNA target sequence for SEMA3E (NM_012431.1,1846-1864).
gctgaaagtaatcacaatt

SEQ ID NO: 312783 - DNA, 19 bp, Homo sapiens
  siRNA target sequence for SEMA3E (NM_012431.1,1901-1919).
ctagaagaacttcagatat

SEQ ID NO: 312784 - DNA, 19 bp, Homo sapiens
  siRNA target sequence for SEMA3E (NM_012431.1,1921-1939).
caaggatccagttcctatt

SEQ ID NO: 312785 - DNA, 19 bp, Homo sapiens
  siRNA target sequence for SEMA3E (NM_012431.1,1995-2013).
ctgtggctcaagtcagatt

SEQ ID NO: 312786 - DNA, 19 bp, Homo sapiens
  siRNA target sequence for SEMA3E (NM_012431.1,1999-2017).
ggctcaagtcagattccat

SEQ ID NO: 312787 - DNA, 19 bp, Homo sapiens
  siRNA target sequence for SEMA3E (NM_012431.1,2014-2032).
ccatcactgtgacatgtat

SEQ ID NO: 312788 - DNA, 19 bp, Homo sapiens
  siRNA target sequence for SEMA3E (NM_012431.1,2134-2152).
gcgtttccggagacaagat

SEQ ID NO: 312789 - DNA, 19 bp, Homo sapiens
  siRNA target sequence for SEMA3E (NM_012431.1,2136-2154).
gtttccggagacaagatgt

SEQ ID NO: 312790 - DNA, 19 bp, Homo sapiens
  siRNA target sequence for SEMA3E (NM_012431.1,2181-2199).
gctttggacaacagtttgt

SEQ ID NO: 312791 - DNA, 19 bp, Homo sapiens
  siRNA target sequence for SEMA3E (NM_012431.1,2198-2216).
gttggggatgctttggata

SEQ ID NO: 312792 - DNA, 19 bp, Homo sapiens
  siRNA target sequence for SEMA3E (NM_012431.1,2271-2289).
gtaccccacgatctttaca

SEQ ID NO: 312793 - DNA, 19 bp, Homo sapiens
  siRNA target sequence for SEMA3E (NM_012431.1,2283-2301).
ctttacaagcgaaagttat

SEQ ID NO: 312794 - DNA, 19 bp, Homo sapiens
  siRNA target sequence for SEMA3E (NM_012431.1,2351-2369).
gatgacagagtggttaaga

SEQ ID NO: 312795 - DNA, 19 bp, Homo sapiens
  siRNA target sequence for SEMA3E (NM_012431.1,2379-2397).
gtttactcttcctaaggtt

SEQ ID NO: 312796 - DNA, 19 bp, Homo sapiens
  siRNA target sequence for SEMA3E (NM_012431.1,2386-2404).
cttcctaaggttacacaaa

SEQ ID NO: 312797 - DNA, 19 bp, Homo sapiens
  siRNA target sequence for SEMA3E (NM_012431.1,2389-2407).
cctaaggttacacaaatca

SEQ ID NO: 312798 - DNA, 19 bp, Homo sapiens
  siRNA target sequence for SEMA3E (NM_012431.1,2406-2424).
cagatgctgggacctattt

SEQ ID NO: 312799 - DNA, 19 bp, Homo sapiens
  siRNA target sequence for SEMA3E (NM_012431.1,2450-2468).
gtccatacggtccgtaaaa

SEQ ID NO: 312800 - DNA, 19 bp, Homo sapiens
  siRNA target sequence for SEMA3E (NM_012431.1,2453-2471).
catacggtccgtaaaatca

SEQ ID NO: 312801 - DNA, 19 bp, Homo sapiens
  siRNA target sequence for SEMA3E (NM_012431.1,2498-2516).
gtcgaggatatgtttaaca

SEQ ID NO: 312802 - DNA, 19 bp, Homo sapiens
  siRNA target sequence for SEMA3E (NM_012431.1,2569-2587).
catctcgcagggagcaaaa

SEQ ID NO: 312803 - DNA, 19 bp, Homo sapiens
  siRNA target sequence for SEMA3E (NM_012431.1,2609-2627).
cagctgatcggttatagca

SEQ ID NO: 312804 - DNA, 19 bp, Homo sapiens
  siRNA target sequence for TM4SF6 (NM_003270.2,117-135).
ctcggagactgcagactaa

SEQ ID NO: 312805 - DNA, 19 bp, Homo sapiens
  siRNA target sequence for TM4SF6 (NM_003270.2,121-139).
gagactgcagactaaacca

SEQ ID NO: 312806 - DNA, 19 bp, Homo sapiens
  siRNA target sequence for TM4SF6 (NM_003270.2,127-145).
gcagactaaaccagtcatt

SEQ ID NO: 312807 - DNA, 19 bp, Homo sapiens
  siRNA target sequence for TM4SF6 (NM_003270.2,128-146).
cagactaaaccagtcatta

SEQ ID NO: 312808 - DNA, 19 bp, Homo sapiens
  siRNA target sequence for TM4SF6 (NM_003270.2,130-148).
gactaaaccagtcattact

SEQ ID NO: 312809 - DNA, 19 bp, Homo sapiens
  siRNA target sequence for TM4SF6 (NM_003270.2,161-179).
gttctgctaatctacactt

SEQ ID NO: 312810 - DNA, 19 bp, Homo sapiens
  siRNA target sequence for TM4SF6 (NM_003270.2,190-208).
gatcactggcgttatcctt

SEQ ID NO: 312811 - DNA, 19 bp, Homo sapiens
  siRNA target sequence for TM4SF6 (NM_003270.2,284-302).
cccttcgtgctcattgcta

SEQ ID NO: 312812 - DNA, 19 bp, Homo sapiens
  siRNA target sequence for TM4SF6 (NM_003270.2,299-317).
gctactggtaccgtcatta

SEQ ID NO: 312813 - DNA, 19 bp, Homo sapiens
  siRNA target sequence for TM4SF6 (NM_003270.2,300-318).
ctactggtaccgtcattat

SEQ ID NO: 312814 - DNA, 19 bp, Homo sapiens
  siRNA target sequence for TM4SF6 (NM_003270.2,320-338).
cttttgggcacctttggtt

SEQ ID NO: 312815 - DNA, 19 bp, Homo sapiens
  siRNA target sequence for TM4SF6 (NM_003270.2,328-346).
cacctttggttgttttgct

SEQ ID NO: 312816 - DNA, 19 bp, Homo sapiens
  siRNA target sequence for TM4SF6 (NM_003270.2,423-441).
ctgccatcgtaggatttgt

SEQ ID NO: 312817 - DNA, 19 bp, Homo sapiens
  siRNA target sequence for TM4SF6 (NM_003270.2,425-443).
gccatcgtaggatttgttt

SEQ ID NO: 312818 - DNA, 19 bp, Homo sapiens
  siRNA target sequence for TM4SF6 (NM_003270.2,440-458).
gttttcagacatgagatta

SEQ ID NO: 312819 - DNA, 19 bp, Homo sapiens
  siRNA target sequence for TM4SF6 (NM_003270.2,488-506).
gctttgaagcagtataact

SEQ ID NO: 312820 - DNA, 19 bp, Homo sapiens
  siRNA target sequence for TM4SF6 (NM_003270.2,525-543).
gccatgcagtagacaagat

SEQ ID NO: 312821 - DNA, 19 bp, Homo sapiens
  siRNA target sequence for TM4SF6 (NM_003270.2,533-551).
gtagacaagatccaaaata

SEQ ID NO: 312822 - DNA, 19 bp, Homo sapiens
  siRNA target sequence for TM4SF6 (NM_003270.2,536-554).
gacaagatccaaaatacgt

SEQ ID NO: 312823 - DNA, 19 bp, Homo sapiens
  siRNA target sequence for TM4SF6 (NM_003270.2,567-585).
gtgtcaccgattatagaga

SEQ ID NO: 312824 - DNA, 19 bp, Homo sapiens
  siRNA target sequence for TM4SF6 (NM_003270.2,569-587).
gtcaccgattatagagatt

SEQ ID NO: 312825 - DNA, 19 bp, Homo sapiens
  siRNA target sequence for TM4SF6 (NM_003270.2,588-606).
ggacagatactaattatta

SEQ ID NO: 312826 - DNA, 19 bp, Homo sapiens
  siRNA target sequence for TM4SF6 (NM_003270.2,624-642).
ctaagagttgctgtaaact

SEQ ID NO: 312827 - DNA, 19 bp, Homo sapiens
  siRNA target sequence for TM4SF6 (NM_003270.2,628-646).
gagttgctgtaaacttgaa

SEQ ID NO: 312828 - DNA, 19 bp, Homo sapiens
  siRNA target sequence for TM4SF6 (NM_003270.2,682-700).
caatgaaggttgttttata

SEQ ID NO: 312829 - DNA, 19 bp, Homo sapiens
  siRNA target sequence for TM4SF6 (NM_003270.2,704-722).
gtgatgaccattatagagt

SEQ ID NO: 312830 - DNA, 19 bp, Homo sapiens
  siRNA target sequence for TM4SF6 (NM_003270.2,730-748).
gggagtcgttgcaggaatt

SEQ ID NO: 312831 - DNA, 19 bp, Homo sapiens
  siRNA target sequence for TM4SF6 (NM_003270.2,731-749).
ggagtcgttgcaggaattt

SEQ ID NO: 312832 - DNA, 19 bp, Homo sapiens
  siRNA target sequence for TM4SF6 (NM_003270.2,765-783).
gcttccaactgattggaat

SEQ ID NO: 312833 - DNA, 19 bp, Homo sapiens
  siRNA target sequence for TM4SF6 (NM_003270.2,769-787).
ccaactgattggaatcttt

SEQ ID NO: 312834 - DNA, 19 bp, Homo sapiens
  siRNA target sequence for TM4SF6 (NM_003270.2,802-820).
ctctcgtgccataacaaat

SEQ ID NO: 312835 - DNA, 19 bp, Homo sapiens
  siRNA target sequence for TM4SF6 (NM_003270.2,804-822).
ctcgtgccataacaaataa

SEQ ID NO: 312836 - DNA, 19 bp, Homo sapiens
  siRNA target sequence for TPBG (NM_006670.3,703-721).
gtgcgcaacctcttcctta

SEQ ID NO: 312837 - DNA, 19 bp, Homo sapiens
  siRNA target sequence for TPBG (NM_006670.3,944-962).
gtccccttgtggaactgat

SEQ ID NO: 312838 - DNA, 19 bp, Homo sapiens
  siRNA target sequence for TPBG (NM_006670.3,1078-1096).
gccagcaaccacttccttt

SEQ ID NO: 312839 - DNA, 19 bp, Homo sapiens
  siRNA target sequence for TPBG (NM_006670.3,1079-1097).
ccagcaaccacttccttta

SEQ ID NO: 312840 - DNA, 19 bp, Homo sapiens
  siRNA target sequence for TPBG (NM_006670.3,1134-1152).
caggcacctggacttaagt

SEQ ID NO: 312841 - DNA, 19 bp, Homo sapiens
  siRNA target sequence for TPBG (NM_006670.3,1136-1154).
ggcacctggacttaagtaa

SEQ ID NO: 312842 - DNA, 19 bp, Homo sapiens
  siRNA target sequence for TPBG (NM_006670.3,1137-1155).
gcacctggacttaagtaat

SEQ ID NO: 312843 - DNA, 19 bp, Homo sapiens
  siRNA target sequence for TPBG (NM_006670.3,1138-1156).
cacctggacttaagtaata

SEQ ID NO: 312844 - DNA, 19 bp, Homo sapiens
  siRNA target sequence for TPBG (NM_006670.3,1141-1159).
ctggacttaagtaataatt

SEQ ID NO: 312845 - DNA, 19 bp, Homo sapiens
  siRNA target sequence for TPBG (NM_006670.3,1190-1208).
gcaacctgacacatctaga

SEQ ID NO: 312846 - DNA, 19 bp, Homo sapiens
  siRNA target sequence for TPBG (NM_006670.3,1191-1209).
caacctgacacatctagaa

SEQ ID NO: 312847 - DNA, 19 bp, Homo sapiens
  siRNA target sequence for TPBG (NM_006670.3,1383-1401).
ccggctcacctgtgcatat

SEQ ID NO: 312848 - DNA, 19 bp, Homo sapiens
  siRNA target sequence for TPBG (NM_006670.3,1394-1412).
gtgcatatccggaaaaaat

SEQ ID NO: 312849 - DNA, 19 bp, Homo sapiens
  siRNA target sequence for TPBG (NM_006670.3,1497-1515).
cttcctgggtattgtttta

SEQ ID NO: 312850 - DNA, 19 bp, Homo sapiens
  siRNA target sequence for TPBG (NM_006670.3,1516-1534).
gccctgataggcgctattt

SEQ ID NO: 312851 - DNA, 19 bp, Homo sapiens
  siRNA target sequence for TPBG (NM_006670.3,1614-1632).
ggaagggtatcattacaga

SEQ ID NO: 312852 - DNA, 19 bp, Homo sapiens
  siRNA target sequence for TPBG (NM_006670.3,1615-1633).
gaagggtatcattacagat

SEQ ID NO: 312853 - DNA, 19 bp, Homo sapiens
  siRNA target sequence for TPBG (NM_006670.3,1641-1659).
caatgcggaccccagatta

SEQ ID NO: 312854 - DNA, 19 bp, Homo sapiens
  siRNA target sequence for TPBG (NM_006670.3,1645-1663).
gcggaccccagattaacga

SEQ ID NO: 312855 - DNA, 19 bp, Homo sapiens
  siRNA target sequence for TPBG (NM_006670.3,1646-1664).
cggaccccagattaacgaa

SEQ ID NO: 312856 - DNA, 19 bp, Homo sapiens
  siRNA target sequence for GAGEB1 (NM_003785.2,115-133).
gggttttctaagaagatta

SEQ ID NO: 312857 - DNA, 19 bp, Homo sapiens
  siRNA target sequence for GAGEB1 (NM_003785.2,140-158).
cggcgtagaccaatgatct

SEQ ID NO: 312858 - DNA, 19 bp, Homo sapiens
  siRNA target sequence for GAGEB1 (NM_003785.2,141-159).
ggcgtagaccaatgatcta

SEQ ID NO: 312859 - DNA, 19 bp, Homo sapiens
  siRNA target sequence for GAGEB1 (NM_003785.2,142-160).
gcgtagaccaatgatctat

SEQ ID NO: 312860 - DNA, 19 bp, Homo sapiens
  siRNA target sequence for GAGEB1 (NM_003785.2,149-167).
ccaatgatctatgtagaat

SEQ ID NO: 312861 - DNA, 19 bp, Homo sapiens
  siRNA target sequence for GAGEB1 (NM_003785.2,487-505).
gttgggcctgccaaatcca

SEQ ID NO: 312862 - DNA, 19 bp, Homo sapiens
  siRNA target sequence for LY6H (NM_002347.1,342-360).
gatcactcggtgaacaaga

SEQ ID NO: 312863 - DNA, 19 bp, Homo sapiens
  siRNA target sequence for LY6H (NM_002347.1,411-429).
ctgatggggtttattaact

SEQ ID NO: 312864 - DNA, 19 bp, Homo sapiens
  siRNA target sequence for PTX3 (NM_002852.2,125-143).
ccttgcgattctgttttgt

SEQ ID NO: 312865 - DNA, 19 bp, Homo sapiens
  siRNA target sequence for PTX3 (NM_002852.2,165-183).
gccgagaactcggatgatt

SEQ ID NO: 312866 - DNA, 19 bp, Homo sapiens
  siRNA target sequence for PTX3 (NM_002852.2,166-184).
ccgagaactcggatgatta

SEQ ID NO: 312867 - DNA, 19 bp, Homo sapiens
  siRNA target sequence for PTX3 (NM_002852.2,167-185).
cgagaactcggatgattat

SEQ ID NO: 312868 - DNA, 19 bp, Homo sapiens
  siRNA target sequence for PTX3 (NM_002852.2,170-188).
gaactcggatgattatgat

SEQ ID NO: 312869 - DNA, 19 bp, Homo sapiens
  siRNA target sequence for PTX3 (NM_002852.2,198-216).
gtgaatttggacaacgaaa

SEQ ID NO: 312870 - DNA, 19 bp, Homo sapiens
  siRNA target sequence for PTX3 (NM_002852.2,206-224).
ggacaacgaaatagacaat

SEQ ID NO: 312871 - DNA, 19 bp, Homo sapiens
  siRNA target sequence for PTX3 (NM_002852.2,639-657).
ctgccggcaggttgtgaaa

SEQ ID NO: 312872 - DNA, 19 bp, Homo sapiens
  siRNA target sequence for PTX3 (NM_002852.2,648-666).
ggttgtgaaacagctattt

SEQ ID NO: 312873 - DNA, 19 bp, Homo sapiens
  siRNA target sequence for PTX3 (NM_002852.2,672-690).
ccaatgcgttccaagaaga

SEQ ID NO: 312874 - DNA, 19 bp, Homo sapiens
  siRNA target sequence for PTX3 (NM_002852.2,673-691).
caatgcgttccaagaagat

SEQ ID NO: 312875 - DNA, 19 bp, Homo sapiens
  siRNA target sequence for PTX3 (NM_002852.2,677-695).
gcgttccaagaagattttt

SEQ ID NO: 312876 - DNA, 19 bp, Homo sapiens
  siRNA target sequence for PTX3 (NM_002852.2,718-736).
caatgaggcttgagtcttt

SEQ ID NO: 312877 - DNA, 19 bp, Homo sapiens
  siRNA target sequence for PTX3 (NM_002852.2,722-740).
gaggcttgagtcttttagt

SEQ ID NO: 312878 - DNA, 19 bp, Homo sapiens
  siRNA target sequence for PTX3 (NM_002852.2,759-777).
gccacagatgtattaaaca

SEQ ID NO: 312879 - DNA, 19 bp, Homo sapiens
  siRNA target sequence for PTX3 (NM_002852.2,760-778).
ccacagatgtattaaacaa

SEQ ID NO: 312880 - DNA, 19 bp, Homo sapiens
  siRNA target sequence for PTX3 (NM_002852.2,799-817).
gcacaaagaggaatccata

SEQ ID NO: 312881 - DNA, 19 bp, Homo sapiens
  siRNA target sequence for PTX3 (NM_002852.2,819-837).
gaaatccagctgtatctca

SEQ ID NO: 312882 - DNA, 19 bp, Homo sapiens
  siRNA target sequence for PTX3 (NM_002852.2,838-856).
gctaccaatccatagtgtt

SEQ ID NO: 312883 - DNA, 19 bp, Homo sapiens
  siRNA target sequence for PTX3 (NM_002852.2,839-857).
ctaccaatccatagtgttt

SEQ ID NO: 312884 - DNA, 19 bp, Homo sapiens
  siRNA target sequence for PTX3 (NM_002852.2,924-942).
ctgtgcggcacctggaatt

SEQ ID NO: 312885 - DNA, 19 bp, Homo sapiens
  siRNA target sequence for PTX3 (NM_002852.2,928-946).
gcggcacctggaattcaga

SEQ ID NO: 312886 - DNA, 19 bp, Homo sapiens
  siRNA target sequence for PTX3 (NM_002852.2,956-974).
cacatccttgtgggtaaat

SEQ ID NO: 312887 - DNA, 19 bp, Homo sapiens
  siRNA target sequence for PTX3 (NM_002852.2,1113-1131).
ctcacaggcttcaatatct

SEQ ID NO: 312888 - DNA, 19 bp, Homo sapiens
  siRNA target sequence for PTX3 (NM_002852.2,1138-1156).
gtgttcttagcaatgaaga

SEQ ID NO: 312889 - DNA, 19 bp, Homo sapiens
  siRNA target sequence for PTX3 (NM_002852.2,1143-1161).
cttagcaatgaagagataa

SEQ ID NO: 312890 - DNA, 19 bp, Homo sapiens
  siRNA target sequence for CD1B (NM_001764.1,117-135).
gccgacctcctttcatgtt

SEQ ID NO: 312891 - DNA, 19 bp, Homo sapiens
  siRNA target sequence for CD1B (NM_001764.1,118-136).
ccgacctcctttcatgtta

SEQ ID NO: 312892 - DNA, 19 bp, Homo sapiens
  siRNA target sequence for CD1B (NM_001764.1,119-137).
cgacctcctttcatgttat

SEQ ID NO: 312893 - DNA, 19 bp, Homo sapiens
  siRNA target sequence for CD1B (NM_001764.1,122-140).
cctcctttcatgttatcca

SEQ ID NO: 312894 - DNA, 19 bp, Homo sapiens
  siRNA target sequence for CD1B (NM_001764.1,139-157).
cagacctcgtcctttacca

SEQ ID NO: 312895 - DNA, 19 bp, Homo sapiens
  siRNA target sequence for CD1B (NM_001764.1,141-159).
gacctcgtcctttaccaat

SEQ ID NO: 312896 - DNA, 19 bp, Homo sapiens
  siRNA target sequence for CD1B (NM_001764.1,144-162).
ctcgtcctttaccaatagt

SEQ ID NO: 312897 - DNA, 19 bp, Homo sapiens
  siRNA target sequence for CD1B (NM_001764.1,185-203).
caggctggttggatgattt

SEQ ID NO: 312898 - DNA, 19 bp, Homo sapiens
  siRNA target sequence for CD1B (NM_001764.1,230-248).
caggcactgccatattcct

SEQ ID NO: 312899 - DNA, 19 bp, Homo sapiens
  siRNA target sequence for CD1B (NM_001764.1,246-264).
cctgaagccttggtctaaa

SEQ ID NO: 312900 - DNA, 19 bp, Homo sapiens
  siRNA target sequence for CD1B (NM_001764.1,254-272).
cttggtctaaaggtaactt

SEQ ID NO: 312901 - DNA, 19 bp, Homo sapiens
  siRNA target sequence for CD1B (NM_001764.1,260-278).
ctaaaggtaactttagtga

SEQ ID NO: 312902 - DNA, 19 bp, Homo sapiens
  siRNA target sequence for CD1B (NM_001764.1,310-328).
cgagtctacatctttggat

SEQ ID NO: 312903 - DNA, 19 bp, Homo sapiens
  siRNA target sequence for CD1B (NM_001764.1,326-344).
gattcgctcgagaagtaca

SEQ ID NO: 312904 - DNA, 19 bp, Homo sapiens
  siRNA target sequence for CD1B (NM_001764.1,419-437).
gaggtgccatagtaagctt

SEQ ID NO: 312905 - DNA, 19 bp, Homo sapiens
  siRNA target sequence for CD1B (NM_001764.1,511-529).
ggcagcagggcacagaaat

SEQ ID NO: 312906 - DNA, 19 bp, Homo sapiens
  siRNA target sequence for CD1B (NM_001764.1,531-549).
ctgtgcactaatcatacaa

SEQ ID NO: 312907 - DNA, 19 bp, Homo sapiens
  siRNA target sequence for CD1B (NM_001764.1,533-551).
gtgcactaatcatacaata

SEQ ID NO: 312908 - DNA, 19 bp, Homo sapiens
  siRNA target sequence for CD1B (NM_001764.1,536-554).
cactaatcatacaatatca

SEQ ID NO: 312909 - DNA, 19 bp, Homo sapiens
  siRNA target sequence for CD1B (NM_001764.1,573-591).
gagaattctcctctatgaa

SEQ ID NO: 312910 - DNA, 19 bp, Homo sapiens
  siRNA target sequence for CD1B (NM_001764.1,615-633).
cgtcctcaatgcaggaaaa

SEQ ID NO: 312911 - DNA, 19 bp, Homo sapiens
  siRNA target sequence for CD1B (NM_001764.1,939-957).
cacctccattggctcaatt

SEQ ID NO: 312912 - DNA, 19 bp, Homo sapiens
  siRNA target sequence for CD1B (NM_001764.1,944-962).
ccattggctcaattgtttt

SEQ ID NO: 312913 - DNA, 19 bp, Homo sapiens
  siRNA target sequence for CD1B (NM_001764.1,953-971).
caattgttttggcaataat

SEQ ID NO: 312914 - DNA, 19 bp, Homo sapiens
  siRNA target sequence for CD1B (NM_001764.1,998-1016).
gccttgcattatggtatat

SEQ ID NO: 312915 - DNA, 19 bp, Homo sapiens
  siRNA target sequence for CD1C (NM_001765.1,228-246).
cagtgaatcaggcacaata

SEQ ID NO: 312916 - DNA, 19 bp, Homo sapiens
  siRNA target sequence for CD1C (NM_001765.1,230-248).
gtgaatcaggcacaataat

SEQ ID NO: 312917 - DNA, 19 bp, Homo sapiens
  siRNA target sequence for CD1C (NM_001765.1,232-250).
gaatcaggcacaataattt

SEQ ID NO: 312918 - DNA, 19 bp, Homo sapiens
  siRNA target sequence for CD1C (NM_001765.1,294-312).
gtcagacctagagttgtta

SEQ ID NO: 312919 - DNA, 19 bp, Homo sapiens
  siRNA target sequence for CD1C (NM_001765.1,296-314).
cagacctagagttgttatt

SEQ ID NO: 312920 - DNA, 19 bp, Homo sapiens
  siRNA target sequence for CD1C (NM_001765.1,300-318).
cctagagttgttatttcgt

SEQ ID NO: 312921 - DNA, 19 bp, Homo sapiens
  siRNA target sequence for CD1C (NM_001765.1,301-319).
ctagagttgttatttcgtt

SEQ ID NO: 312922 - DNA, 19 bp, Homo sapiens
  siRNA target sequence for CD1C (NM_001765.1,332-350).
gattaactcgggagattca

SEQ ID NO: 312923 - DNA, 19 bp, Homo sapiens
  siRNA target sequence for CD1C (NM_001765.1,352-370).
gaccatgcaagtcaagatt

SEQ ID NO: 312924 - DNA, 19 bp, Homo sapiens
  siRNA target sequence for CD1C (NM_001765.1,362-380).
gtcaagattactcgaaata

SEQ ID NO: 312925 - DNA, 19 bp, Homo sapiens
  siRNA target sequence for CD1C (NM_001765.1,372-390).
ctcgaaatatccctttgaa

SEQ ID NO: 312926 - DNA, 19 bp, Homo sapiens
  siRNA target sequence for CD1C (NM_001765.1,454-472).
gctttcaacggattagatt

SEQ ID NO: 312927 - DNA, 19 bp, Homo sapiens
  siRNA target sequence for CD1C (NM_001765.1,455-473).
ctttcaacggattagattt

SEQ ID NO: 312928 - DNA, 19 bp, Homo sapiens
  siRNA target sequence for CD1C (NM_001765.1,477-495).
gagtttccagaatacaaca

SEQ ID NO: 312929 - DNA, 19 bp, Homo sapiens
  siRNA target sequence for CD1C (NM_001765.1,533-551).
gtgtctgtcatctactcaa

SEQ ID NO: 312930 - DNA, 19 bp, Homo sapiens
  siRNA target sequence for CD1C (NM_001765.1,567-585).
cgtcacagaaacagtgtat

SEQ ID NO: 312931 - DNA, 19 bp, Homo sapiens
  siRNA target sequence for CD1C (NM_001765.1,568-586).
gtcacagaaacagtgtata

SEQ ID NO: 312932 - DNA, 19 bp, Homo sapiens
  siRNA target sequence for CD1C (NM_001765.1,574-592).
gaaacagtgtataatctca

SEQ ID NO: 312933 - DNA, 19 bp, Homo sapiens
  siRNA target sequence for CD1C (NM_001765.1,635-653).
cagggaagatgtatgtaca

SEQ ID NO: 312934 - DNA, 19 bp, Homo sapiens
  siRNA target sequence for CD1C (NM_001765.1,764-782).
catggatgcggaatgaaca

SEQ ID NO: 312935 - DNA, 19 bp, Homo sapiens
  siRNA target sequence for CD1C (NM_001765.1,783-801).
ggagcaactgggcactaaa

SEQ ID NO: 312936 - DNA, 19 bp, Homo sapiens
  siRNA target sequence for CD1C (NM_001765.1,786-804).
gcaactgggcactaaacat

SEQ ID NO: 312937 - DNA, 19 bp, Homo sapiens
  siRNA target sequence for CD1C (NM_001765.1,962-980).
ggattgccttggtagtgat

SEQ ID NO: 312938 - DNA, 19 bp, Homo sapiens
  siRNA target sequence for CD1C (NM_001765.1,963-981).
gattgccttggtagtgata

SEQ ID NO: 312939 - DNA, 19 bp, Homo sapiens
  siRNA target sequence for CD1C (NM_001765.1,984-1002).
gcccttggtgattctaata

SEQ ID NO: 312940 - DNA, 19 bp, Homo sapiens
  siRNA target sequence for CD1C (NM_001765.1,986-1004).
ccttggtgattctaatagt

SEQ ID NO: 312941 - DNA, 19 bp, Homo sapiens
  siRNA target sequence for CD1C (NM_001765.1,997-1015).
ctaatagtccttgtgttat

SEQ ID NO: 312942 - DNA, 19 bp, Homo sapiens
  siRNA target sequence for CD1C (NM_001765.1,1006-1024).
cttgtgttatggtttaaga

SEQ ID NO: 312943 - DNA, 19 bp, Homo sapiens
  siRNA target sequence for CD226 (NM_006566.1,211-229).
ggattatcctactttactt

SEQ ID NO: 312944 - DNA, 19 bp, Homo sapiens
  siRNA target sequence for CD226 (NM_006566.1,212-230).
gattatcctactttacttt

SEQ ID NO: 312945 - DNA, 19 bp, Homo sapiens
  siRNA target sequence for CD226 (NM_006566.1,266-284).
gaggtgctttggcatacat

SEQ ID NO: 312946 - DNA, 19 bp, Homo sapiens
  siRNA target sequence for CD226 (NM_006566.1,290-308).
ccctttgccgagaacatgt

SEQ ID NO: 312947 - DNA, 19 bp, Homo sapiens
  siRNA target sequence for CD226 (NM_006566.1,301-319).
gaacatgtctctagaatgt

SEQ ID NO: 312948 - DNA, 19 bp, Homo sapiens
  siRNA target sequence for CD226 (NM_006566.1,347-365).
caggtggagtggttcaaga

SEQ ID NO: 312949 - DNA, 19 bp, Homo sapiens
  siRNA target sequence for CD226 (NM_006566.1,370-388).
gacccagcaggattccata

SEQ ID NO: 312950 - DNA, 19 bp, Homo sapiens
  siRNA target sequence for CD226 (NM_006566.1,380-398).
gattccatagccattttca

SEQ ID NO: 312951 - DNA, 19 bp, Homo sapiens
  siRNA target sequence for CD226 (NM_006566.1,442-460).
ggtttactttttgaattca

SEQ ID NO: 312952 - DNA, 19 bp, Homo sapiens
  siRNA target sequence for CD226 (NM_006566.1,459-477).
caacgatggcttccaataa

SEQ ID NO: 312953 - DNA, 19 bp, Homo sapiens
  siRNA target sequence for CD226 (NM_006566.1,462-480).
cgatggcttccaataacat

SEQ ID NO: 312954 - DNA, 19 bp, Homo sapiens
  siRNA target sequence for CD226 (NM_006566.1,509-527).
gatgatgttggctactatt

SEQ ID NO: 312955 - DNA, 19 bp, Homo sapiens
  siRNA target sequence for CD226 (NM_006566.1,577-595).
ggtggttcagtcagatagt

SEQ ID NO: 312956 - DNA, 19 bp, Homo sapiens
  siRNA target sequence for CD226 (NM_006566.1,578-596).
gtggttcagtcagatagtt

SEQ ID NO: 312957 - DNA, 19 bp, Homo sapiens
  siRNA target sequence for CD226 (NM_006566.1,580-598).
ggttcagtcagatagtttt

SEQ ID NO: 312958 - DNA, 19 bp, Homo sapiens
  siRNA target sequence for CD226 (NM_006566.1,612-630).
catcaaatagccacattgt

SEQ ID NO: 312959 - DNA, 19 bp, Homo sapiens
  siRNA target sequence for CD226 (NM_006566.1,719-737).
cgtcagatcgacctcttaa

SEQ ID NO: 312960 - DNA, 19 bp, Homo sapiens
  siRNA target sequence for CD226 (NM_006566.1,722-740).
cagatcgacctcttaactt

SEQ ID NO: 312961 - DNA, 19 bp, Homo sapiens
  siRNA target sequence for CD226 (NM_006566.1,752-770).
gtccatggcagaaatttca

SEQ ID NO: 312962 - DNA, 19 bp, Homo sapiens
  siRNA target sequence for CD226 (NM_006566.1,885-903).
ccagcgcaggagaaaacga

SEQ ID NO: 312963 - DNA, 19 bp, Homo sapiens
  siRNA target sequence for CD226 (NM_006566.1,886-904).
cagcgcaggagaaaacgaa

SEQ ID NO: 312964 - DNA, 19 bp, Homo sapiens
  siRNA target sequence for CD226 (NM_006566.1,902-920).
gaaaccttcgtgatgagat

SEQ ID NO: 312965 - DNA, 19 bp, Homo sapiens
  siRNA target sequence for CD226 (NM_006566.1,907-925).
cttcgtgatgagattgact

SEQ ID NO: 312966 - DNA, 19 bp, Homo sapiens
  siRNA target sequence for CD226 (NM_006566.1,935-953).
ggtaaaaccgataaccaat

SEQ ID NO: 312967 - DNA, 19 bp, Homo sapiens
  siRNA target sequence for CD226 (NM_006566.1,968-986).
gctggagggacagttttat

SEQ ID NO: 312968 - DNA, 19 bp, Homo sapiens
  siRNA target sequence for CD226 (NM_006566.1,1005-1023).
caattaccaccatcattgt

SEQ ID NO: 312969 - DNA, 19 bp, Homo sapiens
  siRNA target sequence for CD226 (NM_006566.1,1093-1111).
ggcacccaataactataga

SEQ ID NO: 312970 - DNA, 19 bp, Homo sapiens
  siRNA target sequence for CD226 (NM_006566.1,1094-1112).
gcacccaataactatagaa

SEQ ID NO: 312971 - DNA, 19 bp, Homo sapiens
  siRNA target sequence for CD226 (NM_006566.1,1192-1210).
ctctcgcagaccaaagact

SEQ ID NO: 312972 - DNA, 19 bp, Homo sapiens
  siRNA target sequence for CD226 (NM_006566.1,1198-1216).
cagaccaaagactagagtt

SEQ ID NO: 312973 - DNA, 19 bp, Homo sapiens
  siRNA target sequence for CD2BP2 (NM_006110.1,238-256).
cgctttaaaggcaaacact

SEQ ID NO: 312974 - DNA, 19 bp, Homo sapiens
  siRNA target sequence for CD2BP2 (NM_006110.1,293-311).
gggggtccagcaaatatga

SEQ ID NO: 312975 - DNA, 19 bp, Homo sapiens
  siRNA target sequence for CD2BP2 (NM_006110.1,318-336).
ggcctcagaggatgtagaa

SEQ ID NO: 312976 - DNA, 19 bp, Homo sapiens
  siRNA target sequence for CD2BP2 (NM_006110.1,377-395).
ggatcacaccctttaacct

SEQ ID NO: 312977 - DNA, 19 bp, Homo sapiens
  siRNA target sequence for CD2BP2 (NM_006110.1,561-579).
gggccagacctcaatgagt

SEQ ID NO: 312978 - DNA, 19 bp, Homo sapiens
  siRNA target sequence for CD2BP2 (NM_006110.1,961-979).
gtgatgtgggaatataagt

SEQ ID NO: 312979 - DNA, 19 bp, Homo sapiens
  siRNA target sequence for CD2BP2 (NM_006110.1,1091-1109).
cccctggtggtcagttcta

SEQ ID NO: 312980 - DNA, 19 bp, Homo sapiens
  siRNA target sequence for CD2BP2 (NM_006110.1,1096-1114).
ggtggtcagttctacaact

SEQ ID NO: 312981 - DNA, 19 bp, Homo sapiens
  siRNA target sequence for CD2BP2 (NM_006110.1,1115-1133).
ccaaacgcattgactttga

SEQ ID NO: 312982 - DNA, 19 bp, Homo sapiens
  siRNA target sequence for CD53 (NM_000560.2,118-136).
gggcatgagtagcttgaaa

SEQ ID NO: 312983 - DNA, 19 bp, Homo sapiens
  siRNA target sequence for CD53 (NM_000560.2,237-255).
gagtgctcttccataacct

SEQ ID NO: 312984 - DNA, 19 bp, Homo sapiens
  siRNA target sequence for CD53 (NM_000560.2,263-281).
ctcacgctgggcaatgtgt

SEQ ID NO: 312985 - DNA, 19 bp, Homo sapiens
  siRNA target sequence for CD53 (NM_000560.2,267-285).
cgctgggcaatgtgtttgt

SEQ ID NO: 312986 - DNA, 19 bp, Homo sapiens
  siRNA target sequence for CD53 (NM_000560.2,284-302).
gtcatcgtgggctctatta

SEQ ID NO: 312987 - DNA, 19 bp, Homo sapiens
  siRNA target sequence for CD53 (NM_000560.2,323-341).
ggctgcatgggctctatca

SEQ ID NO: 312988 - DNA, 19 bp, Homo sapiens
  siRNA target sequence for CD53 (NM_000560.2,324-342).
gctgcatgggctctatcaa

SEQ ID NO: 312989 - DNA, 19 bp, Homo sapiens
  siRNA target sequence for CD53 (NM_000560.2,356-374).
ctgcttatgtcgttcttca

SEQ ID NO: 312990 - DNA, 19 bp, Homo sapiens
  siRNA target sequence for CD53 (NM_000560.2,413-431).
gccatcctgctctttgtat

SEQ ID NO: 312991 - DNA, 19 bp, Homo sapiens
  siRNA target sequence for CD53 (NM_000560.2,484-502).
ccgttaccactcagacaat

SEQ ID NO: 312992 - DNA, 19 bp, Homo sapiens
  siRNA target sequence for CD53 (NM_000560.2,485-503).
cgttaccactcagacaata

SEQ ID NO: 312993 - DNA, 19 bp, Homo sapiens
  siRNA target sequence for CD53 (NM_000560.2,597-615).
gcccctcagatcgaaaagt

SEQ ID NO: 312994 - DNA, 19 bp, Homo sapiens
  siRNA target sequence for CD53 (NM_000560.2,620-638).
ggttgctatgcgaaagcaa

SEQ ID NO: 312995 - DNA, 19 bp, Homo sapiens
  siRNA target sequence for C1QA (NM_015991.1,292-310).
cgtggcatcccgggaatta

SEQ ID NO: 312996 - DNA, 19 bp, Homo sapiens
  siRNA target sequence for C1QA (NM_015991.1,293-311).
gtggcatcccgggaattaa

SEQ ID NO: 312997 - DNA, 19 bp, Homo sapiens
  siRNA target sequence for C1QA (NM_015991.1,323-341).
gcagcccaggaaacatcaa

SEQ ID NO: 312998 - DNA, 19 bp, Homo sapiens
  siRNA target sequence for C1QA (NM_015991.1,473-491).
ctgtacccggctactacta

SEQ ID NO: 312999 - DNA, 19 bp, Homo sapiens
  siRNA target sequence for C1QA (NM_015991.1,475-493).
gtacccggctactactact

SEQ ID NO: 313000 - DNA, 19 bp, Homo sapiens
  siRNA target sequence for C1QA (NM_015991.1,478-496).
cccggctactactacttca

SEQ ID NO: 313001 - DNA, 19 bp, Homo sapiens
  siRNA target sequence for C1QA (NM_015991.1,508-526).
ctgtcccagtgggaaatct

SEQ ID NO: 313002 - DNA, 19 bp, Homo sapiens
  siRNA target sequence for C1QA (NM_015991.1,649-667).
gaccaggtctgggttgaaa

SEQ ID NO: 313003 - DNA, 19 bp, Homo sapiens
  siRNA target sequence for C1QB (NM_000491.2,115-133).
ctcctgggcctaatcgata

SEQ ID NO: 313004 - DNA, 19 bp, Homo sapiens
  siRNA target sequence for C1QB (NM_000491.2,118-136).
ctgggcctaatcgatatct

SEQ ID NO: 313005 - DNA, 19 bp, Homo sapiens
  siRNA target sequence for C1QB (NM_000491.2,342-360).
ccccatgggccctaaaggt

SEQ ID NO: 313006 - DNA, 19 bp, Homo sapiens
  siRNA target sequence for C1QB (NM_000491.2,395-413).
gtgaatcgggagactacaa

SEQ ID NO: 313007 - DNA, 19 bp, Homo sapiens
  siRNA target sequence for C1QB (NM_000491.2,645-663).
ggtcaccttctgtgactat

SEQ ID NO: 313008 - DNA, 19 bp, Homo sapiens
  siRNA target sequence for C1QG (NM_172369.1,443-461).
ggtgaggagggcagataca

SEQ ID NO: 313009 - DNA, 19 bp, Homo sapiens
  siRNA target sequence for C1QG (NM_172369.1,444-462).
gtgaggagggcagatacaa

SEQ ID NO: 313010 - DNA, 19 bp, Homo sapiens
  siRNA target sequence for C1QG (NM_172369.1,519-537).
ccaacagcctgatcagatt

SEQ ID NO: 313011 - DNA, 19 bp, Homo sapiens
  siRNA target sequence for C1QG (NM_172369.1,552-570).
ccaacccgcagggagatta

SEQ ID NO: 313012 - DNA, 19 bp, Homo sapiens
  siRNA target sequence for C1QG (NM_172369.1,553-571).
caacccgcagggagattat

SEQ ID NO: 313013 - DNA, 19 bp, Homo sapiens
  siRNA target sequence for C1QG (NM_172369.1,557-575).
ccgcagggagattatgaca

SEQ ID NO: 313014 - DNA, 19 bp, Homo sapiens
  siRNA target sequence for C4BPA (NM_000715.2,217-235).
ctggggctcttcatagaaa

SEQ ID NO: 313015 - DNA, 19 bp, Homo sapiens
  siRNA target sequence for C4BPA (NM_000715.2,219-237).
ggggctcttcatagaaaaa

SEQ ID NO: 313016 - DNA, 19 bp, Homo sapiens
  siRNA target sequence for C4BPA (NM_000715.2,222-240).
gctcttcatagaaaaagga

SEQ ID NO: 313017 - DNA, 19 bp, Homo sapiens
  siRNA target sequence for C4BPA (NM_000715.2,271-289).
ggaaagtctctgatccaat

SEQ ID NO: 313018 - DNA, 19 bp, Homo sapiens
  siRNA target sequence for C4BPA (NM_000715.2,345-363).
ggtcctccacccactttat

SEQ ID NO: 313019 - DNA, 19 bp, Homo sapiens
  siRNA target sequence for C4BPA (NM_000715.2,369-387).
gctgccccgatggatatta

SEQ ID NO: 313020 - DNA, 19 bp, Homo sapiens
  siRNA target sequence for C4BPA (NM_000715.2,372-390).
gccccgatggatattacgt

SEQ ID NO: 313021 - DNA, 19 bp, Homo sapiens
  siRNA target sequence for C4BPA (NM_000715.2,373-391).
ccccgatggatattacgtt

SEQ ID NO: 313022 - DNA, 19 bp, Homo sapiens
  siRNA target sequence for C4BPA (NM_000715.2,392-410).
gactgagacacgcttcaaa

SEQ ID NO: 313023 - DNA, 19 bp, Homo sapiens
  siRNA target sequence for C4BPA (NM_000715.2,449-467).
cgtcagatcccattcaact

SEQ ID NO: 313024 - DNA, 19 bp, Homo sapiens
  siRNA target sequence for C4BPA (NM_000715.2,468-486).
cagacgcttacctgtaatt

SEQ ID NO: 313025 - DNA, 19 bp, Homo sapiens
  siRNA target sequence for C4BPA (NM_000715.2,489-507).
gatggcgaatgggtgtata

SEQ ID NO: 313026 - DNA, 19 bp, Homo sapiens
  siRNA target sequence for C4BPA (NM_000715.2,501-519).
gtgtataacaccttctgta

SEQ ID NO: 313027 - DNA, 19 bp, Homo sapiens
  siRNA target sequence for C4BPA (NM_000715.2,537-555).
cacccaggagagttacgta

SEQ ID NO: 313028 - DNA, 19 bp, Homo sapiens
  siRNA target sequence for C4BPA (NM_000715.2,539-557).
cccaggagagttacgtaat

SEQ ID NO: 313029 - DNA, 19 bp, Homo sapiens
  siRNA target sequence for C4BPA (NM_000715.2,558-576).
gggcaagtagagattaaga

SEQ ID NO: 313030 - DNA, 19 bp, Homo sapiens
  siRNA target sequence for C4BPA (NM_000715.2,560-578).
gcaagtagagattaagaca

SEQ ID NO: 313031 - DNA, 19 bp, Homo sapiens
  siRNA target sequence for C4BPA (NM_000715.2,569-587).
gattaagacagatttatct

SEQ ID NO: 313032 - DNA, 19 bp, Homo sapiens
  siRNA target sequence for C4BPA (NM_000715.2,651-669).
cgttgtgaagtccaagata

SEQ ID NO: 313033 - DNA, 19 bp, Homo sapiens
  siRNA target sequence for C4BPA (NM_000715.2,750-768).
cacagcggtgaagaaaatt

SEQ ID NO: 313034 - DNA, 19 bp, Homo sapiens
  siRNA target sequence for C4BPA (NM_000715.2,754-772).
gcggtgaagaaaatttcta

SEQ ID NO: 313035 - DNA, 19 bp, Homo sapiens
  siRNA target sequence for C4BPA (NM_000715.2,770-788).
ctacgcatacggcttttct

SEQ ID NO: 313036 - DNA, 19 bp, Homo sapiens
  siRNA target sequence for C4BPA (NM_000715.2,825-843).
ggccatgcctccatttctt

SEQ ID NO: 313037 - DNA, 19 bp, Homo sapiens
  siRNA target sequence for C4BPA (NM_000715.2,888-906).
cctacctgtgaaaaaatca

SEQ ID NO: 313038 - DNA, 19 bp, Homo sapiens
  siRNA target sequence for C4BPA (NM_000715.2,1015-1033).
gaggcagcagtgtaattca

SEQ ID NO: 313039 - DNA, 19 bp, Homo sapiens
  siRNA target sequence for C4BPA (NM_000715.2,1038-1056).
gatgctgatagcaaatgga

SEQ ID NO: 313040 - DNA, 19 bp, Homo sapiens
  siRNA target sequence for C4BPA (NM_000715.2,1075-1093).
gtgagcccaatagttgtat

SEQ ID NO: 313041 - DNA, 19 bp, Homo sapiens
  siRNA target sequence for C4BPA (NM_000715.2,1079-1097).
gcccaatagttgtattaat

SEQ ID NO: 313042 - DNA, 19 bp, Homo sapiens
  siRNA target sequence for C4BPA (NM_000715.2,1080-1098).
cccaatagttgtattaatt

SEQ ID NO: 313043 - DNA, 19 bp, Homo sapiens
  siRNA target sequence for C4BPA (NM_000715.2,1161-1179).
gttgttgggactgtgttaa

SEQ ID NO: 313044 - DNA, 19 bp, Homo sapiens
  siRNA target sequence for C4BPA (NM_000715.2,1164-1182).
gttgggactgtgttaaggt

SEQ ID NO: 313045 - DNA, 19 bp, Homo sapiens
  siRNA target sequence for C4BPA (NM_000715.2,1220-1238).
gcctacgactgtgatttgt

SEQ ID NO: 313046 - DNA, 19 bp, Homo sapiens
  siRNA target sequence for C4BPA (NM_000715.2,1250-1268).
gagatggaccccataccaa

SEQ ID NO: 313047 - DNA, 19 bp, Homo sapiens
  siRNA target sequence for C4BPA (NM_000715.2,1344-1362).
gccaatcactgtgtttatt

SEQ ID NO: 313048 - DNA, 19 bp, Homo sapiens
  siRNA target sequence for C4BPA (NM_000715.2,1392-1410).
catgagaccagtaggtttt

SEQ ID NO: 313049 - DNA, 19 bp, Homo sapiens
  siRNA target sequence for C4BPA (NM_000715.2,1400-1418).
cagtaggttttcagctata

SEQ ID NO: 313050 - DNA, 19 bp, Homo sapiens
  siRNA target sequence for C4BPA (NM_000715.2,1472-1490).
caattttcctcctaaaatt

SEQ ID NO: 313051 - DNA, 19 bp, Homo sapiens
  siRNA target sequence for C4BPA (NM_000715.2,1494-1512).
catgggcattataaacaat

SEQ ID NO: 313052 - DNA, 19 bp, Homo sapiens
  siRNA target sequence for C4BPA (NM_000715.2,1497-1515).
gggcattataaacaatcta

SEQ ID NO: 313053 - DNA, 19 bp, Homo sapiens
  siRNA target sequence for C4BPA (NM_000715.2,1519-1537).
catacagctttttcaaaga

SEQ ID NO: 313054 - DNA, 19 bp, Homo sapiens
  siRNA target sequence for C4BPA (NM_000715.2,1555-1573).
gtgataaaggctacattct

SEQ ID NO: 313055 - DNA, 19 bp, Homo sapiens
  siRNA target sequence for C4BPA (NM_000715.2,1575-1593).
gtcggacaggcgaaactct

SEQ ID NO: 313056 - DNA, 19 bp, Homo sapiens
  siRNA target sequence for C4BPA (NM_000715.2,1713-1731).
gtcaccatccaatgtgatt

SEQ ID NO: 313057 - DNA, 19 bp, Homo sapiens
  siRNA target sequence for C4BPB (NM_000716.2,289-307).
ggtgtgcgtgctgtcttat

SEQ ID NO: 313058 - DNA, 19 bp, Homo sapiens
  siRNA target sequence for C4BPB (NM_000716.2,292-310).
gtgcgtgctgtcttatggt

SEQ ID NO: 313059 - DNA, 19 bp, Homo sapiens
  siRNA target sequence for C4BPB (NM_000716.2,308-326).
ggttgcgtggcgagtttct

SEQ ID NO: 313060 - DNA, 19 bp, Homo sapiens
  siRNA target sequence for C4BPB (NM_000716.2,360-378).
ccagtggacaatagcatat

SEQ ID NO: 313061 - DNA, 19 bp, Homo sapiens
  siRNA target sequence for C4BPB (NM_000716.2,408-426).
ctggggacttacgtttgta

SEQ ID NO: 313062 - DNA, 19 bp, Homo sapiens
  siRNA target sequence for C4BPB (NM_000716.2,411-429).
gggacttacgtttgtatca

SEQ ID NO: 313063 - DNA, 19 bp, Homo sapiens
  siRNA target sequence for C4BPB (NM_000716.2,412-430).
ggacttacgtttgtatcaa

SEQ ID NO: 313064 - DNA, 19 bp, Homo sapiens
  siRNA target sequence for C4BPB (NM_000716.2,746-764).
cttaggatccaccattagt

SEQ ID NO: 313065 - DNA, 19 bp, Homo sapiens
  siRNA target sequence for C4BPB (NM_000716.2,750-768).
ggatccaccattagttatt

SEQ ID NO: 313066 - DNA, 19 bp, Homo sapiens
  siRNA target sequence for C4BPB (NM_000716.2,751-769).
gatccaccattagttatta

SEQ ID NO: 313067 - DNA, 19 bp, Homo sapiens
  siRNA target sequence for C4BPB (NM_000716.2,772-790).
gtgaagacaggtactactt

SEQ ID NO: 313068 - DNA, 19 bp, Homo sapiens
  siRNA target sequence for C4BPB (NM_000716.2,936-954).
gagaactttatgcaacaat

SEQ ID NO: 313069 - DNA, 19 bp, Homo sapiens
  siRNA target sequence for DAF (NM_000574.2,393-411).
ggaaggccgtacaagtttt

SEQ ID NO: 313070 - DNA, 19 bp, Homo sapiens
  siRNA target sequence for DAF (NM_000574.2,412-430).
cccgaggatactgtaataa

SEQ ID NO: 313071 - DNA, 19 bp, Homo sapiens
  siRNA target sequence for DAF (NM_000574.2,415-433).
gaggatactgtaataacgt

SEQ ID NO: 313072 - DNA, 19 bp, Homo sapiens
  siRNA target sequence for DAF (NM_000574.2,517-535).
gaagagttctgcaatcgta

SEQ ID NO: 313073 - DNA, 19 bp, Homo sapiens
  siRNA target sequence for DAF (NM_000574.2,588-606).
cactcagaattattttcca

SEQ ID NO: 313074 - DNA, 19 bp, Homo sapiens
  siRNA target sequence for DAF (NM_000574.2,609-627).
cggtactgttgtggaatat

SEQ ID NO: 313075 - DNA, 19 bp, Homo sapiens
  siRNA target sequence for DAF (NM_000574.2,630-648).
gtgccgtccaggttacaga

SEQ ID NO: 313076 - DNA, 19 bp, Homo sapiens
  siRNA target sequence for DAF (NM_000574.2,656-674).
cttctctatcaccaaaact

SEQ ID NO: 313077 - DNA, 19 bp, Homo sapiens
  siRNA target sequence for DAF (NM_000574.2,661-679).
ctatcaccaaaactaactt

SEQ ID NO: 313078 - DNA, 19 bp, Homo sapiens
  siRNA target sequence for DAF (NM_000574.2,698-716).
ggtccacagcagtcgaatt

SEQ ID NO: 313079 - DNA, 19 bp, Homo sapiens
  siRNA target sequence for DAF (NM_000574.2,699-717).
gtccacagcagtcgaattt

SEQ ID NO: 313080 - DNA, 19 bp, Homo sapiens
  siRNA target sequence for DAF (NM_000574.2,734-752).
gccctaatccgggagaaat

SEQ ID NO: 313081 - DNA, 19 bp, Homo sapiens
  siRNA target sequence for DAF (NM_000574.2,735-753).
ccctaatccgggagaaata

SEQ ID NO: 313082 - DNA, 19 bp, Homo sapiens
  siRNA target sequence for DAF (NM_000574.2,772-790).
gtaccaggtggcatattat

SEQ ID NO: 313083 - DNA, 19 bp, Homo sapiens
  siRNA target sequence for DAF (NM_000574.2,800-818).
ccatctccttctcatgtaa

SEQ ID NO: 313084 - DNA, 19 bp, Homo sapiens
  siRNA target sequence for DAF (NM_000574.2,804-822).
ctccttctcatgtaacaca

SEQ ID NO: 313085 - DNA, 19 bp, Homo sapiens
  siRNA target sequence for DAF (NM_000574.2,842-860).
cgacttctagtttttgtct

SEQ ID NO: 313086 - DNA, 19 bp, Homo sapiens
  siRNA target sequence for DAF (NM_000574.2,925-943).
gcaccaccacaaattgaca

SEQ ID NO: 313087 - DNA, 19 bp, Homo sapiens
  siRNA target sequence for DAF (NM_000574.2,926-944).
caccaccacaaattgacaa

SEQ ID NO: 313088 - DNA, 19 bp, Homo sapiens
  siRNA target sequence for DAF (NM_000574.2,932-950).
cacaaattgacaatggaat

SEQ ID NO: 313089 - DNA, 19 bp, Homo sapiens
  siRNA target sequence for DAF (NM_000574.2,964-982).
cgtgaccattatggatata

SEQ ID NO: 313090 - DNA, 19 bp, Homo sapiens
  siRNA target sequence for DAF (NM_000574.2,985-1003).
cagtctgtaacgtatgcat

SEQ ID NO: 313091 - DNA, 19 bp, Homo sapiens
  siRNA target sequence for DAF (NM_000574.2,989-1007).
ctgtaacgtatgcatgtaa

SEQ ID NO: 313092 - DNA, 19 bp, Homo sapiens
  siRNA target sequence for DAF (NM_000574.2,1023-1041).
gattggagagcactctatt

SEQ ID NO: 313093 - DNA, 19 bp, Homo sapiens
  siRNA target sequence for DAF (NM_000574.2,1030-1048).
gagcactctatttattgta

SEQ ID NO: 313094 - DNA, 19 bp, Homo sapiens
  siRNA target sequence for DAF (NM_000574.2,1116-1134).
caaggtcccaccaacagtt

SEQ ID NO: 313095 - DNA, 19 bp, Homo sapiens
  siRNA target sequence for DAF (NM_000574.2,1126-1144).
ccaacagttcagaaaccta

SEQ ID NO: 313096 - DNA, 19 bp, Homo sapiens
  siRNA target sequence for DAF (NM_000574.2,1135-1153).
cagaaacctaccacagtaa

SEQ ID NO: 313097 - DNA, 19 bp, Homo sapiens
  siRNA target sequence for DAF (NM_000574.2,1248-1266).
caggacaaccaagcatttt

SEQ ID NO: 313098 - DNA, 19 bp, Homo sapiens
  siRNA target sequence for DAF (NM_000574.2,1250-1268).
ggacaaccaagcattttca

SEQ ID NO: 313099 - DNA, 19 bp, Homo sapiens
  siRNA target sequence for DAF (NM_000574.2,1306-1324).
ggtactacccgtcttctat

SEQ ID NO: 313100 - DNA, 19 bp, Homo sapiens
  siRNA target sequence for FHR5 (NM_030787.1,506-524).
ccatatgcagcttcactaa

SEQ ID NO: 313101 - DNA, 19 bp, Homo sapiens
  siRNA target sequence for FHR5 (NM_030787.1,640-658).
ggatcagactcagttcaat

SEQ ID NO: 313102 - DNA, 19 bp, Homo sapiens
  siRNA target sequence for FHR5 (NM_030787.1,644-662).
cagactcagttcaatgtta

SEQ ID NO: 313103 - DNA, 19 bp, Homo sapiens
  siRNA target sequence for FHR5 (NM_030787.1,648-666).
ctcagttcaatgttaccaa

SEQ ID NO: 313104 - DNA, 19 bp, Homo sapiens
  siRNA target sequence for FHR5 (NM_030787.1,650-668).
cagttcaatgttaccaatt

SEQ ID NO: 313105 - DNA, 19 bp, Homo sapiens
  siRNA target sequence for FHR5 (NM_030787.1,891-909).
gaaaacatgtggatacata

SEQ ID NO: 313106 - DNA, 19 bp, Homo sapiens
  siRNA target sequence for FHR5 (NM_030787.1,939-957).
gtctgtccctccctatcaa

SEQ ID NO: 313107 - DNA, 19 bp, Homo sapiens
  siRNA target sequence for FHR5 (NM_030787.1,964-982).
gtttcagtcgaggtgaatt

SEQ ID NO: 313108 - DNA, 19 bp, Homo sapiens
  siRNA target sequence for FHR5 (NM_030787.1,983-1001).
gcagaaatgaatatgcaat

SEQ ID NO: 313109 - DNA, 19 bp, Homo sapiens
  siRNA target sequence for FHR5 (NM_030787.1,991-1009).
gaatatgcaatgattggaa

SEQ ID NO: 313110 - DNA, 19 bp, Homo sapiens
  siRNA target sequence for FHR5 (NM_030787.1,1014-1032).
catgattacctgtattaat

SEQ ID NO: 313111 - DNA, 19 bp, Homo sapiens
  siRNA target sequence for FHR5 (NM_030787.1,1041-1059).
gacagagcttcctatgtgt

SEQ ID NO: 313112 - DNA, 19 bp, Homo sapiens
  siRNA target sequence for FHR5 (NM_030787.1,1060-1078).
gttgcaacacaccaactta

SEQ ID NO: 313113 - DNA, 19 bp, Homo sapiens
  siRNA target sequence for FHR5 (NM_030787.1,1085-1103).
gcaaaatagcaggagttaa

SEQ ID NO: 313114 - DNA, 19 bp, Homo sapiens
  siRNA target sequence for FHR5 (NM_030787.1,1188-1206).
caggcactcagtctgtata

SEQ ID NO: 313115 - DNA, 19 bp, Homo sapiens
  siRNA target sequence for FHR5 (NM_030787.1,1275-1293).
gatacctaatgctcagaat

SEQ ID NO: 313116 - DNA, 19 bp, Homo sapiens
  siRNA target sequence for FHR5 (NM_030787.1,1390-1408).
gatggacgatggcaatcat

SEQ ID NO: 313117 - DNA, 19 bp, Homo sapiens
  siRNA target sequence for FHR5 (NM_030787.1,1473-1491).
cacctcattcccattatca

SEQ ID NO: 313118 - DNA, 19 bp, Homo sapiens
  siRNA target sequence for FHR5 (NM_030787.1,1521-1539).
ccgttgccagtccttctat

SEQ ID NO: 313119 - DNA, 19 bp, Homo sapiens
  siRNA target sequence for FHR5 (NM_030787.1,1522-1540).
cgttgccagtccttctata

SEQ ID NO: 313120 - DNA, 19 bp, Homo sapiens
  siRNA target sequence for FHR5 (NM_030787.1,1546-1564).
cagggctctgtaactgtaa

SEQ ID NO: 313121 - DNA, 19 bp, Homo sapiens
  siRNA target sequence for FHR5 (NM_030787.1,1722-1740).
cccacataaagcgatgata

SEQ ID NO: 313122 - DNA, 19 bp, Homo sapiens
  siRNA target sequence for FHR5 (NM_030787.1,1726-1744).
cataaagcgatgatatcat

SEQ ID NO: 313123 - DNA, 19 bp, Homo sapiens
  siRNA target sequence for FHR5 (NM_030787.1,1775-1793).
ggaaatttgaatatcctat

SEQ ID NO: 313124 - DNA, 19 bp, Homo sapiens
  siRNA target sequence for HF1 (NM_000186.1,78-96).
gacttctagcaaagattat

SEQ ID NO: 313125 - DNA, 19 bp, Homo sapiens
  siRNA target sequence for HF1 (NM_000186.1,80-98).
cttctagcaaagattattt

SEQ ID NO: 313126 - DNA, 19 bp, Homo sapiens
  siRNA target sequence for HF1 (NM_000186.1,101-119).
cttatgttatgggctattt

SEQ ID NO: 313127 - DNA, 19 bp, Homo sapiens
  siRNA target sequence for HF1 (NM_000186.1,106-124).
gttatgggctatttgtgta

SEQ ID NO: 313128 - DNA, 19 bp, Homo sapiens
  siRNA target sequence for HF1 (NM_000186.1,184-202).
gtctgaccaaacatatcca

SEQ ID NO: 313129 - DNA, 19 bp, Homo sapiens
  siRNA target sequence for HF1 (NM_000186.1,206-224).
ggcacccaggctatctata

SEQ ID NO: 313130 - DNA, 19 bp, Homo sapiens
  siRNA target sequence for HF1 (NM_000186.1,207-225).
gcacccaggctatctataa

SEQ ID NO: 313131 - DNA, 19 bp, Homo sapiens
  siRNA target sequence for HF1 (NM_000186.1,237-255).
gatatagatctcttggaaa

SEQ ID NO: 313132 - DNA, 19 bp, Homo sapiens
  siRNA target sequence for HF1 (NM_000186.1,285-303).
gggttgctcttaatccatt

SEQ ID NO: 313133 - DNA, 19 bp, Homo sapiens
  siRNA target sequence for HF1 (NM_000186.1,286-304).
ggttgctcttaatccatta

SEQ ID NO: 313134 - DNA, 19 bp, Homo sapiens
  siRNA target sequence for HF1 (NM_000186.1,287-305).
gttgctcttaatccattaa

SEQ ID NO: 313135 - DNA, 19 bp, Homo sapiens
  siRNA target sequence for HF1 (NM_000186.1,290-308).
gctcttaatccattaagga

SEQ ID NO: 313136 - DNA, 19 bp, Homo sapiens
  siRNA target sequence for HF1 (NM_000186.1,291-309).
ctcttaatccattaaggaa

SEQ ID NO: 313137 - DNA, 19 bp, Homo sapiens
  siRNA target sequence for HF1 (NM_000186.1,365-383).
cttacaggaggaaatgtgt

SEQ ID NO: 313138 - DNA, 19 bp, Homo sapiens
  siRNA target sequence for HF1 (NM_000186.1,369-387).
caggaggaaatgtgtttga

SEQ ID NO: 313139 - DNA, 19 bp, Homo sapiens
  siRNA target sequence for HF1 (NM_000186.1,392-410).
ggtgtaaaagctgtgtata

SEQ ID NO: 313140 - DNA, 19 bp, Homo sapiens
  siRNA target sequence for HF1 (NM_000186.1,414-432).
gtaatgaggggtatcaatt

SEQ ID NO: 313141 - DNA, 19 bp, Homo sapiens
  siRNA target sequence for HF1 (NM_000186.1,475-493).
gaccaatgatattcctata

SEQ ID NO: 313142 - DNA, 19 bp, Homo sapiens
  siRNA target sequence for HF1 (NM_000186.1,563-581).
ccagatcgggaataccatt

SEQ ID NO: 313143 - DNA, 19 bp, Homo sapiens
  siRNA target sequence for HF1 (NM_000186.1,564-582).
cagatcgggaataccattt

SEQ ID NO: 313144 - DNA, 19 bp, Homo sapiens
  siRNA target sequence for HF1 (NM_000186.1,590-608).
gcagtacggtttgtatgta

SEQ ID NO: 313145 - DNA, 19 bp, Homo sapiens
  siRNA target sequence for HF1 (NM_000186.1,591-609).
cagtacggtttgtatgtaa

SEQ ID NO: 313146 - DNA, 19 bp, Homo sapiens
  siRNA target sequence for HF1 (NM_000186.1,606-624).
gtaactcaggctacaagat

SEQ ID NO: 313147 - DNA, 19 bp, Homo sapiens
  siRNA target sequence for HF1 (NM_000186.1,655-673).
cgatggtttttggagtaaa

SEQ ID NO: 313148 - DNA, 19 bp, Homo sapiens
  siRNA target sequence for HF1 (NM_000186.1,702-720).
gcaaatccccagatgttat

SEQ ID NO: 313149 - DNA, 19 bp, Homo sapiens
  siRNA target sequence for HF1 (NM_000186.1,710-728).
ccagatgttataaatggat

SEQ ID NO: 313150 - DNA, 19 bp, Homo sapiens
  siRNA target sequence for HF1 (NM_000186.1,732-750).
ctatatctcagaagattat

SEQ ID NO: 313151 - DNA, 19 bp, Homo sapiens
  siRNA target sequence for HF1 (NM_000186.1,757-775).
ggagaatgaacgatttcaa

SEQ ID NO: 313152 - DNA, 19 bp, Homo sapiens
  siRNA target sequence for HF1 (NM_000186.1,758-776).
gagaatgaacgatttcaat

SEQ ID NO: 313153 - DNA, 19 bp, Homo sapiens
  siRNA target sequence for HF1 (NM_000186.1,760-778).
gaatgaacgatttcaatat

SEQ ID NO: 313154 - DNA, 19 bp, Homo sapiens
  siRNA target sequence for HF1 (NM_000186.1,783-801).
gtaacatgggttatgaata

SEQ ID NO: 313155 - DNA, 19 bp, Homo sapiens
  siRNA target sequence for HF1 (NM_000186.1,787-805).
catgggttatgaatacagt

SEQ ID NO: 313156 - DNA, 19 bp, Homo sapiens
  siRNA target sequence for HF1 (NM_000186.1,815-833).
gatgctgtatgcactgaat

SEQ ID NO: 313157 - DNA, 19 bp, Homo sapiens
  siRNA target sequence for HF1 (NM_000186.1,870-888).
catgtgataatccttatat

SEQ ID NO: 313158 - DNA, 19 bp, Homo sapiens
  siRNA target sequence for HF1 (NM_000186.1,896-914).
ggtgactactcacctttaa

SEQ ID NO: 313159 - DNA, 19 bp, Homo sapiens
  siRNA target sequence for HF1 (NM_000186.1,904-922).
ctcacctttaaggattaaa

SEQ ID NO: 313160 - DNA, 19 bp, Homo sapiens
  siRNA target sequence for HF1 (NM_000186.1,943-961).
cacgtaccagtgtagaaat

SEQ ID NO: 313161 - DNA, 19 bp, Homo sapiens
  siRNA target sequence for HF1 (NM_000186.1,1035-1053).
ccttgaaaccttgtgatta

SEQ ID NO: 313162 - DNA, 19 bp, Homo sapiens
  siRNA target sequence for HF1 (NM_000186.1,1408-1426).
caaaacatgttccaaatca

SEQ ID NO: 313163 - DNA, 19 bp, Homo sapiens
  siRNA target sequence for HF1 (NM_000186.1,1416-1434).
gttccaaatcaagtataga

SEQ ID NO: 313164 - DNA, 19 bp, Homo sapiens
  siRNA target sequence for HF1 (NM_000186.1,1425-1443).
caagtatagatattgagaa

SEQ ID NO: 313165 - DNA, 19 bp, Homo sapiens
  siRNA target sequence for HF1 (NM_000186.1,1446-1464).
ggtttatttctgaatctca

SEQ ID NO: 313166 - DNA, 19 bp, Homo sapiens
  siRNA target sequence for HF1 (NM_000186.1,1504-1522).
caaactaggatatgtaaca

SEQ ID NO: 313167 - DNA, 19 bp, Homo sapiens
  siRNA target sequence for HF1 (NM_000186.1,1530-1548).
gtgaaacatcaggatcaat

SEQ ID NO: 313168 - DNA, 19 bp, Homo sapiens
  siRNA target sequence for HF1 (NM_000186.1,1574-1592).
gctcaacccacgtgcatta

SEQ ID NO: 313169 - DNA, 19 bp, Homo sapiens
  siRNA target sequence for HF1 (NM_000186.1,1575-1593).
ctcaacccacgtgcattaa

SEQ ID NO: 313170 - DNA, 19 bp, Homo sapiens
  siRNA target sequence for HF1 (NM_000186.1,1577-1595).
caacccacgtgcattaaat

SEQ ID NO: 313171 - DNA, 19 bp, Homo sapiens
  siRNA target sequence for HF1 (NM_000186.1,1580-1598).
cccacgtgcattaaatctt

SEQ ID NO: 313172 - DNA, 19 bp, Homo sapiens
  siRNA target sequence for HF1 (NM_000186.1,1582-1600).
cacgtgcattaaatcttgt

SEQ ID NO: 313173 - DNA, 19 bp, Homo sapiens
  siRNA target sequence for HF1 (NM_000186.1,1596-1614).
cttgtgatatcccagtatt

SEQ ID NO: 313174 - DNA, 19 bp, Homo sapiens
  siRNA target sequence for HF1 (NM_000186.1,1601-1619).
gatatcccagtatttatga

SEQ ID NO: 313175 - DNA, 19 bp, Homo sapiens
  siRNA target sequence for HF1 (NM_000186.1,1685-1703).
gatggttatgaaagcaata

SEQ ID NO: 313176 - DNA, 19 bp, Homo sapiens
  siRNA target sequence for HF1 (NM_000186.1,1722-1740).
ccatagtgtgtggttacaa

SEQ ID NO: 313177 - DNA, 19 bp, Homo sapiens
  siRNA target sequence for HF1 (NM_000186.1,1723-1741).
catagtgtgtggttacaat

SEQ ID NO: 313178 - DNA, 19 bp, Homo sapiens
  siRNA target sequence for HF1 (NM_000186.1,1738-1756).
caatggttggtctgattta

SEQ ID NO: 313179 - DNA, 19 bp, Homo sapiens
  siRNA target sequence for HF1 (NM_000186.1,1758-1776).
ccatatgttatgaaagaga

SEQ ID NO: 313180 - DNA, 19 bp, Homo sapiens
  siRNA target sequence for HF1 (NM_000186.1,1773-1791).
gagaatgcgaacttcctaa

SEQ ID NO: 313181 - DNA, 19 bp, Homo sapiens
  siRNA target sequence for HF1 (NM_000186.1,1775-1793).
gaatgcgaacttcctaaaa

SEQ ID NO: 313182 - DNA, 19 bp, Homo sapiens
  siRNA target sequence for HF1 (NM_000186.1,1779-1797).
gcgaacttcctaaaataga

SEQ ID NO: 313183 - DNA, 19 bp, Homo sapiens
  siRNA target sequence for HF1 (NM_000186.1,1780-1798).
cgaacttcctaaaatagat

SEQ ID NO: 313184 - DNA, 19 bp, Homo sapiens
  siRNA target sequence for HF1 (NM_000186.1,1817-1835).
cgcaagaaagaccagtata

SEQ ID NO: 313185 - DNA, 19 bp, Homo sapiens
  siRNA target sequence for HF1 (NM_000186.1,1818-1836).
gcaagaaagaccagtataa

SEQ ID NO: 313186 - DNA, 19 bp, Homo sapiens
  siRNA target sequence for HF1 (NM_000186.1,1822-1840).
gaaagaccagtataaagtt

SEQ ID NO: 313187 - DNA, 19 bp, Homo sapiens
  siRNA target sequence for HF1 (NM_000186.1,1979-1997).
ctcctcaatgggaatgtta

SEQ ID NO: 313188 - DNA, 19 bp, Homo sapiens
  siRNA target sequence for HF1 (NM_000186.1,2063-2081).
ctaatgaagggacctaata

SEQ ID NO: 313189 - DNA, 19 bp, Homo sapiens
  siRNA target sequence for HF1 (NM_000186.1,2068-2086).
gaagggacctaataaaatt

SEQ ID NO: 313190 - DNA, 19 bp, Homo sapiens
  siRNA target sequence for HF1 (NM_000186.1,2071-2089).
gggacctaataaaattcaa

SEQ ID NO: 313191 - DNA, 19 bp, Homo sapiens
  siRNA target sequence for HF1 (NM_000186.1,2072-2090).
ggacctaataaaattcaat

SEQ ID NO: 313192 - DNA, 19 bp, Homo sapiens
  siRNA target sequence for HF1 (NM_000186.1,2109-2127).
caactttaccagtgtgtat

SEQ ID NO: 313193 - DNA, 19 bp, Homo sapiens
  siRNA target sequence for HF1 (NM_000186.1,2137-2155).
gagtacctgtggagatata

SEQ ID NO: 313194 - DNA, 19 bp, Homo sapiens
  siRNA target sequence for HF1 (NM_000186.1,2224-2242).
caattgctcagaatcattt

SEQ ID NO: 313195 - DNA, 19 bp, Homo sapiens
  siRNA target sequence for HF1 (NM_000186.1,2229-2247).
gctcagaatcatttacaat

SEQ ID NO: 313196 - DNA, 19 bp, Homo sapiens
  siRNA target sequence for HF1 (NM_000186.1,2252-2270).
ggacacagatcaattacgt

SEQ ID NO: 313197 - DNA, 19 bp, Homo sapiens
  siRNA target sequence for HF1 (NM_000186.1,2257-2275).
cagatcaattacgtgtatt

SEQ ID NO: 313198 - DNA, 19 bp, Homo sapiens
  siRNA target sequence for HF1 (NM_000186.1,2259-2277).
gatcaattacgtgtattca

SEQ ID NO: 313199 - DNA, 19 bp, Homo sapiens
  siRNA target sequence for HF1 (NM_000186.1,2298-2316).
cccagtgtgtggcaataga

SEQ ID NO: 313200 - DNA, 19 bp, Homo sapiens
  siRNA target sequence for HF1 (NM_000186.1,2300-2318).
cagtgtgtggcaatagata

SEQ ID NO: 313201 - DNA, 19 bp, Homo sapiens
  siRNA target sequence for HF1 (NM_000186.1,2304-2322).
gtgtggcaatagataaact

SEQ ID NO: 313202 - DNA, 19 bp, Homo sapiens
  siRNA target sequence for HF1 (NM_000186.1,2306-2324).
gtggcaatagataaactta

SEQ ID NO: 313203 - DNA, 19 bp, Homo sapiens
  siRNA target sequence for HF1 (NM_000186.1,2380-2398).
ggaattcgatcataattct

SEQ ID NO: 313204 - DNA, 19 bp, Homo sapiens
  siRNA target sequence for HF1 (NM_000186.1,2386-2404).
cgatcataattctaacata

SEQ ID NO: 313205 - DNA, 19 bp, Homo sapiens
  siRNA target sequence for HF1 (NM_000186.1,2390-2408).
cataattctaacataaggt

SEQ ID NO: 313206 - DNA, 19 bp, Homo sapiens
  siRNA target sequence for HF1 (NM_000186.1,2440-2458).
cacagtctgcataaatgga

SEQ ID NO: 313207 - DNA, 19 bp, Homo sapiens
  siRNA target sequence for HF1 (NM_000186.1,2479-2497).
ctgctcaatggcacaaata

SEQ ID NO: 313208 - DNA, 19 bp, Homo sapiens
  siRNA target sequence for HF1 (NM_000186.1,2481-2499).
gctcaatggcacaaataca

SEQ ID NO: 313209 - DNA, 19 bp, Homo sapiens
  siRNA target sequence for HF1 (NM_000186.1,2525-2543).
cccaattctcacaatatga

SEQ ID NO: 313210 - DNA, 19 bp, Homo sapiens
  siRNA target sequence for HF1 (NM_000186.1,2527-2545).
caattctcacaatatgaca

SEQ ID NO: 313211 - DNA, 19 bp, Homo sapiens
  siRNA target sequence for HF1 (NM_000186.1,2702-2720).
gaacacggaaccattaatt

SEQ ID NO: 313212 - DNA, 19 bp, Homo sapiens
  siRNA target sequence for HF1 (NM_000186.1,2705-2723).
cacggaaccattaattcat

SEQ ID NO: 313213 - DNA, 19 bp, Homo sapiens
  siRNA target sequence for HF1 (NM_000186.1,2725-2743).
caggtcttcacaagaaagt

SEQ ID NO: 313214 - DNA, 19 bp, Homo sapiens
  siRNA target sequence for HF1 (NM_000186.1,2747-2765).
gcacatgggactaaattga

SEQ ID NO: 313215 - DNA, 19 bp, Homo sapiens
  siRNA target sequence for HF1 (NM_000186.1,2750-2768).
catgggactaaattgagtt

SEQ ID NO: 313216 - DNA, 19 bp, Homo sapiens
  siRNA target sequence for HF1 (NM_000186.1,2781-2799).
gtggtttcaggatatctga

SEQ ID NO: 313217 - DNA, 19 bp, Homo sapiens
  siRNA target sequence for HF1 (NM_000186.1,2850-2868).
gtgaaggccttccttgtaa

SEQ ID NO: 313218 - DNA, 19 bp, Homo sapiens
  siRNA target sequence for HF1 (NM_000186.1,2871-2889).
ctccacctgagatttctca

SEQ ID NO: 313219 - DNA, 19 bp, Homo sapiens
  siRNA target sequence for HF1 (NM_000186.1,2901-2919).
ctcacatgtcagacagtta

SEQ ID NO: 313220 - DNA, 19 bp, Homo sapiens
  siRNA target sequence for HF1 (NM_000186.1,2930-2948).
gaagaagttacgtacaaat

SEQ ID NO: 313221 - DNA, 19 bp, Homo sapiens
  siRNA target sequence for HF1 (NM_000186.1,2933-2951).
gaagttacgtacaaatgtt

SEQ ID NO: 313222 - DNA, 19 bp, Homo sapiens
  siRNA target sequence for HF1 (NM_000186.1,2969-2987).
gatgggcctgcaattgcaa

SEQ ID NO: 313223 - DNA, 19 bp, Homo sapiens
  siRNA target sequence for HF1 (NM_000186.1,2972-2990).
gggcctgcaattgcaaaat

SEQ ID NO: 313224 - DNA, 19 bp, Homo sapiens
  siRNA target sequence for HF1 (NM_000186.1,2976-2994).
ctgcaattgcaaaatgctt

SEQ ID NO: 313225 - DNA, 19 bp, Homo sapiens
  siRNA target sequence for HF1 (NM_000186.1,3011-3029).
caccctccatcatgcataa

SEQ ID NO: 313226 - DNA, 19 bp, Homo sapiens
  siRNA target sequence for HF1 (NM_000186.1,3043-3061).
cagtttacctagctttgaa

SEQ ID NO: 313227 - DNA, 19 bp, Homo sapiens
  siRNA target sequence for HF1 (NM_000186.1,3102-3120).
cgggtgagcaagtgactta

SEQ ID NO: 313228 - DNA, 19 bp, Homo sapiens
  siRNA target sequence for HF1 (NM_000186.1,3146-3164).
gatggagccagtaatgtaa

SEQ ID NO: 313229 - DNA, 19 bp, Homo sapiens
  siRNA target sequence for HF1 (NM_000186.1,3624-3642).
cagccaaacagaagcttta

SEQ ID NO: 313230 - DNA, 19 bp, Homo sapiens
  siRNA target sequence for HF1 (NM_000186.1,3626-3644).
gccaaacagaagctttatt

SEQ ID NO: 313231 - DNA, 19 bp, Homo sapiens
  siRNA target sequence for HF1 (NM_000186.1,3673-3691).
gtgtaaacggggatatcgt

SEQ ID NO: 313232 - DNA, 19 bp, Homo sapiens
  siRNA target sequence for HF1 (NM_000186.1,3680-3698).
cggggatatcgtctttcat

SEQ ID NO: 313233 - DNA, 19 bp, Homo sapiens
  siRNA target sequence for HF1 (NM_000186.1,3682-3700).
gggatatcgtctttcatca

SEQ ID NO: 313234 - DNA, 19 bp, Homo sapiens
  siRNA target sequence for HF1 (NM_000186.1,3707-3725).
cacacattgcgaacaacat

SEQ ID NO: 313235 - DNA, 19 bp, Homo sapiens
  siRNA target sequence for HF1 (NM_000186.1,3709-3727).
cacattgcgaacaacatgt

SEQ ID NO: 313236 - DNA, 19 bp, Homo sapiens
  siRNA target sequence for HF1 (NM_000186.1,3734-3752).
gggaaactggagtatccaa

SEQ ID NO: 313237 - DNA, 19 bp, Homo sapiens
  siRNA target sequence for HF1 (NM_000186.1,3745-3763).
gtatccaacttgtgcaaaa

SEQ ID NO: 313238 - DNA, 19 bp, Homo sapiens
  siRNA target sequence for PFC (NM_002621.1,259-277).
cgcaggcccctcgattgtt

SEQ ID NO: 313239 - DNA, 19 bp, Homo sapiens
  siRNA target sequence for PFC (NM_002621.1,335-353).
ctgcttcacccagtatgaa

SEQ ID NO: 313240 - DNA, 19 bp, Homo sapiens
  siRNA target sequence for PFC (NM_002621.1,337-355).
gcttcacccagtatgaaga

SEQ ID NO: 313241 - DNA, 19 bp, Homo sapiens
  siRNA target sequence for PFC (NM_002621.1,716-734).
ccgcaggcgagcctgtaat

SEQ ID NO: 313242 - DNA, 19 bp, Homo sapiens
  siRNA target sequence for PFC (NM_002621.1,1222-1240).
gtatccgacggaacatgaa

SEQ ID NO: 313243 - DNA, 19 bp, Homo sapiens
  siRNA target sequence for PFC (NM_002621.1,1365-1383).
cactgccccttgaaaggat

SEQ ID NO: 313244 - DNA, 19 bp, Homo sapiens
  siRNA target sequence for PFC (NM_002621.1,1422-1440).
ccctgtggacctaatccta

SEQ ID NO: 313245 - DNA, 19 bp, Homo sapiens
  siRNA target sequence for PFC (NM_002621.1,1592-1610).
ggagaaacgaccatgtcta

SEQ ID NO: 313246 - DNA, 19 bp, Homo sapiens
  siRNA target sequence for HFL1 (NM_002113.1,86-104).
cctggtcagtgtaattcta

SEQ ID NO: 313247 - DNA, 19 bp, Homo sapiens
  siRNA target sequence for CD24 (NM_013230.1,113-131).
cctacccacgcagatttat

SEQ ID NO: 313248 - DNA, 19 bp, Homo sapiens
  siRNA target sequence for CD24 (NM_013230.1,114-132).
ctacccacgcagatttatt

SEQ ID NO: 313249 - DNA, 19 bp, Homo sapiens
  siRNA target sequence for CD24 (NM_013230.1,145-163).
caactggaacttcaagtaa

SEQ ID NO: 313250 - DNA, 19 bp, Homo sapiens
  siRNA target sequence for CD24 (NM_013230.1,194-212).
ggccccaaatccaactaat

SEQ ID NO: 313251 - DNA, 19 bp, Homo sapiens
  siRNA target sequence for CD83 (NM_004233.2,448-466).
cggtctcctgggtcaagtt

SEQ ID NO: 313252 - DNA, 19 bp, Homo sapiens
  siRNA target sequence for CD83 (NM_004233.2,449-467).
ggtctcctgggtcaagtta

SEQ ID NO: 313253 - DNA, 19 bp, Homo sapiens
  siRNA target sequence for CD83 (NM_004233.2,454-472).
cctgggtcaagttattgga

SEQ ID NO: 313254 - DNA, 19 bp, Homo sapiens
  siRNA target sequence for CD83 (NM_004233.2,517-535).
ggggacagcactatcatca

SEQ ID NO: 313255 - DNA, 19 bp, Homo sapiens
  siRNA target sequence for CD83 (NM_004233.2,520-538).
gacagcactatcatcagaa

SEQ ID NO: 313256 - DNA, 19 bp, Homo sapiens
  siRNA target sequence for CD83 (NM_004233.2,647-665).
ggatgggcagagaaaccta

SEQ ID NO: 313257 - DNA, 19 bp, Homo sapiens
  siRNA target sequence for CD83 (NM_004233.2,648-666).
gatgggcagagaaacctaa

SEQ ID NO: 313258 - DNA, 19 bp, Homo sapiens
  siRNA target sequence for CD83 (NM_004233.2,708-726).
cgtaaagaagagactttta

SEQ ID NO: 313259 - DNA, 19 bp, Homo sapiens
  siRNA target sequence for CD83 (NM_004233.2,783-801).
ctcatcattttcacttgta

SEQ ID NO: 313260 - DNA, 19 bp, Homo sapiens
  siRNA target sequence for CD83 (NM_004233.2,807-825).
gcacggctacagagtatct

SEQ ID NO: 313261 - DNA, 19 bp, Homo sapiens
  siRNA target sequence for CD83 (NM_004233.2,847-865).
gcatggaacgagcttttct

SEQ ID NO: 313262 - DNA, 19 bp, Homo sapiens
  siRNA target sequence for HGRG8 (NM_016258.1,232-250).
ggattaaacgatgatgatt

SEQ ID NO: 313263 - DNA, 19 bp, Homo sapiens
  siRNA target sequence for HGRG8 (NM_016258.1,233-251).
gattaaacgatgatgattt

SEQ ID NO: 313264 - DNA, 19 bp, Homo sapiens
  siRNA target sequence for HGRG8 (NM_016258.1,279-297).
gcccaataatgcatatact

SEQ ID NO: 313265 - DNA, 19 bp, Homo sapiens
  siRNA target sequence for HGRG8 (NM_016258.1,300-318).
catgtcagattcctactta

SEQ ID NO: 313266 - DNA, 19 bp, Homo sapiens
  siRNA target sequence for HGRG8 (NM_016258.1,399-417).
gccctacttaacttcttat

SEQ ID NO: 313267 - DNA, 19 bp, Homo sapiens
  siRNA target sequence for HGRG8 (NM_016258.1,402-420).
ctacttaacttcttatgga

SEQ ID NO: 313268 - DNA, 19 bp, Homo sapiens
  siRNA target sequence for HGRG8 (NM_016258.1,447-465).
cctaccagatgcaatgttt

SEQ ID NO: 313269 - DNA, 19 bp, Homo sapiens
  siRNA target sequence for HGRG8 (NM_016258.1,480-498).
cctaggtagcactccattt

SEQ ID NO: 313270 - DNA, 19 bp, Homo sapiens
  siRNA target sequence for HGRG8 (NM_016258.1,502-520).
ggtcagcatggttttaatt

SEQ ID NO: 313271 - DNA, 19 bp, Homo sapiens
  siRNA target sequence for HGRG8 (NM_016258.1,547-565).
gcatggggaaataacagtt

SEQ ID NO: 313272 - DNA, 19 bp, Homo sapiens
  siRNA target sequence for HGRG8 (NM_016258.1,583-601).
cagagctctggatatagta

SEQ ID NO: 313273 - DNA, 19 bp, Homo sapiens
  siRNA target sequence for HGRG8 (NM_016258.1,588-606).
ctctggatatagtagcaat

SEQ ID NO: 313274 - DNA, 19 bp, Homo sapiens
  siRNA target sequence for HGRG8 (NM_016258.1,590-608).
ctggatatagtagcaatta

SEQ ID NO: 313275 - DNA, 19 bp, Homo sapiens
  siRNA target sequence for HGRG8 (NM_016258.1,664-682).
gccaatgagaccctcaata

SEQ ID NO: 313276 - DNA, 19 bp, Homo sapiens
  siRNA target sequence for HGRG8 (NM_016258.1,665-683).
ccaatgagaccctcaataa

SEQ ID NO: 313277 - DNA, 19 bp, Homo sapiens
  siRNA target sequence for HGRG8 (NM_016258.1,684-702).
ggctcctggcatgaatact

SEQ ID NO: 313278 - DNA, 19 bp, Homo sapiens
  siRNA target sequence for HGRG8 (NM_016258.1,689-707).
ctggcatgaatactataga

SEQ ID NO: 313279 - DNA, 19 bp, Homo sapiens
  siRNA target sequence for HGRG8 (NM_016258.1,729-747).
gttgggtagcacagaagtt

SEQ ID NO: 313280 - DNA, 19 bp, Homo sapiens
  siRNA target sequence for HGRG8 (NM_016258.1,753-771).
caatgttccaaaagttgta

SEQ ID NO: 313281 - DNA, 19 bp, Homo sapiens
  siRNA target sequence for HGRG8 (NM_016258.1,781-799).
gttggtagcgggtccatta

SEQ ID NO: 313282 - DNA, 19 bp, Homo sapiens
  siRNA target sequence for HGRG8 (NM_016258.1,784-802).
ggtagcgggtccattacta

SEQ ID NO: 313283 - DNA, 19 bp, Homo sapiens
  siRNA target sequence for HGRG8 (NM_016258.1,788-806).
gcgggtccattactagtaa

SEQ ID NO: 313284 - DNA, 19 bp, Homo sapiens
  siRNA target sequence for HGRG8 (NM_016258.1,807-825).
catcgtggcttccaatagt

SEQ ID NO: 313285 - DNA, 19 bp, Homo sapiens
  siRNA target sequence for HGRG8 (NM_016258.1,887-905).
ctgcaaaacagcaacctaa

SEQ ID NO: 313286 - DNA, 19 bp, Homo sapiens
  siRNA target sequence for HGRG8 (NM_016258.1,924-942).
cattgcagggtcaagtctt

SEQ ID NO: 313287 - DNA, 19 bp, Homo sapiens
  siRNA target sequence for HGRG8 (NM_016258.1,944-962).
cgccacccccgataaagca

SEQ ID NO: 313288 - DNA, 19 bp, Homo sapiens
  siRNA target sequence for HGRG8 (NM_016258.1,946-964).
ccacccccgataaagcata

SEQ ID NO: 313289 - DNA, 19 bp, Homo sapiens
  siRNA target sequence for HGRG8 (NM_016258.1,990-1008).
caagggtcccgttgcaaaa

SEQ ID NO: 313290 - DNA, 19 bp, Homo sapiens
  siRNA target sequence for HGRG8 (NM_016258.1,1011-1029).
cccctcacaggctttggtt

SEQ ID NO: 313291 - DNA, 19 bp, Homo sapiens
  siRNA target sequence for HGRG8 (NM_016258.1,1072-1090).
ggtcagcaggctaacaata

SEQ ID NO: 313292 - DNA, 19 bp, Homo sapiens
  siRNA target sequence for HGRG8 (NM_016258.1,1224-1242).
cagtgggttcggtcataat

SEQ ID NO: 313293 - DNA, 19 bp, Homo sapiens
  siRNA target sequence for HGRG8 (NM_016258.1,1318-1336).
gagaagcttcggtccatta

SEQ ID NO: 313294 - DNA, 19 bp, Homo sapiens
  siRNA target sequence for HGRG8 (NM_016258.1,1324-1342).
cttcggtccattaataact

SEQ ID NO: 313295 - DNA, 19 bp, Homo sapiens
  siRNA target sequence for HGRG8 (NM_016258.1,1327-1345).
cggtccattaataactata

SEQ ID NO: 313296 - DNA, 19 bp, Homo sapiens
  siRNA target sequence for HGRG8 (NM_016258.1,1381-1399).
cgggttttcatcattaaga

SEQ ID NO: 313297 - DNA, 19 bp, Homo sapiens
  siRNA target sequence for HGRG8 (NM_016258.1,1413-1431).
cgatattcaccgttccatt

SEQ ID NO: 313298 - DNA, 19 bp, Homo sapiens
  siRNA target sequence for HGRG8 (NM_016258.1,1414-1432).
gatattcaccgttccatta

SEQ ID NO: 313299 - DNA, 19 bp, Homo sapiens
  siRNA target sequence for HGRG8 (NM_016258.1,1420-1438).
caccgttccattaagtata

SEQ ID NO: 313300 - DNA, 19 bp, Homo sapiens
  siRNA target sequence for HGRG8 (NM_016258.1,1422-1440).
ccgttccattaagtataat

SEQ ID NO: 313301 - DNA, 19 bp, Homo sapiens
  siRNA target sequence for HGRG8 (NM_016258.1,1423-1441).
cgttccattaagtataata

SEQ ID NO: 313302 - DNA, 19 bp, Homo sapiens
  siRNA target sequence for HGRG8 (NM_016258.1,1424-1442).
gttccattaagtataatat

SEQ ID NO: 313303 - DNA, 19 bp, Homo sapiens
  siRNA target sequence for HGRG8 (NM_016258.1,1470-1488).
gagactggatgctgcttat

SEQ ID NO: 313304 - DNA, 19 bp, Homo sapiens
  siRNA target sequence for HGRG8 (NM_016258.1,1557-1575).
cgtggcagaaatgaaatct

SEQ ID NO: 313305 - DNA, 19 bp, Homo sapiens
  siRNA target sequence for AIM2 (NM_004833.1,306-324).
gaactggataggtttaagt

SEQ ID NO: 313306 - DNA, 19 bp, Homo sapiens
  siRNA target sequence for AIM2 (NM_004833.1,309-327).
ctggataggtttaagttct

SEQ ID NO: 313307 - DNA, 19 bp, Homo sapiens
  siRNA target sequence for AIM2 (NM_004833.1,311-329).
ggataggtttaagttcttt

SEQ ID NO: 313308 - DNA, 19 bp, Homo sapiens
  siRNA target sequence for AIM2 (NM_004833.1,330-348).
ctttcagacgagtttaata

SEQ ID NO: 313309 - DNA, 19 bp, Homo sapiens
  siRNA target sequence for AIM2 (NM_004833.1,384-402).
caagtagctaccttgatga

SEQ ID NO: 313310 - DNA, 19 bp, Homo sapiens
  siRNA target sequence for AIM2 (NM_004833.1,418-436).
cggtgtctgcagtgatgaa

SEQ ID NO: 313311 - DNA, 19 bp, Homo sapiens
  siRNA target sequence for AIM2 (NM_004833.1,434-452).
gaagaccattcgtattttt

SEQ ID NO: 313312 - DNA, 19 bp, Homo sapiens
  siRNA target sequence for AIM2 (NM_004833.1,544-562).
cactaagtcaagctgaaat

SEQ ID NO: 313313 - DNA, 19 bp, Homo sapiens
  siRNA target sequence for AIM2 (NM_004833.1,605-623).
gcaacgtgctgcaccaaaa

SEQ ID NO: 313314 - DNA, 19 bp, Homo sapiens
  siRNA target sequence for AIM2 (NM_004833.1,663-681).
gcccagcaggaatctatca

SEQ ID NO: 313315 - DNA, 19 bp, Homo sapiens
  siRNA target sequence for AIM2 (NM_004833.1,665-683).
ccagcaggaatctatcaga

SEQ ID NO: 313316 - DNA, 19 bp, Homo sapiens
  siRNA target sequence for AIM2 (NM_004833.1,701-719).
ctgtttgccagttatggta

SEQ ID NO: 313317 - DNA, 19 bp, Homo sapiens
  siRNA target sequence for AIM2 (NM_004833.1,707-725).
gccagttatggtactgaaa

SEQ ID NO: 313318 - DNA, 19 bp, Homo sapiens
  siRNA target sequence for AIM2 (NM_004833.1,761-779).
caagcaggagatgtttcat

SEQ ID NO: 313319 - DNA, 19 bp, Homo sapiens
  siRNA target sequence for AIM2 (NM_004833.1,857-875).
gagaataattataatagca

SEQ ID NO: 313320 - DNA, 19 bp, Homo sapiens
  siRNA target sequence for AIM2 (NM_004833.1,894-912).
ggtttcttagaggtaaata

SEQ ID NO: 313321 - DNA, 19 bp, Homo sapiens
  siRNA target sequence for AIM2 (NM_004833.1,914-932).
cgcctcacgtgtgttagat

SEQ ID NO: 313322 - DNA, 19 bp, Homo sapiens
  siRNA target sequence for AIM2 (NM_004833.1,940-958).
ctgaccaaaaggttaatgt

SEQ ID NO: 313323 - DNA, 19 bp, Homo sapiens
  siRNA target sequence for AIM2 (NM_004833.1,957-975).
gtcccgctgaacattatca

SEQ ID NO: 313324 - DNA, 19 bp, Homo sapiens
  siRNA target sequence for AIM2 (NM_004833.1,984-1002).
ggtgaaaccccgaagatca

SEQ ID NO: 313325 - DNA, 19 bp, Homo sapiens
  siRNA target sequence for AIM2 (NM_004833.1,985-1003).
gtgaaaccccgaagatcaa

SEQ ID NO: 313326 - DNA, 19 bp, Homo sapiens
  siRNA target sequence for AIM2 (NM_004833.1,987-1005).
gaaaccccgaagatcaaca

SEQ ID NO: 313327 - DNA, 19 bp, Homo sapiens
  siRNA target sequence for AIM2 (NM_004833.1,998-1016).
gatcaacacgcttcaaact

SEQ ID NO: 313328 - DNA, 19 bp, Homo sapiens
  siRNA target sequence for AIM2 (NM_004833.1,1015-1033).
ctcagccccttggaacaat

SEQ ID NO: 313329 - DNA, 19 bp, Homo sapiens
  siRNA target sequence for AIM2 (NM_004833.1,1020-1038).
ccccttggaacaattgtga

SEQ ID NO: 313330 - DNA, 19 bp, Homo sapiens
  siRNA target sequence for AIM2 (NM_004833.1,1026-1044).
ggaacaattgtgaatggtt

SEQ ID NO: 313331 - DNA, 19 bp, Homo sapiens
  siRNA target sequence for AIM2 (NM_004833.1,1099-1117).
gtgacaacactgggaaaat

SEQ ID NO: 313332 - DNA, 19 bp, Homo sapiens
  siRNA target sequence for AIM2 (NM_004833.1,1135-1153).
gaaacgaggacacaatgaa

SEQ ID NO: 313333 - DNA, 19 bp, Homo sapiens
  siRNA target sequence for AIM2 (NM_004833.1,1167-1185).
gataaggttcgacttacat

SEQ ID NO: 313334 - DNA, 19 bp, Homo sapiens
  siRNA target sequence for AIM2 (NM_004833.1,1220-1238).
gctgacatctggagttcat

SEQ ID NO: 313335 - DNA, 19 bp, Homo sapiens
  siRNA target sequence for AIM2 (NM_004833.1,1230-1248).
ggagttcatagcaccataa

SEQ ID NO: 313336 - DNA, 19 bp, Homo sapiens
  siRNA target sequence for AIM2 (NM_004833.1,1231-1249).
gagttcatagcaccataaa

SEQ ID NO: 313337 - DNA, 19 bp, Homo sapiens
  siRNA target sequence for AIM2 (NM_004833.1,1236-1254).
catagcaccataaaggtta

SEQ ID NO: 313338 - DNA, 19 bp, Homo sapiens
  siRNA target sequence for AZGP1 (NM_001185.2,152-170).
gctgtccaagcatgttgaa

SEQ ID NO: 313339 - DNA, 19 bp, Homo sapiens
  siRNA target sequence for AZGP1 (NM_001185.2,188-206).
ggcccttggctcactcaat

SEQ ID NO: 313340 - DNA, 19 bp, Homo sapiens
  siRNA target sequence for AZGP1 (NM_001185.2,190-208).
cccttggctcactcaatga

SEQ ID NO: 313341 - DNA, 19 bp, Homo sapiens
  siRNA target sequence for AZGP1 (NM_001185.2,203-221).
caatgacctccagttcttt

SEQ ID NO: 313342 - DNA, 19 bp, Homo sapiens
  siRNA target sequence for AZGP1 (NM_001185.2,207-225).
gacctccagttctttagat

SEQ ID NO: 313343 - DNA, 19 bp, Homo sapiens
  siRNA target sequence for AZGP1 (NM_001185.2,210-228).
ctccagttctttagataca

SEQ ID NO: 313344 - DNA, 19 bp, Homo sapiens
  siRNA target sequence for AZGP1 (NM_001185.2,376-394).
gtaacgggtctcacgtatt

SEQ ID NO: 313345 - DNA, 19 bp, Homo sapiens
  siRNA target sequence for AZGP1 (NM_001185.2,389-407).
cgtattgcagggaaggttt

SEQ ID NO: 313346 - DNA, 19 bp, Homo sapiens
  siRNA target sequence for AZGP1 (NM_001185.2,441-459).
gcattctggaaatattact

SEQ ID NO: 313347 - DNA, 19 bp, Homo sapiens
  siRNA target sequence for AZGP1 (NM_001185.2,446-464).
ctggaaatattactatgat

SEQ ID NO: 313348 - DNA, 19 bp, Homo sapiens
  siRNA target sequence for AZGP1 (NM_001185.2,516-534).
gacccagcagcccagataa

SEQ ID NO: 313349 - DNA, 19 bp, Homo sapiens
  siRNA target sequence for AZGP1 (NM_001185.2,604-622).
ctgcgactctgcggaaata

SEQ ID NO: 313350 - DNA, 19 bp, Homo sapiens
  siRNA target sequence for AZGP1 (NM_001185.2,607-625).
cgactctgcggaaatacct

SEQ ID NO: 313351 - DNA, 19 bp, Homo sapiens
  siRNA target sequence for C1QBP (NM_001212.3,300-318).
gcacaccgacggagacaaa

SEQ ID NO: 313352 - DNA, 19 bp, Homo sapiens
  siRNA target sequence for C1QBP (NM_001212.3,305-323).
ccgacggagacaaagcttt

SEQ ID NO: 313353 - DNA, 19 bp, Homo sapiens
  siRNA target sequence for C1QBP (NM_001212.3,422-440).
ggacagaagcgaaattagt

SEQ ID NO: 313354 - DNA, 19 bp, Homo sapiens
  siRNA target sequence for C1QBP (NM_001212.3,491-509).
gcatcccaccaacatttga

SEQ ID NO: 313355 - DNA, 19 bp, Homo sapiens
  siRNA target sequence for C1QBP (NM_001212.3,553-571).
gagcctgaactgacatcaa

SEQ ID NO: 313356 - DNA, 19 bp, Homo sapiens
  siRNA target sequence for C1QBP (NM_001212.3,555-573).
gcctgaactgacatcaact

SEQ ID NO: 313357 - DNA, 19 bp, Homo sapiens
  siRNA target sequence for C1QBP (NM_001212.3,575-593).
ccaatttcgtggttgaagt

SEQ ID NO: 313358 - DNA, 19 bp, Homo sapiens
  siRNA target sequence for C1QBP (NM_001212.3,576-594).
caatttcgtggttgaagtt

SEQ ID NO: 313359 - DNA, 19 bp, Homo sapiens
  siRNA target sequence for C1QBP (NM_001212.3,585-603).
ggttgaagttataaagaat

SEQ ID NO: 313360 - DNA, 19 bp, Homo sapiens
  siRNA target sequence for C1QBP (NM_001212.3,673-691).
gctgagagtgacatcttct

SEQ ID NO: 313361 - DNA, 19 bp, Homo sapiens
  siRNA target sequence for C1QBP (NM_001212.3,728-746).
ctgaatggaaggatactaa

SEQ ID NO: 313362 - DNA, 19 bp, Homo sapiens
  siRNA target sequence for C1QBP (NM_001212.3,789-807).
ccacctaatggatttcctt

SEQ ID NO: 313363 - DNA, 19 bp, Homo sapiens
  siRNA target sequence for C1QBP (NM_001212.3,819-837).
ggtggacaacacttttgca

SEQ ID NO: 313364 - DNA, 19 bp, Homo sapiens
  siRNA target sequence for C1QBP (NM_001212.3,868-886).
gagcaccaggagtacatta

SEQ ID NO: 313365 - DNA, 19 bp, Homo sapiens
  siRNA target sequence for C1QBP (NM_001212.3,870-888).
gcaccaggagtacattact

SEQ ID NO: 313366 - DNA, 19 bp, Homo sapiens
  siRNA target sequence for C1QBP (NM_001212.3,871-889).
caccaggagtacattactt

SEQ ID NO: 313367 - DNA, 19 bp, Homo sapiens
  siRNA target sequence for C1QBP (NM_001212.3,873-891).
ccaggagtacattactttt

SEQ ID NO: 313368 - DNA, 19 bp, Homo sapiens
  siRNA target sequence for CD1A (NM_001763.1,625-643).
ggatcgcatccttttacaa

SEQ ID NO: 313369 - DNA, 19 bp, Homo sapiens
  siRNA target sequence for CD1A (NM_001763.1,802-820).
gcaccattcggtcatttga

SEQ ID NO: 313370 - DNA, 19 bp, Homo sapiens
  siRNA target sequence for CD1A (NM_001763.1,812-830).
gtcatttgagggaattcgt

SEQ ID NO: 313371 - DNA, 19 bp, Homo sapiens
  siRNA target sequence for CD1A (NM_001763.1,828-846).
cgtagatacgcccatgaat

SEQ ID NO: 313372 - DNA, 19 bp, Homo sapiens
  siRNA target sequence for CD1A (NM_001763.1,829-847).
gtagatacgcccatgaatt

SEQ ID NO: 313373 - DNA, 19 bp, Homo sapiens
  siRNA target sequence for CD1A (NM_001763.1,832-850).
gatacgcccatgaattgca

SEQ ID NO: 313374 - DNA, 19 bp, Homo sapiens
  siRNA target sequence for CD1A (NM_001763.1,920-938).
cttcttgcagttagcttat

SEQ ID NO: 313375 - DNA, 19 bp, Homo sapiens
  siRNA target sequence for CD1A (NM_001763.1,923-941).
cttgcagttagcttatcaa

SEQ ID NO: 313376 - DNA, 19 bp, Homo sapiens
  siRNA target sequence for CD1A (NM_001763.1,954-972).
gtgagcttccagaacaatt

SEQ ID NO: 313377 - DNA, 19 bp, Homo sapiens
  siRNA target sequence for CD1A (NM_001763.1,996-1014).
gggaatatggccaagcatt

SEQ ID NO: 313378 - DNA, 19 bp, Homo sapiens
  siRNA target sequence for CD1A (NM_001763.1,1018-1036).
gcaaagtgctcaatcagaa

SEQ ID NO: 313379 - DNA, 19 bp, Homo sapiens
  siRNA target sequence for CD1A (NM_001763.1,1078-1096).
cctgcccacgtttcatctt

SEQ ID NO: 313380 - DNA, 19 bp, Homo sapiens
  siRNA target sequence for CD1A (NM_001763.1,1091-1109).
catcttgggtcttcttgat

SEQ ID NO: 313381 - DNA, 19 bp, Homo sapiens
  siRNA target sequence for CD1A (NM_001763.1,1450-1468).
cggtgatagtgcctttact

SEQ ID NO: 313382 - DNA, 19 bp, Homo sapiens
  siRNA target sequence for CD59 (NM_000611.3,163-181).
cgtcaattgttcatctgat

SEQ ID NO: 313383 - DNA, 19 bp, Homo sapiens
  siRNA target sequence for CD59 (NM_000611.3,185-203).
gatgcgtgtctcattacca

SEQ ID NO: 313384 - DNA, 19 bp, Homo sapiens
  siRNA target sequence for CD59 (NM_000611.3,209-227).
gggttacaagtgtataaca

SEQ ID NO: 313385 - DNA, 19 bp, Homo sapiens
  siRNA target sequence for CD59 (NM_000611.3,210-228).
ggttacaagtgtataacaa

SEQ ID NO: 313386 - DNA, 19 bp, Homo sapiens
  siRNA target sequence for CD59 (NM_000611.3,279-297).
gggaaaatgagctaacgta

SEQ ID NO: 313387 - DNA, 19 bp, Homo sapiens
  siRNA target sequence for CD59 (NM_000611.3,306-324).
gcaagaaggacctgtgtaa

SEQ ID NO: 313388 - DNA, 19 bp, Homo sapiens
  siRNA target sequence for CD59 (NM_000611.3,310-328).
gaaggacctgtgtaacttt

SEQ ID NO: 313389 - DNA, 19 bp, Homo sapiens
  siRNA target sequence for CD59 (NM_000611.3,348-366).
gtgggacatccttatcaga

SEQ ID NO: 313390 - DNA, 19 bp, Homo sapiens
  siRNA target sequence for CD59 (NM_000611.3,352-370).
gacatccttatcagagaaa

SEQ ID NO: 313391 - DNA, 19 bp, Homo sapiens
  siRNA target sequence for CD59 (NM_000611.3,357-375).
ccttatcagagaaaacagt

SEQ ID NO: 313392 - DNA, 19 bp, Homo sapiens
  siRNA target sequence for CD96 (NM_005816.3,413-431).
ggtccaaggtcaccaataa

SEQ ID NO: 313393 - DNA, 19 bp, Homo sapiens
  siRNA target sequence for CD96 (NM_005816.3,416-434).
ccaaggtcaccaataagat

SEQ ID NO: 313394 - DNA, 19 bp, Homo sapiens
  siRNA target sequence for CD96 (NM_005816.3,417-435).
caaggtcaccaataagata

SEQ ID NO: 313395 - DNA, 19 bp, Homo sapiens
  siRNA target sequence for CD96 (NM_005816.3,547-565).
ctgcacttaaggaatatgt

SEQ ID NO: 313396 - DNA, 19 bp, Homo sapiens
  siRNA target sequence for CD96 (NM_005816.3,578-596).
gtggaaggtacgagtgtat

SEQ ID NO: 313397 - DNA, 19 bp, Homo sapiens
  siRNA target sequence for CD96 (NM_005816.3,674-692).
ggaacagcaaccatacgat

SEQ ID NO: 313398 - DNA, 19 bp, Homo sapiens
  siRNA target sequence for CD96 (NM_005816.3,675-693).
gaacagcaaccatacgata

SEQ ID NO: 313399 - DNA, 19 bp, Homo sapiens
  siRNA target sequence for CD96 (NM_005816.3,678-696).
cagcaaccatacgatagaa

SEQ ID NO: 313400 - DNA, 19 bp, Homo sapiens
  siRNA target sequence for CD96 (NM_005816.3,680-698).
gcaaccatacgatagaaat

SEQ ID NO: 313401 - DNA, 19 bp, Homo sapiens
  siRNA target sequence for CD96 (NM_005816.3,681-699).
caaccatacgatagaaata

SEQ ID NO: 313402 - DNA, 19 bp, Homo sapiens
  siRNA target sequence for CD96 (NM_005816.3,709-727).
cagactctggaaataccat

SEQ ID NO: 313403 - DNA, 19 bp, Homo sapiens
  siRNA target sequence for CD96 (NM_005816.3,773-791).
catggtcggtggaggataa

SEQ ID NO: 313404 - DNA, 19 bp, Homo sapiens
  siRNA target sequence for CD96 (NM_005816.3,777-795).
gtcggtggaggataatgga

SEQ ID NO: 313405 - DNA, 19 bp, Homo sapiens
  siRNA target sequence for CD96 (NM_005816.3,941-959).
gagtcggtcctaacaaaat

SEQ ID NO: 313406 - DNA, 19 bp, Homo sapiens
  siRNA target sequence for CD96 (NM_005816.3,943-961).
gtcggtcctaacaaaatct

SEQ ID NO: 313407 - DNA, 19 bp, Homo sapiens
  siRNA target sequence for CD96 (NM_005816.3,946-964).
ggtcctaacaaaatcttga

SEQ ID NO: 313408 - DNA, 19 bp, Homo sapiens
  siRNA target sequence for CD96 (NM_005816.3,1052-1070).
gatttacctgcttactaaa

SEQ ID NO: 313409 - DNA, 19 bp, Homo sapiens
  siRNA target sequence for CD96 (NM_005816.3,1058-1076).
cctgcttactaaagaatgt

SEQ ID NO: 313410 - DNA, 19 bp, Homo sapiens
  siRNA target sequence for CD96 (NM_005816.3,1198-1216).
gttttaacaagggtacata

SEQ ID NO: 313411 - DNA, 19 bp, Homo sapiens
  siRNA target sequence for CD96 (NM_005816.3,1228-1246).
gcccaatcagacaacttga

SEQ ID NO: 313412 - DNA, 19 bp, Homo sapiens
  siRNA target sequence for CD96 (NM_005816.3,1237-1255).
gacaacttgaccatttggt

SEQ ID NO: 313413 - DNA, 19 bp, Homo sapiens
  siRNA target sequence for CD96 (NM_005816.3,1348-1366).
gaccctccactgagtgtta

SEQ ID NO: 313414 - DNA, 19 bp, Homo sapiens
  siRNA target sequence for CD96 (NM_005816.3,1406-1424).
gtgtatctcctgcaagata

SEQ ID NO: 313415 - DNA, 19 bp, Homo sapiens
  siRNA target sequence for CD96 (NM_005816.3,1491-1509).
cagcaattccagtatgact

SEQ ID NO: 313416 - DNA, 19 bp, Homo sapiens
  siRNA target sequence for CD96 (NM_005816.3,1508-1526).
ctacccgaggcttcaacta

SEQ ID NO: 313417 - DNA, 19 bp, Homo sapiens
  siRNA target sequence for CD96 (NM_005816.3,1570-1588).
cggatacctagtgaaacat

SEQ ID NO: 313418 - DNA, 19 bp, Homo sapiens
  siRNA target sequence for CD96 (NM_005816.3,1571-1589).
ggatacctagtgaaacata

SEQ ID NO: 313419 - DNA, 19 bp, Homo sapiens
  siRNA target sequence for CD96 (NM_005816.3,1610-1628).
caggctcaacacttcatga

SEQ ID NO: 313420 - DNA, 19 bp, Homo sapiens
  siRNA target sequence for CD96 (NM_005816.3,1613-1631).
gctcaacacttcatgacaa

SEQ ID NO: 313421 - DNA, 19 bp, Homo sapiens
  siRNA target sequence for CD96 (NM_005816.3,1614-1632).
ctcaacacttcatgacaat

SEQ ID NO: 313422 - DNA, 19 bp, Homo sapiens
  siRNA target sequence for CD96 (NM_005816.3,1678-1696).
gccaatggatctacgaaaa

SEQ ID NO: 313423 - DNA, 19 bp, Homo sapiens
  siRNA target sequence for CD96 (NM_005816.3,1680-1698).
caatggatctacgaaaact

SEQ ID NO: 313424 - DNA, 19 bp, Homo sapiens
  siRNA target sequence for CD96 (NM_005816.3,1685-1703).
gatctacgaaaactaatca

SEQ ID NO: 313425 - DNA, 19 bp, Homo sapiens
  siRNA target sequence for CD96 (NM_005816.3,1715-1733).
ctggtattgtggtcaataa

SEQ ID NO: 313426 - DNA, 19 bp, Homo sapiens
  siRNA target sequence for CD96 (NM_005816.3,1749-1767).
gtcctggccagtgattgta

SEQ ID NO: 313427 - DNA, 19 bp, Homo sapiens
  siRNA target sequence for CD96 (NM_005816.3,1765-1783).
gtagcagctttactctttt

SEQ ID NO: 313428 - DNA, 19 bp, Homo sapiens
  siRNA target sequence for CD96 (NM_005816.3,1820-1838).
ggtgtcagtaccaaaaaga

SEQ ID NO: 313429 - DNA, 19 bp, Homo sapiens
  siRNA target sequence for CD96 (NM_005816.3,1876-1894).
cctcccatcaagtacactt

SEQ ID NO: 313430 - DNA, 19 bp, Homo sapiens
  siRNA target sequence for CD96 (NM_005816.3,1881-1899).
catcaagtacacttgcatt

SEQ ID NO: 313431 - DNA, 19 bp, Homo sapiens
  siRNA target sequence for CD96 (NM_005816.3,1884-1902).
caagtacacttgcattcaa

SEQ ID NO: 313432 - DNA, 19 bp, Homo sapiens
  siRNA target sequence for CD96 (NM_198196.1,772-790).
gcatggtcggtggaaaaca

SEQ ID NO: 313433 - DNA, 19 bp, Homo sapiens
  siRNA target sequence for CEACAM8 (NM_001816.2,251-269).
gaccctcgtggctacaact

SEQ ID NO: 313434 - DNA, 19 bp, Homo sapiens
  siRNA target sequence for CEACAM8 (NM_001816.2,728-746).
ccagcgagtgcaaacttca

SEQ ID NO: 313435 - DNA, 19 bp, Homo sapiens
  siRNA target sequence for CEACAM8 (NM_001816.2,818-836).
catgcaggggtaaatctca

SEQ ID NO: 313436 - DNA, 19 bp, Homo sapiens
  siRNA target sequence for CEACAM8 (NM_001816.2,893-911).
ggcacattccagcaataca

SEQ ID NO: 313437 - DNA, 19 bp, Homo sapiens
  siRNA target sequence for CNIH (NM_005776.1,125-143).
cgccatttggcacattata

SEQ ID NO: 313438 - DNA, 19 bp, Homo sapiens
  siRNA target sequence for CNIH (NM_005776.1,156-174).
ctgaagactgattacaaga

SEQ ID NO: 313439 - DNA, 19 bp, Homo sapiens
  siRNA target sequence for CNIH (NM_005776.1,163-181).
ctgattacaagaatcctat

SEQ ID NO: 313440 - DNA, 19 bp, Homo sapiens
  siRNA target sequence for CNIH (NM_005776.1,177-195).
cctatagaccagtgtaata

SEQ ID NO: 313441 - DNA, 19 bp, Homo sapiens
  siRNA target sequence for CNIH (NM_005776.1,196-214).
ccctgaatccccttgtact

SEQ ID NO: 313442 - DNA, 19 bp, Homo sapiens
  siRNA target sequence for CNIH (NM_005776.1,293-311).
gcccctcttggcatatcat

SEQ ID NO: 313443 - DNA, 19 bp, Homo sapiens
  siRNA target sequence for CNIH (NM_005776.1,294-312).
cccctcttggcatatcata

SEQ ID NO: 313444 - DNA, 19 bp, Homo sapiens
  siRNA target sequence for CNIH (NM_005776.1,295-313).
ccctcttggcatatcatat

SEQ ID NO: 313445 - DNA, 19 bp, Homo sapiens
  siRNA target sequence for CNIH (NM_005776.1,297-315).
ctcttggcatatcatattt

SEQ ID NO: 313446 - DNA, 19 bp, Homo sapiens
  siRNA target sequence for CNIH (NM_005776.1,416-434).
gtgcaaattagctttttat

SEQ ID NO: 313447 - DNA, 19 bp, Homo sapiens
  siRNA target sequence for CNIH (NM_005776.1,455-473).
cctatatggcatgatctat

SEQ ID NO: 313448 - DNA, 19 bp, Homo sapiens
  siRNA target sequence for CTLA4 (NM_005214.2,309-327).
ggcatcgccagctttgtgt

SEQ ID NO: 313449 - DNA, 19 bp, Homo sapiens
  siRNA target sequence for CTLA4 (NM_005214.2,409-427).
gtgcggcaacctacatgat

SEQ ID NO: 313450 - DNA, 19 bp, Homo sapiens
  siRNA target sequence for CTLA4 (NM_005214.2,469-487).
gcacctccagtggaaatca

SEQ ID NO: 313451 - DNA, 19 bp, Homo sapiens
  siRNA target sequence for CTLA4 (NM_005214.2,650-668).
gatccttgcagcagttagt

SEQ ID NO: 313452 - DNA, 19 bp, Homo sapiens
  siRNA target sequence for CTLA4 (NM_005214.2,663-681).
gttagttcggggttgtttt

SEQ ID NO: 313453 - DNA, 19 bp, Homo sapiens
  siRNA target sequence for CTLA4 (NM_005214.2,672-690).
gggttgtttttttatagct

SEQ ID NO: 313454 - DNA, 19 bp, Homo sapiens
  siRNA target sequence for CTLA4 (NM_005214.2,748-766).
caggggtctatgtgaaaat

SEQ ID NO: 313455 - DNA, 19 bp, Homo sapiens
  siRNA target sequence for CTLA4 (NM_005214.2,780-798).
ccagaatgtgaaaagcaat

SEQ ID NO: 313456 - DNA, 19 bp, Homo sapiens
  siRNA target sequence for G1P3 (NM_002038.2,120-138).
gcggtatcgcttttcttgt

SEQ ID NO: 313457 - DNA, 19 bp, Homo sapiens
  siRNA target sequence for G1P3 (NM_002038.2,418-436).
gcagcgtcgtcataggtaa

SEQ ID NO: 313458 - DNA, 19 bp, Homo sapiens
  siRNA target sequence for G1P3 (NM_002038.2,419-437).
cagcgtcgtcataggtaat

SEQ ID NO: 313459 - DNA, 19 bp, Homo sapiens
  siRNA target sequence for G1P3 (NM_002038.2,421-439).
gcgtcgtcataggtaatat

SEQ ID NO: 313460 - DNA, 19 bp, Homo sapiens
  siRNA target sequence for G1P3 (NM_002038.2,422-440).
cgtcgtcataggtaatatt

SEQ ID NO: 313461 - DNA, 19 bp, Homo sapiens
  siRNA target sequence for G1P3 (NM_002038.2,425-443).
cgtcataggtaatattggt

SEQ ID NO: 313462 - DNA, 19 bp, Homo sapiens
  siRNA target sequence for G1P3 (NM_002038.2,454-472).
gctacgccacccacaagta

SEQ ID NO: 313463 - DNA, 19 bp, Homo sapiens
  siRNA target sequence for ICOS (NM_012092.2,101-119).
caatggttctgccaattat

SEQ ID NO: 313464 - DNA, 19 bp, Homo sapiens
  siRNA target sequence for ICOS (NM_012092.2,137-155).
caacggaggtgtacaaatt

SEQ ID NO: 313465 - DNA, 19 bp, Homo sapiens
  siRNA target sequence for ICOS (NM_012092.2,140-158).
cggaggtgtacaaatttta

SEQ ID NO: 313466 - DNA, 19 bp, Homo sapiens
  siRNA target sequence for ICOS (NM_012092.2,141-159).
ggaggtgtacaaattttat

SEQ ID NO: 313467 - DNA, 19 bp, Homo sapiens
  siRNA target sequence for ICOS (NM_012092.2,147-165).
gtacaaattttatgcaaat

SEQ ID NO: 313468 - DNA, 19 bp, Homo sapiens
  siRNA target sequence for ICOS (NM_012092.2,160-178).
gcaaatatcctgacattgt

SEQ ID NO: 313469 - DNA, 19 bp, Homo sapiens
  siRNA target sequence for ICOS (NM_012092.2,219-237).
ctctgcgatctcactaaga

SEQ ID NO: 313470 - DNA, 19 bp, Homo sapiens
  siRNA target sequence for ICOS (NM_012092.2,221-239).
ctgcgatctcactaagaca

SEQ ID NO: 313471 - DNA, 19 bp, Homo sapiens
  siRNA target sequence for ICOS (NM_012092.2,223-241).
gcgatctcactaagacaaa

SEQ ID NO: 313472 - DNA, 19 bp, Homo sapiens
  siRNA target sequence for ICOS (NM_012092.2,254-272).
cacagtgtccattaagagt

SEQ ID NO: 313473 - DNA, 19 bp, Homo sapiens
  siRNA target sequence for ICOS (NM_012092.2,309-327).
gtctctttttttctataca

SEQ ID NO: 313474 - DNA, 19 bp, Homo sapiens
  siRNA target sequence for ICOS (NM_012092.2,326-344).
caacttggaccattctcat

SEQ ID NO: 313475 - DNA, 19 bp, Homo sapiens
  siRNA target sequence for ICOS (NM_012092.2,336-354).
cattctcatgccaactatt

SEQ ID NO: 313476 - DNA, 19 bp, Homo sapiens
  siRNA target sequence for ICOS (NM_012092.2,340-358).
ctcatgccaactattactt

SEQ ID NO: 313477 - DNA, 19 bp, Homo sapiens
  siRNA target sequence for ICOS (NM_012092.2,342-360).
catgccaactattacttct

SEQ ID NO: 313478 - DNA, 19 bp, Homo sapiens
  siRNA target sequence for ICOS (NM_012092.2,362-380).
caacctatcaatttttgat

SEQ ID NO: 313479 - DNA, 19 bp, Homo sapiens
  siRNA target sequence for ICOS (NM_012092.2,381-399).
cctcctccttttaaagtaa

SEQ ID NO: 313480 - DNA, 19 bp, Homo sapiens
  siRNA target sequence for ICOS (NM_012092.2,497-515).
cattttgggatgcatactt

SEQ ID NO: 313481 - DNA, 19 bp, Homo sapiens
  siRNA target sequence for ICOS (NM_012092.2,558-576).
gaccctaacggtgaataca

SEQ ID NO: 313482 - DNA, 19 bp, Homo sapiens
  siRNA target sequence for ICOS (NM_012092.2,561-579).
cctaacggtgaatacatgt

SEQ ID NO: 313483 - DNA, 19 bp, Homo sapiens
  siRNA target sequence for ICOS (NM_012092.2,562-580).
ctaacggtgaatacatgtt

SEQ ID NO: 313484 - DNA, 19 bp, Homo sapiens
  siRNA target sequence for ICOS (NM_012092.2,596-614).
cacagccaaaaaatctaga

SEQ ID NO: 313485 - DNA, 19 bp, Homo sapiens
  siRNA target sequence for KAAG1 (NM_181337.2,937-955).
gatcgcctcctgaaacgaa

SEQ ID NO: 313486 - DNA, 19 bp, Homo sapiens
  siRNA target sequence for KAAG1 (NM_181337.2,946-964).
ctgaaacgaacgagaaact

SEQ ID NO: 313487 - DNA, 19 bp, Homo sapiens
  siRNA target sequence for NK4 (NM_004221.3,250-268).
gctgaaggcccgaatggta

SEQ ID NO: 313488 - DNA, 19 bp, Homo sapiens
  siRNA target sequence for NK4 (NM_004221.3,251-269).
ctgaaggcccgaatggtaa

SEQ ID NO: 313489 - DNA, 19 bp, Homo sapiens
  siRNA target sequence for NK4 (NM_004221.3,406-424).
ccaggccatagaaagattt

SEQ ID NO: 313490 - DNA, 19 bp, Homo sapiens
  siRNA target sequence for NK4 (NM_004221.3,407-425).
caggccatagaaagatttt

SEQ ID NO: 313491 - DNA, 19 bp, Homo sapiens
  siRNA target sequence for NK4 (NM_004221.3,517-535).
gacagtggcggcttattat

SEQ ID NO: 313492 - DNA, 19 bp, Homo sapiens
  siRNA target sequence for NK4 (NM_004221.3,519-537).
cagtggcggcttattatga

SEQ ID NO: 313493 - DNA, 19 bp, Homo sapiens
  siRNA target sequence for NK4 (NM_004221.3,553-571).
gctcactcctctacttgaa

SEQ ID NO: 313494 - DNA, 19 bp, Homo sapiens
  siRNA target sequence for RAET1E (NM_139165.1,88-106).
cctgtgcgccttcttttgt

SEQ ID NO: 313495 - DNA, 19 bp, Homo sapiens
  siRNA target sequence for RAET1E (NM_139165.1,89-107).
ctgtgcgccttcttttgtt

SEQ ID NO: 313496 - DNA, 19 bp, Homo sapiens
  siRNA target sequence for RAET1E (NM_139165.1,142-160).
gttggtggtcactctcttt

SEQ ID NO: 313497 - DNA, 19 bp, Homo sapiens
  siRNA target sequence for RAET1E (NM_139165.1,209-227).
gtgaagcgcaggtcttctt

SEQ ID NO: 313498 - DNA, 19 bp, Homo sapiens
  siRNA target sequence for RAET1E (NM_139165.1,211-229).
gaagcgcaggtcttcttga

SEQ ID NO: 313499 - DNA, 19 bp, Homo sapiens
  siRNA target sequence for RAET1E (NM_139165.1,214-232).
gcgcaggtcttcttgaata

SEQ ID NO: 313500 - DNA, 19 bp, Homo sapiens
  siRNA target sequence for RAET1E (NM_139165.1,288-306).
cctggggaagaaggtatat

SEQ ID NO: 313501 - DNA, 19 bp, Homo sapiens
  siRNA target sequence for RAET1E (NM_139165.1,369-387).
gctcctttgtgacatcaaa

SEQ ID NO: 313502 - DNA, 19 bp, Homo sapiens
  siRNA target sequence for RAET1E (NM_139165.1,420-438).
gcaagtcgagatgttttgt

SEQ ID NO: 313503 - DNA, 19 bp, Homo sapiens
  siRNA target sequence for RAET1E (NM_139165.1,505-523).
ctctttgacgcaatgaaca

SEQ ID NO: 313504 - DNA, 19 bp, Homo sapiens
  siRNA target sequence for RAET1E (NM_139165.1,527-545).
cctggacagtaattaatca

SEQ ID NO: 313505 - DNA, 19 bp, Homo sapiens
  siRNA target sequence for RAET1E (NM_139165.1,633-651).
ctggctcagggaattctta

SEQ ID NO: 313506 - DNA, 19 bp, Homo sapiens
  siRNA target sequence for RAET1E (NM_139165.1,678-696).
gacagtgtcaccagtaaat

SEQ ID NO: 313507 - DNA, 19 bp, Homo sapiens
  siRNA target sequence for RAET1E (NM_139165.1,688-706).
ccagtaaatgcttcagata

SEQ ID NO: 313508 - DNA, 19 bp, Homo sapiens
  siRNA target sequence for RAET1E (NM_139165.1,689-707).
cagtaaatgcttcagatat

SEQ ID NO: 313509 - DNA, 19 bp, Homo sapiens
  siRNA target sequence for RAET1E (NM_139165.1,703-721).
gatatccactggtcttctt

SEQ ID NO: 313510 - DNA, 19 bp, Homo sapiens
  siRNA target sequence for RAET1E (NM_139165.1,752-770).
gggcattcatcctgttagt

SEQ ID NO: 313511 - DNA, 19 bp, Homo sapiens
  siRNA target sequence for RAET1E (NM_139165.1,753-771).
ggcattcatcctgttagtt

SEQ ID NO: 313512 - DNA, 19 bp, Homo sapiens
  siRNA target sequence for RAET1L (NM_130900.1,12-30).
cgccatcccagctttgctt

SEQ ID NO: 313513 - DNA, 19 bp, Homo sapiens
  siRNA target sequence for SEMA7A (NM_003612.1,238-256).
cgcacacggtgcttttcca

SEQ ID NO: 313514 - DNA, 19 bp, Homo sapiens
  siRNA target sequence for SEMA7A (NM_003612.1,295-313).
gcaaggtctacctctttga

SEQ ID NO: 313515 - DNA, 19 bp, Homo sapiens
  siRNA target sequence for SEMA7A (NM_003612.1,337-355).
ctgtgcgcacggtgaatat

SEQ ID NO: 313516 - DNA, 19 bp, Homo sapiens
  siRNA target sequence for SEMA7A (NM_003612.1,390-408).
gactgcgagaactacatca

SEQ ID NO: 313517 - DNA, 19 bp, Homo sapiens
  siRNA target sequence for SEMA7A (NM_003612.1,548-566).
ctccctggttctgtttgaa

SEQ ID NO: 313518 - DNA, 19 bp, Homo sapiens
  siRNA target sequence for SEMA7A (NM_003612.1,567-585).
ggggacgaggtgtattcca

SEQ ID NO: 313519 - DNA, 19 bp, Homo sapiens
  siRNA target sequence for SEMA7A (NM_003612.1,586-604).
ccatccggaagcaggaata

SEQ ID NO: 313520 - DNA, 19 bp, Homo sapiens
  siRNA target sequence for SEMA7A (NM_003612.1,648-666).
gagctgtacaccagtgata

SEQ ID NO: 313521 - DNA, 19 bp, Homo sapiens
  siRNA target sequence for SEMA7A (NM_003612.1,650-668).
gctgtacaccagtgatact

SEQ ID NO: 313522 - DNA, 19 bp, Homo sapiens
  siRNA target sequence for SEMA7A (NM_003612.1,720-738).
gcttacgatgacaagatct

SEQ ID NO: 313523 - DNA, 19 bp, Homo sapiens
  siRNA target sequence for SEMA7A (NM_003612.1,721-739).
cttacgatgacaagatcta

SEQ ID NO: 313524 - DNA, 19 bp, Homo sapiens
  siRNA target sequence for SEMA7A (NM_003612.1,755-773).
ggacaatcctgacaagaat

SEQ ID NO: 313525 - DNA, 19 bp, Homo sapiens
  siRNA target sequence for SEMA7A (NM_003612.1,849-867).
gtctccaagtggaacactt

SEQ ID NO: 313526 - DNA, 19 bp, Homo sapiens
  siRNA target sequence for SEMA7A (NM_003612.1,851-869).
ctccaagtggaacactttt

SEQ ID NO: 313527 - DNA, 19 bp, Homo sapiens
  siRNA target sequence for SEMA7A (NM_003612.1,973-991).
ccagggtctatggtgtttt

SEQ ID NO: 313528 - DNA, 19 bp, Homo sapiens
  siRNA target sequence for SEMA7A (NM_003612.1,1025-1043).
gtattccctcggtgacatt

SEQ ID NO: 313529 - DNA, 19 bp, Homo sapiens
  siRNA target sequence for SEMA7A (NM_003612.1,1204-1222).
ctctgaagacgccattgtt

SEQ ID NO: 313530 - DNA, 19 bp, Homo sapiens
  siRNA target sequence for SEMA7A (NM_003612.1,1274-1292).
ccacggggagacctttcat

SEQ ID NO: 313531 - DNA, 19 bp, Homo sapiens
  siRNA target sequence for SEMA7A (NM_003612.1,1290-1308).
catgtgctttacctaacta

SEQ ID NO: 313532 - DNA, 19 bp, Homo sapiens
  siRNA target sequence for SEMA7A (NM_003612.1,1356-1374).
cacagcttcgccttcaaca

SEQ ID NO: 313533 - DNA, 19 bp, Homo sapiens
  siRNA target sequence for SEMA7A (NM_003612.1,1594-1612).
ggtcagtgctgcaatccat

SEQ ID NO: 313534 - DNA, 19 bp, Homo sapiens
  siRNA target sequence for SEMA7A (NM_003612.1,1601-1619).
gctgcaatccattaatcca

SEQ ID NO: 313535 - DNA, 19 bp, Homo sapiens
  siRNA target sequence for SEMA7A (NM_003612.1,1662-1680).
gccccactgcagaaggttt

SEQ ID NO: 313536 - DNA, 19 bp, Homo sapiens
  siRNA target sequence for CAMLG (NM_001745.2,241-259).
cggatcatgggctttcaca

SEQ ID NO: 313537 - DNA, 19 bp, Homo sapiens
  siRNA target sequence for CAMLG (NM_001745.2,335-353).
gcgttccttccgtttcaaa

SEQ ID NO: 313538 - DNA, 19 bp, Homo sapiens
  siRNA target sequence for CAMLG (NM_001745.2,404-422).
gtggtgtggccgaggtaaa

SEQ ID NO: 313539 - DNA, 19 bp, Homo sapiens
  siRNA target sequence for CAMLG (NM_001745.2,447-465).
ggactcgttcattaaacca

SEQ ID NO: 313540 - DNA, 19 bp, Homo sapiens
  siRNA target sequence for CAMLG (NM_001745.2,655-673).
gaatttgactcttttcgaa

SEQ ID NO: 313541 - DNA, 19 bp, Homo sapiens
  siRNA target sequence for CAMLG (NM_001745.2,663-681).
ctcttttcgaatatttaga

SEQ ID NO: 313542 - DNA, 19 bp, Homo sapiens
  siRNA target sequence for CAMLG (NM_001745.2,665-683).
cttttcgaatatttagatt

SEQ ID NO: 313543 - DNA, 19 bp, Homo sapiens
  siRNA target sequence for CAMLG (NM_001745.2,714-732).
cagagcttttgtttgcaaa

SEQ ID NO: 313544 - DNA, 19 bp, Homo sapiens
  siRNA target sequence for CAMLG (NM_001745.2,728-746).
gcaaatacttgtccatatt

SEQ ID NO: 313545 - DNA, 19 bp, Homo sapiens
  siRNA target sequence for CAMLG (NM_001745.2,740-758).
ccatatttgctccatttct

SEQ ID NO: 313546 - DNA, 19 bp, Homo sapiens
  siRNA target sequence for CAMLG (NM_001745.2,769-787).
cttgcgtacatgggattat

SEQ ID NO: 313547 - DNA, 19 bp, Homo sapiens
  siRNA target sequence for CAMLG (NM_001745.2,773-791).
cgtacatgggattatacaa

SEQ ID NO: 313548 - DNA, 19 bp, Homo sapiens
  siRNA target sequence for CAMLG (NM_001745.2,857-875).
gaattcctgccgaagtgat

SEQ ID NO: 313549 - DNA, 19 bp, Homo sapiens
  siRNA target sequence for CAMLG (NM_001745.2,865-883).
gccgaagtgataaatcgat

SEQ ID NO: 313550 - DNA, 19 bp, Homo sapiens
  siRNA target sequence for CAMLG (NM_001745.2,873-891).
gataaatcgatcaatggat

SEQ ID NO: 313551 - DNA, 19 bp, Homo sapiens
  siRNA target sequence for CAMLG (NM_001745.2,880-898).
cgatcaatggatacctata

SEQ ID NO: 313552 - DNA, 19 bp, Homo sapiens
  siRNA target sequence for CAMLG (NM_001745.2,899-917).
gcaaaatgggcgaagtctt

SEQ ID NO: 313553 - DNA, 19 bp, Homo sapiens
  siRNA target sequence for CAMLG (NM_001745.2,920-938).
cagatctctgtgtctactt

SEQ ID NO: 313554 - DNA, 19 bp, Homo sapiens
  siRNA target sequence for CAMLG (NM_001745.2,956-974).
gtcatgaactgcttgatta

SEQ ID NO: 313555 - DNA, 19 bp, Homo sapiens
  siRNA target sequence for CAMLG (NM_001745.2,958-976).
catgaactgcttgattatt

SEQ ID NO: 313556 - DNA, 19 bp, Homo sapiens
  siRNA target sequence for CD84 (NM_003874.1,49-67).
ctcagcaccacctatggat

SEQ ID NO: 313557 - DNA, 19 bp, Homo sapiens
  siRNA target sequence for CD84 (NM_003874.1,177-195).
gaaccacggcaagttaaaa

SEQ ID NO: 313558 - DNA, 19 bp, Homo sapiens
  siRNA target sequence for CD84 (NM_003874.1,181-199).
cacggcaagttaaaatcat

SEQ ID NO: 313559 - DNA, 19 bp, Homo sapiens
  siRNA target sequence for CD84 (NM_003874.1,249-267).
gaaacagcacccgtagtta

SEQ ID NO: 313560 - DNA, 19 bp, Homo sapiens
  siRNA target sequence for CD84 (NM_003874.1,253-271).
cagcacccgtagttactgt

SEQ ID NO: 313561 - DNA, 19 bp, Homo sapiens
  siRNA target sequence for CD84 (NM_003874.1,268-286).
ctgtgacccacagaaatta

SEQ ID NO: 313562 - DNA, 19 bp, Homo sapiens
  siRNA target sequence for CD84 (NM_003874.1,274-292).
cccacagaaattattatga

SEQ ID NO: 313563 - DNA, 19 bp, Homo sapiens
  siRNA target sequence for CD84 (NM_003874.1,303-321).
gccttaggtccgaactaca

SEQ ID NO: 313564 - DNA, 19 bp, Homo sapiens
  siRNA target sequence for CD84 (NM_003874.1,304-322).
ccttaggtccgaactacaa

SEQ ID NO: 313565 - DNA, 19 bp, Homo sapiens
  siRNA target sequence for CD84 (NM_003874.1,305-323).
cttaggtccgaactacaat

SEQ ID NO: 313566 - DNA, 19 bp, Homo sapiens
  siRNA target sequence for CD84 (NM_003874.1,411-429).
cgctacaacctgcaaatct

SEQ ID NO: 313567 - DNA, 19 bp, Homo sapiens
  siRNA target sequence for CD84 (NM_003874.1,412-430).
gctacaacctgcaaatcta

SEQ ID NO: 313568 - DNA, 19 bp, Homo sapiens
  siRNA target sequence for CD84 (NM_003874.1,448-466).
caaaaattacacagagttt

SEQ ID NO: 313569 - DNA, 19 bp, Homo sapiens
  siRNA target sequence for CD84 (NM_003874.1,564-582).
gagggtaatgtccttcaaa

SEQ ID NO: 313570 - DNA, 19 bp, Homo sapiens
  siRNA target sequence for CD84 (NM_003874.1,727-745).
gcgtgctggctatgttctt

SEQ ID NO: 313571 - DNA, 19 bp, Homo sapiens
  siRNA target sequence for CD84 (NM_003874.1,728-746).
cgtgctggctatgttcttt

SEQ ID NO: 313572 - DNA, 19 bp, Homo sapiens
  siRNA target sequence for CD84 (NM_003874.1,869-887).
gtccagaatctatgatgaa

SEQ ID NO: 313573 - DNA, 19 bp, Homo sapiens
  siRNA target sequence for LY6E (NM_002346.1,257-275).
gctccgaccaggacaacta

SEQ ID NO: 313574 - DNA, 19 bp, Homo sapiens
  siRNA target sequence for LY6E (NM_002346.1,366-384).
cccagaaggcgtcaatgtt

SEQ ID NO: 313575 - DNA, 19 bp, Homo sapiens
  siRNA target sequence for NOD27 (NM_032206.2,197-215).
cggacacctggcagtcttt

SEQ ID NO: 313576 - DNA, 19 bp, Homo sapiens
  siRNA target sequence for NOD27 (NM_032206.2,199-217).
gacacctggcagtctttca

SEQ ID NO: 313577 - DNA, 19 bp, Homo sapiens
  siRNA target sequence for NOD27 (NM_032206.2,275-293).
gtacttttggctatgatga

SEQ ID NO: 313578 - DNA, 19 bp, Homo sapiens
  siRNA target sequence for NOD27 (NM_032206.2,421-439).
ctagagttggccaagaagt

SEQ ID NO: 313579 - DNA, 19 bp, Homo sapiens
  siRNA target sequence for NOD27 (NM_032206.2,512-530).
ccttccaccaggtctatgt

SEQ ID NO: 313580 - DNA, 19 bp, Homo sapiens
  siRNA target sequence for NOD27 (NM_032206.2,623-641).
gcatctcggacctcttcaa

SEQ ID NO: 313581 - DNA, 19 bp, Homo sapiens
  siRNA target sequence for NOD27 (NM_032206.2,662-680).
cgagggtgaccgtgctttt

SEQ ID NO: 313582 - DNA, 19 bp, Homo sapiens
  siRNA target sequence for NOD27 (NM_032206.2,815-833).
caccgtccgagctcctttt

SEQ ID NO: 313583 - DNA, 19 bp, Homo sapiens
  siRNA target sequence for NOD27 (NM_032206.2,818-836).
cgtccgagctcctttttga

SEQ ID NO: 313584 - DNA, 19 bp, Homo sapiens
  siRNA target sequence for NOD27 (NM_032206.2,819-837).
gtccgagctcctttttgat

SEQ ID NO: 313585 - DNA, 19 bp, Homo sapiens
  siRNA target sequence for NOD27 (NM_032206.2,1086-1104).
ccacatgttgggctttgat

SEQ ID NO: 313586 - DNA, 19 bp, Homo sapiens
  siRNA target sequence for NOD27 (NM_032206.2,1105-1123).
gggccacgggtggaagaat

SEQ ID NO: 313587 - DNA, 19 bp, Homo sapiens
  siRNA target sequence for NOD27 (NM_032206.2,1106-1124).
ggccacgggtggaagaata

SEQ ID NO: 313588 - DNA, 19 bp, Homo sapiens
  siRNA target sequence for NOD27 (NM_032206.2,1107-1125).
gccacgggtggaagaatat

SEQ ID NO: 313589 - DNA, 19 bp, Homo sapiens
  siRNA target sequence for NOD27 (NM_032206.2,1109-1127).
cacgggtggaagaatatgt

SEQ ID NO: 313590 - DNA, 19 bp, Homo sapiens
  siRNA target sequence for NOD27 (NM_032206.2,1405-1423).
gagacagggaaggttatct

SEQ ID NO: 313591 - DNA, 19 bp, Homo sapiens
  siRNA target sequence for NOD27 (NM_032206.2,1409-1427).
cagggaaggttatcttcta

SEQ ID NO: 313592 - DNA, 19 bp, Homo sapiens
  siRNA target sequence for NOD27 (NM_032206.2,1416-1434).
ggttatcttctatgcaaaa

SEQ ID NO: 313593 - DNA, 19 bp, Homo sapiens
  siRNA target sequence for NOD27 (NM_032206.2,1425-1443).
ctatgcaaaagatattgct

SEQ ID NO: 313594 - DNA, 19 bp, Homo sapiens
  siRNA target sequence for NOD27 (NM_032206.2,1442-1460).
ctccacccttgatagcttt

SEQ ID NO: 313595 - DNA, 19 bp, Homo sapiens
  siRNA target sequence for NOD27 (NM_032206.2,1516-1534).
cagcagacaggctatgctt

SEQ ID NO: 313596 - DNA, 19 bp, Homo sapiens
  siRNA target sequence for NOD27 (NM_032206.2,1586-1604).
gccccaaggtgaacaaaga

SEQ ID NO: 313597 - DNA, 19 bp, Homo sapiens
  siRNA target sequence for NOD27 (NM_032206.2,1594-1612).
gtgaacaaagacacactta

SEQ ID NO: 313598 - DNA, 19 bp, Homo sapiens
  siRNA target sequence for NOD27 (NM_032206.2,1818-1836).
gctcacagggccaaaggtt

SEQ ID NO: 313599 - DNA, 19 bp, Homo sapiens
  siRNA target sequence for NOD27 (NM_032206.2,1823-1841).
cagggccaaaggttgtaga

SEQ ID NO: 313600 - DNA, 19 bp, Homo sapiens
  siRNA target sequence for NOD27 (NM_032206.2,2050-2068).
ggctgtgggcagatagaga

SEQ ID NO: 313601 - DNA, 19 bp, Homo sapiens
  siRNA target sequence for NOD27 (NM_032206.2,2052-2070).
ctgtgggcagatagagaat

SEQ ID NO: 313602 - DNA, 19 bp, Homo sapiens
  siRNA target sequence for NOD27 (NM_032206.2,2157-2175).
ggggttagcaggaagtaaa

SEQ ID NO: 313603 - DNA, 19 bp, Homo sapiens
  siRNA target sequence for NOD27 (NM_032206.2,2195-2213).
gccacctggtgaaagcttt

SEQ ID NO: 313604 - DNA, 19 bp, Homo sapiens
  siRNA target sequence for NOD27 (NM_032206.2,3226-3244).
ctgagaggggacaagacaa

SEQ ID NO: 313605 - DNA, 19 bp, Homo sapiens
  siRNA target sequence for NOD27 (NM_032206.2,3544-3562).
ctgctggccaacaccttaa

SEQ ID NO: 313606 - DNA, 19 bp, Homo sapiens
  siRNA target sequence for NOD27 (NM_032206.2,3569-3587).
gtccacgggttaaaaaggt

SEQ ID NO: 313607 - DNA, 19 bp, Homo sapiens
  siRNA target sequence for NOD27 (NM_032206.2,3810-3828).
gcccatctccggtttgctt

SEQ ID NO: 313608 - DNA, 19 bp, Homo sapiens
  siRNA target sequence for NOD27 (NM_032206.2,4222-4240).
ggcagtgtcactgaaatca

SEQ ID NO: 313609 - DNA, 19 bp, Homo sapiens
  siRNA target sequence for NOD27 (NM_032206.2,4406-4424).
gcttgtctcaggttaacct

SEQ ID NO: 313610 - DNA, 19 bp, Homo sapiens
  siRNA target sequence for NOD27 (NM_032206.2,4578-4596).
gctggacttgtctaacaat

SEQ ID NO: 313611 - DNA, 19 bp, Homo sapiens
  siRNA target sequence for NOD27 (NM_032206.2,4581-4599).
ggacttgtctaacaatcaa

SEQ ID NO: 313612 - DNA, 19 bp, Homo sapiens
  siRNA target sequence for NOD27 (NM_032206.2,4582-4600).
gacttgtctaacaatcaat

SEQ ID NO: 313613 - DNA, 19 bp, Homo sapiens
  siRNA target sequence for NOD27 (NM_032206.2,4587-4605).
gtctaacaatcaatttgat

SEQ ID NO: 313614 - DNA, 19 bp, Homo sapiens
  siRNA target sequence for NOD27 (NM_032206.2,4751-4769).
gactgaacaggaacagtat

SEQ ID NO: 313615 - DNA, 19 bp, Homo sapiens
  siRNA target sequence for NOD27 (NM_032206.2,4864-4882).
ggtgtccagcacttagcta

SEQ ID NO: 313616 - DNA, 19 bp, Homo sapiens
  siRNA target sequence for NOD27 (NM_032206.2,5072-5090).
gggtcctacacctaccatt

SEQ ID NO: 313617 - DNA, 19 bp, Homo sapiens
  siRNA target sequence for NOD27 (NM_032206.2,5192-5210).
gggtcctgcgtttctgtat

SEQ ID NO: 313618 - DNA, 19 bp, Homo sapiens
  siRNA target sequence for NOD27 (NM_032206.2,5236-5254).
gacctggtttcctgtaaga

SEQ ID NO: 313619 - DNA, 19 bp, Homo sapiens
  siRNA target sequence for NOD27 (NM_032206.2,5468-5486).
ggtctagcatccaagtcat

SEQ ID NO: 313620 - DNA, 19 bp, Homo sapiens
  siRNA target sequence for NOD27 (NM_032206.2,5482-5500).
gtcatccgcctctggaata

SEQ ID NO: 313621 - DNA, 19 bp, Homo sapiens
  siRNA target sequence for TFF2 (NM_005423.2,274-292).
gtctcagaccgaagaaact

SEQ ID NO: 313622 - DNA, 19 bp, Homo sapiens
  siRNA target sequence for TFF2 (NM_005423.2,391-409).
gtggaagactgccattact

SEQ ID NO: 313623 - DNA, 19 bp, Homo sapiens
  siRNA target sequence for TFF3 (NM_003226.1,173-191).
ggagtgccttggtgtttca

SEQ ID NO: 313624 - DNA, 19 bp, Homo sapiens
  siRNA target sequence for TFF3 (NM_003226.1,174-192).
gagtgccttggtgtttcaa

SEQ ID NO: 313625 - DNA, 19 bp, Homo sapiens
  siRNA target sequence for PSTPIP1 (NM_003978.2,557-575).
ggccagacggagatcaact

SEQ ID NO: 313626 - DNA, 19 bp, Homo sapiens
  siRNA target sequence for PSTPIP1 (NM_003978.2,747-765).
gcaagctgtcgctctacaa

SEQ ID NO: 313627 - DNA, 19 bp, Homo sapiens
  siRNA target sequence for PSTPIP1 (NM_003978.2,917-935).
gaggcagagcgggtataca

SEQ ID NO: 313628 - DNA, 19 bp, Homo sapiens
  siRNA target sequence for PSTPIP1 (NM_003978.2,1148-1166).
gccgacatcgacagtttca

SEQ ID NO: 313629 - DNA, 19 bp, Homo sapiens
  siRNA target sequence for PSTPIP1 (NM_003978.2,1203-1221).
cggtgccctaccagaacta

SEQ ID NO: 313630 - DNA, 19 bp, Homo sapiens
  siRNA target sequence for PSTPIP1 (NM_003978.2,1204-1222).
ggtgccctaccagaactat

SEQ ID NO: 313631 - DNA, 19 bp, Homo sapiens
  siRNA target sequence for PSTPIP1 (NM_003978.2,1209-1227).
cctaccagaactattacga

SEQ ID NO: 313632 - DNA, 19 bp, Homo sapiens
  siRNA target sequence for PSTPIP1 (NM_003978.2,1267-1285).
gccgtcctgcggcatgata

SEQ ID NO: 313633 - DNA, 19 bp, Homo sapiens
  siRNA target sequence for PSTPIP1 (NM_003978.2,1268-1286).
ccgtcctgcggcatgataa

SEQ ID NO: 313634 - DNA, 19 bp, Homo sapiens
  siRNA target sequence for LECT2 (NM_002302.1,253-271).
gcagggccatgggctaata

SEQ ID NO: 313635 - DNA, 19 bp, Homo sapiens
  siRNA target sequence for LECT2 (NM_002302.1,254-272).
cagggccatgggctaatat

SEQ ID NO: 313636 - DNA, 19 bp, Homo sapiens
  siRNA target sequence for LECT2 (NM_002302.1,256-274).
gggccatgggctaatatat

SEQ ID NO: 313637 - DNA, 19 bp, Homo sapiens
  siRNA target sequence for LECT2 (NM_002302.1,258-276).
gccatgggctaatatatgt

SEQ ID NO: 313638 - DNA, 19 bp, Homo sapiens
  siRNA target sequence for LECT2 (NM_002302.1,281-299).
gcaagtcttccaatgagat

SEQ ID NO: 313639 - DNA, 19 bp, Homo sapiens
  siRNA target sequence for LECT2 (NM_002302.1,404-422).
caccattcactggaatgat

SEQ ID NO: 313640 - DNA, 19 bp, Homo sapiens
  siRNA target sequence for LECT2 (NM_002302.1,407-425).
cattcactggaatgattgt

SEQ ID NO: 313641 - DNA, 19 bp, Homo sapiens
  siRNA target sequence for LECT2 (NM_002302.1,450-468).
caagaatgctatcaataat

SEQ ID NO: 313642 - DNA, 19 bp, Homo sapiens
  siRNA target sequence for LECT2 (NM_002302.1,462-480).
caataatggtgttcgaata

SEQ ID NO: 313643 - DNA, 19 bp, Homo sapiens
  siRNA target sequence for LECT2 (NM_002302.1,490-508).
ggtttttgtgtcaaaatgt

SEQ ID NO: 313644 - DNA, 19 bp, Homo sapiens
  siRNA target sequence for LECT2 (NM_002302.1,513-531).
cattaagccaattaagtat

SEQ ID NO: 313645 - DNA, 19 bp, Homo sapiens
  siRNA target sequence for LECT2 (NM_002302.1,573-591).
gcccttgcagaaagtttat

SEQ ID NO: 313646 - DNA, 19 bp, Homo sapiens
  siRNA target sequence for LECT2 (NM_002302.1,586-604).
gtttatcctggcatacaat

SEQ ID NO: 313647 - DNA, 19 bp, Homo sapiens
  siRNA target sequence for COCH (NM_004086.1,133-151).
gagccgctcccattgctat

SEQ ID NO: 313648 - DNA, 19 bp, Homo sapiens
  siRNA target sequence for COCH (NM_004086.1,137-155).
cgctcccattgctatcaca

SEQ ID NO: 313649 - DNA, 19 bp, Homo sapiens
  siRNA target sequence for COCH (NM_004086.1,138-156).
gctcccattgctatcacat

SEQ ID NO: 313650 - DNA, 19 bp, Homo sapiens
  siRNA target sequence for COCH (NM_004086.1,147-165).
gctatcacatgttttacca

SEQ ID NO: 313651 - DNA, 19 bp, Homo sapiens
  siRNA target sequence for COCH (NM_004086.1,214-232).
gctgccctcttgaggaatt

SEQ ID NO: 313652 - DNA, 19 bp, Homo sapiens
  siRNA target sequence for COCH (NM_004086.1,218-236).
ccctcttgaggaattctct

SEQ ID NO: 313653 - DNA, 19 bp, Homo sapiens
  siRNA target sequence for COCH (NM_004086.1,233-251).
ctctgtgtatgggaacata

SEQ ID NO: 313654 - DNA, 19 bp, Homo sapiens
  siRNA target sequence for COCH (NM_004086.1,239-257).
gtatgggaacatagtatat

SEQ ID NO: 313655 - DNA, 19 bp, Homo sapiens
  siRNA target sequence for COCH (NM_004086.1,258-276).
gcttctgtatcgagcatat

SEQ ID NO: 313656 - DNA, 19 bp, Homo sapiens
  siRNA target sequence for COCH (NM_004086.1,288-306).
gtccacaggggagtaatca

SEQ ID NO: 313657 - DNA, 19 bp, Homo sapiens
  siRNA target sequence for COCH (NM_004086.1,318-336).
ggacctgtacgagtctata

SEQ ID NO: 313658 - DNA, 19 bp, Homo sapiens
  siRNA target sequence for COCH (NM_004086.1,339-357).
ctacctggtcgagaaaact

SEQ ID NO: 313659 - DNA, 19 bp, Homo sapiens
  siRNA target sequence for COCH (NM_004086.1,379-397).
gcatccagtctcaaatgct

SEQ ID NO: 313660 - DNA, 19 bp, Homo sapiens
  siRNA target sequence for COCH (NM_004086.1,384-402).
cagtctcaaatgctttcta

SEQ ID NO: 313661 - DNA, 19 bp, Homo sapiens
  siRNA target sequence for COCH (NM_004086.1,490-508).
caggtaaacgactaaagaa

SEQ ID NO: 313662 - DNA, 19 bp, Homo sapiens
  siRNA target sequence for COCH (NM_004086.1,526-544).
ctggcaataaagattgtaa

SEQ ID NO: 313663 - DNA, 19 bp, Homo sapiens
  siRNA target sequence for COCH (NM_004086.1,561-579).
ctgattgatggaagcttta

SEQ ID NO: 313664 - DNA, 19 bp, Homo sapiens
  siRNA target sequence for COCH (NM_004086.1,585-603).
gggcagcgccgatttaatt

SEQ ID NO: 313665 - DNA, 19 bp, Homo sapiens
  siRNA target sequence for COCH (NM_004086.1,586-604).
ggcagcgccgatttaattt

SEQ ID NO: 313666 - DNA, 19 bp, Homo sapiens
  siRNA target sequence for COCH (NM_004086.1,587-605).
gcagcgccgatttaattta

SEQ ID NO: 313667 - DNA, 19 bp, Homo sapiens
  siRNA target sequence for COCH (NM_004086.1,591-609).
cgccgatttaatttacaga

SEQ ID NO: 313668 - DNA, 19 bp, Homo sapiens
  siRNA target sequence for COCH (NM_004086.1,592-610).
gccgatttaatttacagaa

SEQ ID NO: 313669 - DNA, 19 bp, Homo sapiens
  siRNA target sequence for COCH (NM_004086.1,661-679).
cacatgtgggccttgttca

SEQ ID NO: 313670 - DNA, 19 bp, Homo sapiens
  siRNA target sequence for COCH (NM_004086.1,762-780).
ggtttcagagggggtaatt

SEQ ID NO: 313671 - DNA, 19 bp, Homo sapiens
  siRNA target sequence for COCH (NM_004086.1,767-785).
cagagggggtaattccaat

SEQ ID NO: 313672 - DNA, 19 bp, Homo sapiens
  siRNA target sequence for COCH (NM_004086.1,800-818).
gaagcatactgctcagaaa

SEQ ID NO: 313673 - DNA, 19 bp, Homo sapiens
  siRNA target sequence for COCH (NM_004086.1,863-881).
ggtggtggtatttattgat

SEQ ID NO: 313674 - DNA, 19 bp, Homo sapiens
  siRNA target sequence for COCH (NM_004086.1,929-947).
gtttggtgtcaatgtattt

SEQ ID NO: 313675 - DNA, 19 bp, Homo sapiens
  siRNA target sequence for COCH (NM_004086.1,1026-1044).
cggaataatggcttcttct

SEQ ID NO: 313676 - DNA, 19 bp, Homo sapiens
  siRNA target sequence for COCH (NM_004086.1,1063-1081).
ggtttggcaccacaaaata

SEQ ID NO: 313677 - DNA, 19 bp, Homo sapiens
  siRNA target sequence for COCH (NM_004086.1,1068-1086).
ggcaccacaaaatacgtaa

SEQ ID NO: 313678 - DNA, 19 bp, Homo sapiens
  siRNA target sequence for COCH (NM_004086.1,1069-1087).
gcaccacaaaatacgtaaa

SEQ ID NO: 313679 - DNA, 19 bp, Homo sapiens
  siRNA target sequence for COCH (NM_004086.1,1133-1151).
caagacctgttataactca

SEQ ID NO: 313680 - DNA, 19 bp, Homo sapiens
  siRNA target sequence for COCH (NM_004086.1,1183-1201).
gcagtgttggagatagcaa

SEQ ID NO: 313681 - DNA, 19 bp, Homo sapiens
  siRNA target sequence for COCH (NM_004086.1,1184-1202).
cagtgttggagatagcaat

SEQ ID NO: 313682 - DNA, 19 bp, Homo sapiens
  siRNA target sequence for COCH (NM_004086.1,1236-1254).
gccaagacttttgaaatct

SEQ ID NO: 313683 - DNA, 19 bp, Homo sapiens
  siRNA target sequence for COCH (NM_004086.1,1299-1317).
cagcgcacggagttcagtt

SEQ ID NO: 313684 - DNA, 19 bp, Homo sapiens
  siRNA target sequence for COCH (NM_004086.1,1310-1328).
gttcagtttcactgactat

SEQ ID NO: 313685 - DNA, 19 bp, Homo sapiens
  siRNA target sequence for COCH (NM_004086.1,1393-1411).
ctggtgatgccatttcctt

SEQ ID NO: 313686 - DNA, 19 bp, Homo sapiens
  siRNA target sequence for COCH (NM_004086.1,1524-1542).
catgatgcaggaatcacta

SEQ ID NO: 313687 - DNA, 19 bp, Homo sapiens
  siRNA target sequence for COCH (NM_004086.1,1583-1601).
gaaagatatggcttctaaa

SEQ ID NO: 313688 - DNA, 19 bp, Homo sapiens
  siRNA target sequence for COCH (NM_004086.1,1608-1626).
gagtctcatgctttcttca

SEQ ID NO: 313689 - DNA, 19 bp, Homo sapiens
  siRNA target sequence for COCH (NM_004086.1,1637-1655).
cacaggattagaaccaatt

SEQ ID NO: 313690 - DNA, 19 bp, Homo sapiens
  siRNA target sequence for COCH (NM_004086.1,1641-1659).
ggattagaaccaattgttt

SEQ ID NO: 313691 - DNA, 19 bp, Homo sapiens
  siRNA target sequence for DFNA5 (NM_004403.1,109-127).
gacctgattgcagtatcaa

SEQ ID NO: 313692 - DNA, 19 bp, Homo sapiens
  siRNA target sequence for DFNA5 (NM_004403.1,111-129).
cctgattgcagtatcaaat

SEQ ID NO: 313693 - DNA, 19 bp, Homo sapiens
  siRNA target sequence for DFNA5 (NM_004403.1,132-150).
gaatgactctgataagtta

SEQ ID NO: 313694 - DNA, 19 bp, Homo sapiens
  siRNA target sequence for DFNA5 (NM_004403.1,227-245).
cccttggcgatgtactcat

SEQ ID NO: 313695 - DNA, 19 bp, Homo sapiens
  siRNA target sequence for DFNA5 (NM_004403.1,228-246).
ccttggcgatgtactcata

SEQ ID NO: 313696 - DNA, 19 bp, Homo sapiens
  siRNA target sequence for DFNA5 (NM_004403.1,233-251).
gcgatgtactcatagaaga

SEQ ID NO: 313697 - DNA, 19 bp, Homo sapiens
  siRNA target sequence for DFNA5 (NM_004403.1,276-294).
ggagtcggactttgtgaaa

SEQ ID NO: 313698 - DNA, 19 bp, Homo sapiens
  siRNA target sequence for DFNA5 (NM_004403.1,277-295).
gagtcggactttgtgaaat

SEQ ID NO: 313699 - DNA, 19 bp, Homo sapiens
  siRNA target sequence for DFNA5 (NM_004403.1,291-309).
gaaatacgagggcaagttt

SEQ ID NO: 313700 - DNA, 19 bp, Homo sapiens
  siRNA target sequence for DFNA5 (NM_004403.1,387-405).
gagccagtcttcatttgga

SEQ ID NO: 313701 - DNA, 19 bp, Homo sapiens
  siRNA target sequence for DFNA5 (NM_004403.1,448-466).
gactctgccgagagaacaa

SEQ ID NO: 313702 - DNA, 19 bp, Homo sapiens
  siRNA target sequence for DFNA5 (NM_004403.1,450-468).
ctctgccgagagaacaata

SEQ ID NO: 313703 - DNA, 19 bp, Homo sapiens
  siRNA target sequence for DFNA5 (NM_004403.1,452-470).
ctgccgagagaacaataaa

SEQ ID NO: 313704 - DNA, 19 bp, Homo sapiens
  siRNA target sequence for DFNA5 (NM_004403.1,455-473).
ccgagagaacaataaatct

SEQ ID NO: 313705 - DNA, 19 bp, Homo sapiens
  siRNA target sequence for DFNA5 (NM_004403.1,514-532).
gaggtcctgtgcgttttga

SEQ ID NO: 313706 - DNA, 19 bp, Homo sapiens
  siRNA target sequence for DFNA5 (NM_004403.1,516-534).
ggtcctgtgcgttttgaca

SEQ ID NO: 313707 - DNA, 19 bp, Homo sapiens
  siRNA target sequence for DFNA5 (NM_004403.1,524-542).
gcgttttgacacagaagat

SEQ ID NO: 313708 - DNA, 19 bp, Homo sapiens
  siRNA target sequence for DFNA5 (NM_004403.1,709-727).
gcctacggtgtcattgagt

SEQ ID NO: 313709 - DNA, 19 bp, Homo sapiens
  siRNA target sequence for DFNA5 (NM_004403.1,710-728).
cctacggtgtcattgagtt

SEQ ID NO: 313710 - DNA, 19 bp, Homo sapiens
  siRNA target sequence for DFNA5 (NM_004403.1,711-729).
ctacggtgtcattgagtta

SEQ ID NO: 313711 - DNA, 19 bp, Homo sapiens
  siRNA target sequence for DFNA5 (NM_004403.1,716-734).
gtgtcattgagttatacgt

SEQ ID NO: 313712 - DNA, 19 bp, Homo sapiens
  siRNA target sequence for DFNA5 (NM_004403.1,839-857).
gagagtttgcattcataga

SEQ ID NO: 313713 - DNA, 19 bp, Homo sapiens
  siRNA target sequence for DFNA5 (NM_004403.1,841-859).
gagtttgcattcatagaca

SEQ ID NO: 313714 - DNA, 19 bp, Homo sapiens
  siRNA target sequence for DFNA5 (NM_004403.1,868-886).
gctgcgcatgggatatctt

SEQ ID NO: 313715 - DNA, 19 bp, Homo sapiens
  siRNA target sequence for DFNA5 (NM_004403.1,892-910).
gatggaccattaagtgttt

SEQ ID NO: 313716 - DNA, 19 bp, Homo sapiens
  siRNA target sequence for DFNA5 (NM_004403.1,925-943).
ctgctcctggagaggaatt

SEQ ID NO: 313717 - DNA, 19 bp, Homo sapiens
  siRNA target sequence for DFNA5 (NM_004403.1,996-1014).
cttccaggcggtcctattt

SEQ ID NO: 313718 - DNA, 19 bp, Homo sapiens
  siRNA target sequence for DFNA5 (NM_004403.1,999-1017).
ccaggcggtcctatttgat

SEQ ID NO: 313719 - DNA, 19 bp, Homo sapiens
  siRNA target sequence for DFNA5 (NM_004403.1,1002-1020).
ggcggtcctatttgatgat

SEQ ID NO: 313720 - DNA, 19 bp, Homo sapiens
  siRNA target sequence for DFNA5 (NM_004403.1,1004-1022).
cggtcctatttgatgatga

SEQ ID NO: 313721 - DNA, 19 bp, Homo sapiens
  siRNA target sequence for DFNA5 (NM_004403.1,1337-1355).
gagtatctgatcttgaaga

SEQ ID NO: 313722 - DNA, 19 bp, Homo sapiens
  siRNA target sequence for DFNA5 (NM_004403.1,1361-1379).
ccttgactcccctgaaaga

SEQ ID NO: 313723 - DNA, 19 bp, Homo sapiens
  siRNA target sequence for DFNA5 (NM_004403.1,1362-1380).
cttgactcccctgaaagat

SEQ ID NO: 313724 - DNA, 19 bp, Homo sapiens
  siRNA target sequence for DFNA5 (NM_004403.1,1395-1413).
gattgtgcagcgcttgttt

SEQ ID NO: 313725 - DNA, 19 bp, Homo sapiens
  siRNA target sequence for DSPP (NM_014208.1,193-211).
gagagacatgtcgaaaaat

SEQ ID NO: 313726 - DNA, 19 bp, Homo sapiens
  siRNA target sequence for DSPP (NM_014208.1,202-220).
gtcgaaaaatccatgaatt

SEQ ID NO: 313727 - DNA, 19 bp, Homo sapiens
  siRNA target sequence for DSPP (NM_014208.1,229-247).
ctagcaagatcaaatgtgt

SEQ ID NO: 313728 - DNA, 19 bp, Homo sapiens
  siRNA target sequence for DSPP (NM_014208.1,269-287).
ccagtggaaccatcaaaga

SEQ ID NO: 313729 - DNA, 19 bp, Homo sapiens
  siRNA target sequence for DSPP (NM_014208.1,366-384).
ctctaagtgggcagaagta

SEQ ID NO: 313730 - DNA, 19 bp, Homo sapiens
  siRNA target sequence for DSPP (NM_014208.1,473-491).
catatggtcatgatggaat

SEQ ID NO: 313731 - DNA, 19 bp, Homo sapiens
  siRNA target sequence for DSPP (NM_014208.1,531-549).
gggacaagtaagcatcatt

SEQ ID NO: 313732 - DNA, 19 bp, Homo sapiens
  siRNA target sequence for DSPP (NM_014208.1,533-551).
gacaagtaagcatcattga

SEQ ID NO: 313733 - DNA, 19 bp, Homo sapiens
  siRNA target sequence for DSPP (NM_014208.1,623-641).
gcgatgcaggtcacaatga

SEQ ID NO: 313734 - DNA, 19 bp, Homo sapiens
  siRNA target sequence for DSPP (NM_014208.1,648-666).
cgctgttgtccaagaagat

SEQ ID NO: 313735 - DNA, 19 bp, Homo sapiens
  siRNA target sequence for DSPP (NM_014208.1,676-694).
gtagctggaagcaataaca

SEQ ID NO: 313736 - DNA, 19 bp, Homo sapiens
  siRNA target sequence for DSPP (NM_014208.1,687-705).
caataacagtacagacaat

SEQ ID NO: 313737 - DNA, 19 bp, Homo sapiens
  siRNA target sequence for DSPP (NM_014208.1,738-756).
cgagggtaatacaagtgaa

SEQ ID NO: 313738 - DNA, 19 bp, Homo sapiens
  siRNA target sequence for DSPP (NM_014208.1,742-760).
ggtaatacaagtgaaataa

SEQ ID NO: 313739 - DNA, 19 bp, Homo sapiens
  siRNA target sequence for DSPP (NM_014208.1,888-906).
cgagggttctggtgatgat

SEQ ID NO: 313740 - DNA, 19 bp, Homo sapiens
  siRNA target sequence for DSPP (NM_014208.1,969-987).
ggaccatgggaaagaagat

SEQ ID NO: 313741 - DNA, 19 bp, Homo sapiens
  siRNA target sequence for DSPP (NM_014208.1,1006-1024).
ggtcaaaattcggatagta

SEQ ID NO: 313742 - DNA, 19 bp, Homo sapiens
  siRNA target sequence for DSPP (NM_014208.1,1007-1025).
gtcaaaattcggatagtaa

SEQ ID NO: 313743 - DNA, 19 bp, Homo sapiens
  siRNA target sequence for DSPP (NM_014208.1,1047-1065).
caaagaagatccccataat

SEQ ID NO: 313744 - DNA, 19 bp, Homo sapiens
  siRNA target sequence for DSPP (NM_014208.1,1098-1116).
ggagaattctgctggtatt

SEQ ID NO: 313745 - DNA, 19 bp, Homo sapiens
  siRNA target sequence for DSPP (NM_014208.1,1155-1173).
gaagctcaaccatagagaa

SEQ ID NO: 313746 - DNA, 19 bp, Homo sapiens
  siRNA target sequence for DSPP (NM_014208.1,1176-1194).
caaacgcgtagaaaataga

SEQ ID NO: 313747 - DNA, 19 bp, Homo sapiens
  siRNA target sequence for DSPP (NM_014208.1,1180-1198).
cgcgtagaaaatagaatca

SEQ ID NO: 313748 - DNA, 19 bp, Homo sapiens
  siRNA target sequence for DSPP (NM_014208.1,1232-1250).
gccaagataagggaataga

SEQ ID NO: 313749 - DNA, 19 bp, Homo sapiens
  siRNA target sequence for DSPP (NM_014208.1,1308-1326).
cgaaggtaaagaggataaa

SEQ ID NO: 313750 - DNA, 19 bp, Homo sapiens
  siRNA target sequence for DSPP (NM_014208.1,1327-1345).
ggacaacatggaatgatct

SEQ ID NO: 313751 - DNA, 19 bp, Homo sapiens
  siRNA target sequence for DSPP (NM_014208.1,1328-1346).
gacaacatggaatgatctt

SEQ ID NO: 313752 - DNA, 19 bp, Homo sapiens
  siRNA target sequence for DSPP (NM_014208.1,1390-1408).
gaaggacctggccaaaaat

SEQ ID NO: 313753 - DNA, 19 bp, Homo sapiens
  siRNA target sequence for DSPP (NM_014208.1,1581-1599).
ccgaggagatgcttcttat

SEQ ID NO: 313754 - DNA, 19 bp, Homo sapiens
  siRNA target sequence for DSPP (NM_014208.1,1582-1600).
cgaggagatgcttcttata

SEQ ID NO: 313755 - DNA, 19 bp, Homo sapiens
  siRNA target sequence for DSPP (NM_014208.1,1670-1688).
gcacatcagacactaataa

SEQ ID NO: 313756 - DNA, 19 bp, Homo sapiens
  siRNA target sequence for DSPP (NM_014208.1,1671-1689).
cacatcagacactaataat

SEQ ID NO: 313757 - DNA, 19 bp, Homo sapiens
  siRNA target sequence for DSPP (NM_014208.1,1743-1761).
cagtggcaaaggtaaatca

SEQ ID NO: 313758 - DNA, 19 bp, Homo sapiens
  siRNA target sequence for DSPP (NM_014208.1,1747-1765).
ggcaaaggtaaatcagata

SEQ ID NO: 313759 - DNA, 19 bp, Homo sapiens
  siRNA target sequence for ITM2B (NM_021999.2,325-343).
gcaaggacccagatgatgt

SEQ ID NO: 313760 - DNA, 19 bp, Homo sapiens
  siRNA target sequence for ITM2B (NM_021999.2,404-422).
gcttgcaggtgttattcta

SEQ ID NO: 313761 - DNA, 19 bp, Homo sapiens
  siRNA target sequence for ITM2B (NM_021999.2,420-438).
ctaggaggagcatacttgt

SEQ ID NO: 313762 - DNA, 19 bp, Homo sapiens
  siRNA target sequence for ITM2B (NM_021999.2,427-445).
gagcatacttgtacaaata

SEQ ID NO: 313763 - DNA, 19 bp, Homo sapiens
  siRNA target sequence for ITM2B (NM_021999.2,459-477).
ccagatgacgtgtactact

SEQ ID NO: 313764 - DNA, 19 bp, Homo sapiens
  siRNA target sequence for ITM2B (NM_021999.2,468-486).
gtgtactactgtggaataa

SEQ ID NO: 313765 - DNA, 19 bp, Homo sapiens
  siRNA target sequence for ITM2B (NM_021999.2,676-694).
cctatttagatcttaacct

SEQ ID NO: 313766 - DNA, 19 bp, Homo sapiens
  siRNA target sequence for ITM2B (NM_021999.2,708-726).
gtgatccctctgaacactt

SEQ ID NO: 313767 - DNA, 19 bp, Homo sapiens
  siRNA target sequence for ITM2B (NM_021999.2,756-774).
gagttacttattaacatca

SEQ ID NO: 313768 - DNA, 19 bp, Homo sapiens
  siRNA target sequence for ITM2B (NM_021999.2,791-809).
gcctcagtcctatctgatt

SEQ ID NO: 313769 - DNA, 19 bp, Homo sapiens
  siRNA target sequence for ITM2B (NM_021999.2,810-828).
catgagcacatggttatta

SEQ ID NO: 313770 - DNA, 19 bp, Homo sapiens
  siRNA target sequence for ITM2B (NM_021999.2,857-875).
gggtttctttatttatcga

SEQ ID NO: 313771 - DNA, 19 bp, Homo sapiens
  siRNA target sequence for ITM2B (NM_021999.2,876-894).
ctgtgtcatgacaaggaaa

SEQ ID NO: 313772 - DNA, 19 bp, Homo sapiens
  siRNA target sequence for ITM2B (NM_021999.2,880-898).
gtcatgacaaggaaactta

SEQ ID NO: 313773 - DNA, 19 bp, Homo sapiens
  siRNA target sequence for ITM2B (NM_021999.2,905-923).
gcaacgcagagaaactatt

SEQ ID NO: 313774 - DNA, 19 bp, Homo sapiens
  siRNA target sequence for ITM2B (NM_021999.2,913-931).
gagaaactattaaaggtat

SEQ ID NO: 313775 - DNA, 19 bp, Homo sapiens
  siRNA target sequence for ITM2B (NM_021999.2,959-977).
cgcaattcggcattttgaa

SEQ ID NO: 313776 - DNA, 19 bp, Homo sapiens
  siRNA target sequence for ITM2B (NM_021999.2,987-1005).
gccgtggaaactttaattt

SEQ ID NO: 313777 - DNA, 19 bp, Homo sapiens
  siRNA target sequence for ITM2B (NM_021999.2,989-1007).
cgtggaaactttaatttgt

SEQ ID NO: 313778 - DNA, 19 bp, Homo sapiens
  siRNA target sequence for KCNE1L (NM_012282.2,310-328).
ggcgacgacgcctatctct

SEQ ID NO: 313779 - DNA, 19 bp, Homo sapiens
  siRNA target sequence for KCNE1L (NM_012282.2,311-329).
gcgacgacgcctatctcta

SEQ ID NO: 313780 - DNA, 19 bp, Homo sapiens
  siRNA target sequence for NOG (NM_005450.2,654-672).
ccatgccgagcgagatcaa

SEQ ID NO: 313781 - DNA, 19 bp, Homo sapiens
  siRNA target sequence for NOG (NM_005450.2,655-673).
catgccgagcgagatcaaa

SEQ ID NO: 313782 - DNA, 19 bp, Homo sapiens
  siRNA target sequence for NOG (NM_005450.2,731-749).
ctgcggaggaagttacaga

SEQ ID NO: 313783 - DNA, 19 bp, Homo sapiens
  siRNA target sequence for NOG (NM_005450.2,753-771).
ggctgtggtcgcagacatt

SEQ ID NO: 313784 - DNA, 19 bp, Homo sapiens
  siRNA target sequence for NOG (NM_005450.2,755-773).
ctgtggtcgcagacattct

SEQ ID NO: 313785 - DNA, 19 bp, Homo sapiens
  siRNA target sequence for OTOR (NM_020157.2,91-109).
gtgctgtgcatggaatatt

SEQ ID NO: 313786 - DNA, 19 bp, Homo sapiens
  siRNA target sequence for OTOR (NM_020157.2,93-111).
gctgtgcatggaatattta

SEQ ID NO: 313787 - DNA, 19 bp, Homo sapiens
  siRNA target sequence for OTOR (NM_020157.2,94-112).
ctgtgcatggaatatttat

SEQ ID NO: 313788 - DNA, 19 bp, Homo sapiens
  siRNA target sequence for OTOR (NM_020157.2,147-165).
gatgagtgtgtctatacta

SEQ ID NO: 313789 - DNA, 19 bp, Homo sapiens
  siRNA target sequence for OTOR (NM_020157.2,174-192).
gctagtgctcaagaagatt

SEQ ID NO: 313790 - DNA, 19 bp, Homo sapiens
  siRNA target sequence for OTOR (NM_020157.2,175-193).
ctagtgctcaagaagatta

SEQ ID NO: 313791 - DNA, 19 bp, Homo sapiens
  siRNA target sequence for OTOR (NM_020157.2,201-219).
ccggactgtagattcatta

SEQ ID NO: 313792 - DNA, 19 bp, Homo sapiens
  siRNA target sequence for OTOR (NM_020157.2,202-220).
cggactgtagattcattaa

SEQ ID NO: 313793 - DNA, 19 bp, Homo sapiens
  siRNA target sequence for OTOR (NM_020157.2,206-224).
ctgtagattcattaacgtt

SEQ ID NO: 313794 - DNA, 19 bp, Homo sapiens
  siRNA target sequence for OTOR (NM_020157.2,237-255).
cagatctatgtgtactcaa

SEQ ID NO: 313795 - DNA, 19 bp, Homo sapiens
  siRNA target sequence for OTOR (NM_020157.2,399-417).
cccaccacggatattgact

SEQ ID NO: 313796 - DNA, 19 bp, Homo sapiens
  siRNA target sequence for OTOR (NM_020157.2,400-418).
ccaccacggatattgactt

SEQ ID NO: 313797 - DNA, 19 bp, Homo sapiens
  siRNA target sequence for OTOR (NM_020157.2,403-421).
ccacggatattgacttctt

SEQ ID NO: 313798 - DNA, 19 bp, Homo sapiens
  siRNA target sequence for TBL1X (NM_005647.2,656-674).
ctcgctggcgcctcttcat

SEQ ID NO: 313799 - DNA, 19 bp, Homo sapiens
  siRNA target sequence for TBL1X (NM_005647.2,714-732).
cagtcttgcaccactttca

SEQ ID NO: 313800 - DNA, 19 bp, Homo sapiens
  siRNA target sequence for TBL1X (NM_005647.2,980-998).
gaggccgagatcagtatca

SEQ ID NO: 313801 - DNA, 19 bp, Homo sapiens
  siRNA target sequence for TBL1X (NM_005647.2,1493-1511).
catgacgtcccgagtaaca

SEQ ID NO: 313802 - DNA, 19 bp, Homo sapiens
  siRNA target sequence for TBL1X (NM_005647.2,1529-1547).
gactggaataccaatggaa

SEQ ID NO: 313803 - DNA, 19 bp, Homo sapiens
  siRNA target sequence for TBL1X (NM_005647.2,2107-2125).
gcgactgtgggacatagaa

SEQ ID NO: 313804 - DNA, 19 bp, Homo sapiens
  siRNA target sequence for TMC1 (NM_138691.2,666-684).
gaaacggaccagagatgtt

SEQ ID NO: 313805 - DNA, 19 bp, Homo sapiens
  siRNA target sequence for TMC1 (NM_138691.2,670-688).
cggaccagagatgttatca

SEQ ID NO: 313806 - DNA, 19 bp, Homo sapiens
  siRNA target sequence for TMC1 (NM_138691.2,672-690).
gaccagagatgttatcaat

SEQ ID NO: 313807 - DNA, 19 bp, Homo sapiens
  siRNA target sequence for TMC1 (NM_138691.2,819-837).
ggcagagttagatgagaaa

SEQ ID NO: 313808 - DNA, 19 bp, Homo sapiens
  siRNA target sequence for TMC1 (NM_138691.2,956-974).
gaaaacggtggtttgcatt

SEQ ID NO: 313809 - DNA, 19 bp, Homo sapiens
  siRNA target sequence for TMC1 (NM_138691.2,961-979).
cggtggtttgcatttaaga

SEQ ID NO: 313810 - DNA, 19 bp, Homo sapiens
  siRNA target sequence for TMC1 (NM_138691.2,1065-1083).
ggctattgaaagtcagttt

SEQ ID NO: 313811 - DNA, 19 bp, Homo sapiens
  siRNA target sequence for TMC1 (NM_138691.2,1088-1106).
cctcagtggcctcatactt

SEQ ID NO: 313812 - DNA, 19 bp, Homo sapiens
  siRNA target sequence for TMC1 (NM_138691.2,1121-1139).
ggatgtatggagtcaatat

SEQ ID NO: 313813 - DNA, 19 bp, Homo sapiens
  siRNA target sequence for TMC1 (NM_138691.2,1197-1215).
gccatatggcagtttacct

SEQ ID NO: 313814 - DNA, 19 bp, Homo sapiens
  siRNA target sequence for TMC1 (NM_138691.2,1242-1260).
ggcatcggcagcaaacttt

SEQ ID NO: 313815 - DNA, 19 bp, Homo sapiens
  siRNA target sequence for TMC1 (NM_138691.2,1262-1280).
gtgtgttgtacgacttcaa

SEQ ID NO: 313816 - DNA, 19 bp, Homo sapiens
  siRNA target sequence for TMC1 (NM_138691.2,1278-1296).
caatggtttggcacaatat

SEQ ID NO: 313817 - DNA, 19 bp, Homo sapiens
  siRNA target sequence for TMC1 (NM_138691.2,1314-1332).
ctattatgacaataaacga

SEQ ID NO: 313818 - DNA, 19 bp, Homo sapiens
  siRNA target sequence for TMC1 (NM_138691.2,1323-1341).
caataaacgaacaattgga

SEQ ID NO: 313819 - DNA, 19 bp, Homo sapiens
  siRNA target sequence for TMC1 (NM_138691.2,1355-1373).
ggttgccgctctcctattt

SEQ ID NO: 313820 - DNA, 19 bp, Homo sapiens
  siRNA target sequence for TMC1 (NM_138691.2,1356-1374).
gttgccgctctcctatttt

SEQ ID NO: 313821 - DNA, 19 bp, Homo sapiens
  siRNA target sequence for TMC1 (NM_138691.2,1359-1377).
gccgctctcctattttcta

SEQ ID NO: 313822 - DNA, 19 bp, Homo sapiens
  siRNA target sequence for TMC1 (NM_138691.2,1361-1379).
cgctctcctattttctagt

SEQ ID NO: 313823 - DNA, 19 bp, Homo sapiens
  siRNA target sequence for TMC1 (NM_138691.2,1381-1399).
gggattatgtgcattggat

SEQ ID NO: 313824 - DNA, 19 bp, Homo sapiens
  siRNA target sequence for TMC1 (NM_138691.2,1382-1400).
ggattatgtgcattggata

SEQ ID NO: 313825 - DNA, 19 bp, Homo sapiens
  siRNA target sequence for TMC1 (NM_138691.2,1453-1471).
ggtggagatgacaacactt

SEQ ID NO: 313826 - DNA, 19 bp, Homo sapiens
  siRNA target sequence for TMC1 (NM_138691.2,1512-1530).
gatcggcaatcctgaaaca

SEQ ID NO: 313827 - DNA, 19 bp, Homo sapiens
  siRNA target sequence for TMC1 (NM_138691.2,1523-1541).
ctgaaacagcagacaacaa

SEQ ID NO: 313828 - DNA, 19 bp, Homo sapiens
  siRNA target sequence for TMC1 (NM_138691.2,1529-1547).
cagcagacaacaaatttaa

SEQ ID NO: 313829 - DNA, 19 bp, Homo sapiens
  siRNA target sequence for TMC1 (NM_138691.2,1531-1549).
gcagacaacaaatttaatt

SEQ ID NO: 313830 - DNA, 19 bp, Homo sapiens
  siRNA target sequence for TMC1 (NM_138691.2,1534-1552).
gacaacaaatttaattcta

SEQ ID NO: 313831 - DNA, 19 bp, Homo sapiens
  siRNA target sequence for TMC1 (NM_138691.2,1606-1624).
gaaaacgtccacttgatca

SEQ ID NO: 313832 - DNA, 19 bp, Homo sapiens
  siRNA target sequence for TMC1 (NM_138691.2,1674-1692).
gagtggatacctcatcttt

SEQ ID NO: 313833 - DNA, 19 bp, Homo sapiens
  siRNA target sequence for TMC1 (NM_138691.2,1701-1719).
gaagcgatcccaggaattt

SEQ ID NO: 313834 - DNA, 19 bp, Homo sapiens
  siRNA target sequence for TMC1 (NM_138691.2,1762-1780).
gaaatgaacatggttatgt

SEQ ID NO: 313835 - DNA, 19 bp, Homo sapiens
  siRNA target sequence for TMC1 (NM_138691.2,1843-1861).
cctctcatcgctttgaaat

SEQ ID NO: 313836 - DNA, 19 bp, Homo sapiens
  siRNA target sequence for TMC1 (NM_138691.2,1862-1880).
ggctactgggacgcatttt

SEQ ID NO: 313837 - DNA, 19 bp, Homo sapiens
  siRNA target sequence for TMC1 (NM_138691.2,1863-1881).
gctactgggacgcattttt

SEQ ID NO: 313838 - DNA, 19 bp, Homo sapiens
  siRNA target sequence for TMC1 (NM_138691.2,1895-1913).
gcaatttatacgtatttat

SEQ ID NO: 313839 - DNA, 19 bp, Homo sapiens
  siRNA target sequence for TMC1 (NM_138691.2,1905-1923).
cgtatttattcttgcatta

SEQ ID NO: 313840 - DNA, 19 bp, Homo sapiens
  siRNA target sequence for TMC1 (NM_138691.2,1927-1945).
gatgagattaacaacaaga

SEQ ID NO: 313841 - DNA, 19 bp, Homo sapiens
  siRNA target sequence for TMC1 (NM_138691.2,2007-2025).
ctacaatgcatcattctct

SEQ ID NO: 313842 - DNA, 19 bp, Homo sapiens
  siRNA target sequence for TMC1 (NM_138691.2,2033-2051).
gcactggaccacccttttt

SEQ ID NO: 313843 - DNA, 19 bp, Homo sapiens
  siRNA target sequence for TMC1 (NM_138691.2,2036-2054).
ctggaccacccttttttgt

SEQ ID NO: 313844 - DNA, 19 bp, Homo sapiens
  siRNA target sequence for TMC1 (NM_138691.2,2188-2206).
gtgaggttttgcaattatt

SEQ ID NO: 313845 - DNA, 19 bp, Homo sapiens
  siRNA target sequence for TMC1 (NM_138691.2,2216-2234).
gggacttggagtatggata

SEQ ID NO: 313846 - DNA, 19 bp, Homo sapiens
  siRNA target sequence for TMC1 (NM_138691.2,2217-2235).
ggacttggagtatggatat

SEQ ID NO: 313847 - DNA, 19 bp, Homo sapiens
  siRNA target sequence for TMC1 (NM_138691.2,2220-2238).
cttggagtatggatatcct

SEQ ID NO: 313848 - DNA, 19 bp, Homo sapiens
  siRNA target sequence for TMC1 (NM_138691.2,2237-2255).
cttcatacaccgaattcga

SEQ ID NO: 313849 - DNA, 19 bp, Homo sapiens
  siRNA target sequence for TMC1 (NM_138691.2,2269-2287).
gtcctcgctctgatcttca

SEQ ID NO: 313850 - DNA, 19 bp, Homo sapiens
  siRNA target sequence for TMC1 (NM_138691.2,2331-2349).
cccaggcatcaatatcctt

SEQ ID NO: 313851 - DNA, 19 bp, Homo sapiens
  siRNA target sequence for TMC1 (NM_138691.2,2385-2403).
cgttatgtgctgcaatgtt

SEQ ID NO: 313852 - DNA, 19 bp, Homo sapiens
  siRNA target sequence for TMC1 (NM_138691.2,2425-2443).
gcttccagatcaaataact

SEQ ID NO: 313853 - DNA, 19 bp, Homo sapiens
  siRNA target sequence for TMC1 (NM_138691.2,2426-2444).
cttccagatcaaataactt

SEQ ID NO: 313854 - DNA, 19 bp, Homo sapiens
  siRNA target sequence for TMC1 (NM_138691.2,2480-2498).
ccacaatgcctgtcttgta

SEQ ID NO: 313855 - DNA, 19 bp, Homo sapiens
  siRNA target sequence for TMC1 (NM_138691.2,2483-2501).
caatgcctgtcttgtacat

SEQ ID NO: 313856 - DNA, 19 bp, Homo sapiens
  siRNA target sequence for TMC1 (NM_138691.2,2511-2529).
cctcccaccatcttttgat

SEQ ID NO: 313857 - DNA, 19 bp, Homo sapiens
  siRNA target sequence for TMC1 (NM_138691.2,2514-2532).
cccaccatcttttgattgt

SEQ ID NO: 313858 - DNA, 19 bp, Homo sapiens
  siRNA target sequence for TMC1 (NM_138691.2,2664-2682).
gatggttttggccatctat

SEQ ID NO: 313859 - DNA, 19 bp, Homo sapiens
  siRNA target sequence for USH3A (NM_052995.2,451-469).
gcatccacgtcaatgtcat

SEQ ID NO: 313860 - DNA, 19 bp, Homo sapiens
  siRNA target sequence for USH3A (NM_052995.2,452-470).
catccacgtcaatgtcatt

SEQ ID NO: 313861 - DNA, 19 bp, Homo sapiens
  siRNA target sequence for USH3A (NM_052995.2,456-474).
cacgtcaatgtcattctct

SEQ ID NO: 313862 - DNA, 19 bp, Homo sapiens
  siRNA target sequence for USH3A (NM_052995.2,507-525).
gggacagccttcttcatgt

SEQ ID NO: 313863 - DNA, 19 bp, Homo sapiens
  siRNA target sequence for USH3A (NM_052995.2,511-529).
cagccttcttcatgtacaa

SEQ ID NO: 313864 - DNA, 19 bp, Homo sapiens
  siRNA target sequence for USH3A (NM_052995.2,521-539).
catgtacaatgcttttgga

SEQ ID NO: 313865 - DNA, 19 bp, Homo sapiens
  siRNA target sequence for USH3A (NM_052995.2,606-624).
ggctgtcttgtcatgatat

SEQ ID NO: 313866 - DNA, 19 bp, Homo sapiens
  siRNA target sequence for USH3A (NM_052995.2,653-671).
cctctcagaaaaaattgca

SEQ ID NO: 313867 - DNA, 19 bp, Homo sapiens
  siRNA target sequence for USH3A (NM_052995.2,684-702).
gggacttatgtctacaaaa

SEQ ID NO: 313868 - DNA, 19 bp, Homo sapiens
  siRNA target sequence for USH3A (NM_052995.2,705-723).
caaagtgaaaaatatacca

SEQ ID NO: 313869 - DNA, 19 bp, Homo sapiens
  siRNA target sequence for USH3A (NM_174878.2,294-312).
gccaagccaacagaagaaa

SEQ ID NO: 313870 - DNA, 19 bp, Homo sapiens
  siRNA target sequence for USH3A (NM_174878.2,378-396).
gacaccgttgtggatcaaa

SEQ ID NO: 313871 - DNA, 19 bp, Homo sapiens
  siRNA target sequence for USH3A (NM_174878.2,528-546).
gccctttcggttctcattt

SEQ ID NO: 313872 - DNA, 19 bp, Homo sapiens
  siRNA target sequence for GCPHLP (NM_152401.1,106-124).
gcaggatcccaatgaagat

SEQ ID NO: 313873 - DNA, 19 bp, Homo sapiens
  siRNA target sequence for GCPHLP (NM_152401.1,109-127).
ggatcccaatgaagataca

SEQ ID NO: 313874 - DNA, 19 bp, Homo sapiens
  siRNA target sequence for GCPHLP (NM_152401.1,328-346).
gcggttacaggaatggaaa

SEQ ID NO: 313875 - DNA, 19 bp, Homo sapiens
  siRNA target sequence for GCPHLP (NM_152401.1,406-424).
gaatgaagtcacaaatgca

SEQ ID NO: 313876 - DNA, 19 bp, Homo sapiens
  siRNA target sequence for GCPHLP (NM_152401.1,428-446).
gaagatgtgtgggttataa

SEQ ID NO: 313877 - DNA, 19 bp, Homo sapiens
  siRNA target sequence for GCPHLP (NM_152401.1,436-454).
gtgggttataattcatcta

SEQ ID NO: 313878 - DNA, 19 bp, Homo sapiens
  siRNA target sequence for GCPHLP (NM_152401.1,465-483).
gcatcccaatgtgtttgtt

SEQ ID NO: 313879 - DNA, 19 bp, Homo sapiens
  siRNA target sequence for GCPHLP (NM_152401.1,484-502).
ggttaaccagcatcttagt

SEQ ID NO: 313880 - DNA, 19 bp, Homo sapiens
  siRNA target sequence for GCPHLP (NM_152401.1,490-508).
ccagcatcttagtcttcta

SEQ ID NO: 313881 - DNA, 19 bp, Homo sapiens
  siRNA target sequence for GCPHLP (NM_152401.1,544-562).
catcgtgaatagctgtatt

SEQ ID NO: 313882 - DNA, 19 bp, Homo sapiens
  siRNA target sequence for GCPHLP (NM_152401.1,563-581).
caacactaccatgacaatt

SEQ ID NO: 313883 - DNA, 19 bp, Homo sapiens
  siRNA target sequence for GCPHLP (NM_152401.1,568-586).
ctaccatgacaattgttta

SEQ ID NO: 313884 - DNA, 19 bp, Homo sapiens
  siRNA target sequence for GCPHLP (NM_152401.1,571-589).
ccatgacaattgtttacca

SEQ ID NO: 313885 - DNA, 19 bp, Homo sapiens
  siRNA target sequence for GCPHLP (NM_152401.1,572-590).
catgacaattgtttaccaa

SEQ ID NO: 313886 - DNA, 19 bp, Homo sapiens
  siRNA target sequence for GCPHLP (NM_152401.1,577-595).
caattgtttaccaacaatt

SEQ ID NO: 313887 - DNA, 19 bp, Homo sapiens
  siRNA target sequence for GCPHLP (NM_152401.1,582-600).
gtttaccaacaatttttgt

SEQ ID NO: 313888 - DNA, 19 bp, Homo sapiens
  siRNA target sequence for GCPHLP (NM_152401.1,587-605).
ccaacaatttttgtgtata

SEQ ID NO: 313889 - DNA, 19 bp, Homo sapiens
  siRNA target sequence for GCPHLP (NM_152401.1,695-713).
gaagttggagcaatacaga

SEQ ID NO: 313890 - DNA, 19 bp, Homo sapiens
  siRNA target sequence for GCPHLP (NM_152401.1,701-719).
ggagcaatacagactgatt

SEQ ID NO: 313891 - DNA, 19 bp, Homo sapiens
  siRNA target sequence for GCPHLP (NM_152401.1,702-720).
gagcaatacagactgattt

SEQ ID NO: 313892 - DNA, 19 bp, Homo sapiens
  siRNA target sequence for GCPHLP (NM_152401.1,797-815).
gatagctccaacagtgata

SEQ ID NO: 313893 - DNA, 19 bp, Homo sapiens
  siRNA target sequence for UNC119 (NM_005148.2,329-347).
ctttgtcaggtttaagatt

SEQ ID NO: 313894 - DNA, 19 bp, Homo sapiens
  siRNA target sequence for UNC119 (NM_005148.2,363-381).
ggcactgtcctctttgaaa

SEQ ID NO: 313895 - DNA, 19 bp, Homo sapiens
  siRNA target sequence for UNC119 (NM_005148.2,525-543).
gacaagcctgtcaacaact

SEQ ID NO: 313896 - DNA, 19 bp, Homo sapiens
  siRNA target sequence for UNC119 (NM_005148.2,569-587).
ccgcaaccagctactcaaa

SEQ ID NO: 313897 - DNA, 19 bp, Homo sapiens
  siRNA target sequence for UNC119 (NM_005148.2,634-652).
cctgcgagcacatttacga

SEQ ID NO: 313898 - DNA, 19 bp, Homo sapiens
  siRNA target sequence for UNC119 (NM_005148.2,741-759).
cggctggtgatgcacaata

SEQ ID NO: 313899 - DNA, 19 bp, Homo sapiens
  siRNA target sequence for UNC119 (NM_005148.2,742-760).
ggctggtgatgcacaataa

SEQ ID NO: 313900 - DNA, 19 bp, Homo sapiens
  siRNA target sequence for UNC119 (NM_005148.2,752-770).
gcacaataaagcagactat

SEQ ID NO: 313901 - DNA, 19 bp, Homo sapiens
  siRNA target sequence for SNN (NM_003498.3,371-389).
gaccgtgcgtggagagaaa

SEQ ID NO: 313902 - DNA, 19 bp, Homo sapiens
  siRNA target sequence for ARR3 (NM_004312.1,188-206).
gtcgaaagttgtttgtcat

SEQ ID NO: 313903 - DNA, 19 bp, Homo sapiens
  siRNA target sequence for ARR3 (NM_004312.1,260-278).
cgttccgaaaagatctgta

SEQ ID NO: 313904 - DNA, 19 bp, Homo sapiens
  siRNA target sequence for ARR3 (NM_004312.1,261-279).
gttccgaaaagatctgtat

SEQ ID NO: 313905 - DNA, 19 bp, Homo sapiens
  siRNA target sequence for ARR3 (NM_004312.1,537-555).
gctggttgtccggaaagta

SEQ ID NO: 313906 - DNA, 19 bp, Homo sapiens
  siRNA target sequence for ARR3 (NM_004312.1,540-558).
ggttgtccggaaagtacaa

SEQ ID NO: 313907 - DNA, 19 bp, Homo sapiens
  siRNA target sequence for ARR3 (NM_004312.1,541-559).
gttgtccggaaagtacaat

SEQ ID NO: 313908 - DNA, 19 bp, Homo sapiens
  siRNA target sequence for ARR3 (NM_004312.1,679-697).
cccatctctgtcaatgttt

SEQ ID NO: 313909 - DNA, 19 bp, Homo sapiens
  siRNA target sequence for ARR3 (NM_004312.1,909-927).
ggatggcaaacttaagcat

SEQ ID NO: 313910 - DNA, 19 bp, Homo sapiens
  siRNA target sequence for ARR3 (NM_004312.1,914-932).
gcaaacttaagcatgaaga

SEQ ID NO: 313911 - DNA, 19 bp, Homo sapiens
  siRNA target sequence for ARR3 (NM_004312.1,939-957).
cctggcctctagcacaatt

SEQ ID NO: 313912 - DNA, 19 bp, Homo sapiens
  siRNA target sequence for ARR3 (NM_004312.1,940-958).
ctggcctctagcacaatta

SEQ ID NO: 313913 - DNA, 19 bp, Homo sapiens
  siRNA target sequence for ARR3 (NM_004312.1,945-963).
ctctagcacaattattaga

SEQ ID NO: 313914 - DNA, 19 bp, Homo sapiens
  siRNA target sequence for ARR3 (NM_004312.1,962-980).
gaccgggaatggacaaaga

SEQ ID NO: 313915 - DNA, 19 bp, Homo sapiens
  siRNA target sequence for ARR3 (NM_004312.1,1127-1145).
gctctgaggacatagtcat

SEQ ID NO: 313916 - DNA, 19 bp, Homo sapiens
  siRNA target sequence for OPA3 (NM_025136.1,119-137).
ccgcttgccaaccgtatta

SEQ ID NO: 313917 - DNA, 19 bp, Homo sapiens
  siRNA target sequence for OPA3 (NM_025136.1,120-138).
cgcttgccaaccgtattaa

SEQ ID NO: 313918 - DNA, 19 bp, Homo sapiens
  siRNA target sequence for OPA3 (NM_025136.1,150-168).
gccgaagcgagttcttcaa

SEQ ID NO: 313919 - DNA, 19 bp, Homo sapiens
  siRNA target sequence for OPA3 (NM_025136.1,309-327).
gcgaagccaccatcttcat

SEQ ID NO: 313920 - DNA, 19 bp, Homo sapiens
  siRNA target sequence for OPA3 (NM_025136.1,575-593).
gtgcctgcgtccaagaaat

SEQ ID NO: 313921 - DNA, 19 bp, Homo sapiens
  siRNA target sequence for PROL4 (NM_007244.1,72-90).
cagataatgatgtgaacta

SEQ ID NO: 313922 - DNA, 19 bp, Homo sapiens
  siRNA target sequence for PROL4 (NM_007244.1,264-282).
ctcccccacctccttttca

SEQ ID NO: 313923 - DNA, 19 bp, Homo sapiens
  siRNA target sequence for PROM1 (NM_006017.1,76-94).
gtgcgggaactccttttca

SEQ ID NO: 313924 - DNA, 19 bp, Homo sapiens
  siRNA target sequence for PROM1 (NM_006017.1,119-137).
gctcctaaggcttggaatt

SEQ ID NO: 313925 - DNA, 19 bp, Homo sapiens
  siRNA target sequence for PROM1 (NM_006017.1,120-138).
ctcctaaggcttggaatta

SEQ ID NO: 313926 - DNA, 19 bp, Homo sapiens
  siRNA target sequence for PROM1 (NM_006017.1,146-164).
cctgcaacaaattatgaga

SEQ ID NO: 313927 - DNA, 19 bp, Homo sapiens
  siRNA target sequence for PROM1 (NM_006017.1,185-203).
ggacccattggcattctct

SEQ ID NO: 313928 - DNA, 19 bp, Homo sapiens
  siRNA target sequence for PROM1 (NM_006017.1,186-204).
gacccattggcattctctt

SEQ ID NO: 313929 - DNA, 19 bp, Homo sapiens
  siRNA target sequence for PROM1 (NM_006017.1,190-208).
cattggcattctctttgaa

SEQ ID NO: 313930 - DNA, 19 bp, Homo sapiens
  siRNA target sequence for PROM1 (NM_006017.1,209-227).
ctagtgcatatctttctct

SEQ ID NO: 313931 - DNA, 19 bp, Homo sapiens
  siRNA target sequence for PROM1 (NM_006017.1,242-260).
cgtgatttcccagaagata

SEQ ID NO: 313932 - DNA, 19 bp, Homo sapiens
  siRNA target sequence for PROM1 (NM_006017.1,333-351).
gtctaaagattgtctacta

SEQ ID NO: 313933 - DNA, 19 bp, Homo sapiens
  siRNA target sequence for PROM1 (NM_006017.1,384-402).
ggctgctgtttattattct

SEQ ID NO: 313934 - DNA, 19 bp, Homo sapiens
  siRNA target sequence for PROM1 (NM_006017.1,407-425).
cctctggtggggtatttct

SEQ ID NO: 313935 - DNA, 19 bp, Homo sapiens
  siRNA target sequence for PROM1 (NM_006017.1,408-426).
ctctggtggggtatttctt

SEQ ID NO: 313936 - DNA, 19 bp, Homo sapiens
  siRNA target sequence for PROM1 (NM_006017.1,410-428).
ctggtggggtatttctttt

SEQ ID NO: 313937 - DNA, 19 bp, Homo sapiens
  siRNA target sequence for PROM1 (NM_006017.1,469-487).
ccagcgacagaaggaaaat

SEQ ID NO: 313938 - DNA, 19 bp, Homo sapiens
  siRNA target sequence for PROM1 (NM_006017.1,492-510).
ccttcctgaggaaatgctt

SEQ ID NO: 313939 - DNA, 19 bp, Homo sapiens
  siRNA target sequence for PROM1 (NM_006017.1,517-535).
ctccctgttggtgatttgt

SEQ ID NO: 313940 - DNA, 19 bp, Homo sapiens
  siRNA target sequence for PROM1 (NM_006017.1,572-590).
gcaaatcaccaggtaagaa

SEQ ID NO: 313941 - DNA, 19 bp, Homo sapiens
  siRNA target sequence for PROM1 (NM_006017.1,583-601).
ggtaagaacccggatcaaa

SEQ ID NO: 313942 - DNA, 19 bp, Homo sapiens
  siRNA target sequence for PROM1 (NM_006017.1,609-627).
ggaaactggcagatagcaa

SEQ ID NO: 313943 - DNA, 19 bp, Homo sapiens
  siRNA target sequence for PROM1 (NM_006017.1,614-632).
ctggcagatagcaatttca

SEQ ID NO: 313944 - DNA, 19 bp, Homo sapiens
  siRNA target sequence for PROM1 (NM_006017.1,637-655).
cttgcgaactctcttgaat

SEQ ID NO: 313945 - DNA, 19 bp, Homo sapiens
  siRNA target sequence for PROM1 (NM_006017.1,640-658).
gcgaactctcttgaatgaa

SEQ ID NO: 313946 - DNA, 19 bp, Homo sapiens
  siRNA target sequence for PROM1 (NM_006017.1,722-740).
gatctgaacagtatcaatt

SEQ ID NO: 313947 - DNA, 19 bp, Homo sapiens
  siRNA target sequence for PROM1 (NM_006017.1,768-786).
gactgagacccaacatcat

SEQ ID NO: 313948 - DNA, 19 bp, Homo sapiens
  siRNA target sequence for PROM1 (NM_006017.1,791-809).
gttcttgatgagattaagt

SEQ ID NO: 313949 - DNA, 19 bp, Homo sapiens
  siRNA target sequence for PROM1 (NM_006017.1,871-889).
gagcttgcaccaacaaagt

SEQ ID NO: 313950 - DNA, 19 bp, Homo sapiens
  siRNA target sequence for PROM1 (NM_006017.1,1004-1022).
ctaagccagctgaatagca

SEQ ID NO: 313951 - DNA, 19 bp, Homo sapiens
  siRNA target sequence for PROM1 (NM_006017.1,1047-1065).
ccgtggatgcagaacttga

SEQ ID NO: 313952 - DNA, 19 bp, Homo sapiens
  siRNA target sequence for PROM1 (NM_006017.1,1055-1073).
gcagaacttgacaacgtta

SEQ ID NO: 313953 - DNA, 19 bp, Homo sapiens
  siRNA target sequence for PROM1 (NM_006017.1,1058-1076).
gaacttgacaacgttaata

SEQ ID NO: 313954 - DNA, 19 bp, Homo sapiens
  siRNA target sequence for PROM1 (NM_006017.1,1105-1123).
ggtccaacagggctatcaa

SEQ ID NO: 313955 - DNA, 19 bp, Homo sapiens
  siRNA target sequence for PROM1 (NM_006017.1,1106-1124).
gtccaacagggctatcaat

SEQ ID NO: 313956 - DNA, 19 bp, Homo sapiens
  siRNA target sequence for PROM1 (NM_006017.1,1114-1132).
gggctatcaatcccttaat

SEQ ID NO: 313957 - DNA, 19 bp, Homo sapiens
  siRNA target sequence for PROM1 (NM_006017.1,1116-1134).
gctatcaatcccttaatga

SEQ ID NO: 313958 - DNA, 19 bp, Homo sapiens
  siRNA target sequence for PROM1 (NM_006017.1,1167-1185).
ctgtcgtagcaggtatcaa

SEQ ID NO: 313959 - DNA, 19 bp, Homo sapiens
  siRNA target sequence for PROM1 (NM_006017.1,1179-1197).
gtatcaaaagggtcttgaa

SEQ ID NO: 313960 - DNA, 19 bp, Homo sapiens
  siRNA target sequence for PROM1 (NM_006017.1,1190-1208).
gtcttgaattccattggtt

SEQ ID NO: 313961 - DNA, 19 bp, Homo sapiens
  siRNA target sequence for PROM1 (NM_006017.1,1195-1213).
gaattccattggttcagat

SEQ ID NO: 313962 - DNA, 19 bp, Homo sapiens
  siRNA target sequence for PROM1 (NM_006017.1,1200-1218).
ccattggttcagatatcga

SEQ ID NO: 313963 - DNA, 19 bp, Homo sapiens
  siRNA target sequence for PROM1 (NM_006017.1,1206-1224).
gttcagatatcgacaatgt

SEQ ID NO: 313964 - DNA, 19 bp, Homo sapiens
  siRNA target sequence for PROM1 (NM_006017.1,1233-1251).
gtcttcctattcaggatat

SEQ ID NO: 313965 - DNA, 19 bp, Homo sapiens
  siRNA target sequence for PROM1 (NM_006017.1,1311-1329).
ctacattggaagagtatga

SEQ ID NO: 313966 - DNA, 19 bp, Homo sapiens
  siRNA target sequence for PROM1 (NM_006017.1,1372-1390).
gaccctcatcgtgattttt

SEQ ID NO: 313967 - DNA, 19 bp, Homo sapiens
  siRNA target sequence for PROM1 (NM_006017.1,1374-1392).
ccctcatcgtgatttttta

SEQ ID NO: 313968 - DNA, 19 bp, Homo sapiens
  siRNA target sequence for PROM1 (NM_006017.1,1376-1394).
ctcatcgtgattttttact

SEQ ID NO: 313969 - DNA, 19 bp, Homo sapiens
  siRNA target sequence for PROM1 (NM_006017.1,1549-1567).
ctttgtctttggtgcaaat

SEQ ID NO: 313970 - DNA, 19 bp, Homo sapiens
  siRNA target sequence for PROM1 (NM_006017.1,1589-1607).
ccttacacgagcaaggaat

SEQ ID NO: 313971 - DNA, 19 bp, Homo sapiens
  siRNA target sequence for PROM1 (NM_006017.1,1621-1639).
ggatacaccctacttacta

SEQ ID NO: 313972 - DNA, 19 bp, Homo sapiens
  siRNA target sequence for PROM1 (NM_006017.1,1622-1640).
gatacaccctacttactaa

SEQ ID NO: 313973 - DNA, 19 bp, Homo sapiens
  siRNA target sequence for PROM1 (NM_006017.1,1626-1644).
caccctacttactaaatga

SEQ ID NO: 313974 - DNA, 19 bp, Homo sapiens
  siRNA target sequence for PROM1 (NM_006017.1,1811-1829).
ggaagcataagcagtgaat

SEQ ID NO: 313975 - DNA, 19 bp, Homo sapiens
  siRNA target sequence for PROM1 (NM_006017.1,1812-1830).
gaagcataagcagtgaatt

SEQ ID NO: 313976 - DNA, 19 bp, Homo sapiens
  siRNA target sequence for PROM1 (NM_006017.1,1836-1854).
gtctgaaggtaaatcttaa

SEQ ID NO: 313977 - DNA, 19 bp, Homo sapiens
  siRNA target sequence for PROM1 (NM_006017.1,1872-1890).
cagcaggaagaaaaaacct

SEQ ID NO: 313978 - DNA, 19 bp, Homo sapiens
  siRNA target sequence for PROM1 (NM_006017.1,1901-1919).
gctgcttgtggaatagaca

SEQ ID NO: 313979 - DNA, 19 bp, Homo sapiens
  siRNA target sequence for PROM1 (NM_006017.1,1963-1981).
cgcaggagtgaatctttta

SEQ ID NO: 313980 - DNA, 19 bp, Homo sapiens
  siRNA target sequence for PROM1 (NM_006017.1,1964-1982).
gcaggagtgaatcttttat

SEQ ID NO: 313981 - DNA, 19 bp, Homo sapiens
  siRNA target sequence for PROM1 (NM_006017.1,1967-1985).
ggagtgaatcttttatcat

SEQ ID NO: 313982 - DNA, 19 bp, Homo sapiens
  siRNA target sequence for PROM1 (NM_006017.1,1968-1986).
gagtgaatcttttatcatt

SEQ ID NO: 313983 - DNA, 19 bp, Homo sapiens
  siRNA target sequence for PROM1 (NM_006017.1,2083-2101).
gcaacgagtccttcctata

SEQ ID NO: 313984 - DNA, 19 bp, Homo sapiens
  siRNA target sequence for PROM1 (NM_006017.1,2090-2108).
gtccttcctatagaacaat

SEQ ID NO: 313985 - DNA, 19 bp, Homo sapiens
  siRNA target sequence for PROM1 (NM_006017.1,2105-2123).
caatcactgagcactctat

SEQ ID NO: 313986 - DNA, 19 bp, Homo sapiens
  siRNA target sequence for PROM1 (NM_006017.1,2109-2127).
cactgagcactctatacca

SEQ ID NO: 313987 - DNA, 19 bp, Homo sapiens
  siRNA target sequence for PROM1 (NM_006017.1,2111-2129).
ctgagcactctataccaaa

SEQ ID NO: 313988 - DNA, 19 bp, Homo sapiens
  siRNA target sequence for PROM1 (NM_006017.1,2144-2162).
caacgcacagggaatggat

SEQ ID NO: 313989 - DNA, 19 bp, Homo sapiens
  siRNA target sequence for PROM1 (NM_006017.1,2148-2166).
gcacagggaatggattgtt

SEQ ID NO: 313990 - DNA, 19 bp, Homo sapiens
  siRNA target sequence for PROM1 (NM_006017.1,2167-2185).
ggagagagtaactaggatt

SEQ ID NO: 313991 - DNA, 19 bp, Homo sapiens
  siRNA target sequence for PROM1 (NM_006017.1,2170-2188).
gagagtaactaggattcta

SEQ ID NO: 313992 - DNA, 19 bp, Homo sapiens
  siRNA target sequence for PROM1 (NM_006017.1,2209-2227).
gaacttcatcacaaacaat

SEQ ID NO: 313993 - DNA, 19 bp, Homo sapiens
  siRNA target sequence for PROM1 (NM_006017.1,2260-2278).
gtatgggagaacaataata

SEQ ID NO: 313994 - DNA, 19 bp, Homo sapiens
  siRNA target sequence for PROM1 (NM_006017.1,2264-2282).
gggagaacaataataggat

SEQ ID NO: 313995 - DNA, 19 bp, Homo sapiens
  siRNA target sequence for PROM1 (NM_006017.1,2265-2283).
ggagaacaataataggata

SEQ ID NO: 313996 - DNA, 19 bp, Homo sapiens
  siRNA target sequence for PROM1 (NM_006017.1,2268-2286).
gaacaataataggatattt

SEQ ID NO: 313997 - DNA, 19 bp, Homo sapiens
  siRNA target sequence for PROM1 (NM_006017.1,2305-2323).
gatcgagttctctatcagt

SEQ ID NO: 313998 - DNA, 19 bp, Homo sapiens
  siRNA target sequence for PROM1 (NM_006017.1,2348-2366).
gtggccaccgctctagata

SEQ ID NO: 313999 - DNA, 19 bp, Homo sapiens
  siRNA target sequence for PROM1 (NM_006017.1,2350-2368).
ggccaccgctctagatact

SEQ ID NO: 314000 - DNA, 19 bp, Homo sapiens
  siRNA target sequence for PROM1 (NM_006017.1,2405-2423).
cccttgaatttgttttggt

SEQ ID NO: 314001 - DNA, 19 bp, Homo sapiens
  siRNA target sequence for PROM1 (NM_006017.1,2422-2440).
gtttggcataggaaaagct

SEQ ID NO: 314002 - DNA, 19 bp, Homo sapiens
  siRNA target sequence for PROM1 (NM_006017.1,2472-2490).
cggtaaaactggctaagta

SEQ ID NO: 314003 - DNA, 19 bp, Homo sapiens
  siRNA target sequence for PROM1 (NM_006017.1,2515-2533).
cgtgtacgatgatgttgaa

SEQ ID NO: 314004 - DNA, 19 bp, Homo sapiens
  siRNA target sequence for PROM1 (NM_006017.1,2518-2536).
gtacgatgatgttgaaact

SEQ ID NO: 314005 - DNA, 19 bp, Homo sapiens
  siRNA target sequence for PROM1 (NM_006017.1,2521-2539).
cgatgatgttgaaactata

SEQ ID NO: 314006 - DNA, 19 bp, Homo sapiens
  siRNA target sequence for PROM1 (NM_006017.1,2595-2613).
gtattcacaatcctgttat

SEQ ID NO: 314007 - DNA, 19 bp, Homo sapiens
  siRNA target sequence for PROM1 (NM_006017.1,2600-2618).
cacaatcctgttatgacaa

SEQ ID NO: 314008 - DNA, 19 bp, Homo sapiens
  siRNA target sequence for RS1 (NM_000330.1,64-82).
gaagccacattgggattat

SEQ ID NO: 314009 - DNA, 19 bp, Homo sapiens
  siRNA target sequence for RS1 (NM_000330.1,67-85).
gccacattgggattatcgt

SEQ ID NO: 314010 - DNA, 19 bp, Homo sapiens
  siRNA target sequence for RS1 (NM_000330.1,103-121).
gaggacccctggtaccaaa

SEQ ID NO: 314011 - DNA, 19 bp, Homo sapiens
  siRNA target sequence for RS1 (NM_000330.1,108-126).
cccctggtaccaaaaagca

SEQ ID NO: 314012 - DNA, 19 bp, Homo sapiens
  siRNA target sequence for RS1 (NM_000330.1,176-194).
ccacctccttggactgtat

SEQ ID NO: 314013 - DNA, 19 bp, Homo sapiens
  siRNA target sequence for RS1 (NM_000330.1,177-195).
cacctccttggactgtata

SEQ ID NO: 314014 - DNA, 19 bp, Homo sapiens
  siRNA target sequence for RS1 (NM_000330.1,180-198).
ctccttggactgtatacca

SEQ ID NO: 314015 - DNA, 19 bp, Homo sapiens
  siRNA target sequence for RS1 (NM_000330.1,197-215).
cagaatgcccatatcacaa

SEQ ID NO: 314016 - DNA, 19 bp, Homo sapiens
  siRNA target sequence for RS1 (NM_000330.1,266-284).
ctaacccggagcagtatgt

SEQ ID NO: 314017 - DNA, 19 bp, Homo sapiens
  siRNA target sequence for RS1 (NM_000330.1,279-297).
gtatgtgggctggtattct

SEQ ID NO: 314018 - DNA, 19 bp, Homo sapiens
  siRNA target sequence for RS1 (NM_000330.1,490-508).
gagcgcctgaactggattt

SEQ ID NO: 314019 - DNA, 19 bp, Homo sapiens
  siRNA target sequence for RS1 (NM_000330.1,494-512).
gcctgaactggatttacta

SEQ ID NO: 314020 - DNA, 19 bp, Homo sapiens
  siRNA target sequence for RS1 (NM_000330.1,527-545).
gaaacaaccgggtcttcta

SEQ ID NO: 314021 - DNA, 19 bp, Homo sapiens
  siRNA target sequence for RS1 (NM_000330.1,560-578).
gcacctccacggttcagaa

SEQ ID NO: 314022 - DNA, 19 bp, Homo sapiens
  siRNA target sequence for TULP1 (NM_003322.2,542-560).
cctctgcgtgttaggaata

SEQ ID NO: 314023 - DNA, 19 bp, Homo sapiens
  siRNA target sequence for TULP1 (NM_003322.2,543-561).
ctctgcgtgttaggaataa

SEQ ID NO: 314024 - DNA, 19 bp, Homo sapiens
  siRNA target sequence for TULP1 (NM_003322.2,770-788).
gaggcagctacggtgataa

SEQ ID NO: 314025 - DNA, 19 bp, Homo sapiens
  siRNA target sequence for TULP1 (NM_003322.2,773-791).
gcagctacggtgataaaga

SEQ ID NO: 314026 - DNA, 19 bp, Homo sapiens
  siRNA target sequence for TULP1 (NM_003322.2,774-792).
cagctacggtgataaagaa

SEQ ID NO: 314027 - DNA, 19 bp, Homo sapiens
  siRNA target sequence for TULP1 (NM_003322.2,955-973).
catggatcgaggcatgtat

SEQ ID NO: 314028 - DNA, 19 bp, Homo sapiens
  siRNA target sequence for TULP1 (NM_003322.2,1041-1059).
ggagcaagacagccaatta

SEQ ID NO: 314029 - DNA, 19 bp, Homo sapiens
  siRNA target sequence for TULP1 (NM_003322.2,1066-1084).
ctccatcgaccctaccaat

SEQ ID NO: 314030 - DNA, 19 bp, Homo sapiens
  siRNA target sequence for TULP1 (NM_003322.2,1142-1160).
cgcttcacggtctttgaca

SEQ ID NO: 314031 - DNA, 19 bp, Homo sapiens
  siRNA target sequence for TULP1 (NM_003322.2,1177-1195).
gcgtgggtacagcactaat

SEQ ID NO: 314032 - DNA, 19 bp, Homo sapiens
  siRNA target sequence for TULP1 (NM_003322.2,1216-1234).
gctggcagctgtgatctat

SEQ ID NO: 314033 - DNA, 19 bp, Homo sapiens
  siRNA target sequence for TULP1 (NM_003322.2,1267-1285).
gcgcatgaccgtcatcatt

SEQ ID NO: 314034 - DNA, 19 bp, Homo sapiens
  siRNA target sequence for TULP1 (NM_003322.2,1428-1446).
gctcctacaccctcaactt

SEQ ID NO: 314035 - DNA, 19 bp, Homo sapiens
  siRNA target sequence for TULP1 (NM_003322.2,1496-1514).
gctgatgaccccgactata

SEQ ID NO: 314036 - DNA, 19 bp, Homo sapiens
  siRNA target sequence for TULP1 (NM_003322.2,1497-1515).
ctgatgaccccgactatat

SEQ ID NO: 314037 - DNA, 19 bp, Homo sapiens
  siRNA target sequence for TULP2 (NM_003323.1,98-116).
ctcaggataatgacacatt

SEQ ID NO: 314038 - DNA, 19 bp, Homo sapiens
  siRNA target sequence for TULP2 (NM_003323.1,276-294).
gcgggaggagcgcctttta

SEQ ID NO: 314039 - DNA, 19 bp, Homo sapiens
  siRNA target sequence for TULP2 (NM_003323.1,279-297).
ggaggagcgccttttaggt

SEQ ID NO: 314040 - DNA, 19 bp, Homo sapiens
  siRNA target sequence for TULP2 (NM_003323.1,315-333).
ccctttcctccggaagaaa

SEQ ID NO: 314041 - DNA, 19 bp, Homo sapiens
  siRNA target sequence for TULP2 (NM_003323.1,653-671).
cacacaagtcacccaatat

SEQ ID NO: 314042 - DNA, 19 bp, Homo sapiens
  siRNA target sequence for TULP2 (NM_003323.1,694-712).
ggtgactgtgtatatgaaa

SEQ ID NO: 314043 - DNA, 19 bp, Homo sapiens
  siRNA target sequence for TULP2 (NM_003323.1,788-806).
cagcacacaacgaagagtt

SEQ ID NO: 314044 - DNA, 19 bp, Homo sapiens
  siRNA target sequence for TULP2 (NM_003323.1,833-851).
gcacggacagcgaccatat

SEQ ID NO: 314045 - DNA, 19 bp, Homo sapiens
  siRNA target sequence for TULP2 (NM_003323.1,1073-1091).
ggagcaaaacttctaatta

SEQ ID NO: 314046 - DNA, 19 bp, Homo sapiens
  siRNA target sequence for TULP2 (NM_003323.1,1124-1142).
gggacggggacaatttcgt

SEQ ID NO: 314047 - DNA, 19 bp, Homo sapiens
  siRNA target sequence for TULP2 (NM_003323.1,1143-1161).
gggcaaagtcagatccaat

SEQ ID NO: 314048 - DNA, 19 bp, Homo sapiens
  siRNA target sequence for TULP2 (NM_003323.1,1204-1222).
cctgaccgggagcatttaa

SEQ ID NO: 314049 - DNA, 19 bp, Homo sapiens
  siRNA target sequence for TULP2 (NM_003323.1,1207-1225).
gaccgggagcatttaacca

SEQ ID NO: 314050 - DNA, 19 bp, Homo sapiens
  siRNA target sequence for TULP2 (NM_003323.1,1215-1233).
gcatttaaccaggaatact

SEQ ID NO: 314051 - DNA, 19 bp, Homo sapiens
  siRNA target sequence for TULP2 (NM_003323.1,1270-1288).
gagcccaacgtcttaggat

SEQ ID NO: 314052 - DNA, 19 bp, Homo sapiens
  siRNA target sequence for TULP2 (NM_003323.1,1293-1311).
ggggcctcggaaaatgact

SEQ ID NO: 314053 - DNA, 19 bp, Homo sapiens
  siRNA target sequence for TULP2 (NM_003323.1,1334-1352).
gccagaaccagcgaatcaa

SEQ ID NO: 314054 - DNA, 19 bp, Homo sapiens
  siRNA target sequence for TULP2 (NM_003323.1,1335-1353).
ccagaaccagcgaatcaat

SEQ ID NO: 314055 - DNA, 19 bp, Homo sapiens
  siRNA target sequence for TULP2 (NM_003323.1,1380-1398).
gctactgagtcgttaccaa

SEQ ID NO: 314056 - DNA, 19 bp, Homo sapiens
  siRNA target sequence for TULP2 (NM_003323.1,1395-1413).
ccaacgtggggacaaacaa

SEQ ID NO: 314057 - DNA, 19 bp, Homo sapiens
  siRNA target sequence for TULP2 (NM_003323.1,1420-1438).
cttttgttgcacaacaaaa

SEQ ID NO: 314058 - DNA, 19 bp, Homo sapiens
  siRNA target sequence for TULP2 (NM_003323.1,1462-1480).
ggtgtctacacgctcaatt

SEQ ID NO: 314059 - DNA, 19 bp, Homo sapiens
  siRNA target sequence for TULP2 (NM_003323.1,1467-1485).
ctacacgctcaatttccat

SEQ ID NO: 314060 - DNA, 19 bp, Homo sapiens
  siRNA target sequence for TULP2 (NM_003323.1,1498-1516).
cgggcttcggtgaagaact

SEQ ID NO: 314061 - DNA, 19 bp, Homo sapiens
  siRNA target sequence for TULP2 (NM_003323.1,1568-1586).
gagtgggcccagacacatt

SEQ ID NO: 314062 - DNA, 19 bp, Homo sapiens
  siRNA target sequence for ARRB2 (NM_004313.3,242-260).
ccgggaccagggtcttcaa

SEQ ID NO: 314063 - DNA, 19 bp, Homo sapiens
  siRNA target sequence for ARRB2 (NM_004313.3,278-296).
gcaagctcaccgtgtactt

SEQ ID NO: 314064 - DNA, 19 bp, Homo sapiens
  siRNA target sequence for ARRB2 (NM_004313.3,562-580).
catgcccaccccttcttct

SEQ ID NO: 314065 - DNA, 19 bp, Homo sapiens
  siRNA target sequence for ARRB2 (NM_004313.3,645-663).
ggcctgcggcgtagacttt

SEQ ID NO: 314066 - DNA, 19 bp, Homo sapiens
  siRNA target sequence for ARRB2 (NM_004313.3,647-665).
cctgcggcgtagactttga

SEQ ID NO: 314067 - DNA, 19 bp, Homo sapiens
  siRNA target sequence for ARRB2 (NM_004313.3,650-668).
gcggcgtagactttgagat

SEQ ID NO: 314068 - DNA, 19 bp, Homo sapiens
  siRNA target sequence for ARRB2 (NM_004313.3,651-669).
cggcgtagactttgagatt

SEQ ID NO: 314069 - DNA, 19 bp, Homo sapiens
  siRNA target sequence for ARRB2 (NM_004313.3,670-688).
cgagccttctgtgctaaat

SEQ ID NO: 314070 - DNA, 19 bp, Homo sapiens
  siRNA target sequence for ARRB2 (NM_004313.3,675-693).
cttctgtgctaaatcacta

SEQ ID NO: 314071 - DNA, 19 bp, Homo sapiens
  siRNA target sequence for ARRB2 (NM_004313.3,678-696).
ctgtgctaaatcactagaa

SEQ ID NO: 314072 - DNA, 19 bp, Homo sapiens
  siRNA target sequence for ARRB2 (NM_004313.3,680-698).
gtgctaaatcactagaaga

SEQ ID NO: 314073 - DNA, 19 bp, Homo sapiens
  siRNA target sequence for ARRB2 (NM_004313.3,863-881).
gggagcccctcaatgtaaa

SEQ ID NO: 314074 - DNA, 19 bp, Homo sapiens
  siRNA target sequence for ARRB2 (NM_004313.3,864-882).
ggagcccctcaatgtaaat

SEQ ID NO: 314075 - DNA, 19 bp, Homo sapiens
  siRNA target sequence for ARRB2 (NM_004313.3,990-1008).
ggctcaactcgaacaagat

SEQ ID NO: 314076 - DNA, 19 bp, Homo sapiens
  siRNA target sequence for ARRB2 (NM_004313.3,992-1010).
ctcaactcgaacaagatga

SEQ ID NO: 314077 - DNA, 19 bp, Homo sapiens
  siRNA target sequence for ARRB2 (NM_004313.3,1338-1356).
caccaacctcattgaattt

SEQ ID NO: 314078 - DNA, 19 bp, Homo sapiens
  siRNA target sequence for ARRB2 (NM_004313.3,1362-1380).
caactatgccacagatgat

SEQ ID NO: 314079 - DNA, 19 bp, Homo sapiens
  siRNA target sequence for ARRB2 (NM_199004.1,334-352).
gaccctgtagtgtttgtga

SEQ ID NO: 314080 - DNA, 19 bp, Homo sapiens
  siRNA target sequence for CLONE24945 (NM_015683.1,516-534).
ggtagtgtccgctactgta

SEQ ID NO: 314081 - DNA, 19 bp, Homo sapiens
  siRNA target sequence for CLONE24945 (NM_015683.1,520-538).
gtgtccgctactgtatcaa

SEQ ID NO: 314082 - DNA, 19 bp, Homo sapiens
  siRNA target sequence for CLONE24945 (NM_015683.1,663-681).
gcccgatcctggtactgta

SEQ ID NO: 314083 - DNA, 19 bp, Homo sapiens
  siRNA target sequence for CLONE24945 (NM_015683.1,664-682).
cccgatcctggtactgtaa

SEQ ID NO: 314084 - DNA, 19 bp, Homo sapiens
  siRNA target sequence for KIAA1376 (NM_020801.1,228-246).
gtgaagagtttgacaataa

SEQ ID NO: 314085 - DNA, 19 bp, Homo sapiens
  siRNA target sequence for KIAA1376 (NM_020801.1,266-284).
cagcaatgtccctgtgtat

SEQ ID NO: 314086 - DNA, 19 bp, Homo sapiens
  siRNA target sequence for KIAA1376 (NM_020801.1,299-317).
cgtctcaggaagggtaaat

SEQ ID NO: 314087 - DNA, 19 bp, Homo sapiens
  siRNA target sequence for KIAA1376 (NM_020801.1,381-399).
gtacgctggactgaatcta

SEQ ID NO: 314088 - DNA, 19 bp, Homo sapiens
  siRNA target sequence for KIAA1376 (NM_020801.1,384-402).
cgctggactgaatctagaa

SEQ ID NO: 314089 - DNA, 19 bp, Homo sapiens
  siRNA target sequence for KIAA1376 (NM_020801.1,410-428).
ctccaatactgcctataca

SEQ ID NO: 314090 - DNA, 19 bp, Homo sapiens
  siRNA target sequence for KIAA1376 (NM_020801.1,418-436).
ctgcctatacacagaatta

SEQ ID NO: 314091 - DNA, 19 bp, Homo sapiens
  siRNA target sequence for KIAA1376 (NM_020801.1,420-438).
gcctatacacagaattaca

SEQ ID NO: 314092 - DNA, 19 bp, Homo sapiens
  siRNA target sequence for KIAA1376 (NM_020801.1,447-465).
gtagagtatttcaaccata

SEQ ID NO: 314093 - DNA, 19 bp, Homo sapiens
  siRNA target sequence for KIAA1376 (NM_020801.1,458-476).
caaccataaagacatctta

SEQ ID NO: 314094 - DNA, 19 bp, Homo sapiens
  siRNA target sequence for KIAA1376 (NM_020801.1,485-503).
cgaaagagatgatgataat

SEQ ID NO: 314095 - DNA, 19 bp, Homo sapiens
  siRNA target sequence for KIAA1376 (NM_020801.1,513-531).
ggcttccacactattcatt

SEQ ID NO: 314096 - DNA, 19 bp, Homo sapiens
  siRNA target sequence for KIAA1376 (NM_020801.1,515-533).
cttccacactattcattca

SEQ ID NO: 314097 - DNA, 19 bp, Homo sapiens
  siRNA target sequence for KIAA1376 (NM_020801.1,534-552).
ggaaggcatgaatatgcat

SEQ ID NO: 314098 - DNA, 19 bp, Homo sapiens
  siRNA target sequence for KIAA1376 (NM_020801.1,535-553).
gaaggcatgaatatgcatt

SEQ ID NO: 314099 - DNA, 19 bp, Homo sapiens
  siRNA target sequence for KIAA1376 (NM_020801.1,622-640).
gggtgaaagccgaattgca

SEQ ID NO: 314100 - DNA, 19 bp, Homo sapiens
  siRNA target sequence for KIAA1376 (NM_020801.1,646-664).
cttggctactaccagtaaa

SEQ ID NO: 314101 - DNA, 19 bp, Homo sapiens
  siRNA target sequence for KIAA1376 (NM_020801.1,649-667).
ggctactaccagtaaaatt

SEQ ID NO: 314102 - DNA, 19 bp, Homo sapiens
  siRNA target sequence for KIAA1376 (NM_020801.1,682-700).
cagtctttgagcatataga

SEQ ID NO: 314103 - DNA, 19 bp, Homo sapiens
  siRNA target sequence for KIAA1376 (NM_020801.1,690-708).
gagcatatagatatcaaca

SEQ ID NO: 314104 - DNA, 19 bp, Homo sapiens
  siRNA target sequence for KIAA1376 (NM_020801.1,820-838).
ccccaggtgaatcaattca

SEQ ID NO: 314105 - DNA, 19 bp, Homo sapiens
  siRNA target sequence for KIAA1376 (NM_020801.1,823-841).
caggtgaatcaattcagat

SEQ ID NO: 314106 - DNA, 19 bp, Homo sapiens
  siRNA target sequence for KIAA1376 (NM_020801.1,826-844).
gtgaatcaattcagatatt

SEQ ID NO: 314107 - DNA, 19 bp, Homo sapiens
  siRNA target sequence for KIAA1376 (NM_020801.1,959-977).
cttgcgtggggaatcctta

SEQ ID NO: 314108 - DNA, 19 bp, Homo sapiens
  siRNA target sequence for KIAA1376 (NM_020801.1,974-992).
cttatcatctggaaagaca

SEQ ID NO: 314109 - DNA, 19 bp, Homo sapiens
  siRNA target sequence for KIAA1376 (NM_020801.1,1007-1025).
caagttgctgaaaattcca

SEQ ID NO: 314110 - DNA, 19 bp, Homo sapiens
  siRNA target sequence for KIAA1376 (NM_020801.1,1054-1072).
gtataatccgcgtggaata

SEQ ID NO: 314111 - DNA, 19 bp, Homo sapiens
  siRNA target sequence for KIAA1376 (NM_020801.1,1061-1079).
ccgcgtggaatattcacta

SEQ ID NO: 314112 - DNA, 19 bp, Homo sapiens
  siRNA target sequence for KIAA1376 (NM_020801.1,1062-1080).
cgcgtggaatattcactaa

SEQ ID NO: 314113 - DNA, 19 bp, Homo sapiens
  siRNA target sequence for KIAA1376 (NM_020801.1,1063-1081).
gcgtggaatattcactaat

SEQ ID NO: 314114 - DNA, 19 bp, Homo sapiens
  siRNA target sequence for KIAA1376 (NM_020801.1,1068-1086).
gaatattcactaatggtat

SEQ ID NO: 314115 - DNA, 19 bp, Homo sapiens
  siRNA target sequence for KIAA1376 (NM_020801.1,1099-1117).
ctggagctatggatttatt

SEQ ID NO: 314116 - DNA, 19 bp, Homo sapiens
  siRNA target sequence for KIAA1376 (NM_020801.1,1144-1162).
ccattcctctacatccatt

SEQ ID NO: 314117 - DNA, 19 bp, Homo sapiens
  siRNA target sequence for KIAA1376 (NM_020801.1,1145-1163).
cattcctctacatccattt

SEQ ID NO: 314118 - DNA, 19 bp, Homo sapiens
  siRNA target sequence for KIAA1376 (NM_020801.1,1187-1205).
cagtcagtgtagcatgaat

SEQ ID NO: 314119 - DNA, 19 bp, Homo sapiens
  siRNA target sequence for KIAA1376 (NM_020801.1,1189-1207).
gtcagtgtagcatgaatat

SEQ ID NO: 314120 - DNA, 19 bp, Homo sapiens
  siRNA target sequence for KIAA1376 (NM_020801.1,1307-1325).
gagtgcttgtgatgacttt

SEQ ID NO: 314121 - DNA, 19 bp, Homo sapiens
  siRNA target sequence for KIAA1376 (NM_020801.1,1338-1356).
caaggaccactgtttgcat

SEQ ID NO: 314122 - DNA, 19 bp, Homo sapiens
  siRNA target sequence for KIAA1376 (NM_020801.1,1341-1359).
ggaccactgtttgcatata

SEQ ID NO: 314123 - DNA, 19 bp, Homo sapiens
  siRNA target sequence for STIP1 (NM_006819.1,103-121).
ccctgagcgtgggtaacat

SEQ ID NO: 314124 - DNA, 19 bp, Homo sapiens
  siRNA target sequence for STIP1 (NM_006819.1,137-155).
gtgctactccgaagctatt

SEQ ID NO: 314125 - DNA, 19 bp, Homo sapiens
  siRNA target sequence for STIP1 (NM_006819.1,139-157).
gctactccgaagctattaa

SEQ ID NO: 314126 - DNA, 19 bp, Homo sapiens
  siRNA target sequence for STIP1 (NM_006819.1,247-265).
gcaagactgtcgacctaaa

SEQ ID NO: 314127 - DNA, 19 bp, Homo sapiens
  siRNA target sequence for STIP1 (NM_006819.1,272-290).
ctggggcaagggctattca

SEQ ID NO: 314128 - DNA, 19 bp, Homo sapiens
  siRNA target sequence for STIP1 (NM_006819.1,281-299).
gggctattcacgaaaagca

SEQ ID NO: 314129 - DNA, 19 bp, Homo sapiens
  siRNA target sequence for STIP1 (NM_006819.1,454-472).
ctaatctgtatcagaagtt

SEQ ID NO: 314130 - DNA, 19 bp, Homo sapiens
  siRNA target sequence for STIP1 (NM_006819.1,560-578).
gggcacgaaactacaagat

SEQ ID NO: 314131 - DNA, 19 bp, Homo sapiens
  siRNA target sequence for STIP1 (NM_006819.1,617-635).
cgatctgggcagtatggat

SEQ ID NO: 314132 - DNA, 19 bp, Homo sapiens
  siRNA target sequence for STIP1 (NM_006819.1,756-774).
gggaacgatgcctacaaga

SEQ ID NO: 314133 - DNA, 19 bp, Homo sapiens
  siRNA target sequence for STIP1 (NM_006819.1,819-837).
gagctggaccccactaaca

SEQ ID NO: 314134 - DNA, 19 bp, Homo sapiens
  siRNA target sequence for STIP1 (NM_006819.1,825-843).
gaccccactaacatgactt

SEQ ID NO: 314135 - DNA, 19 bp, Homo sapiens
  siRNA target sequence for STIP1 (NM_006819.1,829-847).
ccactaacatgacttacat

SEQ ID NO: 314136 - DNA, 19 bp, Homo sapiens
  siRNA target sequence for STIP1 (NM_006819.1,830-848).
cactaacatgacttacatt

SEQ ID NO: 314137 - DNA, 19 bp, Homo sapiens
  siRNA target sequence for STIP1 (NM_006819.1,873-891).
gaaaagggcgactacaata

SEQ ID NO: 314138 - DNA, 19 bp, Homo sapiens
  siRNA target sequence for STIP1 (NM_006819.1,931-949).
gagaaaaccgagaagacta

SEQ ID NO: 314139 - DNA, 19 bp, Homo sapiens
  siRNA target sequence for STIP1 (NM_006819.1,962-980).
caaagcatatgctcgaatt

SEQ ID NO: 314140 - DNA, 19 bp, Homo sapiens
  siRNA target sequence for STIP1 (NM_006819.1,1340-1358).
cttcatcaagggttataca

SEQ ID NO: 314141 - DNA, 19 bp, Homo sapiens
  siRNA target sequence for STIP1 (NM_006819.1,1461-1479).
ggctaccagcgctgtatga

SEQ ID NO: 314142 - DNA, 19 bp, Homo sapiens
  siRNA target sequence for STIP1 (NM_006819.1,1462-1480).
gctaccagcgctgtatgat

SEQ ID NO: 314143 - DNA, 19 bp, Homo sapiens
  siRNA target sequence for STIP1 (NM_006819.1,1474-1492).
gtatgatggcgcagtacaa

SEQ ID NO: 314144 - DNA, 19 bp, Homo sapiens
  siRNA target sequence for STIP1 (NM_006819.1,1576-1594).
gccttatcctggaacagat

SEQ ID NO: 314145 - DNA, 19 bp, Homo sapiens
  siRNA target sequence for SYN2 (NM_003178.2,548-566).
gctttcggggcaaaaaagt

SEQ ID NO: 314146 - DNA, 19 bp, Homo sapiens
  siRNA target sequence for SYN2 (NM_003178.2,641-659).
cctatgctgtggatatgca

SEQ ID NO: 314147 - DNA, 19 bp, Homo sapiens
  siRNA target sequence for SYN2 (NM_003178.2,666-684).
ccggaatggcacaaaggtt

SEQ ID NO: 314148 - DNA, 19 bp, Homo sapiens
  siRNA target sequence for SYN2 (NM_003178.2,758-776).
gccacctgatcattggtat

SEQ ID NO: 314149 - DNA, 19 bp, Homo sapiens
  siRNA target sequence for SYN2 (NM_003178.2,787-805).
ggcctccccagcatcaact

SEQ ID NO: 314150 - DNA, 19 bp, Homo sapiens
  siRNA target sequence for SYN2 (NM_003178.2,811-829).
gaatccatatacaacttct

SEQ ID NO: 314151 - DNA, 19 bp, Homo sapiens
  siRNA target sequence for SYN2 (NM_003178.2,851-869).
cccagctggtcgctatcta

SEQ ID NO: 314152 - DNA, 19 bp, Homo sapiens
  siRNA target sequence for SYN2 (NM_003178.2,853-871).
cagctggtcgctatctata

SEQ ID NO: 314153 - DNA, 19 bp, Homo sapiens
  siRNA target sequence for SYN2 (NM_003178.2,856-874).
ctggtcgctatctataaga

SEQ ID NO: 314154 - DNA, 19 bp, Homo sapiens
  siRNA target sequence for SYN2 (NM_003178.2,858-876).
ggtcgctatctataagaca

SEQ ID NO: 314155 - DNA, 19 bp, Homo sapiens
  siRNA target sequence for SYN2 (NM_003178.2,1101-1119).
catccgggtccagaagatt

SEQ ID NO: 314156 - DNA, 19 bp, Homo sapiens
  siRNA target sequence for SYN2 (NM_003178.2,1464-1482).
gccacagagcggaacactt

SEQ ID NO: 314157 - DNA, 19 bp, Homo sapiens
  siRNA target sequence for SYN2 (NM_003178.2,1465-1483).
ccacagagcggaacactta

SEQ ID NO: 314158 - DNA, 19 bp, Homo sapiens
  siRNA target sequence for SYN2 (NM_003178.2,1466-1484).
cacagagcggaacacttaa

SEQ ID NO: 314159 - DNA, 19 bp, Homo sapiens
  siRNA target sequence for SYN2 (NM_003178.2,1470-1488).
gagcggaacacttaaggat

SEQ ID NO: 314160 - DNA, 19 bp, Homo sapiens
  siRNA target sequence for SYN2 (NM_003178.2,1523-1541).
cccctcaaggttgtttaca

SEQ ID NO: 314161 - DNA, 19 bp, Homo sapiens
  siRNA target sequence for SYN2 (NM_003178.2,1528-1546).
caaggttgtttacagtata

SEQ ID NO: 314162 - DNA, 19 bp, Homo sapiens
  siRNA target sequence for SYN2 (NM_003178.2,1532-1550).
gttgtttacagtatattct

SEQ ID NO: 314163 - DNA, 19 bp, Homo sapiens
  siRNA target sequence for SYN2 (NM_003178.2,1542-1560).
gtatattctcgactgtaat

SEQ ID NO: 314164 - DNA, 19 bp, Homo sapiens
  siRNA target sequence for SYN2 (NM_133625.1,1779-1797).
gtcgcagtccctgacaaat

SEQ ID NO: 314165 - DNA, 19 bp, Homo sapiens
  siRNA target sequence for CALCYON (NM_015722.2,384-402).
ggctgcgtgctgatcatgt

SEQ ID NO: 314166 - DNA, 19 bp, Homo sapiens
  siRNA target sequence for CALCYON (NM_015722.2,472-490).
cgctgaccctggagatgta

SEQ ID NO: 314167 - DNA, 19 bp, Homo sapiens
  siRNA target sequence for CART (NM_004291.1,205-223).
gaagctcaagagtaaacgt

SEQ ID NO: 314168 - DNA, 19 bp, Homo sapiens
  siRNA target sequence for CBLN1 (NM_004352.1,547-565).
gtaatcgcaccatgatcat

SEQ ID NO: 314169 - DNA, 19 bp, Homo sapiens
  siRNA target sequence for CBLN1 (NM_004352.1,575-593).
ccaggtactagtgaacatt

SEQ ID NO: 314170 - DNA, 19 bp, Homo sapiens
  siRNA target sequence for CBLN1 (NM_004352.1,610-628).
cagaacgcagcactttcat

SEQ ID NO: 314171 - DNA, 19 bp, Homo sapiens
  siRNA target sequence for CBLN1 (NM_004352.1,642-660).
gggatctacagttttaact

SEQ ID NO: 314172 - DNA, 19 bp, Homo sapiens
  siRNA target sequence for CBLN1 (NM_004352.1,643-661).
ggatctacagttttaactt

SEQ ID NO: 314173 - DNA, 19 bp, Homo sapiens
  siRNA target sequence for CBLN1 (NM_004352.1,716-734).
cgggtggccggtgatttca

SEQ ID NO: 314174 - DNA, 19 bp, Homo sapiens
  siRNA target sequence for CBLN1 (NM_004352.1,772-790).
ccagcaacggagtcctaat

SEQ ID NO: 314175 - DNA, 19 bp, Homo sapiens
  siRNA target sequence for CBLN1 (NM_004352.1,825-843).
ctggagcggggaaacttga

SEQ ID NO: 314176 - DNA, 19 bp, Homo sapiens
  siRNA target sequence for HAP1 (NM_003949.2,290-308).
cggtctatgcccgacaatt

SEQ ID NO: 314177 - DNA, 19 bp, Homo sapiens
  siRNA target sequence for HAP1 (NM_003949.2,317-335).
ccgtggacccgcttcgtat

SEQ ID NO: 314178 - DNA, 19 bp, Homo sapiens
  siRNA target sequence for HAP1 (NM_003949.2,318-336).
cgtggacccgcttcgtatt

SEQ ID NO: 314179 - DNA, 19 bp, Homo sapiens
  siRNA target sequence for HAP1 (NM_003949.2,321-339).
ggacccgcttcgtattcca

SEQ ID NO: 314180 - DNA, 19 bp, Homo sapiens
  siRNA target sequence for HAP1 (NM_003949.2,322-340).
gacccgcttcgtattccaa

SEQ ID NO: 314181 - DNA, 19 bp, Homo sapiens
  siRNA target sequence for HAP1 (NM_003949.2,529-547).
cgtcaaagtgatgttatat

SEQ ID NO: 314182 - DNA, 19 bp, Homo sapiens
  siRNA target sequence for HAP1 (NM_003949.2,642-660).
gccagtccctggtgaaaca

SEQ ID NO: 314183 - DNA, 19 bp, Homo sapiens
  siRNA target sequence for HAP1 (NM_003949.2,767-785).
ctccagctctactcagatt

SEQ ID NO: 314184 - DNA, 19 bp, Homo sapiens
  siRNA target sequence for HAP1 (NM_003949.2,772-790).
gctctactcagattctgat

SEQ ID NO: 314185 - DNA, 19 bp, Homo sapiens
  siRNA target sequence for HAP1 (NM_003949.2,1080-1098).
cggaggccagccaacagat

SEQ ID NO: 314186 - DNA, 19 bp, Homo sapiens
  siRNA target sequence for HAP1 (NM_003949.2,1340-1358).
gggggcatgctgattgaga

SEQ ID NO: 314187 - DNA, 19 bp, Homo sapiens
  siRNA target sequence for HAP1 (NM_003949.2,1478-1496).
gagctcagaacgtctctaa

SEQ ID NO: 314188 - DNA, 19 bp, Homo sapiens
  siRNA target sequence for HAP1 (NM_003949.2,1504-1522).
gatctcagaccctgtgtat

SEQ ID NO: 314189 - DNA, 19 bp, Homo sapiens
  siRNA target sequence for HAP1 (NM_003949.2,1558-1576).
cacatccagcctaaggtat

SEQ ID NO: 314190 - DNA, 19 bp, Homo sapiens
  siRNA target sequence for HAP1 (NM_003949.2,1563-1581).
ccagcctaaggtatgattt

SEQ ID NO: 314191 - DNA, 19 bp, Homo sapiens
  siRNA target sequence for HCRT (NM_001524.1,197-215).
ccgactgctgtcgtcaaaa

SEQ ID NO: 314192 - DNA, 19 bp, Homo sapiens
  siRNA target sequence for HCRT (NM_001524.1,199-217).
gactgctgtcgtcaaaaga

SEQ ID NO: 314193 - DNA, 19 bp, Homo sapiens
  siRNA target sequence for HCRT (NM_001524.1,201-219).
ctgctgtcgtcaaaagact

SEQ ID NO: 314194 - DNA, 19 bp, Homo sapiens
  siRNA target sequence for MOG (NM_002433.1,530-548).
ctctggtcggggatgaagt

SEQ ID NO: 314195 - DNA, 19 bp, Homo sapiens
  siRNA target sequence for MOG (NM_002433.1,623-641).
ctagggtggttcatctcta

SEQ ID NO: 314196 - DNA, 19 bp, Homo sapiens
  siRNA target sequence for MOG (NM_002433.1,702-720).
gctgaaagatgctattggt

SEQ ID NO: 314197 - DNA, 19 bp, Homo sapiens
  siRNA target sequence for MOG (NM_002433.1,736-754).
ctcaggatccggaatgtaa

SEQ ID NO: 314198 - DNA, 19 bp, Homo sapiens
  siRNA target sequence for MOG (NM_002433.1,740-758).
ggatccggaatgtaaggtt

SEQ ID NO: 314199 - DNA, 19 bp, Homo sapiens
  siRNA target sequence for MOG (NM_002433.1,780-798).
ctgcttcttccgagatcat

SEQ ID NO: 314200 - DNA, 19 bp, Homo sapiens
  siRNA target sequence for MOG (NM_002433.1,789-807).
ccgagatcattcttaccaa

SEQ ID NO: 314201 - DNA, 19 bp, Homo sapiens
  siRNA target sequence for MOG (NM_002433.1,813-831).
ggcagcaatggaattgaaa

SEQ ID NO: 314202 - DNA, 19 bp, Homo sapiens
  siRNA target sequence for MOG (NM_002433.1,832-850).
gtagaagatcctttctact

SEQ ID NO: 314203 - DNA, 19 bp, Homo sapiens
  siRNA target sequence for MOG (NM_002433.1,975-993).
gaatctccaccggactttt

SEQ ID NO: 314204 - DNA, 19 bp, Homo sapiens
  siRNA target sequence for MOG (NM_002433.1,1011-1029).
ggtgccctgctggaagata

SEQ ID NO: 314205 - DNA, 19 bp, Homo sapiens
  siRNA target sequence for MOG (NM_002433.1,1012-1030).
gtgccctgctggaagataa

SEQ ID NO: 314206 - DNA, 19 bp, Homo sapiens
  siRNA target sequence for MOG (NM_002433.1,1089-1107).
ctggctacatcgaagacta

SEQ ID NO: 314207 - DNA, 19 bp, Homo sapiens
  siRNA target sequence for MOG (NM_002433.1,1103-1121).
gactagcagggcaattcct

SEQ ID NO: 314208 - DNA, 19 bp, Homo sapiens
  siRNA target sequence for MOG (NM_002433.1,1119-1137).
ccttgaagagctacgaaat

SEQ ID NO: 314209 - DNA, 19 bp, Homo sapiens
  siRNA target sequence for CNTNAP2 (NM_014141.3,319-337).
ccggctatgccaagataaa

SEQ ID NO: 314210 - DNA, 19 bp, Homo sapiens
  siRNA target sequence for CNTNAP2 (NM_014141.3,321-339).
ggctatgccaagataaaca

SEQ ID NO: 314211 - DNA, 19 bp, Homo sapiens
  siRNA target sequence for CNTNAP2 (NM_014141.3,322-340).
gctatgccaagataaacaa

SEQ ID NO: 314212 - DNA, 19 bp, Homo sapiens
  siRNA target sequence for CNTNAP2 (NM_014141.3,367-385).
catcagacagcgaccatta

SEQ ID NO: 314213 - DNA, 19 bp, Homo sapiens
  siRNA target sequence for CNTNAP2 (NM_014141.3,370-388).
cagacagcgaccattatca

SEQ ID NO: 314214 - DNA, 19 bp, Homo sapiens
  siRNA target sequence for CNTNAP2 (NM_014141.3,372-390).
gacagcgaccattatcaat

SEQ ID NO: 314215 - DNA, 19 bp, Homo sapiens
  siRNA target sequence for CNTNAP2 (NM_014141.3,435-453).
gcaacccaaggaaggtata

SEQ ID NO: 314216 - DNA, 19 bp, Homo sapiens
  siRNA target sequence for CNTNAP2 (NM_014141.3,511-529).
ggaaaccctatcatcaaga

SEQ ID NO: 314217 - DNA, 19 bp, Homo sapiens
  siRNA target sequence for CNTNAP2 (NM_014141.3,522-540).
catcaagatgggaatatct

SEQ ID NO: 314218 - DNA, 19 bp, Homo sapiens
  siRNA target sequence for CNTNAP2 (NM_014141.3,541-559).
gggcatttcccggaaacat

SEQ ID NO: 314219 - DNA, 19 bp, Homo sapiens
  siRNA target sequence for CNTNAP2 (NM_014141.3,571-589).
gtgtggtccggcacgaatt

SEQ ID NO: 314220 - DNA, 19 bp, Homo sapiens
  siRNA target sequence for CNTNAP2 (NM_014141.3,649-667).
gtcgcattggactcagaat

SEQ ID NO: 314221 - DNA, 19 bp, Homo sapiens
  siRNA target sequence for CNTNAP2 (NM_014141.3,652-670).
gcattggactcagaattga

SEQ ID NO: 314222 - DNA, 19 bp, Homo sapiens
  siRNA target sequence for CNTNAP2 (NM_014141.3,658-676).
gactcagaattgaagttta

SEQ ID NO: 314223 - DNA, 19 bp, Homo sapiens
  siRNA target sequence for CNTNAP2 (NM_014141.3,685-703).
cttactgggctgatgttat

SEQ ID NO: 314224 - DNA, 19 bp, Homo sapiens
  siRNA target sequence for CNTNAP2 (NM_014141.3,714-732).
ggccatgttgtattaccat

SEQ ID NO: 314225 - DNA, 19 bp, Homo sapiens
  siRNA target sequence for CNTNAP2 (NM_014141.3,715-733).
gccatgttgtattaccata

SEQ ID NO: 314226 - DNA, 19 bp, Homo sapiens
  siRNA target sequence for CNTNAP2 (NM_014141.3,736-754).
gattcagaaacaagaagat

SEQ ID NO: 314227 - DNA, 19 bp, Homo sapiens
  siRNA target sequence for CNTNAP2 (NM_014141.3,869-887).
caagctggtcctcagttta

SEQ ID NO: 314228 - DNA, 19 bp, Homo sapiens
  siRNA target sequence for CNTNAP2 (NM_014141.3,875-893).
ggtcctcagtttaaactta

SEQ ID NO: 314229 - DNA, 19 bp, Homo sapiens
  siRNA target sequence for CNTNAP2 (NM_014141.3,967-985).
ggcactctgtggtcattga

SEQ ID NO: 314230 - DNA, 19 bp, Homo sapiens
  siRNA target sequence for CNTNAP2 (NM_014141.3,1028-1046).
gcagcacttccgtaccaat

SEQ ID NO: 314231 - DNA, 19 bp, Homo sapiens
  siRNA target sequence for CNTNAP2 (NM_014141.3,1037-1055).
ccgtaccaatggagagttt

SEQ ID NO: 314232 - DNA, 19 bp, Homo sapiens
  siRNA target sequence for CNTNAP2 (NM_014141.3,1039-1057).
gtaccaatggagagtttga

SEQ ID NO: 314233 - DNA, 19 bp, Homo sapiens
  siRNA target sequence for CNTNAP2 (NM_014141.3,1064-1082).
ggacttggactatgagata

SEQ ID NO: 314234 - DNA, 19 bp, Homo sapiens
  siRNA target sequence for CNTNAP2 (NM_014141.3,1065-1083).
gacttggactatgagataa

SEQ ID NO: 314235 - DNA, 19 bp, Homo sapiens
  siRNA target sequence for CNTNAP2 (NM_014141.3,1114-1132).
ccagctccagcagtagaaa

SEQ ID NO: 314236 - DNA, 19 bp, Homo sapiens
  siRNA target sequence for CNTNAP2 (NM_014141.3,1118-1136).
ctccagcagtagaaagaat

SEQ ID NO: 314237 - DNA, 19 bp, Homo sapiens
  siRNA target sequence for CNTNAP2 (NM_014141.3,1166-1184).
caatggcgtcaacattact

SEQ ID NO: 314238 - DNA, 19 bp, Homo sapiens
  siRNA target sequence for CNTNAP2 (NM_014141.3,1202-1220).
gaaattagagccctcaaat

SEQ ID NO: 314239 - DNA, 19 bp, Homo sapiens
  siRNA target sequence for CNTNAP2 (NM_014141.3,1253-1271).
ctatacggtgcctgtcttt

SEQ ID NO: 314240 - DNA, 19 bp, Homo sapiens
  siRNA target sequence for CNTNAP2 (NM_014141.3,1329-1347).
gtcagtttccagtttagga

SEQ ID NO: 314241 - DNA, 19 bp, Homo sapiens
  siRNA target sequence for CNTNAP2 (NM_014141.3,1459-1477).
ccaagatgagccaaatcga

SEQ ID NO: 314242 - DNA, 19 bp, Homo sapiens
  siRNA target sequence for CNTNAP2 (NM_014141.3,1460-1478).
caagatgagccaaatcgat

SEQ ID NO: 314243 - DNA, 19 bp, Homo sapiens
  siRNA target sequence for CNTNAP2 (NM_014141.3,1463-1481).
gatgagccaaatcgatatt

SEQ ID NO: 314244 - DNA, 19 bp, Homo sapiens
  siRNA target sequence for CNTNAP2 (NM_014141.3,1534-1552).
ccaaggaaaattttgctat

SEQ ID NO: 314245 - DNA, 19 bp, Homo sapiens
  siRNA target sequence for CNTNAP2 (NM_014141.3,1591-1609).
ctaatagtccccttcaagt

SEQ ID NO: 314246 - DNA, 19 bp, Homo sapiens
  siRNA target sequence for CNTNAP2 (NM_014141.3,1615-1633).
ctggcgagaagtacttttt

SEQ ID NO: 314247 - DNA, 19 bp, Homo sapiens
  siRNA target sequence for CNTNAP2 (NM_014141.3,1619-1637).
cgagaagtacttttttgga

SEQ ID NO: 314248 - DNA, 19 bp, Homo sapiens
  siRNA target sequence for CNTNAP2 (NM_014141.3,1716-1734).
gtggacgatcaacttgtaa

SEQ ID NO: 314249 - DNA, 19 bp, Homo sapiens
  siRNA target sequence for CNTNAP2 (NM_014141.3,1718-1736).
ggacgatcaacttgtaaat

SEQ ID NO: 314250 - DNA, 19 bp, Homo sapiens
  siRNA target sequence for CNTNAP2 (NM_014141.3,1764-1782).
ggaagtttcgcgaatgtca

SEQ ID NO: 314251 - DNA, 19 bp, Homo sapiens
  siRNA target sequence for CNTNAP2 (NM_014141.3,1774-1792).
cgaatgtcagcattgacat

SEQ ID NO: 314252 - DNA, 19 bp, Homo sapiens
  siRNA target sequence for CNTNAP2 (NM_014141.3,2053-2071).
ccatagtgtctcatgactt

SEQ ID NO: 314253 - DNA, 19 bp, Homo sapiens
  siRNA target sequence for CNTNAP2 (NM_014141.3,2093-2111).
cggctacaacccagaaaaa

SEQ ID NO: 314254 - DNA, 19 bp, Homo sapiens
  siRNA target sequence for CNTNAP2 (NM_014141.3,2094-2112).
ggctacaacccagaaaaat

SEQ ID NO: 314255 - DNA, 19 bp, Homo sapiens
  siRNA target sequence for CNTNAP2 (NM_014141.3,2116-2134).
cagtgacacagctcgttta

SEQ ID NO: 314256 - DNA, 19 bp, Homo sapiens
  siRNA target sequence for CNTNAP2 (NM_014141.3,2118-2136).
gtgacacagctcgtttaca

SEQ ID NO: 314257 - DNA, 19 bp, Homo sapiens
  siRNA target sequence for CNTNAP2 (NM_014141.3,2141-2159).
ctccatggaccagataagt

SEQ ID NO: 314258 - DNA, 19 bp, Homo sapiens
  siRNA target sequence for CNTNAP2 (NM_014141.3,2272-2290).
ccaacgagaagcactacta

SEQ ID NO: 314259 - DNA, 19 bp, Homo sapiens
  siRNA target sequence for CNTNAP2 (NM_014141.3,2347-2365).
gcacagatcccaagtacta

SEQ ID NO: 314260 - DNA, 19 bp, Homo sapiens
  siRNA target sequence for CNTNAP2 (NM_014141.3,2352-2370).
gatcccaagtactactgta

SEQ ID NO: 314261 - DNA, 19 bp, Homo sapiens
  siRNA target sequence for CNTNAP2 (NM_014141.3,2376-2394).
gacgcggactacaagcaat

SEQ ID NO: 314262 - DNA, 19 bp, Homo sapiens
  siRNA target sequence for CNTNAP2 (NM_014141.3,2403-2421).
gatgctggtttcttatcat

SEQ ID NO: 314263 - DNA, 19 bp, Homo sapiens
  siRNA target sequence for CNTNAP2 (NM_014141.3,2591-2609).
ggaaactagcgctgacatt

SEQ ID NO: 314264 - DNA, 19 bp, Homo sapiens
  siRNA target sequence for CNTNAP2 (NM_014141.3,2592-2610).
gaaactagcgctgacattt

SEQ ID NO: 314265 - DNA, 19 bp, Homo sapiens
  siRNA target sequence for CNTNAP2 (NM_014141.3,2633-2651).
cccctggggagtgtttctt

SEQ ID NO: 314266 - DNA, 19 bp, Homo sapiens
  siRNA target sequence for CNTNAP2 (NM_014141.3,2855-2873).
ccgcaaggccccaacagaa

SEQ ID NO: 314267 - DNA, 19 bp, Homo sapiens
  siRNA target sequence for CNTNAP2 (NM_014141.3,3073-3091).
gcaaatgcctagagagata

SEQ ID NO: 314268 - DNA, 19 bp, Homo sapiens
  siRNA target sequence for CNTNAP2 (NM_014141.3,3104-3122).
ctgcgattgctctaatact

SEQ ID NO: 314269 - DNA, 19 bp, Homo sapiens
  siRNA target sequence for CNTNAP2 (NM_014141.3,3112-3130).
gctctaatactgcatatga

SEQ ID NO: 314270 - DNA, 19 bp, Homo sapiens
  siRNA target sequence for CNTNAP2 (NM_014141.3,3121-3139).
ctgcatatgatggaacatt

SEQ ID NO: 314271 - DNA, 19 bp, Homo sapiens
  siRNA target sequence for CNTNAP2 (NM_014141.3,3136-3154).
cattttgcaacaaagatgt

SEQ ID NO: 314272 - DNA, 19 bp, Homo sapiens
  siRNA target sequence for CNTNAP2 (NM_014141.3,3175-3193).
ggatgtggctacgatataa

SEQ ID NO: 314273 - DNA, 19 bp, Homo sapiens
  siRNA target sequence for CNTNAP2 (NM_014141.3,3179-3197).
gtggctacgatataacttt

SEQ ID NO: 314274 - DNA, 19 bp, Homo sapiens
  siRNA target sequence for CNTNAP2 (NM_014141.3,3181-3199).
ggctacgatataactttca

SEQ ID NO: 314275 - DNA, 19 bp, Homo sapiens
  siRNA target sequence for CNTNAP2 (NM_014141.3,3391-3409).
gcttacagattcgatacaa

SEQ ID NO: 314276 - DNA, 19 bp, Homo sapiens
  siRNA target sequence for CNTNAP2 (NM_014141.3,3418-3436).
gcacccgagagccatacaa

SEQ ID NO: 314277 - DNA, 19 bp, Homo sapiens
  siRNA target sequence for CNTNAP2 (NM_014141.3,3419-3437).
cacccgagagccatacaat

SEQ ID NO: 314278 - DNA, 19 bp, Homo sapiens
  siRNA target sequence for CNTNAP2 (NM_014141.3,3421-3439).
cccgagagccatacaatat

SEQ ID NO: 314279 - DNA, 19 bp, Homo sapiens
  siRNA target sequence for CNTNAP2 (NM_014141.3,3422-3440).
ccgagagccatacaatatt

SEQ ID NO: 314280 - DNA, 19 bp, Homo sapiens
  siRNA target sequence for CNTNAP2 (NM_014141.3,3424-3442).
gagagccatacaatattga

SEQ ID NO: 314281 - DNA, 19 bp, Homo sapiens
  siRNA target sequence for CNTNAP2 (NM_014141.3,3497-3515).
ccacgagaagaccatcttt

SEQ ID NO: 314282 - DNA, 19 bp, Homo sapiens
  siRNA target sequence for CNTNAP2 (NM_014141.3,3518-3536).
caagctcgatcattatcct

SEQ ID NO: 314283 - DNA, 19 bp, Homo sapiens
  siRNA target sequence for CNTNAP2 (NM_014141.3,3562-3580).
catccgacaccctcttcaa

SEQ ID NO: 314284 - DNA, 19 bp, Homo sapiens
  siRNA target sequence for CNTNAP2 (NM_014141.3,3583-3601).
ctcccaagtcgctctttct

SEQ ID NO: 314285 - DNA, 19 bp, Homo sapiens
  siRNA target sequence for CNTNAP2 (NM_014141.3,3636-3654).
gagattcacaaatacaaca

SEQ ID NO: 314286 - DNA, 19 bp, Homo sapiens
  siRNA target sequence for CNTNAP2 (NM_014141.3,3650-3668).
caacaccccaggattcact

SEQ ID NO: 314287 - DNA, 19 bp, Homo sapiens
  siRNA target sequence for CNTNAP2 (NM_014141.3,3855-3873).
gccagtgcggattttccat

SEQ ID NO: 314288 - DNA, 19 bp, Homo sapiens
  siRNA target sequence for CNTNAP2 (NM_014141.3,3856-3874).
ccagtgcggattttccata

SEQ ID NO: 314289 - DNA, 19 bp, Homo sapiens
  siRNA target sequence for CNTNAP2 (NM_014141.3,3857-3875).
cagtgcggattttccatat

SEQ ID NO: 314290 - DNA, 19 bp, Homo sapiens
  siRNA target sequence for CNTNAP2 (NM_014141.3,3859-3877).
gtgcggattttccatataa

SEQ ID NO: 314291 - DNA, 19 bp, Homo sapiens
  siRNA target sequence for CNTNAP2 (NM_014141.3,3863-3881).
ggattttccatataatcca

SEQ ID NO: 314292 - DNA, 19 bp, Homo sapiens
  siRNA target sequence for CNTNAP2 (NM_014141.3,3885-3903).
caaggccaagctataagaa

SEQ ID NO: 314293 - DNA, 19 bp, Homo sapiens
  siRNA target sequence for CNTNAP2 (NM_014141.3,3914-3932).
cagaaactcggctatcatt

SEQ ID NO: 314294 - DNA, 19 bp, Homo sapiens
  siRNA target sequence for CNTNAP2 (NM_014141.3,4091-4109).
cttcacagagaccattgat

SEQ ID NO: 314295 - DNA, 19 bp, Homo sapiens
  siRNA target sequence for F13B (NM_001994.1,50-68).
cctgacttttatcatcata

SEQ ID NO: 314296 - DNA, 19 bp, Homo sapiens
  siRNA target sequence for F13B (NM_001994.1,55-73).
cttttatcatcatattgat

SEQ ID NO: 314297 - DNA, 19 bp, Homo sapiens
  siRNA target sequence for F13B (NM_001994.1,133-151).
gaagaattgcccaatatta

SEQ ID NO: 314298 - DNA, 19 bp, Homo sapiens
  siRNA target sequence for F13B (NM_001994.1,185-203).
catagacaaaaaattgtca

SEQ ID NO: 314299 - DNA, 19 bp, Homo sapiens
  siRNA target sequence for F13B (NM_001994.1,249-267).
gagcaaaccacgtgtacaa

SEQ ID NO: 314300 - DNA, 19 bp, Homo sapiens
  siRNA target sequence for F13B (NM_001994.1,251-269).
gcaaaccacgtgtacaaca

SEQ ID NO: 314301 - DNA, 19 bp, Homo sapiens
  siRNA target sequence for F13B (NM_001994.1,310-328).
ctaagcctgacctgagtaa

SEQ ID NO: 314302 - DNA, 19 bp, Homo sapiens
  siRNA target sequence for F13B (NM_001994.1,321-339).
ctgagtaatggttacatct

SEQ ID NO: 314303 - DNA, 19 bp, Homo sapiens
  siRNA target sequence for F13B (NM_001994.1,390-408).
gcttcagggtacaaaacca

SEQ ID NO: 314304 - DNA, 19 bp, Homo sapiens
  siRNA target sequence for F13B (NM_001994.1,469-487).
cctgtaggaaagaacatga

SEQ ID NO: 314305 - DNA, 19 bp, Homo sapiens
  siRNA target sequence for F13B (NM_001994.1,554-572).
ggacaaagtacaatacgaa

SEQ ID NO: 314306 - DNA, 19 bp, Homo sapiens
  siRNA target sequence for F13B (NM_001994.1,778-796).
gtggatctgatttaattca

SEQ ID NO: 314307 - DNA, 19 bp, Homo sapiens
  siRNA target sequence for F13B (NM_001994.1,780-798).
ggatctgatttaattcaat

SEQ ID NO: 314308 - DNA, 19 bp, Homo sapiens
  siRNA target sequence for F13B (NM_001994.1,784-802).
ctgatttaattcaatgcta

SEQ ID NO: 314309 - DNA, 19 bp, Homo sapiens
  siRNA target sequence for F13B (NM_001994.1,862-880).
ctccacctctgcccataaa

SEQ ID NO: 314310 - DNA, 19 bp, Homo sapiens
  siRNA target sequence for F13B (NM_001994.1,872-890).
gcccataaactccaaaatt

SEQ ID NO: 314311 - DNA, 19 bp, Homo sapiens
  siRNA target sequence for F13B (NM_001994.1,959-977).
ccatgggtcagcagaaata

SEQ ID NO: 314312 - DNA, 19 bp, Homo sapiens
  siRNA target sequence for F13B (NM_001994.1,1083-1101).
cactctaagatttattaca

SEQ ID NO: 314313 - DNA, 19 bp, Homo sapiens
  siRNA target sequence for F13B (NM_001994.1,1139-1157).
ccttctccatggatcgaat

SEQ ID NO: 314314 - DNA, 19 bp, Homo sapiens
  siRNA target sequence for F13B (NM_001994.1,1143-1161).
ctccatggatcgaatgaga

SEQ ID NO: 314315 - DNA, 19 bp, Homo sapiens
  siRNA target sequence for F13B (NM_001994.1,1145-1163).
ccatggatcgaatgagata

SEQ ID NO: 314316 - DNA, 19 bp, Homo sapiens
  siRNA target sequence for F13B (NM_001994.1,1149-1167).
ggatcgaatgagataactt

SEQ ID NO: 314317 - DNA, 19 bp, Homo sapiens
  siRNA target sequence for F13B (NM_001994.1,1252-1270).
ctgttgcagacgggatatt

SEQ ID NO: 314318 - DNA, 19 bp, Homo sapiens
  siRNA target sequence for F13B (NM_001994.1,1262-1280).
cgggatattggcaagctat

SEQ ID NO: 314319 - DNA, 19 bp, Homo sapiens
  siRNA target sequence for F13B (NM_001994.1,1309-1327).
gcaatgaatattacttact

SEQ ID NO: 314320 - DNA, 19 bp, Homo sapiens
  siRNA target sequence for F13B (NM_001994.1,1322-1340).
cttactgaggggatcaaaa

SEQ ID NO: 314321 - DNA, 19 bp, Homo sapiens
  siRNA target sequence for F13B (NM_001994.1,1326-1344).
ctgaggggatcaaaaatat

SEQ ID NO: 314322 - DNA, 19 bp, Homo sapiens
  siRNA target sequence for F13B (NM_001994.1,1345-1363).
ctcgttgcgaacaaggaaa

SEQ ID NO: 314323 - DNA, 19 bp, Homo sapiens
  siRNA target sequence for F13B (NM_001994.1,1347-1365).
cgttgcgaacaaggaaaat

SEQ ID NO: 314324 - DNA, 19 bp, Homo sapiens
  siRNA target sequence for F13B (NM_001994.1,1388-1406).
ggaaccatgtactgttaat

SEQ ID NO: 314325 - DNA, 19 bp, Homo sapiens
  siRNA target sequence for F13B (NM_001994.1,1399-1417).
ctgttaatgtggattacat

SEQ ID NO: 314326 - DNA, 19 bp, Homo sapiens
  siRNA target sequence for F13B (NM_001994.1,1461-1479).
gtcttacatggagatttaa

SEQ ID NO: 314327 - DNA, 19 bp, Homo sapiens
  siRNA target sequence for F13B (NM_001994.1,1492-1510).
gtaaacagggatatgactt

SEQ ID NO: 314328 - DNA, 19 bp, Homo sapiens
  siRNA target sequence for F13B (NM_001994.1,1525-1543).
cattgtctgaattatctgt

SEQ ID NO: 314329 - DNA, 19 bp, Homo sapiens
  siRNA target sequence for F13B (NM_001994.1,1612-1630).
ctcctcctcttattaaaca

SEQ ID NO: 314330 - DNA, 19 bp, Homo sapiens
  siRNA target sequence for F13B (NM_001994.1,1629-1647).
catggagtcattattagtt

SEQ ID NO: 314331 - DNA, 19 bp, Homo sapiens
  siRNA target sequence for F13B (NM_001994.1,1632-1650).
ggagtcattattagttcaa

SEQ ID NO: 314332 - DNA, 19 bp, Homo sapiens
  siRNA target sequence for F13B (NM_001994.1,1723-1741).
gggaggcctattgtttaga

SEQ ID NO: 314333 - DNA, 19 bp, Homo sapiens
  siRNA target sequence for F13B (NM_001994.1,1724-1742).
ggaggcctattgtttagat

SEQ ID NO: 314334 - DNA, 19 bp, Homo sapiens
  siRNA target sequence for F13B (NM_001994.1,1756-1774).
caccaccattgtgtttaga

SEQ ID NO: 314335 - DNA, 19 bp, Homo sapiens
  siRNA target sequence for F13B (NM_001994.1,1776-1794).
ccatgcacattatctttta

SEQ ID NO: 314336 - DNA, 19 bp, Homo sapiens
  siRNA target sequence for F13B (NM_001994.1,1780-1798).
gcacattatcttttactga

SEQ ID NO: 314337 - DNA, 19 bp, Homo sapiens
  siRNA target sequence for F13B (NM_001994.1,1781-1799).
cacattatcttttactgaa

SEQ ID NO: 314338 - DNA, 19 bp, Homo sapiens
  siRNA target sequence for F13B (NM_001994.1,1857-1875).
catggtgaatatattgagt

SEQ ID NO: 314339 - DNA, 19 bp, Homo sapiens
  siRNA target sequence for F13B (NM_001994.1,1860-1878).
ggtgaatatattgagttta

SEQ ID NO: 314340 - DNA, 19 bp, Homo sapiens
  siRNA target sequence for F13B (NM_001994.1,1899-1917).
ccagctgaattatatatta

SEQ ID NO: 314341 - DNA, 19 bp, Homo sapiens
  siRNA target sequence for F13B (NM_001994.1,1946-1964).
cagagggcagttaaaatat

SEQ ID NO: 314342 - DNA, 19 bp, Homo sapiens
  siRNA target sequence for F13B (NM_001994.1,1987-2005).
gcactctgtcttatcaaga

SEQ ID NO: 314343 - DNA, 19 bp, Homo sapiens
  siRNA target sequence for GP5 (NM_004488.1,579-597).
gaggctgtcgcgcaacaaa

SEQ ID NO: 314344 - DNA, 19 bp, Homo sapiens
  siRNA target sequence for GP5 (NM_004488.1,581-599).
ggctgtcgcgcaacaaaat

SEQ ID NO: 314345 - DNA, 19 bp, Homo sapiens
  siRNA target sequence for GP5 (NM_004488.1,583-601).
ctgtcgcgcaacaaaatca

SEQ ID NO: 314346 - DNA, 19 bp, Homo sapiens
  siRNA target sequence for GP5 (NM_004488.1,613-631).
ggtgcgctgctggataaga

SEQ ID NO: 314347 - DNA, 19 bp, Homo sapiens
  siRNA target sequence for GP5 (NM_004488.1,614-632).
gtgcgctgctggataagat

SEQ ID NO: 314348 - DNA, 19 bp, Homo sapiens
  siRNA target sequence for GP5 (NM_004488.1,735-753).
gaatcagctcgatttcctt

SEQ ID NO: 314349 - DNA, 19 bp, Homo sapiens
  siRNA target sequence for GP5 (NM_004488.1,898-916).
gattcggggctgttgaaca

SEQ ID NO: 314350 - DNA, 19 bp, Homo sapiens
  siRNA target sequence for GP5 (NM_004488.1,940-958).
cagttccaccgaaatcaca

SEQ ID NO: 314351 - DNA, 19 bp, Homo sapiens
  siRNA target sequence for GP5 (NM_004488.1,1043-1061).
cctctgcgctctttcttca

SEQ ID NO: 314352 - DNA, 19 bp, Homo sapiens
  siRNA target sequence for GP5 (NM_004488.1,1057-1075).
cttcattcgcacaatctga

SEQ ID NO: 314353 - DNA, 19 bp, Homo sapiens
  siRNA target sequence for GP5 (NM_004488.1,1209-1227).
gagccgcctgcggtactta

SEQ ID NO: 314354 - DNA, 19 bp, Homo sapiens
  siRNA target sequence for GP5 (NM_004488.1,1803-1821).
cacgggcaaaggtcaagat

SEQ ID NO: 314355 - DNA, 19 bp, Homo sapiens
  siRNA target sequence for GP5 (NM_004488.1,1805-1823).
cgggcaaaggtcaagatca

SEQ ID NO: 314356 - DNA, 19 bp, Homo sapiens
  siRNA target sequence for GP5 (NM_004488.1,1806-1824).
gggcaaaggtcaagatcat

SEQ ID NO: 314357 - DNA, 19 bp, Homo sapiens
  siRNA target sequence for GP5 (NM_004488.1,1807-1825).
ggcaaaggtcaagatcata

SEQ ID NO: 314358 - DNA, 19 bp, Homo sapiens
  siRNA target sequence for GP5 (NM_004488.1,1826-1844).
gtccgttctgggggtttta

SEQ ID NO: 314359 - DNA, 19 bp, Homo sapiens
  siRNA target sequence for GP5 (NM_004488.1,1828-1846).
ccgttctgggggttttatt

SEQ ID NO: 314360 - DNA, 19 bp, Homo sapiens
  siRNA target sequence for GP5 (NM_004488.1,1829-1847).
cgttctgggggttttattt

SEQ ID NO: 314361 - DNA, 19 bp, Homo sapiens
  siRNA target sequence for GP5 (NM_004488.1,1858-1876).
gctgttcaggccatgatca

SEQ ID NO: 314362 - DNA, 19 bp, Homo sapiens
  siRNA target sequence for GP5 (NM_004488.1,1879-1897).
gtgatcatcgtgtttgcta

SEQ ID NO: 314363 - DNA, 19 bp, Homo sapiens
  siRNA target sequence for GP5 (NM_004488.1,1909-1927).
ggccaactctttcgaaaat

SEQ ID NO: 314364 - DNA, 19 bp, Homo sapiens
  siRNA target sequence for GP5 (NM_004488.1,1910-1928).
gccaactctttcgaaaatt

SEQ ID NO: 314365 - DNA, 19 bp, Homo sapiens
  siRNA target sequence for GP5 (NM_004488.1,1911-1929).
ccaactctttcgaaaatta

SEQ ID NO: 314366 - DNA, 19 bp, Homo sapiens
  siRNA target sequence for GP5 (NM_004488.1,1915-1933).
ctctttcgaaaattaatca

SEQ ID NO: 314367 - DNA, 19 bp, Homo sapiens
  siRNA target sequence for MMRN (NM_007351.1,118-136).
ggggcattgggcttaacaa

SEQ ID NO: 314368 - DNA, 19 bp, Homo sapiens
  siRNA target sequence for MMRN (NM_007351.1,128-146).
gcttaacaacagtaagcat

SEQ ID NO: 314369 - DNA, 19 bp, Homo sapiens
  siRNA target sequence for MMRN (NM_007351.1,169-187).
ggaactctcagaagactat

SEQ ID NO: 314370 - DNA, 19 bp, Homo sapiens
  siRNA target sequence for MMRN (NM_007351.1,257-275).
ggcggagatagctacaact

SEQ ID NO: 314371 - DNA, 19 bp, Homo sapiens
  siRNA target sequence for MMRN (NM_007351.1,297-315).
gacagtcttcttaaatcaa

SEQ ID NO: 314372 - DNA, 19 bp, Homo sapiens
  siRNA target sequence for MMRN (NM_007351.1,346-364).
ctgagggtgtgagaaatca

SEQ ID NO: 314373 - DNA, 19 bp, Homo sapiens
  siRNA target sequence for MMRN (NM_007351.1,348-366).
gagggtgtgagaaatcaaa

SEQ ID NO: 314374 - DNA, 19 bp, Homo sapiens
  siRNA target sequence for MMRN (NM_007351.1,350-368).
gggtgtgagaaatcaaact

SEQ ID NO: 314375 - DNA, 19 bp, Homo sapiens
  siRNA target sequence for MMRN (NM_007351.1,427-445).
ccaacgctagcatcaagtt

SEQ ID NO: 314376 - DNA, 19 bp, Homo sapiens
  siRNA target sequence for MMRN (NM_007351.1,431-449).
cgctagcatcaagttcaat

SEQ ID NO: 314377 - DNA, 19 bp, Homo sapiens
  siRNA target sequence for MMRN (NM_007351.1,446-464).
caatcctggagcagaatca

SEQ ID NO: 314378 - DNA, 19 bp, Homo sapiens
  siRNA target sequence for MMRN (NM_007351.1,502-520).
gctttgccagaaagtcaaa

SEQ ID NO: 314379 - DNA, 19 bp, Homo sapiens
  siRNA target sequence for MMRN (NM_007351.1,600-618).
cgagccccacgggaaacat

SEQ ID NO: 314380 - DNA, 19 bp, Homo sapiens
  siRNA target sequence for MMRN (NM_007351.1,695-713).
gaattggtgtgcttatgta

SEQ ID NO: 314381 - DNA, 19 bp, Homo sapiens
  siRNA target sequence for MMRN (NM_007351.1,743-761).
ggacaaccaggtcacttat

SEQ ID NO: 314382 - DNA, 19 bp, Homo sapiens
  siRNA target sequence for MMRN (NM_007351.1,824-842).
gatatccaatcctgtctat

SEQ ID NO: 314383 - DNA, 19 bp, Homo sapiens
  siRNA target sequence for MMRN (NM_007351.1,837-855).
gtctataggatgcaacata

SEQ ID NO: 314384 - DNA, 19 bp, Homo sapiens
  siRNA target sequence for MMRN (NM_007351.1,839-857).
ctataggatgcaacataaa

SEQ ID NO: 314385 - DNA, 19 bp, Homo sapiens
  siRNA target sequence for MMRN (NM_007351.1,896-914).
cagtgggccgaaatgtcaa

SEQ ID NO: 314386 - DNA, 19 bp, Homo sapiens
  siRNA target sequence for MMRN (NM_007351.1,900-918).
gggccgaaatgtcaactaa

SEQ ID NO: 314387 - DNA, 19 bp, Homo sapiens
  siRNA target sequence for MMRN (NM_007351.1,921-939).
gcccaggaacagcaaagtt

SEQ ID NO: 314388 - DNA, 19 bp, Homo sapiens
  siRNA target sequence for MMRN (NM_007351.1,926-944).
ggaacagcaaagtttgata

SEQ ID NO: 314389 - DNA, 19 bp, Homo sapiens
  siRNA target sequence for MMRN (NM_007351.1,930-948).
cagcaaagtttgatacaca

SEQ ID NO: 314390 - DNA, 19 bp, Homo sapiens
  siRNA target sequence for MMRN (NM_007351.1,1122-1140).
gatgtaaggaacacttact

SEQ ID NO: 314391 - DNA, 19 bp, Homo sapiens
  siRNA target sequence for MMRN (NM_007351.1,1152-1170).
ggaaaagtcagcgaagata

SEQ ID NO: 314392 - DNA, 19 bp, Homo sapiens
  siRNA target sequence for MMRN (NM_007351.1,1153-1171).
gaaaagtcagcgaagataa

SEQ ID NO: 314393 - DNA, 19 bp, Homo sapiens
  siRNA target sequence for MMRN (NM_007351.1,1158-1176).
gtcagcgaagataaaagca

SEQ ID NO: 314394 - DNA, 19 bp, Homo sapiens
  siRNA target sequence for MMRN (NM_007351.1,1217-1235).
cattaatgtactgataaga

SEQ ID NO: 314395 - DNA, 19 bp, Homo sapiens
  siRNA target sequence for MMRN (NM_007351.1,1287-1305).
gtagcacagctcttcaaga

SEQ ID NO: 314396 - DNA, 19 bp, Homo sapiens
  siRNA target sequence for MMRN (NM_007351.1,1293-1311).
cagctcttcaagactgtat

SEQ ID NO: 314397 - DNA, 19 bp, Homo sapiens
  siRNA target sequence for MMRN (NM_007351.1,1295-1313).
gctcttcaagactgtatca

SEQ ID NO: 314398 - DNA, 19 bp, Homo sapiens
  siRNA target sequence for MMRN (NM_007351.1,1296-1314).
ctcttcaagactgtatcaa

SEQ ID NO: 314399 - DNA, 19 bp, Homo sapiens
  siRNA target sequence for MMRN (NM_007351.1,1301-1319).
caagactgtatcaagtcta

SEQ ID NO: 314400 - DNA, 19 bp, Homo sapiens
  siRNA target sequence for MMRN (NM_007351.1,1331-1349).
cgaaagcaccaggcaaata

SEQ ID NO: 314401 - DNA, 19 bp, Homo sapiens
  siRNA target sequence for MMRN (NM_007351.1,1332-1350).
gaaagcaccaggcaaataa

SEQ ID NO: 314402 - DNA, 19 bp, Homo sapiens
  siRNA target sequence for MMRN (NM_007351.1,1337-1355).
caccaggcaaataattcaa

SEQ ID NO: 314403 - DNA, 19 bp, Homo sapiens
  siRNA target sequence for MMRN (NM_007351.1,1446-1464).
ctaaggaatcacattgtga

SEQ ID NO: 314404 - DNA, 19 bp, Homo sapiens
  siRNA target sequence for MMRN (NM_007351.1,1451-1469).
gaatcacattgtgaatgta

SEQ ID NO: 314405 - DNA, 19 bp, Homo sapiens
  siRNA target sequence for MMRN (NM_007351.1,1461-1479).
gtgaatgtaaggcaagaaa

SEQ ID NO: 314406 - DNA, 19 bp, Homo sapiens
  siRNA target sequence for MMRN (NM_007351.1,1489-1507).
catgtgagaagcctattaa

SEQ ID NO: 314407 - DNA, 19 bp, Homo sapiens
  siRNA target sequence for MMRN (NM_007351.1,1492-1510).
gtgagaagcctattaaaga

SEQ ID NO: 314408 - DNA, 19 bp, Homo sapiens
  siRNA target sequence for MMRN (NM_007351.1,1501-1519).
ctattaaagaactagaagt

SEQ ID NO: 314409 - DNA, 19 bp, Homo sapiens
  siRNA target sequence for MMRN (NM_007351.1,1515-1533).
gaagtaaagcagactcatt

SEQ ID NO: 314410 - DNA, 19 bp, Homo sapiens
  siRNA target sequence for MMRN (NM_007351.1,1553-1571).
ggaacactcaagaagcatt

SEQ ID NO: 314411 - DNA, 19 bp, Homo sapiens
  siRNA target sequence for MMRN (NM_007351.1,1557-1575).
cactcaagaagcattctgt

SEQ ID NO: 314412 - DNA, 19 bp, Homo sapiens
  siRNA target sequence for MMRN (NM_007351.1,1636-1654).
caactgaacaggtatcaga

SEQ ID NO: 314413 - DNA, 19 bp, Homo sapiens
  siRNA target sequence for MMRN (NM_007351.1,1646-1664).
ggtatcagaccagaagaat

SEQ ID NO: 314414 - DNA, 19 bp, Homo sapiens
  siRNA target sequence for MMRN (NM_007351.1,1668-1686).
ccagctgctgagtcagtta

SEQ ID NO: 314415 - DNA, 19 bp, Homo sapiens
  siRNA target sequence for MMRN (NM_007351.1,1672-1690).
ctgctgagtcagttagcaa

SEQ ID NO: 314416 - DNA, 19 bp, Homo sapiens
  siRNA target sequence for MMRN (NM_007351.1,1674-1692).
gctgagtcagttagcaata

SEQ ID NO: 314417 - DNA, 19 bp, Homo sapiens
  siRNA target sequence for MMRN (NM_007351.1,1675-1693).
ctgagtcagttagcaataa

SEQ ID NO: 314418 - DNA, 19 bp, Homo sapiens
  siRNA target sequence for MMRN (NM_007351.1,1699-1717).
ctgagtacatgtctacttt

SEQ ID NO: 314419 - DNA, 19 bp, Homo sapiens
  siRNA target sequence for MMRN (NM_007351.1,1709-1727).
gtctactttacatgaaaat

SEQ ID NO: 314420 - DNA, 19 bp, Homo sapiens
  siRNA target sequence for MMRN (NM_007351.1,1751-1769).
gctgcaaatgtttgaagat

SEQ ID NO: 314421 - DNA, 19 bp, Homo sapiens
  siRNA target sequence for MMRN (NM_007351.1,1779-1797).
caagaaagcaagattaaca

SEQ ID NO: 314422 - DNA, 19 bp, Homo sapiens
  siRNA target sequence for MMRN (NM_007351.1,1829-1847).
gtctctcagaggtgaatgt

SEQ ID NO: 314423 - DNA, 19 bp, Homo sapiens
  siRNA target sequence for MMRN (NM_007351.1,1846-1864).
gtgaagacatgttatccaa

SEQ ID NO: 314424 - DNA, 19 bp, Homo sapiens
  siRNA target sequence for MMRN (NM_007351.1,1930-1948).
cattggctgaagttctctt

SEQ ID NO: 314425 - DNA, 19 bp, Homo sapiens
  siRNA target sequence for MMRN (NM_007351.1,1944-1962).
ctctttccaatggacaata

SEQ ID NO: 314426 - DNA, 19 bp, Homo sapiens
  siRNA target sequence for MMRN (NM_007351.1,1980-1998).
gagcaactaaatgatttga

SEQ ID NO: 314427 - DNA, 19 bp, Homo sapiens
  siRNA target sequence for MMRN (NM_007351.1,1982-2000).
gcaactaaatgatttgact

SEQ ID NO: 314428 - DNA, 19 bp, Homo sapiens
  siRNA target sequence for MMRN (NM_007351.1,2112-2130).
ctgactagtgctgtcaata

SEQ ID NO: 314429 - DNA, 19 bp, Homo sapiens
  siRNA target sequence for MMRN (NM_007351.1,2114-2132).
gactagtgctgtcaatagt

SEQ ID NO: 314430 - DNA, 19 bp, Homo sapiens
  siRNA target sequence for MMRN (NM_007351.1,2119-2137).
gtgctgtcaatagtctaaa

SEQ ID NO: 314431 - DNA, 19 bp, Homo sapiens
  siRNA target sequence for MMRN (NM_007351.1,2121-2139).
gctgtcaatagtctaaatt

SEQ ID NO: 314432 - DNA, 19 bp, Homo sapiens
  siRNA target sequence for MMRN (NM_007351.1,2122-2140).
ctgtcaatagtctaaattt

SEQ ID NO: 314433 - DNA, 19 bp, Homo sapiens
  siRNA target sequence for MMRN (NM_007351.1,2124-2142).
gtcaatagtctaaatttta

SEQ ID NO: 314434 - DNA, 19 bp, Homo sapiens
  siRNA target sequence for MMRN (NM_007351.1,2164-2182).
gacacaacttacttagaaa

SEQ ID NO: 314435 - DNA, 19 bp, Homo sapiens
  siRNA target sequence for MMRN (NM_007351.1,2196-2214).
cgtgatgatgccttagaaa

SEQ ID NO: 314436 - DNA, 19 bp, Homo sapiens
  siRNA target sequence for MMRN (NM_007351.1,2207-2225).
cttagaaagacgtatcaat

SEQ ID NO: 314437 - DNA, 19 bp, Homo sapiens
  siRNA target sequence for MMRN (NM_007351.1,2250-2268).
ggcctcaataagacaatga

SEQ ID NO: 314438 - DNA, 19 bp, Homo sapiens
  siRNA target sequence for MMRN (NM_007351.1,2252-2270).
cctcaataagacaatgact

SEQ ID NO: 314439 - DNA, 19 bp, Homo sapiens
  siRNA target sequence for MMRN (NM_007351.1,2253-2271).
ctcaataagacaatgacta

SEQ ID NO: 314440 - DNA, 19 bp, Homo sapiens
  siRNA target sequence for MMRN (NM_007351.1,2332-2350).
ctattaaggataatagtga

SEQ ID NO: 314441 - DNA, 19 bp, Homo sapiens
  siRNA target sequence for MMRN (NM_007351.1,2368-2386).
cctccgatatggaaactat

SEQ ID NO: 314442 - DNA, 19 bp, Homo sapiens
  siRNA target sequence for MMRN (NM_007351.1,2369-2387).
ctccgatatggaaactatt

SEQ ID NO: 314443 - DNA, 19 bp, Homo sapiens
  siRNA target sequence for MMRN (NM_007351.1,2371-2389).
ccgatatggaaactatttt

SEQ ID NO: 314444 - DNA, 19 bp, Homo sapiens
  siRNA target sequence for MMRN (NM_007351.1,2379-2397).
gaaactattttgacattta

SEQ ID NO: 314445 - DNA, 19 bp, Homo sapiens
  siRNA target sequence for MMRN (NM_007351.1,2405-2423).
gttccaccgtctgaatgat

SEQ ID NO: 314446 - DNA, 19 bp, Homo sapiens
  siRNA target sequence for MMRN (NM_007351.1,2409-2427).
caccgtctgaatgattcta

SEQ ID NO: 314447 - DNA, 19 bp, Homo sapiens
  siRNA target sequence for MMRN (NM_007351.1,2411-2429).
ccgtctgaatgattctatt

SEQ ID NO: 314448 - DNA, 19 bp, Homo sapiens
  siRNA target sequence for MMRN (NM_007351.1,2441-2459).
caatgacaatcagagatat

SEQ ID NO: 314449 - DNA, 19 bp, Homo sapiens
  siRNA target sequence for MMRN (NM_007351.1,2445-2463).
gacaatcagagatataact

SEQ ID NO: 314450 - DNA, 19 bp, Homo sapiens
  siRNA target sequence for MMRN (NM_007351.1,2480-2498).
caagacccttgcaggtatt

SEQ ID NO: 314451 - DNA, 19 bp, Homo sapiens
  siRNA target sequence for MMRN (NM_007351.1,2503-2521).
gagatgagaaactaaatca

SEQ ID NO: 314452 - DNA, 19 bp, Homo sapiens
  siRNA target sequence for MMRN (NM_007351.1,2505-2523).
gatgagaaactaaatcagt

SEQ ID NO: 314453 - DNA, 19 bp, Homo sapiens
  siRNA target sequence for MMRN (NM_007351.1,2616-2634).
ctcttaactaccaagattt

SEQ ID NO: 314454 - DNA, 19 bp, Homo sapiens
  siRNA target sequence for MMRN (NM_007351.1,2650-2668).
ctcggttgcaagacattga

SEQ ID NO: 314455 - DNA, 19 bp, Homo sapiens
  siRNA target sequence for MMRN (NM_007351.1,2652-2670).
cggttgcaagacattgagt

SEQ ID NO: 314456 - DNA, 19 bp, Homo sapiens
  siRNA target sequence for MMRN (NM_007351.1,2680-2698).
cccagacgctcatacctta

SEQ ID NO: 314457 - DNA, 19 bp, Homo sapiens
  siRNA target sequence for MMRN (NM_007351.1,2681-2699).
ccagacgctcataccttat

SEQ ID NO: 314458 - DNA, 19 bp, Homo sapiens
  siRNA target sequence for MMRN (NM_007351.1,2686-2704).
cgctcataccttattatat

SEQ ID NO: 314459 - DNA, 19 bp, Homo sapiens
  siRNA target sequence for MMRN (NM_007351.1,2687-2705).
gctcataccttattatatt

SEQ ID NO: 314460 - DNA, 19 bp, Homo sapiens
  siRNA target sequence for MMRN (NM_007351.1,2719-2737).
gcagtgtagttacaaatga

SEQ ID NO: 314461 - DNA, 19 bp, Homo sapiens
  siRNA target sequence for MMRN (NM_007351.1,2740-2758).
gagatcaggctcttcaact

SEQ ID NO: 314462 - DNA, 19 bp, Homo sapiens
  siRNA target sequence for MMRN (NM_007351.1,2751-2769).
cttcaactgcaagtattaa

SEQ ID NO: 314463 - DNA, 19 bp, Homo sapiens
  siRNA target sequence for MMRN (NM_007351.1,2783-2801).
ggcgttggaagcaaaatct

SEQ ID NO: 314464 - DNA, 19 bp, Homo sapiens
  siRNA target sequence for MMRN (NM_007351.1,2784-2802).
gcgttggaagcaaaatcta

SEQ ID NO: 314465 - DNA, 19 bp, Homo sapiens
  siRNA target sequence for MMRN (NM_007351.1,2785-2803).
cgttggaagcaaaatctat

SEQ ID NO: 314466 - DNA, 19 bp, Homo sapiens
  siRNA target sequence for MMRN (NM_007351.1,2789-2807).
ggaagcaaaatctatccat

SEQ ID NO: 314467 - DNA, 19 bp, Homo sapiens
  siRNA target sequence for MMRN (NM_007351.1,2822-2840).
cttttcgcttaacaaaact

SEQ ID NO: 314468 - DNA, 19 bp, Homo sapiens
  siRNA target sequence for MMRN (NM_007351.1,2844-2862).
cacgaagttttaacaatgt

SEQ ID NO: 314469 - DNA, 19 bp, Homo sapiens
  siRNA target sequence for MMRN (NM_007351.1,2861-2879).
gtgtcacaatgcttctaca

SEQ ID NO: 314470 - DNA, 19 bp, Homo sapiens
  siRNA target sequence for MMRN (NM_007351.1,2883-2901).
gtgtcagaactgaatgcta

SEQ ID NO: 314471 - DNA, 19 bp, Homo sapiens
  siRNA target sequence for MMRN (NM_007351.1,2902-2920).
ccatccctaagtggataaa

SEQ ID NO: 314472 - DNA, 19 bp, Homo sapiens
  siRNA target sequence for MMRN (NM_007351.1,2903-2921).
catccctaagtggataaaa

SEQ ID NO: 314473 - DNA, 19 bp, Homo sapiens
  siRNA target sequence for MMRN (NM_007351.1,2906-2924).
ccctaagtggataaaacat

SEQ ID NO: 314474 - DNA, 19 bp, Homo sapiens
  siRNA target sequence for MMRN (NM_007351.1,2926-2944).
ccctgccagatattcaact

SEQ ID NO: 314475 - DNA, 19 bp, Homo sapiens
  siRNA target sequence for MMRN (NM_007351.1,2930-2948).
gccagatattcaacttctt

SEQ ID NO: 314476 - DNA, 19 bp, Homo sapiens
  siRNA target sequence for MMRN (NM_007351.1,2949-2967).
cagaaaggtctaacagaat

SEQ ID NO: 314477 - DNA, 19 bp, Homo sapiens
  siRNA target sequence for MMRN (NM_007351.1,2951-2969).
gaaaggtctaacagaattt

SEQ ID NO: 314478 - DNA, 19 bp, Homo sapiens
  siRNA target sequence for MMRN (NM_007351.1,2972-2990).
ggaaccaataattcaaata

SEQ ID NO: 314479 - DNA, 19 bp, Homo sapiens
  siRNA target sequence for MMRN (NM_007351.1,2973-2991).
gaaccaataattcaaataa

SEQ ID NO: 314480 - DNA, 19 bp, Homo sapiens
  siRNA target sequence for MMRN (NM_007351.1,2995-3013).
ctcaagctgccctatctaa

SEQ ID NO: 314481 - DNA, 19 bp, Homo sapiens
  siRNA target sequence for MMRN (NM_007351.1,2997-3015).
caagctgccctatctaatt

SEQ ID NO: 314482 - DNA, 19 bp, Homo sapiens
  siRNA target sequence for MMRN (NM_007351.1,3116-3134).
gaaaccaacggtaaatctt

SEQ ID NO: 314483 - DNA, 19 bp, Homo sapiens
  siRNA target sequence for MMRN (NM_007351.1,3144-3162).
ctgataggccggactcaaa

SEQ ID NO: 314484 - DNA, 19 bp, Homo sapiens
  siRNA target sequence for MMRN (NM_007351.1,3146-3164).
gataggccggactcaaaga

SEQ ID NO: 314485 - DNA, 19 bp, Homo sapiens
  siRNA target sequence for MMRN (NM_007351.1,3150-3168).
ggccggactcaaagaaaca

SEQ ID NO: 314486 - DNA, 19 bp, Homo sapiens
  siRNA target sequence for MMRN (NM_007351.1,3163-3181).
gaaacacggacaacataat

SEQ ID NO: 314487 - DNA, 19 bp, Homo sapiens
  siRNA target sequence for MMRN (NM_007351.1,3167-3185).
cacggacaacataatatat

SEQ ID NO: 314488 - DNA, 19 bp, Homo sapiens
  siRNA target sequence for MMRN (NM_007351.1,3170-3188).
ggacaacataatatatcct

SEQ ID NO: 314489 - DNA, 19 bp, Homo sapiens
  siRNA target sequence for MMRN (NM_007351.1,3231-3249).
ggcacgtgcataaatggaa

SEQ ID NO: 314490 - DNA, 19 bp, Homo sapiens
  siRNA target sequence for MMRN (NM_007351.1,3269-3287).
ctgcagacatccttttact

SEQ ID NO: 314491 - DNA, 19 bp, Homo sapiens
  siRNA target sequence for MMRN (NM_007351.1,3288-3306).
ggtgacaactgcactatca

SEQ ID NO: 314492 - DNA, 19 bp, Homo sapiens
  siRNA target sequence for MMRN (NM_007351.1,3289-3307).
gtgacaactgcactatcaa

SEQ ID NO: 314493 - DNA, 19 bp, Homo sapiens
  siRNA target sequence for MMRN (NM_007351.1,3344-3362).
caaaggatcttacagatat

SEQ ID NO: 314494 - DNA, 19 bp, Homo sapiens
  siRNA target sequence for MMRN (NM_007351.1,3390-3408).
catacgtatggaatgacta

SEQ ID NO: 314495 - DNA, 19 bp, Homo sapiens
  siRNA target sequence for MMRN (NM_007351.1,3434-3452).
cttggatgtcaattatgga

SEQ ID NO: 314496 - DNA, 19 bp, Homo sapiens
  siRNA target sequence for MMRN (NM_007351.1,3498-3516).
ggagtatatgttttcaagt

SEQ ID NO: 314497 - DNA, 19 bp, Homo sapiens
  siRNA target sequence for MMRN (NM_007351.1,3515-3533).
gtacaccatcgagtcattt

SEQ ID NO: 314498 - DNA, 19 bp, Homo sapiens
  siRNA target sequence for MMRN (NM_007351.1,3518-3536).
caccatcgagtcatttagt

SEQ ID NO: 314499 - DNA, 19 bp, Homo sapiens
  siRNA target sequence for MMRN (NM_007351.1,3558-3576).
gtggttgatggaatagaca

SEQ ID NO: 314500 - DNA, 19 bp, Homo sapiens
  siRNA target sequence for MMRN (NM_007351.1,3583-3601).
catttgagtctgaaaatat

SEQ ID NO: 314501 - DNA, 19 bp, Homo sapiens
  siRNA target sequence for MMRN (NM_007351.1,3617-3635).
ctgtgatagggttttaact

SEQ ID NO: 314502 - DNA, 19 bp, Homo sapiens
  siRNA target sequence for MMRN (NM_007351.1,3634-3652).
ctggggatgccttattaga

SEQ ID NO: 314503 - DNA, 19 bp, Homo sapiens
  siRNA target sequence for MMRN (NM_007351.1,3638-3656).
ggatgccttattagaatta

SEQ ID NO: 314504 - DNA, 19 bp, Homo sapiens
  siRNA target sequence for MMRN (NM_007351.1,3674-3692).
ctggttacgacttgcaaaa

SEQ ID NO: 314505 - DNA, 19 bp, Homo sapiens
  siRNA target sequence for MMRN (NM_007351.1,3707-3725).
caagtttccccctgttact

SEQ ID NO: 314506 - DNA, 19 bp, Homo sapiens
  siRNA target sequence for MMRN (NM_007351.1,3716-3734).
ccctgttactacatttagt

SEQ ID NO: 314507 - DNA, 19 bp, Homo sapiens
  siRNA target sequence for TRO (NM_016157.2,130-148).
gatatagggtgcctctatt

SEQ ID NO: 314508 - DNA, 19 bp, Homo sapiens
  siRNA target sequence for TRO (NM_016157.2,294-312).
gtcaaccggcctaagaaaa

SEQ ID NO: 314509 - DNA, 19 bp, Homo sapiens
  siRNA target sequence for TRO (NM_016157.2,323-341).
gaaggcccctataaagact

SEQ ID NO: 314510 - DNA, 19 bp, Homo sapiens
  siRNA target sequence for TRO (NM_016157.2,329-347).
ccctataaagactattact

SEQ ID NO: 314511 - DNA, 19 bp, Homo sapiens
  siRNA target sequence for TRO (NM_016157.2,330-348).
cctataaagactattacta

SEQ ID NO: 314512 - DNA, 19 bp, Homo sapiens
  siRNA target sequence for TRO (NM_016157.2,449-467).
gatcagccaggctttacct

SEQ ID NO: 314513 - DNA, 19 bp, Homo sapiens
  siRNA target sequence for TRO (NM_016157.2,472-490).
ctgaggtaaccaatactca

SEQ ID NO: 314514 - DNA, 19 bp, Homo sapiens
  siRNA target sequence for TRO (NM_016157.2,614-632).
cttgcaggtcctaaagcta

SEQ ID NO: 314515 - DNA, 19 bp, Homo sapiens
  siRNA target sequence for TRO (NM_016157.2,647-665).
gaatattcacgctccaatt

SEQ ID NO: 314516 - DNA, 19 bp, Homo sapiens
  siRNA target sequence for TRO (NM_016157.2,657-675).
gctccaattgccaatgagt

SEQ ID NO: 314517 - DNA, 19 bp, Homo sapiens
  siRNA target sequence for TRO (NM_016157.2,680-698).
cagttcccaagccttgata

SEQ ID NO: 314518 - DNA, 19 bp, Homo sapiens
  siRNA target sequence for TRO (NM_016157.2,690-708).
gccttgataacctctatca

SEQ ID NO: 314519 - DNA, 19 bp, Homo sapiens
  siRNA target sequence for TRO (NM_016157.2,691-709).
ccttgataacctctatcaa

SEQ ID NO: 314520 - DNA, 19 bp, Homo sapiens
  siRNA target sequence for TRO (NM_016157.2,700-718).
cctctatcaagcctaagaa

SEQ ID NO: 314521 - DNA, 19 bp, Homo sapiens
  siRNA target sequence for TRO (NM_016157.2,728-746).
ggctaagaaggctgcaaat

SEQ ID NO: 314522 - DNA, 19 bp, Homo sapiens
  siRNA target sequence for TRO (NM_016157.2,741-759).
gcaaataaggccatagcta

SEQ ID NO: 314523 - DNA, 19 bp, Homo sapiens
  siRNA target sequence for TRO (NM_016157.2,808-826).
cccaaggccaaattaccaa

SEQ ID NO: 314524 - DNA, 19 bp, Homo sapiens
  siRNA target sequence for TRO (NM_016157.2,885-903).
gccaggaagacaattgcta

SEQ ID NO: 314525 - DNA, 19 bp, Homo sapiens
  siRNA target sequence for TRO (NM_016157.2,901-919).
ctaaggtcataaatactga

SEQ ID NO: 314526 - DNA, 19 bp, Homo sapiens
  siRNA target sequence for TRO (NM_016157.2,916-934).
ctgacactgagcatataga

SEQ ID NO: 314527 - DNA, 19 bp, Homo sapiens
  siRNA target sequence for TRO (NM_016157.2,926-944).
gcatatagaggctctaaat

SEQ ID NO: 314528 - DNA, 19 bp, Homo sapiens
  siRNA target sequence for TRO (NM_016157.2,987-1005).
gctatcaggcccaaaaaat

SEQ ID NO: 314529 - DNA, 19 bp, Homo sapiens
  siRNA target sequence for TRO (NM_016157.2,1064-1082).
cccacttgccactcagata

SEQ ID NO: 314530 - DNA, 19 bp, Homo sapiens
  siRNA target sequence for TRO (NM_016157.2,1068-1086).
cttgccactcagatagtca

SEQ ID NO: 314531 - DNA, 19 bp, Homo sapiens
  siRNA target sequence for TRO (NM_016157.2,1268-1286).
ggccctggcagatgactat

SEQ ID NO: 314532 - DNA, 19 bp, Homo sapiens
  siRNA target sequence for TRO (NM_016157.2,1365-1383).
gagagaagtggcagtaatt

SEQ ID NO: 314533 - DNA, 19 bp, Homo sapiens
  siRNA target sequence for TRO (NM_016157.2,1420-1438).
cgcgagatgtggccatttt

SEQ ID NO: 314534 - DNA, 19 bp, Homo sapiens
  siRNA target sequence for TRO (NM_016157.2,1421-1439).
gcgagatgtggccatttta

SEQ ID NO: 314535 - DNA, 19 bp, Homo sapiens
  siRNA target sequence for TRO (NM_016157.2,1440-1458).
caagaaagggctaataagt

SEQ ID NO: 314536 - DNA, 19 bp, Homo sapiens
  siRNA target sequence for TRO (NM_016157.2,1589-1607).
gaagatgtttcgagtcaat

SEQ ID NO: 314537 - DNA, 19 bp, Homo sapiens
  siRNA target sequence for TRO (NM_016157.2,1599-1617).
cgagtcaatctgaaagaaa

SEQ ID NO: 314538 - DNA, 19 bp, Homo sapiens
  siRNA target sequence for TRO (NM_016157.2,1600-1618).
gagtcaatctgaaagaaat

SEQ ID NO: 314539 - DNA, 19 bp, Homo sapiens
  siRNA target sequence for TRO (NM_016157.2,1630-1648).
gtagcttgtatattctcat

SEQ ID NO: 314540 - DNA, 19 bp, Homo sapiens
  siRNA target sequence for TRO (NM_016157.2,1898-1916).
cagcagaccacctgaatat

SEQ ID NO: 314541 - DNA, 19 bp, Homo sapiens
  siRNA target sequence for TRO (NM_016157.2,1900-1918).
gcagaccacctgaatatga

SEQ ID NO: 314542 - DNA, 19 bp, Homo sapiens
  siRNA target sequence for TRO (NM_016157.2,1903-1921).
gaccacctgaatatgagtt

SEQ ID NO: 314543 - DNA, 19 bp, Homo sapiens
  siRNA target sequence for TRO (NM_016157.2,1978-1996).
catgcagggtgcagaagaa

SEQ ID NO: 314544 - DNA, 19 bp, Homo sapiens
  siRNA target sequence for TRO (NM_016157.2,2079-2097).
gaagccagggctgagattt

SEQ ID NO: 314545 - DNA, 19 bp, Homo sapiens
  siRNA target sequence for TRO (NM_016157.2,2082-2100).
gccagggctgagatttatt

SEQ ID NO: 314546 - DNA, 19 bp, Homo sapiens
  siRNA target sequence for TRO (NM_016157.2,2143-2161).
cccatggagccaaagtaca

SEQ ID NO: 314547 - DNA, 19 bp, Homo sapiens
  siRNA target sequence for TRO (NM_016157.2,2144-2162).
ccatggagccaaagtacat

SEQ ID NO: 314548 - DNA, 19 bp, Homo sapiens
  siRNA target sequence for BYSL (NM_004053.2,631-649).
ggggtccgggaggtattat

SEQ ID NO: 314549 - DNA, 19 bp, Homo sapiens
  siRNA target sequence for BYSL (NM_004053.2,634-652).
gtccgggaggtattatcta

SEQ ID NO: 314550 - DNA, 19 bp, Homo sapiens
  siRNA target sequence for BYSL (NM_004053.2,637-655).
cgggaggtattatctaagt

SEQ ID NO: 314551 - DNA, 19 bp, Homo sapiens
  siRNA target sequence for BYSL (NM_004053.2,638-656).
gggaggtattatctaagta

SEQ ID NO: 314552 - DNA, 19 bp, Homo sapiens
  siRNA target sequence for BYSL (NM_004053.2,670-688).
ctgcccaaggcatttaaga

SEQ ID NO: 314553 - DNA, 19 bp, Homo sapiens
  siRNA target sequence for BYSL (NM_004053.2,673-691).
cccaaggcatttaagatca

SEQ ID NO: 314554 - DNA, 19 bp, Homo sapiens
  siRNA target sequence for BYSL (NM_004053.2,704-722).
ccaactgggagcaaatcct

SEQ ID NO: 314555 - DNA, 19 bp, Homo sapiens
  siRNA target sequence for BYSL (NM_004053.2,848-866).
gagatgacgttgctgaata

SEQ ID NO: 314556 - DNA, 19 bp, Homo sapiens
  siRNA target sequence for BYSL (NM_004053.2,850-868).
gatgacgttgctgaataca

SEQ ID NO: 314557 - DNA, 19 bp, Homo sapiens
  siRNA target sequence for BYSL (NM_004053.2,872-890).
gactcaacttccatctcta

SEQ ID NO: 314558 - DNA, 19 bp, Homo sapiens
  siRNA target sequence for BYSL (NM_004053.2,1040-1058).
gtgcggccatgctgaaaat

SEQ ID NO: 314559 - DNA, 19 bp, Homo sapiens
  siRNA target sequence for BYSL (NM_004053.2,1099-1117).
cgactgctgctggataaga

SEQ ID NO: 314560 - DNA, 19 bp, Homo sapiens
  siRNA target sequence for BYSL (NM_004053.2,1104-1122).
gctgctggataagaagtat

SEQ ID NO: 314561 - DNA, 19 bp, Homo sapiens
  siRNA target sequence for PSG6 (NM_002782.3,145-163).
caccactgcccaagtaata

SEQ ID NO: 314562 - DNA, 19 bp, Homo sapiens
  siRNA target sequence for CSN1S1 (NM_001890.1,87-105).
ctcttgccaggcctaaact

SEQ ID NO: 314563 - DNA, 19 bp, Homo sapiens
  siRNA target sequence for CSN1S1 (NM_001890.1,145-163).
gagcagtgagcctatacca

SEQ ID NO: 314564 - DNA, 19 bp, Homo sapiens
  siRNA target sequence for CSN1S1 (NM_001890.1,154-172).
gcctataccattagaatca

SEQ ID NO: 314565 - DNA, 19 bp, Homo sapiens
  siRNA target sequence for CSN1S1 (NM_001890.1,176-194).
gaggaatacatgaatggta

SEQ ID NO: 314566 - DNA, 19 bp, Homo sapiens
  siRNA target sequence for CSN1S1 (NM_001890.1,233-251).
gatgaaatcaaggatacta

SEQ ID NO: 314567 - DNA, 19 bp, Homo sapiens
  siRNA target sequence for CSN1S1 (NM_001890.1,326-344).
gaaatgtctctcagtaagt

SEQ ID NO: 314568 - DNA, 19 bp, Homo sapiens
  siRNA target sequence for CSN1S1 (NM_001890.1,339-357).
gtaagtgtgcggaacagtt

SEQ ID NO: 314569 - DNA, 19 bp, Homo sapiens
  siRNA target sequence for CSN1S1 (NM_001890.1,360-378).
gtagactgaacgaatacaa

SEQ ID NO: 314570 - DNA, 19 bp, Homo sapiens
  siRNA target sequence for CSN1S1 (NM_001890.1,487-505).
ctatgctgtttggtactat

SEQ ID NO: 314571 - DNA, 19 bp, Homo sapiens
  siRNA target sequence for CSN1S1 (NM_001890.1,498-516).
ggtactatccacaaatcat

SEQ ID NO: 314572 - DNA, 19 bp, Homo sapiens
  siRNA target sequence for CSN1S1 (NM_001890.1,507-525).
cacaaatcatgcagtatgt

SEQ ID NO: 314573 - DNA, 19 bp, Homo sapiens
  siRNA target sequence for CSN1S1 (NM_001890.1,559-577).
cactgctcatgaaaattat

SEQ ID NO: 314574 - DNA, 19 bp, Homo sapiens
  siRNA target sequence for NPHS1 (NM_004646.1,311-329).
gcgatgacgcggagtatga

SEQ ID NO: 314575 - DNA, 19 bp, Homo sapiens
  siRNA target sequence for NPHS1 (NM_004646.1,522-540).
cctgagtggacagacaata

SEQ ID NO: 314576 - DNA, 19 bp, Homo sapiens
  siRNA target sequence for NPHS1 (NM_004646.1,523-541).
ctgagtggacagacaatat

SEQ ID NO: 314577 - DNA, 19 bp, Homo sapiens
  siRNA target sequence for NPHS1 (NM_004646.1,614-632).
caccccggagctcagataa

SEQ ID NO: 314578 - DNA, 19 bp, Homo sapiens
  siRNA target sequence for NPHS1 (NM_004646.1,616-634).
ccccggagctcagataata

SEQ ID NO: 314579 - DNA, 19 bp, Homo sapiens
  siRNA target sequence for NPHS1 (NM_004646.1,1015-1033).
ccccctagtgccattatta

SEQ ID NO: 314580 - DNA, 19 bp, Homo sapiens
  siRNA target sequence for NPHS1 (NM_004646.1,1016-1034).
cccctagtgccattattat

SEQ ID NO: 314581 - DNA, 19 bp, Homo sapiens
  siRNA target sequence for NPHS1 (NM_004646.1,1018-1036).
cctagtgccattattatct

SEQ ID NO: 314582 - DNA, 19 bp, Homo sapiens
  siRNA target sequence for NPHS1 (NM_004646.1,1019-1037).
ctagtgccattattatctt

SEQ ID NO: 314583 - DNA, 19 bp, Homo sapiens
  siRNA target sequence for NPHS1 (NM_004646.1,1046-1064).
catcccagactgagaacaa

SEQ ID NO: 314584 - DNA, 19 bp, Homo sapiens
  siRNA target sequence for NPHS1 (NM_004646.1,1295-1313).
cgctcatcctgaacgtaaa

SEQ ID NO: 314585 - DNA, 19 bp, Homo sapiens
  siRNA target sequence for NPHS1 (NM_004646.1,1296-1314).
gctcatcctgaacgtaaaa

SEQ ID NO: 314586 - DNA, 19 bp, Homo sapiens
  siRNA target sequence for NPHS1 (NM_004646.1,1297-1315).
ctcatcctgaacgtaaaat

SEQ ID NO: 314587 - DNA, 19 bp, Homo sapiens
  siRNA target sequence for NPHS1 (NM_004646.1,1495-1513).
ctcggcagcgtggagaaat

SEQ ID NO: 314588 - DNA, 19 bp, Homo sapiens
  siRNA target sequence for NPHS1 (NM_004646.1,1676-1694).
cgggagacgccttaaactt

SEQ ID NO: 314589 - DNA, 19 bp, Homo sapiens
  siRNA target sequence for NPHS1 (NM_004646.1,1678-1696).
ggagacgccttaaacttga

SEQ ID NO: 314590 - DNA, 19 bp, Homo sapiens
  siRNA target sequence for NPHS1 (NM_004646.1,1681-1699).
gacgccttaaacttgacat

SEQ ID NO: 314591 - DNA, 19 bp, Homo sapiens
  siRNA target sequence for NPHS1 (NM_004646.1,2135-2153).
cggacgacggcctctatca

SEQ ID NO: 314592 - DNA, 19 bp, Homo sapiens
  siRNA target sequence for NPHS1 (NM_004646.1,2263-2281).
ggttctgtggacatagtct

SEQ ID NO: 314593 - DNA, 19 bp, Homo sapiens
  siRNA target sequence for NPHS1 (NM_004646.1,2483-2501).
ggctgctccgtcttgttgt

SEQ ID NO: 314594 - DNA, 19 bp, Homo sapiens
  siRNA target sequence for NPHS1 (NM_004646.1,2490-2508).
ccgtcttgttgtcagattt

SEQ ID NO: 314595 - DNA, 19 bp, Homo sapiens
  siRNA target sequence for NPHS1 (NM_004646.1,2524-2542).
caccccactcccctaacta

SEQ ID NO: 314596 - DNA, 19 bp, Homo sapiens
  siRNA target sequence for NPHS1 (NM_004646.1,2602-2620).
gtccccaacatcgttttca

SEQ ID NO: 314597 - DNA, 19 bp, Homo sapiens
  siRNA target sequence for NPHS1 (NM_004646.1,2605-2623).
cccaacatcgttttcactt

SEQ ID NO: 314598 - DNA, 19 bp, Homo sapiens
  siRNA target sequence for NPHS1 (NM_004646.1,2613-2631).
cgttttcacttggacaaaa

SEQ ID NO: 314599 - DNA, 19 bp, Homo sapiens
  siRNA target sequence for NPHS1 (NM_004646.1,2740-2758).
gattacgccctcttcacat

SEQ ID NO: 314600 - DNA, 19 bp, Homo sapiens
  siRNA target sequence for NPHS1 (NM_004646.1,2781-2799).
ctcggaccaaaccaacatt

SEQ ID NO: 314601 - DNA, 19 bp, Homo sapiens
  siRNA target sequence for NPHS1 (NM_004646.1,2824-2842).
gaccctccatcaggattaa

SEQ ID NO: 314602 - DNA, 19 bp, Homo sapiens
  siRNA target sequence for NPHS1 (NM_004646.1,2945-2963).
ctccagggttccactatgt

SEQ ID NO: 314603 - DNA, 19 bp, Homo sapiens
  siRNA target sequence for NPHS1 (NM_004646.1,3004-3022).
ggtctacagccttctacaa

SEQ ID NO: 314604 - DNA, 19 bp, Homo sapiens
  siRNA target sequence for NPHS1 (NM_004646.1,3007-3025).
ctacagccttctacaagat

SEQ ID NO: 314605 - DNA, 19 bp, Homo sapiens
  siRNA target sequence for NPHS1 (NM_004646.1,3010-3028).
cagccttctacaagataca

SEQ ID NO: 314606 - DNA, 19 bp, Homo sapiens
  siRNA target sequence for NPHS1 (NM_004646.1,3322-3340).
gaccgagtcaggaacgaat

SEQ ID NO: 314607 - DNA, 19 bp, Homo sapiens
  siRNA target sequence for NPHS1 (NM_004646.1,3324-3342).
ccgagtcaggaacgaatat

SEQ ID NO: 314608 - DNA, 19 bp, Homo sapiens
  siRNA target sequence for NPHS1 (NM_004646.1,3326-3344).
gagtcaggaacgaatatga

SEQ ID NO: 314609 - DNA, 19 bp, Homo sapiens
  siRNA target sequence for NPHS1 (NM_004646.1,3398-3416).
cagaggcagagccgtatta

SEQ ID NO: 314610 - DNA, 19 bp, Homo sapiens
  siRNA target sequence for NPHS1 (NM_004646.1,3457-3475).
caggaggaggtgtcttatt

SEQ ID NO: 314611 - DNA, 19 bp, Homo sapiens
  siRNA target sequence for NPHS1 (NM_004646.1,3482-3500).
gtttcacaggtgaagatga

SEQ ID NO: 314612 - DNA, 19 bp, Homo sapiens
  siRNA target sequence for NPHS1 (NM_004646.1,3513-3531).
ccctgggcacttgtatgat

SEQ ID NO: 314613 - DNA, 19 bp, Homo sapiens
  siRNA target sequence for NPHS1 (NM_004646.1,3515-3533).
ctgggcacttgtatgatga

SEQ ID NO: 314614 - DNA, 19 bp, Homo sapiens
  siRNA target sequence for NPHS1 (NM_004646.1,3569-3587).
gacccctctacgatgaagt

SEQ ID NO: 314615 - DNA, 19 bp, Homo sapiens
  siRNA target sequence for NPHS1 (NM_004646.1,3614-3632).
ggcctgaagacacatatca

SEQ ID NO: 314616 - DNA, 19 bp, Homo sapiens
  siRNA target sequence for NPHS1 (NM_004646.1,3633-3651).
ggatccaagaggaatctat

SEQ ID NO: 314617 - DNA, 19 bp, Homo sapiens
  siRNA target sequence for NPHS2 (NM_014625.1,334-352).
cccgaggaaggtaccaaat

SEQ ID NO: 314618 - DNA, 19 bp, Homo sapiens
  siRNA target sequence for NPHS2 (NM_014625.1,337-355).
gaggaaggtaccaaatcct

SEQ ID NO: 314619 - DNA, 19 bp, Homo sapiens
  siRNA target sequence for NPHS2 (NM_014625.1,432-450).
ctggttctgcgtaaaggtt

SEQ ID NO: 314620 - DNA, 19 bp, Homo sapiens
  siRNA target sequence for NPHS2 (NM_014625.1,440-458).
gcgtaaaggttgtacaaga

SEQ ID NO: 314621 - DNA, 19 bp, Homo sapiens
  siRNA target sequence for NPHS2 (NM_014625.1,459-477).
gtatgaaagagtaattata

SEQ ID NO: 314622 - DNA, 19 bp, Homo sapiens
  siRNA target sequence for NPHS2 (NM_014625.1,606-624).
cgtgaccaaagacatgttt

SEQ ID NO: 314623 - DNA, 19 bp, Homo sapiens
  siRNA target sequence for NPHS2 (NM_014625.1,631-649).
gagatagatgccatttgct

SEQ ID NO: 314624 - DNA, 19 bp, Homo sapiens
  siRNA target sequence for NPHS2 (NM_014625.1,648-666).
ctactaccgaatggaaaat

SEQ ID NO: 314625 - DNA, 19 bp, Homo sapiens
  siRNA target sequence for NPHS2 (NM_014625.1,718-736).
cttgtgcaaaccactatga

SEQ ID NO: 314626 - DNA, 19 bp, Homo sapiens
  siRNA target sequence for NPHS2 (NM_014625.1,751-769).
catcgatccctcactgaaa

SEQ ID NO: 314627 - DNA, 19 bp, Homo sapiens
  siRNA target sequence for NPHS2 (NM_014625.1,816-834).
ggattcagtgacctgtatt

SEQ ID NO: 314628 - DNA, 19 bp, Homo sapiens
  siRNA target sequence for NPHS2 (NM_014625.1,839-857).
gaatcaaagtggagagaat

SEQ ID NO: 314629 - DNA, 19 bp, Homo sapiens
  siRNA target sequence for NPHS2 (NM_014625.1,1096-1114).
ccatttgacctactgaatt

SEQ ID NO: 314630 - DNA, 19 bp, Homo sapiens
  siRNA target sequence for NPHS2 (NM_014625.1,1177-1195).
gttgagccactaaatccta

SEQ ID NO: 314631 - DNA, 19 bp, Homo sapiens
  siRNA target sequence for NPHS2 (NM_014625.1,1180-1198).
gagccactaaatcctaaaa

SEQ ID NO: 314632 - DNA, 19 bp, Homo sapiens
  siRNA target sequence for NPHS2 (NM_014625.1,1200-1218).
gaaagactctcccatgtta

SEQ ID NO: 314633 - DNA, 19 bp, Homo sapiens
  siRNA target sequence for TG737 (NM_006531.2,248-266).
cggctataatgactacaat

SEQ ID NO: 314634 - DNA, 19 bp, Homo sapiens
  siRNA target sequence for TG737 (NM_006531.2,260-278).
ctacaatccaatctatgat

SEQ ID NO: 314635 - DNA, 19 bp, Homo sapiens
  siRNA target sequence for TG737 (NM_006531.2,281-299).
cgaggaattggagaatgat

SEQ ID NO: 314636 - DNA, 19 bp, Homo sapiens
  siRNA target sequence for TG737 (NM_006531.2,335-353).
cagaagacctccaataact

SEQ ID NO: 314637 - DNA, 19 bp, Homo sapiens
  siRNA target sequence for TG737 (NM_006531.2,342-360).
cctccaataactgctaaaa

SEQ ID NO: 314638 - DNA, 19 bp, Homo sapiens
  siRNA target sequence for TG737 (NM_006531.2,343-361).
ctccaataactgctaaaat

SEQ ID NO: 314639 - DNA, 19 bp, Homo sapiens
  siRNA target sequence for TG737 (NM_006531.2,371-389).
ggcagttactagacctata

SEQ ID NO: 314640 - DNA, 19 bp, Homo sapiens
  siRNA target sequence for TG737 (NM_006531.2,396-414).
ggatatgggtccaagacat

SEQ ID NO: 314641 - DNA, 19 bp, Homo sapiens
  siRNA target sequence for TG737 (NM_006531.2,797-815).
caatttggccagtcagtat

SEQ ID NO: 314642 - DNA, 19 bp, Homo sapiens
  siRNA target sequence for TG737 (NM_006531.2,834-852).
gccgaagcacttaacactt

SEQ ID NO: 314643 - DNA, 19 bp, Homo sapiens
  siRNA target sequence for TG737 (NM_006531.2,835-853).
ccgaagcacttaacactta

SEQ ID NO: 314644 - DNA, 19 bp, Homo sapiens
  siRNA target sequence for TG737 (NM_006531.2,836-854).
cgaagcacttaacacttat

SEQ ID NO: 314645 - DNA, 19 bp, Homo sapiens
  siRNA target sequence for TG737 (NM_006531.2,850-868).
cttatcaagttatagtcaa

SEQ ID NO: 314646 - DNA, 19 bp, Homo sapiens
  siRNA target sequence for TG737 (NM_006531.2,858-876).
gttatagtcaaaaataaga

SEQ ID NO: 314647 - DNA, 19 bp, Homo sapiens
  siRNA target sequence for TG737 (NM_006531.2,883-901).
gcaatgcaggaatattgaa

SEQ ID NO: 314648 - DNA, 19 bp, Homo sapiens
  siRNA target sequence for TG737 (NM_006531.2,978-996).
caagttccaagtgtcaata

SEQ ID NO: 314649 - DNA, 19 bp, Homo sapiens
  siRNA target sequence for TG737 (NM_006531.2,984-1002).
ccaagtgtcaataagcaaa

SEQ ID NO: 314650 - DNA, 19 bp, Homo sapiens
  siRNA target sequence for TG737 (NM_006531.2,1172-1190).
ggcattccaaaaattgatt

SEQ ID NO: 314651 - DNA, 19 bp, Homo sapiens
  siRNA target sequence for TG737 (NM_006531.2,1187-1205).
gattactgttccattagaa

SEQ ID NO: 314652 - DNA, 19 bp, Homo sapiens
  siRNA target sequence for TG737 (NM_006531.2,1192-1210).
ctgttccattagaaattga

SEQ ID NO: 314653 - DNA, 19 bp, Homo sapiens
  siRNA target sequence for TG737 (NM_006531.2,1236-1254).
gatgatcctcatactaact

SEQ ID NO: 314654 - DNA, 19 bp, Homo sapiens
  siRNA target sequence for TG737 (NM_006531.2,1334-1352).
gacatctgcaaaactcatt

SEQ ID NO: 314655 - DNA, 19 bp, Homo sapiens
  siRNA target sequence for TG737 (NM_006531.2,1398-1416).
gtggaagtggtgaaagctt

SEQ ID NO: 314656 - DNA, 19 bp, Homo sapiens
  siRNA target sequence for TG737 (NM_006531.2,1404-1422).
gtggtgaaagcttctcaat

SEQ ID NO: 314657 - DNA, 19 bp, Homo sapiens
  siRNA target sequence for TG737 (NM_006531.2,1406-1424).
ggtgaaagcttctcaatat

SEQ ID NO: 314658 - DNA, 19 bp, Homo sapiens
  siRNA target sequence for TG737 (NM_006531.2,1409-1427).
gaaagcttctcaatatgta

SEQ ID NO: 314659 - DNA, 19 bp, Homo sapiens
  siRNA target sequence for TG737 (NM_006531.2,1490-1508).
ccaagctgtagagatctta

SEQ ID NO: 314660 - DNA, 19 bp, Homo sapiens
  siRNA target sequence for TG737 (NM_006531.2,1491-1509).
caagctgtagagatcttaa

SEQ ID NO: 314661 - DNA, 19 bp, Homo sapiens
  siRNA target sequence for TG737 (NM_006531.2,1526-1544).
ggacagtagagtgaaaagt

SEQ ID NO: 314662 - DNA, 19 bp, Homo sapiens
  siRNA target sequence for TG737 (NM_006531.2,1620-1638).
gctgtgaactctgatagat

SEQ ID NO: 314663 - DNA, 19 bp, Homo sapiens
  siRNA target sequence for TG737 (NM_006531.2,1621-1639).
ctgtgaactctgatagata

SEQ ID NO: 314664 - DNA, 19 bp, Homo sapiens
  siRNA target sequence for TG737 (NM_006531.2,1623-1641).
gtgaactctgatagatata

SEQ ID NO: 314665 - DNA, 19 bp, Homo sapiens
  siRNA target sequence for TG737 (NM_006531.2,1625-1643).
gaactctgatagatataat

SEQ ID NO: 314666 - DNA, 19 bp, Homo sapiens
  siRNA target sequence for TG737 (NM_006531.2,1628-1646).
ctctgatagatataatcca

SEQ ID NO: 314667 - DNA, 19 bp, Homo sapiens
  siRNA target sequence for TG737 (NM_006531.2,1644-1662).
ccagcagctcttactaata

SEQ ID NO: 314668 - DNA, 19 bp, Homo sapiens
  siRNA target sequence for TG737 (NM_006531.2,1645-1663).
cagcagctcttactaataa

SEQ ID NO: 314669 - DNA, 19 bp, Homo sapiens
  siRNA target sequence for TG737 (NM_006531.2,1680-1698).
gcaaatggtgattatgaga

SEQ ID NO: 314670 - DNA, 19 bp, Homo sapiens
  siRNA target sequence for TG737 (NM_006531.2,1681-1699).
caaatggtgattatgagaa

SEQ ID NO: 314671 - DNA, 19 bp, Homo sapiens
  siRNA target sequence for TG737 (NM_006531.2,1695-1713).
gagaaggccgctgaattct

SEQ ID NO: 314672 - DNA, 19 bp, Homo sapiens
  siRNA target sequence for TG737 (NM_006531.2,1700-1718).
ggccgctgaattctataaa

SEQ ID NO: 314673 - DNA, 19 bp, Homo sapiens
  siRNA target sequence for TG737 (NM_006531.2,1820-1838).
gaaacttcacgcaatccta

SEQ ID NO: 314674 - DNA, 19 bp, Homo sapiens
  siRNA target sequence for TG737 (NM_006531.2,1829-1847).
cgcaatcctacgaaacagt

SEQ ID NO: 314675 - DNA, 19 bp, Homo sapiens
  siRNA target sequence for TG737 (NM_006531.2,1840-1858).
gaaacagtgccgaagttct

SEQ ID NO: 314676 - DNA, 19 bp, Homo sapiens
  siRNA target sequence for TG737 (NM_006531.2,1846-1864).
gtgccgaagttctttacca

SEQ ID NO: 314677 - DNA, 19 bp, Homo sapiens
  siRNA target sequence for TG737 (NM_006531.2,1896-1914).
cccagtcaagctattgaat

SEQ ID NO: 314678 - DNA, 19 bp, Homo sapiens
  siRNA target sequence for TG737 (NM_006531.2,1925-1943).
ggtggtcagtgttattcca

SEQ ID NO: 314679 - DNA, 19 bp, Homo sapiens
  siRNA target sequence for TG737 (NM_006531.2,1926-1944).
gtggtcagtgttattccaa

SEQ ID NO: 314680 - DNA, 19 bp, Homo sapiens
  siRNA target sequence for TG737 (NM_006531.2,1941-1959).
ccaaccgatcctcaagttt

SEQ ID NO: 314681 - DNA, 19 bp, Homo sapiens
  siRNA target sequence for TG737 (NM_006531.2,1942-1960).
caaccgatcctcaagtttt

SEQ ID NO: 314682 - DNA, 19 bp, Homo sapiens
  siRNA target sequence for TG737 (NM_006531.2,1983-2001).
gatcgtgaaggagataaat

SEQ ID NO: 314683 - DNA, 19 bp, Homo sapiens
  siRNA target sequence for TG737 (NM_006531.2,2002-2020).
ctcaagcatttcaatatta

SEQ ID NO: 314684 - DNA, 19 bp, Homo sapiens
  siRNA target sequence for TG737 (NM_006531.2,2004-2022).
caagcatttcaatattact

SEQ ID NO: 314685 - DNA, 19 bp, Homo sapiens
  siRNA target sequence for TG737 (NM_006531.2,2021-2039).
ctatgagtcatataggtat

SEQ ID NO: 314686 - DNA, 19 bp, Homo sapiens
  siRNA target sequence for TG737 (NM_006531.2,2068-2086).
ggcttggagcctattacat

SEQ ID NO: 314687 - DNA, 19 bp, Homo sapiens
  siRNA target sequence for TG737 (NM_006531.2,2069-2087).
gcttggagcctattacatt

SEQ ID NO: 314688 - DNA, 19 bp, Homo sapiens
  siRNA target sequence for TG737 (NM_006531.2,2142-2160).
cagcctacacaagtgaaat

SEQ ID NO: 314689 - DNA, 19 bp, Homo sapiens
  siRNA target sequence for TG737 (NM_006531.2,2165-2183).
gctgatggtagctagttgt

SEQ ID NO: 314690 - DNA, 19 bp, Homo sapiens
  siRNA target sequence for TG737 (NM_006531.2,2166-2184).
ctgatggtagctagttgtt

SEQ ID NO: 314691 - DNA, 19 bp, Homo sapiens
  siRNA target sequence for TG737 (NM_006531.2,2172-2190).
gtagctagttgtttcagaa

SEQ ID NO: 314692 - DNA, 19 bp, Homo sapiens
  siRNA target sequence for TG737 (NM_006531.2,2175-2193).
gctagttgtttcagaagaa

SEQ ID NO: 314693 - DNA, 19 bp, Homo sapiens
  siRNA target sequence for TG737 (NM_006531.2,2196-2214).
ggtaactaccaaaaagcat

SEQ ID NO: 314694 - DNA, 19 bp, Homo sapiens
  siRNA target sequence for TG737 (NM_006531.2,2204-2222).
ccaaaaagcattagatact

SEQ ID NO: 314695 - DNA, 19 bp, Homo sapiens
  siRNA target sequence for TG737 (NM_006531.2,2205-2223).
caaaaagcattagatactt

SEQ ID NO: 314696 - DNA, 19 bp, Homo sapiens
  siRNA target sequence for TG737 (NM_006531.2,2258-2276).
cgaatgtctgcgtttctta

SEQ ID NO: 314697 - DNA, 19 bp, Homo sapiens
  siRNA target sequence for TG737 (NM_006531.2,2285-2303).
ctgcacagatcttggatta

SEQ ID NO: 314698 - DNA, 19 bp, Homo sapiens
  siRNA target sequence for TG737 (NM_006531.2,2290-2308).
cagatcttggattaaaaga

SEQ ID NO: 314699 - DNA, 19 bp, Homo sapiens
  siRNA target sequence for TG737 (NM_006531.2,2363-2381).
ggaacagcgcataaagtca

SEQ ID NO: 314700 - DNA, 19 bp, Homo sapiens
  siRNA target sequence for TG737 (NM_006531.2,2434-2452).
gtgatagtggccagaacta

SEQ ID NO: 314701 - DNA, 19 bp, Homo sapiens
  siRNA target sequence for TG737 (NM_006531.2,2436-2454).
gatagtggccagaactata

SEQ ID NO: 314702 - DNA, 19 bp, Homo sapiens
  siRNA target sequence for TG737 (NM_006531.2,2450-2468).
ctatagtgccagtagtaaa

SEQ ID NO: 314703 - DNA, 19 bp, Homo sapiens
  siRNA target sequence for TG737 (NM_006531.2,2566-2584).
cacttggccctcaaataga

SEQ ID NO: 314704 - DNA, 19 bp, Homo sapiens
  siRNA target sequence for IBSP (NM_004967.2,256-274).
gtacaggccacgatattat

SEQ ID NO: 314705 - DNA, 19 bp, Homo sapiens
  siRNA target sequence for IBSP (NM_004967.2,259-277).
caggccacgatattatctt

SEQ ID NO: 314706 - DNA, 19 bp, Homo sapiens
  siRNA target sequence for IBSP (NM_004967.2,261-279).
ggccacgatattatcttta

SEQ ID NO: 314707 - DNA, 19 bp, Homo sapiens
  siRNA target sequence for IBSP (NM_004967.2,263-281).
ccacgatattatctttaca

SEQ ID NO: 314708 - DNA, 19 bp, Homo sapiens
  siRNA target sequence for IBSP (NM_004967.2,264-282).
cacgatattatctttacaa

SEQ ID NO: 314709 - DNA, 19 bp, Homo sapiens
  siRNA target sequence for IBSP (NM_004967.2,446-464).
gctgagaataccacacttt

SEQ ID NO: 314710 - DNA, 19 bp, Homo sapiens
  siRNA target sequence for IBSP (NM_004967.2,541-559).
caagaaggctggggatata

SEQ ID NO: 314711 - DNA, 19 bp, Homo sapiens
  siRNA target sequence for IBSP (NM_004967.2,544-562).
gaaggctggggatataaca

SEQ ID NO: 314712 - DNA, 19 bp, Homo sapiens
  siRNA target sequence for IBSP (NM_004967.2,820-838).
gacaacaacctctccaaat

SEQ ID NO: 314713 - DNA, 19 bp, Homo sapiens
  siRNA target sequence for IBSP (NM_004967.2,855-873).
caaccccaccacaagtcta

SEQ ID NO: 314714 - DNA, 19 bp, Homo sapiens
  siRNA target sequence for IBSP (NM_004967.2,903-921).
ccaccaccgttgaatacga

SEQ ID NO: 314715 - DNA, 19 bp, Homo sapiens
  siRNA target sequence for IBSP (NM_004967.2,992-1010).
gaacctcgtggggacaatt

SEQ ID NO: 314716 - DNA, 19 bp, Homo sapiens
  siRNA target sequence for IBSP (NM_004967.2,1006-1024).
caattaccgagcctatgaa

SEQ ID NO: 314717 - DNA, 19 bp, Homo sapiens
  siRNA target sequence for IBSP (NM_004967.2,1061-1079).
ggctatgatggtcagaatt

SEQ ID NO: 314718 - DNA, 19 bp, Homo sapiens
  siRNA target sequence for SFTPC (NM_003018.1,202-220).
cacatgagccagaaacaca

SEQ ID NO: 314719 - DNA, 19 bp, Homo sapiens
  siRNA target sequence for SFTPC (NM_003018.1,325-343).
ggcctcgtggtgtatgact

SEQ ID NO: 314720 - DNA, 19 bp, Homo sapiens
  siRNA target sequence for SFTPC (NM_003018.1,326-344).
gcctcgtggtgtatgacta

SEQ ID NO: 314721 - DNA, 19 bp, Homo sapiens
  siRNA target sequence for SFTPC (NM_003018.1,596-614).
gcgaggtgccgctctacta

SEQ ID NO: 314722 - DNA, 19 bp, Homo sapiens
  siRNA target sequence for SFTPC (NM_003018.1,598-616).
gaggtgccgctctactaca

SEQ ID NO: 314723 - DNA, 19 bp, Homo sapiens
  siRNA target sequence for FMR2 (NM_002025.1,518-536).
gcagcagtgtcactatgaa

SEQ ID NO: 314724 - DNA, 19 bp, Homo sapiens
  siRNA target sequence for FMR2 (NM_002025.1,521-539).
gcagtgtcactatgaacaa

SEQ ID NO: 314725 - DNA, 19 bp, Homo sapiens
  siRNA target sequence for FMR2 (NM_002025.1,543-561).
cgtagtgcacttaaaaaaa

SEQ ID NO: 314726 - DNA, 19 bp, Homo sapiens
  siRNA target sequence for FMR2 (NM_002025.1,569-587).
ggagcggaggaatcaagaa

SEQ ID NO: 314727 - DNA, 19 bp, Homo sapiens
  siRNA target sequence for FMR2 (NM_002025.1,593-611).
gcaagaagacgatctcttt

SEQ ID NO: 314728 - DNA, 19 bp, Homo sapiens
  siRNA target sequence for FMR2 (NM_002025.1,594-612).
caagaagacgatctctttt

SEQ ID NO: 314729 - DNA, 19 bp, Homo sapiens
  siRNA target sequence for FMR2 (NM_002025.1,644-662).
caaggtagctgaatataca

SEQ ID NO: 314730 - DNA, 19 bp, Homo sapiens
  siRNA target sequence for FMR2 (NM_002025.1,695-713).
gaacacgcttggaaactat

SEQ ID NO: 314731 - DNA, 19 bp, Homo sapiens
  siRNA target sequence for FMR2 (NM_002025.1,698-716).
cacgcttggaaactatgat

SEQ ID NO: 314732 - DNA, 19 bp, Homo sapiens
  siRNA target sequence for FMR2 (NM_002025.1,717-735).
gaaatgaagaatttgctaa

SEQ ID NO: 314733 - DNA, 19 bp, Homo sapiens
  siRNA target sequence for FMR2 (NM_002025.1,731-749).
gctaactaaccattctaat

SEQ ID NO: 314734 - DNA, 19 bp, Homo sapiens
  siRNA target sequence for FMR2 (NM_002025.1,756-774).
cacctagtgggaattccaa

SEQ ID NO: 314735 - DNA, 19 bp, Homo sapiens
  siRNA target sequence for FMR2 (NM_002025.1,905-923).
gatactgaattcaactcta

SEQ ID NO: 314736 - DNA, 19 bp, Homo sapiens
  siRNA target sequence for FMR2 (NM_002025.1,953-971).
gtggtcacgtgatagtcat

SEQ ID NO: 314737 - DNA, 19 bp, Homo sapiens
  siRNA target sequence for FMR2 (NM_002025.1,955-973).
ggtcacgtgatagtcataa

SEQ ID NO: 314738 - DNA, 19 bp, Homo sapiens
  siRNA target sequence for FMR2 (NM_002025.1,1003-1021).
gtggtcagccaaacaagat

SEQ ID NO: 314739 - DNA, 19 bp, Homo sapiens
  siRNA target sequence for FMR2 (NM_002025.1,1134-1152).
gacagtaaccctaattcta

SEQ ID NO: 314740 - DNA, 19 bp, Homo sapiens
  siRNA target sequence for FMR2 (NM_002025.1,1270-1288).
gcctttcagttcaaaactt

SEQ ID NO: 314741 - DNA, 19 bp, Homo sapiens
  siRNA target sequence for FMR2 (NM_002025.1,1312-1330).
caagcatggggcagcaaaa

SEQ ID NO: 314742 - DNA, 19 bp, Homo sapiens
  siRNA target sequence for FMR2 (NM_002025.1,1387-1405).
caacactgaaaccttcaat

SEQ ID NO: 314743 - DNA, 19 bp, Homo sapiens
  siRNA target sequence for FMR2 (NM_002025.1,1392-1410).
ctgaaaccttcaattgaat

SEQ ID NO: 314744 - DNA, 19 bp, Homo sapiens
  siRNA target sequence for FMR2 (NM_002025.1,1394-1412).
gaaaccttcaattgaattt

SEQ ID NO: 314745 - DNA, 19 bp, Homo sapiens
  siRNA target sequence for FMR2 (NM_002025.1,1499-1517).
caccatcctccaaacaagt

SEQ ID NO: 314746 - DNA, 19 bp, Homo sapiens
  siRNA target sequence for FMR2 (NM_002025.1,1506-1524).
ctccaaacaagtgaagtaa

SEQ ID NO: 314747 - DNA, 19 bp, Homo sapiens
  siRNA target sequence for FMR2 (NM_002025.1,1671-1689).
ccaggattcaccttacaaa

SEQ ID NO: 314748 - DNA, 19 bp, Homo sapiens
  siRNA target sequence for FMR2 (NM_002025.1,1709-1727).
cagagcttctacaaagtca

SEQ ID NO: 314749 - DNA, 19 bp, Homo sapiens
  siRNA target sequence for FMR2 (NM_002025.1,1726-1744).
cagtgtctttcaaatcgat

SEQ ID NO: 314750 - DNA, 19 bp, Homo sapiens
  siRNA target sequence for FMR2 (NM_002025.1,1850-1868).
ggcaaaacctaggaataat

SEQ ID NO: 314751 - DNA, 19 bp, Homo sapiens
  siRNA target sequence for FMR2 (NM_002025.1,2088-2106).
gtgacatcccagaacaagt

SEQ ID NO: 314752 - DNA, 19 bp, Homo sapiens
  siRNA target sequence for FMR2 (NM_002025.1,2095-2113).
cccagaacaagtcttttat

SEQ ID NO: 314753 - DNA, 19 bp, Homo sapiens
  siRNA target sequence for FMR2 (NM_002025.1,2158-2176).
ctccaatcatccaaccaat

SEQ ID NO: 314754 - DNA, 19 bp, Homo sapiens
  siRNA target sequence for FMR2 (NM_002025.1,2271-2289).
ccacggcccactcagaaaa

SEQ ID NO: 314755 - DNA, 19 bp, Homo sapiens
  siRNA target sequence for FMR2 (NM_002025.1,2272-2290).
cacggcccactcagaaaat

SEQ ID NO: 314756 - DNA, 19 bp, Homo sapiens
  siRNA target sequence for FMR2 (NM_002025.1,2276-2294).
gcccactcagaaaattcca

SEQ ID NO: 314757 - DNA, 19 bp, Homo sapiens
  siRNA target sequence for FMR2 (NM_002025.1,2304-2322).
gctttgaagcataagttgt

SEQ ID NO: 314758 - DNA, 19 bp, Homo sapiens
  siRNA target sequence for FMR2 (NM_002025.1,2312-2330).
gcataagttgtcaacaact

SEQ ID NO: 314759 - DNA, 19 bp, Homo sapiens
  siRNA target sequence for FMR2 (NM_002025.1,2313-2331).
cataagttgtcaacaacta

SEQ ID NO: 314760 - DNA, 19 bp, Homo sapiens
  siRNA target sequence for FMR2 (NM_002025.1,2507-2525).
caaaccagcccctaggaaa

SEQ ID NO: 314761 - DNA, 19 bp, Homo sapiens
  siRNA target sequence for FMR2 (NM_002025.1,2593-2611).
caaagtctcgggaattcat

SEQ ID NO: 314762 - DNA, 19 bp, Homo sapiens
  siRNA target sequence for FMR2 (NM_002025.1,2597-2615).
gtctcgggaattcattgaa

SEQ ID NO: 314763 - DNA, 19 bp, Homo sapiens
  siRNA target sequence for FMR2 (NM_002025.1,2609-2627).
cattgaaacagattcatct

SEQ ID NO: 314764 - DNA, 19 bp, Homo sapiens
  siRNA target sequence for FMR2 (NM_002025.1,2673-2691).
gtcctgcctccgtgcatta

SEQ ID NO: 314765 - DNA, 19 bp, Homo sapiens
  siRNA target sequence for FMR2 (NM_002025.1,2678-2696).
gcctccgtgcattatttct

SEQ ID NO: 314766 - DNA, 19 bp, Homo sapiens
  siRNA target sequence for FMR2 (NM_002025.1,2700-2718).
ggtaatactgccaaatcca

SEQ ID NO: 314767 - DNA, 19 bp, Homo sapiens
  siRNA target sequence for FMR2 (NM_002025.1,2744-2762).
cctcagcaccttaatgagt

SEQ ID NO: 314768 - DNA, 19 bp, Homo sapiens
  siRNA target sequence for FMR2 (NM_002025.1,2773-2791).
gcaacaacaacttatccat

SEQ ID NO: 314769 - DNA, 19 bp, Homo sapiens
  siRNA target sequence for FMR2 (NM_002025.1,2783-2801).
cttatccatcagtaatgaa

SEQ ID NO: 314770 - DNA, 19 bp, Homo sapiens
  siRNA target sequence for FMR2 (NM_002025.1,2794-2812).
gtaatgaagagccaacatt

SEQ ID NO: 314771 - DNA, 19 bp, Homo sapiens
  siRNA target sequence for FMR2 (NM_002025.1,2848-2866).
cccctctgcgagatcatga

SEQ ID NO: 314772 - DNA, 19 bp, Homo sapiens
  siRNA target sequence for FMR2 (NM_002025.1,3021-3039).
gcccctaagggcaaacgta

SEQ ID NO: 314773 - DNA, 19 bp, Homo sapiens
  siRNA target sequence for FMR2 (NM_002025.1,3037-3055).
gtaagcacaagccaataga

SEQ ID NO: 314774 - DNA, 19 bp, Homo sapiens
  siRNA target sequence for FMR2 (NM_002025.1,3093-3111).
gaggaggccacaactatct

SEQ ID NO: 314775 - DNA, 19 bp, Homo sapiens
  siRNA target sequence for FMR2 (NM_002025.1,3147-3165).
cacaagcctcccaacacta

SEQ ID NO: 314776 - DNA, 19 bp, Homo sapiens
  siRNA target sequence for FMR2 (NM_002025.1,3152-3170).
gcctcccaacactagagaa

SEQ ID NO: 314777 - DNA, 19 bp, Homo sapiens
  siRNA target sequence for FMR2 (NM_002025.1,3154-3172).
ctcccaacactagagaaaa

SEQ ID NO: 314778 - DNA, 19 bp, Homo sapiens
  siRNA target sequence for FMR2 (NM_002025.1,3250-3268).
ctccacgccgcagaaatgt

SEQ ID NO: 314779 - DNA, 19 bp, Homo sapiens
  siRNA target sequence for FMR2 (NM_002025.1,3252-3270).
ccacgccgcagaaatgtca

SEQ ID NO: 314780 - DNA, 19 bp, Homo sapiens
  siRNA target sequence for FMR2 (NM_002025.1,3374-3392).
caaagggatatcggtaaat

SEQ ID NO: 314781 - DNA, 19 bp, Homo sapiens
  siRNA target sequence for FMR2 (NM_002025.1,3682-3700).
cggttcacaatgctgatta

SEQ ID NO: 314782 - DNA, 19 bp, Homo sapiens
  siRNA target sequence for FMR2 (NM_002025.1,3761-3779).
caaagctgtgaattatgct

SEQ ID NO: 314783 - DNA, 19 bp, Homo sapiens
  siRNA target sequence for FMR2 (NM_002025.1,3823-3841).
gcgaccctctggaagcaaa

SEQ ID NO: 314784 - DNA, 19 bp, Homo sapiens
  siRNA target sequence for FMR2 (NM_002025.1,3921-3939).
gcttcggatggggacaaaa

SEQ ID NO: 314785 - DNA, 19 bp, Homo sapiens
  siRNA target sequence for FMR2 (NM_002025.1,3922-3940).
cttcggatggggacaaaaa

SEQ ID NO: 314786 - DNA, 19 bp, Homo sapiens
  siRNA target sequence for FMR2 (NM_002025.1,3951-3969).
ctatgctaccgatgtttat

SEQ ID NO: 314787 - DNA, 19 bp, Homo sapiens
  siRNA target sequence for FMR2 (NM_002025.1,3955-3973).
gctaccgatgtttatcact

SEQ ID NO: 314788 - DNA, 19 bp, Homo sapiens
  siRNA target sequence for FMR2 (NM_002025.1,3975-3993).
ctctatttgagaatgttta

SEQ ID NO: 314789 - DNA, 19 bp, Homo sapiens
  siRNA target sequence for FMR2 (NM_002025.1,4005-4023).
gaccatgctatgaagtact

SEQ ID NO: 314790 - DNA, 19 bp, Homo sapiens
  siRNA target sequence for FMR2 (NM_002025.1,4078-4096).
cctctccatgggtaagcaa

SEQ ID NO: 314791 - DNA, 19 bp, Homo sapiens
  siRNA target sequence for FMR2 (NM_002025.1,4084-4102).
catgggtaagcaatggaaa

SEQ ID NO: 314792 - DNA, 19 bp, Homo sapiens
  siRNA target sequence for FMR2 (NM_002025.1,4217-4235).
cgtcaacatcactagcaat

SEQ ID NO: 314793 - DNA, 19 bp, Homo sapiens
  siRNA target sequence for FMR2 (NM_002025.1,4223-4241).
catcactagcaatgtgtta

SEQ ID NO: 314794 - DNA, 19 bp, Homo sapiens
  siRNA target sequence for FMR2 (NM_002025.1,4393-4411).
gcatcgatgcccacttgtt

SEQ ID NO: 314795 - DNA, 19 bp, Homo sapiens
  siRNA target sequence for FRG1 (NM_004477.1,927-945).
gacaggagagccaaattga

SEQ ID NO: 314796 - DNA, 19 bp, Homo sapiens
  siRNA target sequence for GLIPR1 (NM_006851.1,234-252).
gactgcgttcgaatccata

SEQ ID NO: 314797 - DNA, 19 bp, Homo sapiens
  siRNA target sequence for GLIPR1 (NM_006851.1,238-256).
gcgttcgaatccataacaa

SEQ ID NO: 314798 - DNA, 19 bp, Homo sapiens
  siRNA target sequence for GLIPR1 (NM_006851.1,240-258).
gttcgaatccataacaagt

SEQ ID NO: 314799 - DNA, 19 bp, Homo sapiens
  siRNA target sequence for GLIPR1 (NM_006851.1,261-279).
cgatcagaggtgaaaccaa

SEQ ID NO: 314800 - DNA, 19 bp, Homo sapiens
  siRNA target sequence for GLIPR1 (NM_006851.1,280-298).
cagccagtgatatgctata

SEQ ID NO: 314801 - DNA, 19 bp, Homo sapiens
  siRNA target sequence for GLIPR1 (NM_006851.1,282-300).
gccagtgatatgctataca

SEQ ID NO: 314802 - DNA, 19 bp, Homo sapiens
  siRNA target sequence for GLIPR1 (NM_006851.1,283-301).
ccagtgatatgctatacat

SEQ ID NO: 314803 - DNA, 19 bp, Homo sapiens
  siRNA target sequence for GLIPR1 (NM_006851.1,288-306).
gatatgctatacatgactt

SEQ ID NO: 314804 - DNA, 19 bp, Homo sapiens
  siRNA target sequence for GLIPR1 (NM_006851.1,311-329).
cccagcactagcccaaatt

SEQ ID NO: 314805 - DNA, 19 bp, Homo sapiens
  siRNA target sequence for GLIPR1 (NM_006851.1,315-333).
gcactagcccaaattgcaa

SEQ ID NO: 314806 - DNA, 19 bp, Homo sapiens
  siRNA target sequence for GLIPR1 (NM_006851.1,316-334).
cactagcccaaattgcaaa

SEQ ID NO: 314807 - DNA, 19 bp, Homo sapiens
  siRNA target sequence for GLIPR1 (NM_006851.1,346-364).
gcaattgccagttttcaca

SEQ ID NO: 314808 - DNA, 19 bp, Homo sapiens
  siRNA target sequence for GLIPR1 (NM_006851.1,353-371).
ccagttttcacataataca

SEQ ID NO: 314809 - DNA, 19 bp, Homo sapiens
  siRNA target sequence for GLIPR1 (NM_006851.1,393-411).
ctgcacccaaacttcactt

SEQ ID NO: 314810 - DNA, 19 bp, Homo sapiens
  siRNA target sequence for GLIPR1 (NM_006851.1,435-453).
gggtctgtgcccatttttt

SEQ ID NO: 314811 - DNA, 19 bp, Homo sapiens
  siRNA target sequence for GLIPR1 (NM_006851.1,472-490).
caaactggtatgacgaaat

SEQ ID NO: 314812 - DNA, 19 bp, Homo sapiens
  siRNA target sequence for GLIPR1 (NM_006851.1,506-524).
caagactcggatatgcaaa

SEQ ID NO: 314813 - DNA, 19 bp, Homo sapiens
  siRNA target sequence for GLIPR1 (NM_006851.1,513-531).
cggatatgcaaaaaagtct

SEQ ID NO: 314814 - DNA, 19 bp, Homo sapiens
  siRNA target sequence for GLIPR1 (NM_006851.1,549-567).
gttgtttgggcagatagtt

SEQ ID NO: 314815 - DNA, 19 bp, Homo sapiens
  siRNA target sequence for GLIPR1 (NM_006851.1,573-591).
gttggctgcgcagttcaat

SEQ ID NO: 314816 - DNA, 19 bp, Homo sapiens
  siRNA target sequence for GLIPR1 (NM_006851.1,576-594).
ggctgcgcagttcaatttt

SEQ ID NO: 314817 - DNA, 19 bp, Homo sapiens
  siRNA target sequence for GLIPR1 (NM_006851.1,588-606).
caattttgccctaaagttt

SEQ ID NO: 314818 - DNA, 19 bp, Homo sapiens
  siRNA target sequence for GLIPR1 (NM_006851.1,611-629).
ctttgacgctctttccaat

SEQ ID NO: 314819 - DNA, 19 bp, Homo sapiens
  siRNA target sequence for GLIPR1 (NM_006851.1,672-690).
ccaacttggccatataaga

SEQ ID NO: 314820 - DNA, 19 bp, Homo sapiens
  siRNA target sequence for GLIPR1 (NM_006851.1,704-722).
cagtgcctgccccaataat

SEQ ID NO: 314821 - DNA, 19 bp, Homo sapiens
  siRNA target sequence for GLIPR1 (NM_006851.1,706-724).
gtgcctgccccaataatga

SEQ ID NO: 314822 - DNA, 19 bp, Homo sapiens
  siRNA target sequence for GLIPR1 (NM_006851.1,714-732).
cccaataatgacaagtgtt

SEQ ID NO: 314823 - DNA, 19 bp, Homo sapiens
  siRNA target sequence for GLIPR1 (NM_006851.1,715-733).
ccaataatgacaagtgttt

SEQ ID NO: 314824 - DNA, 19 bp, Homo sapiens
  siRNA target sequence for GLIPR1 (NM_006851.1,774-792).
cgttactactctgttgtat

SEQ ID NO: 314825 - DNA, 19 bp, Homo sapiens
  siRNA target sequence for GLIPR1 (NM_006851.1,775-793).
gttactactctgttgtata

SEQ ID NO: 314826 - DNA, 19 bp, Homo sapiens
  siRNA target sequence for GLIPR1 (NM_006851.1,840-858).
ctcattgttaattcagtaa

SEQ ID NO: 314827 - DNA, 19 bp, Homo sapiens
  siRNA target sequence for GLIPR1 (NM_006851.1,846-864).
gttaattcagtaattctaa

SEQ ID NO: 314828 - DNA, 19 bp, Homo sapiens
  siRNA target sequence for GLIPR1 (NM_006851.1,869-887).
gtctgttataattaccatt

SEQ ID NO: 314829 - DNA, 19 bp, Homo sapiens
  siRNA target sequence for GLIPR1 (NM_006851.1,899-917).
caagtaccctaatttagtt

SEQ ID NO: 314830 - DNA, 19 bp, Homo sapiens
  siRNA target sequence for GLIPR1 (NM_006851.1,902-920).
gtaccctaatttagttctt

SEQ ID NO: 314831 - DNA, 19 bp, Homo sapiens
  siRNA target sequence for PSORS1C1 (NM_014068.1,447-465).
caggggacctccaagcaat

SEQ ID NO: 314832 - DNA, 19 bp, Homo sapiens
  siRNA target sequence for PSORS1C1 (NM_014068.1,450-468).
gggacctccaagcaatgat

SEQ ID NO: 314833 - DNA, 19 bp, Homo sapiens
  siRNA target sequence for PSORS1C1 (NM_014068.1,451-469).
ggacctccaagcaatgata

SEQ ID NO: 314834 - DNA, 19 bp, Homo sapiens
  siRNA target sequence for PSORS1C1 (NM_014068.1,452-470).
gacctccaagcaatgatat

SEQ ID NO: 314835 - DNA, 19 bp, Homo sapiens
  siRNA target sequence for PSORS1C1 (NM_014068.1,661-679).
gaccttggctccaactcta

SEQ ID NO: 314836 - DNA, 19 bp, Homo sapiens
  siRNA target sequence for PSORS1C1 (NM_014068.1,663-681).
ccttggctccaactctatt

SEQ ID NO: 314837 - DNA, 19 bp, Homo sapiens
  siRNA target sequence for PSORS1C1 (NM_014068.1,668-686).
gctccaactctattgtact

SEQ ID NO: 314838 - DNA, 19 bp, Homo sapiens
  siRNA target sequence for PSORS1C1 (NM_014068.1,713-731).
ggtctcagctccttgatct

SEQ ID NO: 314839 - DNA, 19 bp, Homo sapiens
  siRNA target sequence for TTC3 (NM_003316.2,4351-4369).
ctgagccagcatcattgaa

SEQ ID NO: 314840 - DNA, 19 bp, Homo sapiens
  siRNA target sequence for TTC3 (NM_003316.2,5062-5080).
gggagtatgtacgagttaa

SEQ ID NO: 314841 - DNA, 19 bp, Homo sapiens
  siRNA target sequence for TTC3 (NM_003316.2,5063-5081).
ggagtatgtacgagttaaa

SEQ ID NO: 314842 - DNA, 19 bp, Homo sapiens
  siRNA target sequence for TTC3 (NM_003316.2,5693-5711).
gggctctttgggaatatct

SEQ ID NO: 314843 - DNA, 19 bp, Homo sapiens
  siRNA target sequence for TTC3 (NM_003316.2,5696-5714).
ctctttgggaatatctgta

SEQ ID NO: 314844 - DNA, 19 bp, Homo sapiens
  siRNA target sequence for APBB1IP (NM_019043.2,101-119).
gtgaagacatagaccaaat

SEQ ID NO: 314845 - DNA, 19 bp, Homo sapiens
  siRNA target sequence for APBB1IP (NM_019043.2,200-218).
cacccagagctgaatttaa

SEQ ID NO: 314846 - DNA, 19 bp, Homo sapiens
  siRNA target sequence for APBB1IP (NM_019043.2,330-348).
gacaatccaggcacagaaa

SEQ ID NO: 314847 - DNA, 19 bp, Homo sapiens
  siRNA target sequence for APBB1IP (NM_019043.2,353-371).
ccttgcagaatcaacatca

SEQ ID NO: 314848 - DNA, 19 bp, Homo sapiens
  siRNA target sequence for APBB1IP (NM_019043.2,354-372).
cttgcagaatcaacatcat

SEQ ID NO: 314849 - DNA, 19 bp, Homo sapiens
  siRNA target sequence for APBB1IP (NM_019043.2,404-422).
gtgcagcctctcttggtta

SEQ ID NO: 314850 - DNA, 19 bp, Homo sapiens
  siRNA target sequence for APBB1IP (NM_019043.2,409-427).
gcctctcttggttatggaa

SEQ ID NO: 314851 - DNA, 19 bp, Homo sapiens
  siRNA target sequence for APBB1IP (NM_019043.2,443-461).
ctggtatcagccaatatga

SEQ ID NO: 314852 - DNA, 19 bp, Homo sapiens
  siRNA target sequence for APBB1IP (NM_019043.2,482-500).
cagccgatcctgtgttaga

SEQ ID NO: 314853 - DNA, 19 bp, Homo sapiens
  siRNA target sequence for APBB1IP (NM_019043.2,691-709).
gatgttctggacaaccttt

SEQ ID NO: 314854 - DNA, 19 bp, Homo sapiens
  siRNA target sequence for APBB1IP (NM_019043.2,706-724).
cttttcgagaaaactcatt

SEQ ID NO: 314855 - DNA, 19 bp, Homo sapiens
  siRNA target sequence for APBB1IP (NM_019043.2,763-781).
ccggaactacaaattgaga

SEQ ID NO: 314856 - DNA, 19 bp, Homo sapiens
  siRNA target sequence for APBB1IP (NM_019043.2,962-980).
ctaagaacaaggaatcctt

SEQ ID NO: 314857 - DNA, 19 bp, Homo sapiens
  siRNA target sequence for APBB1IP (NM_019043.2,966-984).
gaacaaggaatccttactt

SEQ ID NO: 314858 - DNA, 19 bp, Homo sapiens
  siRNA target sequence for APBB1IP (NM_019043.2,1027-1045).
gaaggagctctttatttga

SEQ ID NO: 314859 - DNA, 19 bp, Homo sapiens
  siRNA target sequence for APBB1IP (NM_019043.2,1031-1049).
gagctctttatttgaaaga

SEQ ID NO: 314860 - DNA, 19 bp, Homo sapiens
  siRNA target sequence for APBB1IP (NM_019043.2,1068-1086).
gaaaaggcgctattttctt

SEQ ID NO: 314861 - DNA, 19 bp, Homo sapiens
  siRNA target sequence for APBB1IP (NM_019043.2,1114-1132).
cccaaaggaaagactaaga

SEQ ID NO: 314862 - DNA, 19 bp, Homo sapiens
  siRNA target sequence for APBB1IP (NM_019043.2,1138-1156).
cgagatctggcgtgtttta

SEQ ID NO: 314863 - DNA, 19 bp, Homo sapiens
  siRNA target sequence for APBB1IP (NM_019043.2,1139-1157).
gagatctggcgtgttttat

SEQ ID NO: 314864 - DNA, 19 bp, Homo sapiens
  siRNA target sequence for APBB1IP (NM_019043.2,1144-1162).
ctggcgtgttttatacagt

SEQ ID NO: 314865 - DNA, 19 bp, Homo sapiens
  siRNA target sequence for APBB1IP (NM_019043.2,1148-1166).
cgtgttttatacagtttga

SEQ ID NO: 314866 - DNA, 19 bp, Homo sapiens
  siRNA target sequence for APBB1IP (NM_019043.2,1214-1232).
cgcccactgactattgctt

SEQ ID NO: 314867 - DNA, 19 bp, Homo sapiens
  siRNA target sequence for APBB1IP (NM_019043.2,1255-1273).
cagaaggagtcccagtata

SEQ ID NO: 314868 - DNA, 19 bp, Homo sapiens
  siRNA target sequence for APBB1IP (NM_019043.2,1261-1279).
gagtcccagtatatcaagt

SEQ ID NO: 314869 - DNA, 19 bp, Homo sapiens
  siRNA target sequence for APBB1IP (NM_019043.2,1263-1281).
gtcccagtatatcaagtat

SEQ ID NO: 314870 - DNA, 19 bp, Homo sapiens
  siRNA target sequence for APBB1IP (NM_019043.2,1341-1359).
gtatgggaagactctctat

SEQ ID NO: 314871 - DNA, 19 bp, Homo sapiens
  siRNA target sequence for APBB1IP (NM_019043.2,1345-1363).
gggaagactctctatgata

SEQ ID NO: 314872 - DNA, 19 bp, Homo sapiens
  siRNA target sequence for C12orf2 (NM_007211.2,387-405).
cttgccaggaggttgtcat

SEQ ID NO: 314873 - DNA, 19 bp, Homo sapiens
  siRNA target sequence for C12orf2 (NM_007211.2,409-427).
cttagctcaagcaataggt

SEQ ID NO: 314874 - DNA, 19 bp, Homo sapiens
  siRNA target sequence for C12orf2 (NM_007211.2,476-494).
cacttagcacctcatgaaa

SEQ ID NO: 314875 - DNA, 19 bp, Homo sapiens
  siRNA target sequence for C12orf2 (NM_007211.2,488-506).
catgaaaatcctatcatat

SEQ ID NO: 314876 - DNA, 19 bp, Homo sapiens
  siRNA target sequence for C12orf2 (NM_007211.2,491-509).
gaaaatcctatcatatcct

SEQ ID NO: 314877 - DNA, 19 bp, Homo sapiens
  siRNA target sequence for C12orf2 (NM_007211.2,497-515).
cctatcatatccttaaaca

SEQ ID NO: 314878 - DNA, 19 bp, Homo sapiens
  siRNA target sequence for C12orf2 (NM_007211.2,520-538).
ggggcagtatgctagtgat

SEQ ID NO: 314879 - DNA, 19 bp, Homo sapiens
  siRNA target sequence for C12orf2 (NM_007211.2,658-676).
gaggcctcagattgacaaa

SEQ ID NO: 314880 - DNA, 19 bp, Homo sapiens
  siRNA target sequence for C12orf2 (NM_007211.2,665-683).
cagattgacaaatcaatca

SEQ ID NO: 314881 - DNA, 19 bp, Homo sapiens
  siRNA target sequence for C12orf2 (NM_007211.2,691-709).
ggaaccgaaaaggaaatca

SEQ ID NO: 314882 - DNA, 19 bp, Homo sapiens
  siRNA target sequence for C12orf2 (NM_007211.2,726-744).
gtgccaaaggattaatgga

SEQ ID NO: 314883 - DNA, 19 bp, Homo sapiens
  siRNA target sequence for C12orf2 (NM_007211.2,785-803).
gtgctgaataactgcaaaa

SEQ ID NO: 314884 - DNA, 19 bp, Homo sapiens
  siRNA target sequence for C12orf2 (NM_007211.2,843-861).
cagagaagcttcaatccat

SEQ ID NO: 314885 - DNA, 19 bp, Homo sapiens
  siRNA target sequence for C12orf2 (NM_007211.2,850-868).
gcttcaatccattgagaaa

SEQ ID NO: 314886 - DNA, 19 bp, Homo sapiens
  siRNA target sequence for C12orf2 (NM_007211.2,871-889).
gctggaatctaatgaaata

SEQ ID NO: 314887 - DNA, 19 bp, Homo sapiens
  siRNA target sequence for C12orf2 (NM_007211.2,966-984).
gaaacgatgtagaaattga

SEQ ID NO: 314888 - DNA, 19 bp, Homo sapiens
  siRNA target sequence for C12orf2 (NM_007211.2,1112-1130).
cagatccggactatggaaa

SEQ ID NO: 314889 - DNA, 19 bp, Homo sapiens
  siRNA target sequence for C12orf2 (NM_007211.2,1214-1232).
gtcaaaggggagattgaca

SEQ ID NO: 314890 - DNA, 19 bp, Homo sapiens
  siRNA target sequence for C12orf2 (NM_007211.2,1216-1234).
caaaggggagattgacatt

SEQ ID NO: 314891 - DNA, 19 bp, Homo sapiens
  siRNA target sequence for C12orf2 (NM_007211.2,1348-1366).
ggagttgcggcaagtcaat

SEQ ID NO: 314892 - DNA, 19 bp, Homo sapiens
  siRNA target sequence for C12orf2 (NM_007211.2,1384-1402).
gcagacagggacaaaagtt

SEQ ID NO: 314893 - DNA, 19 bp, Homo sapiens
  siRNA target sequence for C12orf2 (NM_007211.2,1385-1403).
cagacagggacaaaagtta

SEQ ID NO: 314894 - DNA, 19 bp, Homo sapiens
  siRNA target sequence for C12orf2 (NM_007211.2,1435-1453).
ggcctcacatgcagacatt

SEQ ID NO: 314895 - DNA, 19 bp, Homo sapiens
  siRNA target sequence for C12orf2 (NM_007211.2,1462-1480).
gatcatcattctttctgat

SEQ ID NO: 314896 - DNA, 19 bp, Homo sapiens
  siRNA target sequence for FLJ10324 (NM_018059.2,133-151).
gggacgcacttcatcatgt

SEQ ID NO: 314897 - DNA, 19 bp, Homo sapiens
  siRNA target sequence for FLJ10324 (NM_018059.2,533-551).
gtgagaagcccctcttgat

SEQ ID NO: 314898 - DNA, 19 bp, Homo sapiens
  siRNA target sequence for FLJ10324 (NM_018059.2,564-582).
gaaaccccgagaaggttta

SEQ ID NO: 314899 - DNA, 19 bp, Homo sapiens
  siRNA target sequence for FLJ10324 (NM_018059.2,1085-1103).
cgcacatctccgtcaactt

SEQ ID NO: 314900 - DNA, 19 bp, Homo sapiens
  siRNA target sequence for FLJ10324 (NM_018059.2,1087-1105).
cacatctccgtcaacttct

SEQ ID NO: 314901 - DNA, 19 bp, Homo sapiens
  siRNA target sequence for FLJ10324 (NM_018059.2,1656-1674).
catcgagctcctgtacttt

SEQ ID NO: 314902 - DNA, 19 bp, Homo sapiens
  siRNA target sequence for FLJ10324 (NM_018059.2,1818-1836).
ccagcagtgcgtctactat

SEQ ID NO: 314903 - DNA, 19 bp, Homo sapiens
  siRNA target sequence for FLJ10324 (NM_018059.2,2048-2066).
ccgggacactgcttctcaa

SEQ ID NO: 314904 - DNA, 19 bp, Homo sapiens
  siRNA target sequence for FLJ10324 (NM_018059.2,2180-2198).
cggctggagagcacttctt

SEQ ID NO: 314905 - DNA, 19 bp, Homo sapiens
  siRNA target sequence for FLJ10324 (NM_018059.2,2413-2431).
gttctggagtcctacgaaa

SEQ ID NO: 314906 - DNA, 19 bp, Homo sapiens
  siRNA target sequence for FLJ10324 (NM_018059.2,3256-3274).
cgtcatggcgggaagaaga

SEQ ID NO: 314907 - DNA, 19 bp, Homo sapiens
  siRNA target sequence for FLJ10324 (NM_018059.2,3257-3275).
gtcatggcgggaagaagat

SEQ ID NO: 314908 - DNA, 19 bp, Homo sapiens
  siRNA target sequence for NMB (NM_021077.2,305-323).
gaatcctcctgctaaagaa

SEQ ID NO: 314909 - DNA, 19 bp, Homo sapiens
  siRNA target sequence for NMB (NM_021077.2,372-390).
gaggctgctggtacaaata

SEQ ID NO: 314910 - DNA, 19 bp, Homo sapiens
  siRNA target sequence for PKD1L2 (NM_052892.2,43-61).
cttagggccaccactgtta

SEQ ID NO: 314911 - DNA, 19 bp, Homo sapiens
  siRNA target sequence for PKD1L2 (NM_052892.2,173-191).
ggcaaggaggccatttggt

SEQ ID NO: 314912 - DNA, 19 bp, Homo sapiens
  siRNA target sequence for PKD1L2 (NM_052892.2,436-454).
cagaccttcgccttcatgt

SEQ ID NO: 314913 - DNA, 19 bp, Homo sapiens
  siRNA target sequence for PKD1L2 (NM_052892.2,480-498).
ggcctgcgagggactcaat

SEQ ID NO: 314914 - DNA, 19 bp, Homo sapiens
  siRNA target sequence for PKD1L2 (NM_052892.2,845-863).
gaaacctgtcctgtataat

SEQ ID NO: 314915 - DNA, 19 bp, Homo sapiens
  siRNA target sequence for PKD1L2 (NM_052892.2,852-870).
gtcctgtataattagtaca

SEQ ID NO: 314916 - DNA, 19 bp, Homo sapiens
  siRNA target sequence for PKD1L2 (NM_052892.2,922-940).
gtgacccaccagttcacat

SEQ ID NO: 314917 - DNA, 19 bp, Homo sapiens
  siRNA target sequence for PKD1L2 (NM_052892.2,1203-1221).
gggctcgctaccgtacaat

SEQ ID NO: 314918 - DNA, 19 bp, Homo sapiens
  siRNA target sequence for PKD1L2 (NM_052892.2,1205-1223).
gctcgctaccgtacaatct

SEQ ID NO: 314919 - DNA, 19 bp, Homo sapiens
  siRNA target sequence for PKD1L2 (NM_052892.2,1393-1411).
ggacaggacctattgatca

SEQ ID NO: 314920 - DNA, 19 bp, Homo sapiens
  siRNA target sequence for PKD1L2 (NM_052892.2,1602-1620).
cgggaacatcactatcaca

SEQ ID NO: 314921 - DNA, 19 bp, Homo sapiens
  siRNA target sequence for PKD1L2 (NM_052892.2,1698-1716).
catccaacctggtccatat

SEQ ID NO: 314922 - DNA, 19 bp, Homo sapiens
  siRNA target sequence for PKD1L2 (NM_052892.2,1740-1758).
cctgggctggccagacaat

SEQ ID NO: 314923 - DNA, 19 bp, Homo sapiens
  siRNA target sequence for PKD1L2 (NM_052892.2,2007-2025).
gaactgcaggccagttaat

SEQ ID NO: 314924 - DNA, 19 bp, Homo sapiens
  siRNA target sequence for PKD1L2 (NM_052892.2,2077-2095).
gctatgttcagctggtatt

SEQ ID NO: 314925 - DNA, 19 bp, Homo sapiens
  siRNA target sequence for PKD1L2 (NM_052892.2,2078-2096).
ctatgttcagctggtattt

SEQ ID NO: 314926 - DNA, 19 bp, Homo sapiens
  siRNA target sequence for PKD1L2 (NM_052892.2,2282-2300).
gggaggacacctatgtgat

SEQ ID NO: 314927 - DNA, 19 bp, Homo sapiens
  siRNA target sequence for PKD1L2 (NM_052892.2,2625-2643).
ggctgccgtgtcagagaaa

SEQ ID NO: 314928 - DNA, 19 bp, Homo sapiens
  siRNA target sequence for PKD1L2 (NM_052892.2,2874-2892).
gacctgccggagtaaggaa

SEQ ID NO: 314929 - DNA, 19 bp, Homo sapiens
  siRNA target sequence for PKD1L2 (NM_052892.2,3324-3342).
ccaggagcccgtggatata

SEQ ID NO: 314930 - DNA, 19 bp, Homo sapiens
  siRNA target sequence for PKD1L2 (NM_052892.2,3331-3349).
cccgtggatataaagatca

SEQ ID NO: 314931 - DNA, 19 bp, Homo sapiens
  siRNA target sequence for PKD1L2 (NM_052892.2,3332-3350).
ccgtggatataaagatcat

SEQ ID NO: 314932 - DNA, 19 bp, Homo sapiens
  siRNA target sequence for PKD1L2 (NM_052892.2,3377-3395).
cccgaagccactttgatgt

SEQ ID NO: 314933 - DNA, 19 bp, Homo sapiens
  siRNA target sequence for PKD1L2 (NM_052892.2,3428-3446).
gccctagtggtcaactcat

SEQ ID NO: 314934 - DNA, 19 bp, Homo sapiens
  siRNA target sequence for PKD1L2 (NM_052892.2,3509-3527).
gccagccgaccgtgttgaa

SEQ ID NO: 314935 - DNA, 19 bp, Homo sapiens
  siRNA target sequence for PKD1L2 (NM_052892.2,3637-3655).
ggctaccaccccaacaaga

SEQ ID NO: 314936 - DNA, 19 bp, Homo sapiens
  siRNA target sequence for PKD1L2 (NM_052892.2,3659-3677).
gctacgatgcccaaactca

SEQ ID NO: 314937 - DNA, 19 bp, Homo sapiens
  siRNA target sequence for PKD1L2 (NM_052892.2,3745-3763).
ggagaaggggtctactatt

SEQ ID NO: 314938 - DNA, 19 bp, Homo sapiens
  siRNA target sequence for PKD1L2 (NM_052892.2,3746-3764).
gagaaggggtctactattt

SEQ ID NO: 314939 - DNA, 19 bp, Homo sapiens
  siRNA target sequence for PKD1L2 (NM_052892.2,4286-4304).
ccgacactccggtttttga

SEQ ID NO: 314940 - DNA, 19 bp, Homo sapiens
  siRNA target sequence for PKD1L2 (NM_052892.2,4396-4414).
cggccatcgtggtatgtga

SEQ ID NO: 314941 - DNA, 19 bp, Homo sapiens
  siRNA target sequence for PKD1L2 (NM_052892.2,4493-4511).
gagattgcgtcctcgataa

SEQ ID NO: 314942 - DNA, 19 bp, Homo sapiens
  siRNA target sequence for PKD1L2 (NM_052892.2,4595-4613).
gacacatctggtattcgat

SEQ ID NO: 314943 - DNA, 19 bp, Homo sapiens
  siRNA target sequence for PKD1L2 (NM_052892.2,4818-4836).
catcaacctcctgattgtt

SEQ ID NO: 314944 - DNA, 19 bp, Homo sapiens
  siRNA target sequence for PKD1L2 (NM_052892.2,5036-5054).
gggactcagtgaacttgat

SEQ ID NO: 314945 - DNA, 19 bp, Homo sapiens
  siRNA target sequence for PKD1L2 (NM_052892.2,5144-5162).
gagaggaccctgtaacact

SEQ ID NO: 314946 - DNA, 19 bp, Homo sapiens
  siRNA target sequence for PKD1L2 (NM_052892.2,5163-5181).
cactttggggtcatcagaa

SEQ ID NO: 314947 - DNA, 19 bp, Homo sapiens
  siRNA target sequence for PKD1L2 (NM_052892.2,5169-5187).
ggggtcatcagaaatgaaa

SEQ ID NO: 314948 - DNA, 19 bp, Homo sapiens
  siRNA target sequence for PKD1L2 (NM_052892.2,5837-5855).
ccctcatcagagaaatcct

SEQ ID NO: 314949 - DNA, 19 bp, Homo sapiens
  siRNA target sequence for PKD1L2 (NM_052892.2,5977-5995).
ggcttccgagagttcttca

SEQ ID NO: 314950 - DNA, 19 bp, Homo sapiens
  siRNA target sequence for PKD1L2 (NM_052892.2,5978-5996).
gcttccgagagttcttcaa

SEQ ID NO: 314951 - DNA, 19 bp, Homo sapiens
  siRNA target sequence for PKD1L2 (NM_052892.2,6476-6494).
gcgctctgggcaccttttt

SEQ ID NO: 314952 - DNA, 19 bp, Homo sapiens
  siRNA target sequence for PKD1L2 (NM_052892.2,6477-6495).
cgctctgggcacctttttt

SEQ ID NO: 314953 - DNA, 19 bp, Homo sapiens
  siRNA target sequence for PKD1L2 (NM_052892.2,6478-6496).
gctctgggcacctttttta

SEQ ID NO: 314954 - DNA, 19 bp, Homo sapiens
  siRNA target sequence for PKD1L2 (NM_052892.2,6562-6580).
gcggcagagctcatctact

SEQ ID NO: 314955 - DNA, 19 bp, Homo sapiens
  siRNA target sequence for PKD1L2 (NM_052892.2,6610-6628).
cagggcaagcgcatgagta

SEQ ID NO: 314956 - DNA, 19 bp, Homo sapiens
  siRNA target sequence for PKD1L2 (NM_052892.2,6612-6630).
gggcaagcgcatgagtaaa

SEQ ID NO: 314957 - DNA, 19 bp, Homo sapiens
  siRNA target sequence for PKD1L2 (NM_052892.2,6614-6632).
gcaagcgcatgagtaaaga

SEQ ID NO: 314958 - DNA, 19 bp, Homo sapiens
  siRNA target sequence for PKD1L2 (NM_052892.2,6698-6716).
gcgccctggcggtgtttgt

SEQ ID NO: 314959 - DNA, 19 bp, Homo sapiens
  siRNA target sequence for PKD1L2 (NM_052892.2,6864-6882).
gcatctgctcaggttgaat

SEQ ID NO: 314960 - DNA, 19 bp, Homo sapiens
  siRNA target sequence for PKD1L2 (NM_052892.2,6883-6901).
cccaaaatgaacatgatca

SEQ ID NO: 314961 - DNA, 19 bp, Homo sapiens
  siRNA target sequence for PKD1L2 (NM_052892.2,6916-6934).
cgtgcctggggcgacattt

SEQ ID NO: 314962 - DNA, 19 bp, Homo sapiens
  siRNA target sequence for PKD1L2 (NM_052892.2,6977-6995).
ccatcgcgtcaaacttgat

SEQ ID NO: 314963 - DNA, 19 bp, Homo sapiens
  siRNA target sequence for PKD1L2 (NM_052892.2,6978-6996).
catcgcgtcaaacttgata

SEQ ID NO: 314964 - DNA, 19 bp, Homo sapiens
  siRNA target sequence for PKD1L2 (NM_052892.2,6981-6999).
cgcgtcaaacttgatattt

SEQ ID NO: 314965 - DNA, 19 bp, Homo sapiens
  siRNA target sequence for PKD1L2 (NM_052892.2,6984-7002).
gtcaaacttgatatttggt

SEQ ID NO: 314966 - DNA, 19 bp, Homo sapiens
  siRNA target sequence for PKD1L2 (NM_052892.2,7016-7034).
cctacaaaaccctctttga

SEQ ID NO: 314967 - DNA, 19 bp, Homo sapiens
  siRNA target sequence for PKD1L2 (NM_052892.2,7055-7073).
gccttcagctgggaatctt

SEQ ID NO: 314968 - DNA, 19 bp, Homo sapiens
  siRNA target sequence for PKD1L2 (NM_052892.2,7156-7174).
gtgctgaacctgtttatct

SEQ ID NO: 314969 - DNA, 19 bp, Homo sapiens
  siRNA target sequence for PKD1L2 (NM_052892.2,7228-7246).
gaaggggagatcgtagatt

SEQ ID NO: 314970 - DNA, 19 bp, Homo sapiens
  siRNA target sequence for PKD1L2 (NM_052892.2,7232-7250).
gggagatcgtagatttgct

SEQ ID NO: 314971 - DNA, 19 bp, Homo sapiens
  siRNA target sequence for PKD1L2 (NM_052892.2,7275-7293).
gggcattaagtctaagaga

SEQ ID NO: 314972 - DNA, 19 bp, Homo sapiens
  siRNA target sequence for RASSF1 (NM_007182.4,509-527).
gacacctgacctttctcaa

SEQ ID NO: 314973 - DNA, 19 bp, Homo sapiens
  siRNA target sequence for RASSF1 (NM_007182.4,596-614).
caaggacggttcttacaca

SEQ ID NO: 314974 - DNA, 19 bp, Homo sapiens
  siRNA target sequence for RASSF1 (NM_007182.4,813-831).
gccctgctgcgaaagttct

SEQ ID NO: 314975 - DNA, 19 bp, Homo sapiens
  siRNA target sequence for RASSF1 (NM_007182.4,901-919).
ggaagctgttggatgatga

SEQ ID NO: 314976 - DNA, 19 bp, Homo sapiens
  siRNA target sequence for RASSF1 (NM_007182.4,1016-1034).
cttcagcatgcctgaacta

SEQ ID NO: 314977 - DNA, 19 bp, Homo sapiens
  siRNA target sequence for RASSF1 (NM_007182.4,1089-1107).
ctgcagaagtactcctatt

SEQ ID NO: 314978 - DNA, 19 bp, Homo sapiens
  siRNA target sequence for RASSF1 (NM_007182.4,1102-1120).
cctattgccgccagaagat

SEQ ID NO: 314979 - DNA, 19 bp, Homo sapiens
  siRNA target sequence for RASSF1 (NM_170713.1,153-171).
ggaggcgccttctttcgaa

SEQ ID NO: 314980 - DNA, 19 bp, Homo sapiens
  siRNA target sequence for RASSF1 (NM_170713.1,154-172).
gaggcgccttctttcgaaa

SEQ ID NO: 314981 - DNA, 19 bp, Homo sapiens
  siRNA target sequence for RASSF1 (NM_170713.1,157-175).
gcgccttctttcgaaatga

SEQ ID NO: 314982 - DNA, 19 bp, Homo sapiens
  siRNA target sequence for RASSF2 (NM_014737.1,224-242).
gtcccatgtggacaagata

SEQ ID NO: 314983 - DNA, 19 bp, Homo sapiens
  siRNA target sequence for RASSF2 (NM_014737.1,275-293).
ctgaagacctacaacttgt

SEQ ID NO: 314984 - DNA, 19 bp, Homo sapiens
  siRNA target sequence for RASSF2 (NM_014737.1,280-298).
gacctacaacttgtactat

SEQ ID NO: 314985 - DNA, 19 bp, Homo sapiens
  siRNA target sequence for RASSF2 (NM_014737.1,282-300).
cctacaacttgtactatga

SEQ ID NO: 314986 - DNA, 19 bp, Homo sapiens
  siRNA target sequence for RASSF2 (NM_014737.1,283-301).
ctacaacttgtactatgaa

SEQ ID NO: 314987 - DNA, 19 bp, Homo sapiens
  siRNA target sequence for RASSF2 (NM_014737.1,499-517).
cctgactgtgcccaaagtt

SEQ ID NO: 314988 - DNA, 19 bp, Homo sapiens
  siRNA target sequence for RASSF2 (NM_014737.1,619-637).
gcgcacacgcagtgatgtt

SEQ ID NO: 314989 - DNA, 19 bp, Homo sapiens
  siRNA target sequence for RASSF2 (NM_014737.1,644-662).
cgtcgccgtggcaatgtga

SEQ ID NO: 314990 - DNA, 19 bp, Homo sapiens
  siRNA target sequence for RASSF2 (NM_014737.1,874-892).
ccatacgagtggtgagaaa

SEQ ID NO: 314991 - DNA, 19 bp, Homo sapiens
  siRNA target sequence for RASSF2 (NM_014737.1,950-968).
gagcagatctccaaagtgt

SEQ ID NO: 314992 - DNA, 19 bp, Homo sapiens
  siRNA target sequence for RASSF2 (NM_014737.1,1006-1024).
cgacgtggcccagtatata

SEQ ID NO: 314993 - DNA, 19 bp, Homo sapiens
  siRNA target sequence for RASSF2 (NM_014737.1,1007-1025).
gacgtggcccagtatataa

SEQ ID NO: 314994 - DNA, 19 bp, Homo sapiens
  siRNA target sequence for RASSF2 (NM_014737.1,1010-1028).
gtggcccagtatataaagt

SEQ ID NO: 314995 - DNA, 19 bp, Homo sapiens
  siRNA target sequence for RASSF2 (NM_014737.1,1030-1048).
cgagatgccggtacttaaa

SEQ ID NO: 314996 - DNA, 19 bp, Homo sapiens
  siRNA target sequence for RASSF2 (NM_014737.1,1113-1131).
ccgtgctccggctaatgat

SEQ ID NO: 314997 - DNA, 19 bp, Homo sapiens
  siRNA target sequence for RASSF2 (NM_014737.1,1114-1132).
cgtgctccggctaatgatt

SEQ ID NO: 314998 - DNA, 19 bp, Homo sapiens
  siRNA target sequence for RASSF2 (NM_014737.1,1157-1175).
gagaccccagcaacaatct

SEQ ID NO: 314999 - DNA, 19 bp, Homo sapiens
  siRNA target sequence for RASSF2 (NM_170773.1,285-303).
gaatggccactattagagt

SEQ ID NO: 315000 - DNA, 19 bp, Homo sapiens
  siRNA target sequence for RASSF2 (NM_170773.1,291-309).
ccactattagagttttcca

SEQ ID NO: 315001 - DNA, 19 bp, Homo sapiens
  siRNA target sequence for RASSF2 (NM_170773.1,292-310).
cactattagagttttccaa

SEQ ID NO: 315002 - DNA, 19 bp, Homo sapiens
  siRNA target sequence for RASSF3 (NM_178169.2,151-169).
gacgccgaggacttcttct

SEQ ID NO: 315003 - DNA, 19 bp, Homo sapiens
  siRNA target sequence for RASSF3 (NM_178169.2,216-234).
ccgctccggccaacaagat

SEQ ID NO: 315004 - DNA, 19 bp, Homo sapiens
  siRNA target sequence for RASSF3 (NM_178169.2,219-237).
ctccggccaacaagatgtt

SEQ ID NO: 315005 - DNA, 19 bp, Homo sapiens
  siRNA target sequence for RASSF3 (NM_178169.2,221-239).
ccggccaacaagatgttga

SEQ ID NO: 315006 - DNA, 19 bp, Homo sapiens
  siRNA target sequence for RASSF3 (NM_178169.2,279-297).
gatcaaagagaaagttcat

SEQ ID NO: 315007 - DNA, 19 bp, Homo sapiens
  siRNA target sequence for RASSF3 (NM_178169.2,311-329).
cagtcacagacaagttgaa

SEQ ID NO: 315008 - DNA, 19 bp, Homo sapiens
  siRNA target sequence for RASSF3 (NM_178169.2,324-342).
gttgaagatgaccttgaat

SEQ ID NO: 315009 - DNA, 19 bp, Homo sapiens
  siRNA target sequence for RASSF3 (NM_178169.2,327-345).
gaagatgaccttgaattca

SEQ ID NO: 315010 - DNA, 19 bp, Homo sapiens
  siRNA target sequence for RASSF3 (NM_178169.2,351-369).
gatttacactggcttcatt

SEQ ID NO: 315011 - DNA, 19 bp, Homo sapiens
  siRNA target sequence for RASSF3 (NM_178169.2,359-377).
ctggcttcattaaagtaca

SEQ ID NO: 315012 - DNA, 19 bp, Homo sapiens
  siRNA target sequence for RASSF3 (NM_178169.2,434-452).
gtagcaatggctgtatgaa

SEQ ID NO: 315013 - DNA, 19 bp, Homo sapiens
  siRNA target sequence for RASSF3 (NM_178169.2,438-456).
caatggctgtatgaataca

SEQ ID NO: 315014 - DNA, 19 bp, Homo sapiens
  siRNA target sequence for RASSF3 (NM_178169.2,533-551).
ctgccaagtttgcacttta

SEQ ID NO: 315015 - DNA, 19 bp, Homo sapiens
  siRNA target sequence for RASSF3 (NM_178169.2,535-553).
gccaagtttgcactttata

SEQ ID NO: 315016 - DNA, 19 bp, Homo sapiens
  siRNA target sequence for RASSF3 (NM_178169.2,639-657).
cagaacagacacacttagt

SEQ ID NO: 315017 - DNA, 19 bp, Homo sapiens
  siRNA target sequence for RASSF4 (NM_032023.3,293-311).
cgaggggctcctcaacatt

SEQ ID NO: 315018 - DNA, 19 bp, Homo sapiens
  siRNA target sequence for RASSF4 (NM_032023.3,622-640).
ggcgacaccggttctctat

SEQ ID NO: 315019 - DNA, 19 bp, Homo sapiens
  siRNA target sequence for RASSF4 (NM_032023.3,624-642).
cgacaccggttctctatca

SEQ ID NO: 315020 - DNA, 19 bp, Homo sapiens
  siRNA target sequence for RASSF4 (NM_032023.3,625-643).
gacaccggttctctatcaa

SEQ ID NO: 315021 - DNA, 19 bp, Homo sapiens
  siRNA target sequence for RASSF4 (NM_032023.3,690-708).
ggatccgtgaccaatgtga

SEQ ID NO: 315022 - DNA, 19 bp, Homo sapiens
  siRNA target sequence for RASSF4 (NM_032023.3,784-802).
gtgagttcgcactctacat

SEQ ID NO: 315023 - DNA, 19 bp, Homo sapiens
  siRNA target sequence for RASSF4 (NM_032023.3,812-830).
gtctggggagcggacaaaa

SEQ ID NO: 315024 - DNA, 19 bp, Homo sapiens
  siRNA target sequence for RASSF4 (NM_032023.3,814-832).
ctggggagcggacaaaatt

SEQ ID NO: 315025 - DNA, 19 bp, Homo sapiens
  siRNA target sequence for RASSF4 (NM_032023.3,818-836).
ggagcggacaaaattaaaa

SEQ ID NO: 315026 - DNA, 19 bp, Homo sapiens
  siRNA target sequence for RASSF4 (NM_032023.3,843-861).
gagtacccgctgatttcca

SEQ ID NO: 315027 - DNA, 19 bp, Homo sapiens
  siRNA target sequence for RASSF4 (NM_032023.3,968-986).
gccggtgctggacagtttt

SEQ ID NO: 315028 - DNA, 19 bp, Homo sapiens
  siRNA target sequence for RASSF5 (NM_031437.1,501-519).
gctgcgctgcactaactgt

SEQ ID NO: 315029 - DNA, 19 bp, Homo sapiens
  siRNA target sequence for RASSF5 (NM_031437.1,630-648).
cagccagaatgtctgtaaa

SEQ ID NO: 315030 - DNA, 19 bp, Homo sapiens
  siRNA target sequence for RASSF5 (NM_031437.1,758-776).
gcacctacacgggtttcat

SEQ ID NO: 315031 - DNA, 19 bp, Homo sapiens
  siRNA target sequence for RASSF5 (NM_031437.1,761-779).
cctacacgggtttcatcaa

SEQ ID NO: 315032 - DNA, 19 bp, Homo sapiens
  siRNA target sequence for RASSF5 (NM_031437.1,1002-1020).
ccagaagtttgcacttttt

SEQ ID NO: 315033 - DNA, 19 bp, Homo sapiens
  siRNA target sequence for RASSF5 (NM_031437.1,1015-1033).
ctttttaagcggatacaca

SEQ ID NO: 315034 - DNA, 19 bp, Homo sapiens
  siRNA target sequence for RASSF5 (NM_031437.1,1202-1220).
cctcctggtgcattcagat

SEQ ID NO: 315035 - DNA, 19 bp, Homo sapiens
  siRNA target sequence for RASSF5 (NM_031437.1,1205-1223).
cctggtgcattcagattta

SEQ ID NO: 315036 - DNA, 19 bp, Homo sapiens
  siRNA target sequence for RASSF5 (NM_182665.1,487-505).
gcgcagagcaaacatcttt

SEQ ID NO: 315037 - DNA, 19 bp, Homo sapiens
  siRNA target sequence for RASSF6 (NM_177532.2,155-173).
cccctcttggatcttcatt

SEQ ID NO: 315038 - DNA, 19 bp, Homo sapiens
  siRNA target sequence for RASSF6 (NM_177532.2,156-174).
ccctcttggatcttcatta

SEQ ID NO: 315039 - DNA, 19 bp, Homo sapiens
  siRNA target sequence for RASSF6 (NM_177532.2,158-176).
ctcttggatcttcattaat

SEQ ID NO: 315040 - DNA, 19 bp, Homo sapiens
  siRNA target sequence for RASSF6 (NM_177532.2,188-206).
cataaccagggaacaactt

SEQ ID NO: 315041 - DNA, 19 bp, Homo sapiens
  siRNA target sequence for RASSF6 (NM_177532.2,194-212).
cagggaacaacttaattct

SEQ ID NO: 315042 - DNA, 19 bp, Homo sapiens
  siRNA target sequence for RASSF6 (NM_177532.2,196-214).
gggaacaacttaattcttt

SEQ ID NO: 315043 - DNA, 19 bp, Homo sapiens
  siRNA target sequence for RASSF6 (NM_177532.2,197-215).
ggaacaacttaattcttta

SEQ ID NO: 315044 - DNA, 19 bp, Homo sapiens
  siRNA target sequence for RASSF6 (NM_177532.2,211-229).
ctttattgaagacctataa

SEQ ID NO: 315045 - DNA, 19 bp, Homo sapiens
  siRNA target sequence for RASSF6 (NM_177532.2,218-236).
gaagacctataacattttt

SEQ ID NO: 315046 - DNA, 19 bp, Homo sapiens
  siRNA target sequence for RASSF6 (NM_177532.2,277-295).
ctgaagatggcaaactaat

SEQ ID NO: 315047 - DNA, 19 bp, Homo sapiens
  siRNA target sequence for RASSF6 (NM_177532.2,323-341).
gggagtaaaacgacctata

SEQ ID NO: 315048 - DNA, 19 bp, Homo sapiens
  siRNA target sequence for RASSF6 (NM_177532.2,325-343).
gagtaaaacgacctataca

SEQ ID NO: 315049 - DNA, 19 bp, Homo sapiens
  siRNA target sequence for RASSF6 (NM_177532.2,333-351).
cgacctatacagctaaaaa

SEQ ID NO: 315050 - DNA, 19 bp, Homo sapiens
  siRNA target sequence for RASSF6 (NM_177532.2,422-440).
gacacgctggggggaattt

SEQ ID NO: 315051 - DNA, 19 bp, Homo sapiens
  siRNA target sequence for RASSF6 (NM_177532.2,424-442).
cacgctggggggaatttga

SEQ ID NO: 315052 - DNA, 19 bp, Homo sapiens
  siRNA target sequence for RASSF6 (NM_177532.2,433-451).
gggaatttgacgatctcta

SEQ ID NO: 315053 - DNA, 19 bp, Homo sapiens
  siRNA target sequence for RASSF6 (NM_177532.2,434-452).
ggaatttgacgatctctat

SEQ ID NO: 315054 - DNA, 19 bp, Homo sapiens
  siRNA target sequence for RASSF6 (NM_177532.2,441-459).
gacgatctctatcgtatta

SEQ ID NO: 315055 - DNA, 19 bp, Homo sapiens
  siRNA target sequence for RASSF6 (NM_177532.2,443-461).
cgatctctatcgtattagt

SEQ ID NO: 315056 - DNA, 19 bp, Homo sapiens
  siRNA target sequence for RASSF6 (NM_177532.2,468-486).
gacaggacccagattccta

SEQ ID NO: 315057 - DNA, 19 bp, Homo sapiens
  siRNA target sequence for RASSF6 (NM_177532.2,473-491).
gacccagattcctatgtct

SEQ ID NO: 315058 - DNA, 19 bp, Homo sapiens
  siRNA target sequence for RASSF6 (NM_177532.2,506-524).
ccaggaagactatttatct

SEQ ID NO: 315059 - DNA, 19 bp, Homo sapiens
  siRNA target sequence for RASSF6 (NM_177532.2,542-560).
gaagccacatgcaaaggat

SEQ ID NO: 315060 - DNA, 19 bp, Homo sapiens
  siRNA target sequence for RASSF6 (NM_177532.2,567-585).
gactccccagtgctctata

SEQ ID NO: 315061 - DNA, 19 bp, Homo sapiens
  siRNA target sequence for RASSF6 (NM_177532.2,681-699).
cacttctataaccatgaaa

SEQ ID NO: 315062 - DNA, 19 bp, Homo sapiens
  siRNA target sequence for RASSF6 (NM_177532.2,683-701).
cttctataaccatgaaaca

SEQ ID NO: 315063 - DNA, 19 bp, Homo sapiens
  siRNA target sequence for RASSF6 (NM_177532.2,749-767).
cagtaacatgagaactgaa

SEQ ID NO: 315064 - DNA, 19 bp, Homo sapiens
  siRNA target sequence for RASSF6 (NM_177532.2,780-798).
caacttctccaaaaattta

SEQ ID NO: 315065 - DNA, 19 bp, Homo sapiens
  siRNA target sequence for RASSF6 (NM_177532.2,783-801).
cttctccaaaaatttaaga

SEQ ID NO: 315066 - DNA, 19 bp, Homo sapiens
  siRNA target sequence for RASSF6 (NM_177532.2,819-837).
gattttgctcttcacatta

SEQ ID NO: 315067 - DNA, 19 bp, Homo sapiens
  siRNA target sequence for RASSF6 (NM_177532.2,828-846).
cttcacattatttttgcaa

SEQ ID NO: 315068 - DNA, 19 bp, Homo sapiens
  siRNA target sequence for RASSF6 (NM_177532.2,1045-1063).
gagagattcaaagaatagt

SEQ ID NO: 315069 - DNA, 19 bp, Homo sapiens
  siRNA target sequence for RASSF6 (NM_177532.2,1047-1065).
gagattcaaagaatagtaa

SEQ ID NO: 315070 - DNA, 19 bp, Homo sapiens
  siRNA target sequence for RASSF6 (NM_177532.2,1085-1103).
ggcgattatactgaaatgt

SEQ ID NO: 315071 - DNA, 19 bp, Homo sapiens
  siRNA target sequence for RASSF6 (NM_177532.2,1087-1105).
cgattatactgaaatgtct

SEQ ID NO: 315072 - DNA, 19 bp, Homo sapiens
  siRNA target sequence for RASSF6 (NM_177532.2,1088-1106).
gattatactgaaatgtctt

SEQ ID NO: 315073 - DNA, 19 bp, Homo sapiens
  siRNA target sequence for HOMER2 (NM_004839.1,96-114).
caccgtttcctacttctat

SEQ ID NO: 315074 - DNA, 19 bp, Homo sapiens
  siRNA target sequence for HOMER2 (NM_004839.1,98-116).
ccgtttcctacttctatga

SEQ ID NO: 315075 - DNA, 19 bp, Homo sapiens
  siRNA target sequence for HOMER2 (NM_004839.1,99-117).
cgtttcctacttctatgat

SEQ ID NO: 315076 - DNA, 19 bp, Homo sapiens
  siRNA target sequence for HOMER2 (NM_004839.1,153-171).
cggagccaaggtgatcata

SEQ ID NO: 315077 - DNA, 19 bp, Homo sapiens
  siRNA target sequence for HOMER2 (NM_004839.1,154-172).
ggagccaaggtgatcataa

SEQ ID NO: 315078 - DNA, 19 bp, Homo sapiens
  siRNA target sequence for HOMER2 (NM_004839.1,155-173).
gagccaaggtgatcataaa

SEQ ID NO: 315079 - DNA, 19 bp, Homo sapiens
  siRNA target sequence for HOMER2 (NM_004839.1,157-175).
gccaaggtgatcataaaca

SEQ ID NO: 315080 - DNA, 19 bp, Homo sapiens
  siRNA target sequence for HOMER2 (NM_004839.1,244-262).
gccaacacagtgtttggtt

SEQ ID NO: 315081 - DNA, 19 bp, Homo sapiens
  siRNA target sequence for HOMER2 (NM_004839.1,363-381).
cgagacctcaagtaatcat

SEQ ID NO: 315082 - DNA, 19 bp, Homo sapiens
  siRNA target sequence for HOMER2 (NM_004839.1,364-382).
gagacctcaagtaatcatt

SEQ ID NO: 315083 - DNA, 19 bp, Homo sapiens
  siRNA target sequence for HOMER2 (NM_004839.1,671-689).
ggctccgcaacaagattga

SEQ ID NO: 315084 - DNA, 19 bp, Homo sapiens
  siRNA target sequence for HOMER2 (NM_004839.1,801-819).
gaaagatctccgaaaacaa

SEQ ID NO: 315085 - DNA, 19 bp, Homo sapiens
  siRNA target sequence for HOMER2 (NM_004839.1,880-898).
gcagagagagacaatcaaa

SEQ ID NO: 315086 - DNA, 19 bp, Homo sapiens
  siRNA target sequence for HOMER2 (NM_004839.1,993-1011).
ggtgctggacgggaagatt

SEQ ID NO: 315087 - DNA, 19 bp, Homo sapiens
  siRNA target sequence for CD47 (NM_001777.2,194-212).
gatcagctcagctactatt

SEQ ID NO: 315088 - DNA, 19 bp, Homo sapiens
  siRNA target sequence for CD47 (NM_001777.2,197-215).
cagctcagctactatttaa

SEQ ID NO: 315089 - DNA, 19 bp, Homo sapiens
  siRNA target sequence for CD47 (NM_001777.2,199-217).
gctcagctactatttaata

SEQ ID NO: 315090 - DNA, 19 bp, Homo sapiens
  siRNA target sequence for CD47 (NM_001777.2,250-268).
gacactgtcgtcattccat

SEQ ID NO: 315091 - DNA, 19 bp, Homo sapiens
  siRNA target sequence for CD47 (NM_001777.2,261-279).
cattccatgctttgttact

SEQ ID NO: 315092 - DNA, 19 bp, Homo sapiens
  siRNA target sequence for CD47 (NM_001777.2,269-287).
gctttgttactaatatgga

SEQ ID NO: 315093 - DNA, 19 bp, Homo sapiens
  siRNA target sequence for CD47 (NM_001777.2,299-317).
ctactgaagtatacgtaaa

SEQ ID NO: 315094 - DNA, 19 bp, Homo sapiens
  siRNA target sequence for CD47 (NM_001777.2,347-365).
cctttgatggagctctaaa

SEQ ID NO: 315095 - DNA, 19 bp, Homo sapiens
  siRNA target sequence for CD47 (NM_001777.2,352-370).
gatggagctctaaacaagt

SEQ ID NO: 315096 - DNA, 19 bp, Homo sapiens
  siRNA target sequence for CD47 (NM_001777.2,376-394).
gtccccactgactttagta

SEQ ID NO: 315097 - DNA, 19 bp, Homo sapiens
  siRNA target sequence for CD47 (NM_001777.2,378-396).
ccccactgactttagtagt

SEQ ID NO: 315098 - DNA, 19 bp, Homo sapiens
  siRNA target sequence for CD47 (NM_001777.2,392-410).
gtagtgcaaaaattgaagt

SEQ ID NO: 315099 - DNA, 19 bp, Homo sapiens
  siRNA target sequence for CD47 (NM_001777.2,411-429).
ctcacaattactaaaagga

SEQ ID NO: 315100 - DNA, 19 bp, Homo sapiens
  siRNA target sequence for CD47 (NM_001777.2,469-487).
cacacaggaaactacactt

SEQ ID NO: 315101 - DNA, 19 bp, Homo sapiens
  siRNA target sequence for CD47 (NM_001777.2,506-524).
ccagagaaggtgaaacgat

SEQ ID NO: 315102 - DNA, 19 bp, Homo sapiens
  siRNA target sequence for CD47 (NM_001777.2,521-539).
cgatcatcgagctaaaata

SEQ ID NO: 315103 - DNA, 19 bp, Homo sapiens
  siRNA target sequence for CD47 (NM_001777.2,522-540).
gatcatcgagctaaaatat

SEQ ID NO: 315104 - DNA, 19 bp, Homo sapiens
  siRNA target sequence for CD47 (NM_001777.2,525-543).
catcgagctaaaatatcgt

SEQ ID NO: 315105 - DNA, 19 bp, Homo sapiens
  siRNA target sequence for CD47 (NM_001777.2,531-549).
gctaaaatatcgtgttgtt

SEQ ID NO: 315106 - DNA, 19 bp, Homo sapiens
  siRNA target sequence for CD47 (NM_001777.2,617-635).
ggggacagtttggtattaa

SEQ ID NO: 315107 - DNA, 19 bp, Homo sapiens
  siRNA target sequence for CD47 (NM_001777.2,653-671).
ccggtggtatggatgagaa

SEQ ID NO: 315108 - DNA, 19 bp, Homo sapiens
  siRNA target sequence for CD47 (NM_001777.2,654-672).
cggtggtatggatgagaaa

SEQ ID NO: 315109 - DNA, 19 bp, Homo sapiens
  siRNA target sequence for CD47 (NM_001777.2,738-756).
cgtcccaggtgaatattca

SEQ ID NO: 315110 - DNA, 19 bp, Homo sapiens
  siRNA target sequence for CD47 (NM_001777.2,739-757).
gtcccaggtgaatattcat

SEQ ID NO: 315111 - DNA, 19 bp, Homo sapiens
  siRNA target sequence for CD47 (NM_001777.2,741-759).
cccaggtgaatattcatta

SEQ ID NO: 315112 - DNA, 19 bp, Homo sapiens
  siRNA target sequence for CD47 (NM_001777.2,778-796).
ggtttaattgtgacttcta

SEQ ID NO: 315113 - DNA, 19 bp, Homo sapiens
  siRNA target sequence for CD47 (NM_001777.2,789-807).
gacttctacagggatatta

SEQ ID NO: 315114 - DNA, 19 bp, Homo sapiens
  siRNA target sequence for CD47 (NM_001777.2,794-812).
ctacagggatattaatatt

SEQ ID NO: 315115 - DNA, 19 bp, Homo sapiens
  siRNA target sequence for CD47 (NM_001777.2,814-832).
cttcactactatgtgttta

SEQ ID NO: 315116 - DNA, 19 bp, Homo sapiens
  siRNA target sequence for CD47 (NM_001777.2,854-872).
ccttcgtcattgccatatt

SEQ ID NO: 315117 - DNA, 19 bp, Homo sapiens
  siRNA target sequence for CD47 (NM_001777.2,858-876).
cgtcattgccatattggtt

SEQ ID NO: 315118 - DNA, 19 bp, Homo sapiens
  siRNA target sequence for CD47 (NM_001777.2,859-877).
gtcattgccatattggtta

SEQ ID NO: 315119 - DNA, 19 bp, Homo sapiens
  siRNA target sequence for CD47 (NM_001777.2,921-939).
ctgtattgcggcgtgtata

SEQ ID NO: 315120 - DNA, 19 bp, Homo sapiens
  siRNA target sequence for CD47 (NM_001777.2,930-948).
ggcgtgtataccaatgcat

SEQ ID NO: 315121 - DNA, 19 bp, Homo sapiens
  siRNA target sequence for CD47 (NM_001777.2,945-963).
gcatggccctcttctgatt

SEQ ID NO: 315122 - DNA, 19 bp, Homo sapiens
  siRNA target sequence for CD47 (NM_001777.2,978-996).
cttagctctagcacaatta

SEQ ID NO: 315123 - DNA, 19 bp, Homo sapiens
  siRNA target sequence for CD47 (NM_001777.2,1000-1018).
ggactagtttatatgaaat

SEQ ID NO: 315124 - DNA, 19 bp, Homo sapiens
  siRNA target sequence for CD47 (NM_001777.2,1028-1046).
ccaatcagaagactataca

SEQ ID NO: 315125 - DNA, 19 bp, Homo sapiens
  siRNA target sequence for CD47 (NM_001777.2,1029-1047).
caatcagaagactatacaa

SEQ ID NO: 315126 - DNA, 19 bp, Homo sapiens
  siRNA target sequence for CD47 (NM_198793.1,1045-1063).
caacctcctaggaataact

SEQ ID NO: 315127 - DNA, 19 bp, Homo sapiens
  siRNA target sequence for SIRPB1 (NM_006065.1,229-247).
gcccatcatgtggtttaga

SEQ ID NO: 315128 - DNA, 19 bp, Homo sapiens
  siRNA target sequence for SIRPB1 (NM_006065.1,930-948).
cagcttcgaccctcataga

SEQ ID NO: 315129 - DNA, 19 bp, Homo sapiens
  siRNA target sequence for SIRPB1 (NM_006065.1,932-950).
gcttcgaccctcatagaga

SEQ ID NO: 315130 - DNA, 19 bp, Homo sapiens
  siRNA target sequence for SIRPB1 (NM_006065.1,933-951).
cttcgaccctcatagagaa

SEQ ID NO: 315131 - DNA, 19 bp, Homo sapiens
  siRNA target sequence for SIRPB1 (NM_006065.1,1100-1118).
gagcacggctcagatatca

SEQ ID NO: 315132 - DNA, 19 bp, Homo sapiens
  siRNA target sequence for SIRPB1 (NM_006065.1,1196-1214).
ggtgtctctgccatctaca

SEQ ID NO: 315133 - DNA, 19 bp, Homo sapiens
  siRNA target sequence for PARK7 (NM_007262.3,105-123).
ggtcatcctggctaaagga

SEQ ID NO: 315134 - DNA, 19 bp, Homo sapiens
  siRNA target sequence for PARK7 (NM_007262.3,138-156).
gacggtcatccctgtagat

SEQ ID NO: 315135 - DNA, 19 bp, Homo sapiens
  siRNA target sequence for PARK7 (NM_007262.3,140-158).
cggtcatccctgtagatgt

SEQ ID NO: 315136 - DNA, 19 bp, Homo sapiens
  siRNA target sequence for PARK7 (NM_007262.3,164-182).
ggcgagctgggattaaggt

SEQ ID NO: 315137 - DNA, 19 bp, Homo sapiens
  siRNA target sequence for PARK7 (NM_007262.3,423-441).
ggctcatgaaataggtttt

SEQ ID NO: 315138 - DNA, 19 bp, Homo sapiens
  siRNA target sequence for PARK7 (NM_007262.3,529-547).
gacggcctgattcttacaa

SEQ ID NO: 315139 - DNA, 19 bp, Homo sapiens
  siRNA target sequence for PARK7 (NM_007262.3,570-588).
cgagtttgcgcttgcaatt

SEQ ID NO: 315140 - DNA, 19 bp, Homo sapiens
  siRNA target sequence for PARK7 (NM_007262.3,632-650).
ctccacttgttcttaaaga

SEQ ID NO: 315141 - DNA, 19 bp, Homo sapiens
  siRNA target sequence for EDARADD (NM_080738.2,233-251).
cctctgcgcgcagatcata

SEQ ID NO: 315142 - DNA, 19 bp, Homo sapiens
  siRNA target sequence for EDARADD (NM_080738.2,234-252).
ctctgcgcgcagatcatat

SEQ ID NO: 315143 - DNA, 19 bp, Homo sapiens
  siRNA target sequence for EDARADD (NM_080738.2,238-256).
gcgcgcagatcatatggta

SEQ ID NO: 315144 - DNA, 19 bp, Homo sapiens
  siRNA target sequence for EDARADD (NM_080738.2,239-257).
cgcgcagatcatatggtaa

SEQ ID NO: 315145 - DNA, 19 bp, Homo sapiens
  siRNA target sequence for EDARADD (NM_080738.2,240-258).
gcgcagatcatatggtaaa

SEQ ID NO: 315146 - DNA, 19 bp, Homo sapiens
  siRNA target sequence for EDARADD (NM_080738.2,274-292).
cacagaccctagcacttta

SEQ ID NO: 315147 - DNA, 19 bp, Homo sapiens
  siRNA target sequence for EDARADD (NM_080738.2,278-296).
gaccctagcactttatcct

SEQ ID NO: 315148 - DNA, 19 bp, Homo sapiens
  siRNA target sequence for EDARADD (NM_080738.2,282-300).
ctagcactttatcctttaa

SEQ ID NO: 315149 - DNA, 19 bp, Homo sapiens
  siRNA target sequence for EDARADD (NM_080738.2,354-372).
gtgatacaattactttgaa

SEQ ID NO: 315150 - DNA, 19 bp, Homo sapiens
  siRNA target sequence for EDARADD (NM_080738.2,375-393).
gcccacgaaattcagatat

SEQ ID NO: 315151 - DNA, 19 bp, Homo sapiens
  siRNA target sequence for EDARADD (NM_080738.2,377-395).
ccacgaaattcagatatga

SEQ ID NO: 315152 - DNA, 19 bp, Homo sapiens
  siRNA target sequence for EDARADD (NM_080738.2,380-398).
cgaaattcagatatgaaaa

SEQ ID NO: 315153 - DNA, 19 bp, Homo sapiens
  siRNA target sequence for EDARADD (NM_080738.2,466-484).
ctcctgcaaagaaaactgt

SEQ ID NO: 315154 - DNA, 19 bp, Homo sapiens
  siRNA target sequence for EDARADD (NM_080738.2,522-540).
gtgacttgctcaatgatca

SEQ ID NO: 315155 - DNA, 19 bp, Homo sapiens
  siRNA target sequence for EDARADD (NM_080738.2,548-566).
ctagacgtgatcaggataa

SEQ ID NO: 315156 - DNA, 19 bp, Homo sapiens
  siRNA target sequence for EDARADD (NM_080738.2,579-597).
gtcacccaacggtgaaaaa

SEQ ID NO: 315157 - DNA, 19 bp, Homo sapiens
  siRNA target sequence for EDARADD (NM_145861.1,68-86).
gggcctcaggacgactaaa

SEQ ID NO: 315158 - DNA, 19 bp, Homo sapiens
  siRNA target sequence for EDARADD (NM_145861.1,70-88).
gcctcaggacgactaaaca

SEQ ID NO: 315159 - DNA, 19 bp, Homo sapiens
  siRNA target sequence for EDARADD (NM_145861.1,72-90).
ctcaggacgactaaacaga

SEQ ID NO: 315160 - DNA, 19 bp, Homo sapiens
  siRNA target sequence for EDARADD (NM_145861.1,119-137).
ccaagaggatcatatggta

SEQ ID NO: 315161 - DNA, 19 bp, Homo sapiens
  siRNA target sequence for AIP1 (NM_012301.2,497-515).
cgtgctggccgtgatcaaa

SEQ ID NO: 315162 - DNA, 19 bp, Homo sapiens
  siRNA target sequence for AIP1 (NM_012301.2,501-519).
ctggccgtgatcaaacact

SEQ ID NO: 315163 - DNA, 19 bp, Homo sapiens
  siRNA target sequence for AIP1 (NM_012301.2,582-600).
cactacctcaacttacgat

SEQ ID NO: 315164 - DNA, 19 bp, Homo sapiens
  siRNA target sequence for AIP1 (NM_012301.2,587-605).
cctcaacttacgatttcaa

SEQ ID NO: 315165 - DNA, 19 bp, Homo sapiens
  siRNA target sequence for AIP1 (NM_012301.2,673-691).
gcaccacaaggccacataa

SEQ ID NO: 315166 - DNA, 19 bp, Homo sapiens
  siRNA target sequence for AIP1 (NM_012301.2,701-719).
ggtccctggagtggattat

SEQ ID NO: 315167 - DNA, 19 bp, Homo sapiens
  siRNA target sequence for AIP1 (NM_012301.2,770-788).
cctagaaagtgggacttat

SEQ ID NO: 315168 - DNA, 19 bp, Homo sapiens
  siRNA target sequence for AIP1 (NM_012301.2,781-799).
ggacttatgaagacaatta

SEQ ID NO: 315169 - DNA, 19 bp, Homo sapiens
  siRNA target sequence for AIP1 (NM_012301.2,784-802).
cttatgaagacaattacta

SEQ ID NO: 315170 - DNA, 19 bp, Homo sapiens
  siRNA target sequence for AIP1 (NM_012301.2,822-840).
gcagaaccagcaccattat

SEQ ID NO: 315171 - DNA, 19 bp, Homo sapiens
  siRNA target sequence for AIP1 (NM_012301.2,823-841).
cagaaccagcaccattatt

SEQ ID NO: 315172 - DNA, 19 bp, Homo sapiens
  siRNA target sequence for AIP1 (NM_012301.2,834-852).
ccattattgttaaatgtaa

SEQ ID NO: 315173 - DNA, 19 bp, Homo sapiens
  siRNA target sequence for AIP1 (NM_012301.2,891-909).
ggaaaacggaagaggaata

SEQ ID NO: 315174 - DNA, 19 bp, Homo sapiens
  siRNA target sequence for AIP1 (NM_012301.2,1156-1174).
cagacccattgcctgataa

SEQ ID NO: 315175 - DNA, 19 bp, Homo sapiens
  siRNA target sequence for AIP1 (NM_012301.2,1158-1176).
gacccattgcctgataact

SEQ ID NO: 315176 - DNA, 19 bp, Homo sapiens
  siRNA target sequence for AIP1 (NM_012301.2,1192-1210).
cagagaagggcgaagtcta

SEQ ID NO: 315177 - DNA, 19 bp, Homo sapiens
  siRNA target sequence for AIP1 (NM_012301.2,1199-1217).
gggcgaagtctacttcatt

SEQ ID NO: 315178 - DNA, 19 bp, Homo sapiens
  siRNA target sequence for AIP1 (NM_012301.2,1201-1219).
gcgaagtctacttcattga

SEQ ID NO: 315179 - DNA, 19 bp, Homo sapiens
  siRNA target sequence for AIP1 (NM_012301.2,1408-1426).
ggaagctacagcaacataa

SEQ ID NO: 315180 - DNA, 19 bp, Homo sapiens
  siRNA target sequence for AIP1 (NM_012301.2,1466-1484).
cccaggtttccgagaaaaa

SEQ ID NO: 315181 - DNA, 19 bp, Homo sapiens
  siRNA target sequence for AIP1 (NM_012301.2,1665-1683).
gatgtcattgtctatatta

SEQ ID NO: 315182 - DNA, 19 bp, Homo sapiens
  siRNA target sequence for AIP1 (NM_012301.2,1676-1694).
ctatattaatgaagtttgt

SEQ ID NO: 315183 - DNA, 19 bp, Homo sapiens
  siRNA target sequence for AIP1 (NM_012301.2,1828-1846).
caccccttgcaataatgga

SEQ ID NO: 315184 - DNA, 19 bp, Homo sapiens
  siRNA target sequence for AIP1 (NM_012301.2,1918-1936).
cacagtcagttccagatat

SEQ ID NO: 315185 - DNA, 19 bp, Homo sapiens
  siRNA target sequence for AIP1 (NM_012301.2,1920-1938).
cagtcagttccagatataa

SEQ ID NO: 315186 - DNA, 19 bp, Homo sapiens
  siRNA target sequence for AIP1 (NM_012301.2,1922-1940).
gtcagttccagatataaca

SEQ ID NO: 315187 - DNA, 19 bp, Homo sapiens
  siRNA target sequence for AIP1 (NM_012301.2,1924-1942).
cagttccagatataacaga

SEQ ID NO: 315188 - DNA, 19 bp, Homo sapiens
  siRNA target sequence for AIP1 (NM_012301.2,1961-1979).
gcactccatgccaactgat

SEQ ID NO: 315189 - DNA, 19 bp, Homo sapiens
  siRNA target sequence for AIP1 (NM_012301.2,2010-2028).
gtccatgatgacaatgtgt

SEQ ID NO: 315190 - DNA, 19 bp, Homo sapiens
  siRNA target sequence for AIP1 (NM_012301.2,2046-2064).
gccacccaagctgaactta

SEQ ID NO: 315191 - DNA, 19 bp, Homo sapiens
  siRNA target sequence for AIP1 (NM_012301.2,2047-2065).
ccacccaagctgaacttat

SEQ ID NO: 315192 - DNA, 19 bp, Homo sapiens
  siRNA target sequence for AIP1 (NM_012301.2,2058-2076).
gaacttatgaccttaacca

SEQ ID NO: 315193 - DNA, 19 bp, Homo sapiens
  siRNA target sequence for AIP1 (NM_012301.2,2093-2111).
gggcttcggcttcactatt

SEQ ID NO: 315194 - DNA, 19 bp, Homo sapiens
  siRNA target sequence for AIP1 (NM_012301.2,2125-2143).
caggacagcgggtgaaaca

SEQ ID NO: 315195 - DNA, 19 bp, Homo sapiens
  siRNA target sequence for AIP1 (NM_012301.2,2132-2150).
gcgggtgaaacaaatactt

SEQ ID NO: 315196 - DNA, 19 bp, Homo sapiens
  siRNA target sequence for AIP1 (NM_012301.2,2222-2240).
cctgagccatacagaagta

SEQ ID NO: 315197 - DNA, 19 bp, Homo sapiens
  siRNA target sequence for AIP1 (NM_012301.2,2235-2253).
gaagtagtggatatactta

SEQ ID NO: 315198 - DNA, 19 bp, Homo sapiens
  siRNA target sequence for AIP1 (NM_012301.2,2339-2357).
ggaccgatgggagaatcaa

SEQ ID NO: 315199 - DNA, 19 bp, Homo sapiens
  siRNA target sequence for AIP1 (NM_012301.2,2464-2482).
cacggaagcctgatccata

SEQ ID NO: 315200 - DNA, 19 bp, Homo sapiens
  siRNA target sequence for AIP1 (NM_012301.2,2467-2485).
ggaagcctgatccatatga

SEQ ID NO: 315201 - DNA, 19 bp, Homo sapiens
  siRNA target sequence for AIP1 (NM_012301.2,2484-2502).
gagctctacgagaaatcta

SEQ ID NO: 315202 - DNA, 19 bp, Homo sapiens
  siRNA target sequence for AIP1 (NM_012301.2,2495-2513).
gaaatctagggccatttat

SEQ ID NO: 315203 - DNA, 19 bp, Homo sapiens
  siRNA target sequence for AIP1 (NM_012301.2,2535-2553).
cccaggaccagttttcgaa

SEQ ID NO: 315204 - DNA, 19 bp, Homo sapiens
  siRNA target sequence for AIP1 (NM_012301.2,2565-2583).
ggtccagattataaggaat

SEQ ID NO: 315205 - DNA, 19 bp, Homo sapiens
  siRNA target sequence for AIP1 (NM_012301.2,2646-2664).
cctggacagcctattttga

SEQ ID NO: 315206 - DNA, 19 bp, Homo sapiens
  siRNA target sequence for AIP1 (NM_012301.2,2647-2665).
ctggacagcctattttgat

SEQ ID NO: 315207 - DNA, 19 bp, Homo sapiens
  siRNA target sequence for AIP1 (NM_012301.2,3018-3036).
gtcattcaccgcaaagaga

SEQ ID NO: 315208 - DNA, 19 bp, Homo sapiens
  siRNA target sequence for AIP1 (NM_012301.2,3020-3038).
cattcaccgcaaagagaat

SEQ ID NO: 315209 - DNA, 19 bp, Homo sapiens
  siRNA target sequence for AIP1 (NM_012301.2,3083-3101).
gtctggatccactataact

SEQ ID NO: 315210 - DNA, 19 bp, Homo sapiens
  siRNA target sequence for AIP1 (NM_012301.2,3085-3103).
ctggatccactataactgt

SEQ ID NO: 315211 - DNA, 19 bp, Homo sapiens
  siRNA target sequence for AIP1 (NM_012301.2,3142-3160).
cagatcgctgtgcaaaact

SEQ ID NO: 315212 - DNA, 19 bp, Homo sapiens
  siRNA target sequence for AIP1 (NM_012301.2,3173-3191).
ccggatcctagcagtgaat

SEQ ID NO: 315213 - DNA, 19 bp, Homo sapiens
  siRNA target sequence for AIP1 (NM_012301.2,3437-3455).
gctgcaaggacacgaaaat

SEQ ID NO: 315214 - DNA, 19 bp, Homo sapiens
  siRNA target sequence for AIP1 (NM_012301.2,3441-3459).
caaggacacgaaaatagtt

SEQ ID NO: 315215 - DNA, 19 bp, Homo sapiens
  siRNA target sequence for AIP1 (NM_012301.2,3457-3475).
gttacaggtcggaagtgaa

SEQ ID NO: 315216 - DNA, 19 bp, Homo sapiens
  siRNA target sequence for AIP1 (NM_012301.2,3669-3687).
caaccccaggattttgatt

SEQ ID NO: 315217 - DNA, 19 bp, Homo sapiens
  siRNA target sequence for AIP1 (NM_012301.2,3672-3690).
ccccaggattttgattatt

SEQ ID NO: 315218 - DNA, 19 bp, Homo sapiens
  siRNA target sequence for AIP1 (NM_012301.2,3871-3889).
cacatgccagagcaataga

SEQ ID NO: 315219 - DNA, 19 bp, Homo sapiens
  siRNA target sequence for AIP1 (NM_012301.2,3880-3898).
gagcaatagaactcatcaa

SEQ ID NO: 315220 - DNA, 19 bp, Homo sapiens
  siRNA target sequence for AIP1 (NM_012301.2,4034-4052).
cggcctcgctccattctct

SEQ ID NO: 315221 - DNA, 19 bp, Homo sapiens
  siRNA target sequence for AIP1 (NM_012301.2,4101-4119).
ggcccaacttgggatatca

SEQ ID NO: 315222 - DNA, 19 bp, Homo sapiens
  siRNA target sequence for AIP1 (NM_012301.2,4123-4141).
gggaacacgacgttaggaa

SEQ ID NO: 315223 - DNA, 19 bp, Homo sapiens
  siRNA target sequence for AIP1 (NM_012301.2,4124-4142).
ggaacacgacgttaggaaa

SEQ ID NO: 315224 - DNA, 19 bp, Homo sapiens
  siRNA target sequence for AIP1 (NM_012301.2,4128-4146).
cacgacgttaggaaaccaa

SEQ ID NO: 315225 - DNA, 19 bp, Homo sapiens
  siRNA target sequence for ALP (NM_014476.1,123-141).
cagggggcatagacttcaa

SEQ ID NO: 315226 - DNA, 19 bp, Homo sapiens
  siRNA target sequence for ALP (NM_014476.1,260-278).
gatgcgcaggacaggatta

SEQ ID NO: 315227 - DNA, 19 bp, Homo sapiens
  siRNA target sequence for ALP (NM_014476.1,317-335).
ggagaaactcacttatggt

SEQ ID NO: 315228 - DNA, 19 bp, Homo sapiens
  siRNA target sequence for ALP (NM_014476.1,328-346).
cttatggtctccacaagta

SEQ ID NO: 315229 - DNA, 19 bp, Homo sapiens
  siRNA target sequence for ALP (NM_014476.1,400-418).
ggacgggaactactttgaa

SEQ ID NO: 315230 - DNA, 19 bp, Homo sapiens
  siRNA target sequence for ALP (NM_014476.1,583-601).
ccctaacattcctttggaa

SEQ ID NO: 315231 - DNA, 19 bp, Homo sapiens
  siRNA target sequence for ARHGAP21 (NM_020824.1,488-506).
ggcctgcgaggtctcaaaa

SEQ ID NO: 315232 - DNA, 19 bp, Homo sapiens
  siRNA target sequence for ARHGAP21 (NM_020824.1,568-586).
ggccaggtcccaaaacagt

SEQ ID NO: 315233 - DNA, 19 bp, Homo sapiens
  siRNA target sequence for ARHGAP21 (NM_020824.1,569-587).
gccaggtcccaaaacagtt

SEQ ID NO: 315234 - DNA, 19 bp, Homo sapiens
  siRNA target sequence for ARHGAP21 (NM_020824.1,578-596).
caaaacagttacgttgaaa

SEQ ID NO: 315235 - DNA, 19 bp, Homo sapiens
  siRNA target sequence for ARHGAP21 (NM_020824.1,606-624).
caaggctttggttttacat

SEQ ID NO: 315236 - DNA, 19 bp, Homo sapiens
  siRNA target sequence for ARHGAP21 (NM_020824.1,648-666).
ccagagtctgcaattcaat

SEQ ID NO: 315237 - DNA, 19 bp, Homo sapiens
  siRNA target sequence for ARHGAP21 (NM_020824.1,712-730).
gaaaccgcttggaaccaat

SEQ ID NO: 315238 - DNA, 19 bp, Homo sapiens
  siRNA target sequence for ARHGAP21 (NM_020824.1,716-734).
ccgcttggaaccaatggat

SEQ ID NO: 315239 - DNA, 19 bp, Homo sapiens
  siRNA target sequence for ARHGAP21 (NM_020824.1,717-735).
cgcttggaaccaatggata

SEQ ID NO: 315240 - DNA, 19 bp, Homo sapiens
  siRNA target sequence for ARHGAP21 (NM_020824.1,790-808).
gtacaggtgaccgaattat

SEQ ID NO: 315241 - DNA, 19 bp, Homo sapiens
  siRNA target sequence for ARHGAP21 (NM_020824.1,793-811).
caggtgaccgaattataaa

SEQ ID NO: 315242 - DNA, 19 bp, Homo sapiens
  siRNA target sequence for ARHGAP21 (NM_020824.1,798-816).
gaccgaattataaaagtca

SEQ ID NO: 315243 - DNA, 19 bp, Homo sapiens
  siRNA target sequence for ARHGAP21 (NM_020824.1,826-844).
gtgttattggcaaaaccta

SEQ ID NO: 315244 - DNA, 19 bp, Homo sapiens
  siRNA target sequence for ARHGAP21 (NM_020824.1,847-865).
cccaagtaattgctttaat

SEQ ID NO: 315245 - DNA, 19 bp, Homo sapiens
  siRNA target sequence for ARHGAP21 (NM_020824.1,902-920).
gccaaaagatgaagacatt

SEQ ID NO: 315246 - DNA, 19 bp, Homo sapiens
  siRNA target sequence for ARHGAP21 (NM_020824.1,929-947).
gctacagtttacaaaggat

SEQ ID NO: 315247 - DNA, 19 bp, Homo sapiens
  siRNA target sequence for ARHGAP21 (NM_020824.1,1003-1021).
gcggcaatgcccgcaatat

SEQ ID NO: 315248 - DNA, 19 bp, Homo sapiens
  siRNA target sequence for ARHGAP21 (NM_020824.1,1004-1022).
cggcaatgcccgcaatata

SEQ ID NO: 315249 - DNA, 19 bp, Homo sapiens
  siRNA target sequence for ARHGAP21 (NM_020824.1,1073-1091).
catggcacagccagttgaa

SEQ ID NO: 315250 - DNA, 19 bp, Homo sapiens
  siRNA target sequence for ARHGAP21 (NM_020824.1,1152-1170).
cctggtagggcctatagaa

SEQ ID NO: 315251 - DNA, 19 bp, Homo sapiens
  siRNA target sequence for ARHGAP21 (NM_020824.1,1160-1178).
ggcctatagaatggaaata

SEQ ID NO: 315252 - DNA, 19 bp, Homo sapiens
  siRNA target sequence for ARHGAP21 (NM_020824.1,1269-1287).
gagaaggttgtagatttgt

SEQ ID NO: 315253 - DNA, 19 bp, Homo sapiens
  siRNA target sequence for ARHGAP21 (NM_020824.1,1281-1299).
gatttgttatccaatagaa

SEQ ID NO: 315254 - DNA, 19 bp, Homo sapiens
  siRNA target sequence for ARHGAP21 (NM_020824.1,1304-1322).
ccatacaggtccttcacat

SEQ ID NO: 315255 - DNA, 19 bp, Homo sapiens
  siRNA target sequence for ARHGAP21 (NM_020824.1,1305-1323).
catacaggtccttcacata

SEQ ID NO: 315256 - DNA, 19 bp, Homo sapiens
  siRNA target sequence for ARHGAP21 (NM_020824.1,1318-1336).
cacatagaactgaagaagt

SEQ ID NO: 315257 - DNA, 19 bp, Homo sapiens
  siRNA target sequence for ARHGAP21 (NM_020824.1,1411-1429).
ccactcatctaattcatca

SEQ ID NO: 315258 - DNA, 19 bp, Homo sapiens
  siRNA target sequence for ARHGAP21 (NM_020824.1,1532-1550).
ggaggctccctctgtatct

SEQ ID NO: 315259 - DNA, 19 bp, Homo sapiens
  siRNA target sequence for ARHGAP21 (NM_020824.1,1543-1561).
ctgtatctgttaatcacta

SEQ ID NO: 315260 - DNA, 19 bp, Homo sapiens
  siRNA target sequence for ARHGAP21 (NM_020824.1,1545-1563).
gtatctgttaatcactatt

SEQ ID NO: 315261 - DNA, 19 bp, Homo sapiens
  siRNA target sequence for ARHGAP21 (NM_020824.1,1578-1596).
cagcacatagactggaaaa

SEQ ID NO: 315262 - DNA, 19 bp, Homo sapiens
  siRNA target sequence for ARHGAP21 (NM_020824.1,1583-1601).
catagactggaaaaactat

SEQ ID NO: 315263 - DNA, 19 bp, Homo sapiens
  siRNA target sequence for ARHGAP21 (NM_020824.1,1587-1605).
gactggaaaaactataaaa

SEQ ID NO: 315264 - DNA, 19 bp, Homo sapiens
  siRNA target sequence for ARHGAP21 (NM_020824.1,1640-1658).
cataggttgtcggacaata

SEQ ID NO: 315265 - DNA, 19 bp, Homo sapiens
  siRNA target sequence for ARHGAP21 (NM_020824.1,1645-1663).
gttgtcggacaatacaaga

SEQ ID NO: 315266 - DNA, 19 bp, Homo sapiens
  siRNA target sequence for ARHGAP21 (NM_020824.1,1690-1708).
ctcaaagcacgacagatta

SEQ ID NO: 315267 - DNA, 19 bp, Homo sapiens
  siRNA target sequence for ARHGAP21 (NM_020824.1,1696-1714).
gcacgacagattataacca

SEQ ID NO: 315268 - DNA, 19 bp, Homo sapiens
  siRNA target sequence for ARHGAP21 (NM_020824.1,1800-1818).
cgcagtgtgtcccaagaaa

SEQ ID NO: 315269 - DNA, 19 bp, Homo sapiens
  siRNA target sequence for ARHGAP21 (NM_020824.1,1827-1845).
gattctgtgctaatgaagt

SEQ ID NO: 315270 - DNA, 19 bp, Homo sapiens
  siRNA target sequence for ARHGAP21 (NM_020824.1,1875-1893).
ctgacgtctccatctgtta

SEQ ID NO: 315271 - DNA, 19 bp, Homo sapiens
  siRNA target sequence for ARHGAP21 (NM_020824.1,1877-1895).
gacgtctccatctgttagt

SEQ ID NO: 315272 - DNA, 19 bp, Homo sapiens
  siRNA target sequence for ARHGAP21 (NM_020824.1,1884-1902).
ccatctgttagttttagta

SEQ ID NO: 315273 - DNA, 19 bp, Homo sapiens
  siRNA target sequence for ARHGAP21 (NM_020824.1,1885-1903).
catctgttagttttagtaa

SEQ ID NO: 315274 - DNA, 19 bp, Homo sapiens
  siRNA target sequence for ARHGAP21 (NM_020824.1,1890-1908).
gttagttttagtaatcata

SEQ ID NO: 315275 - DNA, 19 bp, Homo sapiens
  siRNA target sequence for ARHGAP21 (NM_020824.1,1912-1930).
ctcgttcatgggattatat

SEQ ID NO: 315276 - DNA, 19 bp, Homo sapiens
  siRNA target sequence for ARHGAP21 (NM_020824.1,1972-1990).
ctccaatacctgattccaa

SEQ ID NO: 315277 - DNA, 19 bp, Homo sapiens
  siRNA target sequence for ARHGAP21 (NM_020824.1,2012-2030).
caagtggagtgggtttact

SEQ ID NO: 315278 - DNA, 19 bp, Homo sapiens
  siRNA target sequence for ARHGAP21 (NM_020824.1,2036-2054).
ggatgatagacgaggtatt

SEQ ID NO: 315279 - DNA, 19 bp, Homo sapiens
  siRNA target sequence for ARHGAP21 (NM_020824.1,2062-2080).
gacctaggcagcaagaaat

SEQ ID NO: 315280 - DNA, 19 bp, Homo sapiens
  siRNA target sequence for ARHGAP21 (NM_020824.1,2065-2083).
ctaggcagcaagaaattca

SEQ ID NO: 315281 - DNA, 19 bp, Homo sapiens
  siRNA target sequence for ARHGAP21 (NM_020824.1,2068-2086).
ggcagcaagaaattcataa

SEQ ID NO: 315282 - DNA, 19 bp, Homo sapiens
  siRNA target sequence for ARHGAP21 (NM_020824.1,2089-2107).
cttttcgaggttccaattt

SEQ ID NO: 315283 - DNA, 19 bp, Homo sapiens
  siRNA target sequence for ARHGAP21 (NM_020824.1,2112-2130).
gtggctccaagcgttgtta

SEQ ID NO: 315284 - DNA, 19 bp, Homo sapiens
  siRNA target sequence for ARHGAP21 (NM_020824.1,2114-2132).
ggctccaagcgttgttaat

SEQ ID NO: 315285 - DNA, 19 bp, Homo sapiens
  siRNA target sequence for ARHGAP21 (NM_020824.1,2115-2133).
gctccaagcgttgttaatt

SEQ ID NO: 315286 - DNA, 19 bp, Homo sapiens
  siRNA target sequence for ARHGAP21 (NM_020824.1,2122-2140).
gcgttgttaattctgataa

SEQ ID NO: 315287 - DNA, 19 bp, Homo sapiens
  siRNA target sequence for ARHGAP21 (NM_020824.1,2166-2184).
ggatctgtgtcgcagttta

SEQ ID NO: 315288 - DNA, 19 bp, Homo sapiens
  siRNA target sequence for ARHGAP21 (NM_020824.1,2167-2185).
gatctgtgtcgcagtttaa

SEQ ID NO: 315289 - DNA, 19 bp, Homo sapiens
  siRNA target sequence for ARHGAP21 (NM_020824.1,2193-2211).
ccaccagatctaaaaacat

SEQ ID NO: 315290 - DNA, 19 bp, Homo sapiens
  siRNA target sequence for ARHGAP21 (NM_020824.1,2194-2212).
caccagatctaaaaacatt

SEQ ID NO: 315291 - DNA, 19 bp, Homo sapiens
  siRNA target sequence for ARHGAP21 (NM_020824.1,2234-2252).
gactacttgtggaatgtca

SEQ ID NO: 315292 - DNA, 19 bp, Homo sapiens
  siRNA target sequence for ARHGAP21 (NM_020824.1,2278-2296).
ggtcacctcttgtgaaagt

SEQ ID NO: 315293 - DNA, 19 bp, Homo sapiens
  siRNA target sequence for ARHGAP21 (NM_020824.1,2289-2307).
gtgaaagtccgaagtaatt

SEQ ID NO: 315294 - DNA, 19 bp, Homo sapiens
  siRNA target sequence for ARHGAP21 (NM_020824.1,2297-2315).
ccgaagtaattctctgaaa

SEQ ID NO: 315295 - DNA, 19 bp, Homo sapiens
  siRNA target sequence for ARHGAP21 (NM_020824.1,2340-2358).
ccatcatttagccagaaat

SEQ ID NO: 315296 - DNA, 19 bp, Homo sapiens
  siRNA target sequence for ARHGAP21 (NM_020824.1,2511-2529).
gcccctcagtcgagtgaaa

SEQ ID NO: 315297 - DNA, 19 bp, Homo sapiens
  siRNA target sequence for ARHGAP21 (NM_020824.1,2512-2530).
cccctcagtcgagtgaaaa

SEQ ID NO: 315298 - DNA, 19 bp, Homo sapiens
  siRNA target sequence for ARHGAP21 (NM_020824.1,2531-2549).
cgctggtacttcagattta

SEQ ID NO: 315299 - DNA, 19 bp, Homo sapiens
  siRNA target sequence for ARHGAP21 (NM_020824.1,2533-2551).
ctggtacttcagatttaga

SEQ ID NO: 315300 - DNA, 19 bp, Homo sapiens
  siRNA target sequence for ARHGAP21 (NM_020824.1,2550-2568).
gaactacctgtcagtcaaa

SEQ ID NO: 315301 - DNA, 19 bp, Homo sapiens
  siRNA target sequence for ARHGAP21 (NM_020824.1,2606-2624).
gcaatcagatactttagat

SEQ ID NO: 315302 - DNA, 19 bp, Homo sapiens
  siRNA target sequence for ARHGAP21 (NM_020824.1,2607-2625).
caatcagatactttagata

SEQ ID NO: 315303 - DNA, 19 bp, Homo sapiens
  siRNA target sequence for ARHGAP21 (NM_020824.1,2611-2629).
cagatactttagataataa

SEQ ID NO: 315304 - DNA, 19 bp, Homo sapiens
  siRNA target sequence for ARHGAP21 (NM_020824.1,2670-2688).
cagacaccgcagcctttaa

SEQ ID NO: 315305 - DNA, 19 bp, Homo sapiens
  siRNA target sequence for ARHGAP21 (NM_020824.1,2698-2716).
cttacatcttggcagtaaa

SEQ ID NO: 315306 - DNA, 19 bp, Homo sapiens
  siRNA target sequence for ARHGAP21 (NM_020824.1,2766-2784).
cgtcgagaggtccacataa

SEQ ID NO: 315307 - DNA, 19 bp, Homo sapiens
  siRNA target sequence for ARHGAP21 (NM_020824.1,2767-2785).
gtcgagaggtccacataaa

SEQ ID NO: 315308 - DNA, 19 bp, Homo sapiens
  siRNA target sequence for ARHGAP21 (NM_020824.1,2818-2836).
gtccgcctggcgattcttt

SEQ ID NO: 315309 - DNA, 19 bp, Homo sapiens
  siRNA target sequence for ARHGAP21 (NM_020824.1,2866-2884).
ctagccctagcattgatca

SEQ ID NO: 315310 - DNA, 19 bp, Homo sapiens
  siRNA target sequence for ARHGAP21 (NM_020824.1,2869-2887).
gccctagcattgatcatga

SEQ ID NO: 315311 - DNA, 19 bp, Homo sapiens
  siRNA target sequence for ARHGAP21 (NM_020824.1,2870-2888).
ccctagcattgatcatgat

SEQ ID NO: 315312 - DNA, 19 bp, Homo sapiens
  siRNA target sequence for ARHGAP21 (NM_020824.1,2958-2976).
cctccttgcctcacaactt

SEQ ID NO: 315313 - DNA, 19 bp, Homo sapiens
  siRNA target sequence for ARHGAP21 (NM_020824.1,2971-2989).
caacttcagctccattaat

SEQ ID NO: 315314 - DNA, 19 bp, Homo sapiens
  siRNA target sequence for ARHGAP21 (NM_020824.1,3004-3022).
cacatgaccacgaatctgt

SEQ ID NO: 315315 - DNA, 19 bp, Homo sapiens
  siRNA target sequence for ARHGAP21 (NM_020824.1,3039-3057).
gatgctcagcccaactcaa

SEQ ID NO: 315316 - DNA, 19 bp, Homo sapiens
  siRNA target sequence for ARHGAP21 (NM_020824.1,3084-3102).
gagggtctggatgattaca

SEQ ID NO: 315317 - DNA, 19 bp, Homo sapiens
  siRNA target sequence for ARHGAP21 (NM_020824.1,3086-3104).
gggtctggatgattacaga

SEQ ID NO: 315318 - DNA, 19 bp, Homo sapiens
  siRNA target sequence for ARHGAP21 (NM_020824.1,3108-3126).
gatgcaaaattgtccttta

SEQ ID NO: 315319 - DNA, 19 bp, Homo sapiens
  siRNA target sequence for ARHGAP21 (NM_020824.1,3139-3157).
gtctgaagggaatcaagat

SEQ ID NO: 315320 - DNA, 19 bp, Homo sapiens
  siRNA target sequence for ARHGAP21 (NM_020824.1,3158-3176).
cgcagacagccaaaagtca

SEQ ID NO: 315321 - DNA, 19 bp, Homo sapiens
  siRNA target sequence for ARHGAP21 (NM_020824.1,3159-3177).
gcagacagccaaaagtcat

SEQ ID NO: 315322 - DNA, 19 bp, Homo sapiens
  siRNA target sequence for ARHGAP21 (NM_020824.1,3189-3207).
gggtccagaaaagattctt

SEQ ID NO: 315323 - DNA, 19 bp, Homo sapiens
  siRNA target sequence for ARHGAP21 (NM_020824.1,3281-3299).
gcgagttggtggaagtatt

SEQ ID NO: 315324 - DNA, 19 bp, Homo sapiens
  siRNA target sequence for ARHGAP21 (NM_020824.1,3326-3344).
ccttcggggtcattcactt

SEQ ID NO: 315325 - DNA, 19 bp, Homo sapiens
  siRNA target sequence for ARHGAP21 (NM_020824.1,3327-3345).
cttcggggtcattcacttt

SEQ ID NO: 315326 - DNA, 19 bp, Homo sapiens
  siRNA target sequence for ARHGAP21 (NM_020824.1,3331-3349).
ggggtcattcactttacct

SEQ ID NO: 315327 - DNA, 19 bp, Homo sapiens
  siRNA target sequence for ARHGAP21 (NM_020824.1,3415-3433).
gcttgatagacatctctta

SEQ ID NO: 315328 - DNA, 19 bp, Homo sapiens
  siRNA target sequence for ARHGAP21 (NM_020824.1,3419-3437).
gatagacatctcttacagt

SEQ ID NO: 315329 - DNA, 19 bp, Homo sapiens
  siRNA target sequence for ARHGAP21 (NM_020824.1,3578-3596).
cactaacagggatctaatt

SEQ ID NO: 315330 - DNA, 19 bp, Homo sapiens
  siRNA target sequence for ARHGAP21 (NM_020824.1,3591-3609).
ctaattagtcgaagaataa

SEQ ID NO: 315331 - DNA, 19 bp, Homo sapiens
  siRNA target sequence for ARHGAP21 (NM_020824.1,3636-3654).
gcagaacagttgccaaaaa

SEQ ID NO: 315332 - DNA, 19 bp, Homo sapiens
  siRNA target sequence for ARHGAP21 (NM_020824.1,3669-3687).
ctcagcatcaggcaaactt

SEQ ID NO: 315333 - DNA, 19 bp, Homo sapiens
  siRNA target sequence for ARHGAP21 (NM_020824.1,3752-3770).
gaaacttctcagtaaagat

SEQ ID NO: 315334 - DNA, 19 bp, Homo sapiens
  siRNA target sequence for ARHGAP21 (NM_020824.1,3805-3823).
gaaaaggcattccaagtat

SEQ ID NO: 315335 - DNA, 19 bp, Homo sapiens
  siRNA target sequence for ARHGAP21 (NM_020824.1,3810-3828).
ggcattccaagtatcatga

SEQ ID NO: 315336 - DNA, 19 bp, Homo sapiens
  siRNA target sequence for ARHGAP21 (NM_020824.1,3850-3868).
caactgctacaggaacttt

SEQ ID NO: 315337 - DNA, 19 bp, Homo sapiens
  siRNA target sequence for ARHGAP21 (NM_020824.1,3898-3916).
ctcatactaatcggtatat

SEQ ID NO: 315338 - DNA, 19 bp, Homo sapiens
  siRNA target sequence for ARHGAP21 (NM_020824.1,3904-3922).
ctaatcggtatattccatt

SEQ ID NO: 315339 - DNA, 19 bp, Homo sapiens
  siRNA target sequence for ARHGAP21 (NM_020824.1,3910-3928).
ggtatattccattaatagt

SEQ ID NO: 315340 - DNA, 19 bp, Homo sapiens
  siRNA target sequence for ARHGAP21 (NM_020824.1,3911-3929).
gtatattccattaatagtt

SEQ ID NO: 315341 - DNA, 19 bp, Homo sapiens
  siRNA target sequence for ARHGAP21 (NM_020824.1,3937-3955).
gttgcaaattagttgaaga

SEQ ID NO: 315342 - DNA, 19 bp, Homo sapiens
  siRNA target sequence for ARHGAP21 (NM_020824.1,3963-3981).
cttgaatatacaggtattt

SEQ ID NO: 315343 - DNA, 19 bp, Homo sapiens
  siRNA target sequence for ARHGAP21 (NM_020824.1,4045-4063).
ctgatattgatatacaaga

SEQ ID NO: 315344 - DNA, 19 bp, Homo sapiens
  siRNA target sequence for ARHGAP21 (NM_020824.1,4065-4083).
gataaatggcgagatttga

SEQ ID NO: 315345 - DNA, 19 bp, Homo sapiens
  siRNA target sequence for ARHGAP21 (NM_020824.1,4072-4090).
ggcgagatttgaatgtgat

SEQ ID NO: 315346 - DNA, 19 bp, Homo sapiens
  siRNA target sequence for ARHGAP21 (NM_020824.1,4073-4091).
gcgagatttgaatgtgata

SEQ ID NO: 315347 - DNA, 19 bp, Homo sapiens
  siRNA target sequence for ARHGAP21 (NM_020824.1,4093-4111).
gcagtttactaaaatcctt

SEQ ID NO: 315348 - DNA, 19 bp, Homo sapiens
  siRNA target sequence for ARHGAP21 (NM_020824.1,4130-4148).
gcctctcttcacaaatgat

SEQ ID NO: 315349 - DNA, 19 bp, Homo sapiens
  siRNA target sequence for ARHGAP21 (NM_020824.1,4139-4157).
cacaaatgataaatatgct

SEQ ID NO: 315350 - DNA, 19 bp, Homo sapiens
  siRNA target sequence for ARHGAP21 (NM_020824.1,4191-4209).
ctagatcgtctgaaaacat

SEQ ID NO: 315351 - DNA, 19 bp, Homo sapiens
  siRNA target sequence for ARHGAP21 (NM_020824.1,4194-4212).
gatcgtctgaaaacattaa

SEQ ID NO: 315352 - DNA, 19 bp, Homo sapiens
  siRNA target sequence for ARHGAP21 (NM_020824.1,4227-4245).
gatttgcctgaacatcatt

SEQ ID NO: 315353 - DNA, 19 bp, Homo sapiens
  siRNA target sequence for ARHGAP21 (NM_020824.1,4248-4266).
gaaacacttaagttccttt

SEQ ID NO: 315354 - DNA, 19 bp, Homo sapiens
  siRNA target sequence for ARHGAP21 (NM_020824.1,4321-4339).
gaaacctagcaatagtgtt

SEQ ID NO: 315355 - DNA, 19 bp, Homo sapiens
  siRNA target sequence for ARHGAP21 (NM_020824.1,4346-4364).
cacccttgttcgaacatca

SEQ ID NO: 315356 - DNA, 19 bp, Homo sapiens
  siRNA target sequence for ARHGAP21 (NM_020824.1,4357-4375).
gaacatcagaagacaacat

SEQ ID NO: 315357 - DNA, 19 bp, Homo sapiens
  siRNA target sequence for ARHGAP21 (NM_020824.1,4397-4415).
gcctgaccagtacaagatt

SEQ ID NO: 315358 - DNA, 19 bp, Homo sapiens
  siRNA target sequence for ARHGAP21 (NM_020824.1,4399-4417).
ctgaccagtacaagattgt

SEQ ID NO: 315359 - DNA, 19 bp, Homo sapiens
  siRNA target sequence for ARHGAP21 (NM_020824.1,4403-4421).
ccagtacaagattgtagaa

SEQ ID NO: 315360 - DNA, 19 bp, Homo sapiens
  siRNA target sequence for ARHGAP21 (NM_020824.1,4632-4650).
ggaaaggatcagtatagca

SEQ ID NO: 315361 - DNA, 19 bp, Homo sapiens
  siRNA target sequence for ARHGAP21 (NM_020824.1,4658-4676).
gcttgtgtcctccatcttt

SEQ ID NO: 315362 - DNA, 19 bp, Homo sapiens
  siRNA target sequence for ARHGAP21 (NM_020824.1,4721-4739).
gcctagcagctcagaagat

SEQ ID NO: 315363 - DNA, 19 bp, Homo sapiens
  siRNA target sequence for ARHGAP21 (NM_020824.1,4802-4820).
ggagtccaaaaaagaaagt

SEQ ID NO: 315364 - DNA, 19 bp, Homo sapiens
  siRNA target sequence for ARHGAP21 (NM_020824.1,4834-4852).
gaaaacagaagatcatcat

SEQ ID NO: 315365 - DNA, 19 bp, Homo sapiens
  siRNA target sequence for ARHGAP21 (NM_020824.1,4882-4900).
ccagcacgacaaaagatga

SEQ ID NO: 315366 - DNA, 19 bp, Homo sapiens
  siRNA target sequence for ARHGAP21 (NM_020824.1,4885-4903).
gcacgacaaaagatgaaaa

SEQ ID NO: 315367 - DNA, 19 bp, Homo sapiens
  siRNA target sequence for ARHGAP21 (NM_020824.1,4922-4940).
gagcacgccttctgaagaa

SEQ ID NO: 315368 - DNA, 19 bp, Homo sapiens
  siRNA target sequence for ARHGAP21 (NM_020824.1,5099-5117).
ggcctccctggcaaggttt

SEQ ID NO: 315369 - DNA, 19 bp, Homo sapiens
  siRNA target sequence for ARHGAP21 (NM_020824.1,5131-5149).
caaccagtccagaaacgaa

SEQ ID NO: 315370 - DNA, 19 bp, Homo sapiens
  siRNA target sequence for ARHGAP21 (NM_020824.1,5135-5153).
cagtccagaaacgaaacat

SEQ ID NO: 315371 - DNA, 19 bp, Homo sapiens
  siRNA target sequence for ARHGAP21 (NM_020824.1,5176-5194).
gcaccatcacctcagatta

SEQ ID NO: 315372 - DNA, 19 bp, Homo sapiens
  siRNA target sequence for ARHGAP21 (NM_020824.1,5177-5195).
caccatcacctcagattat

SEQ ID NO: 315373 - DNA, 19 bp, Homo sapiens
  siRNA target sequence for ARHGAP21 (NM_020824.1,5406-5424).
ctgcaagaagtgactaaga

SEQ ID NO: 315374 - DNA, 19 bp, Homo sapiens
  siRNA target sequence for ARHGAP21 (NM_020824.1,5423-5441).
gagcagccggagaaattct

SEQ ID NO: 315375 - DNA, 19 bp, Homo sapiens
  siRNA target sequence for ARHGAP21 (NM_020824.1,5458-5476).
gttgcaccgagggaagttt

SEQ ID NO: 315376 - DNA, 19 bp, Homo sapiens
  siRNA target sequence for ARHGAP21 (NM_020824.1,5470-5488).
gaagtttaacatcaagttt

SEQ ID NO: 315377 - DNA, 19 bp, Homo sapiens
  siRNA target sequence for ARHGAP21 (NM_020824.1,5496-5514).
cggagacagctcttcagtt

SEQ ID NO: 315378 - DNA, 19 bp, Homo sapiens
  siRNA target sequence for ARHGAP21 (NM_020824.1,5525-5543).
catcgaatgtgatactctt

SEQ ID NO: 315379 - DNA, 19 bp, Homo sapiens
  siRNA target sequence for ARHGAP21 (NM_020824.1,6221-6239).
gagcaaaaatgctagttct

SEQ ID NO: 315380 - DNA, 19 bp, Homo sapiens
  siRNA target sequence for ARHGAP21 (NM_020824.1,6244-6262).
cgaatgcccaacctcataa

SEQ ID NO: 315381 - DNA, 19 bp, Homo sapiens
  siRNA target sequence for ARHGAP21 (NM_020824.1,6245-6263).
gaatgcccaacctcataaa

SEQ ID NO: 315382 - DNA, 19 bp, Homo sapiens
  siRNA target sequence for ASB10 (NM_080871.2,548-566).
gggatttccgcttcaacat

SEQ ID NO: 315383 - DNA, 19 bp, Homo sapiens
  siRNA target sequence for ASB10 (NM_080871.2,578-596).
gactctggtctctgacata

SEQ ID NO: 315384 - DNA, 19 bp, Homo sapiens
  siRNA target sequence for ASB11 (NM_080873.1,47-65).
caatgtttgctacgttttt

SEQ ID NO: 315385 - DNA, 19 bp, Homo sapiens
  siRNA target sequence for ASB11 (NM_080873.1,114-132).
ctatatcgtcaaaggaaat

SEQ ID NO: 315386 - DNA, 19 bp, Homo sapiens
  siRNA target sequence for ASB11 (NM_080873.1,160-178).
gagatctatggtggaattt

SEQ ID NO: 315387 - DNA, 19 bp, Homo sapiens
  siRNA target sequence for ASB11 (NM_080873.1,162-180).
gatctatggtggaatttca

SEQ ID NO: 315388 - DNA, 19 bp, Homo sapiens
  siRNA target sequence for ASB11 (NM_080873.1,228-246).
gcgcttactggcccttaaa

SEQ ID NO: 315389 - DNA, 19 bp, Homo sapiens
  siRNA target sequence for ASB11 (NM_080873.1,229-247).
cgcttactggcccttaaaa

SEQ ID NO: 315390 - DNA, 19 bp, Homo sapiens
  siRNA target sequence for ASB11 (NM_080873.1,231-249).
cttactggcccttaaaact

SEQ ID NO: 315391 - DNA, 19 bp, Homo sapiens
  siRNA target sequence for ASB11 (NM_080873.1,271-289).
gtgaaccttgtgacaatta

SEQ ID NO: 315392 - DNA, 19 bp, Homo sapiens
  siRNA target sequence for ASB11 (NM_080873.1,428-446).
gtgctgcatgtgtcaatgt

SEQ ID NO: 315393 - DNA, 19 bp, Homo sapiens
  siRNA target sequence for ASB11 (NM_080873.1,540-558).
gatcctgctggcaaataat

SEQ ID NO: 315394 - DNA, 19 bp, Homo sapiens
  siRNA target sequence for ASB11 (NM_080873.1,547-565).
ctggcaaataatgttaaca

SEQ ID NO: 315395 - DNA, 19 bp, Homo sapiens
  siRNA target sequence for ASB11 (NM_080873.1,623-641).
gggtagactgtgtgaagaa

SEQ ID NO: 315396 - DNA, 19 bp, Homo sapiens
  siRNA target sequence for ASB11 (NM_080873.1,630-648).
ctgtgtgaagaaacttcta

SEQ ID NO: 315397 - DNA, 19 bp, Homo sapiens
  siRNA target sequence for ASB11 (NM_080873.1,755-773).
ctaacctgaagcgtagaaa

SEQ ID NO: 315398 - DNA, 19 bp, Homo sapiens
  siRNA target sequence for ASB11 (NM_080873.1,759-777).
cctgaagcgtagaaatgct

SEQ ID NO: 315399 - DNA, 19 bp, Homo sapiens
  siRNA target sequence for ASB11 (NM_080873.1,897-915).
cggtcgagcatgtcatcaa

SEQ ID NO: 315400 - DNA, 19 bp, Homo sapiens
  siRNA target sequence for ASB11 (NM_080873.1,917-935).
ccatccacaagctacatct

SEQ ID NO: 315401 - DNA, 19 bp, Homo sapiens
  siRNA target sequence for ASB11 (NM_080873.1,938-956).
cagagccactcgaacgatt

SEQ ID NO: 315402 - DNA, 19 bp, Homo sapiens
  siRNA target sequence for ASB11 (NM_080873.1,952-970).
cgattcctcctataccaat

SEQ ID NO: 315403 - DNA, 19 bp, Homo sapiens
  siRNA target sequence for ASB13 (NM_024701.2,407-425).
gcgggagttccgaatgtgt

SEQ ID NO: 315404 - DNA, 19 bp, Homo sapiens
  siRNA target sequence for ASB13 (NM_024701.2,422-440).
gtgtgaggcttcttattga

SEQ ID NO: 315405 - DNA, 19 bp, Homo sapiens
  siRNA target sequence for ASB13 (NM_024701.2,510-528).
gcatctggactgtgtcaaa

SEQ ID NO: 315406 - DNA, 19 bp, Homo sapiens
  siRNA target sequence for ASB13 (NM_024701.2,594-612).
ggccaaggtcaagaatgtt

SEQ ID NO: 315407 - DNA, 19 bp, Homo sapiens
  siRNA target sequence for ASB13 (NM_024701.2,634-652).
gagtttggcggcaacatct

SEQ ID NO: 315408 - DNA, 19 bp, Homo sapiens
  siRNA target sequence for ASB13 (NM_024701.2,713-731).
ccaagtgcttcgagtacta

SEQ ID NO: 315409 - DNA, 19 bp, Homo sapiens
  siRNA target sequence for ASB13 (NM_024701.2,723-741).
cgagtactacgaaaagaca

SEQ ID NO: 315410 - DNA, 19 bp, Homo sapiens
  siRNA target sequence for ASB13 (NM_024701.2,760-778).
ctctgcagggtgaacttga

SEQ ID NO: 315411 - DNA, 19 bp, Homo sapiens
  siRNA target sequence for ASB13 (NM_024701.2,804-822).
ggagaagattgccaagtta

SEQ ID NO: 315412 - DNA, 19 bp, Homo sapiens
  siRNA target sequence for ASB13 (NM_024701.2,805-823).
gagaagattgccaagttaa

SEQ ID NO: 315413 - DNA, 19 bp, Homo sapiens
  siRNA target sequence for ASB14 (NM_130387.4,59-77).
cggatcttgctgccattaa

SEQ ID NO: 315414 - DNA, 19 bp, Homo sapiens
  siRNA target sequence for ASB14 (NM_130387.4,144-162).
catccaggctggatttgat

SEQ ID NO: 315415 - DNA, 19 bp, Homo sapiens
  siRNA target sequence for ASB14 (NM_130387.4,278-296).
ctggagctctgcctaatca

SEQ ID NO: 315416 - DNA, 19 bp, Homo sapiens
  siRNA target sequence for ASB14 (NM_130387.4,371-389).
gggccaatgtcaattactt

SEQ ID NO: 315417 - DNA, 19 bp, Homo sapiens
  siRNA target sequence for ASB14 (NM_130387.4,373-391).
gccaatgtcaattacttct

SEQ ID NO: 315418 - DNA, 19 bp, Homo sapiens
  siRNA target sequence for ASB14 (NM_130387.4,393-411).
cagagttaaccctttacat

SEQ ID NO: 315419 - DNA, 19 bp, Homo sapiens
  siRNA target sequence for ASB14 (NM_130387.4,456-474).
caggatgctgctgaactat

SEQ ID NO: 315420 - DNA, 19 bp, Homo sapiens
  siRNA target sequence for ASB14 (NM_130387.4,466-484).
ctgaactatgggtatgaca

SEQ ID NO: 315421 - DNA, 19 bp, Homo sapiens
  siRNA target sequence for ASB14 (NM_130387.4,483-501).
cacagagcgatgttttgat

SEQ ID NO: 315422 - DNA, 19 bp, Homo sapiens
  siRNA target sequence for ASB14 (NM_130387.4,538-556).
gttgaaggctggacatcta

SEQ ID NO: 315423 - DNA, 19 bp, Homo sapiens
  siRNA target sequence for ASB14 (NM_130387.4,551-569).
catctacagttatcaaaga

SEQ ID NO: 315424 - DNA, 19 bp, Homo sapiens
  siRNA target sequence for ASB14 (NM_130387.4,557-575).
cagttatcaaagatactaa

SEQ ID NO: 315425 - DNA, 19 bp, Homo sapiens
  siRNA target sequence for ASB14 (NM_130387.4,576-594).
gttctgtgaagtaataact

SEQ ID NO: 315426 - DNA, 19 bp, Homo sapiens
  siRNA target sequence for ASB14 (NM_130387.4,628-646).
gttcgagtgatgcttgatt

SEQ ID NO: 315427 - DNA, 19 bp, Homo sapiens
  siRNA target sequence for ASB14 (NM_130387.4,632-650).
gagtgatgcttgattatgt

SEQ ID NO: 315428 - DNA, 19 bp, Homo sapiens
  siRNA target sequence for ASB14 (NM_130387.4,652-670).
gatcaagttcggatctgtt

SEQ ID NO: 315429 - DNA, 19 bp, Homo sapiens
  siRNA target sequence for ASB14 (NM_130387.4,655-673).
caagttcggatctgttcaa

SEQ ID NO: 315430 - DNA, 19 bp, Homo sapiens
  siRNA target sequence for ASB14 (NM_130387.4,658-676).
gttcggatctgttcaaagt

SEQ ID NO: 315431 - DNA, 19 bp, Homo sapiens
  siRNA target sequence for ASB14 (NM_130387.4,661-679).
cggatctgttcaaagttga

SEQ ID NO: 315432 - DNA, 19 bp, Homo sapiens
  siRNA target sequence for ASB14 (NM_130387.4,702-720).
gatctggtcagaaatacat

SEQ ID NO: 315433 - DNA, 19 bp, Homo sapiens
  siRNA target sequence for ASB14 (NM_130387.4,705-723).
ctggtcagaaatacatttt

SEQ ID NO: 315434 - DNA, 19 bp, Homo sapiens
  siRNA target sequence for ASB14 (NM_130387.4,707-725).
ggtcagaaatacattttat

SEQ ID NO: 315435 - DNA, 19 bp, Homo sapiens
  siRNA target sequence for ASB14 (NM_130387.4,737-755).
ctcgctccctaaaacattt

SEQ ID NO: 315436 - DNA, 19 bp, Homo sapiens
  siRNA target sequence for ASB14 (NM_130387.4,739-757).
cgctccctaaaacatttgt

SEQ ID NO: 315437 - DNA, 19 bp, Homo sapiens
  siRNA target sequence for ASB14 (NM_130387.4,779-797).
gcatgggacggttacattt

SEQ ID NO: 315438 - DNA, 19 bp, Homo sapiens
  siRNA target sequence for ASB14 (NM_130387.4,827-845).
cattacccaatcgtctaaa

SEQ ID NO: 315439 - DNA, 19 bp, Homo sapiens
  siRNA target sequence for ASB14 (NM_130387.4,832-850).
cccaatcgtctaaaagcat

SEQ ID NO: 315440 - DNA, 19 bp, Homo sapiens
  siRNA target sequence for ASB14 (NM_130387.4,833-851).
ccaatcgtctaaaagcata

SEQ ID NO: 315441 - DNA, 19 bp, Homo sapiens
  siRNA target sequence for ASB14 (NM_130387.4,834-852).
caatcgtctaaaagcatat

SEQ ID NO: 315442 - DNA, 19 bp, Homo sapiens
  siRNA target sequence for ASB14 (NM_130387.4,848-866).
catatgtcctttacaaaga

SEQ ID NO: 315443 - DNA, 19 bp, Homo sapiens
  siRNA target sequence for ASB14 (NM_130387.4,861-879).
caaagaatacgacctttat

SEQ ID NO: 315444 - DNA, 19 bp, Homo sapiens
  siRNA target sequence for ASB14 (NM_130387.4,873-891).
cctttatggacaaggaatt

SEQ ID NO: 315445 - DNA, 19 bp, Homo sapiens
  siRNA target sequence for ASB14 (NM_130387.4,874-892).
ctttatggacaaggaattt

SEQ ID NO: 315446 - DNA, 19 bp, Homo sapiens
  siRNA target sequence for ASB15 (NM_080928.2,158-176).
cagcaagactgcactttgt

SEQ ID NO: 315447 - DNA, 19 bp, Homo sapiens
  siRNA target sequence for ASB15 (NM_080928.2,192-210).
cccctaagtgctcaaaaca

SEQ ID NO: 315448 - DNA, 19 bp, Homo sapiens
  siRNA target sequence for ASB15 (NM_080928.2,199-217).
gtgctcaaaacagaaaact

SEQ ID NO: 315449 - DNA, 19 bp, Homo sapiens
  siRNA target sequence for ASB15 (NM_080928.2,330-348).
gttcaacccattcaacaaa

SEQ ID NO: 315450 - DNA, 19 bp, Homo sapiens
  siRNA target sequence for ASB15 (NM_080928.2,360-378).
gttctggatgcatcctata

SEQ ID NO: 315451 - DNA, 19 bp, Homo sapiens
  siRNA target sequence for ASB15 (NM_080928.2,365-383).
ggatgcatcctataagaca

SEQ ID NO: 315452 - DNA, 19 bp, Homo sapiens
  siRNA target sequence for ASB15 (NM_080928.2,441-459).
ggtctggtggaaaatgtaa

SEQ ID NO: 315453 - DNA, 19 bp, Homo sapiens
  siRNA target sequence for ASB15 (NM_080928.2,554-572).
ggtgtcgactctgatcaaa

SEQ ID NO: 315454 - DNA, 19 bp, Homo sapiens
  siRNA target sequence for ASB15 (NM_080928.2,564-582).
ctgatcaaacataacacta

SEQ ID NO: 315455 - DNA, 19 bp, Homo sapiens
  siRNA target sequence for ASB15 (NM_080928.2,605-623).
gcgatggtcagcaatgcat

SEQ ID NO: 315456 - DNA, 19 bp, Homo sapiens
  siRNA target sequence for ASB17 (NM_080868.1,178-196).
gtccaagaagcaatatatt

SEQ ID NO: 315457 - DNA, 19 bp, Homo sapiens
  siRNA target sequence for ASB17 (NM_080868.1,204-222).
ctccttgacaaaattgtta

SEQ ID NO: 315458 - DNA, 19 bp, Homo sapiens
  siRNA target sequence for ASB17 (NM_080868.1,254-272).
gggatatcactgttacgaa

SEQ ID NO: 315459 - DNA, 19 bp, Homo sapiens
  siRNA target sequence for ASB17 (NM_080868.1,263-281).
ctgttacgaaccaaggatt

SEQ ID NO: 315460 - DNA, 19 bp, Homo sapiens
  siRNA target sequence for ASB17 (NM_080868.1,265-283).
gttacgaaccaaggattta

SEQ ID NO: 315461 - DNA, 19 bp, Homo sapiens
  siRNA target sequence for ASB17 (NM_080868.1,269-287).
cgaaccaaggatttacaga

SEQ ID NO: 315462 - DNA, 19 bp, Homo sapiens
  siRNA target sequence for ASB17 (NM_080868.1,286-304).
gatcactggcaaaaattct

SEQ ID NO: 315463 - DNA, 19 bp, Homo sapiens
  siRNA target sequence for ASB17 (NM_080868.1,330-348).
gacgcactactcacagatt

SEQ ID NO: 315464 - DNA, 19 bp, Homo sapiens
  siRNA target sequence for ASB17 (NM_080868.1,334-352).
cactactcacagattacat

SEQ ID NO: 315465 - DNA, 19 bp, Homo sapiens
  siRNA target sequence for ASB17 (NM_080868.1,341-359).
cacagattacattgcattt

SEQ ID NO: 315466 - DNA, 19 bp, Homo sapiens
  siRNA target sequence for ASB17 (NM_080868.1,370-388).
caggataccgttttgaagt

SEQ ID NO: 315467 - DNA, 19 bp, Homo sapiens
  siRNA target sequence for ASB17 (NM_080868.1,372-390).
ggataccgttttgaagtaa

SEQ ID NO: 315468 - DNA, 19 bp, Homo sapiens
  siRNA target sequence for ASB17 (NM_080868.1,377-395).
ccgttttgaagtaagtttt

SEQ ID NO: 315469 - DNA, 19 bp, Homo sapiens
  siRNA target sequence for ASB17 (NM_080868.1,378-396).
cgttttgaagtaagtttta

SEQ ID NO: 315470 - DNA, 19 bp, Homo sapiens
  siRNA target sequence for ASB17 (NM_080868.1,398-416).
cctcgacttcactgaaata

SEQ ID NO: 315471 - DNA, 19 bp, Homo sapiens
  siRNA target sequence for ASB17 (NM_080868.1,399-417).
ctcgacttcactgaaatat

SEQ ID NO: 315472 - DNA, 19 bp, Homo sapiens
  siRNA target sequence for ASB17 (NM_080868.1,491-509).
gacaaaagactatgttcaa

SEQ ID NO: 315473 - DNA, 19 bp, Homo sapiens
  siRNA target sequence for ASB17 (NM_080868.1,493-511).
caaaagactatgttcaaga

SEQ ID NO: 315474 - DNA, 19 bp, Homo sapiens
  siRNA target sequence for ASB17 (NM_080868.1,504-522).
gttcaagacagaagttgta

SEQ ID NO: 315475 - DNA, 19 bp, Homo sapiens
  siRNA target sequence for ASB17 (NM_080868.1,528-546).
gcactgatatggagaactt

SEQ ID NO: 315476 - DNA, 19 bp, Homo sapiens
  siRNA target sequence for ASB17 (NM_080868.1,541-559).
gaactttcacaccagtata

SEQ ID NO: 315477 - DNA, 19 bp, Homo sapiens
  siRNA target sequence for ASB17 (NM_080868.1,580-598).
gcatcacacctctctttta

SEQ ID NO: 315478 - DNA, 19 bp, Homo sapiens
  siRNA target sequence for ASB17 (NM_080868.1,581-599).
catcacacctctcttttat

SEQ ID NO: 315479 - DNA, 19 bp, Homo sapiens
  siRNA target sequence for ASB17 (NM_080868.1,604-622).
ctcagacaagacagtctaa

SEQ ID NO: 315480 - DNA, 19 bp, Homo sapiens
  siRNA target sequence for ASB17 (NM_080868.1,613-631).
gacagtctaatatcttcaa

SEQ ID NO: 315481 - DNA, 19 bp, Homo sapiens
  siRNA target sequence for ASB17 (NM_080868.1,671-689).
ccctatcaacattgtctta

SEQ ID NO: 315482 - DNA, 19 bp, Homo sapiens
  siRNA target sequence for ASB17 (NM_080868.1,699-717).
ctctacccttcgagagtaa

SEQ ID NO: 315483 - DNA, 19 bp, Homo sapiens
  siRNA target sequence for ASB17 (NM_080868.1,701-719).
ctacccttcgagagtaaga

SEQ ID NO: 315484 - DNA, 19 bp, Homo sapiens
  siRNA target sequence for ASB17 (NM_080868.1,704-722).
cccttcgagagtaagagta

SEQ ID NO: 315485 - DNA, 19 bp, Homo sapiens
  siRNA target sequence for ASB17 (NM_080868.1,705-723).
ccttcgagagtaagagtaa

SEQ ID NO: 315486 - DNA, 19 bp, Homo sapiens
  siRNA target sequence for ASB17 (NM_080868.1,706-724).
cttcgagagtaagagtaat

SEQ ID NO: 315487 - DNA, 19 bp, Homo sapiens
  siRNA target sequence for ASB17 (NM_080868.1,709-727).
cgagagtaagagtaatggt

SEQ ID NO: 315488 - DNA, 19 bp, Homo sapiens
  siRNA target sequence for ASB17 (NM_080868.1,785-803).
cagagtgctttctgtcatt

SEQ ID NO: 315489 - DNA, 19 bp, Homo sapiens
  siRNA target sequence for ASB17 (NM_080868.1,832-850).
gtttaggaagacatccaat

SEQ ID NO: 315490 - DNA, 19 bp, Homo sapiens
  siRNA target sequence for ASB17 (NM_080868.1,846-864).
ccaattatttcaaattggt

SEQ ID NO: 315491 - DNA, 19 bp, Homo sapiens
  siRNA target sequence for ASB17 (NM_080868.1,856-874).
caaattggtttgattacat

SEQ ID NO: 315492 - DNA, 19 bp, Homo sapiens
  siRNA target sequence for ASB17 (NM_080868.1,898-916).
catgtgaactattacatct

SEQ ID NO: 315493 - DNA, 19 bp, Homo sapiens
  siRNA target sequence for ASB17 (NM_080868.1,928-946).
ccatcaggaatcaactatt

SEQ ID NO: 315494 - DNA, 19 bp, Homo sapiens
  siRNA target sequence for ASB17 (NM_080868.1,929-947).
catcaggaatcaactatta

SEQ ID NO: 315495 - DNA, 19 bp, Homo sapiens
  siRNA target sequence for ASB17 (NM_080868.1,994-1012).
ctcgtctacaaaactatct

SEQ ID NO: 315496 - DNA, 19 bp, Homo sapiens
  siRNA target sequence for ASB17 (NM_080868.1,996-1014).
cgtctacaaaactatctga

SEQ ID NO: 315497 - DNA, 19 bp, Homo sapiens
  siRNA target sequence for ASB17 (NM_080868.1,997-1015).
gtctacaaaactatctgaa

SEQ ID NO: 315498 - DNA, 19 bp, Homo sapiens
  siRNA target sequence for ASB2 (NM_016150.3,657-675).
gcctgcggaccccttgata

SEQ ID NO: 315499 - DNA, 19 bp, Homo sapiens
  siRNA target sequence for ASB2 (NM_016150.3,658-676).
cctgcggaccccttgataa

SEQ ID NO: 315500 - DNA, 19 bp, Homo sapiens
  siRNA target sequence for ASB2 (NM_016150.3,659-677).
ctgcggaccccttgataaa

SEQ ID NO: 315501 - DNA, 19 bp, Homo sapiens
  siRNA target sequence for ASB2 (NM_016150.3,771-789).
gcacgaggccgcatactat

SEQ ID NO: 315502 - DNA, 19 bp, Homo sapiens
  siRNA target sequence for ASB2 (NM_016150.3,859-877).
gaggaaacagccgtttact

SEQ ID NO: 315503 - DNA, 19 bp, Homo sapiens
  siRNA target sequence for ASB2 (NM_016150.3,936-954).
gccggacatctccaacaaa

SEQ ID NO: 315504 - DNA, 19 bp, Homo sapiens
  siRNA target sequence for ASB2 (NM_016150.3,937-955).
ccggacatctccaacaaat

SEQ ID NO: 315505 - DNA, 19 bp, Homo sapiens
  siRNA target sequence for ASB2 (NM_016150.3,1269-1287).
ctacgaggcctgcaagaat

SEQ ID NO: 315506 - DNA, 19 bp, Homo sapiens
  siRNA target sequence for ASB2 (NM_016150.3,1577-1595).
gcagctccgcgctgtactt

SEQ ID NO: 315507 - DNA, 19 bp, Homo sapiens
  siRNA target sequence for ASB2 (NM_016150.3,1739-1757).
cgaacatcgacgcctatat

SEQ ID NO: 315508 - DNA, 19 bp, Homo sapiens
  siRNA target sequence for ASB2 (NM_016150.3,1808-1826).
gcctgtcgctgctcaagtt

SEQ ID NO: 315509 - DNA, 19 bp, Homo sapiens
  siRNA target sequence for ASB2 (NM_016150.3,1849-1867).
ggcgagccctgcttctcat

SEQ ID NO: 315510 - DNA, 19 bp, Homo sapiens
  siRNA target sequence for ASB2 (NM_016150.3,1960-1978).
cagttctgtgagttcgtat

SEQ ID NO: 315511 - DNA, 19 bp, Homo sapiens
  siRNA target sequence for ASB2 (NM_016150.3,2144-2162).
gccgactgcgggttcgaaa

SEQ ID NO: 315512 - DNA, 19 bp, Homo sapiens
  siRNA target sequence for ASB2 (NM_016150.3,2171-2189).
ggaaataccgtataaaact

SEQ ID NO: 315513 - DNA, 19 bp, Homo sapiens
  siRNA target sequence for ASB2 (NM_016150.3,2209-2227).
ccaggcaggctgattagat

SEQ ID NO: 315514 - DNA, 19 bp, Homo sapiens
  siRNA target sequence for ASB2 (NM_016150.3,2210-2228).
caggcaggctgattagata

SEQ ID NO: 315515 - DNA, 19 bp, Homo sapiens
  siRNA target sequence for ASB3 (NM_016115.3,159-177).
ggacacgtgctctacagtt

SEQ ID NO: 315516 - DNA, 19 bp, Homo sapiens
  siRNA target sequence for ASB3 (NM_016115.3,187-205).
gccagggaaggcaatgtta

SEQ ID NO: 315517 - DNA, 19 bp, Homo sapiens
  siRNA target sequence for ASB3 (NM_016115.3,188-206).
ccagggaaggcaatgttaa

SEQ ID NO: 315518 - DNA, 19 bp, Homo sapiens
  siRNA target sequence for ASB3 (NM_016115.3,191-209).
gggaaggcaatgttaaagt

SEQ ID NO: 315519 - DNA, 19 bp, Homo sapiens
  siRNA target sequence for ASB3 (NM_016115.3,193-211).
gaaggcaatgttaaagtct

SEQ ID NO: 315520 - DNA, 19 bp, Homo sapiens
  siRNA target sequence for ASB3 (NM_016115.3,312-330).
gcaaatgttaattaatgca

SEQ ID NO: 315521 - DNA, 19 bp, Homo sapiens
  siRNA target sequence for ASB3 (NM_016115.3,360-378).
gacctttgaaggtttctgt

SEQ ID NO: 315522 - DNA, 19 bp, Homo sapiens
  siRNA target sequence for ASB3 (NM_016115.3,411-429).
gaaaatcgtacagattctt

SEQ ID NO: 315523 - DNA, 19 bp, Homo sapiens
  siRNA target sequence for ASB3 (NM_016115.3,417-435).
cgtacagattcttttagaa

SEQ ID NO: 315524 - DNA, 19 bp, Homo sapiens
  siRNA target sequence for ASB3 (NM_016115.3,439-457).
ggggcagatcctaatgcaa

SEQ ID NO: 315525 - DNA, 19 bp, Homo sapiens
  siRNA target sequence for ASB3 (NM_016115.3,469-487).
gaaacgacaccattgtttt

SEQ ID NO: 315526 - DNA, 19 bp, Homo sapiens
  siRNA target sequence for ASB3 (NM_016115.3,474-492).
gacaccattgtttttagct

SEQ ID NO: 315527 - DNA, 19 bp, Homo sapiens
  siRNA target sequence for ASB3 (NM_016115.3,528-546).
gcttcaacacggagcaaat

SEQ ID NO: 315528 - DNA, 19 bp, Homo sapiens
  siRNA target sequence for ASB3 (NM_016115.3,547-565).
gttaatggatcccattcta

SEQ ID NO: 315529 - DNA, 19 bp, Homo sapiens
  siRNA target sequence for ASB3 (NM_016115.3,591-609).
ggcttcttttcaggaaaat

SEQ ID NO: 315530 - DNA, 19 bp, Homo sapiens
  siRNA target sequence for ASB3 (NM_016115.3,734-752).
catcgggtgcaaatgtcaa

SEQ ID NO: 315531 - DNA, 19 bp, Homo sapiens
  siRNA target sequence for ASB3 (NM_016115.3,757-775).
caagccttggacaaagcta

SEQ ID NO: 315532 - DNA, 19 bp, Homo sapiens
  siRNA target sequence for ASB3 (NM_016115.3,839-857).
gggcagatcctgatcttta

SEQ ID NO: 315533 - DNA, 19 bp, Homo sapiens
  siRNA target sequence for ASB3 (NM_016115.3,868-886).
gacagttggcagttaccta

SEQ ID NO: 315534 - DNA, 19 bp, Homo sapiens
  siRNA target sequence for ASB3 (NM_016115.3,870-888).
cagttggcagttacctatt

SEQ ID NO: 315535 - DNA, 19 bp, Homo sapiens
  siRNA target sequence for ASB3 (NM_016115.3,872-890).
gttggcagttacctattca

SEQ ID NO: 315536 - DNA, 19 bp, Homo sapiens
  siRNA target sequence for ASB3 (NM_016115.3,921-939).
cttggacttgttaatacca

SEQ ID NO: 315537 - DNA, 19 bp, Homo sapiens
  siRNA target sequence for ASB3 (NM_016115.3,1057-1075).
gcccaggcgtgccttgttt

SEQ ID NO: 315538 - DNA, 19 bp, Homo sapiens
  siRNA target sequence for ASB3 (NM_016115.3,1063-1081).
gcgtgccttgtttttggat

SEQ ID NO: 315539 - DNA, 19 bp, Homo sapiens
  siRNA target sequence for ASB3 (NM_016115.3,1093-1111).
gtgtgcatggctttccaaa

SEQ ID NO: 315540 - DNA, 19 bp, Homo sapiens
  siRNA target sequence for ASB3 (NM_016115.3,1125-1143).
ctttggaattgtgaacatt

SEQ ID NO: 315541 - DNA, 19 bp, Homo sapiens
  siRNA target sequence for ASB3 (NM_016115.3,1191-1209).
cctgaagtacgagaagttt

SEQ ID NO: 315542 - DNA, 19 bp, Homo sapiens
  siRNA target sequence for ASB3 (NM_016115.3,1192-1210).
ctgaagtacgagaagtttt

SEQ ID NO: 315543 - DNA, 19 bp, Homo sapiens
  siRNA target sequence for ASB3 (NM_016115.3,1197-1215).
gtacgagaagttttcgata

SEQ ID NO: 315544 - DNA, 19 bp, Homo sapiens
  siRNA target sequence for ASB3 (NM_016115.3,1200-1218).
cgagaagttttcgatattt

SEQ ID NO: 315545 - DNA, 19 bp, Homo sapiens
  siRNA target sequence for ASB3 (NM_016115.3,1248-1266).
gggaccatggaaccatata

SEQ ID NO: 315546 - DNA, 19 bp, Homo sapiens
  siRNA target sequence for ASB3 (NM_016115.3,1249-1267).
ggaccatggaaccatatat

SEQ ID NO: 315547 - DNA, 19 bp, Homo sapiens
  siRNA target sequence for ASB3 (NM_016115.3,1250-1268).
gaccatggaaccatatata

SEQ ID NO: 315548 - DNA, 19 bp, Homo sapiens
  siRNA target sequence for ASB3 (NM_016115.3,1256-1274).
ggaaccatatatatgaatt

SEQ ID NO: 315549 - DNA, 19 bp, Homo sapiens
  siRNA target sequence for ASB3 (NM_016115.3,1353-1371).
gattctactgtgcaattct

SEQ ID NO: 315550 - DNA, 19 bp, Homo sapiens
  siRNA target sequence for ASB3 (NM_016115.3,1388-1406).
gcattgacacccttatctt

SEQ ID NO: 315551 - DNA, 19 bp, Homo sapiens
  siRNA target sequence for ASB3 (NM_016115.3,1404-1422).
cttcactttggagtttact

SEQ ID NO: 315552 - DNA, 19 bp, Homo sapiens
  siRNA target sequence for ASB3 (NM_016115.3,1439-1457).
caccagctgttgaaaggat

SEQ ID NO: 315553 - DNA, 19 bp, Homo sapiens
  siRNA target sequence for ASB3 (NM_016115.3,1473-1491).
ctcaaacgcttggattcta

SEQ ID NO: 315554 - DNA, 19 bp, Homo sapiens
  siRNA target sequence for ASB3 (NM_016115.3,1484-1502).
ggattctacagcaacatat

SEQ ID NO: 315555 - DNA, 19 bp, Homo sapiens
  siRNA target sequence for ASB3 (NM_016115.3,1524-1542).
ccatctttgtcgtttggaa

SEQ ID NO: 315556 - DNA, 19 bp, Homo sapiens
  siRNA target sequence for ASB3 (NM_016115.3,1525-1543).
catctttgtcgtttggaaa

SEQ ID NO: 315557 - DNA, 19 bp, Homo sapiens
  siRNA target sequence for ASB3 (NM_016115.3,1540-1558).
gaaattcggtccagtctaa

SEQ ID NO: 315558 - DNA, 19 bp, Homo sapiens
  siRNA target sequence for ASB3 (NM_016115.3,1547-1565).
ggtccagtctaaaatcaga

SEQ ID NO: 315559 - DNA, 19 bp, Homo sapiens
  siRNA target sequence for ASB3 (NM_016115.3,1570-1588).
ctacggtctgacagttata

SEQ ID NO: 315560 - DNA, 19 bp, Homo sapiens
  siRNA target sequence for ASB3 (NM_016115.3,1573-1591).
cggtctgacagttatatta

SEQ ID NO: 315561 - DNA, 19 bp, Homo sapiens
  siRNA target sequence for ASB3 (NM_016115.3,1575-1593).
gtctgacagttatattagt

SEQ ID NO: 315562 - DNA, 19 bp, Homo sapiens
  siRNA target sequence for ASB3 (NM_016115.3,1603-1621).
cttcccagaagcctacata

SEQ ID NO: 315563 - DNA, 19 bp, Homo sapiens
  siRNA target sequence for ASB3 (NM_016115.3,1608-1626).
cagaagcctacataattat

SEQ ID NO: 315564 - DNA, 19 bp, Homo sapiens
  siRNA target sequence for ASB3 (NM_016115.3,1613-1631).
gcctacataattatttgct

SEQ ID NO: 315565 - DNA, 19 bp, Homo sapiens
  siRNA target sequence for ASB4 (NM_016116.1,34-52).
ggagctgccaagttagtta

SEQ ID NO: 315566 - DNA, 19 bp, Homo sapiens
  siRNA target sequence for ASB4 (NM_016116.1,37-55).
gctgccaagttagttaaga

SEQ ID NO: 315567 - DNA, 19 bp, Homo sapiens
  siRNA target sequence for ASB4 (NM_016116.1,41-59).
ccaagttagttaagagaaa

SEQ ID NO: 315568 - DNA, 19 bp, Homo sapiens
  siRNA target sequence for ASB4 (NM_016116.1,70-88).
gcgctaaagtccaatgact

SEQ ID NO: 315569 - DNA, 19 bp, Homo sapiens
  siRNA target sequence for ASB4 (NM_016116.1,71-89).
cgctaaagtccaatgactt

SEQ ID NO: 315570 - DNA, 19 bp, Homo sapiens
  siRNA target sequence for ASB4 (NM_016116.1,80-98).
ccaatgacttcggaaaatt

SEQ ID NO: 315571 - DNA, 19 bp, Homo sapiens
  siRNA target sequence for ASB4 (NM_016116.1,150-168).
cgaagatgagaatatggtt

SEQ ID NO: 315572 - DNA, 19 bp, Homo sapiens
  siRNA target sequence for ASB4 (NM_016116.1,194-212).
ggttgcctagctataaatt

SEQ ID NO: 315573 - DNA, 19 bp, Homo sapiens
  siRNA target sequence for ASB4 (NM_016116.1,286-304).
gaccacaatgctacaatca

SEQ ID NO: 315574 - DNA, 19 bp, Homo sapiens
  siRNA target sequence for ASB4 (NM_016116.1,331-349).
cttcacgtggcttgtgaaa

SEQ ID NO: 315575 - DNA, 19 bp, Homo sapiens
  siRNA target sequence for ASB4 (NM_016116.1,352-370).
gccaatgtggattgtgtta

SEQ ID NO: 315576 - DNA, 19 bp, Homo sapiens
  siRNA target sequence for ASB4 (NM_016116.1,385-403).
cgtggggcaaagctcaatt

SEQ ID NO: 315577 - DNA, 19 bp, Homo sapiens
  siRNA target sequence for ASB4 (NM_016116.1,397-415).
ctcaattgctactccttaa

SEQ ID NO: 315578 - DNA, 19 bp, Homo sapiens
  siRNA target sequence for ASB4 (NM_016116.1,399-417).
caattgctactccttaagt

SEQ ID NO: 315579 - DNA, 19 bp, Homo sapiens
  siRNA target sequence for ASB4 (NM_016116.1,427-445).
gctttgcacttttgtacaa

SEQ ID NO: 315580 - DNA, 19 bp, Homo sapiens
  siRNA target sequence for ASB4 (NM_016116.1,487-505).
ggggcgaatgtgaacatga

SEQ ID NO: 315581 - DNA, 19 bp, Homo sapiens
  siRNA target sequence for ASB4 (NM_016116.1,488-506).
gggcgaatgtgaacatgaa

SEQ ID NO: 315582 - DNA, 19 bp, Homo sapiens
  siRNA target sequence for ASB4 (NM_016116.1,704-722).
gccgcatgctgcttgacta

SEQ ID NO: 315583 - DNA, 19 bp, Homo sapiens
  siRNA target sequence for ASB4 (NM_016116.1,720-738).
ctacaaagccgaagtcaat

SEQ ID NO: 315584 - DNA, 19 bp, Homo sapiens
  siRNA target sequence for ASB4 (NM_016116.1,739-757).
gcccgagatgacgacttta

SEQ ID NO: 315585 - DNA, 19 bp, Homo sapiens
  siRNA target sequence for ASB4 (NM_016116.1,740-758).
cccgagatgacgactttaa

SEQ ID NO: 315586 - DNA, 19 bp, Homo sapiens
  siRNA target sequence for ASB4 (NM_016116.1,742-760).
cgagatgacgactttaaat

SEQ ID NO: 315587 - DNA, 19 bp, Homo sapiens
  siRNA target sequence for ASB4 (NM_016116.1,940-958).
catggggctgcccgaatat

SEQ ID NO: 315588 - DNA, 19 bp, Homo sapiens
  siRNA target sequence for ASB4 (NM_016116.1,990-1008).
ctgccattcttgtcctaaa

SEQ ID NO: 315589 - DNA, 19 bp, Homo sapiens
  siRNA target sequence for ASB4 (NM_016116.1,993-1011).
ccattcttgtcctaaagca

SEQ ID NO: 315590 - DNA, 19 bp, Homo sapiens
  siRNA target sequence for ASB4 (NM_016116.1,1067-1085).
gagctatccccgatgatga

SEQ ID NO: 315591 - DNA, 19 bp, Homo sapiens
  siRNA target sequence for ASB4 (NM_016116.1,1070-1088).
ctatccccgatgatgactt

SEQ ID NO: 315592 - DNA, 19 bp, Homo sapiens
  siRNA target sequence for ASB4 (NM_016116.1,1164-1182).
gagatgtgccattagaaga

SEQ ID NO: 315593 - DNA, 19 bp, Homo sapiens
  siRNA target sequence for ASB4 (NM_016116.1,1169-1187).
gtgccattagaagaacatt

SEQ ID NO: 315594 - DNA, 19 bp, Homo sapiens
  siRNA target sequence for ASB4 (NM_016116.1,1199-1217).
gccatagagcaattccttt

SEQ ID NO: 315595 - DNA, 19 bp, Homo sapiens
  siRNA target sequence for ASB4 (NM_016116.1,1224-1242).
cctcccattgtcattgaaa

SEQ ID NO: 315596 - DNA, 19 bp, Homo sapiens
  siRNA target sequence for ASB4 (NM_145872.1,1004-1022).
ggttgaggaagattcaaat

SEQ ID NO: 315597 - DNA, 19 bp, Homo sapiens
  siRNA target sequence for ASB5 (NM_080874.2,38-56).
cggccgtttgctcaacaat

SEQ ID NO: 315598 - DNA, 19 bp, Homo sapiens
  siRNA target sequence for ASB5 (NM_080874.2,39-57).
ggccgtttgctcaacaatt

SEQ ID NO: 315599 - DNA, 19 bp, Homo sapiens
  siRNA target sequence for ASB5 (NM_080874.2,40-58).
gccgtttgctcaacaatta

SEQ ID NO: 315600 - DNA, 19 bp, Homo sapiens
  siRNA target sequence for ASB5 (NM_080874.2,41-59).
ccgtttgctcaacaattat

SEQ ID NO: 315601 - DNA, 19 bp, Homo sapiens
  siRNA target sequence for ASB5 (NM_080874.2,80-98).
ctttcgctgttctgtttta

SEQ ID NO: 315602 - DNA, 19 bp, Homo sapiens
  siRNA target sequence for ASB5 (NM_080874.2,119-137).
cttgccatcctcagtcatt

SEQ ID NO: 315603 - DNA, 19 bp, Homo sapiens
  siRNA target sequence for ASB5 (NM_080874.2,160-178).
caaggaagcggcaaggata

SEQ ID NO: 315604 - DNA, 19 bp, Homo sapiens
  siRNA target sequence for ASB5 (NM_080874.2,269-287).
gctctgagaacattattat

SEQ ID NO: 315605 - DNA, 19 bp, Homo sapiens
  siRNA target sequence for ASB5 (NM_080874.2,422-440).
ggcgtgactccgttattca

SEQ ID NO: 315606 - DNA, 19 bp, Homo sapiens
  siRNA target sequence for ASB5 (NM_080874.2,423-441).
gcgtgactccgttattcaa

SEQ ID NO: 315607 - DNA, 19 bp, Homo sapiens
  siRNA target sequence for ASB5 (NM_080874.2,502-520).
ccagctggagtcatgtctt

SEQ ID NO: 315608 - DNA, 19 bp, Homo sapiens
  siRNA target sequence for ASB5 (NM_080874.2,577-595).
gatatcctggggcatagat

SEQ ID NO: 315609 - DNA, 19 bp, Homo sapiens
  siRNA target sequence for ASB5 (NM_080874.2,619-637).
gggaactcctctctatgta

SEQ ID NO: 315610 - DNA, 19 bp, Homo sapiens
  siRNA target sequence for ASB5 (NM_080874.2,627-645).
ctctctatgtagcttgtat

SEQ ID NO: 315611 - DNA, 19 bp, Homo sapiens
  siRNA target sequence for ASB5 (NM_080874.2,629-647).
ctctatgtagcttgtatgt

SEQ ID NO: 315612 - DNA, 19 bp, Homo sapiens
  siRNA target sequence for ASB5 (NM_080874.2,667-685).
ctggaagcttctttatgct

SEQ ID NO: 315613 - DNA, 19 bp, Homo sapiens
  siRNA target sequence for ASB5 (NM_080874.2,751-769).
cacagaaattgtaaactta

SEQ ID NO: 315614 - DNA, 19 bp, Homo sapiens
  siRNA target sequence for ASB5 (NM_080874.2,761-779).
gtaaacttactgctagaat

SEQ ID NO: 315615 - DNA, 19 bp, Homo sapiens
  siRNA target sequence for ASB5 (NM_080874.2,766-784).
cttactgctagaatttgga

SEQ ID NO: 315616 - DNA, 19 bp, Homo sapiens
  siRNA target sequence for ASB5 (NM_080874.2,811-829).
gcttctgcgacctatagat

SEQ ID NO: 315617 - DNA, 19 bp, Homo sapiens
  siRNA target sequence for ASB5 (NM_080874.2,846-864).
gtatggtggaaaggatatt

SEQ ID NO: 315618 - DNA, 19 bp, Homo sapiens
  siRNA target sequence for ASB5 (NM_080874.2,879-897).
ctaccccaagctctcttta

SEQ ID NO: 315619 - DNA, 19 bp, Homo sapiens
  siRNA target sequence for ASB5 (NM_080874.2,913-931).
ctgtatccgaagctacata

SEQ ID NO: 315620 - DNA, 19 bp, Homo sapiens
  siRNA target sequence for ASB5 (NM_080874.2,970-988).
gccaacgttactgaagaat

SEQ ID NO: 315621 - DNA, 19 bp, Homo sapiens
  siRNA target sequence for ASB5 (NM_080874.2,972-990).
caacgttactgaagaattt

SEQ ID NO: 315622 - DNA, 19 bp, Homo sapiens
  siRNA target sequence for ASB6 (NM_017873.2,182-200).
ggcttccggaggatcatct

SEQ ID NO: 315623 - DNA, 19 bp, Homo sapiens
  siRNA target sequence for ASB6 (NM_017873.2,183-201).
gcttccggaggatcatctt

SEQ ID NO: 315624 - DNA, 19 bp, Homo sapiens
  siRNA target sequence for ASB6 (NM_017873.2,442-460).
ggccaatctcaactttgaa

SEQ ID NO: 315625 - DNA, 19 bp, Homo sapiens
  siRNA target sequence for ASB6 (NM_017873.2,663-681).
ccgctgacaagcatggaaa

SEQ ID NO: 315626 - DNA, 19 bp, Homo sapiens
  siRNA target sequence for ASB6 (NM_017873.2,664-682).
cgctgacaagcatggaaaa

SEQ ID NO: 315627 - DNA, 19 bp, Homo sapiens
  siRNA target sequence for ASB6 (NM_017873.2,665-683).
gctgacaagcatggaaaaa

SEQ ID NO: 315628 - DNA, 19 bp, Homo sapiens
  siRNA target sequence for ASB6 (NM_017873.2,716-734).
ggggtgcagatccacaata

SEQ ID NO: 315629 - DNA, 19 bp, Homo sapiens
  siRNA target sequence for ASB6 (NM_017873.2,963-981).
gcctgaagagctttaaact

SEQ ID NO: 315630 - DNA, 19 bp, Homo sapiens
  siRNA target sequence for ASB6 (NM_017873.2,1056-1074).
ggtctggctttcacatcat

SEQ ID NO: 315631 - DNA, 19 bp, Homo sapiens
  siRNA target sequence for ASB6 (NM_017873.2,1184-1202).
ctccagctgcccgaaaact

SEQ ID NO: 315632 - DNA, 19 bp, Homo sapiens
  siRNA target sequence for ASB6 (NM_017873.2,1190-1208).
ctgcccgaaaacttcgata

SEQ ID NO: 315633 - DNA, 19 bp, Homo sapiens
  siRNA target sequence for ASB6 (NM_017873.2,1194-1212).
ccgaaaacttcgatatcca

SEQ ID NO: 315634 - DNA, 19 bp, Homo sapiens
  siRNA target sequence for ASB6 (NM_017873.2,1220-1238).
ggcagcctggcggaaaaga

SEQ ID NO: 315635 - DNA, 19 bp, Homo sapiens
  siRNA target sequence for ASB6 (NM_017873.2,1407-1425).
gtggctccgtggaagatga

SEQ ID NO: 315636 - DNA, 19 bp, Homo sapiens
  siRNA target sequence for ASB8 (NM_024095.2,67-85).
gttccagtatgtggtatat

SEQ ID NO: 315637 - DNA, 19 bp, Homo sapiens
  siRNA target sequence for ASB8 (NM_024095.2,73-91).
gtatgtggtatattatgca

SEQ ID NO: 315638 - DNA, 19 bp, Homo sapiens
  siRNA target sequence for ASB8 (NM_024095.2,112-130).
ctctctccgagcgcttaat

SEQ ID NO: 315639 - DNA, 19 bp, Homo sapiens
  siRNA target sequence for ASB8 (NM_024095.2,122-140).
gcgcttaatccgaacaatt

SEQ ID NO: 315640 - DNA, 19 bp, Homo sapiens
  siRNA target sequence for ASB8 (NM_024095.2,125-143).
cttaatccgaacaattgct

SEQ ID NO: 315641 - DNA, 19 bp, Homo sapiens
  siRNA target sequence for ASB8 (NM_024095.2,150-168).
cgttccttcccacatgata

SEQ ID NO: 315642 - DNA, 19 bp, Homo sapiens
  siRNA target sequence for ASB8 (NM_024095.2,151-169).
gttccttcccacatgataa

SEQ ID NO: 315643 - DNA, 19 bp, Homo sapiens
  siRNA target sequence for ASB8 (NM_024095.2,154-172).
ccttcccacatgataatgt

SEQ ID NO: 315644 - DNA, 19 bp, Homo sapiens
  siRNA target sequence for ASB8 (NM_024095.2,335-353).
ctatgcagcagagaaagat

SEQ ID NO: 315645 - DNA, 19 bp, Homo sapiens
  siRNA target sequence for ASB8 (NM_024095.2,500-518).
cctggattacaacaatgat

SEQ ID NO: 315646 - DNA, 19 bp, Homo sapiens
  siRNA target sequence for ASB8 (NM_024095.2,503-521).
ggattacaacaatgataca

SEQ ID NO: 315647 - DNA, 19 bp, Homo sapiens
  siRNA target sequence for ASB8 (NM_024095.2,535-553).
ctgccatgaagggaaatct

SEQ ID NO: 315648 - DNA, 19 bp, Homo sapiens
  siRNA target sequence for ASB8 (NM_024095.2,591-609).
gtcagagtcatcaacctaa

SEQ ID NO: 315649 - DNA, 19 bp, Homo sapiens
  siRNA target sequence for ASB8 (NM_024095.2,698-716).
cagagctgttggacacttt

SEQ ID NO: 315650 - DNA, 19 bp, Homo sapiens
  siRNA target sequence for ASB8 (NM_024095.2,757-775).
gagacccgcagctatgtga

SEQ ID NO: 315651 - DNA, 19 bp, Homo sapiens
  siRNA target sequence for ASB8 (NM_024095.2,759-777).
gacccgcagctatgtgaaa

SEQ ID NO: 315652 - DNA, 19 bp, Homo sapiens
  siRNA target sequence for ASB8 (NM_024095.2,761-779).
cccgcagctatgtgaaaaa

SEQ ID NO: 315653 - DNA, 19 bp, Homo sapiens
  siRNA target sequence for ASB8 (NM_024095.2,794-812).
ctcagctccaggaactcta

SEQ ID NO: 315654 - DNA, 19 bp, Homo sapiens
  siRNA target sequence for ASB8 (NM_024095.2,895-913).
cttctttgaaggaatacct

SEQ ID NO: 315655 - DNA, 19 bp, Homo sapiens
  siRNA target sequence for ASB9 (NM_024087.1,363-381).
ggtgggctgtgaacatcat

SEQ ID NO: 315656 - DNA, 19 bp, Homo sapiens
  siRNA target sequence for ASB9 (NM_024087.1,379-397).
catcacggcagatcatgtt

SEQ ID NO: 315657 - DNA, 19 bp, Homo sapiens
  siRNA target sequence for ASB9 (NM_024087.1,431-449).
ctctcttgtgtgaagattt

SEQ ID NO: 315658 - DNA, 19 bp, Homo sapiens
  siRNA target sequence for ASB9 (NM_024087.1,433-451).
ctcttgtgtgaagatttta

SEQ ID NO: 315659 - DNA, 19 bp, Homo sapiens
  siRNA target sequence for ASB9 (NM_024087.1,492-510).
ggcacactccactgtttaa

SEQ ID NO: 315660 - DNA, 19 bp, Homo sapiens
  siRNA target sequence for ASB9 (NM_024087.1,526-544).
cagctgggattgtgtgaat

SEQ ID NO: 315661 - DNA, 19 bp, Homo sapiens
  siRNA target sequence for ASB9 (NM_024087.1,629-647).
gagtgtgtcaactctctta

SEQ ID NO: 315662 - DNA, 19 bp, Homo sapiens
  siRNA target sequence for ASB9 (NM_024087.1,637-655).
caactctcttatagcttat

SEQ ID NO: 315663 - DNA, 19 bp, Homo sapiens
  siRNA target sequence for ASB9 (NM_024087.1,657-675).
ggggcaacattgaccataa

SEQ ID NO: 315664 - DNA, 19 bp, Homo sapiens
  siRNA target sequence for ASB9 (NM_024087.1,685-703).
cctgggcactccactctat

SEQ ID NO: 315665 - DNA, 19 bp, Homo sapiens
  siRNA target sequence for C20orf163 (NM_080749.2,690-708).
ccctcctcgtggaaccata

SEQ ID NO: 315666 - DNA, 19 bp, Homo sapiens
  siRNA target sequence for C20orf163 (NM_080749.2,691-709).
cctcctcgtggaaccatat

SEQ ID NO: 315667 - DNA, 19 bp, Homo sapiens
  siRNA target sequence for C20orf163 (NM_080749.2,873-891).
cggccgacatgcacatcat

SEQ ID NO: 315668 - DNA, 19 bp, Homo sapiens
  siRNA target sequence for C20orf163 (NM_080749.2,875-893).
gccgacatgcacatcatca

SEQ ID NO: 315669 - DNA, 19 bp, Homo sapiens
  siRNA target sequence for C20orf163 (NM_080749.2,1029-1047).
ctctgtgccgcctagtgat

SEQ ID NO: 315670 - DNA, 19 bp, Homo sapiens
  siRNA target sequence for C20orf163 (NM_080749.2,1033-1051).
gtgccgcctagtgatacaa

SEQ ID NO: 315671 - DNA, 19 bp, Homo sapiens
  siRNA target sequence for C20orf163 (NM_080749.2,1084-1102).
gctccacctgcccaaagaa

SEQ ID NO: 315672 - DNA, 19 bp, Homo sapiens
  siRNA target sequence for CTEN (NM_032865.3,238-256).
ccccagtgttcttactaca

SEQ ID NO: 315673 - DNA, 19 bp, Homo sapiens
  siRNA target sequence for CTEN (NM_032865.3,402-420).
ggaccttgactcctacatt

SEQ ID NO: 315674 - DNA, 19 bp, Homo sapiens
  siRNA target sequence for CTEN (NM_032865.3,406-424).
cttgactcctacattgact

SEQ ID NO: 315675 - DNA, 19 bp, Homo sapiens
  siRNA target sequence for CTEN (NM_032865.3,520-538).
cagagcaccatgtcaatga

SEQ ID NO: 315676 - DNA, 19 bp, Homo sapiens
  siRNA target sequence for CTEN (NM_032865.3,559-577).
gccttggacataaagtaca

SEQ ID NO: 315677 - DNA, 19 bp, Homo sapiens
  siRNA target sequence for CTEN (NM_032865.3,961-979).
gtgtctgatgtcagctata

SEQ ID NO: 315678 - DNA, 19 bp, Homo sapiens
  siRNA target sequence for CTEN (NM_032865.3,1449-1467).
cgtgatggacacatctaaa

SEQ ID NO: 315679 - DNA, 19 bp, Homo sapiens
  siRNA target sequence for CTEN (NM_032865.3,1525-1543).
gagccaggggcttttgtca

SEQ ID NO: 315680 - DNA, 19 bp, Homo sapiens
  siRNA target sequence for CTEN (NM_032865.3,1528-1546).
ccaggggcttttgtcataa

SEQ ID NO: 315681 - DNA, 19 bp, Homo sapiens
  siRNA target sequence for CTEN (NM_032865.3,2164-2182).
gagcctcaggagaacgtat

SEQ ID NO: 315682 - DNA, 19 bp, Homo sapiens
  siRNA target sequence for CTEN (NM_032865.3,2188-2206).
ctctttgcggagtatgaca

SEQ ID NO: 315683 - DNA, 19 bp, Homo sapiens
  siRNA target sequence for DCDC2 (NM_016356.1,400-418).
gcgtcgtcatccatgagaa

SEQ ID NO: 315684 - DNA, 19 bp, Homo sapiens
  siRNA target sequence for DCDC2 (NM_016356.1,603-621).
gacataggagaaatcaaga

SEQ ID NO: 315685 - DNA, 19 bp, Homo sapiens
  siRNA target sequence for DCDC2 (NM_016356.1,625-643).
gaccaatggaagttgttaa

SEQ ID NO: 315686 - DNA, 19 bp, Homo sapiens
  siRNA target sequence for DCDC2 (NM_016356.1,627-645).
ccaatggaagttgttaata

SEQ ID NO: 315687 - DNA, 19 bp, Homo sapiens
  siRNA target sequence for DCDC2 (NM_016356.1,680-698).
cgtgtcagctcgctttaga

SEQ ID NO: 315688 - DNA, 19 bp, Homo sapiens
  siRNA target sequence for DCDC2 (NM_016356.1,681-699).
gtgtcagctcgctttagaa

SEQ ID NO: 315689 - DNA, 19 bp, Homo sapiens
  siRNA target sequence for DCDC2 (NM_016356.1,683-701).
gtcagctcgctttagaaaa

SEQ ID NO: 315690 - DNA, 19 bp, Homo sapiens
  siRNA target sequence for DCDC2 (NM_016356.1,708-726).
caggagccgtgcactatct

SEQ ID NO: 315691 - DNA, 19 bp, Homo sapiens
  siRNA target sequence for DCDC2 (NM_016356.1,711-729).
gagccgtgcactatcttct

SEQ ID NO: 315692 - DNA, 19 bp, Homo sapiens
  siRNA target sequence for DCDC2 (NM_016356.1,757-775).
cagcttctcgcctccttat

SEQ ID NO: 315693 - DNA, 19 bp, Homo sapiens
  siRNA target sequence for DCDC2 (NM_016356.1,799-817).
gggatcatgtactacaaat

SEQ ID NO: 315694 - DNA, 19 bp, Homo sapiens
  siRNA target sequence for DCDC2 (NM_016356.1,818-836).
ggtcacagaaaaaatcact

SEQ ID NO: 315695 - DNA, 19 bp, Homo sapiens
  siRNA target sequence for DCDC2 (NM_016356.1,852-870).
gttcacaggctttatactt

SEQ ID NO: 315696 - DNA, 19 bp, Homo sapiens
  siRNA target sequence for DCDC2 (NM_016356.1,924-942).
gtggctgttggcagagata

SEQ ID NO: 315697 - DNA, 19 bp, Homo sapiens
  siRNA target sequence for DCDC2 (NM_016356.1,978-996).
gacaagtcaacgatgagaa

SEQ ID NO: 315698 - DNA, 19 bp, Homo sapiens
  siRNA target sequence for DCDC2 (NM_016356.1,989-1007).
gatgagaaggccttttggt

SEQ ID NO: 315699 - DNA, 19 bp, Homo sapiens
  siRNA target sequence for DCDC2 (NM_016356.1,999-1017).
ccttttggtcagaaagctt

SEQ ID NO: 315700 - DNA, 19 bp, Homo sapiens
  siRNA target sequence for DCDC2 (NM_016356.1,1049-1067).
gtctaaagggagtggaaat

SEQ ID NO: 315701 - DNA, 19 bp, Homo sapiens
  siRNA target sequence for DCDC2 (NM_016356.1,1063-1081).
gaaatgatcgccactctaa

SEQ ID NO: 315702 - DNA, 19 bp, Homo sapiens
  siRNA target sequence for DCDC2 (NM_016356.1,1068-1086).
gatcgccactctaagtcaa

SEQ ID NO: 315703 - DNA, 19 bp, Homo sapiens
  siRNA target sequence for DCDC2 (NM_016356.1,1143-1161).
gaagacgtgaattcagaaa

SEQ ID NO: 315704 - DNA, 19 bp, Homo sapiens
  siRNA target sequence for DCDC2 (NM_016356.1,1211-1229).
cattccaaatagtgatgaa

SEQ ID NO: 315705 - DNA, 19 bp, Homo sapiens
  siRNA target sequence for DCDC2 (NM_016356.1,1498-1516).
cacgccctgctcgtgtaaa

SEQ ID NO: 315706 - DNA, 19 bp, Homo sapiens
  siRNA target sequence for DCDC2 (NM_016356.1,1545-1563).
gagctgcagcaggttaata

SEQ ID NO: 315707 - DNA, 19 bp, Homo sapiens
  siRNA target sequence for DCDC2 (NM_016356.1,1581-1599).
ctagacaaggaaagaaagt

SEQ ID NO: 315708 - DNA, 19 bp, Homo sapiens
  siRNA target sequence for EFS (NM_005864.2,1281-1299).
cgagcgtcagccttactca

SEQ ID NO: 315709 - DNA, 19 bp, Homo sapiens
  siRNA target sequence for EFS (NM_005864.2,1282-1300).
gagcgtcagccttactcaa

SEQ ID NO: 315710 - DNA, 19 bp, Homo sapiens
  siRNA target sequence for EFS (NM_005864.2,1288-1306).
cagccttactcaatttgta

SEQ ID NO: 315711 - DNA, 19 bp, Homo sapiens
  siRNA target sequence for EFS (NM_005864.2,1739-1757).
ggccgaggagtatgactat

SEQ ID NO: 315712 - DNA, 19 bp, Homo sapiens
  siRNA target sequence for EFS (NM_005864.2,1741-1759).
ccgaggagtatgactatgt

SEQ ID NO: 315713 - DNA, 19 bp, Homo sapiens
  siRNA target sequence for EFS (NM_005864.2,1907-1925).
gcagctcctgtacttctat

SEQ ID NO: 315714 - DNA, 19 bp, Homo sapiens
  siRNA target sequence for EFS (NM_005864.2,1984-2002).
ccagtacccaggctaatca

SEQ ID NO: 315715 - DNA, 19 bp, Homo sapiens
  siRNA target sequence for EFS (NM_005864.2,2050-2068).
ctcatcgcctggtgtttgt

SEQ ID NO: 315716 - DNA, 19 bp, Homo sapiens
  siRNA target sequence for EFS (NM_005864.2,2217-2235).
gagatggtgcagtgtgtaa

SEQ ID NO: 315717 - DNA, 19 bp, Homo sapiens
  siRNA target sequence for ENIGMA (NM_005451.2,619-637).
gagcacctgaagaaatcaa

SEQ ID NO: 315718 - DNA, 19 bp, Homo sapiens
  siRNA target sequence for ENIGMA (NM_005451.2,1095-1113).
gtgcaagaagaagattaca

SEQ ID NO: 315719 - DNA, 19 bp, Homo sapiens
  siRNA target sequence for ENIGMA (NM_005451.2,1229-1247).
gcgagcgagactatgagaa

SEQ ID NO: 315720 - DNA, 19 bp, Homo sapiens
  siRNA target sequence for ENIGMA (NM_005451.2,1349-1367).
gtgcgatatgtcagatcaa

SEQ ID NO: 315721 - DNA, 19 bp, Homo sapiens
  siRNA target sequence for ERBB2IP (NM_018695.1,389-407).
gactgtcactactcttgat

SEQ ID NO: 315722 - DNA, 19 bp, Homo sapiens
  siRNA target sequence for ERBB2IP (NM_018695.1,391-409).
ctgtcactactcttgatta

SEQ ID NO: 315723 - DNA, 19 bp, Homo sapiens
  siRNA target sequence for ERBB2IP (NM_018695.1,393-411).
gtcactactcttgattatt

SEQ ID NO: 315724 - DNA, 19 bp, Homo sapiens
  siRNA target sequence for ERBB2IP (NM_018695.1,395-413).
cactactcttgattattct

SEQ ID NO: 315725 - DNA, 19 bp, Homo sapiens
  siRNA target sequence for ERBB2IP (NM_018695.1,467-485).
ggaggaactctatttagat

SEQ ID NO: 315726 - DNA, 19 bp, Homo sapiens
  siRNA target sequence for ERBB2IP (NM_018695.1,501-519).
gagcttccaaagcaacttt

SEQ ID NO: 315727 - DNA, 19 bp, Homo sapiens
  siRNA target sequence for ERBB2IP (NM_018695.1,503-521).
gcttccaaagcaacttttt

SEQ ID NO: 315728 - DNA, 19 bp, Homo sapiens
  siRNA target sequence for ERBB2IP (NM_018695.1,579-597).
gcatccattgcaaacctta

SEQ ID NO: 315729 - DNA, 19 bp, Homo sapiens
  siRNA target sequence for ERBB2IP (NM_018695.1,580-598).
catccattgcaaaccttat

SEQ ID NO: 315730 - DNA, 19 bp, Homo sapiens
  siRNA target sequence for ERBB2IP (NM_018695.1,664-682).
gtaaagttttgacaattgt

SEQ ID NO: 315731 - DNA, 19 bp, Homo sapiens
  siRNA target sequence for ERBB2IP (NM_018695.1,687-705).
gccagtgtaaaccctattt

SEQ ID NO: 315732 - DNA, 19 bp, Homo sapiens
  siRNA target sequence for ERBB2IP (NM_018695.1,746-764).
ccagttgtatctgaatgat

SEQ ID NO: 315733 - DNA, 19 bp, Homo sapiens
  siRNA target sequence for ERBB2IP (NM_018695.1,774-792).
gagttcttgccagcaaatt

SEQ ID NO: 315734 - DNA, 19 bp, Homo sapiens
  siRNA target sequence for ERBB2IP (NM_018695.1,890-908).
ggatttgggaagtaacgaa

SEQ ID NO: 315735 - DNA, 19 bp, Homo sapiens
  siRNA target sequence for ERBB2IP (NM_018695.1,911-929).
cacggaagtgcctgaagta

SEQ ID NO: 315736 - DNA, 19 bp, Homo sapiens
  siRNA target sequence for ERBB2IP (NM_018695.1,956-974).
gttttggatggatgctaat

SEQ ID NO: 315737 - DNA, 19 bp, Homo sapiens
  siRNA target sequence for ERBB2IP (NM_018695.1,961-979).
ggatggatgctaatagact

SEQ ID NO: 315738 - DNA, 19 bp, Homo sapiens
  siRNA target sequence for ERBB2IP (NM_018695.1,991-1009).
cagggtttattggtagttt

SEQ ID NO: 315739 - DNA, 19 bp, Homo sapiens
  siRNA target sequence for ERBB2IP (NM_018695.1,993-1011).
gggtttattggtagtttga

SEQ ID NO: 315740 - DNA, 19 bp, Homo sapiens
  siRNA target sequence for ERBB2IP (NM_018695.1,994-1012).
ggtttattggtagtttgaa

SEQ ID NO: 315741 - DNA, 19 bp, Homo sapiens
  siRNA target sequence for ERBB2IP (NM_018695.1,1006-1024).
gtttgaaacagctcacata

SEQ ID NO: 315742 - DNA, 19 bp, Homo sapiens
  siRNA target sequence for ERBB2IP (NM_018695.1,1086-1104).
cttcaagacctcctattat

SEQ ID NO: 315743 - DNA, 19 bp, Homo sapiens
  siRNA target sequence for ERBB2IP (NM_018695.1,1095-1113).
ctcctattatcaagcaatt

SEQ ID NO: 315744 - DNA, 19 bp, Homo sapiens
  siRNA target sequence for ERBB2IP (NM_018695.1,1097-1115).
cctattatcaagcaattca

SEQ ID NO: 315745 - DNA, 19 bp, Homo sapiens
  siRNA target sequence for ERBB2IP (NM_018695.1,1124-1142).
gcttcctgagactattggt

SEQ ID NO: 315746 - DNA, 19 bp, Homo sapiens
  siRNA target sequence for ERBB2IP (NM_018695.1,1125-1143).
cttcctgagactattggtt

SEQ ID NO: 315747 - DNA, 19 bp, Homo sapiens
  siRNA target sequence for ERBB2IP (NM_018695.1,1135-1153).
ctattggttcgttgaagaa

SEQ ID NO: 315748 - DNA, 19 bp, Homo sapiens
  siRNA target sequence for ERBB2IP (NM_018695.1,1159-1177).
caacgcttaaaatagatga

SEQ ID NO: 315749 - DNA, 19 bp, Homo sapiens
  siRNA target sequence for ERBB2IP (NM_018695.1,1162-1180).
cgcttaaaatagatgaaaa

SEQ ID NO: 315750 - DNA, 19 bp, Homo sapiens
  siRNA target sequence for ERBB2IP (NM_018695.1,1227-1245).
gaagaactggattgtagtt

SEQ ID NO: 315751 - DNA, 19 bp, Homo sapiens
  siRNA target sequence for ERBB2IP (NM_018695.1,1278-1296).
gggcagcttactaacttaa

SEQ ID NO: 315752 - DNA, 19 bp, Homo sapiens
  siRNA target sequence for ERBB2IP (NM_018695.1,1280-1298).
gcagcttactaacttaaga

SEQ ID NO: 315753 - DNA, 19 bp, Homo sapiens
  siRNA target sequence for ERBB2IP (NM_018695.1,1281-1299).
cagcttactaacttaagaa

SEQ ID NO: 315754 - DNA, 19 bp, Homo sapiens
  siRNA target sequence for ERBB2IP (NM_018695.1,1283-1301).
gcttactaacttaagaact

SEQ ID NO: 315755 - DNA, 19 bp, Homo sapiens
  siRNA target sequence for ERBB2IP (NM_018695.1,1284-1302).
cttactaacttaagaactt

SEQ ID NO: 315756 - DNA, 19 bp, Homo sapiens
  siRNA target sequence for ERBB2IP (NM_018695.1,1306-1324).
ctgctgatcataattactt

SEQ ID NO: 315757 - DNA, 19 bp, Homo sapiens
  siRNA target sequence for ERBB2IP (NM_018695.1,1309-1327).
ctgatcataattacttaca

SEQ ID NO: 315758 - DNA, 19 bp, Homo sapiens
  siRNA target sequence for ERBB2IP (NM_018695.1,1450-1468).
gtgataatagattaaagaa

SEQ ID NO: 315759 - DNA, 19 bp, Homo sapiens
  siRNA target sequence for ERBB2IP (NM_018695.1,1466-1484).
gaatttaccctttagcttt

SEQ ID NO: 315760 - DNA, 19 bp, Homo sapiens
  siRNA target sequence for ERBB2IP (NM_018695.1,1475-1493).
ctttagctttacaaagcta

SEQ ID NO: 315761 - DNA, 19 bp, Homo sapiens
  siRNA target sequence for ERBB2IP (NM_018695.1,1506-1524).
gctatgtggctctcagata

SEQ ID NO: 315762 - DNA, 19 bp, Homo sapiens
  siRNA target sequence for ERBB2IP (NM_018695.1,1537-1555).
ccctgatacctcttcaaaa

SEQ ID NO: 315763 - DNA, 19 bp, Homo sapiens
  siRNA target sequence for ERBB2IP (NM_018695.1,1584-1602).
gtgcttaccaactacatgt

SEQ ID NO: 315764 - DNA, 19 bp, Homo sapiens
  siRNA target sequence for ERBB2IP (NM_018695.1,1614-1632).
ccaaggactgaggatgtta

SEQ ID NO: 315765 - DNA, 19 bp, Homo sapiens
  siRNA target sequence for ERBB2IP (NM_018695.1,1615-1633).
caaggactgaggatgttat

SEQ ID NO: 315766 - DNA, 19 bp, Homo sapiens
  siRNA target sequence for ERBB2IP (NM_018695.1,1618-1636).
ggactgaggatgttatgtt

SEQ ID NO: 315767 - DNA, 19 bp, Homo sapiens
  siRNA target sequence for ERBB2IP (NM_018695.1,1691-1709).
gcgggctcaagttgcattt

SEQ ID NO: 315768 - DNA, 19 bp, Homo sapiens
  siRNA target sequence for ERBB2IP (NM_018695.1,1694-1712).
ggctcaagttgcatttgaa

SEQ ID NO: 315769 - DNA, 19 bp, Homo sapiens
  siRNA target sequence for ERBB2IP (NM_018695.1,1746-1764).
cccagggagggaaatttaa

SEQ ID NO: 315770 - DNA, 19 bp, Homo sapiens
  siRNA target sequence for ERBB2IP (NM_018695.1,1747-1765).
ccagggagggaaatttaaa

SEQ ID NO: 315771 - DNA, 19 bp, Homo sapiens
  siRNA target sequence for ERBB2IP (NM_018695.1,1784-1802).
cccagatgagcttaagaat

SEQ ID NO: 315772 - DNA, 19 bp, Homo sapiens
  siRNA target sequence for ERBB2IP (NM_018695.1,1786-1804).
cagatgagcttaagaatat

SEQ ID NO: 315773 - DNA, 19 bp, Homo sapiens
  siRNA target sequence for ERBB2IP (NM_018695.1,1822-1840).
ccattgtacatagattaaa

SEQ ID NO: 315774 - DNA, 19 bp, Homo sapiens
  siRNA target sequence for ERBB2IP (NM_018695.1,1884-1902).
catgaagatcaacaagata

SEQ ID NO: 315775 - DNA, 19 bp, Homo sapiens
  siRNA target sequence for ERBB2IP (NM_018695.1,1890-1908).
gatcaacaagatataaata

SEQ ID NO: 315776 - DNA, 19 bp, Homo sapiens
  siRNA target sequence for ERBB2IP (NM_018695.1,1928-1946).
ctcagaaagtactactaca

SEQ ID NO: 315777 - DNA, 19 bp, Homo sapiens
  siRNA target sequence for ERBB2IP (NM_018695.1,1987-2005).
gaaactctgtacagaagat

SEQ ID NO: 315778 - DNA, 19 bp, Homo sapiens
  siRNA target sequence for ERBB2IP (NM_018695.1,2024-2042).
gattagtcctgggagttta

SEQ ID NO: 315779 - DNA, 19 bp, Homo sapiens
  siRNA target sequence for ERBB2IP (NM_018695.1,2159-2177).
gcgaccaccattaattgaa

SEQ ID NO: 315780 - DNA, 19 bp, Homo sapiens
  siRNA target sequence for ERBB2IP (NM_018695.1,2160-2178).
cgaccaccattaattgaaa

SEQ ID NO: 315781 - DNA, 19 bp, Homo sapiens
  siRNA target sequence for ERBB2IP (NM_018695.1,2199-2217).
gtcgtagcacttagtaata

SEQ ID NO: 315782 - DNA, 19 bp, Homo sapiens
  siRNA target sequence for ERBB2IP (NM_018695.1,2304-2322).
ccatctcggatgtctgatt

SEQ ID NO: 315783 - DNA, 19 bp, Homo sapiens
  siRNA target sequence for ERBB2IP (NM_018695.1,2310-2328).
cggatgtctgattcagttt

SEQ ID NO: 315784 - DNA, 19 bp, Homo sapiens
  siRNA target sequence for ERBB2IP (NM_018695.1,2312-2330).
gatgtctgattcagtttct

SEQ ID NO: 315785 - DNA, 19 bp, Homo sapiens
  siRNA target sequence for ERBB2IP (NM_018695.1,2368-2386).
ctccagtgaaacaaactca

SEQ ID NO: 315786 - DNA, 19 bp, Homo sapiens
  siRNA target sequence for ERBB2IP (NM_018695.1,2379-2397).
caaactcatattgatatta

SEQ ID NO: 315787 - DNA, 19 bp, Homo sapiens
  siRNA target sequence for ERBB2IP (NM_018695.1,2515-2533).
ctgaatatgatttgaatgt

SEQ ID NO: 315788 - DNA, 19 bp, Homo sapiens
  siRNA target sequence for ERBB2IP (NM_018695.1,2535-2553).
gaagagcgattagttctaa

SEQ ID NO: 315789 - DNA, 19 bp, Homo sapiens
  siRNA target sequence for ERBB2IP (NM_018695.1,2593-2611).
ctcacaaattagatcatat

SEQ ID NO: 315790 - DNA, 19 bp, Homo sapiens
  siRNA target sequence for ERBB2IP (NM_018695.1,2622-2640).
cttaataaacttataacta

SEQ ID NO: 315791 - DNA, 19 bp, Homo sapiens
  siRNA target sequence for ERBB2IP (NM_018695.1,2631-2649).
cttataactaatgatacat

SEQ ID NO: 315792 - DNA, 19 bp, Homo sapiens
  siRNA target sequence for ERBB2IP (NM_018695.1,2652-2670).
caaccagagatcatggaaa

SEQ ID NO: 315793 - DNA, 19 bp, Homo sapiens
  siRNA target sequence for ERBB2IP (NM_018695.1,2660-2678).
gatcatggaaagatcaaaa

SEQ ID NO: 315794 - DNA, 19 bp, Homo sapiens
  siRNA target sequence for ERBB2IP (NM_018695.1,2693-2711).
gcttggaacaagcttttta

SEQ ID NO: 315795 - DNA, 19 bp, Homo sapiens
  siRNA target sequence for ERBB2IP (NM_018695.1,2777-2795).
cgtaaataaggtaaatgga

SEQ ID NO: 315796 - DNA, 19 bp, Homo sapiens
  siRNA target sequence for ERBB2IP (NM_018695.1,2793-2811).
ggacattctgaggaaactt

SEQ ID NO: 315797 - DNA, 19 bp, Homo sapiens
  siRNA target sequence for ERBB2IP (NM_018695.1,2856-2874).
gttgacttaggtatttcca

SEQ ID NO: 315798 - DNA, 19 bp, Homo sapiens
  siRNA target sequence for ERBB2IP (NM_018695.1,2911-2929).
cagttggatctgttgtgaa

SEQ ID NO: 315799 - DNA, 19 bp, Homo sapiens
  siRNA target sequence for ERBB2IP (NM_018695.1,2913-2931).
gttggatctgttgtgaaat

SEQ ID NO: 315800 - DNA, 19 bp, Homo sapiens
  siRNA target sequence for ERBB2IP (NM_018695.1,2961-2979).
gggctaaaaatctatgata

SEQ ID NO: 315801 - DNA, 19 bp, Homo sapiens
  siRNA target sequence for ERBB2IP (NM_018695.1,3005-3023).
gccaagtacaaccgttaaa

SEQ ID NO: 315802 - DNA, 19 bp, Homo sapiens
  siRNA target sequence for ERBB2IP (NM_018695.1,3006-3024).
ccaagtacaaccgttaaaa

SEQ ID NO: 315803 - DNA, 19 bp, Homo sapiens
  siRNA target sequence for ERBB2IP (NM_018695.1,3007-3025).
caagtacaaccgttaaaat

SEQ ID NO: 315804 - DNA, 19 bp, Homo sapiens
  siRNA target sequence for ERBB2IP (NM_018695.1,3039-3057).
gatggaaaaaatatagtca

SEQ ID NO: 315805 - DNA, 19 bp, Homo sapiens
  siRNA target sequence for ERBB2IP (NM_018695.1,3067-3085).
ctgccacactgttgtatga

SEQ ID NO: 315806 - DNA, 19 bp, Homo sapiens
  siRNA target sequence for ERBB2IP (NM_018695.1,3070-3088).
ccacactgttgtatgatca

SEQ ID NO: 315807 - DNA, 19 bp, Homo sapiens
  siRNA target sequence for ERBB2IP (NM_018695.1,3071-3089).
cacactgttgtatgatcaa

SEQ ID NO: 315808 - DNA, 19 bp, Homo sapiens
  siRNA target sequence for ERBB2IP (NM_018695.1,3178-3196).
ccgaagagccaaatataat

SEQ ID NO: 315809 - DNA, 19 bp, Homo sapiens
  siRNA target sequence for ERBB2IP (NM_018695.1,3179-3197).
cgaagagccaaatataata

SEQ ID NO: 315810 - DNA, 19 bp, Homo sapiens
  siRNA target sequence for ERBB2IP (NM_018695.1,3206-3224).
cacaagtggcccacaatct

SEQ ID NO: 315811 - DNA, 19 bp, Homo sapiens
  siRNA target sequence for ERBB2IP (NM_018695.1,3240-3258).
ggtcctccacagtataata

SEQ ID NO: 315812 - DNA, 19 bp, Homo sapiens
  siRNA target sequence for ERBB2IP (NM_018695.1,3241-3259).
gtcctccacagtataatat

SEQ ID NO: 315813 - DNA, 19 bp, Homo sapiens
  siRNA target sequence for ERBB2IP (NM_018695.1,3244-3262).
ctccacagtataatatcca

SEQ ID NO: 315814 - DNA, 19 bp, Homo sapiens
  siRNA target sequence for ERBB2IP (NM_018695.1,3279-3297).
gcagtcaaagacactttgt

SEQ ID NO: 315815 - DNA, 19 bp, Homo sapiens
  siRNA target sequence for ERBB2IP (NM_018695.1,3425-3443).
caatgttcgagctaatact

SEQ ID NO: 315816 - DNA, 19 bp, Homo sapiens
  siRNA target sequence for ERBB2IP (NM_018695.1,3435-3453).
gctaatactgcataccatt

SEQ ID NO: 315817 - DNA, 19 bp, Homo sapiens
  siRNA target sequence for ERBB2IP (NM_018695.1,3502-3520).
caccaaacgaccgacttat

SEQ ID NO: 315818 - DNA, 19 bp, Homo sapiens
  siRNA target sequence for ERBB2IP (NM_018695.1,3525-3543).
gcagtaactcgaagtacaa

SEQ ID NO: 315819 - DNA, 19 bp, Homo sapiens
  siRNA target sequence for ERBB2IP (NM_018695.1,3526-3544).
cagtaactcgaagtacaat

SEQ ID NO: 315820 - DNA, 19 bp, Homo sapiens
  siRNA target sequence for ERBB2IP (NM_018695.1,3588-3606).
ggtgatccaggctctacaa

SEQ ID NO: 315821 - DNA, 19 bp, Homo sapiens
  siRNA target sequence for ERBB2IP (NM_018695.1,3617-3635).
gattcctgaaggagattat

SEQ ID NO: 315822 - DNA, 19 bp, Homo sapiens
  siRNA target sequence for ERBB2IP (NM_018695.1,3627-3645).
ggagattatttatcataca

SEQ ID NO: 315823 - DNA, 19 bp, Homo sapiens
  siRNA target sequence for ERBB2IP (NM_018695.1,3653-3671).
ccactcagcgggaagaact

SEQ ID NO: 315824 - DNA, 19 bp, Homo sapiens
  siRNA target sequence for ERBB2IP (NM_018695.1,3700-3718).
ccctttctgcacgaacata

SEQ ID NO: 315825 - DNA, 19 bp, Homo sapiens
  siRNA target sequence for ERBB2IP (NM_018695.1,3752-3770).
gagtgctcgaccctctatt

SEQ ID NO: 315826 - DNA, 19 bp, Homo sapiens
  siRNA target sequence for ERBB2IP (NM_018695.1,3754-3772).
gtgctcgaccctctattaa

SEQ ID NO: 315827 - DNA, 19 bp, Homo sapiens
  siRNA target sequence for ERBB2IP (NM_018695.1,3757-3775).
ctcgaccctctattaatga

SEQ ID NO: 315828 - DNA, 19 bp, Homo sapiens
  siRNA target sequence for ERBB2IP (NM_018695.1,3759-3777).
cgaccctctattaatgaaa

SEQ ID NO: 315829 - DNA, 19 bp, Homo sapiens
  siRNA target sequence for ERBB2IP (NM_018695.1,3764-3782).
ctctattaatgaaatacca

SEQ ID NO: 315830 - DNA, 19 bp, Homo sapiens
  siRNA target sequence for ERBB2IP (NM_018695.1,3783-3801).
gagagaactatgtcagtta

SEQ ID NO: 315831 - DNA, 19 bp, Homo sapiens
  siRNA target sequence for ERBB2IP (NM_018695.1,3787-3805).
gaactatgtcagttagtga

SEQ ID NO: 315832 - DNA, 19 bp, Homo sapiens
  siRNA target sequence for ERBB2IP (NM_018695.1,3794-3812).
gtcagttagtgatttcaat

SEQ ID NO: 315833 - DNA, 19 bp, Homo sapiens
  siRNA target sequence for ERBB2IP (NM_018695.1,3798-3816).
gttagtgatttcaattatt

SEQ ID NO: 315834 - DNA, 19 bp, Homo sapiens
  siRNA target sequence for ERBB2IP (NM_018695.1,3817-3835).
cacggactagtccttcaaa

SEQ ID NO: 315835 - DNA, 19 bp, Homo sapiens
  siRNA target sequence for ERBB2IP (NM_018695.1,3819-3837).
cggactagtccttcaaaaa

SEQ ID NO: 315836 - DNA, 19 bp, Homo sapiens
  siRNA target sequence for ERBB2IP (NM_018695.1,3821-3839).
gactagtccttcaaaaaga

SEQ ID NO: 315837 - DNA, 19 bp, Homo sapiens
  siRNA target sequence for ERBB2IP (NM_018695.1,3855-3873).
ggttctgagcattctttat

SEQ ID NO: 315838 - DNA, 19 bp, Homo sapiens
  siRNA target sequence for ERBB2IP (NM_018695.1,3928-3946).
gacatattgaagccaaaaa

SEQ ID NO: 315839 - DNA, 19 bp, Homo sapiens
  siRNA target sequence for ERBB2IP (NM_018695.1,3990-4008).
ctcaggcctcaggcaaatt

SEQ ID NO: 315840 - DNA, 19 bp, Homo sapiens
  siRNA target sequence for ERBB2IP (NM_018695.1,3999-4017).
caggcaaattatagtcaaa

SEQ ID NO: 315841 - DNA, 19 bp, Homo sapiens
  siRNA target sequence for ERBB2IP (NM_018695.1,4049-4067).
gcatccctctagagaacaa

SEQ ID NO: 315842 - DNA, 19 bp, Homo sapiens
  siRNA target sequence for ERBB2IP (NM_018695.1,4054-4072).
cctctagagaacaactaat

SEQ ID NO: 315843 - DNA, 19 bp, Homo sapiens
  siRNA target sequence for ERBB2IP (NM_018695.1,4055-4073).
ctctagagaacaactaatt

SEQ ID NO: 315844 - DNA, 19 bp, Homo sapiens
  siRNA target sequence for ERBB2IP (NM_018695.1,4094-4112).
ggcccaccagcctccatat

SEQ ID NO: 315845 - DNA, 19 bp, Homo sapiens
  siRNA target sequence for ERBB2IP (NM_018695.1,4095-4113).
gcccaccagcctccatata

SEQ ID NO: 315846 - DNA, 19 bp, Homo sapiens
  siRNA target sequence for ERBB2IP (NM_018695.1,4121-4139).
ccattgttctcctagacaa

SEQ ID NO: 315847 - DNA, 19 bp, Homo sapiens
  siRNA target sequence for ERBB2IP (NM_018695.1,4141-4159).
gccatgaactggcaaaaca

SEQ ID NO: 315848 - DNA, 19 bp, Homo sapiens
  siRNA target sequence for ERBB2IP (NM_018695.1,4168-4186).
gagtgagggttgaaaagga

SEQ ID NO: 315849 - DNA, 19 bp, Homo sapiens
  siRNA target sequence for ERBB2IP (NM_018695.1,4189-4207).
cagaacttggatttagcat

SEQ ID NO: 315850 - DNA, 19 bp, Homo sapiens
  siRNA target sequence for FLJ12428 (NM_022783.1,246-264).
ctcaggctgcacgaagaaa

SEQ ID NO: 315851 - DNA, 19 bp, Homo sapiens
  siRNA target sequence for FLJ12428 (NM_022783.1,252-270).
ctgcacgaagaaaaggtta

SEQ ID NO: 315852 - DNA, 19 bp, Homo sapiens
  siRNA target sequence for FLJ12428 (NM_022783.1,254-272).
gcacgaagaaaaggttatt

SEQ ID NO: 315853 - DNA, 19 bp, Homo sapiens
  siRNA target sequence for FLJ12428 (NM_022783.1,255-273).
cacgaagaaaaggttatta

SEQ ID NO: 315854 - DNA, 19 bp, Homo sapiens
  siRNA target sequence for FLJ12428 (NM_022783.1,298-316).
cctacccaaactgttttgt

SEQ ID NO: 315855 - DNA, 19 bp, Homo sapiens
  siRNA target sequence for FLJ12428 (NM_022783.1,310-328).
gttttgtcgcaaaagaact

SEQ ID NO: 315856 - DNA, 19 bp, Homo sapiens
  siRNA target sequence for FLJ12428 (NM_022783.1,335-353).
ctggctgattgaacacaaa

SEQ ID NO: 315857 - DNA, 19 bp, Homo sapiens
  siRNA target sequence for FLJ12428 (NM_022783.1,367-385).
gagagacggcaattaaact

SEQ ID NO: 315858 - DNA, 19 bp, Homo sapiens
  siRNA target sequence for FLJ12428 (NM_022783.1,459-477).
ctcttctaccgctttagaa

SEQ ID NO: 315859 - DNA, 19 bp, Homo sapiens
  siRNA target sequence for FLJ12428 (NM_022783.1,464-482).
ctaccgctttagaaaggat

SEQ ID NO: 315860 - DNA, 19 bp, Homo sapiens
  siRNA target sequence for FLJ12428 (NM_022783.1,485-503).
cggcaccttcccattggat

SEQ ID NO: 315861 - DNA, 19 bp, Homo sapiens
  siRNA target sequence for FLJ12428 (NM_022783.1,486-504).
ggcaccttcccattggata

SEQ ID NO: 315862 - DNA, 19 bp, Homo sapiens
  siRNA target sequence for FLJ12428 (NM_022783.1,490-508).
ccttcccattggataatga

SEQ ID NO: 315863 - DNA, 19 bp, Homo sapiens
  siRNA target sequence for FLJ12428 (NM_022783.1,491-509).
cttcccattggataatgaa

SEQ ID NO: 315864 - DNA, 19 bp, Homo sapiens
  siRNA target sequence for FLJ12428 (NM_022783.1,507-525).
gaagtgaaggcctttatga

SEQ ID NO: 315865 - DNA, 19 bp, Homo sapiens
  siRNA target sequence for FLJ12428 (NM_022783.1,526-544).
gaggacagaggctatatga

SEQ ID NO: 315866 - DNA, 19 bp, Homo sapiens
  siRNA target sequence for FLJ12428 (NM_022783.1,528-546).
ggacagaggctatatgaaa

SEQ ID NO: 315867 - DNA, 19 bp, Homo sapiens
  siRNA target sequence for FLJ12428 (NM_022783.1,529-547).
gacagaggctatatgaaaa

SEQ ID NO: 315868 - DNA, 19 bp, Homo sapiens
  siRNA target sequence for FLJ12428 (NM_022783.1,878-896).
ccatgacaatcggaaatct

SEQ ID NO: 315869 - DNA, 19 bp, Homo sapiens
  siRNA target sequence for FLJ12428 (NM_022783.1,879-897).
catgacaatcggaaatcta

SEQ ID NO: 315870 - DNA, 19 bp, Homo sapiens
  siRNA target sequence for FLJ12428 (NM_022783.1,888-906).
cggaaatctaccagcttta

SEQ ID NO: 315871 - DNA, 19 bp, Homo sapiens
  siRNA target sequence for FLJ12428 (NM_022783.1,889-907).
ggaaatctaccagctttat

SEQ ID NO: 315872 - DNA, 19 bp, Homo sapiens
  siRNA target sequence for FLJ12428 (NM_022783.1,1095-1113).
ccgtatgcaaggaagacat

SEQ ID NO: 315873 - DNA, 19 bp, Homo sapiens
  siRNA target sequence for FLJ12428 (NM_022783.1,1106-1124).
gaagacattcacgattgtt

SEQ ID NO: 315874 - DNA, 19 bp, Homo sapiens
  siRNA target sequence for FLJ12428 (NM_022783.1,1132-1150).
cggttggctggggttttgt

SEQ ID NO: 315875 - DNA, 19 bp, Homo sapiens
  siRNA target sequence for FLJ12428 (NM_022783.1,1243-1261).
ctgtcaacgggctcaatgt

SEQ ID NO: 315876 - DNA, 19 bp, Homo sapiens
  siRNA target sequence for FLJ12428 (NM_022783.1,1278-1296).
cggaccgtgagcaatctga

SEQ ID NO: 315877 - DNA, 19 bp, Homo sapiens
  siRNA target sequence for FLJ12428 (NM_022783.1,1279-1297).
ggaccgtgagcaatctgat

SEQ ID NO: 315878 - DNA, 19 bp, Homo sapiens
  siRNA target sequence for FLJ12428 (NM_022783.1,1280-1298).
gaccgtgagcaatctgatt

SEQ ID NO: 315879 - DNA, 19 bp, Homo sapiens
  siRNA target sequence for FLJ12428 (NM_022783.1,1282-1300).
ccgtgagcaatctgattct

SEQ ID NO: 315880 - DNA, 19 bp, Homo sapiens
  siRNA target sequence for FLJ12428 (NM_022783.1,1284-1302).
gtgagcaatctgattctga

SEQ ID NO: 315881 - DNA, 19 bp, Homo sapiens
  siRNA target sequence for FLJ12428 (NM_022783.1,1306-1324).
gcccacggacgattgtcat

SEQ ID NO: 315882 - DNA, 19 bp, Homo sapiens
  siRNA target sequence for FLJ12428 (NM_022783.1,1315-1333).
cgattgtcatggaagtcat

SEQ ID NO: 315883 - DNA, 19 bp, Homo sapiens
  siRNA target sequence for FLJ12428 (NM_022783.1,1329-1347).
gtcatggaggagttagagt

SEQ ID NO: 315884 - DNA, 19 bp, Homo sapiens
  siRNA target sequence for FLJ12987 (NM_025170.2,78-96).
cacctgcactgaaatgcta

SEQ ID NO: 315885 - DNA, 19 bp, Homo sapiens
  siRNA target sequence for FLJ12987 (NM_025170.2,223-241).
gatggacatcggtaccttt

SEQ ID NO: 315886 - DNA, 19 bp, Homo sapiens
  siRNA target sequence for FLJ12987 (NM_025170.2,292-310).
ggcaccgctgatttccata

SEQ ID NO: 315887 - DNA, 19 bp, Homo sapiens
  siRNA target sequence for FLJ12987 (NM_025170.2,306-324).
ccatagcagtggacacatt

SEQ ID NO: 315888 - DNA, 19 bp, Homo sapiens
  siRNA target sequence for FLJ12987 (NM_025170.2,314-332).
gtggacacattgttgttaa

SEQ ID NO: 315889 - DNA, 19 bp, Homo sapiens
  siRNA target sequence for FLJ12987 (NM_025170.2,410-428).
ggtttgaagctattttgaa

SEQ ID NO: 315890 - DNA, 19 bp, Homo sapiens
  siRNA target sequence for FLJ12987 (NM_025170.2,434-452).
gagaacggcggaaaggttt

SEQ ID NO: 315891 - DNA, 19 bp, Homo sapiens
  siRNA target sequence for FLJ12987 (NM_025170.2,436-454).
gaacggcggaaaggtttaa

SEQ ID NO: 315892 - DNA, 19 bp, Homo sapiens
  siRNA target sequence for FLJ12987 (NM_025170.2,439-457).
cggcggaaaggtttaaaat

SEQ ID NO: 315893 - DNA, 19 bp, Homo sapiens
  siRNA target sequence for FLJ12987 (NM_025170.2,472-490).
gatacctgggtcatgatct

SEQ ID NO: 315894 - DNA, 19 bp, Homo sapiens
  siRNA target sequence for FLJ12987 (NM_025170.2,491-509).
ctgaacagggtgagaaact

SEQ ID NO: 315895 - DNA, 19 bp, Homo sapiens
  siRNA target sequence for FLJ12987 (NM_025170.2,493-511).
gaacagggtgagaaacttt

SEQ ID NO: 315896 - DNA, 19 bp, Homo sapiens
  siRNA target sequence for FLJ12987 (NM_025170.2,496-514).
cagggtgagaaactttata

SEQ ID NO: 315897 - DNA, 19 bp, Homo sapiens
  siRNA target sequence for FLJ12987 (NM_025170.2,527-545).
gacaaggaaatctgatcaa

SEQ ID NO: 315898 - DNA, 19 bp, Homo sapiens
  siRNA target sequence for FLJ12987 (NM_025170.2,562-580).
ctgactacgttccctaaat

SEQ ID NO: 315899 - DNA, 19 bp, Homo sapiens
  siRNA target sequence for FLJ12987 (NM_025170.2,566-584).
ctacgttccctaaatgctt

SEQ ID NO: 315900 - DNA, 19 bp, Homo sapiens
  siRNA target sequence for FLJ12987 (NM_025170.2,582-600).
ctttcttggaagcgaattt

SEQ ID NO: 315901 - DNA, 19 bp, Homo sapiens
  siRNA target sequence for FLJ12987 (NM_025170.2,586-604).
cttggaagcgaatttgtgt

SEQ ID NO: 315902 - DNA, 19 bp, Homo sapiens
  siRNA target sequence for FLJ12987 (NM_025170.2,601-619).
gtgtcatggctgttggaaa

SEQ ID NO: 315903 - DNA, 19 bp, Homo sapiens
  siRNA target sequence for FLJ12987 (NM_025170.2,651-669).
gcacttgggacaagcatta

SEQ ID NO: 315904 - DNA, 19 bp, Homo sapiens
  siRNA target sequence for FLJ12987 (NM_025170.2,652-670).
cacttgggacaagcattat

SEQ ID NO: 315905 - DNA, 19 bp, Homo sapiens
  siRNA target sequence for FLJ12987 (NM_025170.2,657-675).
gggacaagcattattagaa

SEQ ID NO: 315906 - DNA, 19 bp, Homo sapiens
  siRNA target sequence for FLJ12987 (NM_025170.2,690-708).
ccatgttactgataaacat

SEQ ID NO: 315907 - DNA, 19 bp, Homo sapiens
  siRNA target sequence for FLJ12987 (NM_025170.2,714-732).
caaaccagaacagatgtta

SEQ ID NO: 315908 - DNA, 19 bp, Homo sapiens
  siRNA target sequence for FLJ12987 (NM_025170.2,718-736).
ccagaacagatgttatata

SEQ ID NO: 315909 - DNA, 19 bp, Homo sapiens
  siRNA target sequence for FLJ12987 (NM_025170.2,721-739).
gaacagatgttatatagat

SEQ ID NO: 315910 - DNA, 19 bp, Homo sapiens
  siRNA target sequence for FLJ12987 (NM_025170.2,777-795).
gatgcaggacgtgatttca

SEQ ID NO: 315911 - DNA, 19 bp, Homo sapiens
  siRNA target sequence for FLJ12987 (NM_025170.2,794-812).
caaagggtgtaagattata

SEQ ID NO: 315912 - DNA, 19 bp, Homo sapiens
  siRNA target sequence for FLJ12987 (NM_025170.2,817-835).
cgtcttcatagccttttta

SEQ ID NO: 315913 - DNA, 19 bp, Homo sapiens
  siRNA target sequence for FLJ12987 (NM_025170.2,888-906).
catggccaacaaactgata

SEQ ID NO: 315914 - DNA, 19 bp, Homo sapiens
  siRNA target sequence for FLJ12987 (NM_025170.2,892-910).
gccaacaaactgatagact

SEQ ID NO: 315915 - DNA, 19 bp, Homo sapiens
  siRNA target sequence for FLJ12987 (NM_025170.2,903-921).
gatagactggttaattgca

SEQ ID NO: 315916 - DNA, 19 bp, Homo sapiens
  siRNA target sequence for FLJ12987 (NM_025170.2,963-981).
cgttggactctgtgacaat

SEQ ID NO: 315917 - DNA, 19 bp, Homo sapiens
  siRNA target sequence for FLJ12987 (NM_025170.2,970-988).
ctctgtgacaatggattta

SEQ ID NO: 315918 - DNA, 19 bp, Homo sapiens
  siRNA target sequence for FLJ12987 (NM_025170.2,990-1008).
gcaccatgtccttgaaaaa

SEQ ID NO: 315919 - DNA, 19 bp, Homo sapiens
  siRNA target sequence for FLJ12987 (NM_025170.2,991-1009).
caccatgtccttgaaaaaa

SEQ ID NO: 315920 - DNA, 19 bp, Homo sapiens
  siRNA target sequence for FLJ12987 (NM_025170.2,1000-1018).
cttgaaaaaagcgaattca

SEQ ID NO: 315921 - DNA, 19 bp, Homo sapiens
  siRNA target sequence for FLJ12987 (NM_025170.2,1056-1074).
ggaaatggagggatcaaat

SEQ ID NO: 315922 - DNA, 19 bp, Homo sapiens
  siRNA target sequence for FLJ12987 (NM_025170.2,1065-1083).
gggatcaaatatgaaacat

SEQ ID NO: 315923 - DNA, 19 bp, Homo sapiens
  siRNA target sequence for FLJ12987 (NM_025170.2,1120-1138).
gttatagctaagtcattat

SEQ ID NO: 315924 - DNA, 19 bp, Homo sapiens
  siRNA target sequence for FLJ12987 (NM_025170.2,1126-1144).
gctaagtcattattgatta

SEQ ID NO: 315925 - DNA, 19 bp, Homo sapiens
  siRNA target sequence for FLJ12987 (NM_025170.2,1209-1227).
ggtagaaaagggatctaat

SEQ ID NO: 315926 - DNA, 19 bp, Homo sapiens
  siRNA target sequence for FLJ12987 (NM_025170.2,1241-1259).
gcatggaagtcgggaaaaa

SEQ ID NO: 315927 - DNA, 19 bp, Homo sapiens
  siRNA target sequence for FLJ12987 (NM_025170.2,1260-1278).
gatttttgctattaatggt

SEQ ID NO: 315928 - DNA, 19 bp, Homo sapiens
  siRNA target sequence for FLJ12987 (NM_025170.2,1276-1294).
ggtgacctagtttttatga

SEQ ID NO: 315929 - DNA, 19 bp, Homo sapiens
  siRNA target sequence for FLJ12987 (NM_025170.2,1321-1339).
ctgaaatcgtgtttaaaca

SEQ ID NO: 315930 - DNA, 19 bp, Homo sapiens
  siRNA target sequence for FLJ12987 (NM_025170.2,1498-1516).
cctggacagtgcattatca

SEQ ID NO: 315931 - DNA, 19 bp, Homo sapiens
  siRNA target sequence for FLJ12987 (NM_025170.2,1499-1517).
ctggacagtgcattatcaa

SEQ ID NO: 315932 - DNA, 19 bp, Homo sapiens
  siRNA target sequence for FLJ12987 (NM_025170.2,1613-1631).
ccatacaatgggtttataa

SEQ ID NO: 315933 - DNA, 19 bp, Homo sapiens
  siRNA target sequence for FLJ12987 (NM_025170.2,1693-1711).
gcaggggatgcttttgact

SEQ ID NO: 315934 - DNA, 19 bp, Homo sapiens
  siRNA target sequence for FLJ12987 (NM_025170.2,1697-1715).
gggatgcttttgactgtaa

SEQ ID NO: 315935 - DNA, 19 bp, Homo sapiens
  siRNA target sequence for FLJ12987 (NM_025170.2,1717-1735).
gtagaagaggttattgaca

SEQ ID NO: 315936 - DNA, 19 bp, Homo sapiens
  siRNA target sequence for FLJ12987 (NM_025170.2,1794-1812).
caatgtccacctggaatat

SEQ ID NO: 315937 - DNA, 19 bp, Homo sapiens
  siRNA target sequence for FLJ12987 (NM_025170.2,1895-1913).
gcttaactgccaagattct

SEQ ID NO: 315938 - DNA, 19 bp, Homo sapiens
  siRNA target sequence for FLJ12987 (NM_025170.2,1955-1973).
gtaccagcctaaattctct

SEQ ID NO: 315939 - DNA, 19 bp, Homo sapiens
  siRNA target sequence for FLJ12987 (NM_025170.2,1961-1979).
gcctaaattctctaaatga

SEQ ID NO: 315940 - DNA, 19 bp, Homo sapiens
  siRNA target sequence for FLJ12987 (NM_025170.2,1991-2009).
ctgaccttcagagtaaatt

SEQ ID NO: 315941 - DNA, 19 bp, Homo sapiens
  siRNA target sequence for FLJ12987 (NM_025170.2,1993-2011).
gaccttcagagtaaattca

SEQ ID NO: 315942 - DNA, 19 bp, Homo sapiens
  siRNA target sequence for FLJ12987 (NM_025170.2,1995-2013).
ccttcagagtaaattcagt

SEQ ID NO: 315943 - DNA, 19 bp, Homo sapiens
  siRNA target sequence for FLJ12987 (NM_025170.2,2083-2101).
gaaaggttttacaatttca

SEQ ID NO: 315944 - DNA, 19 bp, Homo sapiens
  siRNA target sequence for FLJ12987 (NM_025170.2,2114-2132).
ctgtctgggagcacagttt

SEQ ID NO: 315945 - DNA, 19 bp, Homo sapiens
  siRNA target sequence for FLJ12987 (NM_025170.2,2195-2213).
ctcctcctctcttaggaat

SEQ ID NO: 315946 - DNA, 19 bp, Homo sapiens
  siRNA target sequence for FLJ12987 (NM_025170.2,2197-2215).
cctcctctcttaggaatat

SEQ ID NO: 315947 - DNA, 19 bp, Homo sapiens
  siRNA target sequence for FLJ14249 (NM_022460.2,60-78).
cctccaggcgacttcagaa

SEQ ID NO: 315948 - DNA, 19 bp, Homo sapiens
  siRNA target sequence for FLJ14249 (NM_022460.2,61-79).
ctccaggcgacttcagaat

SEQ ID NO: 315949 - DNA, 19 bp, Homo sapiens
  siRNA target sequence for FLJ14249 (NM_022460.2,122-140).
gtacggggcaagatgatgt

SEQ ID NO: 315950 - DNA, 19 bp, Homo sapiens
  siRNA target sequence for FLJ14249 (NM_022460.2,176-194).
cgtctggctgcgttcaagt

SEQ ID NO: 315951 - DNA, 19 bp, Homo sapiens
  siRNA target sequence for FLJ14249 (NM_022460.2,224-242).
cagttcttggtctccaaaa

SEQ ID NO: 315952 - DNA, 19 bp, Homo sapiens
  siRNA target sequence for FLJ14249 (NM_022460.2,249-267).
gcgagattgaggagtttta

SEQ ID NO: 315953 - DNA, 19 bp, Homo sapiens
  siRNA target sequence for FLJ14249 (NM_022460.2,271-289).
gaaactgagcagtcgttat

SEQ ID NO: 315954 - DNA, 19 bp, Homo sapiens
  siRNA target sequence for FLJ14249 (NM_022460.2,360-378).
gagccgtgttcaatgagat

SEQ ID NO: 315955 - DNA, 19 bp, Homo sapiens
  siRNA target sequence for FLJ14249 (NM_022460.2,425-443).
ctgctagagttcttaggta

SEQ ID NO: 315956 - DNA, 19 bp, Homo sapiens
  siRNA target sequence for FLJ14249 (NM_022460.2,464-482).
gggctcaccagcagagatt

SEQ ID NO: 315957 - DNA, 19 bp, Homo sapiens
  siRNA target sequence for FLJ14249 (NM_022460.2,505-523).
cagtcagacagggaatgat

SEQ ID NO: 315958 - DNA, 19 bp, Homo sapiens
  siRNA target sequence for FLJ14249 (NM_022460.2,1045-1063).
gccggtgatacccagaaaa

SEQ ID NO: 315959 - DNA, 19 bp, Homo sapiens
  siRNA target sequence for FLJ14249 (NM_022460.2,1048-1066).
ggtgatacccagaaaacca

SEQ ID NO: 315960 - DNA, 19 bp, Homo sapiens
  siRNA target sequence for FLJ14249 (NM_106552.1,794-812).
gggctgtggggccaaagta

SEQ ID NO: 315961 - DNA, 19 bp, Homo sapiens
  siRNA target sequence for FLJ20967 (NM_022071.2,354-372).
gtcggagatgtacatagat

SEQ ID NO: 315962 - DNA, 19 bp, Homo sapiens
  siRNA target sequence for FLJ20967 (NM_022071.2,363-381).
gtacatagatcctgatcta

SEQ ID NO: 315963 - DNA, 19 bp, Homo sapiens
  siRNA target sequence for FLJ20967 (NM_022071.2,441-459).
gatccgacgatggaaagaa

SEQ ID NO: 315964 - DNA, 19 bp, Homo sapiens
  siRNA target sequence for FLJ20967 (NM_022071.2,444-462).
ccgacgatggaaagaaaga

SEQ ID NO: 315965 - DNA, 19 bp, Homo sapiens
  siRNA target sequence for FLJ20967 (NM_022071.2,483-501).
ggagtccctgccagtgaaa

SEQ ID NO: 315966 - DNA, 19 bp, Homo sapiens
  siRNA target sequence for FLJ20967 (NM_022071.2,524-542).
gcaaatcggttcattggaa

SEQ ID NO: 315967 - DNA, 19 bp, Homo sapiens
  siRNA target sequence for FLJ20967 (NM_022071.2,579-597).
gggcgaacaccatctagat

SEQ ID NO: 315968 - DNA, 19 bp, Homo sapiens
  siRNA target sequence for FLJ20967 (NM_022071.2,580-598).
ggcgaacaccatctagata

SEQ ID NO: 315969 - DNA, 19 bp, Homo sapiens
  siRNA target sequence for FLJ20967 (NM_022071.2,581-599).
gcgaacaccatctagataa

SEQ ID NO: 315970 - DNA, 19 bp, Homo sapiens
  siRNA target sequence for FLJ20967 (NM_022071.2,582-600).
cgaacaccatctagataaa

SEQ ID NO: 315971 - DNA, 19 bp, Homo sapiens
  siRNA target sequence for FLJ20967 (NM_022071.2,691-709).
gaagaattcaccaatagct

SEQ ID NO: 315972 - DNA, 19 bp, Homo sapiens
  siRNA target sequence for FLJ20967 (NM_022071.2,746-764).
cggataaccagcagactaa

SEQ ID NO: 315973 - DNA, 19 bp, Homo sapiens
  siRNA target sequence for FLJ20967 (NM_022071.2,747-765).
ggataaccagcagactaaa

SEQ ID NO: 315974 - DNA, 19 bp, Homo sapiens
  siRNA target sequence for FLJ20967 (NM_022071.2,889-907).
gcagattcaatcaatcgta

SEQ ID NO: 315975 - DNA, 19 bp, Homo sapiens
  siRNA target sequence for FLJ20967 (NM_022071.2,1036-1054).
gcatctctgcgaaaatcca

SEQ ID NO: 315976 - DNA, 19 bp, Homo sapiens
  siRNA target sequence for FLJ20967 (NM_022071.2,1073-1091).
gacgctccttggctaaaca

SEQ ID NO: 315977 - DNA, 19 bp, Homo sapiens
  siRNA target sequence for FLJ20967 (NM_022071.2,1297-1315).
gacatcatccggtggttta

SEQ ID NO: 315978 - DNA, 19 bp, Homo sapiens
  siRNA target sequence for FLJ20967 (NM_022071.2,1299-1317).
catcatccggtggtttaaa

SEQ ID NO: 315979 - DNA, 19 bp, Homo sapiens
  siRNA target sequence for FLJ20967 (NM_022071.2,1336-1354).
cgagcgggctaccagaaaa

SEQ ID NO: 315980 - DNA, 19 bp, Homo sapiens
  siRNA target sequence for FLJ20967 (NM_022071.2,1371-1389).
cccctggttccatggaatt

SEQ ID NO: 315981 - DNA, 19 bp, Homo sapiens
  siRNA target sequence for FLJ20967 (NM_022071.2,1390-1408).
ctcacactcaagaaagcaa

SEQ ID NO: 315982 - DNA, 19 bp, Homo sapiens
  siRNA target sequence for FLJ20967 (NM_022071.2,1447-1465).
ctcatccgagtcagtgaaa

SEQ ID NO: 315983 - DNA, 19 bp, Homo sapiens
  siRNA target sequence for FLJ20967 (NM_022071.2,1496-1514).
cggaggacggctgtaaaca

SEQ ID NO: 315984 - DNA, 19 bp, Homo sapiens
  siRNA target sequence for FLJ20967 (NM_022071.2,1497-1515).
ggaggacggctgtaaacat

SEQ ID NO: 315985 - DNA, 19 bp, Homo sapiens
  siRNA target sequence for FLJ20967 (NM_022071.2,1577-1595).
ccaccttggcggatttggt

SEQ ID NO: 315986 - DNA, 19 bp, Homo sapiens
  siRNA target sequence for FLJ20967 (NM_022071.2,1584-1602).
ggcggatttggtggaatat

SEQ ID NO: 315987 - DNA, 19 bp, Homo sapiens
  siRNA target sequence for FLJ20967 (NM_022071.2,1586-1604).
cggatttggtggaatatca

SEQ ID NO: 315988 - DNA, 19 bp, Homo sapiens
  siRNA target sequence for FLJ21687 (NM_024859.1,141-159).
gcctcagggcaaactatgt

SEQ ID NO: 315989 - DNA, 19 bp, Homo sapiens
  siRNA target sequence for FLJ21687 (NM_024859.1,142-160).
cctcagggcaaactatgta

SEQ ID NO: 315990 - DNA, 19 bp, Homo sapiens
  siRNA target sequence for FLJ21687 (NM_024859.1,158-176).
gtacacctgtgtcctttat

SEQ ID NO: 315991 - DNA, 19 bp, Homo sapiens
  siRNA target sequence for FLJ21687 (NM_024859.1,179-197).
cagcaccgttggttagaga

SEQ ID NO: 315992 - DNA, 19 bp, Homo sapiens
  siRNA target sequence for FLJ21687 (NM_024859.1,185-203).
cgttggttagagacatgta

SEQ ID NO: 315993 - DNA, 19 bp, Homo sapiens
  siRNA target sequence for FLJ21687 (NM_024859.1,257-275).
caggcctctggtcatttct

SEQ ID NO: 315994 - DNA, 19 bp, Homo sapiens
  siRNA target sequence for FLJ21687 (NM_024859.1,502-520).
gctccacctggttattcgt

SEQ ID NO: 315995 - DNA, 19 bp, Homo sapiens
  siRNA target sequence for FLJ21687 (NM_024859.1,675-693).
cccggacgacgctcaagaa

SEQ ID NO: 315996 - DNA, 19 bp, Homo sapiens
  siRNA target sequence for FLJ23209 (NM_024895.3,334-352).
cgcgatacctgctaaggaa

SEQ ID NO: 315997 - DNA, 19 bp, Homo sapiens
  siRNA target sequence for FLJ23209 (NM_024895.3,409-427).
gacgcgtcatcctcatcaa

SEQ ID NO: 315998 - DNA, 19 bp, Homo sapiens
  siRNA target sequence for FLJ23209 (NM_024895.3,812-830).
cgacaccagctcagaagat

SEQ ID NO: 315999 - DNA, 19 bp, Homo sapiens
  siRNA target sequence for FLJ23209 (NM_024895.3,840-858).
cgcatcgtccacctataca

SEQ ID NO: 316000 - DNA, 19 bp, Homo sapiens
  siRNA target sequence for FLJ23209 (NM_024895.3,842-860).
catcgtccacctatacaca

SEQ ID NO: 316001 - DNA, 19 bp, Homo sapiens
  siRNA target sequence for FLJ23209 (NM_024895.3,1512-1530).
cgctcccagagctatctga

SEQ ID NO: 316002 - DNA, 19 bp, Homo sapiens
  siRNA target sequence for FLJ23209 (NM_024895.3,1695-1713).
gggagcctggccaaaactt

SEQ ID NO: 316003 - DNA, 19 bp, Homo sapiens
  siRNA target sequence for FLJ23209 (NM_024895.3,1696-1714).
ggagcctggccaaaactta

SEQ ID NO: 316004 - DNA, 19 bp, Homo sapiens
  siRNA target sequence for FLJ30934 (NM_152760.1,196-214).
cgggacaaggtgaaattca

SEQ ID NO: 316005 - DNA, 19 bp, Homo sapiens
  siRNA target sequence for FLJ30934 (NM_152760.1,351-369).
ccctccgaggccagacttt

SEQ ID NO: 316006 - DNA, 19 bp, Homo sapiens
  siRNA target sequence for FLJ30934 (NM_152760.1,416-434).
ctgtcactcgggaagagtt

SEQ ID NO: 316007 - DNA, 19 bp, Homo sapiens
  siRNA target sequence for FLJ30934 (NM_152760.1,494-512).
cgatgcacgaagtctttct

SEQ ID NO: 316008 - DNA, 19 bp, Homo sapiens
  siRNA target sequence for FLJ30934 (NM_152760.1,541-559).
cgtcgagaccacaacttct

SEQ ID NO: 316009 - DNA, 19 bp, Homo sapiens
  siRNA target sequence for FLJ30934 (NM_152760.1,542-560).
gtcgagaccacaacttctt

SEQ ID NO: 316010 - DNA, 19 bp, Homo sapiens
  siRNA target sequence for FLJ30934 (NM_152760.1,623-641).
gagggtttctgaggaatat

SEQ ID NO: 316011 - DNA, 19 bp, Homo sapiens
  siRNA target sequence for FLJ30934 (NM_152760.1,626-644).
ggtttctgaggaatattgt

SEQ ID NO: 316012 - DNA, 19 bp, Homo sapiens
  siRNA target sequence for FLJ30934 (NM_152760.1,873-891).
gcagggcgtgccttgttgt

SEQ ID NO: 316013 - DNA, 19 bp, Homo sapiens
  siRNA target sequence for FLJ30934 (NM_152760.1,874-892).
cagggcgtgccttgttgtt

SEQ ID NO: 316014 - DNA, 19 bp, Homo sapiens
  siRNA target sequence for FLJ32798 (NM_173496.2,492-510).
gcctgcattcattggtaaa

SEQ ID NO: 316015 - DNA, 19 bp, Homo sapiens
  siRNA target sequence for FLJ32798 (NM_173496.2,494-512).
ctgcattcattggtaaaga

SEQ ID NO: 316016 - DNA, 19 bp, Homo sapiens
  siRNA target sequence for FLJ32798 (NM_173496.2,670-688).
ggctttgctctctgtacat

SEQ ID NO: 316017 - DNA, 19 bp, Homo sapiens
  siRNA target sequence for FLJ32798 (NM_173496.2,724-742).
gcctcctatgcctgaagat

SEQ ID NO: 316018 - DNA, 19 bp, Homo sapiens
  siRNA target sequence for FLJ32798 (NM_173496.2,775-793).
ccgtctggtcaaaaataga

SEQ ID NO: 316019 - DNA, 19 bp, Homo sapiens
  siRNA target sequence for FLJ32798 (NM_173496.2,777-795).
gtctggtcaaaaatagaga

SEQ ID NO: 316020 - DNA, 19 bp, Homo sapiens
  siRNA target sequence for FLJ32798 (NM_173496.2,797-815).
ccactgggagctaccatta

SEQ ID NO: 316021 - DNA, 19 bp, Homo sapiens
  siRNA target sequence for FLJ32798 (NM_173496.2,798-816).
cactgggagctaccattaa

SEQ ID NO: 316022 - DNA, 19 bp, Homo sapiens
  siRNA target sequence for FLJ32798 (NM_173496.2,925-943).
gataccagtggaggataaa

SEQ ID NO: 316023 - DNA, 19 bp, Homo sapiens
  siRNA target sequence for FLJ32798 (NM_173496.2,976-994).
gtctcagggagcaattaca

SEQ ID NO: 316024 - DNA, 19 bp, Homo sapiens
  siRNA target sequence for FLJ32798 (NM_173496.2,978-996).
ctcagggagcaattacatt

SEQ ID NO: 316025 - DNA, 19 bp, Homo sapiens
  siRNA target sequence for FLJ32798 (NM_173496.2,1061-1079).
ctctttgactataatccta

SEQ ID NO: 316026 - DNA, 19 bp, Homo sapiens
  siRNA target sequence for FLJ32798 (NM_173496.2,1082-1100).
gaggataaggcaattccat

SEQ ID NO: 316027 - DNA, 19 bp, Homo sapiens
  siRNA target sequence for FLJ32798 (NM_173496.2,1090-1108).
ggcaattccatgtaaggaa

SEQ ID NO: 316028 - DNA, 19 bp, Homo sapiens
  siRNA target sequence for FLJ32798 (NM_173496.2,1144-1162).
gattatgagccaagatgat

SEQ ID NO: 316029 - DNA, 19 bp, Homo sapiens
  siRNA target sequence for FLJ32798 (NM_173496.2,1251-1269).
ctttgagacgaccagaaat

SEQ ID NO: 316030 - DNA, 19 bp, Homo sapiens
  siRNA target sequence for FLJ32798 (NM_173496.2,1257-1275).
gacgaccagaaatattggt

SEQ ID NO: 316031 - DNA, 19 bp, Homo sapiens
  siRNA target sequence for FLJ32798 (NM_173496.2,1274-1292).
gttcagcccctgaaagttt

SEQ ID NO: 316032 - DNA, 19 bp, Homo sapiens
  siRNA target sequence for FLJ32798 (NM_173496.2,1323-1341).
gttttcgtcttagtagaaa

SEQ ID NO: 316033 - DNA, 19 bp, Homo sapiens
  siRNA target sequence for FLJ32798 (NM_173496.2,1328-1346).
cgtcttagtagaaaagata

SEQ ID NO: 316034 - DNA, 19 bp, Homo sapiens
  siRNA target sequence for FLJ32798 (NM_173496.2,1430-1448).
ccgtatcggcgacaaacta

SEQ ID NO: 316035 - DNA, 19 bp, Homo sapiens
  siRNA target sequence for FLJ32798 (NM_173496.2,1431-1449).
cgtatcggcgacaaactaa

SEQ ID NO: 316036 - DNA, 19 bp, Homo sapiens
  siRNA target sequence for FLJ32798 (NM_173496.2,1432-1450).
gtatcggcgacaaactaat

SEQ ID NO: 316037 - DNA, 19 bp, Homo sapiens
  siRNA target sequence for FLJ32798 (NM_173496.2,1436-1454).
cggcgacaaactaatgaaa

SEQ ID NO: 316038 - DNA, 19 bp, Homo sapiens
  siRNA target sequence for FLJ32798 (NM_173496.2,1439-1457).
cgacaaactaatgaaaaat

SEQ ID NO: 316039 - DNA, 19 bp, Homo sapiens
  siRNA target sequence for FLJ32798 (NM_173496.2,1590-1608).
gtgatggtgttgaatacat

SEQ ID NO: 316040 - DNA, 19 bp, Homo sapiens
  siRNA target sequence for FLJ32798 (NM_173496.2,1627-1645).
gtttgagacagatgtacaa

SEQ ID NO: 316041 - DNA, 19 bp, Homo sapiens
  siRNA target sequence for FLJ32798 (NM_173496.2,1712-1730).
cggtctgtccttgctaaaa

SEQ ID NO: 316042 - DNA, 19 bp, Homo sapiens
  siRNA target sequence for FLJ32798 (NM_173496.2,1713-1731).
ggtctgtccttgctaaaaa

SEQ ID NO: 316043 - DNA, 19 bp, Homo sapiens
  siRNA target sequence for FLJ32798 (NM_173496.2,2062-2080).
gccagtgagctggttacat

SEQ ID NO: 316044 - DNA, 19 bp, Homo sapiens
  siRNA target sequence for FLJ33505 (NM_152317.1,187-205).
cagctatgggatggtatta

SEQ ID NO: 316045 - DNA, 19 bp, Homo sapiens
  siRNA target sequence for FLJ33505 (NM_152317.1,247-265).
catcatttacagacataca

SEQ ID NO: 316046 - DNA, 19 bp, Homo sapiens
  siRNA target sequence for FLJ33505 (NM_152317.1,289-307).
gctgtcgatgtggtcttaa

SEQ ID NO: 316047 - DNA, 19 bp, Homo sapiens
  siRNA target sequence for FLJ33505 (NM_152317.1,294-312).
cgatgtggtcttaagtcat

SEQ ID NO: 316048 - DNA, 19 bp, Homo sapiens
  siRNA target sequence for FLJ33505 (NM_152317.1,298-316).
gtggtcttaagtcatctta

SEQ ID NO: 316049 - DNA, 19 bp, Homo sapiens
  siRNA target sequence for FLJ33505 (NM_152317.1,303-321).
cttaagtcatcttatgcaa

SEQ ID NO: 316050 - DNA, 19 bp, Homo sapiens
  siRNA target sequence for FLJ33505 (NM_152317.1,319-337).
caaaacacgtgcctaagta

SEQ ID NO: 316051 - DNA, 19 bp, Homo sapiens
  siRNA target sequence for FLJ33505 (NM_152317.1,324-342).
cacgtgcctaagtagcaat

SEQ ID NO: 316052 - DNA, 19 bp, Homo sapiens
  siRNA target sequence for FLJ33505 (NM_152317.1,374-392).
gccaagttctaatgaatca

SEQ ID NO: 316053 - DNA, 19 bp, Homo sapiens
  siRNA target sequence for FLJ33505 (NM_152317.1,480-498).
gtttctaggcaataaatca

SEQ ID NO: 316054 - DNA, 19 bp, Homo sapiens
  siRNA target sequence for FLJ33505 (NM_152317.1,489-507).
caataaatcatcttacgat

SEQ ID NO: 316055 - DNA, 19 bp, Homo sapiens
  siRNA target sequence for FLJ33505 (NM_152317.1,509-527).
gttgcaaaagacaaaagga

SEQ ID NO: 316056 - DNA, 19 bp, Homo sapiens
  siRNA target sequence for FLJ33505 (NM_152317.1,557-575).
gaccaggatatgaaatgat

SEQ ID NO: 316057 - DNA, 19 bp, Homo sapiens
  siRNA target sequence for FLJ33505 (NM_152317.1,597-615).
gattggtgaggaaagaatt

SEQ ID NO: 316058 - DNA, 19 bp, Homo sapiens
  siRNA target sequence for FLJ33505 (NM_152317.1,618-636).
ggaacttattcatacaata

SEQ ID NO: 316059 - DNA, 19 bp, Homo sapiens
  siRNA target sequence for FLJ33505 (NM_152317.1,646-664).
ccagctttatgtccaaata

SEQ ID NO: 316060 - DNA, 19 bp, Homo sapiens
  siRNA target sequence for FLJ33505 (NM_152317.1,649-667).
gctttatgtccaaatatca

SEQ ID NO: 316061 - DNA, 19 bp, Homo sapiens
  siRNA target sequence for FLJ33505 (NM_152317.1,687-705).
ccggctttcaaaagaagat

SEQ ID NO: 316062 - DNA, 19 bp, Homo sapiens
  siRNA target sequence for FLJ33505 (NM_152317.1,710-728).
ggaaagaacaaacattatt

SEQ ID NO: 316063 - DNA, 19 bp, Homo sapiens
  siRNA target sequence for FLJ33505 (NM_152317.1,823-841).
cttgttatcactaacactt

SEQ ID NO: 316064 - DNA, 19 bp, Homo sapiens
  siRNA target sequence for FLJ33505 (NM_152317.1,842-860).
gcctagacagagaacttat

SEQ ID NO: 316065 - DNA, 19 bp, Homo sapiens
  siRNA target sequence for FLJ33505 (NM_152317.1,853-871).
gaacttattccaagcttat

SEQ ID NO: 316066 - DNA, 19 bp, Homo sapiens
  siRNA target sequence for FLJ38993 (NM_152495.1,767-785).
cgccatctggcacataatt

SEQ ID NO: 316067 - DNA, 19 bp, Homo sapiens
  siRNA target sequence for FLJ38993 (NM_152495.1,921-939).
catagcctcttctgcatta

SEQ ID NO: 316068 - DNA, 19 bp, Homo sapiens
  siRNA target sequence for FLJ38993 (NM_152495.1,975-993).
ctgaatgtccctctacttt

SEQ ID NO: 316069 - DNA, 19 bp, Homo sapiens
  siRNA target sequence for GIPC2 (NM_017655.3,418-436).
ctcgccgtcggagatctta

SEQ ID NO: 316070 - DNA, 19 bp, Homo sapiens
  siRNA target sequence for GIPC2 (NM_017655.3,420-438).
cgccgtcggagatcttata

SEQ ID NO: 316071 - DNA, 19 bp, Homo sapiens
  siRNA target sequence for GIPC2 (NM_017655.3,421-439).
gccgtcggagatcttatat

SEQ ID NO: 316072 - DNA, 19 bp, Homo sapiens
  siRNA target sequence for GIPC2 (NM_017655.3,422-440).
ccgtcggagatcttatatt

SEQ ID NO: 316073 - DNA, 19 bp, Homo sapiens
  siRNA target sequence for GIPC2 (NM_017655.3,430-448).
gatcttatattgcacttta

SEQ ID NO: 316074 - DNA, 19 bp, Homo sapiens
  siRNA target sequence for GIPC2 (NM_017655.3,442-460).
cactttaaacacacctaaa

SEQ ID NO: 316075 - DNA, 19 bp, Homo sapiens
  siRNA target sequence for GIPC2 (NM_017655.3,517-535).
ccatgtgaaaggaatcgaa

SEQ ID NO: 316076 - DNA, 19 bp, Homo sapiens
  siRNA target sequence for GIPC2 (NM_017655.3,572-590).
ggtctcaccattacagata

SEQ ID NO: 316077 - DNA, 19 bp, Homo sapiens
  siRNA target sequence for GIPC2 (NM_017655.3,573-591).
gtctcaccattacagataa

SEQ ID NO: 316078 - DNA, 19 bp, Homo sapiens
  siRNA target sequence for GIPC2 (NM_017655.3,596-614).
gttggctatgcttttataa

SEQ ID NO: 316079 - DNA, 19 bp, Homo sapiens
  siRNA target sequence for GIPC2 (NM_017655.3,633-651).
gtgttattgactcagttaa

SEQ ID NO: 316080 - DNA, 19 bp, Homo sapiens
  siRNA target sequence for GIPC2 (NM_017655.3,660-678).
gtgttggggatcatattga

SEQ ID NO: 316081 - DNA, 19 bp, Homo sapiens
  siRNA target sequence for GIPC2 (NM_017655.3,668-686).
gatcatattgaatccataa

SEQ ID NO: 316082 - DNA, 19 bp, Homo sapiens
  siRNA target sequence for GIPC2 (NM_017655.3,705-723).
ggtggcgtcactatgatgt

SEQ ID NO: 316083 - DNA, 19 bp, Homo sapiens
  siRNA target sequence for GIPC2 (NM_017655.3,706-724).
gtggcgtcactatgatgtt

SEQ ID NO: 316084 - DNA, 19 bp, Homo sapiens
  siRNA target sequence for GIPC2 (NM_017655.3,711-729).
gtcactatgatgttgctaa

SEQ ID NO: 316085 - DNA, 19 bp, Homo sapiens
  siRNA target sequence for GIPC2 (NM_017655.3,861-879).
cacttcgcctgagatcaaa

SEQ ID NO: 316086 - DNA, 19 bp, Homo sapiens
  siRNA target sequence for GIPC2 (NM_017655.3,944-962).
gatgttcttgagttgtaca

SEQ ID NO: 316087 - DNA, 19 bp, Homo sapiens
  siRNA target sequence for GIPC2 (NM_017655.3,955-973).
gttgtacatgggaattcga

SEQ ID NO: 316088 - DNA, 19 bp, Homo sapiens
  siRNA target sequence for GIPC2 (NM_017655.3,961-979).
catgggaattcgagatatt

SEQ ID NO: 316089 - DNA, 19 bp, Homo sapiens
  siRNA target sequence for GIPC2 (NM_017655.3,1004-1022).
gctggaaaggacaaagtaa

SEQ ID NO: 316090 - DNA, 19 bp, Homo sapiens
  siRNA target sequence for GIPC2 (NM_017655.3,1042-1060).
ggcacttgacgaaactctt

SEQ ID NO: 316091 - DNA, 19 bp, Homo sapiens
  siRNA target sequence for GIPC2 (NM_017655.3,1081-1099).
cgaatttgtctttgatgtt

SEQ ID NO: 316092 - DNA, 19 bp, Homo sapiens
  siRNA target sequence for GIPC2 (NM_017655.3,1118-1136).
gccaaacgaagaggattat

SEQ ID NO: 316093 - DNA, 19 bp, Homo sapiens
  siRNA target sequence for GIPC3 (NM_133261.1,361-379).
gaggtggaggtcactaaga

SEQ ID NO: 316094 - DNA, 19 bp, Homo sapiens
  siRNA target sequence for GIPC3 (NM_133261.1,604-622).
cccaagagggccttcgata

SEQ ID NO: 316095 - DNA, 19 bp, Homo sapiens
  siRNA target sequence for GIPC3 (NM_133261.1,605-623).
ccaagagggccttcgatat

SEQ ID NO: 316096 - DNA, 19 bp, Homo sapiens
  siRNA target sequence for GIPC3 (NM_133261.1,655-673).
ccagtagaggcgaaagtga

SEQ ID NO: 316097 - DNA, 19 bp, Homo sapiens
  siRNA target sequence for GIPC3 (NM_133261.1,726-744).
ggaagcgcccagtgagttt

SEQ ID NO: 316098 - DNA, 19 bp, Homo sapiens
  siRNA target sequence for GIPC3 (NM_133261.1,755-773).
catctcggaaggttgatga

SEQ ID NO: 316099 - DNA, 19 bp, Homo sapiens
  siRNA target sequence for GIPC3 (NM_133261.1,826-844).
gtggagacgtccaagaaga

SEQ ID NO: 316100 - DNA, 19 bp, Homo sapiens
  siRNA target sequence for GIPC3 (NM_133261.1,858-876).
ggagtttgcacgctgttta

SEQ ID NO: 316101 - DNA, 19 bp, Homo sapiens
  siRNA target sequence for GOPC (NM_020399.1,193-211).
ggagttcgacaaagctttt

SEQ ID NO: 316102 - DNA, 19 bp, Homo sapiens
  siRNA target sequence for GOPC (NM_020399.1,363-381).
cacagttggtggatctgaa

SEQ ID NO: 316103 - DNA, 19 bp, Homo sapiens
  siRNA target sequence for GOPC (NM_020399.1,555-573).
gagagcttgaggcaaacaa

SEQ ID NO: 316104 - DNA, 19 bp, Homo sapiens
  siRNA target sequence for GOPC (NM_020399.1,640-658).
ccttcgtagacatatagct

SEQ ID NO: 316105 - DNA, 19 bp, Homo sapiens
  siRNA target sequence for GOPC (NM_020399.1,687-705).
gactagctgccaagtactt

SEQ ID NO: 316106 - DNA, 19 bp, Homo sapiens
  siRNA target sequence for GOPC (NM_020399.1,693-711).
ctgccaagtacttggataa

SEQ ID NO: 316107 - DNA, 19 bp, Homo sapiens
  siRNA target sequence for GOPC (NM_020399.1,720-738).
caggaagggtccaacagat

SEQ ID NO: 316108 - DNA, 19 bp, Homo sapiens
  siRNA target sequence for GOPC (NM_020399.1,767-785).
cctgctcatgataagcttt

SEQ ID NO: 316109 - DNA, 19 bp, Homo sapiens
  siRNA target sequence for GOPC (NM_020399.1,781-799).
gctttggaaccaattagaa

SEQ ID NO: 316110 - DNA, 19 bp, Homo sapiens
  siRNA target sequence for GOPC (NM_020399.1,790-808).
ccaattagaagctgaaata

SEQ ID NO: 316111 - DNA, 19 bp, Homo sapiens
  siRNA target sequence for GOPC (NM_020399.1,840-858).
cctgcagaggacgtaatga

SEQ ID NO: 316112 - DNA, 19 bp, Homo sapiens
  siRNA target sequence for GOPC (NM_020399.1,846-864).
gaggacgtaatgacttgaa

SEQ ID NO: 316113 - DNA, 19 bp, Homo sapiens
  siRNA target sequence for GOPC (NM_020399.1,882-900).
caccaggccatgatcaaga

SEQ ID NO: 316114 - DNA, 19 bp, Homo sapiens
  siRNA target sequence for GOPC (NM_020399.1,893-911).
gatcaagattccctaaaga

SEQ ID NO: 316115 - DNA, 19 bp, Homo sapiens
  siRNA target sequence for GOPC (NM_020399.1,916-934).
ccaaggtgttggtccaatt

SEQ ID NO: 316116 - DNA, 19 bp, Homo sapiens
  siRNA target sequence for GOPC (NM_020399.1,917-935).
caaggtgttggtccaatta

SEQ ID NO: 316117 - DNA, 19 bp, Homo sapiens
  siRNA target sequence for GOPC (NM_020399.1,920-938).
ggtgttggtccaattagaa

SEQ ID NO: 316118 - DNA, 19 bp, Homo sapiens
  siRNA target sequence for GOPC (NM_020399.1,921-939).
gtgttggtccaattagaaa

SEQ ID NO: 316119 - DNA, 19 bp, Homo sapiens
  siRNA target sequence for GOPC (NM_020399.1,968-986).
ggccttggcatttcaatta

SEQ ID NO: 316120 - DNA, 19 bp, Homo sapiens
  siRNA target sequence for GOPC (NM_020399.1,1037-1055).
gggcaacctgctgatagat

SEQ ID NO: 316121 - DNA, 19 bp, Homo sapiens
  siRNA target sequence for GOPC (NM_020399.1,1067-1085).
cacgttggggatgctattt

SEQ ID NO: 316122 - DNA, 19 bp, Homo sapiens
  siRNA target sequence for GOPC (NM_020399.1,1089-1107).
cagtcaacggagttaacct

SEQ ID NO: 316123 - DNA, 19 bp, Homo sapiens
  siRNA target sequence for GOPC (NM_020399.1,1105-1123).
cctaagggacacaaagcat

SEQ ID NO: 316124 - DNA, 19 bp, Homo sapiens
  siRNA target sequence for GOPC (NM_020399.1,1120-1138).
gcataaagaagctgtaact

SEQ ID NO: 316125 - DNA, 19 bp, Homo sapiens
  siRNA target sequence for GOPC (NM_020399.1,1121-1139).
cataaagaagctgtaacta

SEQ ID NO: 316126 - DNA, 19 bp, Homo sapiens
  siRNA target sequence for GOPC (NM_020399.1,1158-1176).
gagagattgaatttgaagt

SEQ ID NO: 316127 - DNA, 19 bp, Homo sapiens
  siRNA target sequence for GOPC (NM_020399.1,1239-1257).
gacatcgttaccgtttgta

SEQ ID NO: 316128 - DNA, 19 bp, Homo sapiens
  siRNA target sequence for GOPC (NM_020399.1,1285-1303).
ccctggtgctagttgcaaa

SEQ ID NO: 316129 - DNA, 19 bp, Homo sapiens
  siRNA target sequence for GOPC (NM_020399.1,1289-1307).
ggtgctagttgcaaagaca

SEQ ID NO: 316130 - DNA, 19 bp, Homo sapiens
  siRNA target sequence for GOPC (NM_020399.1,1321-1339).
caaagtattacaaggattt

SEQ ID NO: 316131 - DNA, 19 bp, Homo sapiens
  siRNA target sequence for GOPC (NM_020399.1,1325-1343).
gtattacaaggatttaata

SEQ ID NO: 316132 - DNA, 19 bp, Homo sapiens
  siRNA target sequence for GOPC (NM_020399.1,1381-1399).
gggcactgcaagtgaaact

SEQ ID NO: 316133 - DNA, 19 bp, Homo sapiens
  siRNA target sequence for GOPC (NM_020399.1,1406-1424).
gatgacggtgcttcaaaat

SEQ ID NO: 316134 - DNA, 19 bp, Homo sapiens
  siRNA target sequence for GOPC (NM_020399.1,1411-1429).
cggtgcttcaaaattagat

SEQ ID NO: 316135 - DNA, 19 bp, Homo sapiens
  siRNA target sequence for GORASP2 (NM_015530.3,194-212).
cgttctgcgggtacaagaa

SEQ ID NO: 316136 - DNA, 19 bp, Homo sapiens
  siRNA target sequence for GORASP2 (NM_015530.3,195-213).
gttctgcgggtacaagaaa

SEQ ID NO: 316137 - DNA, 19 bp, Homo sapiens
  siRNA target sequence for GORASP2 (NM_015530.3,232-250).
ctggtttggagcctttctt

SEQ ID NO: 316138 - DNA, 19 bp, Homo sapiens
  siRNA target sequence for GORASP2 (NM_015530.3,235-253).
gtttggagcctttctttga

SEQ ID NO: 316139 - DNA, 19 bp, Homo sapiens
  siRNA target sequence for GORASP2 (NM_015530.3,293-311).
caatgacactcttaaggat

SEQ ID NO: 316140 - DNA, 19 bp, Homo sapiens
  siRNA target sequence for GORASP2 (NM_015530.3,339-357).
gtaaagatgcttatctata

SEQ ID NO: 316141 - DNA, 19 bp, Homo sapiens
  siRNA target sequence for GORASP2 (NM_015530.3,451-469).
gctttgatggggcaaatga

SEQ ID NO: 316142 - DNA, 19 bp, Homo sapiens
  siRNA target sequence for GORASP2 (NM_015530.3,529-547).
gaccacacagtgattatat

SEQ ID NO: 316143 - DNA, 19 bp, Homo sapiens
  siRNA target sequence for GORASP2 (NM_015530.3,556-574).
cagatacagtcatgaatga

SEQ ID NO: 316144 - DNA, 19 bp, Homo sapiens
  siRNA target sequence for GORASP2 (NM_015530.3,569-587).
gaatgagtctgaagatcta

SEQ ID NO: 316145 - DNA, 19 bp, Homo sapiens
  siRNA target sequence for GORASP2 (NM_015530.3,585-603).
ctattcagccttatcgaaa

SEQ ID NO: 316146 - DNA, 19 bp, Homo sapiens
  siRNA target sequence for GORASP2 (NM_015530.3,613-631).
caaaaccattgaaactgta

SEQ ID NO: 316147 - DNA, 19 bp, Homo sapiens
  siRNA target sequence for GORASP2 (NM_015530.3,618-636).
ccattgaaactgtatgtgt

SEQ ID NO: 316148 - DNA, 19 bp, Homo sapiens
  siRNA target sequence for GORASP2 (NM_015530.3,619-637).
cattgaaactgtatgtgta

SEQ ID NO: 316149 - DNA, 19 bp, Homo sapiens
  siRNA target sequence for GORASP2 (NM_015530.3,641-659).
cacagacactgataactgt

SEQ ID NO: 316150 - DNA, 19 bp, Homo sapiens
  siRNA target sequence for GORASP2 (NM_015530.3,718-736).
gcattggatatggttattt

SEQ ID NO: 316151 - DNA, 19 bp, Homo sapiens
  siRNA target sequence for GORASP2 (NM_015530.3,797-815).
ggctggtacacctattaca

SEQ ID NO: 316152 - DNA, 19 bp, Homo sapiens
  siRNA target sequence for GORASP2 (NM_015530.3,808-826).
ctattacacctcttaaaga

SEQ ID NO: 316153 - DNA, 19 bp, Homo sapiens
  siRNA target sequence for GORASP2 (NM_015530.3,840-858).
gtccagctgtcctcagtta

SEQ ID NO: 316154 - DNA, 19 bp, Homo sapiens
  siRNA target sequence for GORASP2 (NM_015530.3,855-873).
gttaatcccccgtctttgt

SEQ ID NO: 316155 - DNA, 19 bp, Homo sapiens
  siRNA target sequence for GORASP2 (NM_015530.3,902-920).
gagtctgactggactttct

SEQ ID NO: 316156 - DNA, 19 bp, Homo sapiens
  siRNA target sequence for GORASP2 (NM_015530.3,906-924).
ctgactggactttctatta

SEQ ID NO: 316157 - DNA, 19 bp, Homo sapiens
  siRNA target sequence for GORASP2 (NM_015530.3,980-998).
gttattgccaccacaagta

SEQ ID NO: 316158 - DNA, 19 bp, Homo sapiens
  siRNA target sequence for GORASP2 (NM_015530.3,1135-1153).
gcttaccagaacttgtaaa

SEQ ID NO: 316159 - DNA, 19 bp, Homo sapiens
  siRNA target sequence for GORASP2 (NM_015530.3,1177-1195).
ccatgcctccccgaaactt

SEQ ID NO: 316160 - DNA, 19 bp, Homo sapiens
  siRNA target sequence for GORASP2 (NM_015530.3,1178-1196).
catgcctccccgaaactta

SEQ ID NO: 316161 - DNA, 19 bp, Homo sapiens
  siRNA target sequence for GORASP2 (NM_015530.3,1467-1485).
gctgtggatgccaatgctt

SEQ ID NO: 316162 - DNA, 19 bp, Homo sapiens
  siRNA target sequence for HSH2 (NM_032855.2,920-938).
ccgcaaacgtggattacga

SEQ ID NO: 316163 - DNA, 19 bp, Homo sapiens
  siRNA target sequence for HSH2 (NM_032855.2,1051-1069).
ccgtcagcagagatgaaca

SEQ ID NO: 316164 - DNA, 19 bp, Homo sapiens
  siRNA target sequence for HSH2 (NM_032855.2,1123-1141).
gagacccgccagaaactct

SEQ ID NO: 316165 - DNA, 19 bp, Homo sapiens
  siRNA target sequence for HSH2 (NM_032855.2,1179-1197).
ggtccggcagcagctaaaa

SEQ ID NO: 316166 - DNA, 19 bp, Homo sapiens
  siRNA target sequence for HSH2 (NM_032855.2,1204-1222).
ctcgccactgtgaacttgt

SEQ ID NO: 316167 - DNA, 19 bp, Homo sapiens
  siRNA target sequence for HSH2 (NM_032855.2,1451-1469).
ggagttggcaccaaatggt

SEQ ID NO: 316168 - DNA, 19 bp, Homo sapiens
  siRNA target sequence for HSPC163 (NM_014184.1,87-105).
cctctcggtctacttcata

SEQ ID NO: 316169 - DNA, 19 bp, Homo sapiens
  siRNA target sequence for HSPC163 (NM_014184.1,88-106).
ctctcggtctacttcataa

SEQ ID NO: 316170 - DNA, 19 bp, Homo sapiens
  siRNA target sequence for HSPC163 (NM_014184.1,90-108).
ctcggtctacttcataatt

SEQ ID NO: 316171 - DNA, 19 bp, Homo sapiens
  siRNA target sequence for HSPC163 (NM_014184.1,93-111).
ggtctacttcataattaca

SEQ ID NO: 316172 - DNA, 19 bp, Homo sapiens
  siRNA target sequence for HSPC163 (NM_014184.1,94-112).
gtctacttcataattacat

SEQ ID NO: 316173 - DNA, 19 bp, Homo sapiens
  siRNA target sequence for HSPC163 (NM_014184.1,99-117).
cttcataattacattgtct

SEQ ID NO: 316174 - DNA, 19 bp, Homo sapiens
  siRNA target sequence for HSPC163 (NM_014184.1,114-132).
gtctgatttagaatgtgat

SEQ ID NO: 316175 - DNA, 19 bp, Homo sapiens
  siRNA target sequence for HSPC163 (NM_014184.1,146-164).
gatcatgttgctcaaaatt

SEQ ID NO: 316176 - DNA, 19 bp, Homo sapiens
  siRNA target sequence for HSPC163 (NM_014184.1,152-170).
gttgctcaaaattaaacaa

SEQ ID NO: 316177 - DNA, 19 bp, Homo sapiens
  siRNA target sequence for HSPC163 (NM_014184.1,196-214).
cataccattgtcactgtat

SEQ ID NO: 316178 - DNA, 19 bp, Homo sapiens
  siRNA target sequence for HSPC163 (NM_014184.1,211-229).
gtattactgctcatgtcat

SEQ ID NO: 316179 - DNA, 19 bp, Homo sapiens
  siRNA target sequence for HSPC163 (NM_014184.1,259-277).
cctgttgccacttggaata

SEQ ID NO: 316180 - DNA, 19 bp, Homo sapiens
  siRNA target sequence for HSPC163 (NM_014184.1,267-285).
cacttggaatatatatcga

SEQ ID NO: 316181 - DNA, 19 bp, Homo sapiens
  siRNA target sequence for HSPC163 (NM_014184.1,316-334).
gtgtttgatccaacagaaa

SEQ ID NO: 316182 - DNA, 19 bp, Homo sapiens
  siRNA target sequence for HSPC163 (NM_014184.1,318-336).
gtttgatccaacagaaata

SEQ ID NO: 316183 - DNA, 19 bp, Homo sapiens
  siRNA target sequence for HSPC163 (NM_014184.1,404-422).
gcttcttcatgtatcttta

SEQ ID NO: 316184 - DNA, 19 bp, Homo sapiens
  siRNA target sequence for HSPC163 (NM_014184.1,425-443).
gtatgatcttagctttgat

SEQ ID NO: 316185 - DNA, 19 bp, Homo sapiens
  siRNA target sequence for KIAA0645 (NM_014662.1,67-85).
caacaaaggtctacaaact

SEQ ID NO: 316186 - DNA, 19 bp, Homo sapiens
  siRNA target sequence for KIAA0645 (NM_014662.1,115-133).
gtgatgatgagctagttgt

SEQ ID NO: 316187 - DNA, 19 bp, Homo sapiens
  siRNA target sequence for KIAA0645 (NM_014662.1,183-201).
gcacaccccaacgatgaat

SEQ ID NO: 316188 - DNA, 19 bp, Homo sapiens
  siRNA target sequence for KIAA0645 (NM_014662.1,184-202).
cacaccccaacgatgaata

SEQ ID NO: 316189 - DNA, 19 bp, Homo sapiens
  siRNA target sequence for KIAA0645 (NM_014662.1,221-239).
ggtcaagtctcttaaggaa

SEQ ID NO: 316190 - DNA, 19 bp, Homo sapiens
  siRNA target sequence for KIAA0645 (NM_014662.1,287-305).
gttccggctgagaccttat

SEQ ID NO: 316191 - DNA, 19 bp, Homo sapiens
  siRNA target sequence for KIAA0645 (NM_014662.1,347-365).
ccttgacctagtggaatta

SEQ ID NO: 316192 - DNA, 19 bp, Homo sapiens
  siRNA target sequence for KIAA0645 (NM_014662.1,351-369).
gacctagtggaattaactt

SEQ ID NO: 316193 - DNA, 19 bp, Homo sapiens
  siRNA target sequence for KIAA0645 (NM_014662.1,394-412).
gggatatgtggcgactaaa

SEQ ID NO: 316194 - DNA, 19 bp, Homo sapiens
  siRNA target sequence for KIAA0645 (NM_014662.1,396-414).
gatatgtggcgactaaaga

SEQ ID NO: 316195 - DNA, 19 bp, Homo sapiens
  siRNA target sequence for KIAA0645 (NM_014662.1,401-419).
gtggcgactaaagaaaagt

SEQ ID NO: 316196 - DNA, 19 bp, Homo sapiens
  siRNA target sequence for KIAA0645 (NM_014662.1,483-501).
ggtgaactgtgggttaaga

SEQ ID NO: 316197 - DNA, 19 bp, Homo sapiens
  siRNA target sequence for KIAA0645 (NM_014662.1,484-502).
gtgaactgtgggttaagaa

SEQ ID NO: 316198 - DNA, 19 bp, Homo sapiens
  siRNA target sequence for KIAA0645 (NM_014662.1,510-528).
gtcatgtgtggctacatca

SEQ ID NO: 316199 - DNA, 19 bp, Homo sapiens
  siRNA target sequence for KIAA0645 (NM_014662.1,519-537).
ggctacatcagtgaagata

SEQ ID NO: 316200 - DNA, 19 bp, Homo sapiens
  siRNA target sequence for KIAA0645 (NM_014662.1,556-574).
ctacgtcggctatggttta

SEQ ID NO: 316201 - DNA, 19 bp, Homo sapiens
  siRNA target sequence for KIAA0645 (NM_014662.1,559-577).
cgtcggctatggtttacat

SEQ ID NO: 316202 - DNA, 19 bp, Homo sapiens
  siRNA target sequence for KIAA0645 (NM_014662.1,595-613).
gtgaaatgtgggattttga

SEQ ID NO: 316203 - DNA, 19 bp, Homo sapiens
  siRNA target sequence for KIAA0645 (NM_014662.1,707-725).
gacagtggtcctgttttct

SEQ ID NO: 316204 - DNA, 19 bp, Homo sapiens
  siRNA target sequence for KIAA0645 (NM_014662.1,727-745).
gaactttctatgatgcaaa

SEQ ID NO: 316205 - DNA, 19 bp, Homo sapiens
  siRNA target sequence for KIAA0645 (NM_014662.1,781-799).
caattcgacaggatcacaa

SEQ ID NO: 316206 - DNA, 19 bp, Homo sapiens
  siRNA target sequence for KIAA0645 (NM_014662.1,792-810).
gatcacaaggggagattct

SEQ ID NO: 316207 - DNA, 19 bp, Homo sapiens
  siRNA target sequence for KIAA0645 (NM_014662.1,802-820).
ggagattctatgaagactt

SEQ ID NO: 316208 - DNA, 19 bp, Homo sapiens
  siRNA target sequence for KIAA0645 (NM_014662.1,803-821).
gagattctatgaagacttt

SEQ ID NO: 316209 - DNA, 19 bp, Homo sapiens
  siRNA target sequence for KIAA0645 (NM_014662.1,865-883).
cacttctcgtaaccattaa

SEQ ID NO: 316210 - DNA, 19 bp, Homo sapiens
  siRNA target sequence for KIAA0645 (NM_014662.1,867-885).
cttctcgtaaccattaaaa

SEQ ID NO: 316211 - DNA, 19 bp, Homo sapiens
  siRNA target sequence for KIAA0645 (NM_014662.1,877-895).
ccattaaaaaactcttcat

SEQ ID NO: 316212 - DNA, 19 bp, Homo sapiens
  siRNA target sequence for KIAA0645 (NM_014662.1,958-976).
cctcagcacaaggaaacta

SEQ ID NO: 316213 - DNA, 19 bp, Homo sapiens
  siRNA target sequence for KIAA0645 (NM_014662.1,984-1002).
gccatcaatctgtcattca

SEQ ID NO: 316214 - DNA, 19 bp, Homo sapiens
  siRNA target sequence for KIAA0645 (NM_014662.1,1115-1133).
gaccaagcagcggatgata

SEQ ID NO: 316215 - DNA, 19 bp, Homo sapiens
  siRNA target sequence for KIAA0645 (NM_014662.1,1117-1135).
ccaagcagcggatgataga

SEQ ID NO: 316216 - DNA, 19 bp, Homo sapiens
  siRNA target sequence for KIAA0645 (NM_014662.1,1121-1139).
gcagcggatgatagataat

SEQ ID NO: 316217 - DNA, 19 bp, Homo sapiens
  siRNA target sequence for KIAA0645 (NM_014662.1,1125-1143).
cggatgatagataatggaa

SEQ ID NO: 316218 - DNA, 19 bp, Homo sapiens
  siRNA target sequence for KIAA0645 (NM_014662.1,1130-1148).
gatagataatggaattggt

SEQ ID NO: 316219 - DNA, 19 bp, Homo sapiens
  siRNA target sequence for KIAA0645 (NM_014662.1,1166-1184).
gggagagcaaccgttacat

SEQ ID NO: 316220 - DNA, 19 bp, Homo sapiens
  siRNA target sequence for KIAA0645 (NM_014662.1,1192-1210).
cattgttcaagctccataa

SEQ ID NO: 316221 - DNA, 19 bp, Homo sapiens
  siRNA target sequence for KIAA0645 (NM_014662.1,1214-1232).
gagtgctccccgtgattct

SEQ ID NO: 316222 - DNA, 19 bp, Homo sapiens
  siRNA target sequence for KIAA0645 (NM_014662.1,1231-1249).
ctcgtctgggcgatgacta

SEQ ID NO: 316223 - DNA, 19 bp, Homo sapiens
  siRNA target sequence for KIAA0645 (NM_014662.1,1233-1251).
cgtctgggcgatgactata

SEQ ID NO: 316224 - DNA, 19 bp, Homo sapiens
  siRNA target sequence for KIAA0645 (NM_014662.1,1234-1252).
gtctgggcgatgactataa

SEQ ID NO: 316225 - DNA, 19 bp, Homo sapiens
  siRNA target sequence for KIAA0645 (NM_014662.1,1236-1254).
ctgggcgatgactataata

SEQ ID NO: 316226 - DNA, 19 bp, Homo sapiens
  siRNA target sequence for KIAA0645 (NM_014662.1,1274-1292).
cagtttctacacatccaaa

SEQ ID NO: 316227 - DNA, 19 bp, Homo sapiens
  siRNA target sequence for KIAA0645 (NM_014662.1,1312-1330).
gtttcaccccacgaataaa

SEQ ID NO: 316228 - DNA, 19 bp, Homo sapiens
  siRNA target sequence for KIAA0645 (NM_014662.1,1386-1404).
ctcgggagtccaaaagaat

SEQ ID NO: 316229 - DNA, 19 bp, Homo sapiens
  siRNA target sequence for KIAA0645 (NM_014662.1,1416-1434).
cttcccatccaagtagatt

SEQ ID NO: 316230 - DNA, 19 bp, Homo sapiens
  siRNA target sequence for KIAA0645 (NM_014662.1,1420-1438).
ccatccaagtagattatga

SEQ ID NO: 316231 - DNA, 19 bp, Homo sapiens
  siRNA target sequence for KIAA0645 (NM_014662.1,1523-1541).
gagtcacagtcgaaagagt

SEQ ID NO: 316232 - DNA, 19 bp, Homo sapiens
  siRNA target sequence for KIAA0645 (NM_014662.1,1872-1890).
cggatgcccatgaagctta

SEQ ID NO: 316233 - DNA, 19 bp, Homo sapiens
  siRNA target sequence for KIAA0645 (NM_014662.1,1903-1921).
ggcgctggatgcacacttt

SEQ ID NO: 316234 - DNA, 19 bp, Homo sapiens
  siRNA target sequence for KIAA0645 (NM_014662.1,1904-1922).
gcgctggatgcacactttt

SEQ ID NO: 316235 - DNA, 19 bp, Homo sapiens
  siRNA target sequence for KIAA0645 (NM_014662.1,1958-1976).
ccaccagacccgacagaat

SEQ ID NO: 316236 - DNA, 19 bp, Homo sapiens
  siRNA target sequence for KIAA0645 (NM_014662.1,1959-1977).
caccagacccgacagaata

SEQ ID NO: 316237 - DNA, 19 bp, Homo sapiens
  siRNA target sequence for KIAA0645 (NM_014662.1,2030-2048).
gctgctggagttagcatat

SEQ ID NO: 316238 - DNA, 19 bp, Homo sapiens
  siRNA target sequence for KIAA0645 (NM_014662.1,2033-2051).
gctggagttagcatatcat

SEQ ID NO: 316239 - DNA, 19 bp, Homo sapiens
  siRNA target sequence for KIAA0645 (NM_014662.1,2036-2054).
ggagttagcatatcatgaa

SEQ ID NO: 316240 - DNA, 19 bp, Homo sapiens
  siRNA target sequence for KIAA0645 (NM_014662.1,2119-2137).
gaacagaggagctttctgt

SEQ ID NO: 316241 - DNA, 19 bp, Homo sapiens
  siRNA target sequence for KIAA0645 (NM_014662.1,2134-2152).
ctgtcggcctgcttagcaa

SEQ ID NO: 316242 - DNA, 19 bp, Homo sapiens
  siRNA target sequence for KIAA0645 (NM_014662.1,2196-2214).
ctagaggacagtgtttcta

SEQ ID NO: 316243 - DNA, 19 bp, Homo sapiens
  siRNA target sequence for KIAA0645 (NM_014662.1,2411-2429).
gacagcccagcaggtattt

SEQ ID NO: 316244 - DNA, 19 bp, Homo sapiens
  siRNA target sequence for KIAA0645 (NM_014662.1,2416-2434).
cccagcaggtatttgaaga

SEQ ID NO: 316245 - DNA, 19 bp, Homo sapiens
  siRNA target sequence for KIAA0645 (NM_014662.1,2451-2469).
ctcatgcagggctaccaaa

SEQ ID NO: 316246 - DNA, 19 bp, Homo sapiens
  siRNA target sequence for KIAA0645 (NM_014662.1,2522-2540).
gagcagtagcccactctat

SEQ ID NO: 316247 - DNA, 19 bp, Homo sapiens
  siRNA target sequence for KIAA0645 (NM_014662.1,2571-2589).
gaggaggaggaccagtatt

SEQ ID NO: 316248 - DNA, 19 bp, Homo sapiens
  siRNA target sequence for KIAA0645 (NM_014662.1,2602-2620).
gcagaacgttccacaaagt

SEQ ID NO: 316249 - DNA, 19 bp, Homo sapiens
  siRNA target sequence for KIAA0645 (NM_014662.1,2642-2660).
cacagtgacgcgatacctt

SEQ ID NO: 316250 - DNA, 19 bp, Homo sapiens
  siRNA target sequence for KIAA0645 (NM_014662.1,2651-2669).
gcgataccttcccaagtat

SEQ ID NO: 316251 - DNA, 19 bp, Homo sapiens
  siRNA target sequence for KIAA0645 (NM_014662.1,2785-2803).
ggaattacttagatcagta

SEQ ID NO: 316252 - DNA, 19 bp, Homo sapiens
  siRNA target sequence for KIAA0645 (NM_014662.1,2792-2810).
cttagatcagtatatctgt

SEQ ID NO: 316253 - DNA, 19 bp, Homo sapiens
  siRNA target sequence for KIAA0645 (NM_014662.1,2826-2844).
gacttcagcttaattgagt

SEQ ID NO: 316254 - DNA, 19 bp, Homo sapiens
  siRNA target sequence for KIAA0645 (NM_014662.1,2971-2989).
ggcaactcctggatggttt

SEQ ID NO: 316255 - DNA, 19 bp, Homo sapiens
  siRNA target sequence for KIAA0645 (NM_014662.1,3281-3299).
ggacagcccacgaaaggta

SEQ ID NO: 316256 - DNA, 19 bp, Homo sapiens
  siRNA target sequence for KIAA0645 (NM_014662.1,3282-3300).
gacagcccacgaaaggtat

SEQ ID NO: 316257 - DNA, 19 bp, Homo sapiens
  siRNA target sequence for KIAA0645 (NM_014662.1,3420-3438).
ggctactcctccacaaact

SEQ ID NO: 316258 - DNA, 19 bp, Homo sapiens
  siRNA target sequence for KIAA0645 (NM_014662.1,3706-3724).
cctggcggaccttcatcta

SEQ ID NO: 316259 - DNA, 19 bp, Homo sapiens
  siRNA target sequence for KIAA0645 (NM_014662.1,3726-3744).
ggcttctatttctacaaga

SEQ ID NO: 316260 - DNA, 19 bp, Homo sapiens
  siRNA target sequence for KIAA0645 (NM_014662.1,3872-3890).
gctcgtgcactctgagatt

SEQ ID NO: 316261 - DNA, 19 bp, Homo sapiens
  siRNA target sequence for KIAA0645 (NM_014662.1,3949-3967).
gctcctttagccgaagttt

SEQ ID NO: 316262 - DNA, 19 bp, Homo sapiens
  siRNA target sequence for KIAA0645 (NM_014662.1,3950-3968).
ctcctttagccgaagtttt

SEQ ID NO: 316263 - DNA, 19 bp, Homo sapiens
  siRNA target sequence for KIAA0645 (NM_014662.1,3980-3998).
ccaggcggcagcactttta

SEQ ID NO: 316264 - DNA, 19 bp, Homo sapiens
  siRNA target sequence for KIAA0645 (NM_014662.1,3983-4001).
ggcggcagcacttttagct

SEQ ID NO: 316265 - DNA, 19 bp, Homo sapiens
  siRNA target sequence for KIAA0645 (NM_014662.1,4067-4085).
ggagtggtgcagctgttat

SEQ ID NO: 316266 - DNA, 19 bp, Homo sapiens
  siRNA target sequence for KIAA0645 (NM_014662.1,4198-4216).
cctgtggcttcttgttagt

SEQ ID NO: 316267 - DNA, 19 bp, Homo sapiens
  siRNA target sequence for KIAA0645 (NM_014662.1,4321-4339).
gcagcgagcacctgtttga

SEQ ID NO: 316268 - DNA, 19 bp, Homo sapiens
  siRNA target sequence for KIAA0645 (NM_014662.1,4322-4340).
cagcgagcacctgtttgat

SEQ ID NO: 316269 - DNA, 19 bp, Homo sapiens
  siRNA target sequence for KIAA0645 (NM_014662.1,4328-4346).
gcacctgtttgatagcttt

SEQ ID NO: 316270 - DNA, 19 bp, Homo sapiens
  siRNA target sequence for KIAA0645 (NM_014662.1,4342-4360).
gctttgaacccgaaacgta

SEQ ID NO: 316271 - DNA, 19 bp, Homo sapiens
  siRNA target sequence for KIAA0645 (NM_014662.1,4402-4420).
ggtttgggtttgtacaaga

SEQ ID NO: 316272 - DNA, 19 bp, Homo sapiens
  siRNA target sequence for KIAA0645 (NM_014662.1,4403-4421).
gtttgggtttgtacaagat

SEQ ID NO: 316273 - DNA, 19 bp, Homo sapiens
  siRNA target sequence for KIAA0645 (NM_014662.1,4590-4608).
gagcgggtcggctacaact

SEQ ID NO: 316274 - DNA, 19 bp, Homo sapiens
  siRNA target sequence for KIAA0645 (NM_014662.1,4648-4666).
gcgccacaggggatgaaaa

SEQ ID NO: 316275 - DNA, 19 bp, Homo sapiens
  siRNA target sequence for KIAA0645 (NM_014662.1,4728-4746).
gtcacgttctggacaagtt

SEQ ID NO: 316276 - DNA, 19 bp, Homo sapiens
  siRNA target sequence for KIAA1365 (NM_020794.1,35-53).
ccaccaaacggaaaatcat

SEQ ID NO: 316277 - DNA, 19 bp, Homo sapiens
  siRNA target sequence for KIAA1365 (NM_020794.1,77-95).
gtttccgaggtgaagaaga

SEQ ID NO: 316278 - DNA, 19 bp, Homo sapiens
  siRNA target sequence for KIAA1365 (NM_020794.1,139-157).
gtgccaaaggaggtcttta

SEQ ID NO: 316279 - DNA, 19 bp, Homo sapiens
  siRNA target sequence for KIAA1365 (NM_020794.1,142-160).
ccaaaggaggtctttaact

SEQ ID NO: 316280 - DNA, 19 bp, Homo sapiens
  siRNA target sequence for KIAA1365 (NM_020794.1,143-161).
caaaggaggtctttaactt

SEQ ID NO: 316281 - DNA, 19 bp, Homo sapiens
  siRNA target sequence for KIAA1365 (NM_020794.1,170-188).
cattagaggagctttatct

SEQ ID NO: 316282 - DNA, 19 bp, Homo sapiens
  siRNA target sequence for KIAA1365 (NM_020794.1,208-226).
gaactacccaagcaattgt

SEQ ID NO: 316283 - DNA, 19 bp, Homo sapiens
  siRNA target sequence for KIAA1365 (NM_020794.1,233-251).
gtcaagctctacgaaaact

SEQ ID NO: 316284 - DNA, 19 bp, Homo sapiens
  siRNA target sequence for KIAA1365 (NM_020794.1,238-256).
gctctacgaaaactaagta

SEQ ID NO: 316285 - DNA, 19 bp, Homo sapiens
  siRNA target sequence for KIAA1365 (NM_020794.1,239-257).
ctctacgaaaactaagtat

SEQ ID NO: 316286 - DNA, 19 bp, Homo sapiens
  siRNA target sequence for KIAA1365 (NM_020794.1,284-302).
caaccactattgctagttt

SEQ ID NO: 316287 - DNA, 19 bp, Homo sapiens
  siRNA target sequence for KIAA1365 (NM_020794.1,287-305).
ccactattgctagtttagt

SEQ ID NO: 316288 - DNA, 19 bp, Homo sapiens
  siRNA target sequence for KIAA1365 (NM_020794.1,288-306).
cactattgctagtttagtt

SEQ ID NO: 316289 - DNA, 19 bp, Homo sapiens
  siRNA target sequence for KIAA1365 (NM_020794.1,295-313).
gctagtttagttaatctta

SEQ ID NO: 316290 - DNA, 19 bp, Homo sapiens
  siRNA target sequence for KIAA1365 (NM_020794.1,329-347).
gtaaaaatggtgtacaaga

SEQ ID NO: 316291 - DNA, 19 bp, Homo sapiens
  siRNA target sequence for KIAA1365 (NM_020794.1,368-386).
gctgtaagtgtttaacaat

SEQ ID NO: 316292 - DNA, 19 bp, Homo sapiens
  siRNA target sequence for KIAA1365 (NM_020794.1,398-416).
gtgtcaatcccatttctaa

SEQ ID NO: 316293 - DNA, 19 bp, Homo sapiens
  siRNA target sequence for KIAA1365 (NM_020794.1,465-483).
gaatgacgcctttcttgaa

SEQ ID NO: 316294 - DNA, 19 bp, Homo sapiens
  siRNA target sequence for KIAA1365 (NM_020794.1,519-537).
gcggatcttggagttaaga

SEQ ID NO: 316295 - DNA, 19 bp, Homo sapiens
  siRNA target sequence for KIAA1365 (NM_020794.1,521-539).
ggatcttggagttaagaga

SEQ ID NO: 316296 - DNA, 19 bp, Homo sapiens
  siRNA target sequence for KIAA1365 (NM_020794.1,522-540).
gatcttggagttaagagaa

SEQ ID NO: 316297 - DNA, 19 bp, Homo sapiens
  siRNA target sequence for KIAA1365 (NM_020794.1,593-611).
gacttgacctaggcaataa

SEQ ID NO: 316298 - DNA, 19 bp, Homo sapiens
  siRNA target sequence for KIAA1365 (NM_020794.1,598-616).
gacctaggcaataatgaat

SEQ ID NO: 316299 - DNA, 19 bp, Homo sapiens
  siRNA target sequence for KIAA1365 (NM_020794.1,618-636).
cggtgagctgcctgaagtt

SEQ ID NO: 316300 - DNA, 19 bp, Homo sapiens
  siRNA target sequence for KIAA1365 (NM_020794.1,628-646).
cctgaagttctggatcaaa

SEQ ID NO: 316301 - DNA, 19 bp, Homo sapiens
  siRNA target sequence for KIAA1365 (NM_020794.1,660-678).
ggagttatggatggataat

SEQ ID NO: 316302 - DNA, 19 bp, Homo sapiens
  siRNA target sequence for KIAA1365 (NM_020794.1,701-719).
ggtctatagggaagttaaa

SEQ ID NO: 316303 - DNA, 19 bp, Homo sapiens
  siRNA target sequence for KIAA1365 (NM_020794.1,733-751).
ctggatatgtcaaaaaaca

SEQ ID NO: 316304 - DNA, 19 bp, Homo sapiens
  siRNA target sequence for KIAA1365 (NM_020794.1,735-753).
ggatatgtcaaaaaacaga

SEQ ID NO: 316305 - DNA, 19 bp, Homo sapiens
  siRNA target sequence for KIAA1365 (NM_020794.1,793-811).
cttgaggacctcttattgt

SEQ ID NO: 316306 - DNA, 19 bp, Homo sapiens
  siRNA target sequence for KIAA1365 (NM_020794.1,796-814).
gaggacctcttattgtcat

SEQ ID NO: 316307 - DNA, 19 bp, Homo sapiens
  siRNA target sequence for KIAA1365 (NM_020794.1,801-819).
cctcttattgtcatccaat

SEQ ID NO: 316308 - DNA, 19 bp, Homo sapiens
  siRNA target sequence for KIAA1365 (NM_020794.1,825-843).
gcaacaattgcctgattct

SEQ ID NO: 316309 - DNA, 19 bp, Homo sapiens
  siRNA target sequence for KIAA1365 (NM_020794.1,826-844).
caacaattgcctgattcta

SEQ ID NO: 316310 - DNA, 19 bp, Homo sapiens
  siRNA target sequence for KIAA1365 (NM_020794.1,842-860).
ctataggacttttgaaaaa

SEQ ID NO: 316311 - DNA, 19 bp, Homo sapiens
  siRNA target sequence for KIAA1365 (NM_020794.1,877-895).
gtagatgacaatcaactta

SEQ ID NO: 316312 - DNA, 19 bp, Homo sapiens
  siRNA target sequence for KIAA1365 (NM_020794.1,880-898).
gatgacaatcaacttacaa

SEQ ID NO: 316313 - DNA, 19 bp, Homo sapiens
  siRNA target sequence for KIAA1365 (NM_020794.1,885-903).
caatcaacttacaatgcta

SEQ ID NO: 316314 - DNA, 19 bp, Homo sapiens
  siRNA target sequence for KIAA1365 (NM_020794.1,900-918).
gctacccaatacaattgga

SEQ ID NO: 316315 - DNA, 19 bp, Homo sapiens
  siRNA target sequence for KIAA1365 (NM_020794.1,901-919).
ctacccaatacaattggaa

SEQ ID NO: 316316 - DNA, 19 bp, Homo sapiens
  siRNA target sequence for KIAA1365 (NM_020794.1,963-981).
ggagtcactaccttctact

SEQ ID NO: 316317 - DNA, 19 bp, Homo sapiens
  siRNA target sequence for KIAA1365 (NM_020794.1,964-982).
gagtcactaccttctacta

SEQ ID NO: 316318 - DNA, 19 bp, Homo sapiens
  siRNA target sequence for KIAA1365 (NM_020794.1,966-984).
gtcactaccttctactatt

SEQ ID NO: 316319 - DNA, 19 bp, Homo sapiens
  siRNA target sequence for KIAA1365 (NM_020794.1,1004-1022).
ggacattagcagttgatga

SEQ ID NO: 316320 - DNA, 19 bp, Homo sapiens
  siRNA target sequence for KIAA1365 (NM_020794.1,1007-1025).
cattagcagttgatgagaa

SEQ ID NO: 316321 - DNA, 19 bp, Homo sapiens
  siRNA target sequence for KIAA1365 (NM_020794.1,1080-1098).
gtctctacgctccaacaaa

SEQ ID NO: 316322 - DNA, 19 bp, Homo sapiens
  siRNA target sequence for KIAA1365 (NM_020794.1,1082-1100).
ctctacgctccaacaaatt

SEQ ID NO: 316323 - DNA, 19 bp, Homo sapiens
  siRNA target sequence for KIAA1365 (NM_020794.1,1087-1105).
cgctccaacaaattagaat

SEQ ID NO: 316324 - DNA, 19 bp, Homo sapiens
  siRNA target sequence for KIAA1365 (NM_020794.1,1243-1261).
gcccttatccctttacaaa

SEQ ID NO: 316325 - DNA, 19 bp, Homo sapiens
  siRNA target sequence for KIAA1365 (NM_020794.1,1245-1263).
ccttatccctttacaaaca

SEQ ID NO: 316326 - DNA, 19 bp, Homo sapiens
  siRNA target sequence for KIAA1365 (NM_020794.1,1276-1294).
gaaacaaagcaaagagtat

SEQ ID NO: 316327 - DNA, 19 bp, Homo sapiens
  siRNA target sequence for KIAA1365 (NM_020794.1,1285-1303).
caaagagtattgactaact

SEQ ID NO: 316328 - DNA, 19 bp, Homo sapiens
  siRNA target sequence for KIAA1365 (NM_020794.1,1322-1340).
ctcgtggtgatgaagattt

SEQ ID NO: 316329 - DNA, 19 bp, Homo sapiens
  siRNA target sequence for KIAA1365 (NM_020794.1,1493-1511).
gccagcgtgggattactct

SEQ ID NO: 316330 - DNA, 19 bp, Homo sapiens
  siRNA target sequence for KIAA1365 (NM_020794.1,1606-1624).
ctggcatggggttgtataa

SEQ ID NO: 316331 - DNA, 19 bp, Homo sapiens
  siRNA target sequence for KIAA1365 (NM_020794.1,1608-1626).
ggcatggggttgtataagt

SEQ ID NO: 316332 - DNA, 19 bp, Homo sapiens
  siRNA target sequence for KIAA1365 (NM_020794.1,1700-1718).
gtggcagacaggttgaaat

SEQ ID NO: 316333 - DNA, 19 bp, Homo sapiens
  siRNA target sequence for KIAA1365 (NM_020794.1,1746-1764).
cccagaggatttaaagaat

SEQ ID NO: 316334 - DNA, 19 bp, Homo sapiens
  siRNA target sequence for KIAA1365 (NM_020794.1,1807-1825).
ggagtgcgtgttgagaatt

SEQ ID NO: 316335 - DNA, 19 bp, Homo sapiens
  siRNA target sequence for KIAA1365 (NM_020794.1,1810-1828).
gtgcgtgttgagaattcaa

SEQ ID NO: 316336 - DNA, 19 bp, Homo sapiens
  siRNA target sequence for KIAA1365 (NM_020794.1,1812-1830).
gcgtgttgagaattcaaat

SEQ ID NO: 316337 - DNA, 19 bp, Homo sapiens
  siRNA target sequence for KIAA1365 (NM_020794.1,1844-1862).
cggagcaaactgtgaaaga

SEQ ID NO: 316338 - DNA, 19 bp, Homo sapiens
  siRNA target sequence for KIAA1365 (NM_020794.1,1885-1903).
gtagccccaaaggagatta

SEQ ID NO: 316339 - DNA, 19 bp, Homo sapiens
  siRNA target sequence for KIAA1365 (NM_020794.1,1924-1942).
catccagctaatgaaatga

SEQ ID NO: 316340 - DNA, 19 bp, Homo sapiens
  siRNA target sequence for KIAA1365 (NM_020794.1,1949-1967).
gggaacttcacccttcatt

SEQ ID NO: 316341 - DNA, 19 bp, Homo sapiens
  siRNA target sequence for KIAA1365 (NM_020794.1,2004-2022).
gctagggaaggacaaaaaa

SEQ ID NO: 316342 - DNA, 19 bp, Homo sapiens
  siRNA target sequence for KIAA1365 (NM_020794.1,2127-2145).
ctctaatacccgggttaaa

SEQ ID NO: 316343 - DNA, 19 bp, Homo sapiens
  siRNA target sequence for KIAA1365 (NM_020794.1,2129-2147).
ctaatacccgggttaaagt

SEQ ID NO: 316344 - DNA, 19 bp, Homo sapiens
  siRNA target sequence for KIAA1365 (NM_020794.1,2167-2185).
gctaaagatgcagtacata

SEQ ID NO: 316345 - DNA, 19 bp, Homo sapiens
  siRNA target sequence for KIAA1365 (NM_020794.1,2222-2240).
cacagcctcttgattcaaa

SEQ ID NO: 316346 - DNA, 19 bp, Homo sapiens
  siRNA target sequence for KIAA1365 (NM_020794.1,2301-2319).
gctgcccatgagtgatact

SEQ ID NO: 316347 - DNA, 19 bp, Homo sapiens
  siRNA target sequence for KIAA1365 (NM_020794.1,2302-2320).
ctgcccatgagtgatactt

SEQ ID NO: 316348 - DNA, 19 bp, Homo sapiens
  siRNA target sequence for KIAA1365 (NM_020794.1,2305-2323).
cccatgagtgatactttca

SEQ ID NO: 316349 - DNA, 19 bp, Homo sapiens
  siRNA target sequence for KIAA1365 (NM_020794.1,2334-2352).
gactgatggctcgcattat

SEQ ID NO: 316350 - DNA, 19 bp, Homo sapiens
  siRNA target sequence for KIAA1365 (NM_020794.1,2336-2354).
ctgatggctcgcattatga

SEQ ID NO: 316351 - DNA, 19 bp, Homo sapiens
  siRNA target sequence for KIAA1365 (NM_020794.1,2338-2356).
gatggctcgcattatgaca

SEQ ID NO: 316352 - DNA, 19 bp, Homo sapiens
  siRNA target sequence for KIAA1365 (NM_020794.1,2386-2404).
gccgagaatgccaacagta

SEQ ID NO: 316353 - DNA, 19 bp, Homo sapiens
  siRNA target sequence for KIAA1365 (NM_020794.1,2397-2415).
caacagtaatcctctctta

SEQ ID NO: 316354 - DNA, 19 bp, Homo sapiens
  siRNA target sequence for KIAA1365 (NM_020794.1,2407-2425).
cctctcttaagttcgaaat

SEQ ID NO: 316355 - DNA, 19 bp, Homo sapiens
  siRNA target sequence for KIAA1365 (NM_020794.1,2412-2430).
cttaagttcgaaatctaga

SEQ ID NO: 316356 - DNA, 19 bp, Homo sapiens
  siRNA target sequence for KIAA1365 (NM_020794.1,2463-2481).
caggcaagacaggattgtt

SEQ ID NO: 316357 - DNA, 19 bp, Homo sapiens
  siRNA target sequence for KIAA1365 (NM_020794.1,2536-2554).
gtgcctccttccaatcctt

SEQ ID NO: 316358 - DNA, 19 bp, Homo sapiens
  siRNA target sequence for KIAA1365 (NM_020794.1,2573-2591).
cccctagtccgtttgaaga

SEQ ID NO: 316359 - DNA, 19 bp, Homo sapiens
  siRNA target sequence for KIAA1365 (NM_020794.1,2595-2613).
gaccgcttttccttccaaa

SEQ ID NO: 316360 - DNA, 19 bp, Homo sapiens
  siRNA target sequence for KIAA1365 (NM_020794.1,2656-2674).
gaacatataaaggaatcta

SEQ ID NO: 316361 - DNA, 19 bp, Homo sapiens
  siRNA target sequence for KIAA1365 (NM_020794.1,2702-2720).
gcgtaccatgggagtatca

SEQ ID NO: 316362 - DNA, 19 bp, Homo sapiens
  siRNA target sequence for KIAA1365 (NM_020794.1,2703-2721).
cgtaccatgggagtatcat

SEQ ID NO: 316363 - DNA, 19 bp, Homo sapiens
  siRNA target sequence for KIAA1365 (NM_020794.1,2707-2725).
ccatgggagtatcatgatt

SEQ ID NO: 316364 - DNA, 19 bp, Homo sapiens
  siRNA target sequence for KIAA1365 (NM_020794.1,2711-2729).
gggagtatcatgattccaa

SEQ ID NO: 316365 - DNA, 19 bp, Homo sapiens
  siRNA target sequence for KIAA1365 (NM_020794.1,2731-2749).
cccaacaggagtcttagta

SEQ ID NO: 316366 - DNA, 19 bp, Homo sapiens
  siRNA target sequence for KIAA1365 (NM_020794.1,2732-2750).
ccaacaggagtcttagtaa

SEQ ID NO: 316367 - DNA, 19 bp, Homo sapiens
  siRNA target sequence for KIAA1365 (NM_020794.1,2876-2894).
gtatcgatgagattgacat

SEQ ID NO: 316368 - DNA, 19 bp, Homo sapiens
  siRNA target sequence for KIAA1365 (NM_020794.1,2881-2899).
gatgagattgacattggta

SEQ ID NO: 316369 - DNA, 19 bp, Homo sapiens
  siRNA target sequence for KIAA1365 (NM_020794.1,2907-2925).
ggtgtataacataccatta

SEQ ID NO: 316370 - DNA, 19 bp, Homo sapiens
  siRNA target sequence for KIAA1365 (NM_020794.1,2910-2928).
gtataacataccattagaa

SEQ ID NO: 316371 - DNA, 19 bp, Homo sapiens
  siRNA target sequence for KIAA1365 (NM_020794.1,2920-2938).
ccattagaaaactatgctt

SEQ ID NO: 316372 - DNA, 19 bp, Homo sapiens
  siRNA target sequence for KIAA1365 (NM_020794.1,2941-2959).
gggagtgatcacttaggaa

SEQ ID NO: 316373 - DNA, 19 bp, Homo sapiens
  siRNA target sequence for KIAA1365 (NM_020794.1,2962-2980).
cacgaacgaccggataaga

SEQ ID NO: 316374 - DNA, 19 bp, Homo sapiens
  siRNA target sequence for KIAA1365 (NM_020794.1,3051-3069).
gctcacctacggaagtagt

SEQ ID NO: 316375 - DNA, 19 bp, Homo sapiens
  siRNA target sequence for KIAA1365 (NM_020794.1,3117-3135).
gtttgaccaaagcttcaat

SEQ ID NO: 316376 - DNA, 19 bp, Homo sapiens
  siRNA target sequence for KIAA1365 (NM_020794.1,3171-3189).
gataccacccccttttcaa

SEQ ID NO: 316377 - DNA, 19 bp, Homo sapiens
  siRNA target sequence for KIAA1365 (NM_020794.1,3225-3243).
catcgccaaggatttgatt

SEQ ID NO: 316378 - DNA, 19 bp, Homo sapiens
  siRNA target sequence for KIAA1365 (NM_020794.1,3268-3286).
ccaccgatggagcaaatgt

SEQ ID NO: 316379 - DNA, 19 bp, Homo sapiens
  siRNA target sequence for KIAA1365 (NM_020794.1,3271-3289).
ccgatggagcaaatgtttt

SEQ ID NO: 316380 - DNA, 19 bp, Homo sapiens
  siRNA target sequence for KIAA1365 (NM_020794.1,3385-3403).
ctggtgagcgccacagaaa

SEQ ID NO: 316381 - DNA, 19 bp, Homo sapiens
  siRNA target sequence for KIAA1365 (NM_020794.1,3588-3606).
gggaagttttccggttaaa

SEQ ID NO: 316382 - DNA, 19 bp, Homo sapiens
  siRNA target sequence for KIAA1365 (NM_020794.1,3593-3611).
gttttccggttaaaaacct

SEQ ID NO: 316383 - DNA, 19 bp, Homo sapiens
  siRNA target sequence for KIAA1365 (NM_020794.1,3641-3659).
gctacagtacagagagtta

SEQ ID NO: 316384 - DNA, 19 bp, Homo sapiens
  siRNA target sequence for KIAA1365 (NM_020794.1,3732-3750).
ctataacttgggtaactat

SEQ ID NO: 316385 - DNA, 19 bp, Homo sapiens
  siRNA target sequence for KIAA1365 (NM_020794.1,3751-3769).
ggtgacaagccatcagata

SEQ ID NO: 316386 - DNA, 19 bp, Homo sapiens
  siRNA target sequence for KIAA1365 (NM_020794.1,3842-3860).
gacaacagctgcttagaca

SEQ ID NO: 316387 - DNA, 19 bp, Homo sapiens
  siRNA target sequence for KIAA1365 (NM_020794.1,3844-3862).
caacagctgcttagacata

SEQ ID NO: 316388 - DNA, 19 bp, Homo sapiens
  siRNA target sequence for KIAA1365 (NM_020794.1,3865-3883).
gaagctagacggttagaca

SEQ ID NO: 316389 - DNA, 19 bp, Homo sapiens
  siRNA target sequence for KIAA1365 (NM_020794.1,3924-3942).
gctgccctatggaggtatt

SEQ ID NO: 316390 - DNA, 19 bp, Homo sapiens
  siRNA target sequence for KIAA1365 (NM_020794.1,3925-3943).
ctgccctatggaggtattt

SEQ ID NO: 316391 - DNA, 19 bp, Homo sapiens
  siRNA target sequence for KIAA1365 (NM_020794.1,3958-3976).
ggcagaagcatgactttaa

SEQ ID NO: 316392 - DNA, 19 bp, Homo sapiens
  siRNA target sequence for KIAA1365 (NM_020794.1,3959-3977).
gcagaagcatgactttaaa

SEQ ID NO: 316393 - DNA, 19 bp, Homo sapiens
  siRNA target sequence for KIAA1365 (NM_020794.1,3981-3999).
gcagactaagtctaaattt

SEQ ID NO: 316394 - DNA, 19 bp, Homo sapiens
  siRNA target sequence for KIAA1365 (NM_020794.1,3986-4004).
ctaagtctaaatttgatca

SEQ ID NO: 316395 - DNA, 19 bp, Homo sapiens
  siRNA target sequence for KIAA1365 (NM_020794.1,3992-4010).
ctaaatttgatcatcaaga

SEQ ID NO: 316396 - DNA, 19 bp, Homo sapiens
  siRNA target sequence for KIAA1365 (NM_020794.1,4120-4138).
gtacctccggacaccatta

SEQ ID NO: 316397 - DNA, 19 bp, Homo sapiens
  siRNA target sequence for KIAA1365 (NM_020794.1,4123-4141).
cctccggacaccattacta

SEQ ID NO: 316398 - DNA, 19 bp, Homo sapiens
  siRNA target sequence for KIAA1365 (NM_020794.1,4124-4142).
ctccggacaccattactaa

SEQ ID NO: 316399 - DNA, 19 bp, Homo sapiens
  siRNA target sequence for KIAA1365 (NM_020794.1,4126-4144).
ccggacaccattactaaga

SEQ ID NO: 316400 - DNA, 19 bp, Homo sapiens
  siRNA target sequence for KIAA1365 (NM_020794.1,4127-4145).
cggacaccattactaagaa

SEQ ID NO: 316401 - DNA, 19 bp, Homo sapiens
  siRNA target sequence for KIAA1365 (NM_020794.1,4212-4230).
gccgtatgaaggaaatata

SEQ ID NO: 316402 - DNA, 19 bp, Homo sapiens
  siRNA target sequence for KIAA1365 (NM_020794.1,4213-4231).
ccgtatgaaggaaatataa

SEQ ID NO: 316403 - DNA, 19 bp, Homo sapiens
  siRNA target sequence for KIAA1365 (NM_020794.1,4259-4277).
caccattgcctattcagat

SEQ ID NO: 316404 - DNA, 19 bp, Homo sapiens
  siRNA target sequence for KIAA1365 (NM_020794.1,4308-4326).
gcctggacggtgcttaatt

SEQ ID NO: 316405 - DNA, 19 bp, Homo sapiens
  siRNA target sequence for KIAA1365 (NM_020794.1,4310-4328).
ctggacggtgcttaattca

SEQ ID NO: 316406 - DNA, 19 bp, Homo sapiens
  siRNA target sequence for KIAA1365 (NM_020794.1,4315-4333).
cggtgcttaattcaaacta

SEQ ID NO: 316407 - DNA, 19 bp, Homo sapiens
  siRNA target sequence for KIAA1365 (NM_020794.1,4344-4362).
gagtatggatggatatcca

SEQ ID NO: 316408 - DNA, 19 bp, Homo sapiens
  siRNA target sequence for KIAA1365 (NM_020794.1,4393-4411).
cctggccttggatttagta

SEQ ID NO: 316409 - DNA, 19 bp, Homo sapiens
  siRNA target sequence for KIAA1365 (NM_020794.1,4396-4414).
ggccttggatttagtatca

SEQ ID NO: 316410 - DNA, 19 bp, Homo sapiens
  siRNA target sequence for KIAA1365 (NM_020794.1,4451-4469).
cttctgacaagggtatctt

SEQ ID NO: 316411 - DNA, 19 bp, Homo sapiens
  siRNA target sequence for KIAA1365 (NM_020794.1,4527-4545).
gatccttcaggcaaatgga

SEQ ID NO: 316412 - DNA, 19 bp, Homo sapiens
  siRNA target sequence for KIAA1365 (NM_020794.1,4555-4573).
gtacatatggaacatgaaa

SEQ ID NO: 316413 - DNA, 19 bp, Homo sapiens
  siRNA target sequence for KIAA1444 (NM_032512.1,294-312).
ccccaatcagccatgagta

SEQ ID NO: 316414 - DNA, 19 bp, Homo sapiens
  siRNA target sequence for KIAA1444 (NM_032512.1,295-313).
cccaatcagccatgagtat

SEQ ID NO: 316415 - DNA, 19 bp, Homo sapiens
  siRNA target sequence for KIAA1444 (NM_032512.1,296-314).
ccaatcagccatgagtatt

SEQ ID NO: 316416 - DNA, 19 bp, Homo sapiens
  siRNA target sequence for KIAA1444 (NM_032512.1,297-315).
caatcagccatgagtatta

SEQ ID NO: 316417 - DNA, 19 bp, Homo sapiens
  siRNA target sequence for KIAA1444 (NM_032512.1,454-472).
ggaggacctgggcatttat

SEQ ID NO: 316418 - DNA, 19 bp, Homo sapiens
  siRNA target sequence for KIAA1444 (NM_032512.1,715-733).
ggagctgcgtgctcgtaaa

SEQ ID NO: 316419 - DNA, 19 bp, Homo sapiens
  siRNA target sequence for KIAA1444 (NM_032512.1,719-737).
ctgcgtgctcgtaaactga

SEQ ID NO: 316420 - DNA, 19 bp, Homo sapiens
  siRNA target sequence for KIAA1444 (NM_032512.1,721-739).
gcgtgctcgtaaactgaaa

SEQ ID NO: 316421 - DNA, 19 bp, Homo sapiens
  siRNA target sequence for KIAA1444 (NM_032512.1,722-740).
cgtgctcgtaaactgaaat

SEQ ID NO: 316422 - DNA, 19 bp, Homo sapiens
  siRNA target sequence for KIAA1444 (NM_032512.1,922-940).
gggaagcctgcgcaagttt

SEQ ID NO: 316423 - DNA, 19 bp, Homo sapiens
  siRNA target sequence for KIAA1444 (NM_032512.1,962-980).
cagagccgggacttccatt

SEQ ID NO: 316424 - DNA, 19 bp, Homo sapiens
  siRNA target sequence for KIAA1444 (NM_032512.1,2162-2180).
ctgagccaccgcaaaacca

SEQ ID NO: 316425 - DNA, 19 bp, Homo sapiens
  siRNA target sequence for KIAA1444 (NM_032512.1,2168-2186).
caccgcaaaaccatgaaga

SEQ ID NO: 316426 - DNA, 19 bp, Homo sapiens
  siRNA target sequence for LMO7 (NM_005358.3,1299-1317).
cagttggatgtcctatgat

SEQ ID NO: 316427 - DNA, 19 bp, Homo sapiens
  siRNA target sequence for LMO7 (NM_005358.3,1301-1319).
gttggatgtcctatgatgt

SEQ ID NO: 316428 - DNA, 19 bp, Homo sapiens
  siRNA target sequence for LMO7 (NM_005358.3,1304-1322).
ggatgtcctatgatgttct

SEQ ID NO: 316429 - DNA, 19 bp, Homo sapiens
  siRNA target sequence for LMO7 (NM_005358.3,1338-1356).
gctcggagctctggaaatt

SEQ ID NO: 316430 - DNA, 19 bp, Homo sapiens
  siRNA target sequence for LMO7 (NM_005358.3,1391-1409).
gtgtgggttggctgtatct

SEQ ID NO: 316431 - DNA, 19 bp, Homo sapiens
  siRNA target sequence for LMO7 (NM_005358.3,1422-1440).
ctgcagcaaaaaagatata

SEQ ID NO: 316432 - DNA, 19 bp, Homo sapiens
  siRNA target sequence for LMO7 (NM_005358.3,1543-1561).
gttctgctgtgtgatttga

SEQ ID NO: 316433 - DNA, 19 bp, Homo sapiens
  siRNA target sequence for LMO7 (NM_005358.3,1553-1571).
gtgatttgattaataagct

SEQ ID NO: 316434 - DNA, 19 bp, Homo sapiens
  siRNA target sequence for LMO7 (NM_005358.3,1570-1588).
cttaaacctggcgtcatta

SEQ ID NO: 316435 - DNA, 19 bp, Homo sapiens
  siRNA target sequence for LMO7 (NM_005358.3,1576-1594).
cctggcgtcattaagaaga

SEQ ID NO: 316436 - DNA, 19 bp, Homo sapiens
  siRNA target sequence for LMO7 (NM_005358.3,1579-1597).
ggcgtcattaagaagatca

SEQ ID NO: 316437 - DNA, 19 bp, Homo sapiens
  siRNA target sequence for LMO7 (NM_005358.3,1580-1598).
gcgtcattaagaagatcaa

SEQ ID NO: 316438 - DNA, 19 bp, Homo sapiens
  siRNA target sequence for LMO7 (NM_005358.3,1612-1630).
ccaatagcaggattggata

SEQ ID NO: 316439 - DNA, 19 bp, Homo sapiens
  siRNA target sequence for LMO7 (NM_005358.3,1613-1631).
caatagcaggattggataa

SEQ ID NO: 316440 - DNA, 19 bp, Homo sapiens
  siRNA target sequence for LMO7 (NM_005358.3,1622-1640).
gattggataatataaacgt

SEQ ID NO: 316441 - DNA, 19 bp, Homo sapiens
  siRNA target sequence for LMO7 (NM_005358.3,1627-1645).
gataatataaacgttttct

SEQ ID NO: 316442 - DNA, 19 bp, Homo sapiens
  siRNA target sequence for LMO7 (NM_005358.3,1652-1670).
cttgtgaacagattggatt

SEQ ID NO: 316443 - DNA, 19 bp, Homo sapiens
  siRNA target sequence for LMO7 (NM_005358.3,1743-1761).
gactgacaggagagtgaaa

SEQ ID NO: 316444 - DNA, 19 bp, Homo sapiens
  siRNA target sequence for LMO7 (NM_005358.3,1801-1819).
caaagcaacccgtactata

SEQ ID NO: 316445 - DNA, 19 bp, Homo sapiens
  siRNA target sequence for LMO7 (NM_005358.3,1806-1824).
caacccgtactataatggt

SEQ ID NO: 316446 - DNA, 19 bp, Homo sapiens
  siRNA target sequence for LMO7 (NM_005358.3,1822-1840).
ggtccccatcttaatttga

SEQ ID NO: 316447 - DNA, 19 bp, Homo sapiens
  siRNA target sequence for LMO7 (NM_005358.3,1943-1961).
gtcctgaacgtggagaatt

SEQ ID NO: 316448 - DNA, 19 bp, Homo sapiens
  siRNA target sequence for LMO7 (NM_005358.3,1967-1985).
ctcctccaaggcaccataa

SEQ ID NO: 316449 - DNA, 19 bp, Homo sapiens
  siRNA target sequence for LMO7 (NM_005358.3,1969-1987).
cctccaaggcaccataaga

SEQ ID NO: 316450 - DNA, 19 bp, Homo sapiens
  siRNA target sequence for LMO7 (NM_005358.3,2019-2037).
gggctcgaggtcattgaca

SEQ ID NO: 316451 - DNA, 19 bp, Homo sapiens
  siRNA target sequence for LMO7 (NM_005358.3,2020-2038).
ggctcgaggtcattgacaa

SEQ ID NO: 316452 - DNA, 19 bp, Homo sapiens
  siRNA target sequence for LMO7 (NM_005358.3,2070-2088).
gcgtgaaggttttgaaagt

SEQ ID NO: 316453 - DNA, 19 bp, Homo sapiens
  siRNA target sequence for LMO7 (NM_005358.3,2089-2107).
gacacagattcggaattta

SEQ ID NO: 316454 - DNA, 19 bp, Homo sapiens
  siRNA target sequence for LMO7 (NM_005358.3,2093-2111).
cagattcggaatttacatt

SEQ ID NO: 316455 - DNA, 19 bp, Homo sapiens
  siRNA target sequence for LMO7 (NM_005358.3,2134-2152).
gatgatatgtcgtatcgaa

SEQ ID NO: 316456 - DNA, 19 bp, Homo sapiens
  siRNA target sequence for LMO7 (NM_005358.3,2175-2193).
gactgcgttacccttcaat

SEQ ID NO: 316457 - DNA, 19 bp, Homo sapiens
  siRNA target sequence for LMO7 (NM_005358.3,2179-2197).
gcgttacccttcaatcgtt

SEQ ID NO: 316458 - DNA, 19 bp, Homo sapiens
  siRNA target sequence for LMO7 (NM_005358.3,2180-2198).
cgttacccttcaatcgttt

SEQ ID NO: 316459 - DNA, 19 bp, Homo sapiens
  siRNA target sequence for LMO7 (NM_005358.3,2181-2199).
gttacccttcaatcgtttt

SEQ ID NO: 316460 - DNA, 19 bp, Homo sapiens
  siRNA target sequence for LMO7 (NM_005358.3,2269-2287).
gaggataacagaagaagtt

SEQ ID NO: 316461 - DNA, 19 bp, Homo sapiens
  siRNA target sequence for LMO7 (NM_005358.3,2289-2307).
ggcaagcccggtttataca

SEQ ID NO: 316462 - DNA, 19 bp, Homo sapiens
  siRNA target sequence for LMO7 (NM_005358.3,2291-2309).
caagcccggtttatacaga

SEQ ID NO: 316463 - DNA, 19 bp, Homo sapiens
  siRNA target sequence for LMO7 (NM_005358.3,2382-2400).
cagcgcagaagatgttcaa

SEQ ID NO: 316464 - DNA, 19 bp, Homo sapiens
  siRNA target sequence for LMO7 (NM_005358.3,2384-2402).
gcgcagaagatgttcaaaa

SEQ ID NO: 316465 - DNA, 19 bp, Homo sapiens
  siRNA target sequence for LMO7 (NM_005358.3,2493-2511).
gaaagatcgtcgaaaaagt

SEQ ID NO: 316466 - DNA, 19 bp, Homo sapiens
  siRNA target sequence for LMO7 (NM_005358.3,2497-2515).
gatcgtcgaaaaagttaca

SEQ ID NO: 316467 - DNA, 19 bp, Homo sapiens
  siRNA target sequence for LMO7 (NM_005358.3,2563-2581).
caggcacttgagaagtcta

SEQ ID NO: 316468 - DNA, 19 bp, Homo sapiens
  siRNA target sequence for LMO7 (NM_005358.3,2588-2606).
gctctaagacgtttaagga

SEQ ID NO: 316469 - DNA, 19 bp, Homo sapiens
  siRNA target sequence for LMO7 (NM_005358.3,2589-2607).
ctctaagacgtttaaggaa

SEQ ID NO: 316470 - DNA, 19 bp, Homo sapiens
  siRNA target sequence for LMO7 (NM_005358.3,2591-2609).
ctaagacgtttaaggaaat

SEQ ID NO: 316471 - DNA, 19 bp, Homo sapiens
  siRNA target sequence for LMO7 (NM_005358.3,2619-2637).
cagggaatcccaaaatcaa

SEQ ID NO: 316472 - DNA, 19 bp, Homo sapiens
  siRNA target sequence for LMO7 (NM_005358.3,2660-2678).
ggagaatgtattcttttga

SEQ ID NO: 316473 - DNA, 19 bp, Homo sapiens
  siRNA target sequence for LMO7 (NM_005358.3,2696-2714).
gaaagcgaccccctacaat

SEQ ID NO: 316474 - DNA, 19 bp, Homo sapiens
  siRNA target sequence for LMO7 (NM_005358.3,2820-2838).
ggaccgtgtaacaactgaa

SEQ ID NO: 316475 - DNA, 19 bp, Homo sapiens
  siRNA target sequence for LMO7 (NM_005358.3,2821-2839).
gaccgtgtaacaactgaaa

SEQ ID NO: 316476 - DNA, 19 bp, Homo sapiens
  siRNA target sequence for LMO7 (NM_005358.3,2825-2843).
gtgtaacaactgaaattca

SEQ ID NO: 316477 - DNA, 19 bp, Homo sapiens
  siRNA target sequence for LMO7 (NM_005358.3,2899-2917).
cgttcacggagcacacaaa

SEQ ID NO: 316478 - DNA, 19 bp, Homo sapiens
  siRNA target sequence for LMO7 (NM_005358.3,2903-2921).
cacggagcacacaaatgga

SEQ ID NO: 316479 - DNA, 19 bp, Homo sapiens
  siRNA target sequence for LMO7 (NM_005358.3,3072-3090).
gtataatggagatgttgaa

SEQ ID NO: 316480 - DNA, 19 bp, Homo sapiens
  siRNA target sequence for LMO7 (NM_005358.3,3150-3168).
ccaactggcttcaagctta

SEQ ID NO: 316481 - DNA, 19 bp, Homo sapiens
  siRNA target sequence for LMO7 (NM_005358.3,3151-3169).
caactggcttcaagcttat

SEQ ID NO: 316482 - DNA, 19 bp, Homo sapiens
  siRNA target sequence for LMO7 (NM_005358.3,3154-3172).
ctggcttcaagcttatcta

SEQ ID NO: 316483 - DNA, 19 bp, Homo sapiens
  siRNA target sequence for LMO7 (NM_005358.3,3353-3371).
caagatcccaggatcagtt

SEQ ID NO: 316484 - DNA, 19 bp, Homo sapiens
  siRNA target sequence for LMO7 (NM_005358.3,3364-3382).
gatcagttcagtgatatga

SEQ ID NO: 316485 - DNA, 19 bp, Homo sapiens
  siRNA target sequence for LMO7 (NM_005358.3,3456-3474).
cttcgtagcatcagttgaa

SEQ ID NO: 316486 - DNA, 19 bp, Homo sapiens
  siRNA target sequence for LMO7 (NM_005358.3,3539-3557).
ccaagttttcatataacga

SEQ ID NO: 316487 - DNA, 19 bp, Homo sapiens
  siRNA target sequence for LMO7 (NM_005358.3,3540-3558).
caagttttcatataacgat

SEQ ID NO: 316488 - DNA, 19 bp, Homo sapiens
  siRNA target sequence for LMO7 (NM_005358.3,3548-3566).
catataacgattcaaaaga

SEQ ID NO: 316489 - DNA, 19 bp, Homo sapiens
  siRNA target sequence for LMO7 (NM_005358.3,3706-3724).
ctatctgtaacaactgatt

SEQ ID NO: 316490 - DNA, 19 bp, Homo sapiens
  siRNA target sequence for LMO7 (NM_005358.3,3734-3752).
gccttcagagttctaatat

SEQ ID NO: 316491 - DNA, 19 bp, Homo sapiens
  siRNA target sequence for LMO7 (NM_005358.3,3788-3806).
gcaatgcttttgaatcaaa

SEQ ID NO: 316492 - DNA, 19 bp, Homo sapiens
  siRNA target sequence for LMO7 (NM_005358.3,3803-3821).
caaaagcatctgaatccat

SEQ ID NO: 316493 - DNA, 19 bp, Homo sapiens
  siRNA target sequence for LMO7 (NM_005358.3,3842-3860).
ggcgatcacaattttttga

SEQ ID NO: 316494 - DNA, 19 bp, Homo sapiens
  siRNA target sequence for LMO7 (NM_005358.3,3985-4003).
cgcctactgcaggaaaaat

SEQ ID NO: 316495 - DNA, 19 bp, Homo sapiens
  siRNA target sequence for LMO7 (NM_005358.3,3986-4004).
gcctactgcaggaaaaata

SEQ ID NO: 316496 - DNA, 19 bp, Homo sapiens
  siRNA target sequence for LMO7 (NM_005358.3,4232-4250).
cacaagaggaagttgttca

SEQ ID NO: 316497 - DNA, 19 bp, Homo sapiens
  siRNA target sequence for LMO7 (NM_005358.3,4270-4288).
ccgcaggatcagcttgtta

SEQ ID NO: 316498 - DNA, 19 bp, Homo sapiens
  siRNA target sequence for LMO7 (NM_005358.3,4404-4422).
gatagagcgggaaacatca

SEQ ID NO: 316499 - DNA, 19 bp, Homo sapiens
  siRNA target sequence for LMO7 (NM_005358.3,4413-4431).
ggaaacatcagtcagaata

SEQ ID NO: 316500 - DNA, 19 bp, Homo sapiens
  siRNA target sequence for LMO7 (NM_005358.3,4437-4455).
gtacaggaggcctgttgat

SEQ ID NO: 316501 - DNA, 19 bp, Homo sapiens
  siRNA target sequence for LMO7 (NM_005358.3,4442-4460).
ggaggcctgttgattccta

SEQ ID NO: 316502 - DNA, 19 bp, Homo sapiens
  siRNA target sequence for LMO7 (NM_005358.3,4458-4476).
ctatgatataccaaagaca

SEQ ID NO: 316503 - DNA, 19 bp, Homo sapiens
  siRNA target sequence for LMO7 (NM_005358.3,4529-4547).
ctactgaactggatgatta

SEQ ID NO: 316504 - DNA, 19 bp, Homo sapiens
  siRNA target sequence for LMO7 (NM_005358.3,4539-4557).
ggatgattactccacaaat

SEQ ID NO: 316505 - DNA, 19 bp, Homo sapiens
  siRNA target sequence for LMO7 (NM_005358.3,4540-4558).
gatgattactccacaaata

SEQ ID NO: 316506 - DNA, 19 bp, Homo sapiens
  siRNA target sequence for LMO7 (NM_005358.3,4637-4655).
catcaggagcagaattgga

SEQ ID NO: 316507 - DNA, 19 bp, Homo sapiens
  siRNA target sequence for LMO7 (NM_005358.3,4653-4671).
ggagaggcaacaaatcctt

SEQ ID NO: 316508 - DNA, 19 bp, Homo sapiens
  siRNA target sequence for LMO7 (NM_005358.3,4686-4704).
gagaacaccccttcacaat

SEQ ID NO: 316509 - DNA, 19 bp, Homo sapiens
  siRNA target sequence for LMO7 (NM_005358.3,4688-4706).
gaacaccccttcacaatga

SEQ ID NO: 316510 - DNA, 19 bp, Homo sapiens
  siRNA target sequence for LMO7 (NM_005358.3,4727-4745).
gcagtgccagtgtcaacaa

SEQ ID NO: 316511 - DNA, 19 bp, Homo sapiens
  siRNA target sequence for LMO7 (NM_005358.3,4740-4758).
caacaaagagcctgttagt

SEQ ID NO: 316512 - DNA, 19 bp, Homo sapiens
  siRNA target sequence for LMO7 (NM_005358.3,4743-4761).
caaagagcctgttagtctt

SEQ ID NO: 316513 - DNA, 19 bp, Homo sapiens
  siRNA target sequence for LMO7 (NM_005358.3,4775-4793).
gaagaggcgaatctttaga

SEQ ID NO: 316514 - DNA, 19 bp, Homo sapiens
  siRNA target sequence for LMO7 (NM_005358.3,4778-4796).
gaggcgaatctttagataa

SEQ ID NO: 316515 - DNA, 19 bp, Homo sapiens
  siRNA target sequence for LMO7 (NM_005358.3,4849-4867).
cccacaggattctatgctt

SEQ ID NO: 316516 - DNA, 19 bp, Homo sapiens
  siRNA target sequence for LMO7 (NM_005358.3,5099-5117).
gctcctactgcaataacat

SEQ ID NO: 316517 - DNA, 19 bp, Homo sapiens
  siRNA target sequence for LMO7 (NM_005358.3,5148-5166).
gtccctgggtctttgttat

SEQ ID NO: 316518 - DNA, 19 bp, Homo sapiens
  siRNA target sequence for LMO7 (NM_005358.3,5266-5284).
gactgctatctcagattca

SEQ ID NO: 316519 - DNA, 19 bp, Homo sapiens
  siRNA target sequence for LNK (NM_005475.1,1078-1096).
gacccacccaagagttcaa

SEQ ID NO: 316520 - DNA, 19 bp, Homo sapiens
  siRNA target sequence for LNK (NM_005475.1,1198-1216).
gaccggacagacatcatct

SEQ ID NO: 316521 - DNA, 19 bp, Homo sapiens
  siRNA target sequence for LNK (NM_005475.1,1200-1218).
ccggacagacatcatcttt

SEQ ID NO: 316522 - DNA, 19 bp, Homo sapiens
  siRNA target sequence for LNK (NM_005475.1,1202-1220).
ggacagacatcatctttga

SEQ ID NO: 316523 - DNA, 19 bp, Homo sapiens
  siRNA target sequence for LNK (NM_005475.1,1358-1376).
gcacagattcccttaacca

SEQ ID NO: 316524 - DNA, 19 bp, Homo sapiens
  siRNA target sequence for LNK (NM_005475.1,1412-1430).
gccagaagacggaccattt

SEQ ID NO: 316525 - DNA, 19 bp, Homo sapiens
  siRNA target sequence for LNK (NM_005475.1,1553-1571).
gggaatacgtgctcacttt

SEQ ID NO: 316526 - DNA, 19 bp, Homo sapiens
  siRNA target sequence for LNK (NM_005475.1,1560-1578).
cgtgctcactttcaacttt

SEQ ID NO: 316527 - DNA, 19 bp, Homo sapiens
  siRNA target sequence for LNK (NM_005475.1,2008-2026).
cgggactcggactacgaaa

SEQ ID NO: 316528 - DNA, 19 bp, Homo sapiens
  siRNA target sequence for LNK (NM_005475.1,2009-2027).
gggactcggactacgaaat

SEQ ID NO: 316529 - DNA, 19 bp, Homo sapiens
  siRNA target sequence for LNX (NM_032622.1,267-285).
ggctcagtcctgctaacta

SEQ ID NO: 316530 - DNA, 19 bp, Homo sapiens
  siRNA target sequence for LNX (NM_032622.1,269-287).
ctcagtcctgctaactaca

SEQ ID NO: 316531 - DNA, 19 bp, Homo sapiens
  siRNA target sequence for LNX (NM_032622.1,271-289).
cagtcctgctaactacatt

SEQ ID NO: 316532 - DNA, 19 bp, Homo sapiens
  siRNA target sequence for LNX (NM_032622.1,273-291).
gtcctgctaactacattga

SEQ ID NO: 316533 - DNA, 19 bp, Homo sapiens
  siRNA target sequence for LNX (NM_032622.1,276-294).
ctgctaactacattgacaa

SEQ ID NO: 316534 - DNA, 19 bp, Homo sapiens
  siRNA target sequence for LNX (NM_032622.1,279-297).
ctaactacattgacaatgt

SEQ ID NO: 316535 - DNA, 19 bp, Homo sapiens
  siRNA target sequence for LNX (NM_032622.1,367-385).
gaagaggcgctcacaagat

SEQ ID NO: 316536 - DNA, 19 bp, Homo sapiens
  siRNA target sequence for LNX (NM_032622.1,577-595).
ctttgagagatccactatt

SEQ ID NO: 316537 - DNA, 19 bp, Homo sapiens
  siRNA target sequence for LNX (NM_032622.1,581-599).
gagagatccactattagaa

SEQ ID NO: 316538 - DNA, 19 bp, Homo sapiens
  siRNA target sequence for LNX (NM_032622.1,749-767).
ccagatggtgaaattacca

SEQ ID NO: 316539 - DNA, 19 bp, Homo sapiens
  siRNA target sequence for LNX (NM_032622.1,772-790).
caagatcaatcgagtagat

SEQ ID NO: 316540 - DNA, 19 bp, Homo sapiens
  siRNA target sequence for LNX (NM_032622.1,782-800).
cgagtagatcccagtgaaa

SEQ ID NO: 316541 - DNA, 19 bp, Homo sapiens
  siRNA target sequence for LNX (NM_032622.1,834-852).
ccccactggtccatatcat

SEQ ID NO: 316542 - DNA, 19 bp, Homo sapiens
  siRNA target sequence for LNX (NM_032622.1,835-853).
cccactggtccatatcatt

SEQ ID NO: 316543 - DNA, 19 bp, Homo sapiens
  siRNA target sequence for LNX (NM_032622.1,836-854).
ccactggtccatatcatta

SEQ ID NO: 316544 - DNA, 19 bp, Homo sapiens
  siRNA target sequence for LNX (NM_032622.1,841-859).
ggtccatatcattatccaa

SEQ ID NO: 316545 - DNA, 19 bp, Homo sapiens
  siRNA target sequence for LNX (NM_032622.1,904-922).
gccaggagacatcattcta

SEQ ID NO: 316546 - DNA, 19 bp, Homo sapiens
  siRNA target sequence for LNX (NM_032622.1,905-923).
ccaggagacatcattctaa

SEQ ID NO: 316547 - DNA, 19 bp, Homo sapiens
  siRNA target sequence for LNX (NM_032622.1,909-927).
gagacatcattctaaaggt

SEQ ID NO: 316548 - DNA, 19 bp, Homo sapiens
  siRNA target sequence for LNX (NM_032622.1,945-963).
gcaatgtccctcacaacta

SEQ ID NO: 316549 - DNA, 19 bp, Homo sapiens
  siRNA target sequence for LNX (NM_032622.1,1072-1090).
ccgagatgacagctttcat

SEQ ID NO: 316550 - DNA, 19 bp, Homo sapiens
  siRNA target sequence for LNX (NM_032622.1,1113-1131).
ccgaggagcagcttggaat

SEQ ID NO: 316551 - DNA, 19 bp, Homo sapiens
  siRNA target sequence for LNX (NM_032622.1,1114-1132).
cgaggagcagcttggaata

SEQ ID NO: 316552 - DNA, 19 bp, Homo sapiens
  siRNA target sequence for LNX (NM_032622.1,1117-1135).
ggagcagcttggaataaaa

SEQ ID NO: 316553 - DNA, 19 bp, Homo sapiens
  siRNA target sequence for LNX (NM_032622.1,1157-1175).
cctggggttttcatcttca

SEQ ID NO: 316554 - DNA, 19 bp, Homo sapiens
  siRNA target sequence for LNX (NM_032622.1,1219-1237).
ggagaatgaccgtgtgtta

SEQ ID NO: 316555 - DNA, 19 bp, Homo sapiens
  siRNA target sequence for LNX (NM_032622.1,1240-1258).
catcaatggacatgatctt

SEQ ID NO: 316556 - DNA, 19 bp, Homo sapiens
  siRNA target sequence for LNX (NM_032622.1,1278-1296).
gtgcggctcatctgattca

SEQ ID NO: 316557 - DNA, 19 bp, Homo sapiens
  siRNA target sequence for LNX (NM_032622.1,1289-1307).
ctgattcaggccagtgaaa

SEQ ID NO: 316558 - DNA, 19 bp, Homo sapiens
  siRNA target sequence for LNX (NM_032622.1,1347-1365).
ggagccctgacatctttca

SEQ ID NO: 316559 - DNA, 19 bp, Homo sapiens
  siRNA target sequence for LNX (NM_032622.1,1432-1450).
gcccctccatcctacaatt

SEQ ID NO: 316560 - DNA, 19 bp, Homo sapiens
  siRNA target sequence for LNX (NM_032622.1,1438-1456).
ccatcctacaattacttgt

SEQ ID NO: 316561 - DNA, 19 bp, Homo sapiens
  siRNA target sequence for LNX (NM_032622.1,1446-1464).
caattacttgtcatgagaa

SEQ ID NO: 316562 - DNA, 19 bp, Homo sapiens
  siRNA target sequence for LNX (NM_032622.1,1455-1473).
gtcatgagaaggtggtaaa

SEQ ID NO: 316563 - DNA, 19 bp, Homo sapiens
  siRNA target sequence for LNX (NM_032622.1,1457-1475).
catgagaaggtggtaaata

SEQ ID NO: 316564 - DNA, 19 bp, Homo sapiens
  siRNA target sequence for LNX (NM_032622.1,1513-1531).
cgcagggggagcatcacat

SEQ ID NO: 316565 - DNA, 19 bp, Homo sapiens
  siRNA target sequence for LNX (NM_032622.1,1539-1557).
gggatttgcctatctatgt

SEQ ID NO: 316566 - DNA, 19 bp, Homo sapiens
  siRNA target sequence for LNX (NM_032622.1,1568-1586).
gagcccggaggagtcataa

SEQ ID NO: 316567 - DNA, 19 bp, Homo sapiens
  siRNA target sequence for LNX (NM_032622.1,1571-1589).
cccggaggagtcataagca

SEQ ID NO: 316568 - DNA, 19 bp, Homo sapiens
  siRNA target sequence for LNX (NM_032622.1,1689-1707).
catcatcctcgatagtact

SEQ ID NO: 316569 - DNA, 19 bp, Homo sapiens
  siRNA target sequence for LNX (NM_032622.1,1692-1710).
catcctcgatagtactcaa

SEQ ID NO: 316570 - DNA, 19 bp, Homo sapiens
  siRNA target sequence for LNX (NM_032622.1,1698-1716).
cgatagtactcaaagcttt

SEQ ID NO: 316571 - DNA, 19 bp, Homo sapiens
  siRNA target sequence for LNX (NM_032622.1,1816-1834).
ggtcatgtggctggaatta

SEQ ID NO: 316572 - DNA, 19 bp, Homo sapiens
  siRNA target sequence for LNX (NM_032622.1,1835-1853).
ccacggtgcttgtataact

SEQ ID NO: 316573 - DNA, 19 bp, Homo sapiens
  siRNA target sequence for LNX (NM_032622.1,1838-1856).
cggtgcttgtataactgta

SEQ ID NO: 316574 - DNA, 19 bp, Homo sapiens
  siRNA target sequence for LNX (NM_032622.1,1839-1857).
ggtgcttgtataactgtaa

SEQ ID NO: 316575 - DNA, 19 bp, Homo sapiens
  siRNA target sequence for LNX (NM_032622.1,1840-1858).
gtgcttgtataactgtaaa

SEQ ID NO: 316576 - DNA, 19 bp, Homo sapiens
  siRNA target sequence for LNX (NM_032622.1,1911-1929).
gaggttatgaagaatacaa

SEQ ID NO: 316577 - DNA, 19 bp, Homo sapiens
  siRNA target sequence for LNX (NM_032622.1,1936-1954).
caaaccttttttcatcaaa

SEQ ID NO: 316578 - DNA, 19 bp, Homo sapiens
  siRNA target sequence for LNX (NM_032622.1,1992-2010).
gaattagatgtggtgatat

SEQ ID NO: 316579 - DNA, 19 bp, Homo sapiens
  siRNA target sequence for LNX (NM_032622.1,2021-2039).
gtcaatggtagaagtacat

SEQ ID NO: 316580 - DNA, 19 bp, Homo sapiens
  siRNA target sequence for LNX (NM_032622.1,2031-2049).
gaagtacatcaggaatgat

SEQ ID NO: 316581 - DNA, 19 bp, Homo sapiens
  siRNA target sequence for LNX (NM_032622.1,2067-2085).
gactgctgaaagaacttaa

SEQ ID NO: 316582 - DNA, 19 bp, Homo sapiens
  siRNA target sequence for LNX (NM_032622.1,2087-2105).
ggaagaattactctaacta

SEQ ID NO: 316583 - DNA, 19 bp, Homo sapiens
  siRNA target sequence for LNX (NM_032622.1,2088-2106).
gaagaattactctaactat

SEQ ID NO: 316584 - DNA, 19 bp, Homo sapiens
  siRNA target sequence for LNX (NM_032622.1,2091-2109).
gaattactctaactattgt

SEQ ID NO: 316585 - DNA, 19 bp, Homo sapiens
  siRNA target sequence for LOC118987 (NM_173791.2,255-273).
cgctcctcgcccagttctt

SEQ ID NO: 316586 - DNA, 19 bp, Homo sapiens
  siRNA target sequence for LOC118987 (NM_173791.2,365-383).
ctcctaagggagtaccttt

SEQ ID NO: 316587 - DNA, 19 bp, Homo sapiens
  siRNA target sequence for LOC118987 (NM_173791.2,367-385).
cctaagggagtacctttat

SEQ ID NO: 316588 - DNA, 19 bp, Homo sapiens
  siRNA target sequence for LOC118987 (NM_173791.2,494-512).
ctcaacgccaccatcctat

SEQ ID NO: 316589 - DNA, 19 bp, Homo sapiens
  siRNA target sequence for LOC118987 (NM_173791.2,839-857).
ggcaagtccgcctacttgt

SEQ ID NO: 316590 - DNA, 19 bp, Homo sapiens
  siRNA target sequence for LOC118987 (NM_173791.2,840-858).
gcaagtccgcctacttgtt

SEQ ID NO: 316591 - DNA, 19 bp, Homo sapiens
  siRNA target sequence for LOC118987 (NM_173791.2,841-859).
caagtccgcctacttgttt

SEQ ID NO: 316592 - DNA, 19 bp, Homo sapiens
  siRNA target sequence for LOC118987 (NM_173791.2,964-982).
ggtgcgctcccagtttgaa

SEQ ID NO: 316593 - DNA, 19 bp, Homo sapiens
  siRNA target sequence for LOC118987 (NM_173791.2,1049-1067).
cacaccctaccgaattaca

SEQ ID NO: 316594 - DNA, 19 bp, Homo sapiens
  siRNA target sequence for LOC118987 (NM_173791.2,1053-1071).
ccctaccgaattacaagat

SEQ ID NO: 316595 - DNA, 19 bp, Homo sapiens
  siRNA target sequence for LOC118987 (NM_173791.2,1072-1090).
caggtttaagccgtttttt

SEQ ID NO: 316596 - DNA, 19 bp, Homo sapiens
  siRNA target sequence for LOC118987 (NM_173791.2,1075-1093).
gtttaagccgttttttcca

SEQ ID NO: 316597 - DNA, 19 bp, Homo sapiens
  siRNA target sequence for LOC118987 (NM_173791.2,1121-1139).
gatgaagagcatatccata

SEQ ID NO: 316598 - DNA, 19 bp, Homo sapiens
  siRNA target sequence for LOC118987 (NM_173791.2,1130-1148).
catatccatatacaacaat

SEQ ID NO: 316599 - DNA, 19 bp, Homo sapiens
  siRNA target sequence for LOC118987 (NM_173791.2,1158-1176).
ctgaaggccgtcttaaagt

SEQ ID NO: 316600 - DNA, 19 bp, Homo sapiens
  siRNA target sequence for LOC118987 (NM_173791.2,1160-1178).
gaaggccgtcttaaagtta

SEQ ID NO: 316601 - DNA, 19 bp, Homo sapiens
  siRNA target sequence for LOC118987 (NM_173791.2,1164-1182).
gccgtcttaaagttacgtt

SEQ ID NO: 316602 - DNA, 19 bp, Homo sapiens
  siRNA target sequence for LOC118987 (NM_173791.2,1175-1193).
gttacgttgttagaatgta

SEQ ID NO: 316603 - DNA, 19 bp, Homo sapiens
  siRNA target sequence for LOC118987 (NM_173791.2,1187-1205).
gaatgtagcaggttactca

SEQ ID NO: 316604 - DNA, 19 bp, Homo sapiens
  siRNA target sequence for LOC118987 (NM_173791.2,1297-1315).
gacggttgaattaataaaa

SEQ ID NO: 316605 - DNA, 19 bp, Homo sapiens
  siRNA target sequence for LOC118987 (NM_173791.2,1376-1394).
gggcacgtcatcattgaaa

SEQ ID NO: 316606 - DNA, 19 bp, Homo sapiens
  siRNA target sequence for LOC118987 (NM_173791.2,1378-1396).
gcacgtcatcattgaaact

SEQ ID NO: 316607 - DNA, 19 bp, Homo sapiens
  siRNA target sequence for LOC118987 (NM_173791.2,1408-1426).
ctcgcctgctgcaattgca

SEQ ID NO: 316608 - DNA, 19 bp, Homo sapiens
  siRNA target sequence for LOC118987 (NM_173791.2,1416-1434).
ctgcaattgcagatcttca

SEQ ID NO: 316609 - DNA, 19 bp, Homo sapiens
  siRNA target sequence for LOC118987 (NM_173791.2,1455-1473).
ccattggaggtgtgaaaat

SEQ ID NO: 316610 - DNA, 19 bp, Homo sapiens
  siRNA target sequence for LOC118987 (NM_173791.2,1484-1502).
ctgcaagtgttgaagctta

SEQ ID NO: 316611 - DNA, 19 bp, Homo sapiens
  siRNA target sequence for LOC118987 (NM_173791.2,1519-1537).
ccgagtcctggtgtactat

SEQ ID NO: 316612 - DNA, 19 bp, Homo sapiens
  siRNA target sequence for LOC118987 (NM_173791.2,1521-1539).
gagtcctggtgtactatga

SEQ ID NO: 316613 - DNA, 19 bp, Homo sapiens
  siRNA target sequence for LOC118987 (NM_173791.2,1565-1583).
ggtgcagtgctgcaagata

SEQ ID NO: 316614 - DNA, 19 bp, Homo sapiens
  siRNA target sequence for LOC118987 (NM_173791.2,1568-1586).
gcagtgctgcaagataact

SEQ ID NO: 316615 - DNA, 19 bp, Homo sapiens
  siRNA target sequence for LOC118987 (NM_173791.2,1620-1638).
catgccaatcgggttatga

SEQ ID NO: 316616 - DNA, 19 bp, Homo sapiens
  siRNA target sequence for LOC118987 (NM_173791.2,1623-1641).
gccaatcgggttatgaaga

SEQ ID NO: 316617 - DNA, 19 bp, Homo sapiens
  siRNA target sequence for LOC118987 (NM_173791.2,1651-1669).
cgggttgacagtagatact

SEQ ID NO: 316618 - DNA, 19 bp, Homo sapiens
  siRNA target sequence for LOC118987 (NM_173791.2,1677-1695).
gagagctggattctgaatt

SEQ ID NO: 316619 - DNA, 19 bp, Homo sapiens
  siRNA target sequence for LOC118987 (NM_173791.2,1739-1757).
gatgaggcacaatcattaa

SEQ ID NO: 316620 - DNA, 19 bp, Homo sapiens
  siRNA target sequence for LOC118987 (NM_173791.2,1745-1763).
gcacaatcattaagtcata

SEQ ID NO: 316621 - DNA, 19 bp, Homo sapiens
  siRNA target sequence for LOC118987 (NM_173791.2,1768-1786).
caaacgtgttccaacaaca

SEQ ID NO: 316622 - DNA, 19 bp, Homo sapiens
  siRNA target sequence for LOC118987 (NM_173791.2,1772-1790).
cgtgttccaacaacacttt

SEQ ID NO: 316623 - DNA, 19 bp, Homo sapiens
  siRNA target sequence for LOC118987 (NM_173791.2,1852-1870).
cccactaccaccgaaaatt

SEQ ID NO: 316624 - DNA, 19 bp, Homo sapiens
  siRNA target sequence for LOC118987 (NM_173791.2,1854-1872).
cactaccaccgaaaattca

SEQ ID NO: 316625 - DNA, 19 bp, Homo sapiens
  siRNA target sequence for LOC118987 (NM_173791.2,1856-1874).
ctaccaccgaaaattcagt

SEQ ID NO: 316626 - DNA, 19 bp, Homo sapiens
  siRNA target sequence for LOC118987 (NM_173791.2,2036-2054).
ccagatgttctcgttgaaa

SEQ ID NO: 316627 - DNA, 19 bp, Homo sapiens
  siRNA target sequence for LOC118987 (NM_173791.2,2071-2089).
gccacctcctcttgtagat

SEQ ID NO: 316628 - DNA, 19 bp, Homo sapiens
  siRNA target sequence for LOC118987 (NM_173791.2,2135-2153).
gcagctgcacctaagcaat

SEQ ID NO: 316629 - DNA, 19 bp, Homo sapiens
  siRNA target sequence for LOC118987 (NM_173791.2,2136-2154).
cagctgcacctaagcaatt

SEQ ID NO: 316630 - DNA, 19 bp, Homo sapiens
  siRNA target sequence for LOC118987 (NM_173791.2,2180-2198).
gatgtcacttcagaaactt

SEQ ID NO: 316631 - DNA, 19 bp, Homo sapiens
  siRNA target sequence for LOC118987 (NM_173791.2,2228-2246).
cgtcaaacatgggaatcat

SEQ ID NO: 316632 - DNA, 19 bp, Homo sapiens
  siRNA target sequence for LOC118987 (NM_173791.2,2249-2267).
gaaattctttatcgtaata

SEQ ID NO: 316633 - DNA, 19 bp, Homo sapiens
  siRNA target sequence for LOC118987 (NM_173791.2,2261-2279).
cgtaataagctaggaaaat

SEQ ID NO: 316634 - DNA, 19 bp, Homo sapiens
  siRNA target sequence for LOC118987 (NM_173791.2,2289-2307).
ccagagcatcctgtttgtt

SEQ ID NO: 316635 - DNA, 19 bp, Homo sapiens
  siRNA target sequence for LOC118987 (NM_173791.2,2322-2340).
gtcacaggtacttaaacat

SEQ ID NO: 316636 - DNA, 19 bp, Homo sapiens
  siRNA target sequence for LOC118987 (NM_173791.2,2328-2346).
ggtacttaaacattgcatt

SEQ ID NO: 316637 - DNA, 19 bp, Homo sapiens
  siRNA target sequence for LOC118987 (NM_173791.2,2352-2370).
gcagggatcctttcaagtt

SEQ ID NO: 316638 - DNA, 19 bp, Homo sapiens
  siRNA target sequence for LOC118987 (NM_173791.2,2389-2407).
ggggcatgttagtttaaaa

SEQ ID NO: 316639 - DNA, 19 bp, Homo sapiens
  siRNA target sequence for LOC118987 (NM_173791.2,2426-2444).
ggatgcctagctacatcaa

SEQ ID NO: 316640 - DNA, 19 bp, Homo sapiens
  siRNA target sequence for LOC118987 (NM_173791.2,2427-2445).
gatgcctagctacatcaaa

SEQ ID NO: 316641 - DNA, 19 bp, Homo sapiens
  siRNA target sequence for LOC118987 (NM_173791.2,2448-2466).
cggaatacctttccaaatt

SEQ ID NO: 316642 - DNA, 19 bp, Homo sapiens
  siRNA target sequence for LOC118987 (NM_173791.2,2481-2499).
cctcacctaaggctatagt

SEQ ID NO: 316643 - DNA, 19 bp, Homo sapiens
  siRNA target sequence for LOC118987 (NM_173791.2,2511-2529).
cactacgcaatctgagtat

SEQ ID NO: 316644 - DNA, 19 bp, Homo sapiens
  siRNA target sequence for LOC118987 (NM_173791.2,2516-2534).
cgcaatctgagtatgcaaa

SEQ ID NO: 316645 - DNA, 19 bp, Homo sapiens
  siRNA target sequence for LOC118987 (NM_173791.2,2517-2535).
gcaatctgagtatgcaaaa

SEQ ID NO: 316646 - DNA, 19 bp, Homo sapiens
  siRNA target sequence for LOC118987 (NM_173791.2,2526-2544).
gtatgcaaaagggattcaa

SEQ ID NO: 316647 - DNA, 19 bp, Homo sapiens
  siRNA target sequence for LOC118987 (NM_173791.2,2542-2560).
caatgacaaattttgctat

SEQ ID NO: 316648 - DNA, 19 bp, Homo sapiens
  siRNA target sequence for LOC118987 (NM_173791.2,2561-2579).
ggtgacattactattcact

SEQ ID NO: 316649 - DNA, 19 bp, Homo sapiens
  siRNA target sequence for LOC118987 (NM_173791.2,2562-2580).
gtgacattactattcactt

SEQ ID NO: 316650 - DNA, 19 bp, Homo sapiens
  siRNA target sequence for LOC118987 (NM_173791.2,2566-2584).
cattactattcacttcaaa

SEQ ID NO: 316651 - DNA, 19 bp, Homo sapiens
  siRNA target sequence for LOC118987 (NM_173791.2,2606-2624).
gaccaccatgtagttacta

SEQ ID NO: 316652 - DNA, 19 bp, Homo sapiens
  siRNA target sequence for LOC118987 (NM_173791.2,2611-2629).
ccatgtagttactaacgta

SEQ ID NO: 316653 - DNA, 19 bp, Homo sapiens
  siRNA target sequence for LOC118987 (NM_173791.2,2615-2633).
gtagttactaacgtagaaa

SEQ ID NO: 316654 - DNA, 19 bp, Homo sapiens
  siRNA target sequence for LOC118987 (NM_173791.2,2646-2664).
cccatttggttgaagaagt

SEQ ID NO: 316655 - DNA, 19 bp, Homo sapiens
  siRNA target sequence for LOC118987 (NM_173791.2,2647-2665).
ccatttggttgaagaagtt

SEQ ID NO: 316656 - DNA, 19 bp, Homo sapiens
  siRNA target sequence for LOC118987 (NM_173791.2,2676-2694).
ctaaagaggagcaatttgt

SEQ ID NO: 316657 - DNA, 19 bp, Homo sapiens
  siRNA target sequence for LOC118987 (NM_173791.2,2693-2711).
gttggacagatgggtttaa

SEQ ID NO: 316658 - DNA, 19 bp, Homo sapiens
  siRNA target sequence for LOC118987 (NM_173791.2,2697-2715).
gacagatgggtttaacaga

SEQ ID NO: 316659 - DNA, 19 bp, Homo sapiens
  siRNA target sequence for LOC118987 (NM_173791.2,2763-2781).
gtgactactgtaagaaaaa

SEQ ID NO: 316660 - DNA, 19 bp, Homo sapiens
  siRNA target sequence for LOC118987 (NM_173791.2,2798-2816).
gcttcccagtgtatgtttt

SEQ ID NO: 316661 - DNA, 19 bp, Homo sapiens
  siRNA target sequence for LOC118987 (NM_173791.2,2819-2837).
gcttatgtttgccataaaa

SEQ ID NO: 316662 - DNA, 19 bp, Homo sapiens
  siRNA target sequence for LOC118987 (NM_173791.2,2820-2838).
cttatgtttgccataaaaa

SEQ ID NO: 316663 - DNA, 19 bp, Homo sapiens
  siRNA target sequence for LOC118987 (NM_173791.2,2880-2898).
caactgataggcgaataga

SEQ ID NO: 316664 - DNA, 19 bp, Homo sapiens
  siRNA target sequence for LOC118987 (NM_173791.2,2947-2965).
cctgcctcctcgtgttgat

SEQ ID NO: 316665 - DNA, 19 bp, Homo sapiens
  siRNA target sequence for LOC118987 (NM_173791.2,2972-2990).
gctagcaagtcagtcaata

SEQ ID NO: 316666 - DNA, 19 bp, Homo sapiens
  siRNA target sequence for LOC118987 (NM_173791.2,2980-2998).
gtcagtcaataaaacaaca

SEQ ID NO: 316667 - DNA, 19 bp, Homo sapiens
  siRNA target sequence for LOC118987 (NM_173791.2,2999-3017).
ggtttgacaaggcatatta

SEQ ID NO: 316668 - DNA, 19 bp, Homo sapiens
  siRNA target sequence for LOC118987 (NM_173791.2,3004-3022).
gacaaggcatattatcaat

SEQ ID NO: 316669 - DNA, 19 bp, Homo sapiens
  siRNA target sequence for LOC118987 (NM_173791.2,3010-3028).
gcatattatcaatactagt

SEQ ID NO: 316670 - DNA, 19 bp, Homo sapiens
  siRNA target sequence for LOC118987 (NM_173791.2,3024-3042).
ctagttctcgtttattaaa

SEQ ID NO: 316671 - DNA, 19 bp, Homo sapiens
  siRNA target sequence for LOC118987 (NM_173791.2,3046-3064).
gcgtcaagtctctaaaact

SEQ ID NO: 316672 - DNA, 19 bp, Homo sapiens
  siRNA target sequence for LOC118987 (NM_173791.2,3187-3205).
cagcacaggaataaagtta

SEQ ID NO: 316673 - DNA, 19 bp, Homo sapiens
  siRNA target sequence for LOC118987 (NM_173791.2,3297-3315).
ggatccagaaactagagtt

SEQ ID NO: 316674 - DNA, 19 bp, Homo sapiens
  siRNA target sequence for LOC118987 (NM_173791.2,3313-3331).
gttcatgttggataagcta

SEQ ID NO: 316675 - DNA, 19 bp, Homo sapiens
  siRNA target sequence for LOC118987 (NM_173791.2,3361-3379).
caataattcccttgttaga

SEQ ID NO: 316676 - DNA, 19 bp, Homo sapiens
  siRNA target sequence for LOC118987 (NM_173791.2,3450-3468).
ggctacaagctctaacact

SEQ ID NO: 316677 - DNA, 19 bp, Homo sapiens
  siRNA target sequence for LOC118987 (NM_173791.2,3451-3469).
gctacaagctctaacactt

SEQ ID NO: 316678 - DNA, 19 bp, Homo sapiens
  siRNA target sequence for LOC118987 (NM_173791.2,3455-3473).
caagctctaacacttctta

SEQ ID NO: 316679 - DNA, 19 bp, Homo sapiens
  siRNA target sequence for LOC118987 (NM_173791.2,3459-3477).
ctctaacacttcttatgat

SEQ ID NO: 316680 - DNA, 19 bp, Homo sapiens
  siRNA target sequence for LOC118987 (NM_173791.2,3489-3507).
caggcattgaagatataga

SEQ ID NO: 316681 - DNA, 19 bp, Homo sapiens
  siRNA target sequence for LOC118987 (NM_173791.2,3616-3634).
gccattcagcagcatatca

SEQ ID NO: 316682 - DNA, 19 bp, Homo sapiens
  siRNA target sequence for LOC118987 (NM_173791.2,3625-3643).
cagcatatcagatgactta

SEQ ID NO: 316683 - DNA, 19 bp, Homo sapiens
  siRNA target sequence for LOC118987 (NM_173791.2,3628-3646).
catatcagatgacttattt

SEQ ID NO: 316684 - DNA, 19 bp, Homo sapiens
  siRNA target sequence for LOC51248 (NM_016484.3,179-197).
ggacagccggattccttat

SEQ ID NO: 316685 - DNA, 19 bp, Homo sapiens
  siRNA target sequence for LOC51248 (NM_016484.3,184-202).
gccggattccttatgatga

SEQ ID NO: 316686 - DNA, 19 bp, Homo sapiens
  siRNA target sequence for LOC51248 (NM_016484.3,187-205).
ggattccttatgatgacta

SEQ ID NO: 316687 - DNA, 19 bp, Homo sapiens
  siRNA target sequence for LOC51248 (NM_016484.3,218-236).
cttgcctgcctatgagaat

SEQ ID NO: 316688 - DNA, 19 bp, Homo sapiens
  siRNA target sequence for LOC51248 (NM_016484.3,272-290).
ccacccggactacaacaat

SEQ ID NO: 316689 - DNA, 19 bp, Homo sapiens
  siRNA target sequence for LOC51248 (NM_016484.3,276-294).
ccggactacaacaatgagt

SEQ ID NO: 316690 - DNA, 19 bp, Homo sapiens
  siRNA target sequence for LOC51248 (NM_016484.3,340-358).
gagctcagttgggatttaa

SEQ ID NO: 316691 - DNA, 19 bp, Homo sapiens
  siRNA target sequence for LOC51248 (NM_016484.3,342-360).
gctcagttgggatttaaca

SEQ ID NO: 316692 - DNA, 19 bp, Homo sapiens
  siRNA target sequence for LOC51248 (NM_016484.3,343-361).
ctcagttgggatttaacat

SEQ ID NO: 316693 - DNA, 19 bp, Homo sapiens
  siRNA target sequence for LOC51248 (NM_016484.3,467-485).
gaatgatgtggatttccaa

SEQ ID NO: 316694 - DNA, 19 bp, Homo sapiens
  siRNA target sequence for LOC51248 (NM_016484.3,549-567).
cgcttctttccctacaatt

SEQ ID NO: 316695 - DNA, 19 bp, Homo sapiens
  siRNA target sequence for LOC51248 (NM_016484.3,563-581).
caattatcatcgccaaaaa

SEQ ID NO: 316696 - DNA, 19 bp, Homo sapiens
  siRNA target sequence for MAGI1 (NM_173515.1,603-621).
gatgactgcctgcaacaat

SEQ ID NO: 316697 - DNA, 19 bp, Homo sapiens
  siRNA target sequence for MAGI1 (NM_173515.1,811-829).
gagcatcttcccacaattt

SEQ ID NO: 316698 - DNA, 19 bp, Homo sapiens
  siRNA target sequence for MAGI1 (NM_173515.1,822-840).
cacaatttacagaattaca

SEQ ID NO: 316699 - DNA, 19 bp, Homo sapiens
  siRNA target sequence for MAGI1 (NM_173515.1,959-977).
ggaccgggctccgtttaca

SEQ ID NO: 316700 - DNA, 19 bp, Homo sapiens
  siRNA target sequence for MAGI1 (NM_173515.1,992-1010).
ctcagtcacgaagaacaaa

SEQ ID NO: 316701 - DNA, 19 bp, Homo sapiens
  siRNA target sequence for MAGI1 (NM_173515.1,996-1014).
gtcacgaagaacaaaatta

SEQ ID NO: 316702 - DNA, 19 bp, Homo sapiens
  siRNA target sequence for MAGI1 (NM_173515.1,1057-1075).
gctttgtagcggaaatgga

SEQ ID NO: 316703 - DNA, 19 bp, Homo sapiens
  siRNA target sequence for MAGI1 (NM_173515.1,1110-1128).
ggcatctgtgacaaaacaa

SEQ ID NO: 316704 - DNA, 19 bp, Homo sapiens
  siRNA target sequence for MAGI1 (NM_173515.1,1111-1129).
gcatctgtgacaaaacaat

SEQ ID NO: 316705 - DNA, 19 bp, Homo sapiens
  siRNA target sequence for MAGI1 (NM_173515.1,1165-1183).
catgtctggaggaagttca

SEQ ID NO: 316706 - DNA, 19 bp, Homo sapiens
  siRNA target sequence for MAGI1 (NM_173515.1,1173-1191).
gaggaagttcacttaccaa

SEQ ID NO: 316707 - DNA, 19 bp, Homo sapiens
  siRNA target sequence for MAGI1 (NM_173515.1,1179-1197).
gttcacttaccaaacatta

SEQ ID NO: 316708 - DNA, 19 bp, Homo sapiens
  siRNA target sequence for MAGI1 (NM_173515.1,1212-1230).
ctgggcatgtacatcaaat

SEQ ID NO: 316709 - DNA, 19 bp, Homo sapiens
  siRNA target sequence for MAGI1 (NM_173515.1,1220-1238).
gtacatcaaatcaacctat

SEQ ID NO: 316710 - DNA, 19 bp, Homo sapiens
  siRNA target sequence for MAGI1 (NM_173515.1,1239-1257).
gatgggttacacgtgatta

SEQ ID NO: 316711 - DNA, 19 bp, Homo sapiens
  siRNA target sequence for MAGI1 (NM_173515.1,1396-1414).
gagttgtgttactgcttaa

SEQ ID NO: 316712 - DNA, 19 bp, Homo sapiens
  siRNA target sequence for MAGI1 (NM_173515.1,1398-1416).
gttgtgttactgcttaaga

SEQ ID NO: 316713 - DNA, 19 bp, Homo sapiens
  siRNA target sequence for MAGI1 (NM_173515.1,1422-1440).
cccaccgggtctttcaact

SEQ ID NO: 316714 - DNA, 19 bp, Homo sapiens
  siRNA target sequence for MAGI1 (NM_173515.1,1424-1442).
caccgggtctttcaacttt

SEQ ID NO: 316715 - DNA, 19 bp, Homo sapiens
  siRNA target sequence for MAGI1 (NM_173515.1,1521-1539).
cctgaaagcactatggata

SEQ ID NO: 316716 - DNA, 19 bp, Homo sapiens
  siRNA target sequence for MAGI1 (NM_173515.1,1561-1579).
cagccatcctggatcttta

SEQ ID NO: 316717 - DNA, 19 bp, Homo sapiens
  siRNA target sequence for MAGI1 (NM_173515.1,1563-1581).
gccatcctggatctttata

SEQ ID NO: 316718 - DNA, 19 bp, Homo sapiens
  siRNA target sequence for MAGI1 (NM_173515.1,1565-1583).
catcctggatctttatatt

SEQ ID NO: 316719 - DNA, 19 bp, Homo sapiens
  siRNA target sequence for MAGI1 (NM_173515.1,1687-1705).
cagagtccccgaattcctt

SEQ ID NO: 316720 - DNA, 19 bp, Homo sapiens
  siRNA target sequence for MAGI1 (NM_173515.1,1923-1941).
gccctttgccggtatttca

SEQ ID NO: 316721 - DNA, 19 bp, Homo sapiens
  siRNA target sequence for MAGI1 (NM_173515.1,1925-1943).
cctttgccggtatttcagt

SEQ ID NO: 316722 - DNA, 19 bp, Homo sapiens
  siRNA target sequence for MAGI1 (NM_173515.1,1926-1944).
ctttgccggtatttcagta

SEQ ID NO: 316723 - DNA, 19 bp, Homo sapiens
  siRNA target sequence for MAGI1 (NM_173515.1,1949-1967).
gcggattcctccgatcatt

SEQ ID NO: 316724 - DNA, 19 bp, Homo sapiens
  siRNA target sequence for MAGI1 (NM_173515.1,1951-1969).
ggattcctccgatcattga

SEQ ID NO: 316725 - DNA, 19 bp, Homo sapiens
  siRNA target sequence for MAGI1 (NM_173515.1,1952-1970).
gattcctccgatcattgaa

SEQ ID NO: 316726 - DNA, 19 bp, Homo sapiens
  siRNA target sequence for MAGI1 (NM_173515.1,2083-2101).
gcagcgccacgattccatt

SEQ ID NO: 316727 - DNA, 19 bp, Homo sapiens
  siRNA target sequence for MAGI1 (NM_173515.1,2169-2187).
ctcctggtcagctggttta

SEQ ID NO: 316728 - DNA, 19 bp, Homo sapiens
  siRNA target sequence for MGC2793 (NM_145064.1,268-286).
cggctaaagcagttactca

SEQ ID NO: 316729 - DNA, 19 bp, Homo sapiens
  siRNA target sequence for MGC2793 (NM_145064.1,361-379).
gggggtgggcccatctact

SEQ ID NO: 316730 - DNA, 19 bp, Homo sapiens
  siRNA target sequence for MGC2793 (NM_145064.1,362-380).
ggggtgggcccatctacta

SEQ ID NO: 316731 - DNA, 19 bp, Homo sapiens
  siRNA target sequence for MGC2793 (NM_145064.1,364-382).
ggtgggcccatctactaca

SEQ ID NO: 316732 - DNA, 19 bp, Homo sapiens
  siRNA target sequence for MGC2793 (NM_145064.1,439-457).
cctaagctggtcaacgata

SEQ ID NO: 316733 - DNA, 19 bp, Homo sapiens
  siRNA target sequence for MGC2793 (NM_145064.1,454-472).
gataagccccacaaattca

SEQ ID NO: 316734 - DNA, 19 bp, Homo sapiens
  siRNA target sequence for MGC2793 (NM_145064.1,459-477).
gccccacaaattcaaagat

SEQ ID NO: 316735 - DNA, 19 bp, Homo sapiens
  siRNA target sequence for MGC2793 (NM_145064.1,461-479).
cccacaaattcaaagatca

SEQ ID NO: 316736 - DNA, 19 bp, Homo sapiens
  siRNA target sequence for MGC2793 (NM_145064.1,510-528).
ctgtgcccggatgattgtt

SEQ ID NO: 316737 - DNA, 19 bp, Homo sapiens
  siRNA target sequence for MGC2793 (NM_145064.1,512-530).
gtgcccggatgattgttct

SEQ ID NO: 316738 - DNA, 19 bp, Homo sapiens
  siRNA target sequence for MGC2793 (NM_145064.1,515-533).
cccggatgattgttctcaa

SEQ ID NO: 316739 - DNA, 19 bp, Homo sapiens
  siRNA target sequence for MGC2793 (NM_145064.1,544-562).
gggcttcgctgtaagaact

SEQ ID NO: 316740 - DNA, 19 bp, Homo sapiens
  siRNA target sequence for MGC2793 (NM_145064.1,675-693).
gcagtacgcttgtgtcaaa

SEQ ID NO: 316741 - DNA, 19 bp, Homo sapiens
  siRNA target sequence for MGC2793 (NM_145064.1,678-696).
gtacgcttgtgtcaaagat

SEQ ID NO: 316742 - DNA, 19 bp, Homo sapiens
  siRNA target sequence for MGC2793 (NM_145064.1,933-951).
ccagcagtctcattacttt

SEQ ID NO: 316743 - DNA, 19 bp, Homo sapiens
  siRNA target sequence for MGC2793 (NM_145064.1,954-972).
ggctctctatcggttcaaa

SEQ ID NO: 316744 - DNA, 19 bp, Homo sapiens
  siRNA target sequence for MGC2793 (NM_145064.1,1000-1018).
ccgccaggagagaagatca

SEQ ID NO: 316745 - DNA, 19 bp, Homo sapiens
  siRNA target sequence for MGC2793 (NM_145064.1,1083-1101).
ccctccaaacttcatcatt

SEQ ID NO: 316746 - DNA, 19 bp, Homo sapiens
  siRNA target sequence for MGC32065 (NM_153271.1,110-128).
gccgagccctctatgactt

SEQ ID NO: 316747 - DNA, 19 bp, Homo sapiens
  siRNA target sequence for MGC32065 (NM_153271.1,115-133).
gccctctatgactttcaca

SEQ ID NO: 316748 - DNA, 19 bp, Homo sapiens
  siRNA target sequence for MGC32065 (NM_153271.1,645-663).
caaccgtttctcatgcttt

SEQ ID NO: 316749 - DNA, 19 bp, Homo sapiens
  siRNA target sequence for MGC32065 (NM_153271.1,805-823).
cccacaaaacagaccaaat

SEQ ID NO: 316750 - DNA, 19 bp, Homo sapiens
  siRNA target sequence for MGC32065 (NM_153271.1,819-837).
caaattcaagggcatcaaa

SEQ ID NO: 316751 - DNA, 19 bp, Homo sapiens
  siRNA target sequence for MGC32065 (NM_153271.1,1222-1240).
gatcgcgtggacactttca

SEQ ID NO: 316752 - DNA, 19 bp, Homo sapiens
  siRNA target sequence for MGC32065 (NM_153271.1,1706-1724).
gccgtgagctcgacttcaa

SEQ ID NO: 316753 - DNA, 19 bp, Homo sapiens
  siRNA target sequence for MGC32065 (NM_153271.1,1796-1814).
ccctgcgcatgtatgacaa

SEQ ID NO: 316754 - DNA, 19 bp, Homo sapiens
  siRNA target sequence for MGC39715 (NM_152628.2,293-311).
ctaaggcgggtctttggaa

SEQ ID NO: 316755 - DNA, 19 bp, Homo sapiens
  siRNA target sequence for MGC39715 (NM_152628.2,379-397).
ggaccaactggaacaatat

SEQ ID NO: 316756 - DNA, 19 bp, Homo sapiens
  siRNA target sequence for MGC39715 (NM_152628.2,380-398).
gaccaactggaacaatatt

SEQ ID NO: 316757 - DNA, 19 bp, Homo sapiens
  siRNA target sequence for MGC39715 (NM_152628.2,416-434).
gacccaaacgtgttgagaa

SEQ ID NO: 316758 - DNA, 19 bp, Homo sapiens
  siRNA target sequence for MGC39715 (NM_152628.2,437-455).
gatgtcttcgttgagtttt

SEQ ID NO: 316759 - DNA, 19 bp, Homo sapiens
  siRNA target sequence for MGC39715 (NM_152628.2,440-458).
gtcttcgttgagtttttaa

SEQ ID NO: 316760 - DNA, 19 bp, Homo sapiens
  siRNA target sequence for MGC39715 (NM_152628.2,461-479).
ctggcgcagctgaatacat

SEQ ID NO: 316761 - DNA, 19 bp, Homo sapiens
  siRNA target sequence for MGC39715 (NM_152628.2,463-481).
ggcgcagctgaatacattt

SEQ ID NO: 316762 - DNA, 19 bp, Homo sapiens
  siRNA target sequence for MGC39715 (NM_152628.2,465-483).
cgcagctgaatacatttga

SEQ ID NO: 316763 - DNA, 19 bp, Homo sapiens
  siRNA target sequence for MGC39715 (NM_152628.2,467-485).
cagctgaatacatttgaca

SEQ ID NO: 316764 - DNA, 19 bp, Homo sapiens
  siRNA target sequence for MGC39715 (NM_152628.2,487-505).
cgccaccaagaaagcttat

SEQ ID NO: 316765 - DNA, 19 bp, Homo sapiens
  siRNA target sequence for MGC39715 (NM_152628.2,521-539).
cccaatgaacagagtatta

SEQ ID NO: 316766 - DNA, 19 bp, Homo sapiens
  siRNA target sequence for MGC39715 (NM_152628.2,532-550).
gagtattagaatcgaaatt

SEQ ID NO: 316767 - DNA, 19 bp, Homo sapiens
  siRNA target sequence for MGC39715 (NM_152628.2,534-552).
gtattagaatcgaaattat

SEQ ID NO: 316768 - DNA, 19 bp, Homo sapiens
  siRNA target sequence for MGC39715 (NM_152628.2,749-767).
ggactccgaaagtggtata

SEQ ID NO: 316769 - DNA, 19 bp, Homo sapiens
  siRNA target sequence for MGC39715 (NM_152628.2,750-768).
gactccgaaagtggtatat

SEQ ID NO: 316770 - DNA, 19 bp, Homo sapiens
  siRNA target sequence for MGC39715 (NM_152628.2,804-822).
gggtggcggtagatttgct

SEQ ID NO: 316771 - DNA, 19 bp, Homo sapiens
  siRNA target sequence for MGC39715 (NM_152628.2,810-828).
cggtagatttgctctacat

SEQ ID NO: 316772 - DNA, 19 bp, Homo sapiens
  siRNA target sequence for MGC39715 (NM_152628.2,833-851).
gcaatacaggacattgaaa

SEQ ID NO: 316773 - DNA, 19 bp, Homo sapiens
  siRNA target sequence for MGC39715 (NM_152628.2,915-933).
gtcaaacaaagtttttgga

SEQ ID NO: 316774 - DNA, 19 bp, Homo sapiens
  siRNA target sequence for MGC39715 (NM_152628.2,944-962).
gaggtacggcactatggat

SEQ ID NO: 316775 - DNA, 19 bp, Homo sapiens
  siRNA target sequence for MGC39715 (NM_152628.2,1023-1041).
ctgttggcaataatgagat

SEQ ID NO: 316776 - DNA, 19 bp, Homo sapiens
  siRNA target sequence for MGC39715 (NM_152628.2,1111-1129).
ctggcaggtcactttcctt

SEQ ID NO: 316777 - DNA, 19 bp, Homo sapiens
  siRNA target sequence for MGC39715 (NM_152628.2,1164-1182).
ctctcaaccagaacttaga

SEQ ID NO: 316778 - DNA, 19 bp, Homo sapiens
  siRNA target sequence for MGC39715 (NM_152628.2,1177-1195).
cttagagctcagatttcaa

SEQ ID NO: 316779 - DNA, 19 bp, Homo sapiens
  siRNA target sequence for MGC39715 (NM_152628.2,1183-1201).
gctcagatttcaatacagt

SEQ ID NO: 316780 - DNA, 19 bp, Homo sapiens
  siRNA target sequence for MGC39715 (NM_152628.2,1212-1230).
gctggcagtggtttgttat

SEQ ID NO: 316781 - DNA, 19 bp, Homo sapiens
  siRNA target sequence for MGC39715 (NM_152628.2,1215-1233).
ggcagtggtttgttattta

SEQ ID NO: 316782 - DNA, 19 bp, Homo sapiens
  siRNA target sequence for MGC39715 (NM_152628.2,1217-1235).
cagtggtttgttatttaca

SEQ ID NO: 316783 - DNA, 19 bp, Homo sapiens
  siRNA target sequence for MGC39715 (NM_152628.2,1236-1254).
ccaaacaggcttttttgct

SEQ ID NO: 316784 - DNA, 19 bp, Homo sapiens
  siRNA target sequence for MGC39715 (NM_152628.2,1252-1270).
gctgagtagctgcttgaaa

SEQ ID NO: 316785 - DNA, 19 bp, Homo sapiens
  siRNA target sequence for MGC39715 (NM_152628.2,1331-1349).
gttccggaacaaagcaaaa

SEQ ID NO: 316786 - DNA, 19 bp, Homo sapiens
  siRNA target sequence for MGC39715 (NM_152628.2,1334-1352).
ccggaacaaagcaaaagta

SEQ ID NO: 316787 - DNA, 19 bp, Homo sapiens
  siRNA target sequence for MGC39715 (NM_152628.2,1376-1394).
cagcagaaagactattcta

SEQ ID NO: 316788 - DNA, 19 bp, Homo sapiens
  siRNA target sequence for MGC39715 (NM_152628.2,1378-1396).
gcagaaagactattctagt

SEQ ID NO: 316789 - DNA, 19 bp, Homo sapiens
  siRNA target sequence for MGC39715 (NM_152628.2,1379-1397).
cagaaagactattctagtt

SEQ ID NO: 316790 - DNA, 19 bp, Homo sapiens
  siRNA target sequence for MGC39715 (NM_152628.2,1414-1432).
caagattaagatagctaaa

SEQ ID NO: 316791 - DNA, 19 bp, Homo sapiens
  siRNA target sequence for MGC39715 (NM_152628.2,1438-1456).
ctgcgtttttgggaacata

SEQ ID NO: 316792 - DNA, 19 bp, Homo sapiens
  siRNA target sequence for MGC39715 (NM_152628.2,1440-1458).
gcgtttttgggaacataaa

SEQ ID NO: 316793 - DNA, 19 bp, Homo sapiens
  siRNA target sequence for MGC5395 (NM_024060.1,325-343).
gggacgacggcgtctttgt

SEQ ID NO: 316794 - DNA, 19 bp, Homo sapiens
  siRNA target sequence for MPP4 (NM_033066.1,390-408).
ggcttcaggctctgctaaa

SEQ ID NO: 316795 - DNA, 19 bp, Homo sapiens
  siRNA target sequence for MPP4 (NM_033066.1,416-434).
gactgcctccaggaattta

SEQ ID NO: 316796 - DNA, 19 bp, Homo sapiens
  siRNA target sequence for MPP4 (NM_033066.1,418-436).
ctgcctccaggaatttaaa

SEQ ID NO: 316797 - DNA, 19 bp, Homo sapiens
  siRNA target sequence for MPP4 (NM_033066.1,461-479).
ccacatgcacaggtgttat

SEQ ID NO: 316798 - DNA, 19 bp, Homo sapiens
  siRNA target sequence for MPP4 (NM_033066.1,464-482).
catgcacaggtgttatcct

SEQ ID NO: 316799 - DNA, 19 bp, Homo sapiens
  siRNA target sequence for MPP4 (NM_033066.1,487-505).
ggtagtggagttattacgt

SEQ ID NO: 316800 - DNA, 19 bp, Homo sapiens
  siRNA target sequence for MPP4 (NM_033066.1,623-641).
cctccactgccagacaata

SEQ ID NO: 316801 - DNA, 19 bp, Homo sapiens
  siRNA target sequence for MPP4 (NM_033066.1,659-677).
gcaatgaggattgtttgtt

SEQ ID NO: 316802 - DNA, 19 bp, Homo sapiens
  siRNA target sequence for MPP4 (NM_033066.1,775-793).
gagaagtgggttgctatat

SEQ ID NO: 316803 - DNA, 19 bp, Homo sapiens
  siRNA target sequence for MPP4 (NM_033066.1,787-805).
gctatatgctggagacaaa

SEQ ID NO: 316804 - DNA, 19 bp, Homo sapiens
  siRNA target sequence for MPP4 (NM_033066.1,798-816).
gagacaaactggtagaagt

SEQ ID NO: 316805 - DNA, 19 bp, Homo sapiens
  siRNA target sequence for MPP4 (NM_033066.1,835-853).
gggactggaccctgaacaa

SEQ ID NO: 316806 - DNA, 19 bp, Homo sapiens
  siRNA target sequence for MPP4 (NM_033066.1,845-863).
cctgaacaagtgatccata

SEQ ID NO: 316807 - DNA, 19 bp, Homo sapiens
  siRNA target sequence for MPP4 (NM_033066.1,846-864).
ctgaacaagtgatccatat

SEQ ID NO: 316808 - DNA, 19 bp, Homo sapiens
  siRNA target sequence for MPP4 (NM_033066.1,876-894).
ctcgaggcacaatcatgtt

SEQ ID NO: 316809 - DNA, 19 bp, Homo sapiens
  siRNA target sequence for MPP4 (NM_033066.1,878-896).
cgaggcacaatcatgttca

SEQ ID NO: 316810 - DNA, 19 bp, Homo sapiens
  siRNA target sequence for MPP4 (NM_033066.1,879-897).
gaggcacaatcatgttcaa

SEQ ID NO: 316811 - DNA, 19 bp, Homo sapiens
  siRNA target sequence for MPP4 (NM_033066.1,1065-1083).
ggtggcaggcccgaaaaat

SEQ ID NO: 316812 - DNA, 19 bp, Homo sapiens
  siRNA target sequence for MPP4 (NM_033066.1,1069-1087).
gcaggcccgaaaaatctca

SEQ ID NO: 316813 - DNA, 19 bp, Homo sapiens
  siRNA target sequence for MPP4 (NM_033066.1,1187-1205).
ctcaagtcaaccctatcaa

SEQ ID NO: 316814 - DNA, 19 bp, Homo sapiens
  siRNA target sequence for MPP4 (NM_033066.1,1192-1210).
gtcaaccctatcaatttct

SEQ ID NO: 316815 - DNA, 19 bp, Homo sapiens
  siRNA target sequence for MPP4 (NM_033066.1,1194-1212).
caaccctatcaatttctat

SEQ ID NO: 316816 - DNA, 19 bp, Homo sapiens
  siRNA target sequence for MPP4 (NM_033066.1,1313-1331).
ggctacggtcagaagttct

SEQ ID NO: 316817 - DNA, 19 bp, Homo sapiens
  siRNA target sequence for MPP4 (NM_033066.1,1314-1332).
gctacggtcagaagttctt

SEQ ID NO: 316818 - DNA, 19 bp, Homo sapiens
  siRNA target sequence for MPP4 (NM_033066.1,1315-1333).
ctacggtcagaagttcttt

SEQ ID NO: 316819 - DNA, 19 bp, Homo sapiens
  siRNA target sequence for MPP4 (NM_033066.1,1318-1336).
cggtcagaagttctttata

SEQ ID NO: 316820 - DNA, 19 bp, Homo sapiens
  siRNA target sequence for MPP4 (NM_033066.1,1470-1488).
gacgcccttcagacaagta

SEQ ID NO: 316821 - DNA, 19 bp, Homo sapiens
  siRNA target sequence for MPP4 (NM_033066.1,1513-1531).
ctctggtgttggagtaaat

SEQ ID NO: 316822 - DNA, 19 bp, Homo sapiens
  siRNA target sequence for MPP4 (NM_033066.1,1515-1533).
ctggtgttggagtaaatga

SEQ ID NO: 316823 - DNA, 19 bp, Homo sapiens
  siRNA target sequence for MPP4 (NM_033066.1,1587-1605).
cacacactactcgtactaa

SEQ ID NO: 316824 - DNA, 19 bp, Homo sapiens
  siRNA target sequence for MPP4 (NM_033066.1,1589-1607).
cacactactcgtactaaaa

SEQ ID NO: 316825 - DNA, 19 bp, Homo sapiens
  siRNA target sequence for MPP4 (NM_033066.1,1596-1614).
ctcgtactaaaaagagtta

SEQ ID NO: 316826 - DNA, 19 bp, Homo sapiens
  siRNA target sequence for MPP4 (NM_033066.1,1602-1620).
ctaaaaagagttacgaaat

SEQ ID NO: 316827 - DNA, 19 bp, Homo sapiens
  siRNA target sequence for MPP4 (NM_033066.1,1626-1644).
ggcgtgagtatcactatgt

SEQ ID NO: 316828 - DNA, 19 bp, Homo sapiens
  siRNA target sequence for MPP4 (NM_033066.1,1628-1646).
cgtgagtatcactatgtgt

SEQ ID NO: 316829 - DNA, 19 bp, Homo sapiens
  siRNA target sequence for MPP4 (NM_033066.1,1690-1708).
ggagtatggtgagtacaaa

SEQ ID NO: 316830 - DNA, 19 bp, Homo sapiens
  siRNA target sequence for MPP4 (NM_033066.1,1746-1764).
cagtccttgtcgaaggaaa

SEQ ID NO: 316831 - DNA, 19 bp, Homo sapiens
  siRNA target sequence for MPP4 (NM_033066.1,1803-1821).
gggttcgaacccatgaact

SEQ ID NO: 316832 - DNA, 19 bp, Homo sapiens
  siRNA target sequence for MPP4 (NM_033066.1,1820-1838).
ctgaagccctatgtcatat

SEQ ID NO: 316833 - DNA, 19 bp, Homo sapiens
  siRNA target sequence for MPP4 (NM_033066.1,1851-1869).
cgaatatgaggtgtatgaa

SEQ ID NO: 316834 - DNA, 19 bp, Homo sapiens
  siRNA target sequence for MPP4 (NM_033066.1,1877-1895).
cggaaaaatgccaaggtta

SEQ ID NO: 316835 - DNA, 19 bp, Homo sapiens
  siRNA target sequence for MPP4 (NM_033066.1,1878-1896).
ggaaaaatgccaaggttat

SEQ ID NO: 316836 - DNA, 19 bp, Homo sapiens
  siRNA target sequence for MPP5 (NM_022474.2,511-529).
cagcgaagtaaaaaatgtt

SEQ ID NO: 316837 - DNA, 19 bp, Homo sapiens
  siRNA target sequence for MPP5 (NM_022474.2,513-531).
gcgaagtaaaaaatgttga

SEQ ID NO: 316838 - DNA, 19 bp, Homo sapiens
  siRNA target sequence for MPP5 (NM_022474.2,694-712).
gcaagaacttgaccttaat

SEQ ID NO: 316839 - DNA, 19 bp, Homo sapiens
  siRNA target sequence for MPP5 (NM_022474.2,747-765).
ctccaaagaccggaataga

SEQ ID NO: 316840 - DNA, 19 bp, Homo sapiens
  siRNA target sequence for MPP5 (NM_022474.2,749-767).
ccaaagaccggaatagata

SEQ ID NO: 316841 - DNA, 19 bp, Homo sapiens
  siRNA target sequence for MPP5 (NM_022474.2,759-777).
gaatagataaccctatgtt

SEQ ID NO: 316842 - DNA, 19 bp, Homo sapiens
  siRNA target sequence for MPP5 (NM_022474.2,787-805).
ggaaggaattgtcttagaa

SEQ ID NO: 316843 - DNA, 19 bp, Homo sapiens
  siRNA target sequence for MPP5 (NM_022474.2,788-806).
gaaggaattgtcttagaaa

SEQ ID NO: 316844 - DNA, 19 bp, Homo sapiens
  siRNA target sequence for MPP5 (NM_022474.2,857-875).
cttaaacatatccaacata

SEQ ID NO: 316845 - DNA, 19 bp, Homo sapiens
  siRNA target sequence for MPP5 (NM_022474.2,890-908).
cagagccaggaggatattt

SEQ ID NO: 316846 - DNA, 19 bp, Homo sapiens
  siRNA target sequence for MPP5 (NM_022474.2,894-912).
gccaggaggatatttcact

SEQ ID NO: 316847 - DNA, 19 bp, Homo sapiens
  siRNA target sequence for MPP5 (NM_022474.2,943-961).
ccagaatgcatttaagata

SEQ ID NO: 316848 - DNA, 19 bp, Homo sapiens
  siRNA target sequence for MPP5 (NM_022474.2,988-1006).
caaggccagtcctccattt

SEQ ID NO: 316849 - DNA, 19 bp, Homo sapiens
  siRNA target sequence for MPP5 (NM_022474.2,998-1016).
cctccatttcctcttatct

SEQ ID NO: 316850 - DNA, 19 bp, Homo sapiens
  siRNA target sequence for MPP5 (NM_022474.2,1015-1033).
ctccaacgcacaagatctt

SEQ ID NO: 316851 - DNA, 19 bp, Homo sapiens
  siRNA target sequence for MPP5 (NM_022474.2,1035-1053).
ctcaagaggtacaaactgt

SEQ ID NO: 316852 - DNA, 19 bp, Homo sapiens
  siRNA target sequence for MPP5 (NM_022474.2,1037-1055).
caagaggtacaaactgttt

SEQ ID NO: 316853 - DNA, 19 bp, Homo sapiens
  siRNA target sequence for MPP5 (NM_022474.2,1110-1128).
cacatattcaggcactttt

SEQ ID NO: 316854 - DNA, 19 bp, Homo sapiens
  siRNA target sequence for MPP5 (NM_022474.2,1162-1180).
gcagctagagcccattaca

SEQ ID NO: 316855 - DNA, 19 bp, Homo sapiens
  siRNA target sequence for MPP5 (NM_022474.2,1179-1197).
cagatgagagagtttatga

SEQ ID NO: 316856 - DNA, 19 bp, Homo sapiens
  siRNA target sequence for MPP5 (NM_022474.2,1267-1285).
gggtgctacagttcgtaat

SEQ ID NO: 316857 - DNA, 19 bp, Homo sapiens
  siRNA target sequence for MPP5 (NM_022474.2,1269-1287).
gtgctacagttcgtaatga

SEQ ID NO: 316858 - DNA, 19 bp, Homo sapiens
  siRNA target sequence for MPP5 (NM_022474.2,1271-1289).
gctacagttcgtaatgaaa

SEQ ID NO: 316859 - DNA, 19 bp, Homo sapiens
  siRNA target sequence for MPP5 (NM_022474.2,1300-1318).
catcattagccggatagta

SEQ ID NO: 316860 - DNA, 19 bp, Homo sapiens
  siRNA target sequence for MPP5 (NM_022474.2,1303-1321).
cattagccggatagtaaaa

SEQ ID NO: 316861 - DNA, 19 bp, Homo sapiens
  siRNA target sequence for MPP5 (NM_022474.2,1395-1413).
gggggaaagatgtcaatga

SEQ ID NO: 316862 - DNA, 19 bp, Homo sapiens
  siRNA target sequence for MPP5 (NM_022474.2,1406-1424).
gtcaatgaggtttttgact

SEQ ID NO: 316863 - DNA, 19 bp, Homo sapiens
  siRNA target sequence for MPP5 (NM_022474.2,1570-1588).
gttaggtctgtcttttcaa

SEQ ID NO: 316864 - DNA, 19 bp, Homo sapiens
  siRNA target sequence for MPP5 (NM_022474.2,1648-1666).
ggaaggggacgaagataat

SEQ ID NO: 316865 - DNA, 19 bp, Homo sapiens
  siRNA target sequence for MPP5 (NM_022474.2,1841-1859).
gacaacgaggagatcttaa

SEQ ID NO: 316866 - DNA, 19 bp, Homo sapiens
  siRNA target sequence for MPP5 (NM_022474.2,1846-1864).
cgaggagatcttaacctat

SEQ ID NO: 316867 - DNA, 19 bp, Homo sapiens
  siRNA target sequence for MPP5 (NM_022474.2,1883-1901).
catcagccagcaaatagga

SEQ ID NO: 316868 - DNA, 19 bp, Homo sapiens
  siRNA target sequence for MPP5 (NM_022474.2,2030-2048).
gaagtagccggtagagatt

SEQ ID NO: 316869 - DNA, 19 bp, Homo sapiens
  siRNA target sequence for MPP5 (NM_022474.2,2040-2058).
gtagagattaccactttgt

SEQ ID NO: 316870 - DNA, 19 bp, Homo sapiens
  siRNA target sequence for MPP5 (NM_022474.2,2136-2154).
gaactagcatagattctgt

SEQ ID NO: 316871 - DNA, 19 bp, Homo sapiens
  siRNA target sequence for MPP5 (NM_022474.2,2151-2169).
ctgtacggcaagtgatcaa

SEQ ID NO: 316872 - DNA, 19 bp, Homo sapiens
  siRNA target sequence for MPP5 (NM_022474.2,2153-2171).
gtacggcaagtgatcaact

SEQ ID NO: 316873 - DNA, 19 bp, Homo sapiens
  siRNA target sequence for MPP5 (NM_022474.2,2193-2211).
gtcttcgtacacagtcatt

SEQ ID NO: 316874 - DNA, 19 bp, Homo sapiens
  siRNA target sequence for MPP5 (NM_022474.2,2212-2230).
gaagactctccggaattca

SEQ ID NO: 316875 - DNA, 19 bp, Homo sapiens
  siRNA target sequence for MPP5 (NM_022474.2,2215-2233).
gactctccggaattcagat

SEQ ID NO: 316876 - DNA, 19 bp, Homo sapiens
  siRNA target sequence for MPP5 (NM_022474.2,2217-2235).
ctctccggaattcagattt

SEQ ID NO: 316877 - DNA, 19 bp, Homo sapiens
  siRNA target sequence for MPP5 (NM_022474.2,2219-2237).
ctccggaattcagatttga

SEQ ID NO: 316878 - DNA, 19 bp, Homo sapiens
  siRNA target sequence for MPP5 (NM_022474.2,2221-2239).
ccggaattcagatttgaaa

SEQ ID NO: 316879 - DNA, 19 bp, Homo sapiens
  siRNA target sequence for MPP5 (NM_022474.2,2284-2302).
ggcattattggccaaagaa

SEQ ID NO: 316880 - DNA, 19 bp, Homo sapiens
  siRNA target sequence for MPP5 (NM_022474.2,2365-2383).
gaacaatggccactacttt

SEQ ID NO: 316881 - DNA, 19 bp, Homo sapiens
  siRNA target sequence for MPP5 (NM_022474.2,2368-2386).
caatggccactactttgat

SEQ ID NO: 316882 - DNA, 19 bp, Homo sapiens
  siRNA target sequence for MPP5 (NM_022474.2,2384-2402).
gatacggcaattgtgaatt

SEQ ID NO: 316883 - DNA, 19 bp, Homo sapiens
  siRNA target sequence for MPP5 (NM_022474.2,2396-2414).
gtgaattccgatcttgata

SEQ ID NO: 316884 - DNA, 19 bp, Homo sapiens
  siRNA target sequence for MPP5 (NM_022474.2,2398-2416).
gaattccgatcttgataaa

SEQ ID NO: 316885 - DNA, 19 bp, Homo sapiens
  siRNA target sequence for MPP5 (NM_022474.2,2417-2435).
gcctatcaggaattgctta

SEQ ID NO: 316886 - DNA, 19 bp, Homo sapiens
  siRNA target sequence for MPP5 (NM_022474.2,2425-2443).
ggaattgcttaggttaatt

SEQ ID NO: 316887 - DNA, 19 bp, Homo sapiens
  siRNA target sequence for MPP5 (NM_022474.2,2436-2454).
ggttaattaacaaacttga

SEQ ID NO: 316888 - DNA, 19 bp, Homo sapiens
  siRNA target sequence for MPP5 (NM_022474.2,2437-2455).
gttaattaacaaacttgat

SEQ ID NO: 316889 - DNA, 19 bp, Homo sapiens
  siRNA target sequence for NCK1 (NM_006153.3,151-169).
cccaacaagaacaagagtt

SEQ ID NO: 316890 - DNA, 19 bp, Homo sapiens
  siRNA target sequence for NCK1 (NM_006153.3,217-235).
cctggtggcgagttcgaaa

SEQ ID NO: 316891 - DNA, 19 bp, Homo sapiens
  siRNA target sequence for NCK1 (NM_006153.3,218-236).
ctggtggcgagttcgaaat

SEQ ID NO: 316892 - DNA, 19 bp, Homo sapiens
  siRNA target sequence for NCK1 (NM_006153.3,223-241).
ggcgagttcgaaattccat

SEQ ID NO: 316893 - DNA, 19 bp, Homo sapiens
  siRNA target sequence for NCK1 (NM_006153.3,228-246).
gttcgaaattccatgaata

SEQ ID NO: 316894 - DNA, 19 bp, Homo sapiens
  siRNA target sequence for NCK1 (NM_006153.3,253-271).
gttttgtgccttctaacta

SEQ ID NO: 316895 - DNA, 19 bp, Homo sapiens
  siRNA target sequence for NCK1 (NM_006153.3,265-283).
ctaactatgtggaaaggaa

SEQ ID NO: 316896 - DNA, 19 bp, Homo sapiens
  siRNA target sequence for NCK1 (NM_006153.3,289-307).
gtgctcggaaagcatctat

SEQ ID NO: 316897 - DNA, 19 bp, Homo sapiens
  siRNA target sequence for NCK1 (NM_006153.3,292-310).
ctcggaaagcatctattgt

SEQ ID NO: 316898 - DNA, 19 bp, Homo sapiens
  siRNA target sequence for NCK1 (NM_006153.3,294-312).
cggaaagcatctattgtga

SEQ ID NO: 316899 - DNA, 19 bp, Homo sapiens
  siRNA target sequence for NCK1 (NM_006153.3,301-319).
catctattgtgaaaaacct

SEQ ID NO: 316900 - DNA, 19 bp, Homo sapiens
  siRNA target sequence for NCK1 (NM_006153.3,324-342).
gataccttaggcattggaa

SEQ ID NO: 316901 - DNA, 19 bp, Homo sapiens
  siRNA target sequence for NCK1 (NM_006153.3,375-393).
gcatctcctgctgatgata

SEQ ID NO: 316902 - DNA, 19 bp, Homo sapiens
  siRNA target sequence for NCK1 (NM_006153.3,385-403).
ctgatgatagttttgttga

SEQ ID NO: 316903 - DNA, 19 bp, Homo sapiens
  siRNA target sequence for NCK1 (NM_006153.3,406-424).
caggggaacgtctctatga

SEQ ID NO: 316904 - DNA, 19 bp, Homo sapiens
  siRNA target sequence for NCK1 (NM_006153.3,415-433).
gtctctatgacctcaacat

SEQ ID NO: 316905 - DNA, 19 bp, Homo sapiens
  siRNA target sequence for NCK1 (NM_006153.3,431-449).
catgcccgcttatgtgaaa

SEQ ID NO: 316906 - DNA, 19 bp, Homo sapiens
  siRNA target sequence for NCK1 (NM_006153.3,536-554).
gtggcgtggtagctacaat

SEQ ID NO: 316907 - DNA, 19 bp, Homo sapiens
  siRNA target sequence for NCK1 (NM_006153.3,623-641).
gggttctctgtcagagaaa

SEQ ID NO: 316908 - DNA, 19 bp, Homo sapiens
  siRNA target sequence for NCK1 (NM_006153.3,646-664).
cagcagtcgtcaataacct

SEQ ID NO: 316909 - DNA, 19 bp, Homo sapiens
  siRNA target sequence for NCK1 (NM_006153.3,648-666).
gcagtcgtcaataacctaa

SEQ ID NO: 316910 - DNA, 19 bp, Homo sapiens
  siRNA target sequence for NCK1 (NM_006153.3,649-667).
cagtcgtcaataacctaaa

SEQ ID NO: 316911 - DNA, 19 bp, Homo sapiens
  siRNA target sequence for NCK1 (NM_006153.3,651-669).
gtcgtcaataacctaaata

SEQ ID NO: 316912 - DNA, 19 bp, Homo sapiens
  siRNA target sequence for NCK1 (NM_006153.3,653-671).
cgtcaataacctaaatact

SEQ ID NO: 316913 - DNA, 19 bp, Homo sapiens
  siRNA target sequence for NCK1 (NM_006153.3,704-722).
cccattcagctcatctaat

SEQ ID NO: 316914 - DNA, 19 bp, Homo sapiens
  siRNA target sequence for NCK1 (NM_006153.3,712-730).
gctcatctaatgatgaaga

SEQ ID NO: 316915 - DNA, 19 bp, Homo sapiens
  siRNA target sequence for NCK1 (NM_006153.3,718-736).
ctaatgatgaagaacttaa

SEQ ID NO: 316916 - DNA, 19 bp, Homo sapiens
  siRNA target sequence for NCK1 (NM_006153.3,748-766).
gagatgtaatggatgttat

SEQ ID NO: 316917 - DNA, 19 bp, Homo sapiens
  siRNA target sequence for NCK1 (NM_006153.3,821-839).
ggttggtctagtaccaaaa

SEQ ID NO: 316918 - DNA, 19 bp, Homo sapiens
  siRNA target sequence for NCK1 (NM_006153.3,822-840).
gttggtctagtaccaaaaa

SEQ ID NO: 316919 - DNA, 19 bp, Homo sapiens
  siRNA target sequence for NCK1 (NM_006153.3,825-843).
ggtctagtaccaaaaaact

SEQ ID NO: 316920 - DNA, 19 bp, Homo sapiens
  siRNA target sequence for NCK1 (NM_006153.3,826-844).
gtctagtaccaaaaaacta

SEQ ID NO: 316921 - DNA, 19 bp, Homo sapiens
  siRNA target sequence for NCK1 (NM_006153.3,831-849).
gtaccaaaaaactatgtta

SEQ ID NO: 316922 - DNA, 19 bp, Homo sapiens
  siRNA target sequence for NCK1 (NM_006153.3,846-864).
gttaccgttatgcagaata

SEQ ID NO: 316923 - DNA, 19 bp, Homo sapiens
  siRNA target sequence for NCK1 (NM_006153.3,857-875).
gcagaataatccattaact

SEQ ID NO: 316924 - DNA, 19 bp, Homo sapiens
  siRNA target sequence for NCK1 (NM_006153.3,892-910).
cacctccacagtgtgatta

SEQ ID NO: 316925 - DNA, 19 bp, Homo sapiens
  siRNA target sequence for NCK1 (NM_006153.3,894-912).
cctccacagtgtgattaca

SEQ ID NO: 316926 - DNA, 19 bp, Homo sapiens
  siRNA target sequence for NCK1 (NM_006153.3,895-913).
ctccacagtgtgattacat

SEQ ID NO: 316927 - DNA, 19 bp, Homo sapiens
  siRNA target sequence for NCK1 (NM_006153.3,978-996).
caagcagaaatggcattaa

SEQ ID NO: 316928 - DNA, 19 bp, Homo sapiens
  siRNA target sequence for NCK1 (NM_006153.3,1006-1024).
gacatgaaggggatttcct

SEQ ID NO: 316929 - DNA, 19 bp, Homo sapiens
  siRNA target sequence for NCK1 (NM_006153.3,1025-1043).
cattcgtgatagtgaatct

SEQ ID NO: 316930 - DNA, 19 bp, Homo sapiens
  siRNA target sequence for NCK1 (NM_006153.3,1038-1056).
gaatcttcgccaaatgatt

SEQ ID NO: 316931 - DNA, 19 bp, Homo sapiens
  siRNA target sequence for NOXO1 (NM_144603.2,271-289).
cccgatacccagtttcagt

SEQ ID NO: 316932 - DNA, 19 bp, Homo sapiens
  siRNA target sequence for NOXO1 (NM_144603.2,314-332).
caagaggctccaaacgttt

SEQ ID NO: 316933 - DNA, 19 bp, Homo sapiens
  siRNA target sequence for NOXO1 (NM_144603.2,376-394).
gcaggagttgggacgaatt

SEQ ID NO: 316934 - DNA, 19 bp, Homo sapiens
  siRNA target sequence for NOXO1 (NM_144603.2,778-796).
cgcgggataggccttttca

SEQ ID NO: 316935 - DNA, 19 bp, Homo sapiens
  siRNA target sequence for NOXO1 (NM_144603.2,1029-1047).
cgcgtgcgcgtgttggaaa

SEQ ID NO: 316936 - DNA, 19 bp, Homo sapiens
  siRNA target sequence for PDLIM2 (NM_021630.4,531-549).
ggcctggagacataatcgt

SEQ ID NO: 316937 - DNA, 19 bp, Homo sapiens
  siRNA target sequence for PDLIM2 (NM_021630.4,716-734).
ggctccgtgaggacataca

SEQ ID NO: 316938 - DNA, 19 bp, Homo sapiens
  siRNA target sequence for PDLIM2 (NM_021630.4,718-736).
ctccgtgaggacatacact

SEQ ID NO: 316939 - DNA, 19 bp, Homo sapiens
  siRNA target sequence for PDLIM2 (NM_021630.4,737-755).
gagagtcagtcctccttaa

SEQ ID NO: 316940 - DNA, 19 bp, Homo sapiens
  siRNA target sequence for PDZK2 (NM_024791.2,31-49).
caggacacagcctcgttaa

SEQ ID NO: 316941 - DNA, 19 bp, Homo sapiens
  siRNA target sequence for PDZK2 (NM_024791.2,33-51).
ggacacagcctcgttaact

SEQ ID NO: 316942 - DNA, 19 bp, Homo sapiens
  siRNA target sequence for PDZK2 (NM_024791.2,41-59).
cctcgttaactctgaagtt

SEQ ID NO: 316943 - DNA, 19 bp, Homo sapiens
  siRNA target sequence for PDZK2 (NM_024791.2,42-60).
ctcgttaactctgaagttt

SEQ ID NO: 316944 - DNA, 19 bp, Homo sapiens
  siRNA target sequence for PDZK2 (NM_024791.2,44-62).
cgttaactctgaagtttaa

SEQ ID NO: 316945 - DNA, 19 bp, Homo sapiens
  siRNA target sequence for PDZK2 (NM_024791.2,70-88).
ccaaagctgggcattgata

SEQ ID NO: 316946 - DNA, 19 bp, Homo sapiens
  siRNA target sequence for PDZK2 (NM_024791.2,142-160).
gagcggcctcgcttctgtt

SEQ ID NO: 316947 - DNA, 19 bp, Homo sapiens
  siRNA target sequence for PDZK2 (NM_024791.2,144-162).
gcggcctcgcttctgttta

SEQ ID NO: 316948 - DNA, 19 bp, Homo sapiens
  siRNA target sequence for PDZK2 (NM_024791.2,294-312).
cctggcggtgaacaatgat

SEQ ID NO: 316949 - DNA, 19 bp, Homo sapiens
  siRNA target sequence for PDZK2 (NM_024791.2,297-315).
ggcggtgaacaatgatgtt

SEQ ID NO: 316950 - DNA, 19 bp, Homo sapiens
  siRNA target sequence for PDZK2 (NM_024791.2,299-317).
cggtgaacaatgatgttgt

SEQ ID NO: 316951 - DNA, 19 bp, Homo sapiens
  siRNA target sequence for PDZK2 (NM_024791.2,475-493).
cggctgtgccacatagtga

SEQ ID NO: 316952 - DNA, 19 bp, Homo sapiens
  siRNA target sequence for PDZK2 (NM_024791.2,1003-1021).
gaggcggaccgcttcttca

SEQ ID NO: 316953 - DNA, 19 bp, Homo sapiens
  siRNA target sequence for PDZRN1 (NM_153371.2,249-267).
gtacaattaccagaatgaa

SEQ ID NO: 316954 - DNA, 19 bp, Homo sapiens
  siRNA target sequence for PDZRN1 (NM_153371.2,324-342).
cacaccctgtggacataca

SEQ ID NO: 316955 - DNA, 19 bp, Homo sapiens
  siRNA target sequence for PDZRN1 (NM_153371.2,337-355).
catacattctgctacaagt

SEQ ID NO: 316956 - DNA, 19 bp, Homo sapiens
  siRNA target sequence for PDZRN1 (NM_153371.2,347-365).
gctacaagtgcctcagaaa

SEQ ID NO: 316957 - DNA, 19 bp, Homo sapiens
  siRNA target sequence for PDZRN1 (NM_153371.2,397-415).
gaccggaaaagacttcatt

SEQ ID NO: 316958 - DNA, 19 bp, Homo sapiens
  siRNA target sequence for PDZRN1 (NM_153371.2,423-441).
gtgcaagaagtctagtatt

SEQ ID NO: 316959 - DNA, 19 bp, Homo sapiens
  siRNA target sequence for PDZRN1 (NM_153371.2,429-447).
gaagtctagtattctagtt

SEQ ID NO: 316960 - DNA, 19 bp, Homo sapiens
  siRNA target sequence for PDZRN1 (NM_153371.2,432-450).
gtctagtattctagttcat

SEQ ID NO: 316961 - DNA, 19 bp, Homo sapiens
  siRNA target sequence for PDZRN1 (NM_153371.2,434-452).
ctagtattctagttcataa

SEQ ID NO: 316962 - DNA, 19 bp, Homo sapiens
  siRNA target sequence for PDZRN1 (NM_153371.2,437-455).
gtattctagttcataaact

SEQ ID NO: 316963 - DNA, 19 bp, Homo sapiens
  siRNA target sequence for PDZRN1 (NM_153371.2,456-474).
cctagacaaattattagtt

SEQ ID NO: 316964 - DNA, 19 bp, Homo sapiens
  siRNA target sequence for PDZRN1 (NM_153371.2,700-718).
gtggagcggcacttgacat

SEQ ID NO: 316965 - DNA, 19 bp, Homo sapiens
  siRNA target sequence for PDZRN1 (NM_153371.2,797-815).
cacaacagccacttagttt

SEQ ID NO: 316966 - DNA, 19 bp, Homo sapiens
  siRNA target sequence for PDZRN1 (NM_153371.2,812-830).
gtttaccagaaggagaaat

SEQ ID NO: 316967 - DNA, 19 bp, Homo sapiens
  siRNA target sequence for PDZRN1 (NM_153371.2,831-849).
caccacgattgaaattcat

SEQ ID NO: 316968 - DNA, 19 bp, Homo sapiens
  siRNA target sequence for PDZRN1 (NM_153371.2,851-869).
ggtccaatccttacattca

SEQ ID NO: 316969 - DNA, 19 bp, Homo sapiens
  siRNA target sequence for PDZRN1 (NM_153371.2,854-872).
ccaatccttacattcagtt

SEQ ID NO: 316970 - DNA, 19 bp, Homo sapiens
  siRNA target sequence for PDZRN1 (NM_153371.2,855-873).
caatccttacattcagtta

SEQ ID NO: 316971 - DNA, 19 bp, Homo sapiens
  siRNA target sequence for PDZRN1 (NM_153371.2,859-877).
ccttacattcagttaggaa

SEQ ID NO: 316972 - DNA, 19 bp, Homo sapiens
  siRNA target sequence for PDZRN1 (NM_153371.2,860-878).
cttacattcagttaggaat

SEQ ID NO: 316973 - DNA, 19 bp, Homo sapiens
  siRNA target sequence for PDZRN1 (NM_153371.2,893-911).
gcaacgaaacacctttgat

SEQ ID NO: 316974 - DNA, 19 bp, Homo sapiens
  siRNA target sequence for PDZRN1 (NM_153371.2,894-912).
caacgaaacacctttgatt

SEQ ID NO: 316975 - DNA, 19 bp, Homo sapiens
  siRNA target sequence for PDZRN1 (NM_153371.2,898-916).
gaaacacctttgattaaca

SEQ ID NO: 316976 - DNA, 19 bp, Homo sapiens
  siRNA target sequence for PDZRN1 (NM_153371.2,902-920).
cacctttgattaacattgt

SEQ ID NO: 316977 - DNA, 19 bp, Homo sapiens
  siRNA target sequence for PDZRN1 (NM_153371.2,904-922).
cctttgattaacattgtca

SEQ ID NO: 316978 - DNA, 19 bp, Homo sapiens
  siRNA target sequence for PDZRN1 (NM_153371.2,994-1012).
gtcaacaactacaatatca

SEQ ID NO: 316979 - DNA, 19 bp, Homo sapiens
  siRNA target sequence for PDZRN1 (NM_153371.2,1013-1031).
gcaatgtgtcccataacta

SEQ ID NO: 316980 - DNA, 19 bp, Homo sapiens
  siRNA target sequence for PDZRN1 (NM_153371.2,1014-1032).
caatgtgtcccataactat

SEQ ID NO: 316981 - DNA, 19 bp, Homo sapiens
  siRNA target sequence for PDZRN1 (NM_153371.2,1059-1077).
caacacactgcatcttact

SEQ ID NO: 316982 - DNA, 19 bp, Homo sapiens
  siRNA target sequence for PDZRN1 (NM_153371.2,1108-1126).
gcacacaaccattctgata

SEQ ID NO: 316983 - DNA, 19 bp, Homo sapiens
  siRNA target sequence for PDZRN1 (NM_153371.2,1111-1129).
cacaaccattctgatagta

SEQ ID NO: 316984 - DNA, 19 bp, Homo sapiens
  siRNA target sequence for PDZRN1 (NM_153371.2,1116-1134).
ccattctgatagtaactct

SEQ ID NO: 316985 - DNA, 19 bp, Homo sapiens
  siRNA target sequence for PDZRN1 (NM_153371.2,1131-1149).
ctctccacgagaagagatt

SEQ ID NO: 316986 - DNA, 19 bp, Homo sapiens
  siRNA target sequence for PDZRN1 (NM_153371.2,1152-1170).
ccaagtggctcttcataaa

SEQ ID NO: 316987 - DNA, 19 bp, Homo sapiens
  siRNA target sequence for PDZRN1 (NM_153371.2,1181-1199).
gtgaacagcttggcattaa

SEQ ID NO: 316988 - DNA, 19 bp, Homo sapiens
  siRNA target sequence for PDZRN1 (NM_153371.2,1183-1201).
gaacagcttggcattaaat

SEQ ID NO: 316989 - DNA, 19 bp, Homo sapiens
  siRNA target sequence for PDZRN1 (NM_153371.2,1339-1357).
gagcttgctgcccagatta

SEQ ID NO: 316990 - DNA, 19 bp, Homo sapiens
  siRNA target sequence for PDZRN1 (NM_153371.2,1413-1431).
gcctggtaacaccattaga

SEQ ID NO: 316991 - DNA, 19 bp, Homo sapiens
  siRNA target sequence for PDZRN1 (NM_153371.2,1467-1485).
cacaccaccaccgtattat

SEQ ID NO: 316992 - DNA, 19 bp, Homo sapiens
  siRNA target sequence for PDZRN1 (NM_153371.2,1497-1515).
ctcacataaggatcttact

SEQ ID NO: 316993 - DNA, 19 bp, Homo sapiens
  siRNA target sequence for PDZRN1 (NM_153371.2,1499-1517).
cacataaggatcttactca

SEQ ID NO: 316994 - DNA, 19 bp, Homo sapiens
  siRNA target sequence for PDZRN1 (NM_153371.2,1507-1525).
gatcttactcagtgtgtta

SEQ ID NO: 316995 - DNA, 19 bp, Homo sapiens
  siRNA target sequence for PDZRN1 (NM_153371.2,1510-1528).
cttactcagtgtgttacat

SEQ ID NO: 316996 - DNA, 19 bp, Homo sapiens
  siRNA target sequence for PDZRN1 (NM_153371.2,1708-1726).
ggcattgatttgaccaatt

SEQ ID NO: 316997 - DNA, 19 bp, Homo sapiens
  siRNA target sequence for PDZRN1 (NM_153371.2,1834-1852).
gaggagcagccgagtactt

SEQ ID NO: 316998 - DNA, 19 bp, Homo sapiens
  siRNA target sequence for PDZRN1 (NM_153371.2,1837-1855).
gagcagccgagtactttca

SEQ ID NO: 316999 - DNA, 19 bp, Homo sapiens
  siRNA target sequence for PDZRN1 (NM_153371.2,1909-1927).
cttcccagcacacttcata

SEQ ID NO: 317000 - DNA, 19 bp, Homo sapiens
  siRNA target sequence for PDZRN1 (NM_153371.2,1928-1946).
gctgccacgatatagtttt

SEQ ID NO: 317001 - DNA, 19 bp, Homo sapiens
  siRNA target sequence for PDZRN1 (NM_153371.2,1929-1947).
ctgccacgatatagtttta

SEQ ID NO: 317002 - DNA, 19 bp, Homo sapiens
  siRNA target sequence for PDZRN1 (NM_153371.2,1932-1950).
ccacgatatagttttacga

SEQ ID NO: 317003 - DNA, 19 bp, Homo sapiens
  siRNA target sequence for PDZRN1 (NM_153371.2,1933-1951).
cacgatatagttttacgaa

SEQ ID NO: 317004 - DNA, 19 bp, Homo sapiens
  siRNA target sequence for PDZRN1 (NM_153371.2,1942-1960).
gttttacgaagaagttact

SEQ ID NO: 317005 - DNA, 19 bp, Homo sapiens
  siRNA target sequence for PDZRN1 (NM_153371.2,1962-1980).
gggaagttggggctttagt

SEQ ID NO: 317006 - DNA, 19 bp, Homo sapiens
  siRNA target sequence for PDZRN1 (NM_153371.2,1964-1982).
gaagttggggctttagtat

SEQ ID NO: 317007 - DNA, 19 bp, Homo sapiens
  siRNA target sequence for PDZRN1 (NM_153371.2,1979-1997).
gtatcgttggtggatatga

SEQ ID NO: 317008 - DNA, 19 bp, Homo sapiens
  siRNA target sequence for PDZRN1 (NM_153371.2,2045-2063).
gaactcctgcttattatga

SEQ ID NO: 317009 - DNA, 19 bp, Homo sapiens
  siRNA target sequence for PDZRN1 (NM_153371.2,2124-2142).
gagccactctgcactagtt

SEQ ID NO: 317010 - DNA, 19 bp, Homo sapiens
  siRNA target sequence for PDZRN1 (NM_153371.2,2172-2190).
cactctgaccgttatttgt

SEQ ID NO: 317011 - DNA, 19 bp, Homo sapiens
  siRNA target sequence for PSCDBP (NM_004288.2,97-115).
ccagcgtatagctcttact

SEQ ID NO: 317012 - DNA, 19 bp, Homo sapiens
  siRNA target sequence for PSCDBP (NM_004288.2,208-226).
cttgctttgaccagatcaa

SEQ ID NO: 317013 - DNA, 19 bp, Homo sapiens
  siRNA target sequence for PSCDBP (NM_004288.2,216-234).
gaccagatcaagttcttta

SEQ ID NO: 317014 - DNA, 19 bp, Homo sapiens
  siRNA target sequence for PSCDBP (NM_004288.2,246-264).
ctggtctcaaagaaagctt

SEQ ID NO: 317015 - DNA, 19 bp, Homo sapiens
  siRNA target sequence for PSCDBP (NM_004288.2,282-300).
ggataatgaaacatttgga

SEQ ID NO: 317016 - DNA, 19 bp, Homo sapiens
  siRNA target sequence for PSCDBP (NM_004288.2,337-355).
gcctgctcctcggaaatgt

SEQ ID NO: 317017 - DNA, 19 bp, Homo sapiens
  siRNA target sequence for PSCDBP (NM_004288.2,347-365).
cggaaatgttcactttgat

SEQ ID NO: 317018 - DNA, 19 bp, Homo sapiens
  siRNA target sequence for PSCDBP (NM_004288.2,348-366).
ggaaatgttcactttgata

SEQ ID NO: 317019 - DNA, 19 bp, Homo sapiens
  siRNA target sequence for PSCDBP (NM_004288.2,415-433).
ggtgatgtccttgcaaata

SEQ ID NO: 317020 - DNA, 19 bp, Homo sapiens
  siRNA target sequence for PSCDBP (NM_004288.2,442-460).
gtgagcacagaaggtttta

SEQ ID NO: 317021 - DNA, 19 bp, Homo sapiens
  siRNA target sequence for PSCDBP (NM_004288.2,472-490).
gtcgttgacctgatcagat

SEQ ID NO: 317022 - DNA, 19 bp, Homo sapiens
  siRNA target sequence for PSCDBP (NM_004288.2,494-512).
ccggaaacctgctaacgat

SEQ ID NO: 317023 - DNA, 19 bp, Homo sapiens
  siRNA target sequence for PSCDBP (NM_004288.2,495-513).
cggaaacctgctaacgata

SEQ ID NO: 317024 - DNA, 19 bp, Homo sapiens
  siRNA target sequence for PSCDBP (NM_004288.2,505-523).
ctaacgatagagactctta

SEQ ID NO: 317025 - DNA, 19 bp, Homo sapiens
  siRNA target sequence for PSCDBP (NM_004288.2,510-528).
gatagagactcttaatgga

SEQ ID NO: 317026 - DNA, 19 bp, Homo sapiens
  siRNA target sequence for PSCDBP (NM_004288.2,526-544).
ggaacaatgattctgaaaa

SEQ ID NO: 317027 - DNA, 19 bp, Homo sapiens
  siRNA target sequence for PSCDBP (NM_004288.2,545-563).
gaacggagcttgaagcaaa

SEQ ID NO: 317028 - DNA, 19 bp, Homo sapiens
  siRNA target sequence for PSCDBP (NM_004288.2,643-661).
catggtgatgcagctaatt

SEQ ID NO: 317029 - DNA, 19 bp, Homo sapiens
  siRNA target sequence for PSCDBP (NM_004288.2,733-751).
cttgtggaccggaatcgat

SEQ ID NO: 317030 - DNA, 19 bp, Homo sapiens
  siRNA target sequence for PSCDBP (NM_004288.2,736-754).
gtggaccggaatcgattat

SEQ ID NO: 317031 - DNA, 19 bp, Homo sapiens
  siRNA target sequence for PSCDBP (NM_004288.2,861-879).
gcagacgagtacagatgat

SEQ ID NO: 317032 - DNA, 19 bp, Homo sapiens
  siRNA target sequence for PSCDBP (NM_004288.2,898-916).
gagggggatgattttctga

SEQ ID NO: 317033 - DNA, 19 bp, Homo sapiens
  siRNA target sequence for PSCDBP (NM_004288.2,935-953).
ggaaccggagcatcagtaa

SEQ ID NO: 317034 - DNA, 19 bp, Homo sapiens
  siRNA target sequence for RACGAP1 (NM_013277.2,458-476).
ggtggatgtagagatcaaa

SEQ ID NO: 317035 - DNA, 19 bp, Homo sapiens
  siRNA target sequence for RACGAP1 (NM_013277.2,649-667).
gactatcaaccattgatga

SEQ ID NO: 317036 - DNA, 19 bp, Homo sapiens
  siRNA target sequence for RACGAP1 (NM_013277.2,651-669).
ctatcaaccattgatgaat

SEQ ID NO: 317037 - DNA, 19 bp, Homo sapiens
  siRNA target sequence for RACGAP1 (NM_013277.2,1076-1094).
gcgcctgcatgactttgtt

SEQ ID NO: 317038 - DNA, 19 bp, Homo sapiens
  siRNA target sequence for RACGAP1 (NM_013277.2,2082-2100).
ggacgacaaggcaactttt

SEQ ID NO: 317039 - DNA, 19 bp, Homo sapiens
  siRNA target sequence for RACGAP1 (NM_013277.2,2083-2101).
gacgacaaggcaacttttt

SEQ ID NO: 317040 - DNA, 19 bp, Homo sapiens
  siRNA target sequence for RHPN1 (NM_052924.1,416-434).
cctcctacgaggcagaaat

SEQ ID NO: 317041 - DNA, 19 bp, Homo sapiens
  siRNA target sequence for RHPN1 (NM_052924.1,640-658).
ggcagcgttctcttcaaca

SEQ ID NO: 317042 - DNA, 19 bp, Homo sapiens
  siRNA target sequence for RHPN1 (NM_052924.1,641-659).
gcagcgttctcttcaacat

SEQ ID NO: 317043 - DNA, 19 bp, Homo sapiens
  siRNA target sequence for RHPN1 (NM_052924.1,1410-1428).
gcgctcactggccaagtat

SEQ ID NO: 317044 - DNA, 19 bp, Homo sapiens
  siRNA target sequence for RHPN1 (NM_052924.1,1722-1740).
gaaggagggcgactacatt

SEQ ID NO: 317045 - DNA, 19 bp, Homo sapiens
  siRNA target sequence for RHPN1 (NM_052924.1,1734-1752).
ctacattgtgtcagtgaat

SEQ ID NO: 317046 - DNA, 19 bp, Homo sapiens
  siRNA target sequence for RHPN2 (NM_033103.3,197-215).
ggaccggagcggaaaacct

SEQ ID NO: 317047 - DNA, 19 bp, Homo sapiens
  siRNA target sequence for RHPN2 (NM_033103.3,203-221).
gagcggaaaaccttctgaa

SEQ ID NO: 317048 - DNA, 19 bp, Homo sapiens
  siRNA target sequence for RHPN2 (NM_033103.3,326-344).
cggtgggcgtctatcagaa

SEQ ID NO: 317049 - DNA, 19 bp, Homo sapiens
  siRNA target sequence for RHPN2 (NM_033103.3,412-430).
gcagtcgtcctcaaggatt

SEQ ID NO: 317050 - DNA, 19 bp, Homo sapiens
  siRNA target sequence for RHPN2 (NM_033103.3,413-431).
cagtcgtcctcaaggattt

SEQ ID NO: 317051 - DNA, 19 bp, Homo sapiens
  siRNA target sequence for RHPN2 (NM_033103.3,415-433).
gtcgtcctcaaggatttta

SEQ ID NO: 317052 - DNA, 19 bp, Homo sapiens
  siRNA target sequence for RHPN2 (NM_033103.3,541-559).
gaactgctgatgacatact

SEQ ID NO: 317053 - DNA, 19 bp, Homo sapiens
  siRNA target sequence for RHPN2 (NM_033103.3,544-562).
ctgctgatgacatacttca

SEQ ID NO: 317054 - DNA, 19 bp, Homo sapiens
  siRNA target sequence for RHPN2 (NM_033103.3,790-808).
gccgcaggggttttaaatt

SEQ ID NO: 317055 - DNA, 19 bp, Homo sapiens
  siRNA target sequence for RHPN2 (NM_033103.3,1887-1905).
gatctgcttagccattgat

SEQ ID NO: 317056 - DNA, 19 bp, Homo sapiens
  siRNA target sequence for RHPN2 (NM_033103.3,1892-1910).
gcttagccattgatgatga

SEQ ID NO: 317057 - DNA, 19 bp, Homo sapiens
  siRNA target sequence for RHPN2 (NM_033103.3,1906-1924).
gatgacgacaaaactgata

SEQ ID NO: 317058 - DNA, 19 bp, Homo sapiens
  siRNA target sequence for RHPN2 (NM_033103.3,2027-2045).
cacggcctcaggtcaagaa

SEQ ID NO: 317059 - DNA, 19 bp, Homo sapiens
  siRNA target sequence for RHPN2 (NM_033103.3,2071-2089).
ctcaactcagacagttctt

SEQ ID NO: 317060 - DNA, 19 bp, Homo sapiens
  siRNA target sequence for RIL (NM_003687.2,467-485).
ctttccagtccctcacaat

SEQ ID NO: 317061 - DNA, 19 bp, Homo sapiens
  siRNA target sequence for RIL (NM_003687.2,864-882).
catcccgagtgcttcatgt

SEQ ID NO: 317062 - DNA, 19 bp, Homo sapiens
  siRNA target sequence for RIMS2 (NM_014677.1,266-284).
gcgccaggtctgcaattct

SEQ ID NO: 317063 - DNA, 19 bp, Homo sapiens
  siRNA target sequence for RIMS2 (NM_014677.1,316-334).
ccccaccaaatatcttaca

SEQ ID NO: 317064 - DNA, 19 bp, Homo sapiens
  siRNA target sequence for RIMS2 (NM_014677.1,317-335).
cccaccaaatatcttacaa

SEQ ID NO: 317065 - DNA, 19 bp, Homo sapiens
  siRNA target sequence for RIMS2 (NM_014677.1,318-336).
ccaccaaatatcttacaaa

SEQ ID NO: 317066 - DNA, 19 bp, Homo sapiens
  siRNA target sequence for RIMS2 (NM_014677.1,472-490).
ctagatctccatcagatta

SEQ ID NO: 317067 - DNA, 19 bp, Homo sapiens
  siRNA target sequence for RIMS2 (NM_014677.1,568-586).
gaagtcataggcattccaa

SEQ ID NO: 317068 - DNA, 19 bp, Homo sapiens
  siRNA target sequence for RIMS2 (NM_014677.1,662-680).
gtcacgctaccgaagtgat

SEQ ID NO: 317069 - DNA, 19 bp, Homo sapiens
  siRNA target sequence for RIMS2 (NM_014677.1,707-725).
gccacaaccctatgaagaa

SEQ ID NO: 317070 - DNA, 19 bp, Homo sapiens
  siRNA target sequence for RIMS2 (NM_014677.1,709-727).
cacaaccctatgaagaaca

SEQ ID NO: 317071 - DNA, 19 bp, Homo sapiens
  siRNA target sequence for RIMS2 (NM_014677.1,711-729).
caaccctatgaagaacaaa

SEQ ID NO: 317072 - DNA, 19 bp, Homo sapiens
  siRNA target sequence for RIMS2 (NM_014677.1,817-835).
ggatttctatgctaaggat

SEQ ID NO: 317073 - DNA, 19 bp, Homo sapiens
  siRNA target sequence for RIMS2 (NM_014677.1,850-868).
ggcaaagatctatatcaga

SEQ ID NO: 317074 - DNA, 19 bp, Homo sapiens
  siRNA target sequence for RIMS2 (NM_014677.1,884-902).
ggaaaatcagcgatcttat

SEQ ID NO: 317075 - DNA, 19 bp, Homo sapiens
  siRNA target sequence for RIMS2 (NM_014677.1,893-911).
gcgatcttattcaatggaa

SEQ ID NO: 317076 - DNA, 19 bp, Homo sapiens
  siRNA target sequence for RIMS2 (NM_014677.1,948-966).
caaaggaccacaaaccata

SEQ ID NO: 317077 - DNA, 19 bp, Homo sapiens
  siRNA target sequence for RIMS2 (NM_014677.1,986-1004).
gagtccactacccatagat

SEQ ID NO: 317078 - DNA, 19 bp, Homo sapiens
  siRNA target sequence for RIMS2 (NM_014677.1,1153-1171).
caccaccaaagcctcataa

SEQ ID NO: 317079 - DNA, 19 bp, Homo sapiens
  siRNA target sequence for RIMS2 (NM_014677.1,1174-1192).
caaagaaaggcggtaaaat

SEQ ID NO: 317080 - DNA, 19 bp, Homo sapiens
  siRNA target sequence for RIMS2 (NM_014677.1,1230-1248).
gcttccacgcctgaatata

SEQ ID NO: 317081 - DNA, 19 bp, Homo sapiens
  siRNA target sequence for RIMS2 (NM_014677.1,1235-1253).
cacgcctgaatatacaagt

SEQ ID NO: 317082 - DNA, 19 bp, Homo sapiens
  siRNA target sequence for RIMS2 (NM_014677.1,1551-1569).
ggtcgcattttattaaata

SEQ ID NO: 317083 - DNA, 19 bp, Homo sapiens
  siRNA target sequence for RIMS2 (NM_014677.1,1552-1570).
gtcgcattttattaaataa

SEQ ID NO: 317084 - DNA, 19 bp, Homo sapiens
  siRNA target sequence for RIMS2 (NM_014677.1,1653-1671).
ggtcggctttgtgcattta

SEQ ID NO: 317085 - DNA, 19 bp, Homo sapiens
  siRNA target sequence for RIMS2 (NM_014677.1,1654-1672).
gtcggctttgtgcatttat

SEQ ID NO: 317086 - DNA, 19 bp, Homo sapiens
  siRNA target sequence for RIMS2 (NM_014677.1,1656-1674).
cggctttgtgcatttatta

SEQ ID NO: 317087 - DNA, 19 bp, Homo sapiens
  siRNA target sequence for RIMS2 (NM_014677.1,1701-1719).
gatactgtaggacatctta

SEQ ID NO: 317088 - DNA, 19 bp, Homo sapiens
  siRNA target sequence for RIMS2 (NM_014677.1,1790-1808).
catcattctagaatccaaa

SEQ ID NO: 317089 - DNA, 19 bp, Homo sapiens
  siRNA target sequence for RIMS2 (NM_014677.1,1816-1834).
cacaagtagaacttgtagt

SEQ ID NO: 317090 - DNA, 19 bp, Homo sapiens
  siRNA target sequence for RIMS2 (NM_014677.1,1818-1836).
caagtagaacttgtagttt

SEQ ID NO: 317091 - DNA, 19 bp, Homo sapiens
  siRNA target sequence for RIMS2 (NM_014677.1,1925-1943).
ggatcgtccttctatttct

SEQ ID NO: 317092 - DNA, 19 bp, Homo sapiens
  siRNA target sequence for RIMS2 (NM_014677.1,1929-1947).
cgtccttctatttctgtta

SEQ ID NO: 317093 - DNA, 19 bp, Homo sapiens
  siRNA target sequence for RIMS2 (NM_014677.1,1977-1995).
gatgtcccacagttcttat

SEQ ID NO: 317094 - DNA, 19 bp, Homo sapiens
  siRNA target sequence for RIMS2 (NM_014677.1,2027-2045).
caaggttggtcaccaatta

SEQ ID NO: 317095 - DNA, 19 bp, Homo sapiens
  siRNA target sequence for RIMS2 (NM_014677.1,2030-2048).
ggttggtcaccaattaata

SEQ ID NO: 317096 - DNA, 19 bp, Homo sapiens
  siRNA target sequence for RIMS2 (NM_014677.1,2034-2052).
ggtcaccaattaatagtta

SEQ ID NO: 317097 - DNA, 19 bp, Homo sapiens
  siRNA target sequence for RIMS2 (NM_014677.1,2092-2110).
ggaggccaaggaatcctta

SEQ ID NO: 317098 - DNA, 19 bp, Homo sapiens
  siRNA target sequence for RIMS2 (NM_014677.1,2093-2111).
gaggccaaggaatccttat

SEQ ID NO: 317099 - DNA, 19 bp, Homo sapiens
  siRNA target sequence for RIMS2 (NM_014677.1,2098-2116).
caaggaatccttatgttaa

SEQ ID NO: 317100 - DNA, 19 bp, Homo sapiens
  siRNA target sequence for RIMS2 (NM_014677.1,2217-2235).
ccagtccaccgaagagaat

SEQ ID NO: 317101 - DNA, 19 bp, Homo sapiens
  siRNA target sequence for RIMS2 (NM_014677.1,2218-2236).
cagtccaccgaagagaatt

SEQ ID NO: 317102 - DNA, 19 bp, Homo sapiens
  siRNA target sequence for RIMS2 (NM_014677.1,2230-2248).
gagaatttcgggaacgaat

SEQ ID NO: 317103 - DNA, 19 bp, Homo sapiens
  siRNA target sequence for RIMS2 (NM_014677.1,2241-2259).
gaacgaatgctagagatta

SEQ ID NO: 317104 - DNA, 19 bp, Homo sapiens
  siRNA target sequence for RIMS2 (NM_014677.1,2351-2369).
gccacattggtacaaactt

SEQ ID NO: 317105 - DNA, 19 bp, Homo sapiens
  siRNA target sequence for RIMS2 (NM_014677.1,2374-2392).
cgcatgatgtctcttcatt

SEQ ID NO: 317106 - DNA, 19 bp, Homo sapiens
  siRNA target sequence for RIMS2 (NM_014677.1,2448-2466).
ccaacacggaggttgcaaa

SEQ ID NO: 317107 - DNA, 19 bp, Homo sapiens
  siRNA target sequence for RIMS2 (NM_014677.1,2462-2480).
gcaaaggtcaaagagaata

SEQ ID NO: 317108 - DNA, 19 bp, Homo sapiens
  siRNA target sequence for RIMS2 (NM_014677.1,2514-2532).
gatggaattggtgtagtat

SEQ ID NO: 317109 - DNA, 19 bp, Homo sapiens
  siRNA target sequence for RIMS2 (NM_014677.1,2518-2536).
gaattggtgtagtatcaga

SEQ ID NO: 317110 - DNA, 19 bp, Homo sapiens
  siRNA target sequence for RIMS2 (NM_014677.1,2547-2565).
gatggtcgagatcttcaaa

SEQ ID NO: 317111 - DNA, 19 bp, Homo sapiens
  siRNA target sequence for RIMS2 (NM_014677.1,2580-2598).
gtgccagaacaagtaatgt

SEQ ID NO: 317112 - DNA, 19 bp, Homo sapiens
  siRNA target sequence for RIMS2 (NM_014677.1,2582-2600).
gccagaacaagtaatgtca

SEQ ID NO: 317113 - DNA, 19 bp, Homo sapiens
  siRNA target sequence for RIMS2 (NM_014677.1,2624-2642).
gtctcctcatcgagtagat

SEQ ID NO: 317114 - DNA, 19 bp, Homo sapiens
  siRNA target sequence for RIMS2 (NM_014677.1,2626-2644).
ctcctcatcgagtagatgt

SEQ ID NO: 317115 - DNA, 19 bp, Homo sapiens
  siRNA target sequence for RIMS2 (NM_014677.1,2628-2646).
cctcatcgagtagatgtta

SEQ ID NO: 317116 - DNA, 19 bp, Homo sapiens
  siRNA target sequence for RIMS2 (NM_014677.1,2629-2647).
ctcatcgagtagatgttat

SEQ ID NO: 317117 - DNA, 19 bp, Homo sapiens
  siRNA target sequence for RIMS2 (NM_014677.1,2634-2652).
cgagtagatgttataggaa

SEQ ID NO: 317118 - DNA, 19 bp, Homo sapiens
  siRNA target sequence for RIMS2 (NM_014677.1,2643-2661).
gttataggaaggactagat

SEQ ID NO: 317119 - DNA, 19 bp, Homo sapiens
  siRNA target sequence for RIMS2 (NM_014677.1,2725-2743).
gcactatgaccggacatta

SEQ ID NO: 317120 - DNA, 19 bp, Homo sapiens
  siRNA target sequence for RIMS2 (NM_014677.1,2732-2750).
gaccggacattataataca

SEQ ID NO: 317121 - DNA, 19 bp, Homo sapiens
  siRNA target sequence for RIMS2 (NM_014677.1,2735-2753).
cggacattataatacaatt

SEQ ID NO: 317122 - DNA, 19 bp, Homo sapiens
  siRNA target sequence for RIMS2 (NM_014677.1,2736-2754).
ggacattataatacaatta

SEQ ID NO: 317123 - DNA, 19 bp, Homo sapiens
  siRNA target sequence for RIMS2 (NM_014677.1,2775-2793).
gtcatggatgaccattatt

SEQ ID NO: 317124 - DNA, 19 bp, Homo sapiens
  siRNA target sequence for RIMS2 (NM_014677.1,2777-2795).
catggatgaccattattct

SEQ ID NO: 317125 - DNA, 19 bp, Homo sapiens
  siRNA target sequence for RIMS2 (NM_014677.1,2786-2804).
ccattattctccagataga

SEQ ID NO: 317126 - DNA, 19 bp, Homo sapiens
  siRNA target sequence for RIMS2 (NM_014677.1,2824-2842).
cagatagacagccatatca

SEQ ID NO: 317127 - DNA, 19 bp, Homo sapiens
  siRNA target sequence for RIMS2 (NM_014677.1,2826-2844).
gatagacagccatatcaca

SEQ ID NO: 317128 - DNA, 19 bp, Homo sapiens
  siRNA target sequence for RIMS2 (NM_014677.1,2930-2948).
gaggtcgatgccttcatta

SEQ ID NO: 317129 - DNA, 19 bp, Homo sapiens
  siRNA target sequence for RIMS2 (NM_014677.1,2970-2988).
ccttcacctgccttatcga

SEQ ID NO: 317130 - DNA, 19 bp, Homo sapiens
  siRNA target sequence for RIMS2 (NM_014677.1,3014-3032).
ccagacaagcccatcaagt

SEQ ID NO: 317131 - DNA, 19 bp, Homo sapiens
  siRNA target sequence for RIMS2 (NM_014677.1,3015-3033).
cagacaagcccatcaagta

SEQ ID NO: 317132 - DNA, 19 bp, Homo sapiens
  siRNA target sequence for RIMS2 (NM_014677.1,3017-3035).
gacaagcccatcaagtact

SEQ ID NO: 317133 - DNA, 19 bp, Homo sapiens
  siRNA target sequence for RIMS2 (NM_014677.1,3083-3101).
gggaacgttggatagaaaa

SEQ ID NO: 317134 - DNA, 19 bp, Homo sapiens
  siRNA target sequence for RIMS2 (NM_014677.1,3125-3143).
cactgtccaaagaagtaca

SEQ ID NO: 317135 - DNA, 19 bp, Homo sapiens
  siRNA target sequence for RIMS2 (NM_014677.1,3230-3248).
ctcagaaggaaatctgatt

SEQ ID NO: 317136 - DNA, 19 bp, Homo sapiens
  siRNA target sequence for RIMS2 (NM_014677.1,3258-3276).
gttcgcttggcctctgata

SEQ ID NO: 317137 - DNA, 19 bp, Homo sapiens
  siRNA target sequence for RIMS2 (NM_014677.1,3452-3470).
gccagcaccgtatgtaaaa

SEQ ID NO: 317138 - DNA, 19 bp, Homo sapiens
  siRNA target sequence for RIMS2 (NM_014677.1,3454-3472).
cagcaccgtatgtaaaagt

SEQ ID NO: 317139 - DNA, 19 bp, Homo sapiens
  siRNA target sequence for RIMS2 (NM_014677.1,3456-3474).
gcaccgtatgtaaaagtgt

SEQ ID NO: 317140 - DNA, 19 bp, Homo sapiens
  siRNA target sequence for RIMS2 (NM_014677.1,3457-3475).
caccgtatgtaaaagtgta

SEQ ID NO: 317141 - DNA, 19 bp, Homo sapiens
  siRNA target sequence for RIMS2 (NM_014677.1,3541-3559).
ccctttaccagcagctatt

SEQ ID NO: 317142 - DNA, 19 bp, Homo sapiens
  siRNA target sequence for RIMS2 (NM_014677.1,3542-3560).
cctttaccagcagctatta

SEQ ID NO: 317143 - DNA, 19 bp, Homo sapiens
  siRNA target sequence for RIMS2 (NM_014677.1,3543-3561).
ctttaccagcagctattat

SEQ ID NO: 317144 - DNA, 19 bp, Homo sapiens
  siRNA target sequence for RIMS2 (NM_014677.1,3572-3590).
gagtccacaaggaaaagtt

SEQ ID NO: 317145 - DNA, 19 bp, Homo sapiens
  siRNA target sequence for RIMS2 (NM_014677.1,3620-3638).
ccgcatggatcacaaatct

SEQ ID NO: 317146 - DNA, 19 bp, Homo sapiens
  siRNA target sequence for RIMS2 (NM_014677.1,3621-3639).
cgcatggatcacaaatctt

SEQ ID NO: 317147 - DNA, 19 bp, Homo sapiens
  siRNA target sequence for RIMS2 (NM_014677.1,3644-3662).
gggagtggcccagatactt

SEQ ID NO: 317148 - DNA, 19 bp, Homo sapiens
  siRNA target sequence for RIMS2 (NM_014677.1,3650-3668).
ggcccagatacttttagat

SEQ ID NO: 317149 - DNA, 19 bp, Homo sapiens
  siRNA target sequence for RP1L1 (NM_178857.4,532-550).
gctacctctgctctgataa

SEQ ID NO: 317150 - DNA, 19 bp, Homo sapiens
  siRNA target sequence for RP1L1 (NM_178857.4,658-676).
cctcccggaagagtcttaa

SEQ ID NO: 317151 - DNA, 19 bp, Homo sapiens
  siRNA target sequence for RP1L1 (NM_178857.4,684-702).
cggaggatactgctgatta

SEQ ID NO: 317152 - DNA, 19 bp, Homo sapiens
  siRNA target sequence for RP1L1 (NM_178857.4,738-756).
ctcagtcacaggaatacta

SEQ ID NO: 317153 - DNA, 19 bp, Homo sapiens
  siRNA target sequence for RP1L1 (NM_178857.4,932-950).
gagaagcgaggctgaaact

SEQ ID NO: 317154 - DNA, 19 bp, Homo sapiens
  siRNA target sequence for RP1L1 (NM_178857.4,934-952).
gaagcgaggctgaaacttt

SEQ ID NO: 317155 - DNA, 19 bp, Homo sapiens
  siRNA target sequence for RP1L1 (NM_178857.4,957-975).
gggctgacttcaagaaaca

SEQ ID NO: 317156 - DNA, 19 bp, Homo sapiens
  siRNA target sequence for RP1L1 (NM_178857.4,1160-1178).
gaagaaggtccgcatgaat

SEQ ID NO: 317157 - DNA, 19 bp, Homo sapiens
  siRNA target sequence for RP1L1 (NM_178857.4,1431-1449).
ccagggcccaagtatgaaa

SEQ ID NO: 317158 - DNA, 19 bp, Homo sapiens
  siRNA target sequence for RP1L1 (NM_178857.4,1432-1450).
cagggcccaagtatgaaat

SEQ ID NO: 317159 - DNA, 19 bp, Homo sapiens
  siRNA target sequence for RP1L1 (NM_178857.4,1962-1980).
gccctgagtctttcatctt

SEQ ID NO: 317160 - DNA, 19 bp, Homo sapiens
  siRNA target sequence for RP1L1 (NM_178857.4,2325-2343).
ggctcagtgccacgatatt

SEQ ID NO: 317161 - DNA, 19 bp, Homo sapiens
  siRNA target sequence for RP1L1 (NM_178857.4,2327-2345).
ctcagtgccacgatattct

SEQ ID NO: 317162 - DNA, 19 bp, Homo sapiens
  siRNA target sequence for RP1L1 (NM_178857.4,2458-2476).
cagtccactcggattttgt

SEQ ID NO: 317163 - DNA, 19 bp, Homo sapiens
  siRNA target sequence for RP1L1 (NM_178857.4,2460-2478).
gtccactcggattttgttt

SEQ ID NO: 317164 - DNA, 19 bp, Homo sapiens
  siRNA target sequence for RP1L1 (NM_178857.4,3124-3142).
cagaagagcccatactcat

SEQ ID NO: 317165 - DNA, 19 bp, Homo sapiens
  siRNA target sequence for RP1L1 (NM_178857.4,3471-3489).
gcctccacgcagatcatga

SEQ ID NO: 317166 - DNA, 19 bp, Homo sapiens
  siRNA target sequence for RP1L1 (NM_178857.4,3596-3614).
ggccagtctgcagttattt

SEQ ID NO: 317167 - DNA, 19 bp, Homo sapiens
  siRNA target sequence for RP1L1 (NM_178857.4,3638-3656).
cagcaaagtgaggttcaaa

SEQ ID NO: 317168 - DNA, 19 bp, Homo sapiens
  siRNA target sequence for RP1L1 (NM_178857.4,4681-4699).
gcgtccacgggcaggaatt

SEQ ID NO: 317169 - DNA, 19 bp, Homo sapiens
  siRNA target sequence for RP1L1 (NM_178857.4,4683-4701).
gtccacgggcaggaattgt

SEQ ID NO: 317170 - DNA, 19 bp, Homo sapiens
  siRNA target sequence for RP1L1 (NM_178857.4,4685-4703).
ccacgggcaggaattgtca

SEQ ID NO: 317171 - DNA, 19 bp, Homo sapiens
  siRNA target sequence for RP1L1 (NM_178857.4,4820-4838).
cacagagccccctagtcat

SEQ ID NO: 317172 - DNA, 19 bp, Homo sapiens
  siRNA target sequence for RP1L1 (NM_178857.4,5023-5041).
gggtgtccgtgttactgaa

SEQ ID NO: 317173 - DNA, 19 bp, Homo sapiens
  siRNA target sequence for RP1L1 (NM_178857.4,5506-5524).
ccagaggtcccatcaaaga

SEQ ID NO: 317174 - DNA, 19 bp, Homo sapiens
  siRNA target sequence for RP1L1 (NM_178857.4,5893-5911).
ctgggcatgaggacaactt

SEQ ID NO: 317175 - DNA, 19 bp, Homo sapiens
  siRNA target sequence for RP1L1 (NM_178857.4,7496-7514).
gatgtacccagaaagttct

SEQ ID NO: 317176 - DNA, 19 bp, Homo sapiens
  siRNA target sequence for RP1L1 (NM_178857.4,7502-7520).
cccagaaagttctacttct

SEQ ID NO: 317177 - DNA, 19 bp, Homo sapiens
  siRNA target sequence for RP1L1 (NM_178857.4,7650-7668).
ggccaagatgacttagatt

SEQ ID NO: 317178 - DNA, 19 bp, Homo sapiens
  siRNA target sequence for SCRIB (NM_015356.1,86-104).
ccgtgccggaggagatcta

SEQ ID NO: 317179 - DNA, 19 bp, Homo sapiens
  siRNA target sequence for SCRIB (NM_015356.1,157-175).
gagctgcccaagccttttt

SEQ ID NO: 317180 - DNA, 19 bp, Homo sapiens
  siRNA target sequence for SCRIB (NM_015356.1,271-289).
gacgtgtcccggaacgata

SEQ ID NO: 317181 - DNA, 19 bp, Homo sapiens
  siRNA target sequence for SCRIB (NM_015356.1,301-319).
ccggagagcatcaagttct

SEQ ID NO: 317182 - DNA, 19 bp, Homo sapiens
  siRNA target sequence for SCRIB (NM_015356.1,588-606).
gggggctctgcccaatctt

SEQ ID NO: 317183 - DNA, 19 bp, Homo sapiens
  siRNA target sequence for SCRIB (NM_015356.1,810-828).
gctatccatcctaaaggta

SEQ ID NO: 317184 - DNA, 19 bp, Homo sapiens
  siRNA target sequence for SCRIB (NM_015356.1,1136-1154).
cgctcacccacctcaatct

SEQ ID NO: 317185 - DNA, 19 bp, Homo sapiens
  siRNA target sequence for SCRIB (NM_015356.1,2132-2150).
cgtttgaccaggccaataa

SEQ ID NO: 317186 - DNA, 19 bp, Homo sapiens
  siRNA target sequence for SCRIB (NM_015356.1,2267-2285).
gggacgacgagggcatatt

SEQ ID NO: 317187 - DNA, 19 bp, Homo sapiens
  siRNA target sequence for SCRIB (NM_015356.1,3044-3062).
gccctctggggcttagtat

SEQ ID NO: 317188 - DNA, 19 bp, Homo sapiens
  siRNA target sequence for SCRIB (NM_015356.1,3045-3063).
ccctctggggcttagtatt

SEQ ID NO: 317189 - DNA, 19 bp, Homo sapiens
  siRNA target sequence for SDCBP2 (NM_015685.3,438-456).
ggcatcaggcgataagatt

SEQ ID NO: 317190 - DNA, 19 bp, Homo sapiens
  siRNA target sequence for SDCBP2 (NM_015685.3,523-541).
gtcggcttcgtgatcaaga

SEQ ID NO: 317191 - DNA, 19 bp, Homo sapiens
  siRNA target sequence for SDCBP2 (NM_015685.3,619-637).
gtggacgggcagaatgtta

SEQ ID NO: 317192 - DNA, 19 bp, Homo sapiens
  siRNA target sequence for SDP35 (NM_017779.2,224-242).
cagtggattggctttatga

SEQ ID NO: 317193 - DNA, 19 bp, Homo sapiens
  siRNA target sequence for SDP35 (NM_017779.2,244-262).
ctattaagaaataatagca

SEQ ID NO: 317194 - DNA, 19 bp, Homo sapiens
  siRNA target sequence for SDP35 (NM_017779.2,354-372).
gggatcagaaaatgttgat

SEQ ID NO: 317195 - DNA, 19 bp, Homo sapiens
  siRNA target sequence for SDP35 (NM_017779.2,400-418).
gcaacttcgccacttaaaa

SEQ ID NO: 317196 - DNA, 19 bp, Homo sapiens
  siRNA target sequence for SDP35 (NM_017779.2,425-443).
cacgaaggtatccagaatt

SEQ ID NO: 317197 - DNA, 19 bp, Homo sapiens
  siRNA target sequence for SDP35 (NM_017779.2,427-445).
cgaaggtatccagaattga

SEQ ID NO: 317198 - DNA, 19 bp, Homo sapiens
  siRNA target sequence for SDP35 (NM_017779.2,518-536).
ctcctaaaaggcatggatt

SEQ ID NO: 317199 - DNA, 19 bp, Homo sapiens
  siRNA target sequence for SDP35 (NM_017779.2,663-681).
gatctacctgcaaaccatt

SEQ ID NO: 317200 - DNA, 19 bp, Homo sapiens
  siRNA target sequence for SDP35 (NM_017779.2,669-687).
cctgcaaaccattttaggt

SEQ ID NO: 317201 - DNA, 19 bp, Homo sapiens
  siRNA target sequence for SDP35 (NM_017779.2,686-704).
gtgtgccatccctagaaga

SEQ ID NO: 317202 - DNA, 19 bp, Homo sapiens
  siRNA target sequence for SDP35 (NM_017779.2,692-710).
catccctagaagaagtcat

SEQ ID NO: 317203 - DNA, 19 bp, Homo sapiens
  siRNA target sequence for SDP35 (NM_017779.2,695-713).
ccctagaagaagtcataaa

SEQ ID NO: 317204 - DNA, 19 bp, Homo sapiens
  siRNA target sequence for SDP35 (NM_017779.2,721-739).
caagtaattccccaatata

SEQ ID NO: 317205 - DNA, 19 bp, Homo sapiens
  siRNA target sequence for SDP35 (NM_017779.2,724-742).
gtaattccccaatatataa

SEQ ID NO: 317206 - DNA, 19 bp, Homo sapiens
  siRNA target sequence for SDP35 (NM_017779.2,730-748).
ccccaatatataatgtaca

SEQ ID NO: 317207 - DNA, 19 bp, Homo sapiens
  siRNA target sequence for SDP35 (NM_017779.2,753-771).
ggccaatacaagtaaacgt

SEQ ID NO: 317208 - DNA, 19 bp, Homo sapiens
  siRNA target sequence for SDP35 (NM_017779.2,770-788).
gtggagtagttatactaca

SEQ ID NO: 317209 - DNA, 19 bp, Homo sapiens
  siRNA target sequence for SDP35 (NM_017779.2,772-790).
ggagtagttatactacaaa

SEQ ID NO: 317210 - DNA, 19 bp, Homo sapiens
  siRNA target sequence for SDP35 (NM_017779.2,773-791).
gagtagttatactacaaaa

SEQ ID NO: 317211 - DNA, 19 bp, Homo sapiens
  siRNA target sequence for SDP35 (NM_017779.2,804-822).
cctccctcactgggtatta

SEQ ID NO: 317212 - DNA, 19 bp, Homo sapiens
  siRNA target sequence for SDP35 (NM_017779.2,827-845).
ccatgaagtgcctagcaaa

SEQ ID NO: 317213 - DNA, 19 bp, Homo sapiens
  siRNA target sequence for SDP35 (NM_017779.2,828-846).
catgaagtgcctagcaaat

SEQ ID NO: 317214 - DNA, 19 bp, Homo sapiens
  siRNA target sequence for SDP35 (NM_017779.2,848-866).
ggccaagaagcaatgatat

SEQ ID NO: 317215 - DNA, 19 bp, Homo sapiens
  siRNA target sequence for SDP35 (NM_017779.2,886-904).
ggatttgaacgagatgtat

SEQ ID NO: 317216 - DNA, 19 bp, Homo sapiens
  siRNA target sequence for SDP35 (NM_017779.2,892-910).
gaacgagatgtattcagaa

SEQ ID NO: 317217 - DNA, 19 bp, Homo sapiens
  siRNA target sequence for SDP35 (NM_017779.2,895-913).
cgagatgtattcagaacaa

SEQ ID NO: 317218 - DNA, 19 bp, Homo sapiens
  siRNA target sequence for SDP35 (NM_017779.2,908-926).
gaacaatcgcagattattt

SEQ ID NO: 317219 - DNA, 19 bp, Homo sapiens
  siRNA target sequence for SDP35 (NM_017779.2,934-952).
ctccctgaacctctactta

SEQ ID NO: 317220 - DNA, 19 bp, Homo sapiens
  siRNA target sequence for SDP35 (NM_017779.2,937-955).
cctgaacctctacttactt

SEQ ID NO: 317221 - DNA, 19 bp, Homo sapiens
  siRNA target sequence for SDP35 (NM_017779.2,1148-1166).
gtacgaggtcactgatgat

SEQ ID NO: 317222 - DNA, 19 bp, Homo sapiens
  siRNA target sequence for SDP35 (NM_017779.2,1588-1606).
ctttttggtgacaaaccta

SEQ ID NO: 317223 - DNA, 19 bp, Homo sapiens
  siRNA target sequence for SDP35 (NM_017779.2,1594-1612).
ggtgacaaacctacaatca

SEQ ID NO: 317224 - DNA, 19 bp, Homo sapiens
  siRNA target sequence for SDP35 (NM_017779.2,1595-1613).
gtgacaaacctacaatcaa

SEQ ID NO: 317225 - DNA, 19 bp, Homo sapiens
  siRNA target sequence for SDP35 (NM_017779.2,1639-1657).
ccaaagttccgtagtctaa

SEQ ID NO: 317226 - DNA, 19 bp, Homo sapiens
  siRNA target sequence for SH2B (NM_015503.1,2975-2993).
cctgctgcttcgaagtgaa

SEQ ID NO: 317227 - DNA, 19 bp, Homo sapiens
  siRNA target sequence for SH2B (NM_015503.1,3010-3028).
gaagtcgcctggagttctt

SEQ ID NO: 317228 - DNA, 19 bp, Homo sapiens
  siRNA target sequence for SH2B (NM_015503.1,3147-3165).
gaaggtccatccgagtata

SEQ ID NO: 317229 - DNA, 19 bp, Homo sapiens
  siRNA target sequence for SH2B (NM_015503.1,3150-3168).
ggtccatccgagtatatca

SEQ ID NO: 317230 - DNA, 19 bp, Homo sapiens
  siRNA target sequence for SH2B (NM_015503.1,3151-3169).
gtccatccgagtatatcat

SEQ ID NO: 317231 - DNA, 19 bp, Homo sapiens
  siRNA target sequence for SH2B (NM_015503.1,3282-3300).
cctgggacctcattcctta

SEQ ID NO: 317232 - DNA, 19 bp, Homo sapiens
  siRNA target sequence for SH2B (NM_015503.1,3285-3303).
gggacctcattccttacaa

SEQ ID NO: 317233 - DNA, 19 bp, Homo sapiens
  siRNA target sequence for SH2B (NM_015503.1,3881-3899).
gttccagtccattttcgat

SEQ ID NO: 317234 - DNA, 19 bp, Homo sapiens
  siRNA target sequence for SH2D2A (NM_003975.2,699-717).
gaccgaagaatcaaacttt

SEQ ID NO: 317235 - DNA, 19 bp, Homo sapiens
  siRNA target sequence for SH2D2A (NM_003975.2,743-761).
cccagtacagcccaatcat

SEQ ID NO: 317236 - DNA, 19 bp, Homo sapiens
  siRNA target sequence for SH2D2A (NM_003975.2,745-763).
cagtacagcccaatcatca

SEQ ID NO: 317237 - DNA, 19 bp, Homo sapiens
  siRNA target sequence for SH2D2A (NM_003975.2,747-765).
gtacagcccaatcatcaaa

SEQ ID NO: 317238 - DNA, 19 bp, Homo sapiens
  siRNA target sequence for SH2D2A (NM_003975.2,779-797).
cagtcccgatgcagaaaga

SEQ ID NO: 317239 - DNA, 19 bp, Homo sapiens
  siRNA target sequence for SH2D2A (NM_003975.2,920-938).
ccaagccctccaatcctat

SEQ ID NO: 317240 - DNA, 19 bp, Homo sapiens
  siRNA target sequence for SH2D2A (NM_003975.2,950-968).
ctgatgaacccatagcttt

SEQ ID NO: 317241 - DNA, 19 bp, Homo sapiens
  siRNA target sequence for SH2D2A (NM_003975.2,1001-1019).
cccccagcaacatctatgt

SEQ ID NO: 317242 - DNA, 19 bp, Homo sapiens
  siRNA target sequence for SHANK1 (NM_016148.1,352-370).
gcaggatgtgctcaactat

SEQ ID NO: 317243 - DNA, 19 bp, Homo sapiens
  siRNA target sequence for SHANK1 (NM_016148.1,483-501).
gatacaagacccgagttta

SEQ ID NO: 317244 - DNA, 19 bp, Homo sapiens
  siRNA target sequence for SHANK1 (NM_016148.1,487-505).
caagacccgagtttacaaa

SEQ ID NO: 317245 - DNA, 19 bp, Homo sapiens
  siRNA target sequence for SHANK1 (NM_016148.1,759-777).
gcatgaccgcactgcataa

SEQ ID NO: 317246 - DNA, 19 bp, Homo sapiens
  siRNA target sequence for SHANK1 (NM_016148.1,1930-1948).
ctcctacgacagctttgat

SEQ ID NO: 317247 - DNA, 19 bp, Homo sapiens
  siRNA target sequence for SHANK1 (NM_016148.1,1942-1960).
ctttgatgccccaagctta

SEQ ID NO: 317248 - DNA, 19 bp, Homo sapiens
  siRNA target sequence for SHANK1 (NM_016148.1,1973-1991).
ggcccagggagcgattaca

SEQ ID NO: 317249 - DNA, 19 bp, Homo sapiens
  siRNA target sequence for SHANK1 (NM_016148.1,1974-1992).
gcccagggagcgattacat

SEQ ID NO: 317250 - DNA, 19 bp, Homo sapiens
  siRNA target sequence for SHANK1 (NM_016148.1,1976-1994).
ccagggagcgattacatca

SEQ ID NO: 317251 - DNA, 19 bp, Homo sapiens
  siRNA target sequence for SHANK1 (NM_016148.1,1977-1995).
cagggagcgattacatcat

SEQ ID NO: 317252 - DNA, 19 bp, Homo sapiens
  siRNA target sequence for SHANK1 (NM_016148.1,1979-1997).
gggagcgattacatcatta

SEQ ID NO: 317253 - DNA, 19 bp, Homo sapiens
  siRNA target sequence for SHANK1 (NM_016148.1,1983-2001).
gcgattacatcattaagga

SEQ ID NO: 317254 - DNA, 19 bp, Homo sapiens
  siRNA target sequence for SHANK1 (NM_016148.1,2369-2387).
ctgcgttccaaatctatga

SEQ ID NO: 317255 - DNA, 19 bp, Homo sapiens
  siRNA target sequence for SHANK1 (NM_016148.1,2631-2649).
gttacgagcgtccttcttt

SEQ ID NO: 317256 - DNA, 19 bp, Homo sapiens
  siRNA target sequence for SHANK1 (NM_016148.1,2671-2689).
gatgctccggcaaaaatct

SEQ ID NO: 317257 - DNA, 19 bp, Homo sapiens
  siRNA target sequence for SHANK1 (NM_016148.1,2726-2744).
cccccagccatgaaattca

SEQ ID NO: 317258 - DNA, 19 bp, Homo sapiens
  siRNA target sequence for SHANK1 (NM_016148.1,3860-3878).
cggctgcgccactccaaat

SEQ ID NO: 317259 - DNA, 19 bp, Homo sapiens
  siRNA target sequence for SHANK1 (NM_016148.1,3863-3881).
ctgcgccactccaaatcca

SEQ ID NO: 317260 - DNA, 19 bp, Homo sapiens
  siRNA target sequence for SHANK1 (NM_016148.1,4425-4443).
cgcaccccggagtaagcaa

SEQ ID NO: 317261 - DNA, 19 bp, Homo sapiens
  siRNA target sequence for SHANK1 (NM_016148.1,4490-4508).
cacgtgcggttccttgaaa

SEQ ID NO: 317262 - DNA, 19 bp, Homo sapiens
  siRNA target sequence for SHANK1 (NM_016148.1,4493-4511).
gtgcggttccttgaaaact

SEQ ID NO: 317263 - DNA, 19 bp, Homo sapiens
  siRNA target sequence for SHANK1 (NM_016148.1,4620-4638).
cgagggccagcgaagagaa

SEQ ID NO: 317264 - DNA, 19 bp, Homo sapiens
  siRNA target sequence for SHANK1 (NM_016148.1,4688-4706).
gaagatggcgaattccttt

SEQ ID NO: 317265 - DNA, 19 bp, Homo sapiens
  siRNA target sequence for SHANK1 (NM_016148.1,4721-4739).
cctccgcctctggaattct

SEQ ID NO: 317266 - DNA, 19 bp, Homo sapiens
  siRNA target sequence for SHANK1 (NM_016148.1,5615-5633).
gtaaaagccagcatcatca

SEQ ID NO: 317267 - DNA, 19 bp, Homo sapiens
  siRNA target sequence for SHANK1 (NM_016148.1,6283-6301).
gccgtttggcgctaaacct

SEQ ID NO: 317268 - DNA, 19 bp, Homo sapiens
  siRNA target sequence for SHANK1 (NM_016148.1,6469-6487).
catcgaccgggctctcaaa

SEQ ID NO: 317269 - DNA, 19 bp, Homo sapiens
  siRNA target sequence for SHD (NM_020209.1,420-438).
ccccggagatgccaagtat

SEQ ID NO: 317270 - DNA, 19 bp, Homo sapiens
  siRNA target sequence for SHD (NM_020209.1,525-543).
ggaagccgacactgagtat

SEQ ID NO: 317271 - DNA, 19 bp, Homo sapiens
  siRNA target sequence for SHD (NM_020209.1,526-544).
gaagccgacactgagtatt

SEQ ID NO: 317272 - DNA, 19 bp, Homo sapiens
  siRNA target sequence for SHD (NM_020209.1,643-661).
ggggtgcagctctatgaca

SEQ ID NO: 317273 - DNA, 19 bp, Homo sapiens
  siRNA target sequence for SHD (NM_020209.1,732-750).
gatgccccaggaagatgaa

SEQ ID NO: 317274 - DNA, 19 bp, Homo sapiens
  siRNA target sequence for SHD (NM_020209.1,809-827).
cgtttgcagtgcagtttga

SEQ ID NO: 317275 - DNA, 19 bp, Homo sapiens
  siRNA target sequence for SHD (NM_020209.1,933-951).
gaaacagccgtggtttcat

SEQ ID NO: 317276 - DNA, 19 bp, Homo sapiens
  siRNA target sequence for ShrmL (NM_020859.1,981-999).
caagcctagtgccacatta

SEQ ID NO: 317277 - DNA, 19 bp, Homo sapiens
  siRNA target sequence for ShrmL (NM_020859.1,985-1003).
cctagtgccacattaaact

SEQ ID NO: 317278 - DNA, 19 bp, Homo sapiens
  siRNA target sequence for ShrmL (NM_020859.1,1017-1035).
caagggaaggtacatttat

SEQ ID NO: 317279 - DNA, 19 bp, Homo sapiens
  siRNA target sequence for ShrmL (NM_020859.1,1057-1075).
ggagctccctggggtttta

SEQ ID NO: 317280 - DNA, 19 bp, Homo sapiens
  siRNA target sequence for ShrmL (NM_020859.1,1092-1110).
ggagcacggagaaccatta

SEQ ID NO: 317281 - DNA, 19 bp, Homo sapiens
  siRNA target sequence for ShrmL (NM_020859.1,1096-1114).
cacggagaaccattaatca

SEQ ID NO: 317282 - DNA, 19 bp, Homo sapiens
  siRNA target sequence for ShrmL (NM_020859.1,1228-1246).
gtttccctggtgaaaggat

SEQ ID NO: 317283 - DNA, 19 bp, Homo sapiens
  siRNA target sequence for ShrmL (NM_020859.1,1306-1324).
gatactggtgcctctaact

SEQ ID NO: 317284 - DNA, 19 bp, Homo sapiens
  siRNA target sequence for ShrmL (NM_020859.1,1374-1392).
gtggtcaggaggggttaaa

SEQ ID NO: 317285 - DNA, 19 bp, Homo sapiens
  siRNA target sequence for ShrmL (NM_020859.1,1376-1394).
ggtcaggaggggttaaact

SEQ ID NO: 317286 - DNA, 19 bp, Homo sapiens
  siRNA target sequence for ShrmL (NM_020859.1,1377-1395).
gtcaggaggggttaaactt

SEQ ID NO: 317287 - DNA, 19 bp, Homo sapiens
  siRNA target sequence for ShrmL (NM_020859.1,1435-1453).
cactcgtggcacacaacta

SEQ ID NO: 317288 - DNA, 19 bp, Homo sapiens
  siRNA target sequence for ShrmL (NM_020859.1,1440-1458).
gtggcacacaactaaatct

SEQ ID NO: 317289 - DNA, 19 bp, Homo sapiens
  siRNA target sequence for ShrmL (NM_020859.1,1514-1532).
ctccttggcaccaaagcta

SEQ ID NO: 317290 - DNA, 19 bp, Homo sapiens
  siRNA target sequence for ShrmL (NM_020859.1,1553-1571).
gtgacctctccaactatga

SEQ ID NO: 317291 - DNA, 19 bp, Homo sapiens
  siRNA target sequence for ShrmL (NM_020859.1,1566-1584).
ctatgaccatgcttatcta

SEQ ID NO: 317292 - DNA, 19 bp, Homo sapiens
  siRNA target sequence for ShrmL (NM_020859.1,2901-2919).
gagcctgtcaggcaacttt

SEQ ID NO: 317293 - DNA, 19 bp, Homo sapiens
  siRNA target sequence for ShrmL (NM_020859.1,3142-3160).
ggtgcctcggcttctttca

SEQ ID NO: 317294 - DNA, 19 bp, Homo sapiens
  siRNA target sequence for ShrmL (NM_020859.1,3388-3406).
cacaggaccgtctcaactt

SEQ ID NO: 317295 - DNA, 19 bp, Homo sapiens
  siRNA target sequence for ShrmL (NM_020859.1,3426-3444).
cttcgaggagacaaaagca

SEQ ID NO: 317296 - DNA, 19 bp, Homo sapiens
  siRNA target sequence for ShrmL (NM_020859.1,4730-4748).
gtggctttggtcttgtgaa

SEQ ID NO: 317297 - DNA, 19 bp, Homo sapiens
  siRNA target sequence for ShrmL (NM_020859.1,4782-4800).
gtcactcagttgttcagaa

SEQ ID NO: 317298 - DNA, 19 bp, Homo sapiens
  siRNA target sequence for ShrmL (NM_020859.1,4884-4902).
ctccgttcctagtgaatgt

SEQ ID NO: 317299 - DNA, 19 bp, Homo sapiens
  siRNA target sequence for ShrmL (NM_020859.1,5313-5331).
cctgaagcactatcaaaaa

SEQ ID NO: 317300 - DNA, 19 bp, Homo sapiens
  siRNA target sequence for ShrmL (NM_020859.1,5447-5465).
cgccacctcatgaggatta

SEQ ID NO: 317301 - DNA, 19 bp, Homo sapiens
  siRNA target sequence for ShrmL (NM_020859.1,5448-5466).
gccacctcatgaggattat

SEQ ID NO: 317302 - DNA, 19 bp, Homo sapiens
  siRNA target sequence for ShrmL (NM_020859.1,5507-5525).
cgtccagccccacatttga

SEQ ID NO: 317303 - DNA, 19 bp, Homo sapiens
  siRNA target sequence for ShrmL (NM_020859.1,5560-5578).
caggaaaccccggtgtata

SEQ ID NO: 317304 - DNA, 19 bp, Homo sapiens
  siRNA target sequence for ShrmL (NM_020859.1,5563-5581).
gaaaccccggtgtatagca

SEQ ID NO: 317305 - DNA, 19 bp, Homo sapiens
  siRNA target sequence for ShrmL (NM_020859.1,5599-5617).
cctcctccccacactgtat

SEQ ID NO: 317306 - DNA, 19 bp, Homo sapiens
  siRNA target sequence for ShrmL (NM_020859.1,5653-5671).
ccacgccccagcttcaaca

SEQ ID NO: 317307 - DNA, 19 bp, Homo sapiens
  siRNA target sequence for ShrmL (NM_020859.1,5851-5869).
gcacccatccagactcaaa

SEQ ID NO: 317308 - DNA, 19 bp, Homo sapiens
  siRNA target sequence for ShrmL (NM_020859.1,5891-5909).
gtggaactcagggtttaga

SEQ ID NO: 317309 - DNA, 19 bp, Homo sapiens
  siRNA target sequence for ShrmL (NM_020859.1,5923-5941).
cctgatcctcagaagagtt

SEQ ID NO: 317310 - DNA, 19 bp, Homo sapiens
  siRNA target sequence for ShrmL (NM_020859.1,5982-6000).
ccaccaagacaaatctcta

SEQ ID NO: 317311 - DNA, 19 bp, Homo sapiens
  siRNA target sequence for ShrmL (NM_020859.1,5996-6014).
ctctagcagacattttgga

SEQ ID NO: 317312 - DNA, 19 bp, Homo sapiens
  siRNA target sequence for ShrmL (NM_020859.1,6023-6041).
ccaggctgaagacaacaat

SEQ ID NO: 317313 - DNA, 19 bp, Homo sapiens
  siRNA target sequence for ShrmL (NM_020859.1,6172-6190).
gtgagcatgttggttaact

SEQ ID NO: 317314 - DNA, 19 bp, Homo sapiens
  siRNA target sequence for ShrmL (NM_020859.1,6371-6389).
cggacatcaagctcaacaa

SEQ ID NO: 317315 - DNA, 19 bp, Homo sapiens
  siRNA target sequence for ShrmL (NM_020859.1,6427-6445).
ctctgcaagcccaatgagt

SEQ ID NO: 317316 - DNA, 19 bp, Homo sapiens
  siRNA target sequence for ShrmL (NM_020859.1,6448-6466).
gacaagtataggatgttca

SEQ ID NO: 317317 - DNA, 19 bp, Homo sapiens
  siRNA target sequence for ShrmL (NM_020859.1,6515-6533).
gtctagcccgtgttgagaa

SEQ ID NO: 317318 - DNA, 19 bp, Homo sapiens
  siRNA target sequence for ShrmL (NM_020859.1,6581-6599).
ctctttacgagaaaaggaa

SEQ ID NO: 317319 - DNA, 19 bp, Homo sapiens
  siRNA target sequence for ShrmL (NM_020859.1,6900-6918).
ctgtactttcagtggtatt

SEQ ID NO: 317320 - DNA, 19 bp, Homo sapiens
  siRNA target sequence for SLA2 (NM_032214.2,585-603).
gtctcaggcagagagtata

SEQ ID NO: 317321 - DNA, 19 bp, Homo sapiens
  siRNA target sequence for SLA2 (NM_032214.2,873-891).
gccctggtggaccattact

SEQ ID NO: 317322 - DNA, 19 bp, Homo sapiens
  siRNA target sequence for SLA2 (NM_032214.2,875-893).
cctggtggaccattactct

SEQ ID NO: 317323 - DNA, 19 bp, Homo sapiens
  siRNA target sequence for SLA2 (NM_032214.2,954-972).
ccgctccctggcaaggata

SEQ ID NO: 317324 - DNA, 19 bp, Homo sapiens
  siRNA target sequence for SLA2 (NM_032214.2,955-973).
cgctccctggcaaggatat

SEQ ID NO: 317325 - DNA, 19 bp, Homo sapiens
  siRNA target sequence for SSB1 (NM_025106.2,421-439).
cccctgtgtcctatgatgt

SEQ ID NO: 317326 - DNA, 19 bp, Homo sapiens
  siRNA target sequence for SSB1 (NM_025106.2,470-488).
ccgatcgctcaatgtcttt

SEQ ID NO: 317327 - DNA, 19 bp, Homo sapiens
  siRNA target sequence for SSB1 (NM_025106.2,472-490).
gatcgctcaatgtctttgt

SEQ ID NO: 317328 - DNA, 19 bp, Homo sapiens
  siRNA target sequence for SSB1 (NM_025106.2,475-493).
cgctcaatgtctttgtgaa

SEQ ID NO: 317329 - DNA, 19 bp, Homo sapiens
  siRNA target sequence for SSB1 (NM_025106.2,497-515).
ggacgacaagctcatcttt

SEQ ID NO: 317330 - DNA, 19 bp, Homo sapiens
  siRNA target sequence for SSB1 (NM_025106.2,679-697).
caaccctcgtggggaataa

SEQ ID NO: 317331 - DNA, 19 bp, Homo sapiens
  siRNA target sequence for SSB1 (NM_025106.2,682-700).
ccctcgtggggaataacca

SEQ ID NO: 317332 - DNA, 19 bp, Homo sapiens
  siRNA target sequence for SSB1 (NM_025106.2,786-804).
gaaccagatgagacattca

SEQ ID NO: 317333 - DNA, 19 bp, Homo sapiens
  siRNA target sequence for SSB1 (NM_025106.2,845-863).
cgggactctgagcttcatt

SEQ ID NO: 317334 - DNA, 19 bp, Homo sapiens
  siRNA target sequence for SSB1 (NM_025106.2,902-920).
caagggcaaaaaactgtat

SEQ ID NO: 317335 - DNA, 19 bp, Homo sapiens
  siRNA target sequence for SSB1 (NM_025106.2,993-1011).
ctgccgctcatggatttgt

SEQ ID NO: 317336 - DNA, 19 bp, Homo sapiens
  siRNA target sequence for SSB3 (NM_080861.3,176-194).
ctagcaggctccactaact

SEQ ID NO: 317337 - DNA, 19 bp, Homo sapiens
  siRNA target sequence for SSB3 (NM_080861.3,381-399).
gagaggaagacgagtattt

SEQ ID NO: 317338 - DNA, 19 bp, Homo sapiens
  siRNA target sequence for SSB3 (NM_080861.3,403-421).
ctgggtctgggatgactta

SEQ ID NO: 317339 - DNA, 19 bp, Homo sapiens
  siRNA target sequence for SSB3 (NM_080861.3,406-424).
ggtctgggatgacttaaat

SEQ ID NO: 317340 - DNA, 19 bp, Homo sapiens
  siRNA target sequence for SSB3 (NM_080861.3,407-425).
gtctgggatgacttaaata

SEQ ID NO: 317341 - DNA, 19 bp, Homo sapiens
  siRNA target sequence for SSB3 (NM_080861.3,536-554).
cacttctgggagatcaaga

SEQ ID NO: 317342 - DNA, 19 bp, Homo sapiens
  siRNA target sequence for SSB3 (NM_080861.3,773-791).
cacggcacactcacctttt

SEQ ID NO: 317343 - DNA, 19 bp, Homo sapiens
  siRNA target sequence for SSB3 (NM_080861.3,780-798).
cactcacctttttcaagaa

SEQ ID NO: 317344 - DNA, 19 bp, Homo sapiens
  siRNA target sequence for SSB3 (NM_080861.3,782-800).
ctcacctttttcaagaaca

SEQ ID NO: 317345 - DNA, 19 bp, Homo sapiens
  siRNA target sequence for SSB4 (NM_080862.1,581-599).
cggcacccacgctgtagtt

SEQ ID NO: 317346 - DNA, 19 bp, Homo sapiens
  siRNA target sequence for SSB4 (NM_080862.1,1041-1059).
cctcagtctctcaaaaact

SEQ ID NO: 317347 - DNA, 19 bp, Homo sapiens
  siRNA target sequence for STAC (NM_003149.1,160-178).
ctaaaacgatcactttctt

SEQ ID NO: 317348 - DNA, 19 bp, Homo sapiens
  siRNA target sequence for STAC (NM_003149.1,166-184).
cgatcactttctttcaaga

SEQ ID NO: 317349 - DNA, 19 bp, Homo sapiens
  siRNA target sequence for STAC (NM_003149.1,189-207).
gagtttacggagcaaaagt

SEQ ID NO: 317350 - DNA, 19 bp, Homo sapiens
  siRNA target sequence for STAC (NM_003149.1,359-377).
ctcatgcctttcaggaata

SEQ ID NO: 317351 - DNA, 19 bp, Homo sapiens
  siRNA target sequence for STAC (NM_003149.1,451-469).
cgctgcaaagcctgtaaga

SEQ ID NO: 317352 - DNA, 19 bp, Homo sapiens
  siRNA target sequence for STAC (NM_003149.1,535-553).
gggtttcggcgttactaca

SEQ ID NO: 317353 - DNA, 19 bp, Homo sapiens
  siRNA target sequence for STAC (NM_003149.1,555-573).
ctcccccttgctcattcat

SEQ ID NO: 317354 - DNA, 19 bp, Homo sapiens
  siRNA target sequence for STAC (NM_003149.1,558-576).
ccccttgctcattcatgaa

SEQ ID NO: 317355 - DNA, 19 bp, Homo sapiens
  siRNA target sequence for STAC (NM_003149.1,560-578).
ccttgctcattcatgaaca

SEQ ID NO: 317356 - DNA, 19 bp, Homo sapiens
  siRNA target sequence for STAC (NM_003149.1,564-582).
gctcattcatgaacagttt

SEQ ID NO: 317357 - DNA, 19 bp, Homo sapiens
  siRNA target sequence for STAC (NM_003149.1,583-601).
ggctgcattaaagaagtta

SEQ ID NO: 317358 - DNA, 19 bp, Homo sapiens
  siRNA target sequence for STAC (NM_003149.1,605-623).
ccattgcctgtggcaataa

SEQ ID NO: 317359 - DNA, 19 bp, Homo sapiens
  siRNA target sequence for STAC (NM_003149.1,773-791).
gcgggtatgacctaaggaa

SEQ ID NO: 317360 - DNA, 19 bp, Homo sapiens
  siRNA target sequence for STAC (NM_003149.1,774-792).
cgggtatgacctaaggaaa

SEQ ID NO: 317361 - DNA, 19 bp, Homo sapiens
  siRNA target sequence for STAC (NM_003149.1,793-811).
cgcagcaacagcgtgttta

SEQ ID NO: 317362 - DNA, 19 bp, Homo sapiens
  siRNA target sequence for STAC (NM_003149.1,844-862).
gatccagcgaagaacataa

SEQ ID NO: 317363 - DNA, 19 bp, Homo sapiens
  siRNA target sequence for STAC (NM_003149.1,881-899).
ccaaagacccattacagat

SEQ ID NO: 317364 - DNA, 19 bp, Homo sapiens
  siRNA target sequence for STAC (NM_003149.1,886-904).
gacccattacagatgaaca

SEQ ID NO: 317365 - DNA, 19 bp, Homo sapiens
  siRNA target sequence for STAC (NM_003149.1,905-923).
cctatgttgccttgtacaa

SEQ ID NO: 317366 - DNA, 19 bp, Homo sapiens
  siRNA target sequence for STAC (NM_003149.1,957-975).
gaggccaggagacataatt

SEQ ID NO: 317367 - DNA, 19 bp, Homo sapiens
  siRNA target sequence for STAC (NM_003149.1,960-978).
gccaggagacataattact

SEQ ID NO: 317368 - DNA, 19 bp, Homo sapiens
  siRNA target sequence for STAC (NM_003149.1,1149-1167).
gatctgcgtgagttctgaa

SEQ ID NO: 317369 - DNA, 19 bp, Homo sapiens
  siRNA target sequence for STAC (NM_003149.1,1154-1172).
gcgtgagttctgaagaaga

SEQ ID NO: 317370 - DNA, 19 bp, Homo sapiens
  siRNA target sequence for STAC (NM_003149.1,1155-1173).
cgtgagttctgaagaagaa

SEQ ID NO: 317371 - DNA, 19 bp, Homo sapiens
  siRNA target sequence for STAC (NM_003149.1,1218-1236).
catcccccttgatgtacta

SEQ ID NO: 317372 - DNA, 19 bp, Homo sapiens
  siRNA target sequence for STAC (NM_003149.1,1221-1239).
cccccttgatgtactagaa

SEQ ID NO: 317373 - DNA, 19 bp, Homo sapiens
  siRNA target sequence for STAC (NM_003149.1,1222-1240).
ccccttgatgtactagaaa

SEQ ID NO: 317374 - DNA, 19 bp, Homo sapiens
  siRNA target sequence for STMN4 (NM_030795.2,119-137).
cccttgctgcctacaaaga

SEQ ID NO: 317375 - DNA, 19 bp, Homo sapiens
  siRNA target sequence for STMN4 (NM_030795.2,121-139).
cttgctgcctacaaagaga

SEQ ID NO: 317376 - DNA, 19 bp, Homo sapiens
  siRNA target sequence for STMN4 (NM_030795.2,184-202).
ctggccgatcccctgaata

SEQ ID NO: 317377 - DNA, 19 bp, Homo sapiens
  siRNA target sequence for STMN4 (NM_030795.2,187-205).
gccgatcccctgaataagt

SEQ ID NO: 317378 - DNA, 19 bp, Homo sapiens
  siRNA target sequence for STMN4 (NM_030795.2,198-216).
gaataagtcgtcctacaaa

SEQ ID NO: 317379 - DNA, 19 bp, Homo sapiens
  siRNA target sequence for STMN4 (NM_030795.2,204-222).
gtcgtcctacaaatatgaa

SEQ ID NO: 317380 - DNA, 19 bp, Homo sapiens
  siRNA target sequence for STMN4 (NM_030795.2,307-325).
gacacggtggacctgaatt

SEQ ID NO: 317381 - DNA, 19 bp, Homo sapiens
  siRNA target sequence for STMN4 (NM_030795.2,368-386).
gcacctcgggccaatcctt

SEQ ID NO: 317382 - DNA, 19 bp, Homo sapiens
  siRNA target sequence for STMN4 (NM_030795.2,369-387).
cacctcgggccaatccttt

SEQ ID NO: 317383 - DNA, 19 bp, Homo sapiens
  siRNA target sequence for STMN4 (NM_030795.2,372-390).
ctcgggccaatcctttgaa

SEQ ID NO: 317384 - DNA, 19 bp, Homo sapiens
  siRNA target sequence for STMN4 (NM_030795.2,374-392).
cgggccaatcctttgaagt

SEQ ID NO: 317385 - DNA, 19 bp, Homo sapiens
  siRNA target sequence for STMN4 (NM_030795.2,399-417).
gaagccaccctcctttgat

SEQ ID NO: 317386 - DNA, 19 bp, Homo sapiens
  siRNA target sequence for SYNJ2BP (NM_018373.1,85-103).
gaacggaagagtggattat

SEQ ID NO: 317387 - DNA, 19 bp, Homo sapiens
  siRNA target sequence for SYNJ2BP (NM_018373.1,171-189).
ggacagatcagcagtatgt

SEQ ID NO: 317388 - DNA, 19 bp, Homo sapiens
  siRNA target sequence for SYNJ2BP (NM_018373.1,211-229).
cgtcagccgcatcaaagaa

SEQ ID NO: 317389 - DNA, 19 bp, Homo sapiens
  siRNA target sequence for SYNJ2BP (NM_018373.1,323-341).
gctgtagacctctttcgta

SEQ ID NO: 317390 - DNA, 19 bp, Homo sapiens
  siRNA target sequence for SYNJ2BP (NM_018373.1,324-342).
ctgtagacctctttcgtaa

SEQ ID NO: 317391 - DNA, 19 bp, Homo sapiens
  siRNA target sequence for SYNJ2BP (NM_018373.1,388-406).
gcagaatggacctatagga

SEQ ID NO: 317392 - DNA, 19 bp, Homo sapiens
  siRNA target sequence for SYNJ2BP (NM_018373.1,432-450).
gtattcccatatttatggt

SEQ ID NO: 317393 - DNA, 19 bp, Homo sapiens
  siRNA target sequence for SYNJ2BP (NM_018373.1,485-503).
gcctgggctttcatgagat

SEQ ID NO: 317394 - DNA, 19 bp, Homo sapiens
  siRNA target sequence for SYNJ2BP (NM_018373.1,486-504).
cctgggctttcatgagata

SEQ ID NO: 317395 - DNA, 19 bp, Homo sapiens
  siRNA target sequence for SYNJ2BP (NM_018373.1,499-517).
gagataccggcaacaactt

SEQ ID NO: 317396 - DNA, 19 bp, Homo sapiens
  siRNA target sequence for TENC1 (NM_015319.2,417-435).
ggtggcgacgcacagaaaa

SEQ ID NO: 317397 - DNA, 19 bp, Homo sapiens
  siRNA target sequence for TENC1 (NM_015319.2,418-436).
gtggcgacgcacagaaaat

SEQ ID NO: 317398 - DNA, 19 bp, Homo sapiens
  siRNA target sequence for TENC1 (NM_015319.2,422-440).
cgacgcacagaaaatgtga

SEQ ID NO: 317399 - DNA, 19 bp, Homo sapiens
  siRNA target sequence for TENC1 (NM_015319.2,710-728).
cccatgtgctgcaatccaa

SEQ ID NO: 317400 - DNA, 19 bp, Homo sapiens
  siRNA target sequence for TENC1 (NM_015319.2,895-913).
cagcacgtggtcgtactat

SEQ ID NO: 317401 - DNA, 19 bp, Homo sapiens
  siRNA target sequence for TENC1 (NM_015319.2,898-916).
cacgtggtcgtactatact

SEQ ID NO: 317402 - DNA, 19 bp, Homo sapiens
  siRNA target sequence for TENC1 (NM_015319.2,1007-1025).
ctcttaccatgcggaaatt

SEQ ID NO: 317403 - DNA, 19 bp, Homo sapiens
  siRNA target sequence for TENC1 (NM_015319.2,1009-1027).
cttaccatgcggaaattct

SEQ ID NO: 317404 - DNA, 19 bp, Homo sapiens
  siRNA target sequence for TENC1 (NM_015319.2,1056-1074).
gccctcccagcgtcgatat

SEQ ID NO: 317405 - DNA, 19 bp, Homo sapiens
  siRNA target sequence for TENC1 (NM_015319.2,1057-1075).
ccctcccagcgtcgatata

SEQ ID NO: 317406 - DNA, 19 bp, Homo sapiens
  siRNA target sequence for TENC1 (NM_015319.2,1058-1076).
cctcccagcgtcgatatat

SEQ ID NO: 317407 - DNA, 19 bp, Homo sapiens
  siRNA target sequence for TENC1 (NM_015319.2,1069-1087).
cgatatatcagctacttca

SEQ ID NO: 317408 - DNA, 19 bp, Homo sapiens
  siRNA target sequence for TENC1 (NM_015319.2,1185-1203).
cttccagcccttccttaaa

SEQ ID NO: 317409 - DNA, 19 bp, Homo sapiens
  siRNA target sequence for TENC1 (NM_015319.2,1232-1250).
catctggagtctatcacat

SEQ ID NO: 317410 - DNA, 19 bp, Homo sapiens
  siRNA target sequence for TENC1 (NM_015319.2,1262-1280).
gtccccagcagctttgcat

SEQ ID NO: 317411 - DNA, 19 bp, Homo sapiens
  siRNA target sequence for TENC1 (NM_015319.2,1311-1329).
cgatgtcatggtaacatgt

SEQ ID NO: 317412 - DNA, 19 bp, Homo sapiens
  siRNA target sequence for TENC1 (NM_015319.2,1312-1330).
gatgtcatggtaacatgtt

SEQ ID NO: 317413 - DNA, 19 bp, Homo sapiens
  siRNA target sequence for TENC1 (NM_015319.2,1541-1559).
cggtctctgtcgactacaa

SEQ ID NO: 317414 - DNA, 19 bp, Homo sapiens
  siRNA target sequence for TENC1 (NM_015319.2,2613-2631).
cagttactgcccagcatat

SEQ ID NO: 317415 - DNA, 19 bp, Homo sapiens
  siRNA target sequence for TENC1 (NM_015319.2,3547-3565).
gcacctctgctctcagata

SEQ ID NO: 317416 - DNA, 19 bp, Homo sapiens
  siRNA target sequence for TENC1 (NM_015319.2,3548-3566).
cacctctgctctcagataa

SEQ ID NO: 317417 - DNA, 19 bp, Homo sapiens
  siRNA target sequence for TENC1 (NM_015319.2,3954-3972).
gcgcattcccagcaaagat

SEQ ID NO: 317418 - DNA, 19 bp, Homo sapiens
  siRNA target sequence for TENC1 (NM_015319.2,4209-4227).
ccaaaggaagctcttcttt

SEQ ID NO: 317419 - DNA, 19 bp, Homo sapiens
  siRNA target sequence for TENC1 (NM_015319.2,4399-4417).
cctgctggcgccattgtca

SEQ ID NO: 317420 - DNA, 19 bp, Homo sapiens
  siRNA target sequence for TENC1 (NM_170754.2,201-219).
cgcaagcaggcctaggaaa

SEQ ID NO: 317421 - DNA, 19 bp, Homo sapiens
  siRNA target sequence for TJP2 (NM_004817.1,179-197).
gtgaccctacaaaaggatt

SEQ ID NO: 317422 - DNA, 19 bp, Homo sapiens
  siRNA target sequence for TJP2 (NM_004817.1,257-275).
ggagaaacgtcaattgtca

SEQ ID NO: 317423 - DNA, 19 bp, Homo sapiens
  siRNA target sequence for TJP2 (NM_004817.1,361-379).
ggatgtgcttcattcgttt

SEQ ID NO: 317424 - DNA, 19 bp, Homo sapiens
  siRNA target sequence for TJP2 (NM_004817.1,405-423).
ggaaggtcgctgctattgt

SEQ ID NO: 317425 - DNA, 19 bp, Homo sapiens
  siRNA target sequence for TJP2 (NM_004817.1,502-520).
ggtgatggacgagtttgat

SEQ ID NO: 317426 - DNA, 19 bp, Homo sapiens
  siRNA target sequence for TJP2 (NM_004817.1,1001-1019).
gtcctcctgatgaaaagca

SEQ ID NO: 317427 - DNA, 19 bp, Homo sapiens
  siRNA target sequence for TJP2 (NM_004817.1,1017-1035).
gcagagcgaacgaagagta

SEQ ID NO: 317428 - DNA, 19 bp, Homo sapiens
  siRNA target sequence for TJP2 (NM_004817.1,1018-1036).
cagagcgaacgaagagtat

SEQ ID NO: 317429 - DNA, 19 bp, Homo sapiens
  siRNA target sequence for TJP2 (NM_004817.1,1049-1067).
gggagtcagatcttcgtaa

SEQ ID NO: 317430 - DNA, 19 bp, Homo sapiens
  siRNA target sequence for TJP2 (NM_004817.1,1050-1068).
ggagtcagatcttcgtaaa

SEQ ID NO: 317431 - DNA, 19 bp, Homo sapiens
  siRNA target sequence for TJP2 (NM_004817.1,1053-1071).
gtcagatcttcgtaaagga

SEQ ID NO: 317432 - DNA, 19 bp, Homo sapiens
  siRNA target sequence for TJP2 (NM_004817.1,1055-1073).
cagatcttcgtaaaggaaa

SEQ ID NO: 317433 - DNA, 19 bp, Homo sapiens
  siRNA target sequence for TJP2 (NM_004817.1,1080-1098).
gaacgggtctggcaactaa

SEQ ID NO: 317434 - DNA, 19 bp, Homo sapiens
  siRNA target sequence for TJP2 (NM_004817.1,1084-1102).
gggtctggcaactaaagat

SEQ ID NO: 317435 - DNA, 19 bp, Homo sapiens
  siRNA target sequence for TJP2 (NM_004817.1,1108-1126).
ccttcacgaaggagacata

SEQ ID NO: 317436 - DNA, 19 bp, Homo sapiens
  siRNA target sequence for TJP2 (NM_004817.1,1119-1137).
gagacataattctcaagat

SEQ ID NO: 317437 - DNA, 19 bp, Homo sapiens
  siRNA target sequence for TJP2 (NM_004817.1,1135-1153).
gatcaatgggactgtaact

SEQ ID NO: 317438 - DNA, 19 bp, Homo sapiens
  siRNA target sequence for TJP2 (NM_004817.1,1148-1166).
gtaactgagaacatgtctt

SEQ ID NO: 317439 - DNA, 19 bp, Homo sapiens
  siRNA target sequence for TJP2 (NM_004817.1,1170-1188).
cggatgctcgaaaattgat

SEQ ID NO: 317440 - DNA, 19 bp, Homo sapiens
  siRNA target sequence for TJP2 (NM_004817.1,1171-1189).
ggatgctcgaaaattgata

SEQ ID NO: 317441 - DNA, 19 bp, Homo sapiens
  siRNA target sequence for TJP2 (NM_004817.1,1175-1193).
gctcgaaaattgatagaaa

SEQ ID NO: 317442 - DNA, 19 bp, Homo sapiens
  siRNA target sequence for TJP2 (NM_004817.1,1176-1194).
ctcgaaaattgatagaaaa

SEQ ID NO: 317443 - DNA, 19 bp, Homo sapiens
  siRNA target sequence for TJP2 (NM_004817.1,1246-1264).
catcaacatcccgtcatta

SEQ ID NO: 317444 - DNA, 19 bp, Homo sapiens
  siRNA target sequence for TJP2 (NM_004817.1,1249-1267).
caacatcccgtcattaaat

SEQ ID NO: 317445 - DNA, 19 bp, Homo sapiens
  siRNA target sequence for TJP2 (NM_004817.1,1331-1349).
gagagacgtcatcagtatt

SEQ ID NO: 317446 - DNA, 19 bp, Homo sapiens
  siRNA target sequence for TJP2 (NM_004817.1,1333-1351).
gagacgtcatcagtattct

SEQ ID NO: 317447 - DNA, 19 bp, Homo sapiens
  siRNA target sequence for TJP2 (NM_004817.1,1459-1477).
gtccacaggggatattgca

SEQ ID NO: 317448 - DNA, 19 bp, Homo sapiens
  siRNA target sequence for TJP2 (NM_004817.1,1501-1519).
caaggaacccagataccaa

SEQ ID NO: 317449 - DNA, 19 bp, Homo sapiens
  siRNA target sequence for TJP2 (NM_004817.1,1601-1619).
cctaataccaaaatggtaa

SEQ ID NO: 317450 - DNA, 19 bp, Homo sapiens
  siRNA target sequence for TJP2 (NM_004817.1,1663-1681).
caatgatgtcgggatattt

SEQ ID NO: 317451 - DNA, 19 bp, Homo sapiens
  siRNA target sequence for TJP2 (NM_004817.1,1730-1748).
gaaggagaccagattctga

SEQ ID NO: 317452 - DNA, 19 bp, Homo sapiens
  siRNA target sequence for TJP2 (NM_004817.1,1751-1769).
gtgaacacacaggatttca

SEQ ID NO: 317453 - DNA, 19 bp, Homo sapiens
  siRNA target sequence for TJP2 (NM_004817.1,1804-1822).
gttagaaatccctaaaggt

SEQ ID NO: 317454 - DNA, 19 bp, Homo sapiens
  siRNA target sequence for TJP2 (NM_004817.1,1820-1838).
ggtgaaatggtgaccattt

SEQ ID NO: 317455 - DNA, 19 bp, Homo sapiens
  siRNA target sequence for TJP2 (NM_004817.1,1849-1867).
ccgagccgatgtgtataga

SEQ ID NO: 317456 - DNA, 19 bp, Homo sapiens
  siRNA target sequence for TJP2 (NM_004817.1,1851-1869).
gagccgatgtgtatagaga

SEQ ID NO: 317457 - DNA, 19 bp, Homo sapiens
  siRNA target sequence for TJP2 (NM_004817.1,1883-1901).
ggcagaggggattcgtttt

SEQ ID NO: 317458 - DNA, 19 bp, Homo sapiens
  siRNA target sequence for TJP2 (NM_004817.1,1884-1902).
gcagaggggattcgttttt

SEQ ID NO: 317459 - DNA, 19 bp, Homo sapiens
  siRNA target sequence for TJP2 (NM_004817.1,1889-1907).
ggggattcgttttttataa

SEQ ID NO: 317460 - DNA, 19 bp, Homo sapiens
  siRNA target sequence for TJP2 (NM_004817.1,1891-1909).
ggattcgttttttataaga

SEQ ID NO: 317461 - DNA, 19 bp, Homo sapiens
  siRNA target sequence for TJP2 (NM_004817.1,2115-2133).
ctggggaccgggcagattt

SEQ ID NO: 317462 - DNA, 19 bp, Homo sapiens
  siRNA target sequence for TJP2 (NM_004817.1,2117-2135).
ggggaccgggcagatttct

SEQ ID NO: 317463 - DNA, 19 bp, Homo sapiens
  siRNA target sequence for TJP2 (NM_004817.1,2232-2250).
cttatgagagggttttgct

SEQ ID NO: 317464 - DNA, 19 bp, Homo sapiens
  siRNA target sequence for TJP2 (NM_004817.1,2252-2270).
cgagaagctggtttcaaga

SEQ ID NO: 317465 - DNA, 19 bp, Homo sapiens
  siRNA target sequence for TJP2 (NM_004817.1,2290-2308).
ccccatagctgatatagca

SEQ ID NO: 317466 - DNA, 19 bp, Homo sapiens
  siRNA target sequence for TJP2 (NM_004817.1,2291-2309).
cccatagctgatatagcaa

SEQ ID NO: 317467 - DNA, 19 bp, Homo sapiens
  siRNA target sequence for TJP2 (NM_004817.1,2297-2315).
gctgatatagcaatggaaa

SEQ ID NO: 317468 - DNA, 19 bp, Homo sapiens
  siRNA target sequence for TJP2 (NM_004817.1,2369-2387).
gatgcaggatctgagaaat

SEQ ID NO: 317469 - DNA, 19 bp, Homo sapiens
  siRNA target sequence for TJP2 (NM_004817.1,2391-2409).
ctggagtggtccggttaaa

SEQ ID NO: 317470 - DNA, 19 bp, Homo sapiens
  siRNA target sequence for TJP2 (NM_004817.1,2393-2411).
ggagtggtccggttaaata

SEQ ID NO: 317471 - DNA, 19 bp, Homo sapiens
  siRNA target sequence for TJP2 (NM_004817.1,2468-2486).
gctgtggacctgttgaatt

SEQ ID NO: 317472 - DNA, 19 bp, Homo sapiens
  siRNA target sequence for TJP2 (NM_004817.1,2583-2601).
gttctcgaaagttatttga

SEQ ID NO: 317473 - DNA, 19 bp, Homo sapiens
  siRNA target sequence for TJP2 (NM_004817.1,2586-2604).
ctcgaaagttatttgatca

SEQ ID NO: 317474 - DNA, 19 bp, Homo sapiens
  siRNA target sequence for TJP2 (NM_004817.1,2645-2663).
gctacaatcaacctaaatt

SEQ ID NO: 317475 - DNA, 19 bp, Homo sapiens
  siRNA target sequence for TJP2 (NM_004817.1,2679-2697).
ggtttggcagcttaaagga

SEQ ID NO: 317476 - DNA, 19 bp, Homo sapiens
  siRNA target sequence for TJP2 (NM_004817.1,2685-2703).
gcagcttaaaggacactat

SEQ ID NO: 317477 - DNA, 19 bp, Homo sapiens
  siRNA target sequence for TJP2 (NM_004817.1,2774-2792).
gaccgcatgtcctacttaa

SEQ ID NO: 317478 - DNA, 19 bp, Homo sapiens
  siRNA target sequence for TJP2 (NM_004817.1,3008-3026).
gctagcagcgatcaactta

SEQ ID NO: 317479 - DNA, 19 bp, Homo sapiens
  siRNA target sequence for TJP2 (NM_004817.1,3017-3035).
gatcaacttagggacaata

SEQ ID NO: 317480 - DNA, 19 bp, Homo sapiens
  siRNA target sequence for TJP2 (NM_004817.1,3210-3228).
cctttgggcggtctatact

SEQ ID NO: 317481 - DNA, 19 bp, Homo sapiens
  siRNA target sequence for TJP2 (NM_004817.1,3280-3298).
cagtgaggagcaagataat

SEQ ID NO: 317482 - DNA, 19 bp, Homo sapiens
  siRNA target sequence for TJP2 (NM_004817.1,3395-3413).
gaatgcaaggatcgaaatt

SEQ ID NO: 317483 - DNA, 19 bp, Homo sapiens
  siRNA target sequence for WSB2 (NM_018639.3,235-253).
gacactgcatcgtcaaact

SEQ ID NO: 317484 - DNA, 19 bp, Homo sapiens
  siRNA target sequence for WSB2 (NM_018639.3,237-255).
cactgcatcgtcaaactga

SEQ ID NO: 317485 - DNA, 19 bp, Homo sapiens
  siRNA target sequence for WSB2 (NM_018639.3,307-325).
gccgaagtagcaaaaatga

SEQ ID NO: 317486 - DNA, 19 bp, Homo sapiens
  siRNA target sequence for WSB2 (NM_018639.3,309-327).
cgaagtagcaaaaatgaga

SEQ ID NO: 317487 - DNA, 19 bp, Homo sapiens
  siRNA target sequence for WSB2 (NM_018639.3,359-377).
gctggactgtggtcagatt

SEQ ID NO: 317488 - DNA, 19 bp, Homo sapiens
  siRNA target sequence for WSB2 (NM_018639.3,363-381).
gactgtggtcagattgtct

SEQ ID NO: 317489 - DNA, 19 bp, Homo sapiens
  siRNA target sequence for WSB2 (NM_018639.3,583-601).
cacccagtggcagtttgat

SEQ ID NO: 317490 - DNA, 19 bp, Homo sapiens
  siRNA target sequence for WSB2 (NM_018639.3,611-629).
cgcgtcacgggataagact

SEQ ID NO: 317491 - DNA, 19 bp, Homo sapiens
  siRNA target sequence for WSB2 (NM_018639.3,633-651).
cgcatctgggacctgaata

SEQ ID NO: 317492 - DNA, 19 bp, Homo sapiens
  siRNA target sequence for WSB2 (NM_018639.3,634-652).
gcatctgggacctgaataa

SEQ ID NO: 317493 - DNA, 19 bp, Homo sapiens
  siRNA target sequence for WSB2 (NM_018639.3,635-653).
catctgggacctgaataaa

SEQ ID NO: 317494 - DNA, 19 bp, Homo sapiens
  siRNA target sequence for WSB2 (NM_018639.3,776-794).
gaggtcctacacgttaatt

SEQ ID NO: 317495 - DNA, 19 bp, Homo sapiens
  siRNA target sequence for WSB2 (NM_018639.3,861-879).
gtcacggcttcttacgata

SEQ ID NO: 317496 - DNA, 19 bp, Homo sapiens
  siRNA target sequence for WSB2 (NM_018639.3,865-883).
cggcttcttacgataccaa

SEQ ID NO: 317497 - DNA, 19 bp, Homo sapiens
  siRNA target sequence for WSB2 (NM_018639.3,866-884).
ggcttcttacgataccaat

SEQ ID NO: 317498 - DNA, 19 bp, Homo sapiens
  siRNA target sequence for WSB2 (NM_018639.3,871-889).
cttacgataccaatgtgat

SEQ ID NO: 317499 - DNA, 19 bp, Homo sapiens
  siRNA target sequence for WSB2 (NM_018639.3,876-894).
gataccaatgtgattatgt

SEQ ID NO: 317500 - DNA, 19 bp, Homo sapiens
  siRNA target sequence for WSB2 (NM_018639.3,960-978).
gacagtgacgtccacatta

SEQ ID NO: 317501 - DNA, 19 bp, Homo sapiens
  siRNA target sequence for WSB2 (NM_018639.3,1219-1237).
ggaaagcccttcgaagttt

SEQ ID NO: 317502 - DNA, 19 bp, Homo sapiens
  siRNA target sequence for WSB2 (NM_018639.3,1227-1245).
cttcgaagtttcctaacaa

SEQ ID NO: 317503 - DNA, 19 bp, Homo sapiens
  siRNA target sequence for WSB2 (NM_018639.3,1230-1248).
cgaagtttcctaacaactt

SEQ ID NO: 317504 - DNA, 19 bp, Homo sapiens
  siRNA target sequence for WSB2 (NM_018639.3,1293-1311).
ctcacatacaggacttttt

SEQ ID NO: 317505 - DNA, 19 bp, Homo sapiens
  siRNA target sequence for XTP1 (NM_018369.1,93-111).
gaccgtggagctttttcgt

SEQ ID NO: 317506 - DNA, 19 bp, Homo sapiens
  siRNA target sequence for XTP1 (NM_018369.1,117-135).
gatgccgttacggaaacat

SEQ ID NO: 317507 - DNA, 19 bp, Homo sapiens
  siRNA target sequence for XTP1 (NM_018369.1,232-250).
gaagtgacccgcaaacaaa

SEQ ID NO: 317508 - DNA, 19 bp, Homo sapiens
  siRNA target sequence for XTP1 (NM_018369.1,251-269).
cggtccagctgctaaaaaa

SEQ ID NO: 317509 - DNA, 19 bp, Homo sapiens
  siRNA target sequence for XTP1 (NM_018369.1,331-349).
gacaatcgtcacttataca

SEQ ID NO: 317510 - DNA, 19 bp, Homo sapiens
  siRNA target sequence for XTP1 (NM_018369.1,333-351).
caatcgtcacttatacaga

SEQ ID NO: 317511 - DNA, 19 bp, Homo sapiens
  siRNA target sequence for XTP1 (NM_018369.1,362-380).
cttcacccctgaaaccata

SEQ ID NO: 317512 - DNA, 19 bp, Homo sapiens
  siRNA target sequence for XTP1 (NM_018369.1,368-386).
ccctgaaaccatatccaaa

SEQ ID NO: 317513 - DNA, 19 bp, Homo sapiens
  siRNA target sequence for XTP1 (NM_018369.1,395-413).
caaaccaaaaggatgttat

SEQ ID NO: 317514 - DNA, 19 bp, Homo sapiens
  siRNA target sequence for XTP1 (NM_018369.1,438-456).
cccaccaggcacttcacaa

SEQ ID NO: 317515 - DNA, 19 bp, Homo sapiens
  siRNA target sequence for XTP1 (NM_018369.1,474-492).
gccagttgtgatgaattct

SEQ ID NO: 317516 - DNA, 19 bp, Homo sapiens
  siRNA target sequence for XTP1 (NM_018369.1,500-518).
ggtacaagcgtcacagtat

SEQ ID NO: 317517 - DNA, 19 bp, Homo sapiens
  siRNA target sequence for XTP1 (NM_018369.1,501-519).
gtacaagcgtcacagtatt

SEQ ID NO: 317518 - DNA, 19 bp, Homo sapiens
  siRNA target sequence for XTP1 (NM_018369.1,504-522).
caagcgtcacagtattgca

SEQ ID NO: 317519 - DNA, 19 bp, Homo sapiens
  siRNA target sequence for XTP1 (NM_018369.1,507-525).
gcgtcacagtattgcaatt

SEQ ID NO: 317520 - DNA, 19 bp, Homo sapiens
  siRNA target sequence for XTP1 (NM_018369.1,574-592).
gccaatgtagaagagatat

SEQ ID NO: 317521 - DNA, 19 bp, Homo sapiens
  siRNA target sequence for XTP1 (NM_018369.1,599-617).
ctatgacattatcatactt

SEQ ID NO: 317522 - DNA, 19 bp, Homo sapiens
  siRNA target sequence for XTP1 (NM_018369.1,605-623).
cattatcatacttacagaa

SEQ ID NO: 317523 - DNA, 19 bp, Homo sapiens
  siRNA target sequence for XTP1 (NM_018369.1,611-629).
catacttacagaaaattct

SEQ ID NO: 317524 - DNA, 19 bp, Homo sapiens
  siRNA target sequence for XTP1 (NM_018369.1,658-676).
gacgtcaaacttgtcaatt

SEQ ID NO: 317525 - DNA, 19 bp, Homo sapiens
  siRNA target sequence for XTP1 (NM_018369.1,661-679).
gtcaaacttgtcaattcga

SEQ ID NO: 317526 - DNA, 19 bp, Homo sapiens
  siRNA target sequence for XTP1 (NM_018369.1,667-685).
cttgtcaattcgaagttca

SEQ ID NO: 317527 - DNA, 19 bp, Homo sapiens
  siRNA target sequence for XTP1 (NM_018369.1,670-688).
gtcaattcgaagttcatca

SEQ ID NO: 317528 - DNA, 19 bp, Homo sapiens
  siRNA target sequence for XTP1 (NM_018369.1,677-695).
cgaagttcatcatccataa

SEQ ID NO: 317529 - DNA, 19 bp, Homo sapiens
  siRNA target sequence for XTP1 (NM_018369.1,690-708).
ccataatgtatatagtgtt

SEQ ID NO: 317530 - DNA, 19 bp, Homo sapiens
  siRNA target sequence for XTP1 (NM_018369.1,710-728).
gcaagcagggagttgttat

SEQ ID NO: 317531 - DNA, 19 bp, Homo sapiens
  siRNA target sequence for XTP1 (NM_018369.1,719-737).
gagttgttattcttgatga

SEQ ID NO: 317532 - DNA, 19 bp, Homo sapiens
  siRNA target sequence for XTP1 (NM_018369.1,763-781).
gtgctgtcagctatgaagt

SEQ ID NO: 317533 - DNA, 19 bp, Homo sapiens
  siRNA target sequence for XTP1 (NM_018369.1,766-784).
ctgtcagctatgaagtgtt

SEQ ID NO: 317534 - DNA, 19 bp, Homo sapiens
  siRNA target sequence for XTP1 (NM_018369.1,787-805).
gcaaattggcccaactgtt

SEQ ID NO: 317535 - DNA, 19 bp, Homo sapiens
  siRNA target sequence for XTP1 (NM_018369.1,821-839).
ctatgtacttgggatttga

SEQ ID NO: 317536 - DNA, 19 bp, Homo sapiens
  siRNA target sequence for XTP1 (NM_018369.1,882-900).
gaaagagcctctacttaca

SEQ ID NO: 317537 - DNA, 19 bp, Homo sapiens
  siRNA target sequence for XTP1 (NM_018369.1,926-944).
gtgtactgggtttgttaca

SEQ ID NO: 317538 - DNA, 19 bp, Homo sapiens
  siRNA target sequence for XTP1 (NM_018369.1,928-946).
gtactgggtttgttacaga

SEQ ID NO: 317539 - DNA, 19 bp, Homo sapiens
  siRNA target sequence for XTP1 (NM_018369.1,1007-1025).
ggagaaagttacagctatt

SEQ ID NO: 317540 - DNA, 19 bp, Homo sapiens
  siRNA target sequence for XTP1 (NM_018369.1,1039-1057).
gcaaggatttgcttaaaca

SEQ ID NO: 317541 - DNA, 19 bp, Homo sapiens
  siRNA target sequence for XTP1 (NM_018369.1,1072-1090).
ctgtgtgatggctttggta

SEQ ID NO: 317542 - DNA, 19 bp, Homo sapiens
  siRNA target sequence for XTP1 (NM_018369.1,1169-1187).
ctgctagattggtaacgtt

SEQ ID NO: 317543 - DNA, 19 bp, Homo sapiens
  siRNA target sequence for XTP1 (NM_018369.1,1175-1193).
gattggtaacgtttctgat

SEQ ID NO: 317544 - DNA, 19 bp, Homo sapiens
  siRNA target sequence for XTP1 (NM_018369.1,1184-1202).
cgtttctgatggacaatta

SEQ ID NO: 317545 - DNA, 19 bp, Homo sapiens
  siRNA target sequence for XTP1 (NM_018369.1,1227-1245).
ggccttgcagacctctata

SEQ ID NO: 317546 - DNA, 19 bp, Homo sapiens
  siRNA target sequence for XTP1 (NM_018369.1,1248-1266).
ggagcgtgtggctcatcta

SEQ ID NO: 317547 - DNA, 19 bp, Homo sapiens
  siRNA target sequence for XTP1 (NM_018369.1,1264-1282).
ctacgaagagtccagataa

SEQ ID NO: 317548 - DNA, 19 bp, Homo sapiens
  siRNA target sequence for XTP1 (NM_018369.1,1289-1307).
caggagctgatatggatat

SEQ ID NO: 317549 - DNA, 19 bp, Homo sapiens
  siRNA target sequence for XTP1 (NM_018369.1,1291-1309).
ggagctgatatggatatca

SEQ ID NO: 317550 - DNA, 19 bp, Homo sapiens
  siRNA target sequence for XTP1 (NM_018369.1,1295-1313).
ctgatatggatatcacttt

SEQ ID NO: 317551 - DNA, 19 bp, Homo sapiens
  siRNA target sequence for XTP1 (NM_018369.1,1297-1315).
gatatggatatcactttat

SEQ ID NO: 317552 - DNA, 19 bp, Homo sapiens
  siRNA target sequence for XTP1 (NM_018369.1,1346-1364).
cagaggaatttgaatatca

SEQ ID NO: 317553 - DNA, 19 bp, Homo sapiens
  siRNA target sequence for XTP1 (NM_018369.1,1398-1416).
cttgttggaggaagtcata

SEQ ID NO: 317554 - DNA, 19 bp, Homo sapiens
  siRNA target sequence for XTP1 (NM_018369.1,1461-1479).
gcagtttcagaaatcctat

SEQ ID NO: 317555 - DNA, 19 bp, Homo sapiens
  siRNA target sequence for XTP1 (NM_018369.1,1476-1494).
ctatcctgaagtctatcaa

SEQ ID NO: 317556 - DNA, 19 bp, Homo sapiens
  siRNA target sequence for XTP1 (NM_018369.1,1488-1506).
ctatcaagaacgatttcct

SEQ ID NO: 317557 - DNA, 19 bp, Homo sapiens
  siRNA target sequence for XTP1 (NM_018369.1,1550-1568).
cgaaaccacagctgctaat

SEQ ID NO: 317558 - DNA, 19 bp, Homo sapiens
  siRNA target sequence for XTP1 (NM_018369.1,1564-1582).
ctaatgtgggcactaaaga

SEQ ID NO: 317559 - DNA, 19 bp, Homo sapiens
  siRNA target sequence for XTP1 (NM_018369.1,1591-1609).
caaccatttcaaagaacta

SEQ ID NO: 317560 - DNA, 19 bp, Homo sapiens
  siRNA target sequence for XTP1 (NM_018369.1,1604-1622).
gaactagaagttttcgaat

SEQ ID NO: 317561 - DNA, 19 bp, Homo sapiens
  siRNA target sequence for CHL1 (NM_006614.2,294-312).
gaggactaatcgtatatct

SEQ ID NO: 317562 - DNA, 19 bp, Homo sapiens
  siRNA target sequence for CHL1 (NM_006614.2,299-317).
ctaatcgtatatctaatgt

SEQ ID NO: 317563 - DNA, 19 bp, Homo sapiens
  siRNA target sequence for CHL1 (NM_006614.2,365-383).
caacaggttccaacaatca

SEQ ID NO: 317564 - DNA, 19 bp, Homo sapiens
  siRNA target sequence for CHL1 (NM_006614.2,368-386).
caggttccaacaatcataa

SEQ ID NO: 317565 - DNA, 19 bp, Homo sapiens
  siRNA target sequence for CHL1 (NM_006614.2,374-392).
ccaacaatcataaaacagt

SEQ ID NO: 317566 - DNA, 19 bp, Homo sapiens
  siRNA target sequence for CHL1 (NM_006614.2,409-427).
ctttcccttcgatgagtat

SEQ ID NO: 317567 - DNA, 19 bp, Homo sapiens
  siRNA target sequence for CHL1 (NM_006614.2,418-436).
cgatgagtattttcaaatt

SEQ ID NO: 317568 - DNA, 19 bp, Homo sapiens
  siRNA target sequence for CHL1 (NM_006614.2,505-523).
cactgaccatcggataatt

SEQ ID NO: 317569 - DNA, 19 bp, Homo sapiens
  siRNA target sequence for CHL1 (NM_006614.2,509-527).
gaccatcggataattccat

SEQ ID NO: 317570 - DNA, 19 bp, Homo sapiens
  siRNA target sequence for CHL1 (NM_006614.2,517-535).
gataattccatcgaacaat

SEQ ID NO: 317571 - DNA, 19 bp, Homo sapiens
  siRNA target sequence for CHL1 (NM_006614.2,528-546).
cgaacaattcaggaacatt

SEQ ID NO: 317572 - DNA, 19 bp, Homo sapiens
  siRNA target sequence for CHL1 (NM_006614.2,554-572).
ccaaacgaggggcacatat

SEQ ID NO: 317573 - DNA, 19 bp, Homo sapiens
  siRNA target sequence for CHL1 (NM_006614.2,564-582).
ggcacatatctcactttca

SEQ ID NO: 317574 - DNA, 19 bp, Homo sapiens
  siRNA target sequence for CHL1 (NM_006614.2,739-757).
caaaggcctcccaccttta

SEQ ID NO: 317575 - DNA, 19 bp, Homo sapiens
  siRNA target sequence for CHL1 (NM_006614.2,748-766).
cccacctttacacatttat

SEQ ID NO: 317576 - DNA, 19 bp, Homo sapiens
  siRNA target sequence for CHL1 (NM_006614.2,788-806).
cacatcgaacaagatgaaa

SEQ ID NO: 317577 - DNA, 19 bp, Homo sapiens
  siRNA target sequence for CHL1 (NM_006614.2,793-811).
cgaacaagatgaaagagta

SEQ ID NO: 317578 - DNA, 19 bp, Homo sapiens
  siRNA target sequence for CHL1 (NM_006614.2,817-835).
gagccaaaagggagatcta

SEQ ID NO: 317579 - DNA, 19 bp, Homo sapiens
  siRNA target sequence for CHL1 (NM_006614.2,821-839).
caaaagggagatctatact

SEQ ID NO: 317580 - DNA, 19 bp, Homo sapiens
  siRNA target sequence for CHL1 (NM_006614.2,868-886).
caatgactactgttgcttt

SEQ ID NO: 317581 - DNA, 19 bp, Homo sapiens
  siRNA target sequence for CHL1 (NM_006614.2,887-905).
gctgcatttccaagattaa

SEQ ID NO: 317582 - DNA, 19 bp, Homo sapiens
  siRNA target sequence for CHL1 (NM_006614.2,926-944).
ccaatgaaactaacagtta

SEQ ID NO: 317583 - DNA, 19 bp, Homo sapiens
  siRNA target sequence for CHL1 (NM_006614.2,927-945).
caatgaaactaacagttaa

SEQ ID NO: 317584 - DNA, 19 bp, Homo sapiens
  siRNA target sequence for CHL1 (NM_006614.2,948-966).
gtttaaagcatgctaatga

SEQ ID NO: 317585 - DNA, 19 bp, Homo sapiens
  siRNA target sequence for CHL1 (NM_006614.2,956-974).
catgctaatgactcaagtt

SEQ ID NO: 317586 - DNA, 19 bp, Homo sapiens
  siRNA target sequence for CHL1 (NM_006614.2,959-977).
gctaatgactcaagttcat

SEQ ID NO: 317587 - DNA, 19 bp, Homo sapiens
  siRNA target sequence for CHL1 (NM_006614.2,969-987).
caagttcatccacagaaat

SEQ ID NO: 317588 - DNA, 19 bp, Homo sapiens
  siRNA target sequence for CHL1 (NM_006614.2,1050-1068).
gtggcagtgagtcttcaat

SEQ ID NO: 317589 - DNA, 19 bp, Homo sapiens
  siRNA target sequence for CHL1 (NM_006614.2,1052-1070).
ggcagtgagtcttcaatta

SEQ ID NO: 317590 - DNA, 19 bp, Homo sapiens
  siRNA target sequence for CHL1 (NM_006614.2,1125-1143).
ctccacaggttgattggaa

SEQ ID NO: 317591 - DNA, 19 bp, Homo sapiens
  siRNA target sequence for CHL1 (NM_006614.2,1144-1162).
caaaattggtggtgactta

SEQ ID NO: 317592 - DNA, 19 bp, Homo sapiens
  siRNA target sequence for CHL1 (NM_006614.2,1222-1240).
ctaccaggacaaaggaaat

SEQ ID NO: 317593 - DNA, 19 bp, Homo sapiens
  siRNA target sequence for CHL1 (NM_006614.2,1245-1263).
gctgcacagccagcaattt

SEQ ID NO: 317594 - DNA, 19 bp, Homo sapiens
  siRNA target sequence for CHL1 (NM_006614.2,1248-1266).
gcacagccagcaatttctt

SEQ ID NO: 317595 - DNA, 19 bp, Homo sapiens
  siRNA target sequence for CHL1 (NM_006614.2,1269-1287).
gaacagccactcacgattt

SEQ ID NO: 317596 - DNA, 19 bp, Homo sapiens
  siRNA target sequence for CHL1 (NM_006614.2,1282-1300).
cgattttcacgttatagta

SEQ ID NO: 317597 - DNA, 19 bp, Homo sapiens
  siRNA target sequence for CHL1 (NM_006614.2,1342-1360).
gtatagcaccggaagcaat

SEQ ID NO: 317598 - DNA, 19 bp, Homo sapiens
  siRNA target sequence for CHL1 (NM_006614.2,1352-1370).
ggaagcaatggcatcttgt

SEQ ID NO: 317599 - DNA, 19 bp, Homo sapiens
  siRNA target sequence for CHL1 (NM_006614.2,1353-1371).
gaagcaatggcatcttgtt

SEQ ID NO: 317600 - DNA, 19 bp, Homo sapiens
  siRNA target sequence for CHL1 (NM_006614.2,1388-1406).
gaacctcaacccacaatca

SEQ ID NO: 317601 - DNA, 19 bp, Homo sapiens
  siRNA target sequence for CHL1 (NM_006614.2,1423-1441).
ctccccagttgacaatcat

SEQ ID NO: 317602 - DNA, 19 bp, Homo sapiens
  siRNA target sequence for CHL1 (NM_006614.2,1555-1573).
caatgccaatattgatgtt

SEQ ID NO: 317603 - DNA, 19 bp, Homo sapiens
  siRNA target sequence for CHL1 (NM_006614.2,1576-1594).
ggatgtccgtccattgata

SEQ ID NO: 317604 - DNA, 19 bp, Homo sapiens
  siRNA target sequence for CHL1 (NM_006614.2,1580-1598).
gtccgtccattgatacaaa

SEQ ID NO: 317605 - DNA, 19 bp, Homo sapiens
  siRNA target sequence for CHL1 (NM_006614.2,1584-1602).
gtccattgatacaaaccaa

SEQ ID NO: 317606 - DNA, 19 bp, Homo sapiens
  siRNA target sequence for CHL1 (NM_006614.2,1645-1663).
cttacattgcgagttcttt

SEQ ID NO: 317607 - DNA, 19 bp, Homo sapiens
  siRNA target sequence for CHL1 (NM_006614.2,1649-1667).
cattgcgagttctttgctt

SEQ ID NO: 317608 - DNA, 19 bp, Homo sapiens
  siRNA target sequence for CHL1 (NM_006614.2,1717-1735).
ggagggcaggcggtatcat

SEQ ID NO: 317609 - DNA, 19 bp, Homo sapiens
  siRNA target sequence for CHL1 (NM_006614.2,1718-1736).
gagggcaggcggtatcata

SEQ ID NO: 317610 - DNA, 19 bp, Homo sapiens
  siRNA target sequence for CHL1 (NM_006614.2,1721-1739).
ggcaggcggtatcatatct

SEQ ID NO: 317611 - DNA, 19 bp, Homo sapiens
  siRNA target sequence for CHL1 (NM_006614.2,1722-1740).
gcaggcggtatcatatcta

SEQ ID NO: 317612 - DNA, 19 bp, Homo sapiens
  siRNA target sequence for CHL1 (NM_006614.2,1723-1741).
caggcggtatcatatctat

SEQ ID NO: 317613 - DNA, 19 bp, Homo sapiens
  siRNA target sequence for CHL1 (NM_006614.2,1725-1743).
ggcggtatcatatctatga

SEQ ID NO: 317614 - DNA, 19 bp, Homo sapiens
  siRNA target sequence for CHL1 (NM_006614.2,1726-1744).
gcggtatcatatctatgaa

SEQ ID NO: 317615 - DNA, 19 bp, Homo sapiens
  siRNA target sequence for CHL1 (NM_006614.2,1748-1766).
ggcacattgcagatcaaca

SEQ ID NO: 317616 - DNA, 19 bp, Homo sapiens
  siRNA target sequence for CHL1 (NM_006614.2,1781-1799).
gatgctgggtcttactcat

SEQ ID NO: 317617 - DNA, 19 bp, Homo sapiens
  siRNA target sequence for CHL1 (NM_006614.2,1784-1802).
gctgggtcttactcatgtt

SEQ ID NO: 317618 - DNA, 19 bp, Homo sapiens
  siRNA target sequence for CHL1 (NM_006614.2,1800-1818).
gttgggtagaaaatgctat

SEQ ID NO: 317619 - DNA, 19 bp, Homo sapiens
  siRNA target sequence for CHL1 (NM_006614.2,1838-1856).
gccaatttggatattagaa

SEQ ID NO: 317620 - DNA, 19 bp, Homo sapiens
  siRNA target sequence for CHL1 (NM_006614.2,1890-1908).
ctcgtatccccaaattgca

SEQ ID NO: 317621 - DNA, 19 bp, Homo sapiens
  siRNA target sequence for CHL1 (NM_006614.2,1906-1924).
gcatatgcttgaattacat

SEQ ID NO: 317622 - DNA, 19 bp, Homo sapiens
  siRNA target sequence for CHL1 (NM_006614.2,1907-1925).
catatgcttgaattacatt

SEQ ID NO: 317623 - DNA, 19 bp, Homo sapiens
  siRNA target sequence for CHL1 (NM_006614.2,1963-1981).
gaagttgtcctggagtaaa

SEQ ID NO: 317624 - DNA, 19 bp, Homo sapiens
  siRNA target sequence for CHL1 (NM_006614.2,1966-1984).
gttgtcctggagtaaagat

SEQ ID NO: 317625 - DNA, 19 bp, Homo sapiens
  siRNA target sequence for CHL1 (NM_006614.2,2036-2054).
ggagctaatttgaccatat

SEQ ID NO: 317626 - DNA, 19 bp, Homo sapiens
  siRNA target sequence for CHL1 (NM_006614.2,2049-2067).
ccatatctaatgtaacttt

SEQ ID NO: 317627 - DNA, 19 bp, Homo sapiens
  siRNA target sequence for CHL1 (NM_006614.2,2050-2068).
catatctaatgtaacttta

SEQ ID NO: 317628 - DNA, 19 bp, Homo sapiens
  siRNA target sequence for CHL1 (NM_006614.2,2064-2082).
ctttagaggaccaaggtat

SEQ ID NO: 317629 - DNA, 19 bp, Homo sapiens
  siRNA target sequence for CHL1 (NM_006614.2,2113-2131).
cagtgctgccgatataact

SEQ ID NO: 317630 - DNA, 19 bp, Homo sapiens
  siRNA target sequence for CHL1 (NM_006614.2,2115-2133).
gtgctgccgatataactca

SEQ ID NO: 317631 - DNA, 19 bp, Homo sapiens
  siRNA target sequence for CHL1 (NM_006614.2,2120-2138).
gccgatataactcaagtaa

SEQ ID NO: 317632 - DNA, 19 bp, Homo sapiens
  siRNA target sequence for CHL1 (NM_006614.2,2122-2140).
cgatataactcaagtaact

SEQ ID NO: 317633 - DNA, 19 bp, Homo sapiens
  siRNA target sequence for CHL1 (NM_006614.2,2155-2173).
ggatccaccagaaaacctt

SEQ ID NO: 317634 - DNA, 19 bp, Homo sapiens
  siRNA target sequence for CHL1 (NM_006614.2,2225-2243).
gctgaccacaacagcaata

SEQ ID NO: 317635 - DNA, 19 bp, Homo sapiens
  siRNA target sequence for CHL1 (NM_006614.2,2226-2244).
ctgaccacaacagcaatat

SEQ ID NO: 317636 - DNA, 19 bp, Homo sapiens
  siRNA target sequence for CHL1 (NM_006614.2,2228-2246).
gaccacaacagcaatatta

SEQ ID NO: 317637 - DNA, 19 bp, Homo sapiens
  siRNA target sequence for CHL1 (NM_006614.2,2238-2256).
gcaatattagcgagtatat

SEQ ID NO: 317638 - DNA, 19 bp, Homo sapiens
  siRNA target sequence for CHL1 (NM_006614.2,2239-2257).
caatattagcgagtatatt

SEQ ID NO: 317639 - DNA, 19 bp, Homo sapiens
  siRNA target sequence for CHL1 (NM_006614.2,2247-2265).
gcgagtatattgttgaatt

SEQ ID NO: 317640 - DNA, 19 bp, Homo sapiens
  siRNA target sequence for CHL1 (NM_006614.2,2323-2341).
gaaaaccacagttatctta

SEQ ID NO: 317641 - DNA, 19 bp, Homo sapiens
  siRNA target sequence for CHL1 (NM_006614.2,2419-2437).
gtcagaccatcatgaaaca

SEQ ID NO: 317642 - DNA, 19 bp, Homo sapiens
  siRNA target sequence for CHL1 (NM_006614.2,2453-2471).
gataggaatccacaaaaca

SEQ ID NO: 317643 - DNA, 19 bp, Homo sapiens
  siRNA target sequence for CHL1 (NM_006614.2,2489-2507).
caacccaaggaaatgatta

SEQ ID NO: 317644 - DNA, 19 bp, Homo sapiens
  siRNA target sequence for CHL1 (NM_006614.2,2514-2532).
gggagcctttgaaatccat

SEQ ID NO: 317645 - DNA, 19 bp, Homo sapiens
  siRNA target sequence for CHL1 (NM_006614.2,2635-2653).
gatgacgcctgctgtctat

SEQ ID NO: 317646 - DNA, 19 bp, Homo sapiens
  siRNA target sequence for CHL1 (NM_006614.2,2646-2664).
ctgtctatgccccttatga

SEQ ID NO: 317647 - DNA, 19 bp, Homo sapiens
  siRNA target sequence for CHL1 (NM_006614.2,2674-2692).
ccaggctatcaatcaacta

SEQ ID NO: 317648 - DNA, 19 bp, Homo sapiens
  siRNA target sequence for CHL1 (NM_006614.2,2764-2782).
ccatggggtggacgttata

SEQ ID NO: 317649 - DNA, 19 bp, Homo sapiens
  siRNA target sequence for CHL1 (NM_006614.2,2765-2783).
catggggtggacgttataa

SEQ ID NO: 317650 - DNA, 19 bp, Homo sapiens
  siRNA target sequence for CHL1 (NM_006614.2,2768-2786).
ggggtggacgttataaaca

SEQ ID NO: 317651 - DNA, 19 bp, Homo sapiens
  siRNA target sequence for CHL1 (NM_006614.2,2770-2788).
ggtggacgttataaacagt

SEQ ID NO: 317652 - DNA, 19 bp, Homo sapiens
  siRNA target sequence for CHL1 (NM_006614.2,2771-2789).
gtggacgttataaacagta

SEQ ID NO: 317653 - DNA, 19 bp, Homo sapiens
  siRNA target sequence for CHL1 (NM_006614.2,2785-2803).
cagtacattagttaaagtt

SEQ ID NO: 317654 - DNA, 19 bp, Homo sapiens
  siRNA target sequence for CHL1 (NM_006614.2,2805-2823).
cctggtcaacagttccaaa

SEQ ID NO: 317655 - DNA, 19 bp, Homo sapiens
  siRNA target sequence for CHL1 (NM_006614.2,2840-2858).
cgtctgaaaggctatcaga

SEQ ID NO: 317656 - DNA, 19 bp, Homo sapiens
  siRNA target sequence for CHL1 (NM_006614.2,2849-2867).
ggctatcagataaattggt

SEQ ID NO: 317657 - DNA, 19 bp, Homo sapiens
  siRNA target sequence for CHL1 (NM_006614.2,2976-2994).
gtgaatttcatttaacagt

SEQ ID NO: 317658 - DNA, 19 bp, Homo sapiens
  siRNA target sequence for CHL1 (NM_006614.2,2993-3011).
gtcttagcctataactcta

SEQ ID NO: 317659 - DNA, 19 bp, Homo sapiens
  siRNA target sequence for CHL1 (NM_006614.2,2995-3013).
cttagcctataactctaaa

SEQ ID NO: 317660 - DNA, 19 bp, Homo sapiens
  siRNA target sequence for CHL1 (NM_006614.2,3030-3048).
gtgagccttatatatttca

SEQ ID NO: 317661 - DNA, 19 bp, Homo sapiens
  siRNA target sequence for CHL1 (NM_006614.2,3034-3052).
gccttatatatttcaaaca

SEQ ID NO: 317662 - DNA, 19 bp, Homo sapiens
  siRNA target sequence for CHL1 (NM_006614.2,3088-3106).
ggtcatcaaagttgataaa

SEQ ID NO: 317663 - DNA, 19 bp, Homo sapiens
  siRNA target sequence for CHL1 (NM_006614.2,3107-3125).
gacactgccactttatctt

SEQ ID NO: 317664 - DNA, 19 bp, Homo sapiens
  siRNA target sequence for CHL1 (NM_006614.2,3126-3144).
ggggactacctaagaaatt

SEQ ID NO: 317665 - DNA, 19 bp, Homo sapiens
  siRNA target sequence for CHL1 (NM_006614.2,3162-3180).
gctatcttttgcaatatca

SEQ ID NO: 317666 - DNA, 19 bp, Homo sapiens
  siRNA target sequence for CHL1 (NM_006614.2,3195-3213).
cctacgagattggagaatt

SEQ ID NO: 317667 - DNA, 19 bp, Homo sapiens
  siRNA target sequence for CHL1 (NM_006614.2,3272-3290).
gcaactaccaagtacaaat

SEQ ID NO: 317668 - DNA, 19 bp, Homo sapiens
  siRNA target sequence for CHL1 (NM_006614.2,3411-3429).
ctcacccaatagaggtatt

SEQ ID NO: 317669 - DNA, 19 bp, Homo sapiens
  siRNA target sequence for CHL1 (NM_006614.2,3433-3451).
gccgggagctgaacatata

SEQ ID NO: 317670 - DNA, 19 bp, Homo sapiens
  siRNA target sequence for CHL1 (NM_006614.2,3435-3453).
cgggagctgaacatatagt

SEQ ID NO: 317671 - DNA, 19 bp, Homo sapiens
  siRNA target sequence for CHL1 (NM_006614.2,3436-3454).
gggagctgaacatatagtt

SEQ ID NO: 317672 - DNA, 19 bp, Homo sapiens
  siRNA target sequence for CHL1 (NM_006614.2,3446-3464).
catatagttcgcctaatga

SEQ ID NO: 317673 - DNA, 19 bp, Homo sapiens
  siRNA target sequence for CHL1 (NM_006614.2,3469-3487).
gaattggggcgataatgat

SEQ ID NO: 317674 - DNA, 19 bp, Homo sapiens
  siRNA target sequence for CHL1 (NM_006614.2,3474-3492).
ggggcgataatgatagcat

SEQ ID NO: 317675 - DNA, 19 bp, Homo sapiens
  siRNA target sequence for CHL1 (NM_006614.2,3475-3493).
gggcgataatgatagcatt

SEQ ID NO: 317676 - DNA, 19 bp, Homo sapiens
  siRNA target sequence for CHL1 (NM_006614.2,3477-3495).
gcgataatgatagcatttt

SEQ ID NO: 317677 - DNA, 19 bp, Homo sapiens
  siRNA target sequence for CHL1 (NM_006614.2,3520-3538).
gagagaatatgctggttta

SEQ ID NO: 317678 - DNA, 19 bp, Homo sapiens
  siRNA target sequence for CHL1 (NM_006614.2,3590-3608).
gctcttctcacactactat

SEQ ID NO: 317679 - DNA, 19 bp, Homo sapiens
  siRNA target sequence for CHL1 (NM_006614.2,3591-3609).
ctcttctcacactactatt

SEQ ID NO: 317680 - DNA, 19 bp, Homo sapiens
  siRNA target sequence for CHL1 (NM_006614.2,3593-3611).
cttctcacactactattat

SEQ ID NO: 317681 - DNA, 19 bp, Homo sapiens
  siRNA target sequence for CHL1 (NM_006614.2,3598-3616).
cacactactattattaact

SEQ ID NO: 317682 - DNA, 19 bp, Homo sapiens
  siRNA target sequence for CHL1 (NM_006614.2,3600-3618).
cactactattattaactgt

SEQ ID NO: 317683 - DNA, 19 bp, Homo sapiens
  siRNA target sequence for CHL1 (NM_006614.2,3645-3663).
gaaagtactcagttaaaga

SEQ ID NO: 317684 - DNA, 19 bp, Homo sapiens
  siRNA target sequence for CHL1 (NM_006614.2,3686-3704).
ccagaaattcagtcagtaa

SEQ ID NO: 317685 - DNA, 19 bp, Homo sapiens
  siRNA target sequence for CHL1 (NM_006614.2,3768-3786).
cccttaatagggatatgca

SEQ ID NO: 317686 - DNA, 19 bp, Homo sapiens
  siRNA target sequence for CHL1 (NM_006614.2,3801-3819).
ctgacagcttagtcgaata

SEQ ID NO: 317687 - DNA, 19 bp, Homo sapiens
  siRNA target sequence for CHL1 (NM_006614.2,3846-3864).
gtgaagatggatcatttat

SEQ ID NO: 317688 - DNA, 19 bp, Homo sapiens
  siRNA target sequence for CHL1 (NM_006614.2,3867-3885).
gtgcctacgctggatctaa

SEQ ID NO: 317689 - DNA, 19 bp, Homo sapiens
  siRNA target sequence for CHL1 (NM_006614.2,3887-3905).
gagaagggatctgttgaaa

SEQ ID NO: 317690 - DNA, 19 bp, Homo sapiens
  siRNA target sequence for CHL1 (NM_006614.2,3892-3910).
gggatctgttgaaagcaat

SEQ ID NO: 317691 - DNA, 19 bp, Homo sapiens
  siRNA target sequence for FLJ38991 (NM_173827.1,260-278).
gggttgcggaggaagtact

SEQ ID NO: 317692 - DNA, 19 bp, Homo sapiens
  siRNA target sequence for FLJ38991 (NM_173827.1,428-446).
ctattgccaggcatcttaa

SEQ ID NO: 317693 - DNA, 19 bp, Homo sapiens
  siRNA target sequence for FLJ38991 (NM_173827.1,457-475).
gcagttcgtgcaaatcagt

SEQ ID NO: 317694 - DNA, 19 bp, Homo sapiens
  siRNA target sequence for FLJ38991 (NM_173827.1,458-476).
cagttcgtgcaaatcagtt

SEQ ID NO: 317695 - DNA, 19 bp, Homo sapiens
  siRNA target sequence for FLJ38991 (NM_173827.1,474-492).
gttggggtggtccaaaaga

SEQ ID NO: 317696 - DNA, 19 bp, Homo sapiens
  siRNA target sequence for FLJ38991 (NM_173827.1,477-495).
ggggtggtccaaaagagat

SEQ ID NO: 317697 - DNA, 19 bp, Homo sapiens
  siRNA target sequence for FLJ38991 (NM_173827.1,501-519).
gctcacttatctaaagaat

SEQ ID NO: 317698 - DNA, 19 bp, Homo sapiens
  siRNA target sequence for FLJ38991 (NM_173827.1,502-520).
ctcacttatctaaagaata

SEQ ID NO: 317699 - DNA, 19 bp, Homo sapiens
  siRNA target sequence for FLJ38991 (NM_173827.1,516-534).
gaatatgaggaggctaatt

SEQ ID NO: 317700 - DNA, 19 bp, Homo sapiens
  siRNA target sequence for FLJ38991 (NM_173827.1,541-559).
ctatatgtgcgagataact

SEQ ID NO: 317701 - DNA, 19 bp, Homo sapiens
  siRNA target sequence for FLJ38991 (NM_173827.1,598-616).
cttccaatgtggatcttca

SEQ ID NO: 317702 - DNA, 19 bp, Homo sapiens
  siRNA target sequence for FLJ38991 (NM_173827.1,625-643).
gctctccggaatttaagca

SEQ ID NO: 317703 - DNA, 19 bp, Homo sapiens
  siRNA target sequence for FLJ38991 (NM_173827.1,755-773).
ctgttggcgtcatcaattt

SEQ ID NO: 317704 - DNA, 19 bp, Homo sapiens
  siRNA target sequence for FLJ38991 (NM_173827.1,757-775).
gttggcgtcatcaatttgt

SEQ ID NO: 317705 - DNA, 19 bp, Homo sapiens
  siRNA target sequence for FLJ38991 (NM_173827.1,760-778).
ggcgtcatcaatttgttaa

SEQ ID NO: 317706 - DNA, 19 bp, Homo sapiens
  siRNA target sequence for FLJ38991 (NM_173827.1,761-779).
gcgtcatcaatttgttaat

SEQ ID NO: 317707 - DNA, 19 bp, Homo sapiens
  siRNA target sequence for FLJ38991 (NM_173827.1,762-780).
cgtcatcaatttgttaata

SEQ ID NO: 317708 - DNA, 19 bp, Homo sapiens
  siRNA target sequence for FLJ38991 (NM_173827.1,786-804).
gatttgtgctctacaaaaa

SEQ ID NO: 317709 - DNA, 19 bp, Homo sapiens
  siRNA target sequence for FLJ38991 (NM_173827.1,815-833).
ctcgttttcagacgtatat

SEQ ID NO: 317710 - DNA, 19 bp, Homo sapiens
  siRNA target sequence for FLJ38991 (NM_173827.1,817-835).
cgttttcagacgtatatta

SEQ ID NO: 317711 - DNA, 19 bp, Homo sapiens
  siRNA target sequence for FLJ38991 (NM_173827.1,825-843).
gacgtatattacgtacttt

SEQ ID NO: 317712 - DNA, 19 bp, Homo sapiens
  siRNA target sequence for FLJ38991 (NM_173827.1,850-868).
gcaatgtcggtgttgatga

SEQ ID NO: 317713 - DNA, 19 bp, Homo sapiens
  siRNA target sequence for FLJ38991 (NM_173827.1,851-869).
caatgtcggtgttgatgat

SEQ ID NO: 317714 - DNA, 19 bp, Homo sapiens
  siRNA target sequence for FLJ38991 (NM_173827.1,857-875).
cggtgttgatgataccaat

SEQ ID NO: 317715 - DNA, 19 bp, Homo sapiens
  siRNA target sequence for FLJ38991 (NM_173827.1,858-876).
ggtgttgatgataccaatt

SEQ ID NO: 317716 - DNA, 19 bp, Homo sapiens
  siRNA target sequence for FLJ38991 (NM_173827.1,880-898).
gcaacggtaccctcatcaa

SEQ ID NO: 317717 - DNA, 19 bp, Homo sapiens
  siRNA target sequence for FLJ38991 (NM_173827.1,881-899).
caacggtaccctcatcaat

SEQ ID NO: 317718 - DNA, 19 bp, Homo sapiens
  siRNA target sequence for FLJ38991 (NM_173827.1,884-902).
cggtaccctcatcaattgt

SEQ ID NO: 317719 - DNA, 19 bp, Homo sapiens
  siRNA target sequence for FLJ38991 (NM_173827.1,885-903).
ggtaccctcatcaattgtt

SEQ ID NO: 317720 - DNA, 19 bp, Homo sapiens
  siRNA target sequence for FLJ38991 (NM_173827.1,890-908).
cctcatcaattgttctcta

SEQ ID NO: 317721 - DNA, 19 bp, Homo sapiens
  siRNA target sequence for FLJ38991 (NM_173827.1,923-941).
gcttcgtgggcctttcaca

SEQ ID NO: 317722 - DNA, 19 bp, Homo sapiens
  siRNA target sequence for FLJ38991 (NM_173827.1,927-945).
cgtgggcctttcacagaat

SEQ ID NO: 317723 - DNA, 19 bp, Homo sapiens
  siRNA target sequence for FLJ38991 (NM_173827.1,928-946).
gtgggcctttcacagaatt

SEQ ID NO: 317724 - DNA, 19 bp, Homo sapiens
  siRNA target sequence for FLJ38991 (NM_173827.1,961-979).
cctggatttcgccaacttt

SEQ ID NO: 317725 - DNA, 19 bp, Homo sapiens
  siRNA target sequence for FLJ38991 (NM_173827.1,972-990).
ccaactttgccgaatacca

SEQ ID NO: 317726 - DNA, 19 bp, Homo sapiens
  siRNA target sequence for FLJ38991 (NM_173827.1,988-1006).
ccatcgaccaagtcagatt

SEQ ID NO: 317727 - DNA, 19 bp, Homo sapiens
  siRNA target sequence for FLJ38991 (NM_173827.1,992-1010).
cgaccaagtcagattcaga

SEQ ID NO: 317728 - DNA, 19 bp, Homo sapiens
  siRNA target sequence for FLJ38991 (NM_173827.1,993-1011).
gaccaagtcagattcagaa

SEQ ID NO: 317729 - DNA, 19 bp, Homo sapiens
  siRNA target sequence for FLJ38991 (NM_173827.1,1003-1021).
gattcagaaactccttata

SEQ ID NO: 317730 - DNA, 19 bp, Homo sapiens
  siRNA target sequence for FLJ38991 (NM_173827.1,1036-1054).
gcctttaataccaagttca

SEQ ID NO: 317731 - DNA, 19 bp, Homo sapiens
  siRNA target sequence for FLJ38991 (NM_173827.1,1037-1055).
cctttaataccaagttcat

SEQ ID NO: 317732 - DNA, 19 bp, Homo sapiens
  siRNA target sequence for HAN11 (NM_005828.1,91-109).
cggaaggagatctacaagt

SEQ ID NO: 317733 - DNA, 19 bp, Homo sapiens
  siRNA target sequence for HAN11 (NM_005828.1,336-354).
ggcaacaagcggtgactat

SEQ ID NO: 317734 - DNA, 19 bp, Homo sapiens
  siRNA target sequence for HAN11 (NM_005828.1,338-356).
caacaagcggtgactatct

SEQ ID NO: 317735 - DNA, 19 bp, Homo sapiens
  siRNA target sequence for HAN11 (NM_005828.1,387-405).
caggctggagtgtttgcta

SEQ ID NO: 317736 - DNA, 19 bp, Homo sapiens
  siRNA target sequence for HAN11 (NM_005828.1,391-409).
ctggagtgtttgctaaaca

SEQ ID NO: 317737 - DNA, 19 bp, Homo sapiens
  siRNA target sequence for HAN11 (NM_005828.1,393-411).
ggagtgtttgctaaacaat

SEQ ID NO: 317738 - DNA, 19 bp, Homo sapiens
  siRNA target sequence for HAN11 (NM_005828.1,455-473).
ggaatgaggtggatcctta

SEQ ID NO: 317739 - DNA, 19 bp, Homo sapiens
  siRNA target sequence for HAN11 (NM_005828.1,460-478).
gaggtggatccttatcttt

SEQ ID NO: 317740 - DNA, 19 bp, Homo sapiens
  siRNA target sequence for HAN11 (NM_005828.1,462-480).
ggtggatccttatctttta

SEQ ID NO: 317741 - DNA, 19 bp, Homo sapiens
  siRNA target sequence for HAN11 (NM_005828.1,465-483).
ggatccttatcttttaggt

SEQ ID NO: 317742 - DNA, 19 bp, Homo sapiens
  siRNA target sequence for HAN11 (NM_005828.1,534-552).
ggtgttagggcgagtgaat

SEQ ID NO: 317743 - DNA, 19 bp, Homo sapiens
  siRNA target sequence for HAN11 (NM_005828.1,579-597).
gctgatcgcccatgacaaa

SEQ ID NO: 317744 - DNA, 19 bp, Homo sapiens
  siRNA target sequence for HAN11 (NM_005828.1,594-612).
caaagaggtctatgatatt

SEQ ID NO: 317745 - DNA, 19 bp, Homo sapiens
  siRNA target sequence for HAN11 (NM_005828.1,598-616).
gaggtctatgatattgcat

SEQ ID NO: 317746 - DNA, 19 bp, Homo sapiens
  siRNA target sequence for HAN11 (NM_005828.1,668-686).
gctcggtgcggatgtttga

SEQ ID NO: 317747 - DNA, 19 bp, Homo sapiens
  siRNA target sequence for HAN11 (NM_005828.1,705-723).
cagcaccatcatttacgaa

SEQ ID NO: 317748 - DNA, 19 bp, Homo sapiens
  siRNA target sequence for HAN11 (NM_005828.1,844-862).
cctgtcgccaggttaaaca

SEQ ID NO: 317749 - DNA, 19 bp, Homo sapiens
  siRNA target sequence for HAN11 (NM_005828.1,845-863).
ctgtcgccaggttaaacaa

SEQ ID NO: 317750 - DNA, 19 bp, Homo sapiens
  siRNA target sequence for INPP4A (NM_001566.1,464-482).
ctccatcgctagatcgaaa

SEQ ID NO: 317751 - DNA, 19 bp, Homo sapiens
  siRNA target sequence for INPP4A (NM_001566.1,545-563).
cacagacggagatcattga

SEQ ID NO: 317752 - DNA, 19 bp, Homo sapiens
  siRNA target sequence for INPP4A (NM_001566.1,558-576).
cattgagggaaccaacaat

SEQ ID NO: 317753 - DNA, 19 bp, Homo sapiens
  siRNA target sequence for INPP4A (NM_001566.1,564-582).
gggaaccaacaatcctata

SEQ ID NO: 317754 - DNA, 19 bp, Homo sapiens
  siRNA target sequence for INPP4A (NM_001566.1,565-583).
ggaaccaacaatcctatat

SEQ ID NO: 317755 - DNA, 19 bp, Homo sapiens
  siRNA target sequence for INPP4A (NM_001566.1,566-584).
gaaccaacaatcctatatt

SEQ ID NO: 317756 - DNA, 19 bp, Homo sapiens
  siRNA target sequence for INPP4A (NM_001566.1,590-608).
gcagtattgccttctttca

SEQ ID NO: 317757 - DNA, 19 bp, Homo sapiens
  siRNA target sequence for INPP4A (NM_001566.1,610-628).
gactctcttatcaatcaga

SEQ ID NO: 317758 - DNA, 19 bp, Homo sapiens
  siRNA target sequence for INPP4A (NM_001566.1,639-657).
caaactctccgtgtatgat

SEQ ID NO: 317759 - DNA, 19 bp, Homo sapiens
  siRNA target sequence for INPP4A (NM_001566.1,645-663).
ctccgtgtatgatgtcaaa

SEQ ID NO: 317760 - DNA, 19 bp, Homo sapiens
  siRNA target sequence for INPP4A (NM_001566.1,647-665).
ccgtgtatgatgtcaaaga

SEQ ID NO: 317761 - DNA, 19 bp, Homo sapiens
  siRNA target sequence for INPP4A (NM_001566.1,648-666).
cgtgtatgatgtcaaagat

SEQ ID NO: 317762 - DNA, 19 bp, Homo sapiens
  siRNA target sequence for INPP4A (NM_001566.1,651-669).
gtatgatgtcaaagataga

SEQ ID NO: 317763 - DNA, 19 bp, Homo sapiens
  siRNA target sequence for INPP4A (NM_001566.1,671-689).
ctcagggaacaatgtattt

SEQ ID NO: 317764 - DNA, 19 bp, Homo sapiens
  siRNA target sequence for INPP4A (NM_001566.1,734-752).
ggcatcataggttgcattt

SEQ ID NO: 317765 - DNA, 19 bp, Homo sapiens
  siRNA target sequence for INPP4A (NM_001566.1,773-791).
gtgaccgtgtaggtaacat

SEQ ID NO: 317766 - DNA, 19 bp, Homo sapiens
  siRNA target sequence for INPP4A (NM_001566.1,775-793).
gaccgtgtaggtaacatca

SEQ ID NO: 317767 - DNA, 19 bp, Homo sapiens
  siRNA target sequence for INPP4A (NM_001566.1,849-867).
gtctgtggacactgtcaat

SEQ ID NO: 317768 - DNA, 19 bp, Homo sapiens
  siRNA target sequence for INPP4A (NM_001566.1,935-953).
cattgcgaaaggacacttt

SEQ ID NO: 317769 - DNA, 19 bp, Homo sapiens
  siRNA target sequence for INPP4A (NM_001566.1,985-1003).
cgcatgtaccggtttccaa

SEQ ID NO: 317770 - DNA, 19 bp, Homo sapiens
  siRNA target sequence for INPP4A (NM_001566.1,1004-1022).
ccactgatggtaaccattt

SEQ ID NO: 317771 - DNA, 19 bp, Homo sapiens
  siRNA target sequence for INPP4A (NM_001566.1,1239-1257).
cagagggccctcgtttaaa

SEQ ID NO: 317772 - DNA, 19 bp, Homo sapiens
  siRNA target sequence for INPP4A (NM_001566.1,1273-1291).
gcagataaaaagttagaat

SEQ ID NO: 317773 - DNA, 19 bp, Homo sapiens
  siRNA target sequence for INPP4A (NM_001566.1,1409-1427).
caggaggtctccgcaaaaa

SEQ ID NO: 317774 - DNA, 19 bp, Homo sapiens
  siRNA target sequence for INPP4A (NM_001566.1,1412-1430).
gaggtctccgcaaaaagct

SEQ ID NO: 317775 - DNA, 19 bp, Homo sapiens
  siRNA target sequence for INPP4A (NM_001566.1,1420-1438).
cgcaaaaagctgcacaaat

SEQ ID NO: 317776 - DNA, 19 bp, Homo sapiens
  siRNA target sequence for INPP4A (NM_001566.1,1488-1506).
ccagtccataatctacata

SEQ ID NO: 317777 - DNA, 19 bp, Homo sapiens
  siRNA target sequence for INPP4A (NM_001566.1,1543-1561).
cagatcaacaccctgaaaa

SEQ ID NO: 317778 - DNA, 19 bp, Homo sapiens
  siRNA target sequence for INPP4A (NM_001566.1,1721-1739).
ctgcacggcctgactacat

SEQ ID NO: 317779 - DNA, 19 bp, Homo sapiens
  siRNA target sequence for INPP4A (NM_001566.1,1774-1792).
gagcaggtgatgcttagaa

SEQ ID NO: 317780 - DNA, 19 bp, Homo sapiens
  siRNA target sequence for INPP4A (NM_001566.1,1776-1794).
gcaggtgatgcttagaaat

SEQ ID NO: 317781 - DNA, 19 bp, Homo sapiens
  siRNA target sequence for INPP4A (NM_001566.1,1997-2015).
gctgcaccagcaagaaaga

SEQ ID NO: 317782 - DNA, 19 bp, Homo sapiens
  siRNA target sequence for INPP4A (NM_001566.1,1998-2016).
ctgcaccagcaagaaagat

SEQ ID NO: 317783 - DNA, 19 bp, Homo sapiens
  siRNA target sequence for INPP4A (NM_001566.1,2120-2138).
ccaagaaggccatggtatt

SEQ ID NO: 317784 - DNA, 19 bp, Homo sapiens
  siRNA target sequence for INPP4A (NM_001566.1,2237-2255).
gcggcttcatcattaagct

SEQ ID NO: 317785 - DNA, 19 bp, Homo sapiens
  siRNA target sequence for INPP4A (NM_001566.1,2396-2414).
ggaacgtgaccttcaaagt

SEQ ID NO: 317786 - DNA, 19 bp, Homo sapiens
  siRNA target sequence for INPP4A (NM_001566.1,2465-2483).
gaaatcgcgacgggtttaa

SEQ ID NO: 317787 - DNA, 19 bp, Homo sapiens
  siRNA target sequence for INPP4A (NM_001566.1,2613-2631).
gtttggcgatacgtcttta

SEQ ID NO: 317788 - DNA, 19 bp, Homo sapiens
  siRNA target sequence for INPP4A (NM_001566.1,2618-2636).
gcgatacgtctttacaaga

SEQ ID NO: 317789 - DNA, 19 bp, Homo sapiens
  siRNA target sequence for INPP4A (NM_001566.1,2619-2637).
cgatacgtctttacaagaa

SEQ ID NO: 317790 - DNA, 19 bp, Homo sapiens
  siRNA target sequence for INPP4A (NM_001566.1,2624-2642).
cgtctttacaagaagtcat

SEQ ID NO: 317791 - DNA, 19 bp, Homo sapiens
  siRNA target sequence for INPP4A (NM_001566.1,2773-2791).
gtgcatgcccggaagaata

SEQ ID NO: 317792 - DNA, 19 bp, Homo sapiens
  siRNA target sequence for INPP4A (NM_001566.1,2776-2794).
catgcccggaagaataaga

SEQ ID NO: 317793 - DNA, 19 bp, Homo sapiens
  siRNA target sequence for INPP4A (NM_001566.1,3024-3042).
ggtgcccatccgagactta

SEQ ID NO: 317794 - DNA, 19 bp, Homo sapiens
  siRNA target sequence for INPP4A (NM_001566.1,3063-3081).
ctgttccatccctttatta

SEQ ID NO: 317795 - DNA, 19 bp, Homo sapiens
  siRNA target sequence for INPP4A (NM_001566.1,3087-3105).
gagccccaatttactgatt

SEQ ID NO: 317796 - DNA, 19 bp, Homo sapiens
  siRNA target sequence for INPP4A (NM_001566.1,3089-3107).
gccccaatttactgattgt

SEQ ID NO: 317797 - DNA, 19 bp, Homo sapiens
  siRNA target sequence for INPP4A (NM_001566.1,3112-3130).
ctctttctgagcatagcat

SEQ ID NO: 317798 - DNA, 19 bp, Homo sapiens
  siRNA target sequence for INPP4A (NM_001566.1,3127-3145).
gcatacctggtgaccaaat

SEQ ID NO: 317799 - DNA, 19 bp, Homo sapiens
  siRNA target sequence for INPP4A (NM_001566.1,3128-3146).
catacctggtgaccaaatt

SEQ ID NO: 317800 - DNA, 19 bp, Homo sapiens
  siRNA target sequence for INPP4A (NM_001566.1,3138-3156).
gaccaaattgcgttgcaaa

SEQ ID NO: 317801 - DNA, 19 bp, Homo sapiens
  siRNA target sequence for INPP4A (NM_004027.1,2982-3000).
gggttgtcgaagagaaaat

SEQ ID NO: 317802 - DNA, 19 bp, Homo sapiens
  siRNA target sequence for INPP4A (NM_004027.1,2983-3001).
ggttgtcgaagagaaaata

SEQ ID NO: 317803 - DNA, 19 bp, Homo sapiens
  siRNA target sequence for INPP4A (NM_004027.1,2987-3005).
gtcgaagagaaaatacaat

SEQ ID NO: 317804 - DNA, 19 bp, Homo sapiens
  siRNA target sequence for INPP4A (NM_004027.1,3016-3034).
ggaagtcgcaaatatgcat

SEQ ID NO: 317805 - DNA, 19 bp, Homo sapiens
  siRNA target sequence for INPP4A (NM_004027.1,3017-3035).
gaagtcgcaaatatgcatt

SEQ ID NO: 317806 - DNA, 19 bp, Homo sapiens
  siRNA target sequence for INPP4A (NM_004027.1,3022-3040).
cgcaaatatgcatttaatt

SEQ ID NO: 317807 - DNA, 19 bp, Homo sapiens
  siRNA target sequence for LRDD (NM_018494.2,970-988).
cacgctacctcctgagatt

SEQ ID NO: 317808 - DNA, 19 bp, Homo sapiens
  siRNA target sequence for LRDD (NM_018494.2,1586-1604).
gtcaggacccggaatgaca

SEQ ID NO: 317809 - DNA, 19 bp, Homo sapiens
  siRNA target sequence for LRDD (NM_018494.2,1998-2016).
cccgcctgcacctgttgta

SEQ ID NO: 317810 - DNA, 19 bp, Homo sapiens
  siRNA target sequence for LRDD (NM_018494.2,2000-2018).
cgcctgcacctgttgtact

SEQ ID NO: 317811 - DNA, 19 bp, Homo sapiens
  siRNA target sequence for LRDD (NM_018494.2,2286-2304).
ctgacacggtggagatgtt

SEQ ID NO: 317812 - DNA, 19 bp, Homo sapiens
  siRNA target sequence for LRDD (NM_018494.2,2305-2323).
cgagggcgaagagttcttt

SEQ ID NO: 317813 - DNA, 19 bp, Homo sapiens
  siRNA target sequence for LRDD (NM_018494.2,2378-2396).
ggcagaatctgctttgtct

SEQ ID NO: 317814 - DNA, 19 bp, Homo sapiens
  siRNA target sequence for LRDD (NM_018494.2,2398-2416).
ctactcgcacctgaagaat

SEQ ID NO: 317815 - DNA, 19 bp, Homo sapiens
  siRNA target sequence for LRDD (NM_018494.2,2634-2652).
ccttggcacccttgaatct

SEQ ID NO: 317816 - DNA, 19 bp, Homo sapiens
  siRNA target sequence for LRDD (NM_018494.2,2660-2678).
gccgagaccggctttctga

SEQ ID NO: 317817 - DNA, 19 bp, Homo sapiens
  siRNA target sequence for RSU1 (NM_012425.3,237-255).
gatgtcaacggcctcttta

SEQ ID NO: 317818 - DNA, 19 bp, Homo sapiens
  siRNA target sequence for RSU1 (NM_012425.3,240-258).
gtcaacggcctctttacct

SEQ ID NO: 317819 - DNA, 19 bp, Homo sapiens
  siRNA target sequence for RSU1 (NM_012425.3,242-260).
caacggcctctttacctta

SEQ ID NO: 317820 - DNA, 19 bp, Homo sapiens
  siRNA target sequence for RSU1 (NM_012425.3,338-356).
ggaggtgctcaactttttt

SEQ ID NO: 317821 - DNA, 19 bp, Homo sapiens
  siRNA target sequence for RSU1 (NM_012425.3,339-357).
gaggtgctcaactttttta

SEQ ID NO: 317822 - DNA, 19 bp, Homo sapiens
  siRNA target sequence for RSU1 (NM_012425.3,375-393).
ctgcccacacagatcagta

SEQ ID NO: 317823 - DNA, 19 bp, Homo sapiens
  siRNA target sequence for RSU1 (NM_012425.3,391-409).
gtagccttcagaaactcaa

SEQ ID NO: 317824 - DNA, 19 bp, Homo sapiens
  siRNA target sequence for RSU1 (NM_012425.3,503-521).
cttgagcgaaaattctctt

SEQ ID NO: 317825 - DNA, 19 bp, Homo sapiens
  siRNA target sequence for RSU1 (NM_012425.3,825-843).
cttggcgtgtcccatgttt

SEQ ID NO: 317826 - DNA, 19 bp, Homo sapiens
  siRNA target sequence for RSU1 (NM_012425.3,829-847).
gcgtgtcccatgtttttga

SEQ ID NO: 317827 - DNA, 19 bp, Homo sapiens
  siRNA target sequence for RSU1 (NM_012425.3,835-853).
cccatgtttttgagtatat

SEQ ID NO: 317828 - DNA, 19 bp, Homo sapiens
  siRNA target sequence for RSU1 (NM_012425.3,910-928).
caccgaagaagaataatga

SEQ ID NO: 317829 - DNA, 19 bp, Homo sapiens
  siRNA target sequence for RSU1 (NM_012425.3,912-930).
ccgaagaagaataatgaca

SEQ ID NO: 317830 - DNA, 19 bp, Homo sapiens
  siRNA target sequence for RSU1 (NM_012425.3,913-931).
cgaagaagaataatgacaa

SEQ ID NO: 317831 - DNA, 19 bp, Homo sapiens
  siRNA target sequence for RSU1 (NM_012425.3,927-945).
gacaaatcgaaaaagatca

SEQ ID NO: 317832 - DNA, 19 bp, Homo sapiens
  siRNA target sequence for SH3GL2 (NM_003026.1,186-204).
gtgatggaaataatgacta

SEQ ID NO: 317833 - DNA, 19 bp, Homo sapiens
  siRNA target sequence for SH3GL2 (NM_003026.1,328-346).
cagaggccatgctcaaatt

SEQ ID NO: 317834 - DNA, 19 bp, Homo sapiens
  siRNA target sequence for SH3GL2 (NM_003026.1,417-435).
ctgtcggaggtcaaagact

SEQ ID NO: 317835 - DNA, 19 bp, Homo sapiens
  siRNA target sequence for SH3GL2 (NM_003026.1,535-553).
gtcgacgcctggattttga

SEQ ID NO: 317836 - DNA, 19 bp, Homo sapiens
  siRNA target sequence for SH3GL2 (NM_003026.1,537-555).
cgacgcctggattttgatt

SEQ ID NO: 317837 - DNA, 19 bp, Homo sapiens
  siRNA target sequence for SH3GL2 (NM_003026.1,538-556).
gacgcctggattttgatta

SEQ ID NO: 317838 - DNA, 19 bp, Homo sapiens
  siRNA target sequence for SH3GL2 (NM_003026.1,597-615).
cgtcaagctctagagaaat

SEQ ID NO: 317839 - DNA, 19 bp, Homo sapiens
  siRNA target sequence for SH3GL2 (NM_003026.1,598-616).
gtcaagctctagagaaatt

SEQ ID NO: 317840 - DNA, 19 bp, Homo sapiens
  siRNA target sequence for SH3GL2 (NM_003026.1,636-654).
gctgagtcaagcatgttca

SEQ ID NO: 317841 - DNA, 19 bp, Homo sapiens
  siRNA target sequence for SH3GL2 (NM_003026.1,637-655).
ctgagtcaagcatgttcaa

SEQ ID NO: 317842 - DNA, 19 bp, Homo sapiens
  siRNA target sequence for SH3GL2 (NM_003026.1,643-661).
caagcatgttcaatctctt

SEQ ID NO: 317843 - DNA, 19 bp, Homo sapiens
  siRNA target sequence for SH3GL2 (NM_003026.1,806-824).
ggaatatcaacctaaacca

SEQ ID NO: 317844 - DNA, 19 bp, Homo sapiens
  siRNA target sequence for SH3GL2 (NM_003026.1,901-919).
cttcaggtgtccaaatgga

SEQ ID NO: 317845 - DNA, 19 bp, Homo sapiens
  siRNA target sequence for SH3GL2 (NM_003026.1,934-952).
gagctctgtacgactttga

SEQ ID NO: 317846 - DNA, 19 bp, Homo sapiens
  siRNA target sequence for SH3GL3 (NM_003027.2,500-518).
gaatctttgctgggataat

SEQ ID NO: 317847 - DNA, 19 bp, Homo sapiens
  siRNA target sequence for SH3GL3 (NM_003027.2,548-566).
ggacctcccaacagctatt

SEQ ID NO: 317848 - DNA, 19 bp, Homo sapiens
  siRNA target sequence for SH3GL3 (NM_003027.2,549-567).
gacctcccaacagctattt

SEQ ID NO: 317849 - DNA, 19 bp, Homo sapiens
  siRNA target sequence for SH3GL3 (NM_003027.2,581-599).
gtggtgctgaaggaactaa

SEQ ID NO: 317850 - DNA, 19 bp, Homo sapiens
  siRNA target sequence for SH3GL3 (NM_003027.2,596-614).
ctaaactagacgatgaatt

SEQ ID NO: 317851 - DNA, 19 bp, Homo sapiens
  siRNA target sequence for SH3GL3 (NM_003027.2,788-806).
gcttgctgggggactgtat

SEQ ID NO: 317852 - DNA, 19 bp, Homo sapiens
  siRNA target sequence for SH3GL3 (NM_003027.2,839-857).
ccacctttggcaatgcatt

SEQ ID NO: 317853 - DNA, 19 bp, Homo sapiens
  siRNA target sequence for SH3GL3 (NM_003027.2,848-866).
gcaatgcattgatagaagt

SEQ ID NO: 317854 - DNA, 19 bp, Homo sapiens
  siRNA target sequence for SH3GL3 (NM_003027.2,869-887).
gtgaatccatgaagctaat

SEQ ID NO: 317855 - DNA, 19 bp, Homo sapiens
  siRNA target sequence for SH3GL3 (NM_003027.2,894-912).
ggtgaaagactctcttgat

SEQ ID NO: 317856 - DNA, 19 bp, Homo sapiens
  siRNA target sequence for SH3GL3 (NM_003027.2,895-913).
gtgaaagactctcttgata

SEQ ID NO: 317857 - DNA, 19 bp, Homo sapiens
  siRNA target sequence for SH3GL3 (NM_003027.2,948-966).
gttactacaagataaagat

SEQ ID NO: 317858 - DNA, 19 bp, Homo sapiens
  siRNA target sequence for SH3GL3 (NM_003027.2,952-970).
ctacaagataaagatttaa

SEQ ID NO: 317859 - DNA, 19 bp, Homo sapiens
  siRNA target sequence for SH3GL3 (NM_003027.2,1011-1029).
cctggattacgattataaa

SEQ ID NO: 317860 - DNA, 19 bp, Homo sapiens
  siRNA target sequence for SH3GL3 (NM_003027.2,1012-1030).
ctggattacgattataaaa

SEQ ID NO: 317861 - DNA, 19 bp, Homo sapiens
  siRNA target sequence for SH3GL3 (NM_003027.2,1015-1033).
gattacgattataaaaaga

SEQ ID NO: 317862 - DNA, 19 bp, Homo sapiens
  siRNA target sequence for SH3GL3 (NM_003027.2,1032-1050).
gaaacgagtaggtaagata

SEQ ID NO: 317863 - DNA, 19 bp, Homo sapiens
  siRNA target sequence for SH3GL3 (NM_003027.2,1264-1282).
gtccccagacgagaataca

SEQ ID NO: 317864 - DNA, 19 bp, Homo sapiens
  siRNA target sequence for SH3GL3 (NM_003027.2,1347-1365).
gacgacaggttctaacatt

SEQ ID NO: 317865 - DNA, 19 bp, Homo sapiens
  siRNA target sequence for SH3GL3 (NM_003027.2,1382-1400).
gctgtcgtggtctctatga

SEQ ID NO: 317866 - DNA, 19 bp, Homo sapiens
  siRNA target sequence for SH3GL3 (NM_003027.2,1446-1464).
catcattacattaaccaat

SEQ ID NO: 317867 - DNA, 19 bp, Homo sapiens
  siRNA target sequence for SH3GL3 (NM_003027.2,1449-1467).
cattacattaaccaatcaa

SEQ ID NO: 317868 - DNA, 19 bp, Homo sapiens
  siRNA target sequence for SH3GL3 (NM_003027.2,1508-1526).
cgggattcttccccattaa

SEQ ID NO: 317869 - DNA, 19 bp, Homo sapiens
  siRNA target sequence for SH3GL3 (NM_003027.2,1509-1527).
gggattcttccccattaat

SEQ ID NO: 317870 - DNA, 19 bp, Homo sapiens
  siRNA target sequence for SH3GL3 (NM_003027.2,1510-1528).
ggattcttccccattaatt

SEQ ID NO: 317871 - DNA, 19 bp, Homo sapiens
  siRNA target sequence for SH3GL3 (NM_003027.2,1511-1529).
gattcttccccattaatta

SEQ ID NO: 317872 - DNA, 19 bp, Homo sapiens
  siRNA target sequence for UNC5CL (NM_173561.1,259-277).
ccccccaactagaaaatga

SEQ ID NO: 317873 - DNA, 19 bp, Homo sapiens
  siRNA target sequence for UNC5CL (NM_173561.1,361-379).
ccatggtccgccagttgat

SEQ ID NO: 317874 - DNA, 19 bp, Homo sapiens
  siRNA target sequence for UNC5CL (NM_173561.1,370-388).
gccagttgatgcacaaact

SEQ ID NO: 317875 - DNA, 19 bp, Homo sapiens
  siRNA target sequence for UNC5CL (NM_173561.1,381-399).
cacaaactgttggtgtttt

SEQ ID NO: 317876 - DNA, 19 bp, Homo sapiens
  siRNA target sequence for UNC5CL (NM_173561.1,495-513).
caggagcgggtgtctttga

SEQ ID NO: 317877 - DNA, 19 bp, Homo sapiens
  siRNA target sequence for UNC5CL (NM_173561.1,619-637).
gcactctcacgttcaaaca

SEQ ID NO: 317878 - DNA, 19 bp, Homo sapiens
  siRNA target sequence for UNC5CL (NM_173561.1,828-846).
ctgcagctggccgtattct

SEQ ID NO: 317879 - DNA, 19 bp, Homo sapiens
  siRNA target sequence for UNC5CL (NM_173561.1,973-991).
gccagctcttcgacttcaa

SEQ ID NO: 317880 - DNA, 19 bp, Homo sapiens
  siRNA target sequence for UNC5CL (NM_173561.1,1118-1136).
cttctgcttccggagaaaa

SEQ ID NO: 317881 - DNA, 19 bp, Homo sapiens
  siRNA target sequence for UNC5CL (NM_173561.1,1121-1139).
ctgcttccggagaaaagca

SEQ ID NO: 317882 - DNA, 19 bp, Homo sapiens
  siRNA target sequence for UNC5CL (NM_173561.1,1209-1227).
ggcttggagaccaagtata

SEQ ID NO: 317883 - DNA, 19 bp, Homo sapiens
  siRNA target sequence for UNC5CL (NM_173561.1,1210-1228).
gcttggagaccaagtatat

SEQ ID NO: 317884 - DNA, 19 bp, Homo sapiens
  siRNA target sequence for UNC5CL (NM_173561.1,1214-1232).
ggagaccaagtatatggaa

SEQ ID NO: 317885 - DNA, 19 bp, Homo sapiens
  siRNA target sequence for UNC5CL (NM_173561.1,1215-1233).
gagaccaagtatatggaaa

SEQ ID NO: 317886 - DNA, 19 bp, Homo sapiens
  siRNA target sequence for UNC5CL (NM_173561.1,1219-1237).
ccaagtatatggaaatcct

SEQ ID NO: 317887 - DNA, 19 bp, Homo sapiens
  siRNA target sequence for UNC5CL (NM_173561.1,1401-1419).
gggctttgcggcatgaaga

SEQ ID NO: 317888 - DNA, 19 bp, Homo sapiens
  siRNA target sequence for UNC5CL (NM_173561.1,1402-1420).
ggctttgcggcatgaagat

SEQ ID NO: 317889 - DNA, 19 bp, Homo sapiens
  siRNA target sequence for NCAM2 (NM_004540.2,297-315).
cgggcaagctcttcttcaa

SEQ ID NO: 317890 - DNA, 19 bp, Homo sapiens
  siRNA target sequence for NCAM2 (NM_004540.2,313-331).
caagtgacaatttcactta

SEQ ID NO: 317891 - DNA, 19 bp, Homo sapiens
  siRNA target sequence for NCAM2 (NM_004540.2,318-336).
gacaatttcacttagcaaa

SEQ ID NO: 317892 - DNA, 19 bp, Homo sapiens
  siRNA target sequence for NCAM2 (NM_004540.2,332-350).
gcaaagtagagcttagtgt

SEQ ID NO: 317893 - DNA, 19 bp, Homo sapiens
  siRNA target sequence for NCAM2 (NM_004540.2,342-360).
gcttagtgttggagaatct

SEQ ID NO: 317894 - DNA, 19 bp, Homo sapiens
  siRNA target sequence for NCAM2 (NM_004540.2,347-365).
gtgttggagaatctaaatt

SEQ ID NO: 317895 - DNA, 19 bp, Homo sapiens
  siRNA target sequence for NCAM2 (NM_004540.2,355-373).
gaatctaaattcttcacat

SEQ ID NO: 317896 - DNA, 19 bp, Homo sapiens
  siRNA target sequence for NCAM2 (NM_004540.2,437-455).
caacacagagggtagtagt

SEQ ID NO: 317897 - DNA, 19 bp, Homo sapiens
  siRNA target sequence for NCAM2 (NM_004540.2,446-464).
gggtagtagtgcaaaagga

SEQ ID NO: 317898 - DNA, 19 bp, Homo sapiens
  siRNA target sequence for NCAM2 (NM_004540.2,469-487).
gttaggtcacggttaacca

SEQ ID NO: 317899 - DNA, 19 bp, Homo sapiens
  siRNA target sequence for NCAM2 (NM_004540.2,476-494).
cacggttaaccatctacaa

SEQ ID NO: 317900 - DNA, 19 bp, Homo sapiens
  siRNA target sequence for NCAM2 (NM_004540.2,556-574).
caagaagctacagtagttt

SEQ ID NO: 317901 - DNA, 19 bp, Homo sapiens
  siRNA target sequence for NCAM2 (NM_004540.2,607-625).
gtggtatctccacaagaat

SEQ ID NO: 317902 - DNA, 19 bp, Homo sapiens
  siRNA target sequence for NCAM2 (NM_004540.2,610-628).
gtatctccacaagaattca

SEQ ID NO: 317903 - DNA, 19 bp, Homo sapiens
  siRNA target sequence for NCAM2 (NM_004540.2,683-701).
ctgtcagctggttgtatca

SEQ ID NO: 317904 - DNA, 19 bp, Homo sapiens
  siRNA target sequence for NCAM2 (NM_004540.2,685-703).
gtcagctggttgtatcata

SEQ ID NO: 317905 - DNA, 19 bp, Homo sapiens
  siRNA target sequence for NCAM2 (NM_004540.2,687-705).
cagctggttgtatcataat

SEQ ID NO: 317906 - DNA, 19 bp, Homo sapiens
  siRNA target sequence for NCAM2 (NM_004540.2,706-724).
gaggaagtcaccactattt

SEQ ID NO: 317907 - DNA, 19 bp, Homo sapiens
  siRNA target sequence for NCAM2 (NM_004540.2,729-747).
caatcggttcgctatgtta

SEQ ID NO: 317908 - DNA, 19 bp, Homo sapiens
  siRNA target sequence for NCAM2 (NM_004540.2,733-751).
cggttcgctatgttagcaa

SEQ ID NO: 317909 - DNA, 19 bp, Homo sapiens
  siRNA target sequence for NCAM2 (NM_004540.2,840-858).
cttccgtgatatcattgtt

SEQ ID NO: 317910 - DNA, 19 bp, Homo sapiens
  siRNA target sequence for NCAM2 (NM_004540.2,868-886).
gtgccgccagcaatctcaa

SEQ ID NO: 317911 - DNA, 19 bp, Homo sapiens
  siRNA target sequence for NCAM2 (NM_004540.2,1045-1063).
ctcactgtcaggaacataa

SEQ ID NO: 317912 - DNA, 19 bp, Homo sapiens
  siRNA target sequence for NCAM2 (NM_004540.2,1049-1067).
ctgtcaggaacataatcaa

SEQ ID NO: 317913 - DNA, 19 bp, Homo sapiens
  siRNA target sequence for NCAM2 (NM_004540.2,1055-1073).
ggaacataatcaatagtga

SEQ ID NO: 317914 - DNA, 19 bp, Homo sapiens
  siRNA target sequence for NCAM2 (NM_004540.2,1072-1090).
gatggtggtccttatgtct

SEQ ID NO: 317915 - DNA, 19 bp, Homo sapiens
  siRNA target sequence for NCAM2 (NM_004540.2,1154-1172).
ctcacataatacagcttaa

SEQ ID NO: 317916 - DNA, 19 bp, Homo sapiens
  siRNA target sequence for NCAM2 (NM_004540.2,1296-1314).
cctggacggccgtatcgaa

SEQ ID NO: 317917 - DNA, 19 bp, Homo sapiens
  siRNA target sequence for NCAM2 (NM_004540.2,1334-1352).
gctcatcactgcatattaa

SEQ ID NO: 317918 - DNA, 19 bp, Homo sapiens
  siRNA target sequence for NCAM2 (NM_004540.2,1335-1353).
ctcatcactgcatattaaa

SEQ ID NO: 317919 - DNA, 19 bp, Homo sapiens
  siRNA target sequence for NCAM2 (NM_004540.2,1354-1372).
gatgtgaagttgtcagatt

SEQ ID NO: 317920 - DNA, 19 bp, Homo sapiens
  siRNA target sequence for NCAM2 (NM_004540.2,1369-1387).
gattcagggagatatgact

SEQ ID NO: 317921 - DNA, 19 bp, Homo sapiens
  siRNA target sequence for NCAM2 (NM_004540.2,1403-1421).
gaattggagggcatcaaaa

SEQ ID NO: 317922 - DNA, 19 bp, Homo sapiens
  siRNA target sequence for NCAM2 (NM_004540.2,1424-1442).
gcatgtaccttgatattga

SEQ ID NO: 317923 - DNA, 19 bp, Homo sapiens
  siRNA target sequence for NCAM2 (NM_004540.2,1428-1446).
gtaccttgatattgaatat

SEQ ID NO: 317924 - DNA, 19 bp, Homo sapiens
  siRNA target sequence for NCAM2 (NM_004540.2,1452-1470).
caagtttatatcaaaccaa

SEQ ID NO: 317925 - DNA, 19 bp, Homo sapiens
  siRNA target sequence for NCAM2 (NM_004540.2,1467-1485).
ccaaacaatttattactct

SEQ ID NO: 317926 - DNA, 19 bp, Homo sapiens
  siRNA target sequence for NCAM2 (NM_004540.2,1531-1549).
ccaccagcatcaattcact

SEQ ID NO: 317927 - DNA, 19 bp, Homo sapiens
  siRNA target sequence for NCAM2 (NM_004540.2,1546-1564).
cactggagaagagataaat

SEQ ID NO: 317928 - DNA, 19 bp, Homo sapiens
  siRNA target sequence for NCAM2 (NM_004540.2,1576-1594).
gctaaaaacacgaccaatt

SEQ ID NO: 317929 - DNA, 19 bp, Homo sapiens
  siRNA target sequence for NCAM2 (NM_004540.2,1577-1595).
ctaaaaacacgaccaattt

SEQ ID NO: 317930 - DNA, 19 bp, Homo sapiens
  siRNA target sequence for NCAM2 (NM_004540.2,1610-1628).
caggaagaaagatgatatt

SEQ ID NO: 317931 - DNA, 19 bp, Homo sapiens
  siRNA target sequence for NCAM2 (NM_004540.2,1637-1655).
cacctacatctgacaatga

SEQ ID NO: 317932 - DNA, 19 bp, Homo sapiens
  siRNA target sequence for NCAM2 (NM_004540.2,1639-1657).
cctacatctgacaatgact

SEQ ID NO: 317933 - DNA, 19 bp, Homo sapiens
  siRNA target sequence for NCAM2 (NM_004540.2,1673-1691).
gcacagccactaatcatat

SEQ ID NO: 317934 - DNA, 19 bp, Homo sapiens
  siRNA target sequence for NCAM2 (NM_004540.2,1678-1696).
gccactaatcatataggaa

SEQ ID NO: 317935 - DNA, 19 bp, Homo sapiens
  siRNA target sequence for NCAM2 (NM_004540.2,1744-1762).
ccctatggagtgaagatca

SEQ ID NO: 317936 - DNA, 19 bp, Homo sapiens
  siRNA target sequence for NCAM2 (NM_004540.2,1745-1763).
cctatggagtgaagatcat

SEQ ID NO: 317937 - DNA, 19 bp, Homo sapiens
  siRNA target sequence for NCAM2 (NM_004540.2,1811-1829).
cccatggaggtgtacctat

SEQ ID NO: 317938 - DNA, 19 bp, Homo sapiens
  siRNA target sequence for NCAM2 (NM_004540.2,1812-1830).
ccatggaggtgtacctatt

SEQ ID NO: 317939 - DNA, 19 bp, Homo sapiens
  siRNA target sequence for NCAM2 (NM_004540.2,1817-1835).
gaggtgtacctattcatca

SEQ ID NO: 317940 - DNA, 19 bp, Homo sapiens
  siRNA target sequence for NCAM2 (NM_004540.2,1820-1838).
gtgtacctattcatcacta

SEQ ID NO: 317941 - DNA, 19 bp, Homo sapiens
  siRNA target sequence for NCAM2 (NM_004540.2,1836-1854).
ctatcaggtggatgtcaaa

SEQ ID NO: 317942 - DNA, 19 bp, Homo sapiens
  siRNA target sequence for NCAM2 (NM_004540.2,1861-1879).
gcgtcagaaatctggaaaa

SEQ ID NO: 317943 - DNA, 19 bp, Homo sapiens
  siRNA target sequence for NCAM2 (NM_004540.2,1862-1880).
cgtcagaaatctggaaaat

SEQ ID NO: 317944 - DNA, 19 bp, Homo sapiens
  siRNA target sequence for NCAM2 (NM_004540.2,1885-1903).
cgctcccatggagttcaaa

SEQ ID NO: 317945 - DNA, 19 bp, Homo sapiens
  siRNA target sequence for NCAM2 (NM_004540.2,1887-1905).
ctcccatggagttcaaaca

SEQ ID NO: 317946 - DNA, 19 bp, Homo sapiens
  siRNA target sequence for NCAM2 (NM_004540.2,1889-1907).
cccatggagttcaaacaat

SEQ ID NO: 317947 - DNA, 19 bp, Homo sapiens
  siRNA target sequence for NCAM2 (NM_004540.2,1897-1915).
gttcaaacaatggttgttt

SEQ ID NO: 317948 - DNA, 19 bp, Homo sapiens
  siRNA target sequence for NCAM2 (NM_004540.2,1900-1918).
caaacaatggttgttttga

SEQ ID NO: 317949 - DNA, 19 bp, Homo sapiens
  siRNA target sequence for NCAM2 (NM_004540.2,1920-1938).
caacctggaaccaaataca

SEQ ID NO: 317950 - DNA, 19 bp, Homo sapiens
  siRNA target sequence for NCAM2 (NM_004540.2,1930-1948).
ccaaatacaacttatgaaa

SEQ ID NO: 317951 - DNA, 19 bp, Homo sapiens
  siRNA target sequence for NCAM2 (NM_004540.2,1950-1968).
cagggttgcagctgtaaat

SEQ ID NO: 317952 - DNA, 19 bp, Homo sapiens
  siRNA target sequence for NCAM2 (NM_004540.2,1978-1996).
caaggagactacagtaaaa

SEQ ID NO: 317953 - DNA, 19 bp, Homo sapiens
  siRNA target sequence for NCAM2 (NM_004540.2,2060-2078).
gcagtggaaagagctttaa

SEQ ID NO: 317954 - DNA, 19 bp, Homo sapiens
  siRNA target sequence for NCAM2 (NM_004540.2,2061-2079).
cagtggaaagagctttaaa

SEQ ID NO: 317955 - DNA, 19 bp, Homo sapiens
  siRNA target sequence for NCAM2 (NM_004540.2,2111-2129).
cccctattttggaatacat

SEQ ID NO: 317956 - DNA, 19 bp, Homo sapiens
  siRNA target sequence for NCAM2 (NM_004540.2,2112-2130).
ccctattttggaatacatt

SEQ ID NO: 317957 - DNA, 19 bp, Homo sapiens
  siRNA target sequence for NCAM2 (NM_004540.2,2158-2176).
gaccaatggctagagaaaa

SEQ ID NO: 317958 - DNA, 19 bp, Homo sapiens
  siRNA target sequence for NCAM2 (NM_004540.2,2222-2240).
ggaccatggggtatgaagt

SEQ ID NO: 317959 - DNA, 19 bp, Homo sapiens
  siRNA target sequence for NCAM2 (NM_004540.2,2223-2241).
gaccatggggtatgaagtt

SEQ ID NO: 317960 - DNA, 19 bp, Homo sapiens
  siRNA target sequence for NCAM2 (NM_004540.2,2230-2248).
gggtatgaagttcagatta

SEQ ID NO: 317961 - DNA, 19 bp, Homo sapiens
  siRNA target sequence for NCAM2 (NM_004540.2,2254-2272).
gccaatagattgggatatt

SEQ ID NO: 317962 - DNA, 19 bp, Homo sapiens
  siRNA target sequence for NCAM2 (NM_004540.2,2273-2291).
ctgaaccgacagtttatga

SEQ ID NO: 317963 - DNA, 19 bp, Homo sapiens
  siRNA target sequence for NCAM2 (NM_004540.2,2275-2293).
gaaccgacagtttatgaat

SEQ ID NO: 317964 - DNA, 19 bp, Homo sapiens
  siRNA target sequence for NCAM2 (NM_004540.2,2278-2296).
ccgacagtttatgaattca

SEQ ID NO: 317965 - DNA, 19 bp, Homo sapiens
  siRNA target sequence for NCAM2 (NM_004540.2,2381-2399).
cactgctgctaattcttgt

SEQ ID NO: 317966 - DNA, 19 bp, Homo sapiens
  siRNA target sequence for NCAM2 (NM_004540.2,2529-2547).
cctgaaagatggatcaaaa

SEQ ID NO: 317967 - DNA, 19 bp, Homo sapiens
  siRNA target sequence for NCAM2 (NM_004540.2,2540-2558).
gatcaaaagaaccaatagt

SEQ ID NO: 317968 - DNA, 19 bp, Homo sapiens
  siRNA target sequence for NCAM2 (NM_004540.2,2695-2713).
ccagaaactatagaaatta

SEQ ID NO: 317969 - DNA, 19 bp, Homo sapiens
  siRNA target sequence for NCAM2 (NM_004540.2,2743-2761).
gaagacgacagcaaagcat

SEQ ID NO: 317970 - DNA, 19 bp, Homo sapiens
  siRNA target sequence for NINJ2 (NM_016533.4,399-417).
gaccatcctctcactacta

SEQ ID NO: 317971 - DNA, 19 bp, Homo sapiens
  siRNA target sequence for NINJ2 (NM_016533.4,401-419).
ccatcctctcactactaca

SEQ ID NO: 317972 - DNA, 19 bp, Homo sapiens
  siRNA target sequence for NINJ2 (NM_016533.4,597-615).
cagccttcggggcacataa

SEQ ID NO: 317973 - DNA, 19 bp, Homo sapiens
  siRNA target sequence for NINJ2 (NM_016533.4,599-617).
gccttcggggcacataaaa

SEQ ID NO: 317974 - DNA, 19 bp, Homo sapiens
  siRNA target sequence for NINJ2 (NM_016533.4,601-619).
cttcggggcacataaaaca

SEQ ID NO: 317975 - DNA, 19 bp, Homo sapiens
  siRNA target sequence for EVA1 (NM_005797.2,209-227).
ctatagcagctgtggaaat

SEQ ID NO: 317976 - DNA, 19 bp, Homo sapiens
  siRNA target sequence for EVA1 (NM_005797.2,261-279).
gacagatgctcggttaaaa

SEQ ID NO: 317977 - DNA, 19 bp, Homo sapiens
  siRNA target sequence for EVA1 (NM_005797.2,398-416).
ccatgagtgggcggtttaa

SEQ ID NO: 317978 - DNA, 19 bp, Homo sapiens
  siRNA target sequence for EVA1 (NM_005797.2,516-534).
gaagaacccacctgatgtt

SEQ ID NO: 317979 - DNA, 19 bp, Homo sapiens
  siRNA target sequence for EVA1 (NM_005797.2,519-537).
gaacccacctgatgttgat

SEQ ID NO: 317980 - DNA, 19 bp, Homo sapiens
  siRNA target sequence for EVA1 (NM_005797.2,636-654).
gatcataatagtaattgta

SEQ ID NO: 317981 - DNA, 19 bp, Homo sapiens
  siRNA target sequence for EVA1 (NM_005797.2,689-707).
gggccgaaagagctcataa

SEQ ID NO: 317982 - DNA, 19 bp, Homo sapiens
  siRNA target sequence for EVA1 (NM_005797.2,690-708).
ggccgaaagagctcataaa

SEQ ID NO: 317983 - DNA, 19 bp, Homo sapiens
  siRNA target sequence for EVA1 (NM_005797.2,692-710).
ccgaaagagctcataaagt

SEQ ID NO: 317984 - DNA, 19 bp, Homo sapiens
  siRNA target sequence for ICAM5 (NM_003259.2,812-830).
cactctggacggactgttt

SEQ ID NO: 317985 - DNA, 19 bp, Homo sapiens
  siRNA target sequence for ICAM5 (NM_003259.2,1264-1282).
cagagcttcgtgtcctata

SEQ ID NO: 317986 - DNA, 19 bp, Homo sapiens
  siRNA target sequence for ICAM5 (NM_003259.2,1556-1574).
ctgcccagaacgcattact

SEQ ID NO: 317987 - DNA, 19 bp, Homo sapiens
  siRNA target sequence for ICAM5 (NM_003259.2,1741-1759).
gctctgcggccaaaaatgt

SEQ ID NO: 317988 - DNA, 19 bp, Homo sapiens
  siRNA target sequence for ICAM5 (NM_003259.2,1760-1778).
ggccgtcacggtggaatat

SEQ ID NO: 317989 - DNA, 19 bp, Homo sapiens
  siRNA target sequence for ICAM5 (NM_003259.2,2018-2036).
cggctccgtggccaaaaca

SEQ ID NO: 317990 - DNA, 19 bp, Homo sapiens
  siRNA target sequence for ICAM5 (NM_003259.2,2061-2079).
ccggagatggatgaatcta

SEQ ID NO: 317991 - DNA, 19 bp, Homo sapiens
  siRNA target sequence for ICAM5 (NM_003259.2,2436-2454).
ggcctgtcgagcaacaaca

SEQ ID NO: 317992 - DNA, 19 bp, Homo sapiens
  siRNA target sequence for JAM2 (NM_021219.2,714-732).
gtttcctccagattagagt

SEQ ID NO: 317993 - DNA, 19 bp, Homo sapiens
  siRNA target sequence for JAM2 (NM_021219.2,757-775).
cctttgtctactatcaaca

SEQ ID NO: 317994 - DNA, 19 bp, Homo sapiens
  siRNA target sequence for JAM2 (NM_021219.2,767-785).
ctatcaacagactcttcaa

SEQ ID NO: 317995 - DNA, 19 bp, Homo sapiens
  siRNA target sequence for JAM2 (NM_021219.2,801-819).
cgagctgagatgatagatt

SEQ ID NO: 317996 - DNA, 19 bp, Homo sapiens
  siRNA target sequence for JAM2 (NM_021219.2,804-822).
gctgagatgatagatttca

SEQ ID NO: 317997 - DNA, 19 bp, Homo sapiens
  siRNA target sequence for JAM2 (NM_021219.2,821-839).
caatatccggatcaaaaat

SEQ ID NO: 317998 - DNA, 19 bp, Homo sapiens
  siRNA target sequence for JAM2 (NM_021219.2,995-1013).
ggtagagctacgatgtcaa

SEQ ID NO: 317999 - DNA, 19 bp, Homo sapiens
  siRNA target sequence for JAM2 (NM_021219.2,1055-1073).
ggatggcatccgtttgcta

SEQ ID NO: 318000 - DNA, 19 bp, Homo sapiens
  siRNA target sequence for JAM2 (NM_021219.2,1100-1118).
caccaacagctcatacaca

SEQ ID NO: 318001 - DNA, 19 bp, Homo sapiens
  siRNA target sequence for JAM2 (NM_021219.2,1109-1127).
ctcatacacaatgaataca

SEQ ID NO: 318002 - DNA, 19 bp, Homo sapiens
  siRNA target sequence for JAM2 (NM_021219.2,1138-1156).
ctctgcaatttaatactgt

SEQ ID NO: 318003 - DNA, 19 bp, Homo sapiens
  siRNA target sequence for JAM2 (NM_021219.2,1186-1204).
gtgaagcccgcaattctgt

SEQ ID NO: 318004 - DNA, 19 bp, Homo sapiens
  siRNA target sequence for JAM2 (NM_021219.2,1192-1210).
cccgcaattctgttggata

SEQ ID NO: 318005 - DNA, 19 bp, Homo sapiens
  siRNA target sequence for JAM2 (NM_021219.2,1216-1234).
ggtgtcctgggaaacgaat

SEQ ID NO: 318006 - DNA, 19 bp, Homo sapiens
  siRNA target sequence for JAM2 (NM_021219.2,1239-1257).
gtagatgatctcaacataa

SEQ ID NO: 318007 - DNA, 19 bp, Homo sapiens
  siRNA target sequence for JAM2 (NM_021219.2,1265-1283).
catagcagccgtagtagtt

SEQ ID NO: 318008 - DNA, 19 bp, Homo sapiens
  siRNA target sequence for JAM2 (NM_021219.2,1370-1388).
gagtaattcttcatctaaa

SEQ ID NO: 318009 - DNA, 19 bp, Homo sapiens
  siRNA target sequence for VCAM1 (NM_001078.2,141-159).
gatccttggagcctcaaat

SEQ ID NO: 318010 - DNA, 19 bp, Homo sapiens
  siRNA target sequence for VCAM1 (NM_001078.2,148-166).
ggagcctcaaatatacttt

SEQ ID NO: 318011 - DNA, 19 bp, Homo sapiens
  siRNA target sequence for VCAM1 (NM_001078.2,152-170).
cctcaaatatactttggat

SEQ ID NO: 318012 - DNA, 19 bp, Homo sapiens
  siRNA target sequence for VCAM1 (NM_001078.2,153-171).
ctcaaatatactttggata

SEQ ID NO: 318013 - DNA, 19 bp, Homo sapiens
  siRNA target sequence for VCAM1 (NM_001078.2,178-196).
gcagcttctcaagctttta

SEQ ID NO: 318014 - DNA, 19 bp, Homo sapiens
  siRNA target sequence for VCAM1 (NM_001078.2,204-222).
gaccaccccagaatctaga

SEQ ID NO: 318015 - DNA, 19 bp, Homo sapiens
  siRNA target sequence for VCAM1 (NM_001078.2,210-228).
cccagaatctagatatctt

SEQ ID NO: 318016 - DNA, 19 bp, Homo sapiens
  siRNA target sequence for VCAM1 (NM_001078.2,306-324).
gatagatagtccactgaat

SEQ ID NO: 318017 - DNA, 19 bp, Homo sapiens
  siRNA target sequence for VCAM1 (NM_001078.2,350-368).
catctacgctgacaatgaa

SEQ ID NO: 318018 - DNA, 19 bp, Homo sapiens
  siRNA target sequence for VCAM1 (NM_001078.2,360-378).
gacaatgaatcctgttagt

SEQ ID NO: 318019 - DNA, 19 bp, Homo sapiens
  siRNA target sequence for VCAM1 (NM_001078.2,416-434).
gtgaatctaggaaattgga

SEQ ID NO: 318020 - DNA, 19 bp, Homo sapiens
  siRNA target sequence for VCAM1 (NM_001078.2,514-532).
ccgatcacagtcaagtgtt

SEQ ID NO: 318021 - DNA, 19 bp, Homo sapiens
  siRNA target sequence for VCAM1 (NM_001078.2,556-574).
gacaggctggagatagact

SEQ ID NO: 318022 - DNA, 19 bp, Homo sapiens
  siRNA target sequence for VCAM1 (NM_001078.2,573-591).
cttactgaaaggagatcat

SEQ ID NO: 318023 - DNA, 19 bp, Homo sapiens
  siRNA target sequence for VCAM1 (NM_001078.2,629-647).
ggaagtccctggaaaccaa

SEQ ID NO: 318024 - DNA, 19 bp, Homo sapiens
  siRNA target sequence for VCAM1 (NM_001078.2,673-691).
gtcattgaggatattggaa

SEQ ID NO: 318025 - DNA, 19 bp, Homo sapiens
  siRNA target sequence for VCAM1 (NM_001078.2,697-715).
cttgtttgccgagctaaat

SEQ ID NO: 318026 - DNA, 19 bp, Homo sapiens
  siRNA target sequence for VCAM1 (NM_001078.2,704-722).
gccgagctaaattacacat

SEQ ID NO: 318027 - DNA, 19 bp, Homo sapiens
  siRNA target sequence for VCAM1 (NM_001078.2,705-723).
ccgagctaaattacacatt

SEQ ID NO: 318028 - DNA, 19 bp, Homo sapiens
  siRNA target sequence for VCAM1 (NM_001078.2,707-725).
gagctaaattacacattga

SEQ ID NO: 318029 - DNA, 19 bp, Homo sapiens
  siRNA target sequence for VCAM1 (NM_001078.2,733-751).
gattctgtgcccacagtaa

SEQ ID NO: 318030 - DNA, 19 bp, Homo sapiens
  siRNA target sequence for VCAM1 (NM_001078.2,746-764).
cagtaaggcaggctgtaaa

SEQ ID NO: 318031 - DNA, 19 bp, Homo sapiens
  siRNA target sequence for VCAM1 (NM_001078.2,756-774).
ggctgtaaaagaattgcaa

SEQ ID NO: 318032 - DNA, 19 bp, Homo sapiens
  siRNA target sequence for VCAM1 (NM_001078.2,780-798).
catatcacccaagaataca

SEQ ID NO: 318033 - DNA, 19 bp, Homo sapiens
  siRNA target sequence for VCAM1 (NM_001078.2,973-991).
gattctggaatttatgtgt

SEQ ID NO: 318034 - DNA, 19 bp, Homo sapiens
  siRNA target sequence for VCAM1 (NM_001078.2,1029-1047).
ggtggaattaattgttcaa

SEQ ID NO: 318035 - DNA, 19 bp, Homo sapiens
  siRNA target sequence for VCAM1 (NM_001078.2,1083-1101).
ccggattgctgctcagatt

SEQ ID NO: 318036 - DNA, 19 bp, Homo sapiens
  siRNA target sequence for VCAM1 (NM_001078.2,1320-1338).
ctactcattccctagagat

SEQ ID NO: 318037 - DNA, 19 bp, Homo sapiens
  siRNA target sequence for VCAM1 (NM_001078.2,1331-1349).
ctagagatccagaaatcga

SEQ ID NO: 318038 - DNA, 19 bp, Homo sapiens
  siRNA target sequence for VCAM1 (NM_001078.2,1422-1440).
ccggctggagattgaatta

SEQ ID NO: 318039 - DNA, 19 bp, Homo sapiens
  siRNA target sequence for VCAM1 (NM_001078.2,1450-1468).
gagactattctggagaata

SEQ ID NO: 318040 - DNA, 19 bp, Homo sapiens
  siRNA target sequence for VCAM1 (NM_001078.2,1452-1470).
gactattctggagaatata

SEQ ID NO: 318041 - DNA, 19 bp, Homo sapiens
  siRNA target sequence for VCAM1 (NM_001078.2,1479-1497).
ggaggatacggatatgaaa

SEQ ID NO: 318042 - DNA, 19 bp, Homo sapiens
  siRNA target sequence for VCAM1 (NM_001078.2,1480-1498).
gaggatacggatatgaaat

SEQ ID NO: 318043 - DNA, 19 bp, Homo sapiens
  siRNA target sequence for VCAM1 (NM_001078.2,1482-1500).
ggatacggatatgaaatct

SEQ ID NO: 318044 - DNA, 19 bp, Homo sapiens
  siRNA target sequence for VCAM1 (NM_001078.2,1499-1517).
ctctagagaacaaaagttt

SEQ ID NO: 318045 - DNA, 19 bp, Homo sapiens
  siRNA target sequence for VCAM1 (NM_001078.2,1568-1586).
gtcaggctaagttacatat

SEQ ID NO: 318046 - DNA, 19 bp, Homo sapiens
  siRNA target sequence for VCAM1 (NM_001078.2,1572-1590).
ggctaagttacatattgat

SEQ ID NO: 318047 - DNA, 19 bp, Homo sapiens
  siRNA target sequence for VCAM1 (NM_001078.2,1582-1600).
catattgatgacatggaat

SEQ ID NO: 318048 - DNA, 19 bp, Homo sapiens
  siRNA target sequence for VCAM1 (NM_001078.2,1616-1634).
ggcagagtacgcaaacact

SEQ ID NO: 318049 - DNA, 19 bp, Homo sapiens
  siRNA target sequence for VCAM1 (NM_001078.2,1617-1635).
gcagagtacgcaaacactt

SEQ ID NO: 318050 - DNA, 19 bp, Homo sapiens
  siRNA target sequence for VCAM1 (NM_001078.2,1618-1636).
cagagtacgcaaacacttt

SEQ ID NO: 318051 - DNA, 19 bp, Homo sapiens
  siRNA target sequence for VCAM1 (NM_001078.2,1622-1640).
gtacgcaaacactttatgt

SEQ ID NO: 318052 - DNA, 19 bp, Homo sapiens
  siRNA target sequence for VCAM1 (NM_001078.2,1625-1643).
cgcaaacactttatgtcaa

SEQ ID NO: 318053 - DNA, 19 bp, Homo sapiens
  siRNA target sequence for VCAM1 (NM_001078.2,1696-1714).
gaaggcagttctgtgaata

SEQ ID NO: 318054 - DNA, 19 bp, Homo sapiens
  siRNA target sequence for VCAM1 (NM_001078.2,1733-1751).
gctttcctgctccgaaaat

SEQ ID NO: 318055 - DNA, 19 bp, Homo sapiens
  siRNA target sequence for VCAM1 (NM_001078.2,1975-1993).
gtcatcatctcttgtacat

SEQ ID NO: 318056 - DNA, 19 bp, Homo sapiens
  siRNA target sequence for VCAM1 (NM_001078.2,2040-2058).
gacaggagacacagtacta

SEQ ID NO: 318057 - DNA, 19 bp, Homo sapiens
  siRNA target sequence for VCAM1 (NM_001078.2,2047-2065).
gacacagtactaaaatcta

SEQ ID NO: 318058 - DNA, 19 bp, Homo sapiens
  siRNA target sequence for VCAM1 (NM_001078.2,2049-2067).
cacagtactaaaatctata

SEQ ID NO: 318059 - DNA, 19 bp, Homo sapiens
  siRNA target sequence for VCAM1 (NM_001078.2,2100-2118).
gaaggatgcgggagtatat

SEQ ID NO: 318060 - DNA, 19 bp, Homo sapiens
  siRNA target sequence for VCAM1 (NM_001078.2,2136-2154).
caaagttggctcacaatta

SEQ ID NO: 318061 - DNA, 19 bp, Homo sapiens
  siRNA target sequence for VCAM1 (NM_001078.2,2140-2158).
gttggctcacaattaagaa

SEQ ID NO: 318062 - DNA, 19 bp, Homo sapiens
  siRNA target sequence for VCAM1 (NM_001078.2,2143-2161).
ggctcacaattaagaagtt

SEQ ID NO: 318063 - DNA, 19 bp, Homo sapiens
  siRNA target sequence for VCAM1 (NM_001078.2,2159-2177).
gtttaacacttgatgttca

SEQ ID NO: 318064 - DNA, 19 bp, Homo sapiens
  siRNA target sequence for VCAM1 (NM_001078.2,2183-2201).
gagaaaacaacaaagacta

SEQ ID NO: 318065 - DNA, 19 bp, Homo sapiens
  siRNA target sequence for VCAM1 (NM_001078.2,2212-2230).
gagcttctcgtgctctatt

SEQ ID NO: 318066 - DNA, 19 bp, Homo sapiens
  siRNA target sequence for VCAM1 (NM_001078.2,2218-2236).
ctcgtgctctattttgcat

SEQ ID NO: 318067 - DNA, 19 bp, Homo sapiens
  siRNA target sequence for VCAM1 (NM_001078.2,2252-2270).
ctgccattggaatgataat

SEQ ID NO: 318068 - DNA, 19 bp, Homo sapiens
  siRNA target sequence for VCAM1 (NM_001078.2,2289-2307).
caacatgaaggggtcatat

SEQ ID NO: 318069 - DNA, 19 bp, Homo sapiens
  siRNA target sequence for VCAM1 (NM_001078.2,2292-2310).
catgaaggggtcatatagt

SEQ ID NO: 318070 - DNA, 19 bp, Homo sapiens
  siRNA target sequence for VCAM1 (NM_001078.2,2295-2313).
gaaggggtcatatagtctt

SEQ ID NO: 318071 - DNA, 19 bp, Homo sapiens
  siRNA target sequence for VCAM1 (NM_001078.2,2298-2316).
ggggtcatatagtcttgta

SEQ ID NO: 318072 - DNA, 19 bp, Homo sapiens
  siRNA target sequence for VCAM1 (NM_001078.2,2301-2319).
gtcatatagtcttgtagaa

SEQ ID NO: 318073 - DNA, 19 bp, Homo sapiens
  siRNA target sequence for ZAN (NM_003386.1,254-272).
gcagctctagggacaacta

SEQ ID NO: 318074 - DNA, 19 bp, Homo sapiens
  siRNA target sequence for ZAN (NM_003386.1,255-273).
cagctctagggacaactat

SEQ ID NO: 318075 - DNA, 19 bp, Homo sapiens
  siRNA target sequence for ZAN (NM_003386.1,423-441).
cagctatctgcatatggaa

SEQ ID NO: 318076 - DNA, 19 bp, Homo sapiens
  siRNA target sequence for ZAN (NM_003386.1,681-699).
gcccacccggctgatgttt

SEQ ID NO: 318077 - DNA, 19 bp, Homo sapiens
  siRNA target sequence for ZAN (NM_003386.1,683-701).
ccacccggctgatgtttga

SEQ ID NO: 318078 - DNA, 19 bp, Homo sapiens
  siRNA target sequence for ZAN (NM_003386.1,767-785).
cctgtaatcgcgtctgtat

SEQ ID NO: 318079 - DNA, 19 bp, Homo sapiens
  siRNA target sequence for ZAN (NM_003386.1,775-793).
cgcgtctgtatgatgcaaa

SEQ ID NO: 318080 - DNA, 19 bp, Homo sapiens
  siRNA target sequence for ZAN (NM_003386.1,904-922).
cctgatggcgacttctcta

SEQ ID NO: 318081 - DNA, 19 bp, Homo sapiens
  siRNA target sequence for ZAN (NM_003386.1,1147-1165).
caggctgtttctgtcaatt

SEQ ID NO: 318082 - DNA, 19 bp, Homo sapiens
  siRNA target sequence for ZAN (NM_003386.1,1173-1191).
cgtgggacggatacagttt

SEQ ID NO: 318083 - DNA, 19 bp, Homo sapiens
  siRNA target sequence for ZAN (NM_003386.1,1194-1212).
cgtggtaggcgtttttgga

SEQ ID NO: 318084 - DNA, 19 bp, Homo sapiens
  siRNA target sequence for ZAN (NM_003386.1,1195-1213).
gtggtaggcgtttttggaa

SEQ ID NO: 318085 - DNA, 19 bp, Homo sapiens
  siRNA target sequence for ZAN (NM_003386.1,1349-1367).
gggccctcggacataaaaa

SEQ ID NO: 318086 - DNA, 19 bp, Homo sapiens
  siRNA target sequence for ZAN (NM_003386.1,1350-1368).
ggccctcggacataaaaat

SEQ ID NO: 318087 - DNA, 19 bp, Homo sapiens
  siRNA target sequence for ZAN (NM_003386.1,1411-1429).
gcagggggtcactatatct

SEQ ID NO: 318088 - DNA, 19 bp, Homo sapiens
  siRNA target sequence for ZAN (NM_003386.1,1412-1430).
cagggggtcactatatcta

SEQ ID NO: 318089 - DNA, 19 bp, Homo sapiens
  siRNA target sequence for ZAN (NM_003386.1,1518-1536).
gttcgcataccacatgtat

SEQ ID NO: 318090 - DNA, 19 bp, Homo sapiens
  siRNA target sequence for ZAN (NM_003386.1,1538-1556).
gccttggggagggtactat

SEQ ID NO: 318091 - DNA, 19 bp, Homo sapiens
  siRNA target sequence for ZAN (NM_003386.1,1718-1736).
cggcctctgtggttgctat

SEQ ID NO: 318092 - DNA, 19 bp, Homo sapiens
  siRNA target sequence for ZAN (NM_003386.1,1729-1747).
gttgctatgggtttcatct

SEQ ID NO: 318093 - DNA, 19 bp, Homo sapiens
  siRNA target sequence for ZAN (NM_003386.1,1795-1813).
cccgtatctccagtttctt

SEQ ID NO: 318094 - DNA, 19 bp, Homo sapiens
  siRNA target sequence for ZAN (NM_003386.1,3301-3319).
ccaaatgcccgctacgaat

SEQ ID NO: 318095 - DNA, 19 bp, Homo sapiens
  siRNA target sequence for ZAN (NM_003386.1,3392-3410).
gcaaccctggctttttgtt

SEQ ID NO: 318096 - DNA, 19 bp, Homo sapiens
  siRNA target sequence for ZAN (NM_003386.1,3443-3461).
gcaattgcttctacaacaa

SEQ ID NO: 318097 - DNA, 19 bp, Homo sapiens
  siRNA target sequence for ZAN (NM_003386.1,3495-3513).
ccccaactgcacagaacat

SEQ ID NO: 318098 - DNA, 19 bp, Homo sapiens
  siRNA target sequence for ZAN (NM_003386.1,3572-3590).
ccgtgtgccagcttaagaa

SEQ ID NO: 318099 - DNA, 19 bp, Homo sapiens
  siRNA target sequence for ZAN (NM_003386.1,3573-3591).
cgtgtgccagcttaagaat

SEQ ID NO: 318100 - DNA, 19 bp, Homo sapiens
  siRNA target sequence for ZAN (NM_003386.1,3639-3657).
ctacggagaccctcattat

SEQ ID NO: 318101 - DNA, 19 bp, Homo sapiens
  siRNA target sequence for ZAN (NM_003386.1,3749-3767).
gggtgacagccaagaatga

SEQ ID NO: 318102 - DNA, 19 bp, Homo sapiens
  siRNA target sequence for ZAN (NM_003386.1,3866-3884).
ggggtcagcaagttactct

SEQ ID NO: 318103 - DNA, 19 bp, Homo sapiens
  siRNA target sequence for ZAN (NM_003386.1,3977-3995).
gtgaccagcagctgtatgt

SEQ ID NO: 318104 - DNA, 19 bp, Homo sapiens
  siRNA target sequence for ZAN (NM_003386.1,3979-3997).
gaccagcagctgtatgtta

SEQ ID NO: 318105 - DNA, 19 bp, Homo sapiens
  siRNA target sequence for ZAN (NM_003386.1,4031-4049).
gtttgtgtgggaactatga

SEQ ID NO: 318106 - DNA, 19 bp, Homo sapiens
  siRNA target sequence for ZAN (NM_003386.1,4173-4191).
gaattccccgtcttgtgat

SEQ ID NO: 318107 - DNA, 19 bp, Homo sapiens
  siRNA target sequence for ZAN (NM_003386.1,4501-4519).
ggattctccggcatgttct

SEQ ID NO: 318108 - DNA, 19 bp, Homo sapiens
  siRNA target sequence for ZAN (NM_003386.1,4742-4760).
gccaacaggatggtatcta

SEQ ID NO: 318109 - DNA, 19 bp, Homo sapiens
  siRNA target sequence for ZAN (NM_003386.1,4743-4761).
ccaacaggatggtatctat

SEQ ID NO: 318110 - DNA, 19 bp, Homo sapiens
  siRNA target sequence for ZAN (NM_003386.1,4829-4847).
gcgccttgcaccacttcat

SEQ ID NO: 318111 - DNA, 19 bp, Homo sapiens
  siRNA target sequence for ZAN (NM_003386.1,4889-4907).
ggtcccaagacagctattt

SEQ ID NO: 318112 - DNA, 19 bp, Homo sapiens
  siRNA target sequence for ZAN (NM_003386.1,4890-4908).
gtcccaagacagctatttt

SEQ ID NO: 318113 - DNA, 19 bp, Homo sapiens
  siRNA target sequence for ZAN (NM_003386.1,4947-4965).
ggaggtctcctacatcaaa

SEQ ID NO: 318114 - DNA, 19 bp, Homo sapiens
  siRNA target sequence for ZAN (NM_003386.1,4968-4986).
cgtccacgtgacagtcttt

SEQ ID NO: 318115 - DNA, 19 bp, Homo sapiens
  siRNA target sequence for ZAN (NM_003386.1,5103-5121).
cctcctctacacgaacttt

SEQ ID NO: 318116 - DNA, 19 bp, Homo sapiens
  siRNA target sequence for ZAN (NM_003386.1,5382-5400).
caagaactgtgcgatctta

SEQ ID NO: 318117 - DNA, 19 bp, Homo sapiens
  siRNA target sequence for ZAN (NM_003386.1,5414-5432).
gacccttctctcaatgtca

SEQ ID NO: 318118 - DNA, 19 bp, Homo sapiens
  siRNA target sequence for ZAN (NM_003386.1,5699-5717).
ctgagagctgtgaatgtca

SEQ ID NO: 318119 - DNA, 19 bp, Homo sapiens
  siRNA target sequence for ZAN (NM_003386.1,5976-5994).
ccactacgtgagctttgat

SEQ ID NO: 318120 - DNA, 19 bp, Homo sapiens
  siRNA target sequence for ZAN (NM_003386.1,6178-6196).
ggccaccgtgtgctaatca

SEQ ID NO: 318121 - DNA, 19 bp, Homo sapiens
  siRNA target sequence for ZAN (NM_003386.1,6179-6197).
gccaccgtgtgctaatcaa

SEQ ID NO: 318122 - DNA, 19 bp, Homo sapiens
  siRNA target sequence for ZAN (NM_003386.1,6288-6306).
cggggtgcaagtcaagttt

SEQ ID NO: 318123 - DNA, 19 bp, Homo sapiens
  siRNA target sequence for ZAN (NM_003386.1,6290-6308).
gggtgcaagtcaagtttga

SEQ ID NO: 318124 - DNA, 19 bp, Homo sapiens
  siRNA target sequence for ZAN (NM_003386.1,6300-6318).
caagtttgacgggaatcat

SEQ ID NO: 318125 - DNA, 19 bp, Homo sapiens
  siRNA target sequence for ZAN (NM_003386.1,6310-6328).
gggaatcatctcttagaga

SEQ ID NO: 318126 - DNA, 19 bp, Homo sapiens
  siRNA target sequence for ZAN (NM_003386.1,6337-6355).
cccacaacctactatggaa

SEQ ID NO: 318127 - DNA, 19 bp, Homo sapiens
  siRNA target sequence for ZAN (NM_003386.1,6408-6426).
gatgcccagcgatgaagta

SEQ ID NO: 318128 - DNA, 19 bp, Homo sapiens
  siRNA target sequence for ZAN (NM_003386.1,6417-6435).
cgatgaagtagcaaatagt

SEQ ID NO: 318129 - DNA, 19 bp, Homo sapiens
  siRNA target sequence for ZAN (NM_003386.1,6448-6466).
gtgaacagttggaaagata

SEQ ID NO: 318130 - DNA, 19 bp, Homo sapiens
  siRNA target sequence for ZAN (NM_003386.1,7173-7191).
cccccgttacctcacattt

SEQ ID NO: 318131 - DNA, 19 bp, Homo sapiens
  siRNA target sequence for ZAN (NM_003386.1,7175-7193).
cccgttacctcacatttga

SEQ ID NO: 318132 - DNA, 19 bp, Homo sapiens
  siRNA target sequence for ZAN (NM_003386.1,7217-7235).
gccgcatgacctatgttct

SEQ ID NO: 318133 - DNA, 19 bp, Homo sapiens
  siRNA target sequence for ZAN (NM_003386.1,7220-7238).
gcatgacctatgttctgat

SEQ ID NO: 318134 - DNA, 19 bp, Homo sapiens
  siRNA target sequence for ZAN (NM_003386.1,7282-7300).
gtggaaggacgcaacaaga

SEQ ID NO: 318135 - DNA, 19 bp, Homo sapiens
  siRNA target sequence for ZAN (NM_003386.1,7343-7361).
ccaccgtctacggctataa

SEQ ID NO: 318136 - DNA, 19 bp, Homo sapiens
  siRNA target sequence for ZAN (NM_003386.1,7344-7362).
caccgtctacggctataaa

SEQ ID NO: 318137 - DNA, 19 bp, Homo sapiens
  siRNA target sequence for ZAN (NM_003386.1,7346-7364).
ccgtctacggctataaagt

SEQ ID NO: 318138 - DNA, 19 bp, Homo sapiens
  siRNA target sequence for ZAN (NM_003386.1,7418-7436).
cctacaggccaaatgaaca

SEQ ID NO: 318139 - DNA, 19 bp, Homo sapiens
  siRNA target sequence for ZAN (NM_003386.1,7568-7586).
gcggaaactacgacaagaa

SEQ ID NO: 318140 - DNA, 19 bp, Homo sapiens
  siRNA target sequence for ZAN (NM_003386.1,7578-7596).
cgacaagaaccgcaagaat

SEQ ID NO: 318141 - DNA, 19 bp, Homo sapiens
  siRNA target sequence for ZAN (NM_003386.1,7750-7768).
ctccaagtgtccgaatgta

SEQ ID NO: 318142 - DNA, 19 bp, Homo sapiens
  siRNA target sequence for ZAN (NM_003386.1,7960-7978).
gtgtccagcaggtaccata

SEQ ID NO: 318143 - DNA, 19 bp, Homo sapiens
  siRNA target sequence for ZAN (NM_003386.1,7962-7980).
gtccagcaggtaccatata

SEQ ID NO: 318144 - DNA, 19 bp, Homo sapiens
  siRNA target sequence for ZAN (NM_003386.1,8471-8489).
ctgtggtggtcgtactact

SEQ ID NO: 318145 - DNA, 19 bp, Homo sapiens
  siRNA target sequence for CDA08 (NM_030790.2,264-282).
gcgggaaagaaatgactta

SEQ ID NO: 318146 - DNA, 19 bp, Homo sapiens
  siRNA target sequence for CDA08 (NM_030790.2,334-352).
gtatctttcaagaatcaca

SEQ ID NO: 318147 - DNA, 19 bp, Homo sapiens
  siRNA target sequence for CDA08 (NM_030790.2,351-369).
cagtgcattgataacaagt

SEQ ID NO: 318148 - DNA, 19 bp, Homo sapiens
  siRNA target sequence for CDA08 (NM_030790.2,419-437).
catatcttcccaaaaatta

SEQ ID NO: 318149 - DNA, 19 bp, Homo sapiens
  siRNA target sequence for CDA08 (NM_030790.2,446-464).
gtgaattaggagctgttat

SEQ ID NO: 318150 - DNA, 19 bp, Homo sapiens
  siRNA target sequence for CDA08 (NM_030790.2,498-516).
caatatgaccatactcaat

SEQ ID NO: 318151 - DNA, 19 bp, Homo sapiens
  siRNA target sequence for CDA08 (NM_030790.2,532-550).
gagccactaattatggatt

SEQ ID NO: 318152 - DNA, 19 bp, Homo sapiens
  siRNA target sequence for CDA08 (NM_030790.2,535-553).
ccactaattatggatttca

SEQ ID NO: 318153 - DNA, 19 bp, Homo sapiens
  siRNA target sequence for CDA08 (NM_030790.2,559-577).
gatctaattcctgatattt

SEQ ID NO: 318154 - DNA, 19 bp, Homo sapiens
  siRNA target sequence for CDA08 (NM_030790.2,597-615).
caaccagccacagatacta

SEQ ID NO: 318155 - DNA, 19 bp, Homo sapiens
  siRNA target sequence for CDA08 (NM_030790.2,613-631).
ctattaggagggaatttat

SEQ ID NO: 318156 - DNA, 19 bp, Homo sapiens
  siRNA target sequence for CDA08 (NM_030790.2,643-661).
gcattgaccactacaagta

SEQ ID NO: 318157 - DNA, 19 bp, Homo sapiens
  siRNA target sequence for CDA08 (NM_030790.2,799-817).
gtcagtactatattggaaa

SEQ ID NO: 318158 - DNA, 19 bp, Homo sapiens
  siRNA target sequence for CDA08 (NM_030790.2,964-982).
gttccagtcctacaagatt

SEQ ID NO: 318159 - DNA, 19 bp, Homo sapiens
  siRNA target sequence for CDA08 (NM_030790.2,973-991).
ctacaagatttcagcaata

SEQ ID NO: 318160 - DNA, 19 bp, Homo sapiens
  siRNA target sequence for CDA08 (NM_030790.2,1066-1084).
catattggagactacaata

SEQ ID NO: 318161 - DNA, 19 bp, Homo sapiens
  siRNA target sequence for CDA08 (NM_030790.2,1102-1120).
gctctggtcatactaaaga

SEQ ID NO: 318162 - DNA, 19 bp, Homo sapiens
  siRNA target sequence for CDA08 (NM_030790.2,1155-1173).
ggagaacgtcccttgtaat

SEQ ID NO: 318163 - DNA, 19 bp, Homo sapiens
  siRNA target sequence for CDA08 (NM_030790.2,1156-1174).
gagaacgtcccttgtaata

SEQ ID NO: 318164 - DNA, 19 bp, Homo sapiens
  siRNA target sequence for CDA08 (NM_030790.2,1158-1176).
gaacgtcccttgtaataat

SEQ ID NO: 318165 - DNA, 19 bp, Homo sapiens
  siRNA target sequence for CDA08 (NM_030790.2,1161-1179).
cgtcccttgtaataatgca

SEQ ID NO: 318166 - DNA, 19 bp, Homo sapiens
  siRNA target sequence for CDA08 (NM_030790.2,1189-1207).
gaggcgcgtcgaatgttta

SEQ ID NO: 318167 - DNA, 19 bp, Homo sapiens
  siRNA target sequence for CDA08 (NM_030790.2,1191-1209).
ggcgcgtcgaatgtttaaa

SEQ ID NO: 318168 - DNA, 19 bp, Homo sapiens
  siRNA target sequence for CDA08 (NM_030790.2,1193-1211).
cgcgtcgaatgtttaaagt

SEQ ID NO: 318169 - DNA, 19 bp, Homo sapiens
  siRNA target sequence for CDA08 (NM_030790.2,1195-1213).
cgtcgaatgtttaaagtct

SEQ ID NO: 318170 - DNA, 19 bp, Homo sapiens
  siRNA target sequence for CDA08 (NM_030790.2,1196-1214).
gtcgaatgtttaaagtcta

SEQ ID NO: 318171 - DNA, 19 bp, Homo sapiens
  siRNA target sequence for CDA08 (NM_030790.2,1217-1235).
gggagctgacagacctaaa

SEQ ID NO: 318172 - DNA, 19 bp, Homo sapiens
  siRNA target sequence for CDA08 (NM_030790.2,1218-1236).
ggagctgacagacctaaat

SEQ ID NO: 318173 - DNA, 19 bp, Homo sapiens
  siRNA target sequence for CDA08 (NM_030790.2,1230-1248).
cctaaatcaaattaaggat

SEQ ID NO: 318174 - DNA, 19 bp, Homo sapiens
  siRNA target sequence for CDA08 (NM_030790.2,1294-1312).
gacattgtagtgctaagta

SEQ ID NO: 318175 - DNA, 19 bp, Homo sapiens
  siRNA target sequence for CDA08 (NM_030790.2,1296-1314).
cattgtagtgctaagtaaa

SEQ ID NO: 318176 - DNA, 19 bp, Homo sapiens
  siRNA target sequence for CDA08 (NM_030790.2,1300-1318).
gtagtgctaagtaaaggat

SEQ ID NO: 318177 - DNA, 19 bp, Homo sapiens
  siRNA target sequence for CDA08 (NM_030790.2,1305-1323).
gctaagtaaaggatataca

SEQ ID NO: 318178 - DNA, 19 bp, Homo sapiens
  siRNA target sequence for CDA08 (NM_030790.2,1306-1324).
ctaagtaaaggatatacaa

SEQ ID NO: 318179 - DNA, 19 bp, Homo sapiens
  siRNA target sequence for CDA08 (NM_030790.2,1315-1333).
ggatatacaaagaatgatt

SEQ ID NO: 318180 - DNA, 19 bp, Homo sapiens
  siRNA target sequence for CDA08 (NM_030790.2,1402-1420).
ggtctgtgttctaatgact

SEQ ID NO: 318181 - DNA, 19 bp, Homo sapiens
  siRNA target sequence for CDA08 (NM_030790.2,1417-1435).
gactgtcctcgtaagataa

SEQ ID NO: 318182 - DNA, 19 bp, Homo sapiens
  siRNA target sequence for CDA08 (NM_030790.2,1419-1437).
ctgtcctcgtaagataaca

SEQ ID NO: 318183 - DNA, 19 bp, Homo sapiens
  siRNA target sequence for CDA08 (NM_030790.2,1436-1454).
caccctttggagtgaatca

SEQ ID NO: 318184 - DNA, 19 bp, Homo sapiens
  siRNA target sequence for CDA08 (NM_030790.2,1456-1474).
cctggaccttatatcatgt

SEQ ID NO: 318185 - DNA, 19 bp, Homo sapiens
  siRNA target sequence for CDA08 (NM_030790.2,1457-1475).
ctggaccttatatcatgta

SEQ ID NO: 318186 - DNA, 19 bp, Homo sapiens
  siRNA target sequence for CDA08 (NM_030790.2,1459-1477).
ggaccttatatcatgtata

SEQ ID NO: 318187 - DNA, 19 bp, Homo sapiens
  siRNA target sequence for CDA08 (NM_030790.2,1486-1504).
gatgcaaatgggtatctga

SEQ ID NO: 318188 - DNA, 19 bp, Homo sapiens
  siRNA target sequence for CDA08 (NM_030790.2,1489-1507).
gcaaatgggtatctgaaaa

SEQ ID NO: 318189 - DNA, 19 bp, Homo sapiens
  siRNA target sequence for CDA08 (NM_030790.2,1490-1508).
caaatgggtatctgaaaaa

SEQ ID NO: 318190 - DNA, 19 bp, Homo sapiens
  siRNA target sequence for CDA08 (NM_030790.2,1530-1548).
ccaatccgcacatttagct

SEQ ID NO: 318191 - DNA, 19 bp, Homo sapiens
  siRNA target sequence for CDA08 (NM_030790.2,1580-1598).
gtcggagcgcaaattttct

SEQ ID NO: 318192 - DNA, 19 bp, Homo sapiens
  siRNA target sequence for CDA08 (NM_030790.2,1602-1620).
ccatctctacgttggtatt

SEQ ID NO: 318193 - DNA, 19 bp, Homo sapiens
  siRNA target sequence for CDA08 (NM_030790.2,1622-1640).
cccgtccatctggagaaaa

SEQ ID NO: 318194 - DNA, 19 bp, Homo sapiens
  siRNA target sequence for CDA08 (NM_030790.2,1676-1694).
caaattcccagctaattgt

SEQ ID NO: 318195 - DNA, 19 bp, Homo sapiens
  siRNA target sequence for CDA08 (NM_030790.2,1684-1702).
cagctaattgtcattccat

SEQ ID NO: 318196 - DNA, 19 bp, Homo sapiens
  siRNA target sequence for CDA08 (NM_030790.2,1728-1746).
gagtgccaaactgtatctt

SEQ ID NO: 318197 - DNA, 19 bp, Homo sapiens
  siRNA target sequence for CDA08 (NM_030790.2,1740-1758).
gtatcttacaccaagtaat

SEQ ID NO: 318198 - DNA, 19 bp, Homo sapiens
  siRNA target sequence for CDA08 (NM_030790.2,1789-1807).
ggtgtctgtgttttcatct

SEQ ID NO: 318199 - DNA, 19 bp, Homo sapiens
  siRNA target sequence for CDA08 (NM_030790.2,1809-1827).
ggcaataattggcatttta

SEQ ID NO: 318200 - DNA, 19 bp, Homo sapiens
  siRNA target sequence for COL17A1 (NM_000494.2,190-208).
caaacgagatggaactgaa

SEQ ID NO: 318201 - DNA, 19 bp, Homo sapiens
  siRNA target sequence for COL17A1 (NM_000494.2,236-254).
gtaaccacaagacttacat

SEQ ID NO: 318202 - DNA, 19 bp, Homo sapiens
  siRNA target sequence for COL17A1 (NM_000494.2,241-259).
cacaagacttacatcctta

SEQ ID NO: 318203 - DNA, 19 bp, Homo sapiens
  siRNA target sequence for COL17A1 (NM_000494.2,276-294).
ccagcaatggctatgctaa

SEQ ID NO: 318204 - DNA, 19 bp, Homo sapiens
  siRNA target sequence for COL17A1 (NM_000494.2,348-366).
gcagcagcggctacataaa

SEQ ID NO: 318205 - DNA, 19 bp, Homo sapiens
  siRNA target sequence for COL17A1 (NM_000494.2,352-370).
cagcggctacataaactca

SEQ ID NO: 318206 - DNA, 19 bp, Homo sapiens
  siRNA target sequence for COL17A1 (NM_000494.2,389-407).
catgcctccacctctagtt

SEQ ID NO: 318207 - DNA, 19 bp, Homo sapiens
  siRNA target sequence for COL17A1 (NM_000494.2,445-463).
ctccccaggctcaaccttt

SEQ ID NO: 318208 - DNA, 19 bp, Homo sapiens
  siRNA target sequence for COL17A1 (NM_000494.2,448-466).
cccaggctcaacctttgaa

SEQ ID NO: 318209 - DNA, 19 bp, Homo sapiens
  siRNA target sequence for COL17A1 (NM_000494.2,449-467).
ccaggctcaacctttgaaa

SEQ ID NO: 318210 - DNA, 19 bp, Homo sapiens
  siRNA target sequence for COL17A1 (NM_000494.2,527-545).
gagtaccctcggaaggaat

SEQ ID NO: 318211 - DNA, 19 bp, Homo sapiens
  siRNA target sequence for COL17A1 (NM_000494.2,532-550).
ccctcggaaggaatttgca

SEQ ID NO: 318212 - DNA, 19 bp, Homo sapiens
  siRNA target sequence for COL17A1 (NM_000494.2,533-551).
cctcggaaggaatttgcat

SEQ ID NO: 318213 - DNA, 19 bp, Homo sapiens
  siRNA target sequence for COL17A1 (NM_000494.2,575-593).
caaacacgagagagtgaaa

SEQ ID NO: 318214 - DNA, 19 bp, Homo sapiens
  siRNA target sequence for COL17A1 (NM_000494.2,624-642).
ccacccgatggacagaatt

SEQ ID NO: 318215 - DNA, 19 bp, Homo sapiens
  siRNA target sequence for COL17A1 (NM_000494.2,627-645).
cccgatggacagaattgga

SEQ ID NO: 318216 - DNA, 19 bp, Homo sapiens
  siRNA target sequence for COL17A1 (NM_000494.2,628-646).
ccgatggacagaattggat

SEQ ID NO: 318217 - DNA, 19 bp, Homo sapiens
  siRNA target sequence for COL17A1 (NM_000494.2,735-753).
gcactgtggagaccaaaat

SEQ ID NO: 318218 - DNA, 19 bp, Homo sapiens
  siRNA target sequence for COL17A1 (NM_000494.2,740-758).
gtggagaccaaaattgtga

SEQ ID NO: 318219 - DNA, 19 bp, Homo sapiens
  siRNA target sequence for COL17A1 (NM_000494.2,858-876).
ccatggggacctatcacaa

SEQ ID NO: 318220 - DNA, 19 bp, Homo sapiens
  siRNA target sequence for COL17A1 (NM_000494.2,863-881).
gggacctatcacaacaaca

SEQ ID NO: 318221 - DNA, 19 bp, Homo sapiens
  siRNA target sequence for COL17A1 (NM_000494.2,933-951).
cagtcttcggagttccaaa

SEQ ID NO: 318222 - DNA, 19 bp, Homo sapiens
  siRNA target sequence for COL17A1 (NM_000494.2,1299-1317).
gcatcgctgcaacttcttt

SEQ ID NO: 318223 - DNA, 19 bp, Homo sapiens
  siRNA target sequence for COL17A1 (NM_000494.2,1300-1318).
catcgctgcaacttctttt

SEQ ID NO: 318224 - DNA, 19 bp, Homo sapiens
  siRNA target sequence for COL17A1 (NM_000494.2,1371-1389).
gcctaaaagccgaagctaa

SEQ ID NO: 318225 - DNA, 19 bp, Homo sapiens
  siRNA target sequence for COL17A1 (NM_000494.2,1372-1390).
cctaaaagccgaagctaat

SEQ ID NO: 318226 - DNA, 19 bp, Homo sapiens
  siRNA target sequence for COL17A1 (NM_000494.2,1707-1725).
gggacagcatggatagaat

SEQ ID NO: 318227 - DNA, 19 bp, Homo sapiens
  siRNA target sequence for COL17A1 (NM_000494.2,1708-1726).
ggacagcatggatagaata

SEQ ID NO: 318228 - DNA, 19 bp, Homo sapiens
  siRNA target sequence for COL17A1 (NM_000494.2,1711-1729).
cagcatggatagaatagaa

SEQ ID NO: 318229 - DNA, 19 bp, Homo sapiens
  siRNA target sequence for COL17A1 (NM_000494.2,1713-1731).
gcatggatagaatagaaaa

SEQ ID NO: 318230 - DNA, 19 bp, Homo sapiens
  siRNA target sequence for COL17A1 (NM_000494.2,1764-1782).
gagcagacctggacaaaat

SEQ ID NO: 318231 - DNA, 19 bp, Homo sapiens
  siRNA target sequence for COL17A1 (NM_000494.2,2545-2563).
ccctggccgaccaggaata

SEQ ID NO: 318232 - DNA, 19 bp, Homo sapiens
  siRNA target sequence for COL17A1 (NM_000494.2,2546-2564).
cctggccgaccaggaataa

SEQ ID NO: 318233 - DNA, 19 bp, Homo sapiens
  siRNA target sequence for COL17A1 (NM_000494.2,2547-2565).
ctggccgaccaggaataaa

SEQ ID NO: 318234 - DNA, 19 bp, Homo sapiens
  siRNA target sequence for COL17A1 (NM_000494.2,2551-2569).
ccgaccaggaataaaaggt

SEQ ID NO: 318235 - DNA, 19 bp, Homo sapiens
  siRNA target sequence for COL17A1 (NM_000494.2,3173-3191).
gggcctccgggctctatca

SEQ ID NO: 318236 - DNA, 19 bp, Homo sapiens
  siRNA target sequence for COL17A1 (NM_000494.2,3240-3258).
gtgacagtattagatctta

SEQ ID NO: 318237 - DNA, 19 bp, Homo sapiens
  siRNA target sequence for COL17A1 (NM_000494.2,3244-3262).
cagtattagatcttaccta

SEQ ID NO: 318238 - DNA, 19 bp, Homo sapiens
  siRNA target sequence for COL17A1 (NM_000494.2,3557-3575).
ctgagtagtcgcattctca

SEQ ID NO: 318239 - DNA, 19 bp, Homo sapiens
  siRNA target sequence for COL17A1 (NM_000494.2,3764-3782).
gaggacctctcgtcttact

SEQ ID NO: 318240 - DNA, 19 bp, Homo sapiens
  siRNA target sequence for COL17A1 (NM_000494.2,3766-3784).
ggacctctcgtcttactta

SEQ ID NO: 318241 - DNA, 19 bp, Homo sapiens
  siRNA target sequence for COL17A1 (NM_000494.2,3769-3787).
cctctcgtcttacttacat

SEQ ID NO: 318242 - DNA, 19 bp, Homo sapiens
  siRNA target sequence for COL17A1 (NM_000494.2,3770-3788).
ctctcgtcttacttacata

SEQ ID NO: 318243 - DNA, 19 bp, Homo sapiens
  siRNA target sequence for COL17A1 (NM_000494.2,3772-3790).
ctcgtcttacttacatact

SEQ ID NO: 318244 - DNA, 19 bp, Homo sapiens
  siRNA target sequence for COL17A1 (NM_000494.2,3785-3803).
catactgccggcttgtcat

SEQ ID NO: 318245 - DNA, 19 bp, Homo sapiens
  siRNA target sequence for COL17A1 (NM_000494.2,3789-3807).
ctgccggcttgtcattcat

SEQ ID NO: 318246 - DNA, 19 bp, Homo sapiens
  siRNA target sequence for COL17A1 (NM_000494.2,4271-4289).
gctggagatctggattaca

SEQ ID NO: 318247 - DNA, 19 bp, Homo sapiens
  siRNA target sequence for COL17A1 (NM_000494.2,4272-4290).
ctggagatctggattacaa

SEQ ID NO: 318248 - DNA, 19 bp, Homo sapiens
  siRNA target sequence for COL17A1 (NM_000494.2,4275-4293).
gagatctggattacaatga

SEQ ID NO: 318249 - DNA, 19 bp, Homo sapiens
  siRNA target sequence for DKFZP761D0211 (NM_032039.1,191-209).
cgaaatccaccccttgaaa

SEQ ID NO: 318250 - DNA, 19 bp, Homo sapiens
  siRNA target sequence for DKFZP761D0211 (NM_032039.1,197-215).
ccaccccttgaaaaatgaa

SEQ ID NO: 318251 - DNA, 19 bp, Homo sapiens
  siRNA target sequence for DKFZP761D0211 (NM_032039.1,237-255).
ctgggaaatccatcaaaaa

SEQ ID NO: 318252 - DNA, 19 bp, Homo sapiens
  siRNA target sequence for DKFZP761D0211 (NM_032039.1,250-268).
caaaaaatgaggataacgt

SEQ ID NO: 318253 - DNA, 19 bp, Homo sapiens
  siRNA target sequence for DKFZP761D0211 (NM_032039.1,402-420).
cgaatgtggaggatagact

SEQ ID NO: 318254 - DNA, 19 bp, Homo sapiens
  siRNA target sequence for DKFZP761D0211 (NM_032039.1,424-442).
gtgccgctgttatctatga

SEQ ID NO: 318255 - DNA, 19 bp, Homo sapiens
  siRNA target sequence for DKFZP761D0211 (NM_032039.1,426-444).
gccgctgttatctatgact

SEQ ID NO: 318256 - DNA, 19 bp, Homo sapiens
  siRNA target sequence for DKFZP761D0211 (NM_032039.1,427-445).
ccgctgttatctatgactt

SEQ ID NO: 318257 - DNA, 19 bp, Homo sapiens
  siRNA target sequence for DKFZP761D0211 (NM_032039.1,447-465).
ctggctgtggatgatataa

SEQ ID NO: 318258 - DNA, 19 bp, Homo sapiens
  siRNA target sequence for DKFZP761D0211 (NM_032039.1,470-488).
ggacaggatccaagatgtt

SEQ ID NO: 318259 - DNA, 19 bp, Homo sapiens
  siRNA target sequence for DKFZP761D0211 (NM_032039.1,973-991).
ggacaggtgcccactacat

SEQ ID NO: 318260 - DNA, 19 bp, Homo sapiens
  siRNA target sequence for DKFZP761D0211 (NM_032039.1,1525-1543).
ggcacagcctgtacatgtt

SEQ ID NO: 318261 - DNA, 19 bp, Homo sapiens
  siRNA target sequence for MDS028 (NM_018463.2,139-157).
cggagacgttgataacgat

SEQ ID NO: 318262 - DNA, 19 bp, Homo sapiens
  siRNA target sequence for MDS028 (NM_018463.2,140-158).
ggagacgttgataacgata

SEQ ID NO: 318263 - DNA, 19 bp, Homo sapiens
  siRNA target sequence for MDS028 (NM_018463.2,145-163).
cgttgataacgatacgtta

SEQ ID NO: 318264 - DNA, 19 bp, Homo sapiens
  siRNA target sequence for MDS028 (NM_018463.2,146-164).
gttgataacgatacgttaa

SEQ ID NO: 318265 - DNA, 19 bp, Homo sapiens
  siRNA target sequence for MDS028 (NM_018463.2,190-208).
cgggaaggtgtctgtgtat

SEQ ID NO: 318266 - DNA, 19 bp, Homo sapiens
  siRNA target sequence for MDS028 (NM_018463.2,270-288).
gggttggagacgtgtgtaa

SEQ ID NO: 318267 - DNA, 19 bp, Homo sapiens
  siRNA target sequence for MDS028 (NM_018463.2,271-289).
ggttggagacgtgtgtaat

SEQ ID NO: 318268 - DNA, 19 bp, Homo sapiens
  siRNA target sequence for MDS028 (NM_018463.2,272-290).
gttggagacgtgtgtaata

SEQ ID NO: 318269 - DNA, 19 bp, Homo sapiens
  siRNA target sequence for MDS028 (NM_018463.2,278-296).
gacgtgtgtaataaaggaa

SEQ ID NO: 318270 - DNA, 19 bp, Homo sapiens
  siRNA target sequence for MDS028 (NM_018463.2,320-338).
gctgaaggctggtttcatt

SEQ ID NO: 318271 - DNA, 19 bp, Homo sapiens
  siRNA target sequence for MDS028 (NM_018463.2,377-395).
gggcaccacgagacactaa

SEQ ID NO: 318272 - DNA, 19 bp, Homo sapiens
  siRNA target sequence for MDS028 (NM_018463.2,378-396).
ggcaccacgagacactaat

SEQ ID NO: 318273 - DNA, 19 bp, Homo sapiens
  siRNA target sequence for MDS028 (NM_018463.2,546-564).
gtgagggtcctgaacatct

SEQ ID NO: 318274 - DNA, 19 bp, Homo sapiens
  siRNA target sequence for MDS028 (NM_018463.2,671-689).
ccaggttgtgcgtatgcaa

SEQ ID NO: 318275 - DNA, 19 bp, Homo sapiens
  siRNA target sequence for MDS028 (NM_018463.2,672-690).
caggttgtgcgtatgcaat

SEQ ID NO: 318276 - DNA, 19 bp, Homo sapiens
  siRNA target sequence for MDS028 (NM_018463.2,675-693).
gttgtgcgtatgcaattct

SEQ ID NO: 318277 - DNA, 19 bp, Homo sapiens
  siRNA target sequence for MDS028 (NM_018463.2,678-696).
gtgcgtatgcaattctact

SEQ ID NO: 318278 - DNA, 19 bp, Homo sapiens
  siRNA target sequence for MDS028 (NM_018463.2,801-819).
ctggccgtatccacaacaa

SEQ ID NO: 318279 - DNA, 19 bp, Homo sapiens
  siRNA target sequence for MDS028 (NM_018463.2,805-823).
ccgtatccacaacaagaat

SEQ ID NO: 318280 - DNA, 19 bp, Homo sapiens
  siRNA target sequence for MDS028 (NM_018463.2,835-853).
cctaattggcaacatcaaa

SEQ ID NO: 318281 - DNA, 19 bp, Homo sapiens
  siRNA target sequence for MDS028 (NM_018463.2,1053-1071).
gacagacatatatcattga

SEQ ID NO: 318282 - DNA, 19 bp, Homo sapiens
  siRNA target sequence for MDS028 (NM_018463.2,1091-1109).
cgcttccaagtggatgaaa

SEQ ID NO: 318283 - DNA, 19 bp, Homo sapiens
  siRNA target sequence for MDS028 (NM_018463.2,1093-1111).
cttccaagtggatgaaaat

SEQ ID NO: 318284 - DNA, 19 bp, Homo sapiens
  siRNA target sequence for MDS028 (NM_018463.2,1161-1179).
gcccctgcctcgtatatgt

SEQ ID NO: 318285 - DNA, 19 bp, Homo sapiens
  siRNA target sequence for MDS028 (NM_018463.2,1167-1185).
gcctcgtatatgtcacttt

SEQ ID NO: 318286 - DNA, 19 bp, Homo sapiens
  siRNA target sequence for MDS028 (NM_018463.2,1169-1187).
ctcgtatatgtcactttca

SEQ ID NO: 318287 - DNA, 19 bp, Homo sapiens
  siRNA target sequence for MDS028 (NM_018463.2,1225-1243).
gcggatggagtctaccaat

SEQ ID NO: 318288 - DNA, 19 bp, Homo sapiens
  siRNA target sequence for PPFIA2 (NM_003625.2,171-189).
gaagtgatgcccacgatta

SEQ ID NO: 318289 - DNA, 19 bp, Homo sapiens
  siRNA target sequence for PPFIA2 (NM_003625.2,401-419).
cctgccacaggatatcgaa

SEQ ID NO: 318290 - DNA, 19 bp, Homo sapiens
  siRNA target sequence for PPFIA2 (NM_003625.2,402-420).
ctgccacaggatatcgaat

SEQ ID NO: 318291 - DNA, 19 bp, Homo sapiens
  siRNA target sequence for PPFIA2 (NM_003625.2,452-470).
ggctgatccaccggaattt

SEQ ID NO: 318292 - DNA, 19 bp, Homo sapiens
  siRNA target sequence for PPFIA2 (NM_003625.2,565-583).
gactattactggagcattt

SEQ ID NO: 318293 - DNA, 19 bp, Homo sapiens
  siRNA target sequence for PPFIA2 (NM_003625.2,590-608).
ccttgtgtcacgacatgaa

SEQ ID NO: 318294 - DNA, 19 bp, Homo sapiens
  siRNA target sequence for PPFIA2 (NM_003625.2,591-609).
cttgtgtcacgacatgaaa

SEQ ID NO: 318295 - DNA, 19 bp, Homo sapiens
  siRNA target sequence for PPFIA2 (NM_003625.2,600-618).
cgacatgaaagatcactaa

SEQ ID NO: 318296 - DNA, 19 bp, Homo sapiens
  siRNA target sequence for PPFIA2 (NM_003625.2,603-621).
catgaaagatcactaagaa

SEQ ID NO: 318297 - DNA, 19 bp, Homo sapiens
  siRNA target sequence for PPFIA2 (NM_003625.2,738-756).
gagcgactgagggtttctt

SEQ ID NO: 318298 - DNA, 19 bp, Homo sapiens
  siRNA target sequence for PPFIA2 (NM_003625.2,740-758).
gcgactgagggtttcttta

SEQ ID NO: 318299 - DNA, 19 bp, Homo sapiens
  siRNA target sequence for PPFIA2 (NM_003625.2,810-828).
gttgccttgcgtgaacaaa

SEQ ID NO: 318300 - DNA, 19 bp, Homo sapiens
  siRNA target sequence for PPFIA2 (NM_003625.2,815-833).
cttgcgtgaacaaaatgtt

SEQ ID NO: 318301 - DNA, 19 bp, Homo sapiens
  siRNA target sequence for PPFIA2 (NM_003625.2,818-836).
gcgtgaacaaaatgttcat

SEQ ID NO: 318302 - DNA, 19 bp, Homo sapiens
  siRNA target sequence for PPFIA2 (NM_003625.2,925-943).
gtttgtccaatggttctat

SEQ ID NO: 318303 - DNA, 19 bp, Homo sapiens
  siRNA target sequence for PPFIA2 (NM_003625.2,947-965).
ctcaaccgatgaaactagt

SEQ ID NO: 318304 - DNA, 19 bp, Homo sapiens
  siRNA target sequence for PPFIA2 (NM_003625.2,952-970).
ccgatgaaactagtcaaat

SEQ ID NO: 318305 - DNA, 19 bp, Homo sapiens
  siRNA target sequence for PPFIA2 (NM_003625.2,961-979).
ctagtcaaatagttgaact

SEQ ID NO: 318306 - DNA, 19 bp, Homo sapiens
  siRNA target sequence for PPFIA2 (NM_003625.2,989-1007).
gcttgaaaagcaaaactat

SEQ ID NO: 318307 - DNA, 19 bp, Homo sapiens
  siRNA target sequence for PPFIA2 (NM_003625.2,1015-1033).
cccagatgaaagaacgttt

SEQ ID NO: 318308 - DNA, 19 bp, Homo sapiens
  siRNA target sequence for PPFIA2 (NM_003625.2,1016-1034).
ccagatgaaagaacgttta

SEQ ID NO: 318309 - DNA, 19 bp, Homo sapiens
  siRNA target sequence for PPFIA2 (NM_003625.2,1029-1047).
cgtttagcagccctttctt

SEQ ID NO: 318310 - DNA, 19 bp, Homo sapiens
  siRNA target sequence for PPFIA2 (NM_003625.2,1229-1247).
catacatgacatgaatgat

SEQ ID NO: 318311 - DNA, 19 bp, Homo sapiens
  siRNA target sequence for PPFIA2 (NM_003625.2,1329-1347).
gagctagctgaacaaaagt

SEQ ID NO: 318312 - DNA, 19 bp, Homo sapiens
  siRNA target sequence for PPFIA2 (NM_003625.2,1408-1426).
gaattgcagccctaaccaa

SEQ ID NO: 318313 - DNA, 19 bp, Homo sapiens
  siRNA target sequence for PPFIA2 (NM_003625.2,1444-1462).
gaaatattgaagaacgtat

SEQ ID NO: 318314 - DNA, 19 bp, Homo sapiens
  siRNA target sequence for PPFIA2 (NM_003625.2,1452-1470).
gaagaacgtatgagacatt

SEQ ID NO: 318315 - DNA, 19 bp, Homo sapiens
  siRNA target sequence for PPFIA2 (NM_003625.2,1536-1554).
gaggagcataacaagagat

SEQ ID NO: 318316 - DNA, 19 bp, Homo sapiens
  siRNA target sequence for PPFIA2 (NM_003625.2,1558-1576).
cggatacggttgatagact

SEQ ID NO: 318317 - DNA, 19 bp, Homo sapiens
  siRNA target sequence for PPFIA2 (NM_003625.2,1559-1577).
ggatacggttgatagactt

SEQ ID NO: 318318 - DNA, 19 bp, Homo sapiens
  siRNA target sequence for PPFIA2 (NM_003625.2,1569-1587).
gatagacttctgactgaat

SEQ ID NO: 318319 - DNA, 19 bp, Homo sapiens
  siRNA target sequence for PPFIA2 (NM_003625.2,1573-1591).
gacttctgactgaatccaa

SEQ ID NO: 318320 - DNA, 19 bp, Homo sapiens
  siRNA target sequence for PPFIA2 (NM_003625.2,1588-1606).
ccaatgaacgcctacaact

SEQ ID NO: 318321 - DNA, 19 bp, Homo sapiens
  siRNA target sequence for PPFIA2 (NM_003625.2,1589-1607).
caatgaacgcctacaacta

SEQ ID NO: 318322 - DNA, 19 bp, Homo sapiens
  siRNA target sequence for PPFIA2 (NM_003625.2,1597-1615).
gcctacaactacacttaaa

SEQ ID NO: 318323 - DNA, 19 bp, Homo sapiens
  siRNA target sequence for PPFIA2 (NM_003625.2,1746-1764).
cttgaccaattgaaaatga

SEQ ID NO: 318324 - DNA, 19 bp, Homo sapiens
  siRNA target sequence for PPFIA2 (NM_003625.2,1763-1781).
gagaactggctctttaatt

SEQ ID NO: 318325 - DNA, 19 bp, Homo sapiens
  siRNA target sequence for PPFIA2 (NM_003625.2,1765-1783).
gaactggctctttaattga

SEQ ID NO: 318326 - DNA, 19 bp, Homo sapiens
  siRNA target sequence for PPFIA2 (NM_003625.2,1787-1805).
cacaataccaagaactcat

SEQ ID NO: 318327 - DNA, 19 bp, Homo sapiens
  siRNA target sequence for PPFIA2 (NM_003625.2,1859-1877).
gtctgattacagaacaact

SEQ ID NO: 318328 - DNA, 19 bp, Homo sapiens
  siRNA target sequence for PPFIA2 (NM_003625.2,1907-1925).
catgggtgtgcgaagagat

SEQ ID NO: 318329 - DNA, 19 bp, Homo sapiens
  siRNA target sequence for PPFIA2 (NM_003625.2,1947-1965).
ggggatcacgagtggaata

SEQ ID NO: 318330 - DNA, 19 bp, Homo sapiens
  siRNA target sequence for PPFIA2 (NM_003625.2,1949-1967).
ggatcacgagtggaataga

SEQ ID NO: 318331 - DNA, 19 bp, Homo sapiens
  siRNA target sequence for PPFIA2 (NM_003625.2,1950-1968).
gatcacgagtggaatagaa

SEQ ID NO: 318332 - DNA, 19 bp, Homo sapiens
  siRNA target sequence for PPFIA2 (NM_003625.2,2010-2028).
gacactgaaatgtctgata

SEQ ID NO: 318333 - DNA, 19 bp, Homo sapiens
  siRNA target sequence for PPFIA2 (NM_003625.2,2256-2274).
cacccaggtacctccatta

SEQ ID NO: 318334 - DNA, 19 bp, Homo sapiens
  siRNA target sequence for PPFIA2 (NM_003625.2,2407-2425).
ggaaacatcggagaaagat

SEQ ID NO: 318335 - DNA, 19 bp, Homo sapiens
  siRNA target sequence for PPFIA2 (NM_003625.2,2540-2558).
caatgatgctcgaagtagt

SEQ ID NO: 318336 - DNA, 19 bp, Homo sapiens
  siRNA target sequence for PPFIA2 (NM_003625.2,2544-2562).
gatgctcgaagtagtttat

SEQ ID NO: 318337 - DNA, 19 bp, Homo sapiens
  siRNA target sequence for PPFIA2 (NM_003625.2,2656-2674).
cttcaataggacgtttgtt

SEQ ID NO: 318338 - DNA, 19 bp, Homo sapiens
  siRNA target sequence for PPFIA2 (NM_003625.2,2778-2796).
gagaaggatcgaagactaa

SEQ ID NO: 318339 - DNA, 19 bp, Homo sapiens
  siRNA target sequence for PPFIA2 (NM_003625.2,2783-2801).
ggatcgaagactaaagaaa

SEQ ID NO: 318340 - DNA, 19 bp, Homo sapiens
  siRNA target sequence for PPFIA2 (NM_003625.2,2826-2844).
cggagaaagggattacctt

SEQ ID NO: 318341 - DNA, 19 bp, Homo sapiens
  siRNA target sequence for PPFIA2 (NM_003625.2,2946-2964).
gccatcatgtctgctttat

SEQ ID NO: 318342 - DNA, 19 bp, Homo sapiens
  siRNA target sequence for PPFIA2 (NM_003625.2,3041-3059).
gatggtttccctaacaagt

SEQ ID NO: 318343 - DNA, 19 bp, Homo sapiens
  siRNA target sequence for PPFIA2 (NM_003625.2,3098-3116).
cgtttgggtgactcatgaa

SEQ ID NO: 318344 - DNA, 19 bp, Homo sapiens
  siRNA target sequence for PPFIA2 (NM_003625.2,3203-3221).
ggcttatggagatatgaat

SEQ ID NO: 318345 - DNA, 19 bp, Homo sapiens
  siRNA target sequence for PPFIA2 (NM_003625.2,3205-3223).
cttatggagatatgaatca

SEQ ID NO: 318346 - DNA, 19 bp, Homo sapiens
  siRNA target sequence for PPFIA2 (NM_003625.2,3258-3276).
gggttacctcagtacagaa

SEQ ID NO: 318347 - DNA, 19 bp, Homo sapiens
  siRNA target sequence for PPFIA2 (NM_003625.2,3296-3314).
ggtagatgcaagaatgtta

SEQ ID NO: 318348 - DNA, 19 bp, Homo sapiens
  siRNA target sequence for PPFIA2 (NM_003625.2,3369-3387).
catcgaacaagtttacaat

SEQ ID NO: 318349 - DNA, 19 bp, Homo sapiens
  siRNA target sequence for PPFIA2 (NM_003625.2,3400-3418).
gcttaaagaggttgaatta

SEQ ID NO: 318350 - DNA, 19 bp, Homo sapiens
  siRNA target sequence for PPFIA2 (NM_003625.2,3445-3463).
gggaagcaagccaacatga

SEQ ID NO: 318351 - DNA, 19 bp, Homo sapiens
  siRNA target sequence for PPFIA2 (NM_003625.2,3450-3468).
gcaagccaacatgaaataa

SEQ ID NO: 318352 - DNA, 19 bp, Homo sapiens
  siRNA target sequence for PPFIA2 (NM_003625.2,3522-3540).
ggacttcgagaatatgcaa

SEQ ID NO: 318353 - DNA, 19 bp, Homo sapiens
  siRNA target sequence for PPFIA2 (NM_003625.2,3523-3541).
gacttcgagaatatgcaaa

SEQ ID NO: 318354 - DNA, 19 bp, Homo sapiens
  siRNA target sequence for PPFIA2 (NM_003625.2,3525-3543).
cttcgagaatatgcaaata

SEQ ID NO: 318355 - DNA, 19 bp, Homo sapiens
  siRNA target sequence for PPFIA2 (NM_003625.2,3558-3576).
ggtgtgcatggctcactta

SEQ ID NO: 318356 - DNA, 19 bp, Homo sapiens
  siRNA target sequence for PPFIA2 (NM_003625.2,3559-3577).
gtgtgcatggctcacttat

SEQ ID NO: 318357 - DNA, 19 bp, Homo sapiens
  siRNA target sequence for PPFIA2 (NM_003625.2,3647-3665).
ggcaaggcagattcttgaa

SEQ ID NO: 318358 - DNA, 19 bp, Homo sapiens
  siRNA target sequence for PPFIA2 (NM_003625.2,3648-3666).
gcaaggcagattcttgaaa

SEQ ID NO: 318359 - DNA, 19 bp, Homo sapiens
  siRNA target sequence for PPFIA2 (NM_003625.2,3652-3670).
ggcagattcttgaaagaga

SEQ ID NO: 318360 - DNA, 19 bp, Homo sapiens
  siRNA target sequence for PPFIA2 (NM_003625.2,3819-3837).
ccagctggatttaggttaa

SEQ ID NO: 318361 - DNA, 19 bp, Homo sapiens
  siRNA target sequence for PPFIA2 (NM_003625.2,3844-3862).
cctctgggcagtcaagaaa

SEQ ID NO: 318362 - DNA, 19 bp, Homo sapiens
  siRNA target sequence for PPFIA2 (NM_003625.2,3845-3863).
ctctgggcagtcaagaaaa

SEQ ID NO: 318363 - DNA, 19 bp, Homo sapiens
  siRNA target sequence for PPFIA2 (NM_003625.2,3889-3907).
gactgcagaggttagacaa

SEQ ID NO: 318364 - DNA, 19 bp, Homo sapiens
  siRNA target sequence for PPFIA2 (NM_003625.2,3911-3929).
cactgttcgcacatactca

SEQ ID NO: 318365 - DNA, 19 bp, Homo sapiens
  siRNA target sequence for PPFIA2 (NM_003625.2,3915-3933).
gttcgcacatactcatgtt

SEQ ID NO: 318366 - DNA, 19 bp, Homo sapiens
  siRNA target sequence for SGCE (NM_003919.1,170-188).
gctgacagtgtacagtatt

SEQ ID NO: 318367 - DNA, 19 bp, Homo sapiens
  siRNA target sequence for SGCE (NM_003919.1,201-219).
cactccgatcggaatgtat

SEQ ID NO: 318368 - DNA, 19 bp, Homo sapiens
  siRNA target sequence for SGCE (NM_003919.1,232-250).
gtgtcctctttgttcatgt

SEQ ID NO: 318369 - DNA, 19 bp, Homo sapiens
  siRNA target sequence for SGCE (NM_003919.1,234-252).
gtcctctttgttcatgttt

SEQ ID NO: 318370 - DNA, 19 bp, Homo sapiens
  siRNA target sequence for SGCE (NM_003919.1,291-309).
ccaaaacctggcgagatta

SEQ ID NO: 318371 - DNA, 19 bp, Homo sapiens
  siRNA target sequence for SGCE (NM_003919.1,298-316).
ctggcgagattagtaatga

SEQ ID NO: 318372 - DNA, 19 bp, Homo sapiens
  siRNA target sequence for SGCE (NM_003919.1,310-328).
gtaatgatcccataacatt

SEQ ID NO: 318373 - DNA, 19 bp, Homo sapiens
  siRNA target sequence for SGCE (NM_003919.1,358-376).
gacctggatggcttcgata

SEQ ID NO: 318374 - DNA, 19 bp, Homo sapiens
  siRNA target sequence for SGCE (NM_003919.1,360-378).
cctggatggcttcgatata

SEQ ID NO: 318375 - DNA, 19 bp, Homo sapiens
  siRNA target sequence for SGCE (NM_003919.1,361-379).
ctggatggcttcgatatat

SEQ ID NO: 318376 - DNA, 19 bp, Homo sapiens
  siRNA target sequence for SGCE (NM_003919.1,444-462).
ccaacaatcattgagataa

SEQ ID NO: 318377 - DNA, 19 bp, Homo sapiens
  siRNA target sequence for SGCE (NM_003919.1,486-504).
gagactgcaaggcataatt

SEQ ID NO: 318378 - DNA, 19 bp, Homo sapiens
  siRNA target sequence for SGCE (NM_003919.1,493-511).
caaggcataatttgataat

SEQ ID NO: 318379 - DNA, 19 bp, Homo sapiens
  siRNA target sequence for SGCE (NM_003919.1,563-581).
cattaagaatatgaatgta

SEQ ID NO: 318380 - DNA, 19 bp, Homo sapiens
  siRNA target sequence for SGCE (NM_003919.1,614-632).
ctttcttggcgcagtgaaa

SEQ ID NO: 318381 - DNA, 19 bp, Homo sapiens
  siRNA target sequence for SGCE (NM_003919.1,621-639).
ggcgcagtgaaaaatgtgt

SEQ ID NO: 318382 - DNA, 19 bp, Homo sapiens
  siRNA target sequence for SGCE (NM_003919.1,697-715).
gggtgccacttcccattaa

SEQ ID NO: 318383 - DNA, 19 bp, Homo sapiens
  siRNA target sequence for SGCE (NM_003919.1,719-737).
cctgaaggagggcgtttat

SEQ ID NO: 318384 - DNA, 19 bp, Homo sapiens
  siRNA target sequence for SGCE (NM_003919.1,769-787).
cttgtttacgagaagttga

SEQ ID NO: 318385 - DNA, 19 bp, Homo sapiens
  siRNA target sequence for SGCE (NM_003919.1,772-790).
gtttacgagaagttgaaaa

SEQ ID NO: 318386 - DNA, 19 bp, Homo sapiens
  siRNA target sequence for SGCE (NM_003919.1,827-845).
gcctgtaataacatgtgat

SEQ ID NO: 318387 - DNA, 19 bp, Homo sapiens
  siRNA target sequence for SGCE (NM_003919.1,971-989).
caaacccccttctgattct

SEQ ID NO: 318388 - DNA, 19 bp, Homo sapiens
  siRNA target sequence for SGCE (NM_003919.1,1004-1022).
ctattacacggatttccta

SEQ ID NO: 318389 - DNA, 19 bp, Homo sapiens
  siRNA target sequence for SGCE (NM_003919.1,1010-1028).
cacggatttcctaattaca

SEQ ID NO: 318390 - DNA, 19 bp, Homo sapiens
  siRNA target sequence for SGCE (NM_003919.1,1012-1030).
cggatttcctaattacact

SEQ ID NO: 318391 - DNA, 19 bp, Homo sapiens
  siRNA target sequence for SGCE (NM_003919.1,1049-1067).
ggcactggtcctttttcta

SEQ ID NO: 318392 - DNA, 19 bp, Homo sapiens
  siRNA target sequence for SGCE (NM_003919.1,1101-1119).
ggcgtggaaaagagaaaca

SEQ ID NO: 318393 - DNA, 19 bp, Homo sapiens
  siRNA target sequence for SGCE (NM_003919.1,1291-1309).
gcacaaacatgccattgat

SEQ ID NO: 318394 - DNA, 19 bp, Homo sapiens
  siRNA target sequence for SGCE (NM_003919.1,1356-1374).
cagactacaggtaaatggt

SEQ ID NO: 318395 - DNA, 19 bp, Homo sapiens
  siRNA target sequence for HNT (NM_016522.2,823-841).
caccctcaggtgcactatt

SEQ ID NO: 318396 - DNA, 19 bp, Homo sapiens
  siRNA target sequence for HNT (NM_016522.2,827-845).
ctcaggtgcactattgaca

SEQ ID NO: 318397 - DNA, 19 bp, Homo sapiens
  siRNA target sequence for HNT (NM_016522.2,1051-1069).
cctcattgtgcaagtatct

SEQ ID NO: 318398 - DNA, 19 bp, Homo sapiens
  siRNA target sequence for HNT (NM_016522.2,1060-1078).
gcaagtatctcccaaaatt

SEQ ID NO: 318399 - DNA, 19 bp, Homo sapiens
  siRNA target sequence for HNT (NM_016522.2,1068-1086).
ctcccaaaattgtagagat

SEQ ID NO: 318400 - DNA, 19 bp, Homo sapiens
  siRNA target sequence for HNT (NM_016522.2,1082-1100).
gagatttcttcagatatct

SEQ ID NO: 318401 - DNA, 19 bp, Homo sapiens
  siRNA target sequence for HNT (NM_016522.2,1151-1169).
ccagagcctacggttactt

SEQ ID NO: 318402 - DNA, 19 bp, Homo sapiens
  siRNA target sequence for HNT (NM_016522.2,1208-1226).
gaagacgaatacttggaaa

SEQ ID NO: 318403 - DNA, 19 bp, Homo sapiens
  siRNA target sequence for HNT (NM_016522.2,1292-1310).
cccgtggtacggagagtaa

SEQ ID NO: 318404 - DNA, 19 bp, Homo sapiens
  siRNA target sequence for HNT (NM_016522.2,1293-1311).
ccgtggtacggagagtaaa

SEQ ID NO: 318405 - DNA, 19 bp, Homo sapiens
  siRNA target sequence for HNT (NM_016522.2,1324-1342).
ctatccaccatacatttca

SEQ ID NO: 318406 - DNA, 19 bp, Homo sapiens
  siRNA target sequence for HNT (NM_016522.2,1359-1377).
gtgtccccgtgggacaaaa

SEQ ID NO: 318407 - DNA, 19 bp, Homo sapiens
  siRNA target sequence for HNT (NM_016522.2,1485-1503).
gacctttcctctcaaaact

SEQ ID NO: 318408 - DNA, 19 bp, Homo sapiens
  siRNA target sequence for HNT (NM_016522.2,1510-1528).
cttcaatgtctctgaacat

SEQ ID NO: 318409 - DNA, 19 bp, Homo sapiens
  siRNA target sequence for HNT (NM_016522.2,1675-1693).
cttgcacctgcttctcaaa

SEQ ID NO: 318410 - DNA, 19 bp, Homo sapiens
  siRNA target sequence for HNT (NM_016522.2,1678-1696).
gcacctgcttctcaaattt

SEQ ID NO: 318411 - DNA, 19 bp, Homo sapiens
  siRNA target sequence for CASPR3 (NM_033655.1,770-788).
gcagtatcgccgagaagaa

SEQ ID NO: 318412 - DNA, 19 bp, Homo sapiens
  siRNA target sequence for CASPR3 (NM_033655.1,1857-1875).
gattcaggtgacacctatt

SEQ ID NO: 318413 - DNA, 19 bp, Homo sapiens
  siRNA target sequence for ADRM1 (NM_007002.2,209-227).
gaaagggctggtgtacatt

SEQ ID NO: 318414 - DNA, 19 bp, Homo sapiens
  siRNA target sequence for ADRM1 (NM_007002.2,233-251).
gacggacgactcgcttatt

SEQ ID NO: 318415 - DNA, 19 bp, Homo sapiens
  siRNA target sequence for ADRM1 (NM_007002.2,235-253).
cggacgactcgcttattca

SEQ ID NO: 318416 - DNA, 19 bp, Homo sapiens
  siRNA target sequence for ADRM1 (NM_007002.2,237-255).
gacgactcgcttattcact

SEQ ID NO: 318417 - DNA, 19 bp, Homo sapiens
  siRNA target sequence for ADRM1 (NM_007002.2,285-303).
gtggaagacgacttgatca

SEQ ID NO: 318418 - DNA, 19 bp, Homo sapiens
  siRNA target sequence for ADRM1 (NM_007002.2,288-306).
gaagacgacttgatcatct

SEQ ID NO: 318419 - DNA, 19 bp, Homo sapiens
  siRNA target sequence for ADRM1 (NM_007002.2,355-373).
gggtctacgtgctgaagtt

SEQ ID NO: 318420 - DNA, 19 bp, Homo sapiens
  siRNA target sequence for ADRM1 (NM_007002.2,381-399).
gggtccaagcggcttttct

SEQ ID NO: 318421 - DNA, 19 bp, Homo sapiens
  siRNA target sequence for ADRM1 (NM_007002.2,382-400).
ggtccaagcggcttttctt

SEQ ID NO: 318422 - DNA, 19 bp, Homo sapiens
  siRNA target sequence for ADRM1 (NM_007002.2,951-969).
gtgctgacgccggagataa

SEQ ID NO: 318423 - DNA, 19 bp, Homo sapiens
  siRNA target sequence for ADRM1 (NM_007002.2,1042-1060).
cgcagaccgcggatgagat

SEQ ID NO: 318424 - DNA, 19 bp, Homo sapiens
  siRNA target sequence for C1orf38 (NM_004848.1,331-349).
gcaggaccattgtcaagat

SEQ ID NO: 318425 - DNA, 19 bp, Homo sapiens
  siRNA target sequence for C1orf38 (NM_004848.1,394-412).
cccggcacgtccactttat

SEQ ID NO: 318426 - DNA, 19 bp, Homo sapiens
  siRNA target sequence for C1orf38 (NM_004848.1,396-414).
cggcacgtccactttatca

SEQ ID NO: 318427 - DNA, 19 bp, Homo sapiens
  siRNA target sequence for C1orf38 (NM_004848.1,397-415).
ggcacgtccactttatcaa

SEQ ID NO: 318428 - DNA, 19 bp, Homo sapiens
  siRNA target sequence for C1orf38 (NM_004848.1,398-416).
gcacgtccactttatcaaa

SEQ ID NO: 318429 - DNA, 19 bp, Homo sapiens
  siRNA target sequence for C1orf38 (NM_004848.1,518-536).
ggtgggctccttgcaaaaa

SEQ ID NO: 318430 - DNA, 19 bp, Homo sapiens
  siRNA target sequence for CASPR4 (NM_033401.2,160-178).
ggttgttttgtctattgat

SEQ ID NO: 318431 - DNA, 19 bp, Homo sapiens
  siRNA target sequence for CASPR4 (NM_033401.2,304-322).
cagtcatggtcctggattt

SEQ ID NO: 318432 - DNA, 19 bp, Homo sapiens
  siRNA target sequence for CASPR4 (NM_033401.2,308-326).
catggtcctggatttgcaa

SEQ ID NO: 318433 - DNA, 19 bp, Homo sapiens
  siRNA target sequence for CASPR4 (NM_033401.2,357-375).
ggtctccacttgtgtctaa

SEQ ID NO: 318434 - DNA, 19 bp, Homo sapiens
  siRNA target sequence for CASPR4 (NM_033401.2,360-378).
ctccacttgtgtctaacaa

SEQ ID NO: 318435 - DNA, 19 bp, Homo sapiens
  siRNA target sequence for CASPR4 (NM_033401.2,433-451).
cactcaagggggatatggt

SEQ ID NO: 318436 - DNA, 19 bp, Homo sapiens
  siRNA target sequence for CASPR4 (NM_033401.2,563-581).
gacagtgttgtgtactata

SEQ ID NO: 318437 - DNA, 19 bp, Homo sapiens
  siRNA target sequence for CASPR4 (NM_033401.2,565-583).
cagtgttgtgtactataga

SEQ ID NO: 318438 - DNA, 19 bp, Homo sapiens
  siRNA target sequence for CASPR4 (NM_033401.2,613-631).
gcgcttcatccctttggaa

SEQ ID NO: 318439 - DNA, 19 bp, Homo sapiens
  siRNA target sequence for CASPR4 (NM_033401.2,614-632).
cgcttcatccctttggaat

SEQ ID NO: 318440 - DNA, 19 bp, Homo sapiens
  siRNA target sequence for CASPR4 (NM_033401.2,639-657).
ccaagggcagaattggaat

SEQ ID NO: 318441 - DNA, 19 bp, Homo sapiens
  siRNA target sequence for CASPR4 (NM_033401.2,654-672).
gaatgcgaatcgaagtgtt

SEQ ID NO: 318442 - DNA, 19 bp, Homo sapiens
  siRNA target sequence for CASPR4 (NM_033401.2,670-688).
gttcggatgtgcatacaga

SEQ ID NO: 318443 - DNA, 19 bp, Homo sapiens
  siRNA target sequence for CASPR4 (NM_033401.2,720-738).
cccttctctacagatttga

SEQ ID NO: 318444 - DNA, 19 bp, Homo sapiens
  siRNA target sequence for CASPR4 (NM_033401.2,721-739).
ccttctctacagatttgat

SEQ ID NO: 318445 - DNA, 19 bp, Homo sapiens
  siRNA target sequence for CASPR4 (NM_033401.2,725-743).
ctctacagatttgatcaaa

SEQ ID NO: 318446 - DNA, 19 bp, Homo sapiens
  siRNA target sequence for CASPR4 (NM_033401.2,751-769).
gagcccaataaaagacatt

SEQ ID NO: 318447 - DNA, 19 bp, Homo sapiens
  siRNA target sequence for CASPR4 (NM_033401.2,793-811).
gcagagtgatgggattcta

SEQ ID NO: 318448 - DNA, 19 bp, Homo sapiens
  siRNA target sequence for CASPR4 (NM_033401.2,839-857).
cacatcacactgcaattaa

SEQ ID NO: 318449 - DNA, 19 bp, Homo sapiens
  siRNA target sequence for CASPR4 (NM_033401.2,844-862).
cacactgcaattaagaaga

SEQ ID NO: 318450 - DNA, 19 bp, Homo sapiens
  siRNA target sequence for CASPR4 (NM_033401.2,861-879).
gagcaagactctttttact

SEQ ID NO: 318451 - DNA, 19 bp, Homo sapiens
  siRNA target sequence for CASPR4 (NM_033401.2,912-930).
cttccaccctggtcaatct

SEQ ID NO: 318452 - DNA, 19 bp, Homo sapiens
  siRNA target sequence for CASPR4 (NM_033401.2,979-997).
ccagcgtttgggcaaacaa

SEQ ID NO: 318453 - DNA, 19 bp, Homo sapiens
  siRNA target sequence for CASPR4 (NM_033401.2,1013-1031).
gacgaacacaggcatcatt

SEQ ID NO: 318454 - DNA, 19 bp, Homo sapiens
  siRNA target sequence for CASPR4 (NM_033401.2,1034-1052).
catgcacggggagaattca

SEQ ID NO: 318455 - DNA, 19 bp, Homo sapiens
  siRNA target sequence for CASPR4 (NM_033401.2,1038-1056).
cacggggagaattcaatct

SEQ ID NO: 318456 - DNA, 19 bp, Homo sapiens
  siRNA target sequence for CASPR4 (NM_033401.2,1041-1059).
ggggagaattcaatctcat

SEQ ID NO: 318457 - DNA, 19 bp, Homo sapiens
  siRNA target sequence for CASPR4 (NM_033401.2,1186-1204).
ggccaagcagcaaaaacca

SEQ ID NO: 318458 - DNA, 19 bp, Homo sapiens
  siRNA target sequence for CASPR4 (NM_033401.2,1195-1213).
gcaaaaaccacagatcatt

SEQ ID NO: 318459 - DNA, 19 bp, Homo sapiens
  siRNA target sequence for CASPR4 (NM_033401.2,1318-1336).
ggaggtttctgccactttt

SEQ ID NO: 318460 - DNA, 19 bp, Homo sapiens
  siRNA target sequence for CASPR4 (NM_033401.2,1398-1416).
ggggtatcctcctctttct

SEQ ID NO: 318461 - DNA, 19 bp, Homo sapiens
  siRNA target sequence for CASPR4 (NM_033401.2,1400-1418).
ggtatcctcctctttctga

SEQ ID NO: 318462 - DNA, 19 bp, Homo sapiens
  siRNA target sequence for CASPR4 (NM_033401.2,1474-1492).
cacagcaggtgtcgaatta

SEQ ID NO: 318463 - DNA, 19 bp, Homo sapiens
  siRNA target sequence for CASPR4 (NM_033401.2,1476-1494).
cagcaggtgtcgaattaaa

SEQ ID NO: 318464 - DNA, 19 bp, Homo sapiens
  siRNA target sequence for CASPR4 (NM_033401.2,1479-1497).
caggtgtcgaattaaatga

SEQ ID NO: 318465 - DNA, 19 bp, Homo sapiens
  siRNA target sequence for CASPR4 (NM_033401.2,1588-1606).
ggggcctgagcagatttat

SEQ ID NO: 318466 - DNA, 19 bp, Homo sapiens
  siRNA target sequence for CASPR4 (NM_033401.2,1589-1607).
gggcctgagcagatttatt

SEQ ID NO: 318467 - DNA, 19 bp, Homo sapiens
  siRNA target sequence for CASPR4 (NM_033401.2,1631-1649).
ggttgtcctgacaaaagct

SEQ ID NO: 318468 - DNA, 19 bp, Homo sapiens
  siRNA target sequence for CASPR4 (NM_033401.2,1632-1650).
gttgtcctgacaaaagctt

SEQ ID NO: 318469 - DNA, 19 bp, Homo sapiens
  siRNA target sequence for CASPR4 (NM_033401.2,1637-1655).
cctgacaaaagctttggat

SEQ ID NO: 318470 - DNA, 19 bp, Homo sapiens
  siRNA target sequence for CASPR4 (NM_033401.2,1668-1686).
gtccacttggtggatttca

SEQ ID NO: 318471 - DNA, 19 bp, Homo sapiens
  siRNA target sequence for CASPR4 (NM_033401.2,1713-1731).
gcggcaaagtggtagatct

SEQ ID NO: 318472 - DNA, 19 bp, Homo sapiens
  siRNA target sequence for CASPR4 (NM_033401.2,1716-1734).
gcaaagtggtagatctgat

SEQ ID NO: 318473 - DNA, 19 bp, Homo sapiens
  siRNA target sequence for CASPR4 (NM_033401.2,1723-1741).
ggtagatctgatttcagtt

SEQ ID NO: 318474 - DNA, 19 bp, Homo sapiens
  siRNA target sequence for CASPR4 (NM_033401.2,1849-1867).
ctggagcacctttcattgt

SEQ ID NO: 318475 - DNA, 19 bp, Homo sapiens
  siRNA target sequence for CASPR4 (NM_033401.2,1892-1910).
ggagctacttgccataact

SEQ ID NO: 318476 - DNA, 19 bp, Homo sapiens
  siRNA target sequence for CASPR4 (NM_033401.2,1895-1913).
gctacttgccataactcta

SEQ ID NO: 318477 - DNA, 19 bp, Homo sapiens
  siRNA target sequence for CASPR4 (NM_033401.2,1896-1914).
ctacttgccataactctat

SEQ ID NO: 318478 - DNA, 19 bp, Homo sapiens
  siRNA target sequence for CASPR4 (NM_033401.2,1961-1979).
gggttttactatatagatt

SEQ ID NO: 318479 - DNA, 19 bp, Homo sapiens
  siRNA target sequence for CASPR4 (NM_033401.2,2009-2027).
cttctatattgcaatatga

SEQ ID NO: 318480 - DNA, 19 bp, Homo sapiens
  siRNA target sequence for CASPR4 (NM_033401.2,2053-2071).
gcacaacggctctgactta

SEQ ID NO: 318481 - DNA, 19 bp, Homo sapiens
  siRNA target sequence for CASPR4 (NM_033401.2,2054-2072).
cacaacggctctgacttaa

SEQ ID NO: 318482 - DNA, 19 bp, Homo sapiens
  siRNA target sequence for CASPR4 (NM_033401.2,2056-2074).
caacggctctgacttaaca

SEQ ID NO: 318483 - DNA, 19 bp, Homo sapiens
  siRNA target sequence for CASPR4 (NM_033401.2,2059-2077).
cggctctgacttaacaaga

SEQ ID NO: 318484 - DNA, 19 bp, Homo sapiens
  siRNA target sequence for CASPR4 (NM_033401.2,2103-2121).
catatgctgggtttttcga

SEQ ID NO: 318485 - DNA, 19 bp, Homo sapiens
  siRNA target sequence for CASPR4 (NM_033401.2,2140-2158).
gcaacttcaggccactatt

SEQ ID NO: 318486 - DNA, 19 bp, Homo sapiens
  siRNA target sequence for CASPR4 (NM_033401.2,2141-2159).
caacttcaggccactatta

SEQ ID NO: 318487 - DNA, 19 bp, Homo sapiens
  siRNA target sequence for CASPR4 (NM_033401.2,2173-2191).
ctgtgaacaggagtttact

SEQ ID NO: 318488 - DNA, 19 bp, Homo sapiens
  siRNA target sequence for CASPR4 (NM_033401.2,2175-2193).
gtgaacaggagtttactta

SEQ ID NO: 318489 - DNA, 19 bp, Homo sapiens
  siRNA target sequence for CASPR4 (NM_033401.2,2177-2195).
gaacaggagtttacttatt

SEQ ID NO: 318490 - DNA, 19 bp, Homo sapiens
  siRNA target sequence for CASPR4 (NM_033401.2,2180-2198).
caggagtttacttattact

SEQ ID NO: 318491 - DNA, 19 bp, Homo sapiens
  siRNA target sequence for CASPR4 (NM_033401.2,2262-2280).
ccaatgaaacgcaaaccta

SEQ ID NO: 318492 - DNA, 19 bp, Homo sapiens
  siRNA target sequence for CASPR4 (NM_033401.2,2289-2307).
gttcttcgcctgatcttca

SEQ ID NO: 318493 - DNA, 19 bp, Homo sapiens
  siRNA target sequence for CASPR4 (NM_033401.2,2397-2415).
ctggattgcttgcttataa

SEQ ID NO: 318494 - DNA, 19 bp, Homo sapiens
  siRNA target sequence for CASPR4 (NM_033401.2,2429-2447).
gtaactaagatcgtgatta

SEQ ID NO: 318495 - DNA, 19 bp, Homo sapiens
  siRNA target sequence for CASPR4 (NM_033401.2,2433-2451).
ctaagatcgtgattacaga

SEQ ID NO: 318496 - DNA, 19 bp, Homo sapiens
  siRNA target sequence for CASPR4 (NM_033401.2,2508-2526).
gagacagatcattttggaa

SEQ ID NO: 318497 - DNA, 19 bp, Homo sapiens
  siRNA target sequence for CASPR4 (NM_033401.2,2544-2562).
ccgaggcttcatatcttca

SEQ ID NO: 318498 - DNA, 19 bp, Homo sapiens
  siRNA target sequence for CASPR4 (NM_033401.2,2582-2600).
gaacttagcgcggatgtat

SEQ ID NO: 318499 - DNA, 19 bp, Homo sapiens
  siRNA target sequence for CASPR4 (NM_033401.2,2585-2603).
cttagcgcggatgtatctt

SEQ ID NO: 318500 - DNA, 19 bp, Homo sapiens
  siRNA target sequence for CASPR4 (NM_033401.2,2589-2607).
gcgcggatgtatctttctt

SEQ ID NO: 318501 - DNA, 19 bp, Homo sapiens
  siRNA target sequence for CASPR4 (NM_033401.2,2590-2608).
cgcggatgtatctttcttt

SEQ ID NO: 318502 - DNA, 19 bp, Homo sapiens
  siRNA target sequence for CASPR4 (NM_033401.2,2621-2639).
gcttcatctggggtatttt

SEQ ID NO: 318503 - DNA, 19 bp, Homo sapiens
  siRNA target sequence for CASPR4 (NM_033401.2,2631-2649).
gggtatttttagagaactt

SEQ ID NO: 318504 - DNA, 19 bp, Homo sapiens
  siRNA target sequence for CASPR4 (NM_033401.2,2647-2665).
cttggggattgctgatttt

SEQ ID NO: 318505 - DNA, 19 bp, Homo sapiens
  siRNA target sequence for CASPR4 (NM_033401.2,2685-2703).
ctccgacagtagtgacttt

SEQ ID NO: 318506 - DNA, 19 bp, Homo sapiens
  siRNA target sequence for CASPR4 (NM_033401.2,2687-2705).
ccgacagtagtgacttttt

SEQ ID NO: 318507 - DNA, 19 bp, Homo sapiens
  siRNA target sequence for CASPR4 (NM_033401.2,2691-2709).
cagtagtgactttttcatt

SEQ ID NO: 318508 - DNA, 19 bp, Homo sapiens
  siRNA target sequence for CASPR4 (NM_033401.2,2965-2983).
gatgaccctggatttggaa

SEQ ID NO: 318509 - DNA, 19 bp, Homo sapiens
  siRNA target sequence for CASPR4 (NM_033401.2,3165-3183).
ctggctcatccgtgatata

SEQ ID NO: 318510 - DNA, 19 bp, Homo sapiens
  siRNA target sequence for CASPR4 (NM_033401.2,3167-3185).
ggctcatccgtgatataca

SEQ ID NO: 318511 - DNA, 19 bp, Homo sapiens
  siRNA target sequence for CASPR4 (NM_033401.2,3168-3186).
gctcatccgtgatatacaa

SEQ ID NO: 318512 - DNA, 19 bp, Homo sapiens
  siRNA target sequence for CASPR4 (NM_033401.2,3169-3187).
ctcatccgtgatatacaat

SEQ ID NO: 318513 - DNA, 19 bp, Homo sapiens
  siRNA target sequence for CASPR4 (NM_033401.2,3226-3244).
ccacgctgcttcatttcat

SEQ ID NO: 318514 - DNA, 19 bp, Homo sapiens
  siRNA target sequence for CASPR4 (NM_033401.2,3377-3395).
cagatcaggtacaagttaa

SEQ ID NO: 318515 - DNA, 19 bp, Homo sapiens
  siRNA target sequence for CASPR4 (NM_033401.2,3382-3400).
caggtacaagttaaataaa

SEQ ID NO: 318516 - DNA, 19 bp, Homo sapiens
  siRNA target sequence for CASPR4 (NM_033401.2,3384-3402).
ggtacaagttaaataaata

SEQ ID NO: 318517 - DNA, 19 bp, Homo sapiens
  siRNA target sequence for CASPR4 (NM_033401.2,3413-3431).
gatgttgttaactttgatt

SEQ ID NO: 318518 - DNA, 19 bp, Homo sapiens
  siRNA target sequence for CASPR4 (NM_033401.2,3449-3467).
ggacaacttcaccacataa

SEQ ID NO: 318519 - DNA, 19 bp, Homo sapiens
  siRNA target sequence for CASPR4 (NM_033401.2,3450-3468).
gacaacttcaccacataat

SEQ ID NO: 318520 - DNA, 19 bp, Homo sapiens
  siRNA target sequence for CASPR4 (NM_033401.2,3452-3470).
caacttcaccacataatga

SEQ ID NO: 318521 - DNA, 19 bp, Homo sapiens
  siRNA target sequence for CASPR4 (NM_033401.2,3455-3473).
cttcaccacataatgatta

SEQ ID NO: 318522 - DNA, 19 bp, Homo sapiens
  siRNA target sequence for CASPR4 (NM_033401.2,3458-3476).
caccacataatgattaaca

SEQ ID NO: 318523 - DNA, 19 bp, Homo sapiens
  siRNA target sequence for CASPR4 (NM_033401.2,3485-3503).
ggagtggtctttatagaga

SEQ ID NO: 318524 - DNA, 19 bp, Homo sapiens
  siRNA target sequence for CASPR4 (NM_033401.2,3486-3504).
gagtggtctttatagagat

SEQ ID NO: 318525 - DNA, 19 bp, Homo sapiens
  siRNA target sequence for CASPR4 (NM_033401.2,3533-3551).
ctgtcatcaggcacagaat

SEQ ID NO: 318526 - DNA, 19 bp, Homo sapiens
  siRNA target sequence for CASPR4 (NM_033401.2,3569-3587).
ctggtattgggcaggattt

SEQ ID NO: 318527 - DNA, 19 bp, Homo sapiens
  siRNA target sequence for CASPR4 (NM_033401.2,3571-3589).
ggtattgggcaggatttta

SEQ ID NO: 318528 - DNA, 19 bp, Homo sapiens
  siRNA target sequence for CASPR4 (NM_033401.2,3797-3815).
cactcgtttgcagatcatt

SEQ ID NO: 318529 - DNA, 19 bp, Homo sapiens
  siRNA target sequence for CASPR4 (NM_033401.2,3836-3854).
gagccccttgctaatgcaa

SEQ ID NO: 318530 - DNA, 19 bp, Homo sapiens
  siRNA target sequence for CASPR4 (NM_033401.2,3841-3859).
ccttgctaatgcaatcaaa

SEQ ID NO: 318531 - DNA, 19 bp, Homo sapiens
  siRNA target sequence for CASPR4 (NM_033401.2,3846-3864).
ctaatgcaatcaaaagtga

SEQ ID NO: 318532 - DNA, 19 bp, Homo sapiens
  siRNA target sequence for CASPR4 (NM_033401.2,3882-3900).
gtctgatagctgttgtgat

SEQ ID NO: 318533 - DNA, 19 bp, Homo sapiens
  siRNA target sequence for CASPR4 (NM_033401.2,3924-3942).
ccatagctgttcgcattta

SEQ ID NO: 318534 - DNA, 19 bp, Homo sapiens
  siRNA target sequence for CASPR4 (NM_033401.2,3925-3943).
catagctgttcgcatttat

SEQ ID NO: 318535 - DNA, 19 bp, Homo sapiens
  siRNA target sequence for CASPR4 (NM_033401.2,3935-3953).
cgcatttatcagcagaaaa

SEQ ID NO: 318536 - DNA, 19 bp, Homo sapiens
  siRNA target sequence for CASPR4 (NM_033401.2,4013-4031).
ctgaaaagtgagcttaata

SEQ ID NO: 318537 - DNA, 19 bp, Homo sapiens
  siRNA target sequence for CASPR4 (NM_033401.2,4015-4033).
gaaaagtgagcttaatata

SEQ ID NO: 318538 - DNA, 19 bp, Homo sapiens
  siRNA target sequence for caspr5 (NM_130773.2,380-398).
cggctgaccagcgttttga

SEQ ID NO: 318539 - DNA, 19 bp, Homo sapiens
  siRNA target sequence for caspr5 (NM_130773.2,413-431).
ggcttgtggcatttaggat

SEQ ID NO: 318540 - DNA, 19 bp, Homo sapiens
  siRNA target sequence for caspr5 (NM_130773.2,414-432).
gcttgtggcatttaggatt

SEQ ID NO: 318541 - DNA, 19 bp, Homo sapiens
  siRNA target sequence for caspr5 (NM_130773.2,428-446).
ggattaacagcgacaaact

SEQ ID NO: 318542 - DNA, 19 bp, Homo sapiens
  siRNA target sequence for caspr5 (NM_130773.2,429-447).
gattaacagcgacaaacta

SEQ ID NO: 318543 - DNA, 19 bp, Homo sapiens
  siRNA target sequence for caspr5 (NM_130773.2,665-683).
gactgggtgacgagttaca

SEQ ID NO: 318544 - DNA, 19 bp, Homo sapiens
  siRNA target sequence for caspr5 (NM_130773.2,675-693).
cgagttacagcctgatgtt

SEQ ID NO: 318545 - DNA, 19 bp, Homo sapiens
  siRNA target sequence for caspr5 (NM_130773.2,704-722).
ggacgcaactggaaacagt

SEQ ID NO: 318546 - DNA, 19 bp, Homo sapiens
  siRNA target sequence for caspr5 (NM_130773.2,705-723).
gacgcaactggaaacagta

SEQ ID NO: 318547 - DNA, 19 bp, Homo sapiens
  siRNA target sequence for caspr5 (NM_130773.2,776-794).
gtggtgcaccacaagctat

SEQ ID NO: 318548 - DNA, 19 bp, Homo sapiens
  siRNA target sequence for caspr5 (NM_130773.2,801-819).
cagtgagagcccgatttgt

SEQ ID NO: 318549 - DNA, 19 bp, Homo sapiens
  siRNA target sequence for caspr5 (NM_130773.2,874-892).
ggtctacggatgttcctat

SEQ ID NO: 318550 - DNA, 19 bp, Homo sapiens
  siRNA target sequence for caspr5 (NM_130773.2,877-895).
ctacggatgttcctataaa

SEQ ID NO: 318551 - DNA, 19 bp, Homo sapiens
  siRNA target sequence for caspr5 (NM_130773.2,880-898).
cggatgttcctataaatca

SEQ ID NO: 318552 - DNA, 19 bp, Homo sapiens
  siRNA target sequence for caspr5 (NM_130773.2,897-915).
cagatgttgctgactttga

SEQ ID NO: 318553 - DNA, 19 bp, Homo sapiens
  siRNA target sequence for caspr5 (NM_130773.2,918-936).
gccgaagctcacttctgta

SEQ ID NO: 318554 - DNA, 19 bp, Homo sapiens
  siRNA target sequence for caspr5 (NM_130773.2,939-957).
ggttcaatcagaagttgat

SEQ ID NO: 318555 - DNA, 19 bp, Homo sapiens
  siRNA target sequence for caspr5 (NM_130773.2,952-970).
gttgatgagtactctcaaa

SEQ ID NO: 318556 - DNA, 19 bp, Homo sapiens
  siRNA target sequence for caspr5 (NM_130773.2,955-973).
gatgagtactctcaaagat

SEQ ID NO: 318557 - DNA, 19 bp, Homo sapiens
  siRNA target sequence for caspr5 (NM_130773.2,960-978).
gtactctcaaagatgtgat

SEQ ID NO: 318558 - DNA, 19 bp, Homo sapiens
  siRNA target sequence for caspr5 (NM_130773.2,1076-1094).
ctcgccctacacctcaatt

SEQ ID NO: 318559 - DNA, 19 bp, Homo sapiens
  siRNA target sequence for caspr5 (NM_130773.2,1170-1188).
ggcactcggtcctcattga

SEQ ID NO: 318560 - DNA, 19 bp, Homo sapiens
  siRNA target sequence for caspr5 (NM_130773.2,1253-1271).
gagacggatgccttagaca

SEQ ID NO: 318561 - DNA, 19 bp, Homo sapiens
  siRNA target sequence for caspr5 (NM_130773.2,1255-1273).
gacggatgccttagacatt

SEQ ID NO: 318562 - DNA, 19 bp, Homo sapiens
  siRNA target sequence for caspr5 (NM_130773.2,1263-1281).
ccttagacattgactatga

SEQ ID NO: 318563 - DNA, 19 bp, Homo sapiens
  siRNA target sequence for caspr5 (NM_130773.2,1276-1294).
ctatgagcttagttttgga

SEQ ID NO: 318564 - DNA, 19 bp, Homo sapiens
  siRNA target sequence for caspr5 (NM_130773.2,1316-1334).
cctgggacctttttaaaga

SEQ ID NO: 318565 - DNA, 19 bp, Homo sapiens
  siRNA target sequence for caspr5 (NM_130773.2,1346-1364).
ggatgcatcgaaaaccttt

SEQ ID NO: 318566 - DNA, 19 bp, Homo sapiens
  siRNA target sequence for caspr5 (NM_130773.2,1347-1365).
gatgcatcgaaaaccttta

SEQ ID NO: 318567 - DNA, 19 bp, Homo sapiens
  siRNA target sequence for caspr5 (NM_130773.2,1354-1372).
cgaaaacctttactacaat

SEQ ID NO: 318568 - DNA, 19 bp, Homo sapiens
  siRNA target sequence for caspr5 (NM_130773.2,1369-1387).
caatggagtaaacataatt

SEQ ID NO: 318569 - DNA, 19 bp, Homo sapiens
  siRNA target sequence for caspr5 (NM_130773.2,1393-1411).
ggctaagagacgaaagcat

SEQ ID NO: 318570 - DNA, 19 bp, Homo sapiens
  siRNA target sequence for caspr5 (NM_130773.2,1401-1419).
gacgaaagcatcagatcta

SEQ ID NO: 318571 - DNA, 19 bp, Homo sapiens
  siRNA target sequence for caspr5 (NM_130773.2,1403-1421).
cgaaagcatcagatctata

SEQ ID NO: 318572 - DNA, 19 bp, Homo sapiens
  siRNA target sequence for caspr5 (NM_130773.2,1441-1459).
ctgctccgaaccacagatt

SEQ ID NO: 318573 - DNA, 19 bp, Homo sapiens
  siRNA target sequence for caspr5 (NM_130773.2,1443-1461).
gctccgaaccacagattgt

SEQ ID NO: 318574 - DNA, 19 bp, Homo sapiens
  siRNA target sequence for caspr5 (NM_130773.2,1482-1500).
ccagcggcagctatttgct

SEQ ID NO: 318575 - DNA, 19 bp, Homo sapiens
  siRNA target sequence for caspr5 (NM_130773.2,1535-1553).
gtgagtttccagtttcgaa

SEQ ID NO: 318576 - DNA, 19 bp, Homo sapiens
  siRNA target sequence for caspr5 (NM_130773.2,1637-1655).
ctgagactcgtgattcaga

SEQ ID NO: 318577 - DNA, 19 bp, Homo sapiens
  siRNA target sequence for caspr5 (NM_130773.2,1662-1680).
cagaacgcgtagctgaaat

SEQ ID NO: 318578 - DNA, 19 bp, Homo sapiens
  siRNA target sequence for caspr5 (NM_130773.2,1795-1813).
cacttgggtgcagatttat

SEQ ID NO: 318579 - DNA, 19 bp, Homo sapiens
  siRNA target sequence for caspr5 (NM_130773.2,1836-1854).
gagggtgccccgacaatct

SEQ ID NO: 318580 - DNA, 19 bp, Homo sapiens
  siRNA target sequence for caspr5 (NM_130773.2,1838-1856).
gggtgccccgacaatctca

SEQ ID NO: 318581 - DNA, 19 bp, Homo sapiens
  siRNA target sequence for caspr5 (NM_130773.2,1853-1871).
ctcaccgattcccaatgtt

SEQ ID NO: 318582 - DNA, 19 bp, Homo sapiens
  siRNA target sequence for caspr5 (NM_130773.2,1855-1873).
caccgattcccaatgttta

SEQ ID NO: 318583 - DNA, 19 bp, Homo sapiens
  siRNA target sequence for caspr5 (NM_130773.2,1857-1875).
ccgattcccaatgtttaaa

SEQ ID NO: 318584 - DNA, 19 bp, Homo sapiens
  siRNA target sequence for caspr5 (NM_130773.2,1896-1914).
gctgcatgaggctcatctt

SEQ ID NO: 318585 - DNA, 19 bp, Homo sapiens
  siRNA target sequence for caspr5 (NM_130773.2,1897-1915).
ctgcatgaggctcatcttt

SEQ ID NO: 318586 - DNA, 19 bp, Homo sapiens
  siRNA target sequence for caspr5 (NM_130773.2,1900-1918).
catgaggctcatctttatt

SEQ ID NO: 318587 - DNA, 19 bp, Homo sapiens
  siRNA target sequence for caspr5 (NM_130773.2,1927-1945).
gcccaaggacctcatttca

SEQ ID NO: 318588 - DNA, 19 bp, Homo sapiens
  siRNA target sequence for caspr5 (NM_130773.2,1959-1977).
ccctggggaattttagtga

SEQ ID NO: 318589 - DNA, 19 bp, Homo sapiens
  siRNA target sequence for caspr5 (NM_130773.2,1960-1978).
cctggggaattttagtgat

SEQ ID NO: 318590 - DNA, 19 bp, Homo sapiens
  siRNA target sequence for caspr5 (NM_130773.2,1961-1979).
ctggggaattttagtgatt

SEQ ID NO: 318591 - DNA, 19 bp, Homo sapiens
  siRNA target sequence for caspr5 (NM_130773.2,1963-1981).
ggggaattttagtgattta

SEQ ID NO: 318592 - DNA, 19 bp, Homo sapiens
  siRNA target sequence for caspr5 (NM_130773.2,1991-2009).
ctgtgtagcatcaaagaca

SEQ ID NO: 318593 - DNA, 19 bp, Homo sapiens
  siRNA target sequence for caspr5 (NM_130773.2,2017-2035).
gccaaactactgtgaacat

SEQ ID NO: 318594 - DNA, 19 bp, Homo sapiens
  siRNA target sequence for caspr5 (NM_130773.2,2053-2071).
gtcctggactaccttctat

SEQ ID NO: 318595 - DNA, 19 bp, Homo sapiens
  siRNA target sequence for caspr5 (NM_130773.2,2080-2098).
cagtgacacaagttacact

SEQ ID NO: 318596 - DNA, 19 bp, Homo sapiens
  siRNA target sequence for caspr5 (NM_130773.2,2163-2181).
cagccggcttcttctacat

SEQ ID NO: 318597 - DNA, 19 bp, Homo sapiens
  siRNA target sequence for caspr5 (NM_130773.2,2218-2236).
ggtgtactgcaatatcact

SEQ ID NO: 318598 - DNA, 19 bp, Homo sapiens
  siRNA target sequence for caspr5 (NM_130773.2,2434-2452).
gccggatggaacaccattt

SEQ ID NO: 318599 - DNA, 19 bp, Homo sapiens
  siRNA target sequence for caspr5 (NM_130773.2,2435-2453).
ccggatggaacaccattta

SEQ ID NO: 318600 - DNA, 19 bp, Homo sapiens
  siRNA target sequence for caspr5 (NM_130773.2,2632-2650).
cttgcctgtcactcagata

SEQ ID NO: 318601 - DNA, 19 bp, Homo sapiens
  siRNA target sequence for caspr5 (NM_130773.2,2641-2659).
cactcagatagttatcact

SEQ ID NO: 318602 - DNA, 19 bp, Homo sapiens
  siRNA target sequence for caspr5 (NM_130773.2,2645-2663).
cagatagttatcactgata

SEQ ID NO: 318603 - DNA, 19 bp, Homo sapiens
  siRNA target sequence for caspr5 (NM_130773.2,2733-2751).
ggaacgccgtctcatttta

SEQ ID NO: 318604 - DNA, 19 bp, Homo sapiens
  siRNA target sequence for caspr5 (NM_130773.2,2734-2752).
gaacgccgtctcattttat

SEQ ID NO: 318605 - DNA, 19 bp, Homo sapiens
  siRNA target sequence for caspr5 (NM_130773.2,2740-2758).
cgtctcattttatacagaa

SEQ ID NO: 318606 - DNA, 19 bp, Homo sapiens
  siRNA target sequence for caspr5 (NM_130773.2,2782-2800).
cttccatgcggaattcagt

SEQ ID NO: 318607 - DNA, 19 bp, Homo sapiens
  siRNA target sequence for caspr5 (NM_130773.2,2791-2809).
ggaattcagtgccgatatt

SEQ ID NO: 318608 - DNA, 19 bp, Homo sapiens
  siRNA target sequence for caspr5 (NM_130773.2,2792-2810).
gaattcagtgccgatattt

SEQ ID NO: 318609 - DNA, 19 bp, Homo sapiens
  siRNA target sequence for caspr5 (NM_130773.2,2832-2850).
cattatccggagttttcct

SEQ ID NO: 318610 - DNA, 19 bp, Homo sapiens
  siRNA target sequence for caspr5 (NM_130773.2,2838-2856).
ccggagttttcctagaaaa

SEQ ID NO: 318611 - DNA, 19 bp, Homo sapiens
  siRNA target sequence for caspr5 (NM_130773.2,2872-2890).
cttcattcgactcgaaata

SEQ ID NO: 318612 - DNA, 19 bp, Homo sapiens
  siRNA target sequence for caspr5 (NM_130773.2,2934-2952).
gtcctgtggagcttgtagt

SEQ ID NO: 318613 - DNA, 19 bp, Homo sapiens
  siRNA target sequence for caspr5 (NM_130773.2,3064-3082).
gtcggaggagggccatttt

SEQ ID NO: 318614 - DNA, 19 bp, Homo sapiens
  siRNA target sequence for caspr5 (NM_130773.2,3094-3112).
gaacagccagttgtttgta

SEQ ID NO: 318615 - DNA, 19 bp, Homo sapiens
  siRNA target sequence for caspr5 (NM_130773.2,3150-3168).
gcattcgctccttacactt

SEQ ID NO: 318616 - DNA, 19 bp, Homo sapiens
  siRNA target sequence for caspr5 (NM_130773.2,3315-3333).
gcaccaattcaccttatga

SEQ ID NO: 318617 - DNA, 19 bp, Homo sapiens
  siRNA target sequence for caspr5 (NM_130773.2,3316-3334).
caccaattcaccttatgaa

SEQ ID NO: 318618 - DNA, 19 bp, Homo sapiens
  siRNA target sequence for caspr5 (NM_130773.2,3374-3392).
gctggcacgtcggttactt

SEQ ID NO: 318619 - DNA, 19 bp, Homo sapiens
  siRNA target sequence for caspr5 (NM_130773.2,3375-3393).
ctggcacgtcggttactta

SEQ ID NO: 318620 - DNA, 19 bp, Homo sapiens
  siRNA target sequence for caspr5 (NM_130773.2,3377-3395).
ggcacgtcggttacttaca

SEQ ID NO: 318621 - DNA, 19 bp, Homo sapiens
  siRNA target sequence for caspr5 (NM_130773.2,3378-3396).
gcacgtcggttacttacat

SEQ ID NO: 318622 - DNA, 19 bp, Homo sapiens
  siRNA target sequence for caspr5 (NM_130773.2,3381-3399).
cgtcggttacttacatgtt

SEQ ID NO: 318623 - DNA, 19 bp, Homo sapiens
  siRNA target sequence for caspr5 (NM_130773.2,3382-3400).
gtcggttacttacatgttt

SEQ ID NO: 318624 - DNA, 19 bp, Homo sapiens
  siRNA target sequence for caspr5 (NM_130773.2,3384-3402).
cggttacttacatgtttca

SEQ ID NO: 318625 - DNA, 19 bp, Homo sapiens
  siRNA target sequence for caspr5 (NM_130773.2,3385-3403).
ggttacttacatgtttcaa

SEQ ID NO: 318626 - DNA, 19 bp, Homo sapiens
  siRNA target sequence for caspr5 (NM_130773.2,3513-3531).
ccagtcttttgctctttat

SEQ ID NO: 318627 - DNA, 19 bp, Homo sapiens
  siRNA target sequence for caspr5 (NM_130773.2,3516-3534).
gtcttttgctctttatcaa

SEQ ID NO: 318628 - DNA, 19 bp, Homo sapiens
  siRNA target sequence for caspr5 (NM_130773.2,3590-3608).
gttcgctatcacctaaaca

SEQ ID NO: 318629 - DNA, 19 bp, Homo sapiens
  siRNA target sequence for caspr5 (NM_130773.2,3657-3675).
gaaggatgcaccacttgaa

SEQ ID NO: 318630 - DNA, 19 bp, Homo sapiens
  siRNA target sequence for caspr5 (NM_130773.2,3661-3679).
gatgcaccacttgaagatt

SEQ ID NO: 318631 - DNA, 19 bp, Homo sapiens
  siRNA target sequence for caspr5 (NM_130773.2,3688-3706).
gggaagagagcttaccatt

SEQ ID NO: 318632 - DNA, 19 bp, Homo sapiens
  siRNA target sequence for caspr5 (NM_130773.2,3718-3736).
gcaacttcgactcagttat

SEQ ID NO: 318633 - DNA, 19 bp, Homo sapiens
  siRNA target sequence for caspr5 (NM_130773.2,3725-3743).
cgactcagttataacttct

SEQ ID NO: 318634 - DNA, 19 bp, Homo sapiens
  siRNA target sequence for caspr5 (NM_130773.2,3752-3770).
gtagagttcagggttataa

SEQ ID NO: 318635 - DNA, 19 bp, Homo sapiens
  siRNA target sequence for caspr5 (NM_130773.2,3755-3773).
gagttcagggttataaggt

SEQ ID NO: 318636 - DNA, 19 bp, Homo sapiens
  siRNA target sequence for caspr5 (NM_130773.2,3786-3804).
gcaaagtcacagagaatct

SEQ ID NO: 318637 - DNA, 19 bp, Homo sapiens
  siRNA target sequence for caspr5 (NM_130773.2,3797-3815).
gagaatcttggtttggatt

SEQ ID NO: 318638 - DNA, 19 bp, Homo sapiens
  siRNA target sequence for caspr5 (NM_130773.2,3997-4015).
cacggtgcattcttcatca

SEQ ID NO: 318639 - DNA, 19 bp, Homo sapiens
  siRNA target sequence for caspr5 (NM_130773.2,4000-4018).
ggtgcattcttcatcagat

SEQ ID NO: 318640 - DNA, 19 bp, Homo sapiens
  siRNA target sequence for caspr5 (NM_130773.2,4039-4057).
gcgggaaccactcacaaat

SEQ ID NO: 318641 - DNA, 19 bp, Homo sapiens
  siRNA target sequence for caspr5 (NM_130773.2,4213-4231).
ggacagttccttcagaaat

SEQ ID NO: 318642 - DNA, 19 bp, Homo sapiens
  siRNA target sequence for caspr5 (NM_130773.2,4249-4267).
cacagtgagcgagtgtaaa

SEQ ID NO: 318643 - DNA, 19 bp, Homo sapiens
  siRNA target sequence for caspr5 (NM_130773.2,4258-4276).
cgagtgtaaacgggaatat

SEQ ID NO: 318644 - DNA, 19 bp, Homo sapiens
  siRNA target sequence for CD151 (NM_004357.3,135-153).
cgagaagaagacaacatgt

SEQ ID NO: 318645 - DNA, 19 bp, Homo sapiens
  siRNA target sequence for CD151 (NM_004357.3,174-192).
cctgctgtttacctacaat

SEQ ID NO: 318646 - DNA, 19 bp, Homo sapiens
  siRNA target sequence for CD151 (NM_004357.3,250-268).
ctcaagagtgactacatca

SEQ ID NO: 318647 - DNA, 19 bp, Homo sapiens
  siRNA target sequence for CD151 (NM_004357.3,706-724).
gaccatgcctccaacatct

SEQ ID NO: 318648 - DNA, 19 bp, Homo sapiens
  siRNA target sequence for CD34 (NM_001773.1,137-155).
gctggaccgcgctttgctt

SEQ ID NO: 318649 - DNA, 19 bp, Homo sapiens
  siRNA target sequence for CD34 (NM_001773.1,146-164).
cgctttgcttgctgagttt

SEQ ID NO: 318650 - DNA, 19 bp, Homo sapiens
  siRNA target sequence for CD34 (NM_001773.1,176-194).
ggttcatgagtcttgacaa

SEQ ID NO: 318651 - DNA, 19 bp, Homo sapiens
  siRNA target sequence for CD34 (NM_001773.1,306-324).
gcaccctgtgtctcaacat

SEQ ID NO: 318652 - DNA, 19 bp, Homo sapiens
  siRNA target sequence for CD34 (NM_001773.1,325-343).
ggcaatgaggccacaacaa

SEQ ID NO: 318653 - DNA, 19 bp, Homo sapiens
  siRNA target sequence for CD34 (NM_001773.1,331-349).
gaggccacaacaaacatca

SEQ ID NO: 318654 - DNA, 19 bp, Homo sapiens
  siRNA target sequence for CD34 (NM_001773.1,350-368).
cagaaacgacagtcaaatt

SEQ ID NO: 318655 - DNA, 19 bp, Homo sapiens
  siRNA target sequence for CD34 (NM_001773.1,352-370).
gaaacgacagtcaaattca

SEQ ID NO: 318656 - DNA, 19 bp, Homo sapiens
  siRNA target sequence for CD34 (NM_001773.1,394-412).
gtttatggaaacacaaact

SEQ ID NO: 318657 - DNA, 19 bp, Homo sapiens
  siRNA target sequence for CD34 (NM_001773.1,559-577).
cccactaaaccctatacat

SEQ ID NO: 318658 - DNA, 19 bp, Homo sapiens
  siRNA target sequence for CD34 (NM_001773.1,561-579).
cactaaaccctatacatca

SEQ ID NO: 318659 - DNA, 19 bp, Homo sapiens
  siRNA target sequence for CD34 (NM_001773.1,587-605).
ctatcctaagtgacatcaa

SEQ ID NO: 318660 - DNA, 19 bp, Homo sapiens
  siRNA target sequence for CD34 (NM_001773.1,680-698).
ccagctgtgcggagtttaa

SEQ ID NO: 318661 - DNA, 19 bp, Homo sapiens
  siRNA target sequence for CD34 (NM_001773.1,683-701).
gctgtgcggagtttaagaa

SEQ ID NO: 318662 - DNA, 19 bp, Homo sapiens
  siRNA target sequence for CD34 (NM_001773.1,855-873).
caaactccaacttatgaaa

SEQ ID NO: 318663 - DNA, 19 bp, Homo sapiens
  siRNA target sequence for CD99 (NM_002414.3,238-256).
ccggatggtggtttcgatt

SEQ ID NO: 318664 - DNA, 19 bp, Homo sapiens
  siRNA target sequence for CD99 (NM_002414.3,239-257).
cggatggtggtttcgattt

SEQ ID NO: 318665 - DNA, 19 bp, Homo sapiens
  siRNA target sequence for CD99 (NM_002414.3,240-258).
ggatggtggtttcgattta

SEQ ID NO: 318666 - DNA, 19 bp, Homo sapiens
  siRNA target sequence for CD99 (NM_002414.3,241-259).
gatggtggtttcgatttat

SEQ ID NO: 318667 - DNA, 19 bp, Homo sapiens
  siRNA target sequence for CD99 (NM_002414.3,265-283).
gcccttcctgacaatgaaa

SEQ ID NO: 318668 - DNA, 19 bp, Homo sapiens
  siRNA target sequence for CD99 (NM_002414.3,319-337).
gctggggatgactttgact

SEQ ID NO: 318669 - DNA, 19 bp, Homo sapiens
  siRNA target sequence for CD99 (NM_002414.3,431-449).
cctccggtagcttttcaga

SEQ ID NO: 318670 - DNA, 19 bp, Homo sapiens
  siRNA target sequence for CD99 (NM_002414.3,432-450).
ctccggtagcttttcagat

SEQ ID NO: 318671 - DNA, 19 bp, Homo sapiens
  siRNA target sequence for CD99 (NM_002414.3,703-721).
gctgttcagcgtactcttt

SEQ ID NO: 318672 - DNA, 19 bp, Homo sapiens
  siRNA target sequence for CD99 (NM_002414.3,712-730).
cgtactcttttagagaaat

SEQ ID NO: 318673 - DNA, 19 bp, Homo sapiens
  siRNA target sequence for CDON (NM_016952.1,91-109).
gtgaccactcgtatctcat

SEQ ID NO: 318674 - DNA, 19 bp, Homo sapiens
  siRNA target sequence for CDON (NM_016952.1,112-130).
ctgcataacggaaaaacat

SEQ ID NO: 318675 - DNA, 19 bp, Homo sapiens
  siRNA target sequence for CDON (NM_016952.1,165-183).
ggggactctgacaattctt

SEQ ID NO: 318676 - DNA, 19 bp, Homo sapiens
  siRNA target sequence for CDON (NM_016952.1,218-236).
gccttgccaacaatagcat

SEQ ID NO: 318677 - DNA, 19 bp, Homo sapiens
  siRNA target sequence for CDON (NM_016952.1,254-272).
gccctgcgacagtatctgt

SEQ ID NO: 318678 - DNA, 19 bp, Homo sapiens
  siRNA target sequence for CDON (NM_016952.1,296-314).
catccacaaagcatgttat

SEQ ID NO: 318679 - DNA, 19 bp, Homo sapiens
  siRNA target sequence for CDON (NM_016952.1,350-368).
gcagggtaccggagagtaa

SEQ ID NO: 318680 - DNA, 19 bp, Homo sapiens
  siRNA target sequence for CDON (NM_016952.1,377-395).
ctgaggtgcgctataaaat

SEQ ID NO: 318681 - DNA, 19 bp, Homo sapiens
  siRNA target sequence for CDON (NM_016952.1,443-461).
catcaggaaatcttcagat

SEQ ID NO: 318682 - DNA, 19 bp, Homo sapiens
  siRNA target sequence for CDON (NM_016952.1,459-477).
gattttgaatgtatcctta

SEQ ID NO: 318683 - DNA, 19 bp, Homo sapiens
  siRNA target sequence for CDON (NM_016952.1,478-496).
gaggacaagggatcataca

SEQ ID NO: 318684 - DNA, 19 bp, Homo sapiens
  siRNA target sequence for CDON (NM_016952.1,481-499).
gacaagggatcatacaaat

SEQ ID NO: 318685 - DNA, 19 bp, Homo sapiens
  siRNA target sequence for CDON (NM_016952.1,495-513).
caaatgtgcagcttataat

SEQ ID NO: 318686 - DNA, 19 bp, Homo sapiens
  siRNA target sequence for CDON (NM_016952.1,521-539).
cacatcaattaaaagttga

SEQ ID NO: 318687 - DNA, 19 bp, Homo sapiens
  siRNA target sequence for CDON (NM_016952.1,564-582).
gagtcgtccttcttcagat

SEQ ID NO: 318688 - DNA, 19 bp, Homo sapiens
  siRNA target sequence for CDON (NM_016952.1,572-590).
cttcttcagatgatgttca

SEQ ID NO: 318689 - DNA, 19 bp, Homo sapiens
  siRNA target sequence for CDON (NM_016952.1,606-624).
ccattcacaggcattagct

SEQ ID NO: 318690 - DNA, 19 bp, Homo sapiens
  siRNA target sequence for CDON (NM_016952.1,615-633).
ggcattagctgttctttct

SEQ ID NO: 318691 - DNA, 19 bp, Homo sapiens
  siRNA target sequence for CDON (NM_016952.1,632-650).
ctcgtagccctgtaacctt

SEQ ID NO: 318692 - DNA, 19 bp, Homo sapiens
  siRNA target sequence for CDON (NM_016952.1,672-690).
cccggctcctcaagtgtat

SEQ ID NO: 318693 - DNA, 19 bp, Homo sapiens
  siRNA target sequence for CDON (NM_016952.1,731-749).
ggagaaggttgtattctca

SEQ ID NO: 318694 - DNA, 19 bp, Homo sapiens
  siRNA target sequence for CDON (NM_016952.1,732-750).
gagaaggttgtattctcat

SEQ ID NO: 318695 - DNA, 19 bp, Homo sapiens
  siRNA target sequence for CDON (NM_016952.1,775-793).
gcggactccggaaactatt

SEQ ID NO: 318696 - DNA, 19 bp, Homo sapiens
  siRNA target sequence for CDON (NM_016952.1,834-852).
gacttacatggttaatgta

SEQ ID NO: 318697 - DNA, 19 bp, Homo sapiens
  siRNA target sequence for CDON (NM_016952.1,836-854).
cttacatggttaatgtact

SEQ ID NO: 318698 - DNA, 19 bp, Homo sapiens
  siRNA target sequence for CDON (NM_016952.1,878-896).
gactacaggatcagatagt

SEQ ID NO: 318699 - DNA, 19 bp, Homo sapiens
  siRNA target sequence for CDON (NM_016952.1,880-898).
ctacaggatcagatagtgt

SEQ ID NO: 318700 - DNA, 19 bp, Homo sapiens
  siRNA target sequence for CDON (NM_016952.1,903-921).
gggtgccacagtacacttt

SEQ ID NO: 318701 - DNA, 19 bp, Homo sapiens
  siRNA target sequence for CDON (NM_016952.1,907-925).
gccacagtacactttacct

SEQ ID NO: 318702 - DNA, 19 bp, Homo sapiens
  siRNA target sequence for CDON (NM_016952.1,969-987).
caatgcacagcctattcat

SEQ ID NO: 318703 - DNA, 19 bp, Homo sapiens
  siRNA target sequence for CDON (NM_016952.1,988-1006).
ccttctgcacgacatctaa

SEQ ID NO: 318704 - DNA, 19 bp, Homo sapiens
  siRNA target sequence for CDON (NM_016952.1,1073-1091).
cagataatgggattggatt

SEQ ID NO: 318705 - DNA, 19 bp, Homo sapiens
  siRNA target sequence for CDON (NM_016952.1,1132-1150).
ggattcaagccagttataa

SEQ ID NO: 318706 - DNA, 19 bp, Homo sapiens
  siRNA target sequence for CDON (NM_016952.1,1173-1191).
ggttgcagacggagacttt

SEQ ID NO: 318707 - DNA, 19 bp, Homo sapiens
  siRNA target sequence for CDON (NM_016952.1,1177-1195).
gcagacggagactttgtta

SEQ ID NO: 318708 - DNA, 19 bp, Homo sapiens
  siRNA target sequence for CDON (NM_016952.1,1222-1240).
ccggttccggtcattcgtt

SEQ ID NO: 318709 - DNA, 19 bp, Homo sapiens
  siRNA target sequence for CDON (NM_016952.1,1231-1249).
gtcattcgttggtatgaca

SEQ ID NO: 318710 - DNA, 19 bp, Homo sapiens
  siRNA target sequence for CDON (NM_016952.1,1279-1297).
caagtcctgagatcgaaat

SEQ ID NO: 318711 - DNA, 19 bp, Homo sapiens
  siRNA target sequence for CDON (NM_016952.1,1292-1310).
cgaaatcccgaaaatcaca

SEQ ID NO: 318712 - DNA, 19 bp, Homo sapiens
  siRNA target sequence for CDON (NM_016952.1,1300-1318).
cgaaaatcacagttatcaa

SEQ ID NO: 318713 - DNA, 19 bp, Homo sapiens
  siRNA target sequence for CDON (NM_016952.1,1373-1391).
caagctctctccatattca

SEQ ID NO: 318714 - DNA, 19 bp, Homo sapiens
  siRNA target sequence for CDON (NM_016952.1,1405-1423).
gaacatgcggggaaataca

SEQ ID NO: 318715 - DNA, 19 bp, Homo sapiens
  siRNA target sequence for CDON (NM_016952.1,1408-1426).
catgcggggaaatacatct

SEQ ID NO: 318716 - DNA, 19 bp, Homo sapiens
  siRNA target sequence for CDON (NM_016952.1,1422-1440).
catctgcgaagctgcaaat

SEQ ID NO: 318717 - DNA, 19 bp, Homo sapiens
  siRNA target sequence for CDON (NM_016952.1,1534-1552).
cagaatgatgacagaagta

SEQ ID NO: 318718 - DNA, 19 bp, Homo sapiens
  siRNA target sequence for CDON (NM_016952.1,1742-1760).
ggctgcccatcaatgctta

SEQ ID NO: 318719 - DNA, 19 bp, Homo sapiens
  siRNA target sequence for CDON (NM_016952.1,1863-1881).
ggagccatctagtctttat

SEQ ID NO: 318720 - DNA, 19 bp, Homo sapiens
  siRNA target sequence for CDON (NM_016952.1,1871-1889).
ctagtctttatgaagtctt

SEQ ID NO: 318721 - DNA, 19 bp, Homo sapiens
  siRNA target sequence for CDON (NM_016952.1,2008-2026).
cctaagtatcccgttgttt

SEQ ID NO: 318722 - DNA, 19 bp, Homo sapiens
  siRNA target sequence for CDON (NM_016952.1,2050-2068).
ggagtggtacttacagatt

SEQ ID NO: 318723 - DNA, 19 bp, Homo sapiens
  siRNA target sequence for CDON (NM_016952.1,2128-2146).
gagacatcagtctatgtca

SEQ ID NO: 318724 - DNA, 19 bp, Homo sapiens
  siRNA target sequence for CDON (NM_016952.1,2183-2201).
ctgccttcaaagtcgaata

SEQ ID NO: 318725 - DNA, 19 bp, Homo sapiens
  siRNA target sequence for CDON (NM_016952.1,2185-2203).
gccttcaaagtcgaatata

SEQ ID NO: 318726 - DNA, 19 bp, Homo sapiens
  siRNA target sequence for CDON (NM_016952.1,2186-2204).
ccttcaaagtcgaatataa

SEQ ID NO: 318727 - DNA, 19 bp, Homo sapiens
  siRNA target sequence for CDON (NM_016952.1,2187-2205).
cttcaaagtcgaatataaa

SEQ ID NO: 318728 - DNA, 19 bp, Homo sapiens
  siRNA target sequence for CDON (NM_016952.1,2206-2224).
cggatgaggaccagcaatt

SEQ ID NO: 318729 - DNA, 19 bp, Homo sapiens
  siRNA target sequence for CDON (NM_016952.1,2249-2267).
ctccttccaaactttcagt

SEQ ID NO: 318730 - DNA, 19 bp, Homo sapiens
  siRNA target sequence for CDON (NM_016952.1,2268-2286).
ggaagttcgtagtttagaa

SEQ ID NO: 318731 - DNA, 19 bp, Homo sapiens
  siRNA target sequence for CDON (NM_016952.1,2284-2302).
gaaccaggttcaacataca

SEQ ID NO: 318732 - DNA, 19 bp, Homo sapiens
  siRNA target sequence for CDON (NM_016952.1,2287-2305).
ccaggttcaacatacaaat

SEQ ID NO: 318733 - DNA, 19 bp, Homo sapiens
  siRNA target sequence for CDON (NM_016952.1,2288-2306).
caggttcaacatacaaatt

SEQ ID NO: 318734 - DNA, 19 bp, Homo sapiens
  siRNA target sequence for CDON (NM_016952.1,2351-2369).
cagcatctcgtccttatca

SEQ ID NO: 318735 - DNA, 19 bp, Homo sapiens
  siRNA target sequence for CDON (NM_016952.1,2354-2372).
catctcgtccttatcaagt

SEQ ID NO: 318736 - DNA, 19 bp, Homo sapiens
  siRNA target sequence for CDON (NM_016952.1,2411-2429).
ctggacctcacattgcata

SEQ ID NO: 318737 - DNA, 19 bp, Homo sapiens
  siRNA target sequence for CDON (NM_016952.1,2460-2478).
gctaaagtggacgtacatt

SEQ ID NO: 318738 - DNA, 19 bp, Homo sapiens
  siRNA target sequence for CDON (NM_016952.1,2471-2489).
cgtacattccatcaagtaa

SEQ ID NO: 318739 - DNA, 19 bp, Homo sapiens
  siRNA target sequence for CDON (NM_016952.1,2475-2493).
cattccatcaagtaacaat

SEQ ID NO: 318740 - DNA, 19 bp, Homo sapiens
  siRNA target sequence for CDON (NM_016952.1,2496-2514).
cactcccattcaaggattt

SEQ ID NO: 318741 - DNA, 19 bp, Homo sapiens
  siRNA target sequence for CDON (NM_016952.1,2501-2519).
ccattcaaggattttatat

SEQ ID NO: 318742 - DNA, 19 bp, Homo sapiens
  siRNA target sequence for CDON (NM_016952.1,2520-2538).
ctattaccgaccaacagat

SEQ ID NO: 318743 - DNA, 19 bp, Homo sapiens
  siRNA target sequence for CDON (NM_016952.1,2688-2706).
ctgcgagactaaagtgaaa

SEQ ID NO: 318744 - DNA, 19 bp, Homo sapiens
  siRNA target sequence for CDON (NM_016952.1,2723-2741).
ctgaatatcctgtcaaaga

SEQ ID NO: 318745 - DNA, 19 bp, Homo sapiens
  siRNA target sequence for CDON (NM_016952.1,2742-2760).
cttgagtacccctccaaat

SEQ ID NO: 318746 - DNA, 19 bp, Homo sapiens
  siRNA target sequence for CDON (NM_016952.1,2745-2763).
gagtacccctccaaattct

SEQ ID NO: 318747 - DNA, 19 bp, Homo sapiens
  siRNA target sequence for CDON (NM_016952.1,2807-2825).
gaagcagtgacatgttata

SEQ ID NO: 318748 - DNA, 19 bp, Homo sapiens
  siRNA target sequence for CDON (NM_016952.1,2813-2831).
gtgacatgttatatctgat

SEQ ID NO: 318749 - DNA, 19 bp, Homo sapiens
  siRNA target sequence for CDON (NM_016952.1,2905-2923).
cagcagaataccatacaaa

SEQ ID NO: 318750 - DNA, 19 bp, Homo sapiens
  siRNA target sequence for CDON (NM_016952.1,3001-3019).
gcaagtcagataaatggaa

SEQ ID NO: 318751 - DNA, 19 bp, Homo sapiens
  siRNA target sequence for CDON (NM_016952.1,3084-3102).
ggtccccaatgcagtcaat

SEQ ID NO: 318752 - DNA, 19 bp, Homo sapiens
  siRNA target sequence for CDON (NM_016952.1,3088-3106).
cccaatgcagtcaatggaa

SEQ ID NO: 318753 - DNA, 19 bp, Homo sapiens
  siRNA target sequence for CDON (NM_016952.1,3111-3129).
gaatgggagcctaaatgga

SEQ ID NO: 318754 - DNA, 19 bp, Homo sapiens
  siRNA target sequence for CDON (NM_016952.1,3121-3139).
ctaaatggagggctttact

SEQ ID NO: 318755 - DNA, 19 bp, Homo sapiens
  siRNA target sequence for CDON (NM_016952.1,3161-3179).
ccaggacacacgtggattt

SEQ ID NO: 318756 - DNA, 19 bp, Homo sapiens
  siRNA target sequence for CDON (NM_016952.1,3221-3239).
cggccgtgcctcagattga

SEQ ID NO: 318757 - DNA, 19 bp, Homo sapiens
  siRNA target sequence for CDON (NM_016952.1,3238-3256).
gaccctctggagtgtgtta

SEQ ID NO: 318758 - DNA, 19 bp, Homo sapiens
  siRNA target sequence for CDON (NM_016952.1,3260-3278).
gccgaaattgtcgaaacaa

SEQ ID NO: 318759 - DNA, 19 bp, Homo sapiens
  siRNA target sequence for CDON (NM_016952.1,3284-3302).
ggtgtttcaccaaaaccaa

SEQ ID NO: 318760 - DNA, 19 bp, Homo sapiens
  siRNA target sequence for CDON (NM_016952.1,3491-3509).
cctgctgtcaggacattgt

SEQ ID NO: 318761 - DNA, 19 bp, Homo sapiens
  siRNA target sequence for CDON (NM_016952.1,3492-3510).
ctgctgtcaggacattgta

SEQ ID NO: 318762 - DNA, 19 bp, Homo sapiens
  siRNA target sequence for CNTN2 (NM_005076.2,478-496).
cctatcggtggaagatgaa

SEQ ID NO: 318763 - DNA, 19 bp, Homo sapiens
  siRNA target sequence for CNTN2 (NM_005076.2,483-501).
cggtggaagatgaatggta

SEQ ID NO: 318764 - DNA, 19 bp, Homo sapiens
  siRNA target sequence for CNTN2 (NM_005076.2,845-863).
gtacattgcccgaaccaat

SEQ ID NO: 318765 - DNA, 19 bp, Homo sapiens
  siRNA target sequence for CNTN2 (NM_005076.2,1248-1266).
cctgagtggctaaaagtga

SEQ ID NO: 318766 - DNA, 19 bp, Homo sapiens
  siRNA target sequence for CNTN2 (NM_005076.2,1627-1645).
gcaaaggcacggagatttt

SEQ ID NO: 318767 - DNA, 19 bp, Homo sapiens
  siRNA target sequence for CNTN2 (NM_005076.2,1700-1718).
catcagccggtcagatgaa

SEQ ID NO: 318768 - DNA, 19 bp, Homo sapiens
  siRNA target sequence for CNTN2 (NM_005076.2,1708-1726).
ggtcagatgaaggcaaata

SEQ ID NO: 318769 - DNA, 19 bp, Homo sapiens
  siRNA target sequence for CNTN2 (NM_005076.2,1729-1747).
cctgctttgctgagaactt

SEQ ID NO: 318770 - DNA, 19 bp, Homo sapiens
  siRNA target sequence for CNTN2 (NM_005076.2,1782-1800).
gtgcgagatgcaaccaaaa

SEQ ID NO: 318771 - DNA, 19 bp, Homo sapiens
  siRNA target sequence for CNTN2 (NM_005076.2,1816-1834).
caagtgccgacatcaactt

SEQ ID NO: 318772 - DNA, 19 bp, Homo sapiens
  siRNA target sequence for CNTN2 (NM_005076.2,1941-1959).
gggcactaccggagaacta

SEQ ID NO: 318773 - DNA, 19 bp, Homo sapiens
  siRNA target sequence for CNTN2 (NM_005076.2,1942-1960).
ggcactaccggagaactaa

SEQ ID NO: 318774 - DNA, 19 bp, Homo sapiens
  siRNA target sequence for CNTN2 (NM_005076.2,1943-1961).
gcactaccggagaactaat

SEQ ID NO: 318775 - DNA, 19 bp, Homo sapiens
  siRNA target sequence for CNTN2 (NM_005076.2,2007-2025).
cgccatggggggaagtaca

SEQ ID NO: 318776 - DNA, 19 bp, Homo sapiens
  siRNA target sequence for CNTN2 (NM_005076.2,2296-2314).
ccccctggatggactatga

SEQ ID NO: 318777 - DNA, 19 bp, Homo sapiens
  siRNA target sequence for CNTN2 (NM_005076.2,2298-2316).
ccctggatggactatgagt

SEQ ID NO: 318778 - DNA, 19 bp, Homo sapiens
  siRNA target sequence for CNTN2 (NM_005076.2,2359-2377).
gtgggccctccagcaaaat

SEQ ID NO: 318779 - DNA, 19 bp, Homo sapiens
  siRNA target sequence for CNTN2 (NM_005076.2,2568-2586).
gatgcccagtactttgtct

SEQ ID NO: 318780 - DNA, 19 bp, Homo sapiens
  siRNA target sequence for CNTN2 (NM_005076.2,2614-2632).
cgccctttgaggtcaagat

SEQ ID NO: 318781 - DNA, 19 bp, Homo sapiens
  siRNA target sequence for CNTN2 (NM_005076.2,3043-3061).
gctctagtcttagcattaa

SEQ ID NO: 318782 - DNA, 19 bp, Homo sapiens
  siRNA target sequence for CNTN2 (NM_005076.2,3201-3219).
ggccatgccctggtacaaa

SEQ ID NO: 318783 - DNA, 19 bp, Homo sapiens
  siRNA target sequence for CNTN2 (NM_005076.2,3202-3220).
gccatgccctggtacaaat

SEQ ID NO: 318784 - DNA, 19 bp, Homo sapiens
  siRNA target sequence for DCBLD1 (NM_173674.1,247-265).
gtggacacctagtgactta

SEQ ID NO: 318785 - DNA, 19 bp, Homo sapiens
  siRNA target sequence for DCBLD1 (NM_173674.1,250-268).
gacacctagtgacttatca

SEQ ID NO: 318786 - DNA, 19 bp, Homo sapiens
  siRNA target sequence for DCBLD1 (NM_173674.1,269-287).
ggatagtggcacaatgaca

SEQ ID NO: 318787 - DNA, 19 bp, Homo sapiens
  siRNA target sequence for DCBLD1 (NM_173674.1,270-288).
gatagtggcacaatgacat

SEQ ID NO: 318788 - DNA, 19 bp, Homo sapiens
  siRNA target sequence for DCBLD1 (NM_173674.1,278-296).
cacaatgacatctaagaat

SEQ ID NO: 318789 - DNA, 19 bp, Homo sapiens
  siRNA target sequence for DCBLD1 (NM_173674.1,280-298).
caatgacatctaagaatta

SEQ ID NO: 318790 - DNA, 19 bp, Homo sapiens
  siRNA target sequence for DCBLD1 (NM_173674.1,328-346).
gcgaaaagacaattacagt

SEQ ID NO: 318791 - DNA, 19 bp, Homo sapiens
  siRNA target sequence for DCBLD1 (NM_173674.1,329-347).
cgaaaagacaattacagta

SEQ ID NO: 318792 - DNA, 19 bp, Homo sapiens
  siRNA target sequence for DCBLD1 (NM_173674.1,371-389).
gaggttgggagatttggat

SEQ ID NO: 318793 - DNA, 19 bp, Homo sapiens
  siRNA target sequence for DCBLD1 (NM_173674.1,377-395).
gggagatttggatatcgaa

SEQ ID NO: 318794 - DNA, 19 bp, Homo sapiens
  siRNA target sequence for DCBLD1 (NM_173674.1,378-396).
ggagatttggatatcgaat

SEQ ID NO: 318795 - DNA, 19 bp, Homo sapiens
  siRNA target sequence for DCBLD1 (NM_173674.1,401-419).
gacctgtgcttctgactat

SEQ ID NO: 318796 - DNA, 19 bp, Homo sapiens
  siRNA target sequence for DCBLD1 (NM_173674.1,409-427).
cttctgactatcttctctt

SEQ ID NO: 318797 - DNA, 19 bp, Homo sapiens
  siRNA target sequence for DCBLD1 (NM_173674.1,430-448).
ccagctcttcagatcaata

SEQ ID NO: 318798 - DNA, 19 bp, Homo sapiens
  siRNA target sequence for DCBLD1 (NM_173674.1,451-469).
gtccatactgtggaagtat

SEQ ID NO: 318799 - DNA, 19 bp, Homo sapiens
  siRNA target sequence for DCBLD1 (NM_173674.1,478-496).
ccaaagaactcttgttgaa

SEQ ID NO: 318800 - DNA, 19 bp, Homo sapiens
  siRNA target sequence for DCBLD1 (NM_173674.1,507-525).
gtaaccgtccgctttgaga

SEQ ID NO: 318801 - DNA, 19 bp, Homo sapiens
  siRNA target sequence for DCBLD1 (NM_173674.1,522-540).
gagagtggatcccacattt

SEQ ID NO: 318802 - DNA, 19 bp, Homo sapiens
  siRNA target sequence for DCBLD1 (NM_173674.1,524-542).
gagtggatcccacatttct

SEQ ID NO: 318803 - DNA, 19 bp, Homo sapiens
  siRNA target sequence for DCBLD1 (NM_173674.1,571-589).
gcagcgaccatccagattt

SEQ ID NO: 318804 - DNA, 19 bp, Homo sapiens
  siRNA target sequence for DCBLD1 (NM_173674.1,574-592).
gcgaccatccagatttaat

SEQ ID NO: 318805 - DNA, 19 bp, Homo sapiens
  siRNA target sequence for DCBLD1 (NM_173674.1,575-593).
cgaccatccagatttaata

SEQ ID NO: 318806 - DNA, 19 bp, Homo sapiens
  siRNA target sequence for DCBLD1 (NM_173674.1,576-594).
gaccatccagatttaataa

SEQ ID NO: 318807 - DNA, 19 bp, Homo sapiens
  siRNA target sequence for DCBLD1 (NM_173674.1,579-597).
catccagatttaataacat

SEQ ID NO: 318808 - DNA, 19 bp, Homo sapiens
  siRNA target sequence for DCBLD1 (NM_173674.1,602-620).
ggaacgagctagccattat

SEQ ID NO: 318809 - DNA, 19 bp, Homo sapiens
  siRNA target sequence for DCBLD1 (NM_173674.1,603-621).
gaacgagctagccattatt

SEQ ID NO: 318810 - DNA, 19 bp, Homo sapiens
  siRNA target sequence for DCBLD1 (NM_173674.1,606-624).
cgagctagccattatttga

SEQ ID NO: 318811 - DNA, 19 bp, Homo sapiens
  siRNA target sequence for DCBLD1 (NM_173674.1,607-625).
gagctagccattatttgaa

SEQ ID NO: 318812 - DNA, 19 bp, Homo sapiens
  siRNA target sequence for DCBLD1 (NM_173674.1,609-627).
gctagccattatttgaaga

SEQ ID NO: 318813 - DNA, 19 bp, Homo sapiens
  siRNA target sequence for DCBLD1 (NM_173674.1,644-662).
ctgcccagctggttgtaga

SEQ ID NO: 318814 - DNA, 19 bp, Homo sapiens
  siRNA target sequence for DCBLD1 (NM_173674.1,677-695).
catttctgggaatatggta

SEQ ID NO: 318815 - DNA, 19 bp, Homo sapiens
  siRNA target sequence for DCBLD1 (NM_173674.1,685-703).
ggaatatggtagatggata

SEQ ID NO: 318816 - DNA, 19 bp, Homo sapiens
  siRNA target sequence for DCBLD1 (NM_173674.1,686-704).
gaatatggtagatggatat

SEQ ID NO: 318817 - DNA, 19 bp, Homo sapiens
  siRNA target sequence for DCBLD1 (NM_173674.1,693-711).
gtagatggatatagagata

SEQ ID NO: 318818 - DNA, 19 bp, Homo sapiens
  siRNA target sequence for DCBLD1 (NM_173674.1,791-809).
caaagggatcagtcgatat

SEQ ID NO: 318819 - DNA, 19 bp, Homo sapiens
  siRNA target sequence for DCBLD1 (NM_173674.1,856-874).
cagacaagcgatttctgtt

SEQ ID NO: 318820 - DNA, 19 bp, Homo sapiens
  siRNA target sequence for DCBLD1 (NM_173674.1,858-876).
gacaagcgatttctgttta

SEQ ID NO: 318821 - DNA, 19 bp, Homo sapiens
  siRNA target sequence for DCBLD1 (NM_173674.1,870-888).
ctgtttacctccaatggtt

SEQ ID NO: 318822 - DNA, 19 bp, Homo sapiens
  siRNA target sequence for DCBLD1 (NM_173674.1,890-908).
cagcagatccttgagtttt

SEQ ID NO: 318823 - DNA, 19 bp, Homo sapiens
  siRNA target sequence for DCBLD1 (NM_173674.1,892-910).
gcagatccttgagttttga

SEQ ID NO: 318824 - DNA, 19 bp, Homo sapiens
  siRNA target sequence for DCBLD1 (NM_173674.1,909-927).
gaacctgacgggcaaatca

SEQ ID NO: 318825 - DNA, 19 bp, Homo sapiens
  siRNA target sequence for DCBLD1 (NM_173674.1,940-958).
catggcagtcggtcaatga

SEQ ID NO: 318826 - DNA, 19 bp, Homo sapiens
  siRNA target sequence for DCBLD1 (NM_173674.1,1059-1077).
gagtggctggagatcgatt

SEQ ID NO: 318827 - DNA, 19 bp, Homo sapiens
  siRNA target sequence for DCBLD1 (NM_173674.1,1120-1138).
ctacacagtcgaacttcaa

SEQ ID NO: 318828 - DNA, 19 bp, Homo sapiens
  siRNA target sequence for DCBLD1 (NM_173674.1,1125-1143).
cagtcgaacttcaactttt

SEQ ID NO: 318829 - DNA, 19 bp, Homo sapiens
  siRNA target sequence for DCBLD1 (NM_173674.1,1127-1145).
gtcgaacttcaacttttat

SEQ ID NO: 318830 - DNA, 19 bp, Homo sapiens
  siRNA target sequence for DCBLD1 (NM_173674.1,1129-1147).
cgaacttcaacttttatgt

SEQ ID NO: 318831 - DNA, 19 bp, Homo sapiens
  siRNA target sequence for DCBLD1 (NM_173674.1,1183-1201).
ctaagtggaagacctataa

SEQ ID NO: 318832 - DNA, 19 bp, Homo sapiens
  siRNA target sequence for DCBLD1 (NM_173674.1,1254-1272).
gacccagtgcaaaacaatt

SEQ ID NO: 318833 - DNA, 19 bp, Homo sapiens
  siRNA target sequence for DCBLD1 (NM_173674.1,1282-1300).
ccatcgtggccagatatgt

SEQ ID NO: 318834 - DNA, 19 bp, Homo sapiens
  siRNA target sequence for DCBLD1 (NM_173674.1,1350-1368).
ctcattggttgccagatta

SEQ ID NO: 318835 - DNA, 19 bp, Homo sapiens
  siRNA target sequence for DCBLD1 (NM_173674.1,1352-1370).
cattggttgccagattaca

SEQ ID NO: 318836 - DNA, 19 bp, Homo sapiens
  siRNA target sequence for DCBLD1 (NM_173674.1,1361-1379).
ccagattacacaaggtaat

SEQ ID NO: 318837 - DNA, 19 bp, Homo sapiens
  siRNA target sequence for DCBLD1 (NM_173674.1,1364-1382).
gattacacaaggtaatgat

SEQ ID NO: 318838 - DNA, 19 bp, Homo sapiens
  siRNA target sequence for DCBLD1 (NM_173674.1,1411-1429).
gcaccagtgtttcaactaa

SEQ ID NO: 318839 - DNA, 19 bp, Homo sapiens
  siRNA target sequence for DCBLD1 (NM_173674.1,1455-1473).
cccatcccctcggaagaaa

SEQ ID NO: 318840 - DNA, 19 bp, Homo sapiens
  siRNA target sequence for DCBLD1 (NM_173674.1,1457-1475).
catcccctcggaagaaaca

SEQ ID NO: 318841 - DNA, 19 bp, Homo sapiens
  siRNA target sequence for DCBLD1 (NM_173674.1,1495-1513).
caacggtggctattccatt

SEQ ID NO: 318842 - DNA, 19 bp, Homo sapiens
  siRNA target sequence for DCBLD1 (NM_173674.1,1510-1528).
cattggtgctccttgttgt

SEQ ID NO: 318843 - DNA, 19 bp, Homo sapiens
  siRNA target sequence for DCBLD1 (NM_173674.1,1550-1568).
gatctttgcagcctttaga

SEQ ID NO: 318844 - DNA, 19 bp, Homo sapiens
  siRNA target sequence for DCBLD1 (NM_173674.1,1620-1638).
gactgttggaagcagatta

SEQ ID NO: 318845 - DNA, 19 bp, Homo sapiens
  siRNA target sequence for DCBLD1 (NM_173674.1,1670-1688).
gtttaccatcagctatgat

SEQ ID NO: 318846 - DNA, 19 bp, Homo sapiens
  siRNA target sequence for DCBLD1 (NM_173674.1,1705-1723).
cacaaaagttagatctcat

SEQ ID NO: 318847 - DNA, 19 bp, Homo sapiens
  siRNA target sequence for DCBLD1 (NM_173674.1,1716-1734).
gatctcatcacaagtgata

SEQ ID NO: 318848 - DNA, 19 bp, Homo sapiens
  siRNA target sequence for DSCAM (NM_001389.2,505-523).
ccagagcttcgcgaatgtt

SEQ ID NO: 318849 - DNA, 19 bp, Homo sapiens
  siRNA target sequence for DSCAM (NM_001389.2,506-524).
cagagcttcgcgaatgttt

SEQ ID NO: 318850 - DNA, 19 bp, Homo sapiens
  siRNA target sequence for DSCAM (NM_001389.2,511-529).
cttcgcgaatgttttcagt

SEQ ID NO: 318851 - DNA, 19 bp, Homo sapiens
  siRNA target sequence for DSCAM (NM_001389.2,548-566).
ctctactttgtcaatgcat

SEQ ID NO: 318852 - DNA, 19 bp, Homo sapiens
  siRNA target sequence for DSCAM (NM_001389.2,708-726).
ccaacggcactctccaaat

SEQ ID NO: 318853 - DNA, 19 bp, Homo sapiens
  siRNA target sequence for DSCAM (NM_001389.2,737-755).
cctccttcaagcttcagta

SEQ ID NO: 318854 - DNA, 19 bp, Homo sapiens
  siRNA target sequence for DSCAM (NM_001389.2,767-785).
gataatacttattattgca

SEQ ID NO: 318855 - DNA, 19 bp, Homo sapiens
  siRNA target sequence for DSCAM (NM_001389.2,863-881).
cgtgtggaggaccagaaaa

SEQ ID NO: 318856 - DNA, 19 bp, Homo sapiens
  siRNA target sequence for DSCAM (NM_001389.2,891-909).
gcaatgttgcggtcttcaa

SEQ ID NO: 318857 - DNA, 19 bp, Homo sapiens
  siRNA target sequence for DSCAM (NM_001389.2,899-917).
gcggtcttcaagtgcatta

SEQ ID NO: 318858 - DNA, 19 bp, Homo sapiens
  siRNA target sequence for DSCAM (NM_001389.2,900-918).
cggtcttcaagtgcattat

SEQ ID NO: 318859 - DNA, 19 bp, Homo sapiens
  siRNA target sequence for DSCAM (NM_001389.2,977-995).
cttgtctcaggatctagat

SEQ ID NO: 318860 - DNA, 19 bp, Homo sapiens
  siRNA target sequence for DSCAM (NM_001389.2,984-1002).
caggatctagatttctcat

SEQ ID NO: 318861 - DNA, 19 bp, Homo sapiens
  siRNA target sequence for DSCAM (NM_001389.2,1008-1026).
ccacgggagccttgtatat

SEQ ID NO: 318862 - DNA, 19 bp, Homo sapiens
  siRNA target sequence for DSCAM (NM_001389.2,1011-1029).
cgggagccttgtatattaa

SEQ ID NO: 318863 - DNA, 19 bp, Homo sapiens
  siRNA target sequence for DSCAM (NM_001389.2,1012-1030).
gggagccttgtatattaaa

SEQ ID NO: 318864 - DNA, 19 bp, Homo sapiens
  siRNA target sequence for DSCAM (NM_001389.2,1043-1061).
gaagatggattgtataact

SEQ ID NO: 318865 - DNA, 19 bp, Homo sapiens
  siRNA target sequence for DSCAM (NM_001389.2,1068-1086).
gcatcacgcggcatcgata

SEQ ID NO: 318866 - DNA, 19 bp, Homo sapiens
  siRNA target sequence for DSCAM (NM_001389.2,1336-1354).
ggactcaggcagctatgtt

SEQ ID NO: 318867 - DNA, 19 bp, Homo sapiens
  siRNA target sequence for DSCAM (NM_001389.2,1337-1355).
gactcaggcagctatgttt

SEQ ID NO: 318868 - DNA, 19 bp, Homo sapiens
  siRNA target sequence for DSCAM (NM_001389.2,1356-1374).
gtgaagtgtccaacagata

SEQ ID NO: 318869 - DNA, 19 bp, Homo sapiens
  siRNA target sequence for DSCAM (NM_001389.2,1436-1454).
cccaggaaggttaaaagca

SEQ ID NO: 318870 - DNA, 19 bp, Homo sapiens
  siRNA target sequence for DSCAM (NM_001389.2,1518-1536).
ggtaccgcaatggtgaaat

SEQ ID NO: 318871 - DNA, 19 bp, Homo sapiens
  siRNA target sequence for DSCAM (NM_001389.2,1566-1584).
cagggatcaaccacgaaaa

SEQ ID NO: 318872 - DNA, 19 bp, Homo sapiens
  siRNA target sequence for DSCAM (NM_001389.2,1569-1587).
ggatcaaccacgaaaacct

SEQ ID NO: 318873 - DNA, 19 bp, Homo sapiens
  siRNA target sequence for DSCAM (NM_001389.2,1570-1588).
gatcaaccacgaaaacctt

SEQ ID NO: 318874 - DNA, 19 bp, Homo sapiens
  siRNA target sequence for DSCAM (NM_001389.2,1573-1591).
caaccacgaaaaccttata

SEQ ID NO: 318875 - DNA, 19 bp, Homo sapiens
  siRNA target sequence for DSCAM (NM_001389.2,1579-1597).
cgaaaaccttataatggat

SEQ ID NO: 318876 - DNA, 19 bp, Homo sapiens
  siRNA target sequence for DSCAM (NM_001389.2,1651-1669).
gctgtccgctcaagactat

SEQ ID NO: 318877 - DNA, 19 bp, Homo sapiens
  siRNA target sequence for DSCAM (NM_001389.2,1742-1760).
gagccggtttcccttatgt

SEQ ID NO: 318878 - DNA, 19 bp, Homo sapiens
  siRNA target sequence for DSCAM (NM_001389.2,1805-1823).
gacgatgacccgattctca

SEQ ID NO: 318879 - DNA, 19 bp, Homo sapiens
  siRNA target sequence for DSCAM (NM_001389.2,1838-1856).
cgcatcagccagatgatca

SEQ ID NO: 318880 - DNA, 19 bp, Homo sapiens
  siRNA target sequence for DSCAM (NM_001389.2,1874-1892).
gtcagctacctgaacatct

SEQ ID NO: 318881 - DNA, 19 bp, Homo sapiens
  siRNA target sequence for DSCAM (NM_001389.2,1957-1975).
cctgtaccaggctcgaata

SEQ ID NO: 318882 - DNA, 19 bp, Homo sapiens
  siRNA target sequence for DSCAM (NM_001389.2,1958-1976).
ctgtaccaggctcgaataa

SEQ ID NO: 318883 - DNA, 19 bp, Homo sapiens
  siRNA target sequence for DSCAM (NM_001389.2,1992-2010).
caagcattcgaccaatgaa

SEQ ID NO: 318884 - DNA, 19 bp, Homo sapiens
  siRNA target sequence for DSCAM (NM_001389.2,1995-2013).
gcattcgaccaatgaaaaa

SEQ ID NO: 318885 - DNA, 19 bp, Homo sapiens
  siRNA target sequence for DSCAM (NM_001389.2,2028-2046).
caggacgggacacatacat

SEQ ID NO: 318886 - DNA, 19 bp, Homo sapiens
  siRNA target sequence for DSCAM (NM_001389.2,2033-2051).
cgggacacatacattcact

SEQ ID NO: 318887 - DNA, 19 bp, Homo sapiens
  siRNA target sequence for DSCAM (NM_001389.2,2044-2062).
cattcactgtcgtgtgatt

SEQ ID NO: 318888 - DNA, 19 bp, Homo sapiens
  siRNA target sequence for DSCAM (NM_001389.2,2069-2087).
ccgtattactccattaaat

SEQ ID NO: 318889 - DNA, 19 bp, Homo sapiens
  siRNA target sequence for DSCAM (NM_001389.2,2245-2263).
ccacgtgaccgtgaaagtt

SEQ ID NO: 318890 - DNA, 19 bp, Homo sapiens
  siRNA target sequence for DSCAM (NM_001389.2,2257-2275).
gaaagttccgcctttcata

SEQ ID NO: 318891 - DNA, 19 bp, Homo sapiens
  siRNA target sequence for DSCAM (NM_001389.2,2272-2290).
catacaaccctttgagttt

SEQ ID NO: 318892 - DNA, 19 bp, Homo sapiens
  siRNA target sequence for DSCAM (NM_001389.2,2280-2298).
cctttgagtttccaagatt

SEQ ID NO: 318893 - DNA, 19 bp, Homo sapiens
  siRNA target sequence for DSCAM (NM_001389.2,2403-2421).
gggtgaccattgacaatat

SEQ ID NO: 318894 - DNA, 19 bp, Homo sapiens
  siRNA target sequence for DSCAM (NM_001389.2,2434-2452).
ctccttgaggatttccaat

SEQ ID NO: 318895 - DNA, 19 bp, Homo sapiens
  siRNA target sequence for DSCAM (NM_001389.2,2515-2533).
gcaccaaagccagttgatt

SEQ ID NO: 318896 - DNA, 19 bp, Homo sapiens
  siRNA target sequence for DSCAM (NM_001389.2,2536-2554).
cagagttcctcccaagttt

SEQ ID NO: 318897 - DNA, 19 bp, Homo sapiens
  siRNA target sequence for DSCAM (NM_001389.2,2569-2587).
ggaccaggacgggatttat

SEQ ID NO: 318898 - DNA, 19 bp, Homo sapiens
  siRNA target sequence for DSCAM (NM_001389.2,2634-2652).
ctaccatcgtgtggaaatt

SEQ ID NO: 318899 - DNA, 19 bp, Homo sapiens
  siRNA target sequence for DSCAM (NM_001389.2,2641-2659).
cgtgtggaaattctctaaa

SEQ ID NO: 318900 - DNA, 19 bp, Homo sapiens
  siRNA target sequence for DSCAM (NM_001389.2,2815-2833).
catgtacctcacggttaaa

SEQ ID NO: 318901 - DNA, 19 bp, Homo sapiens
  siRNA target sequence for DSCAM (NM_001389.2,2818-2836).
gtacctcacggttaaaatt

SEQ ID NO: 318902 - DNA, 19 bp, Homo sapiens
  siRNA target sequence for DSCAM (NM_001389.2,2821-2839).
cctcacggttaaaattcct

SEQ ID NO: 318903 - DNA, 19 bp, Homo sapiens
  siRNA target sequence for DSCAM (NM_001389.2,2873-2891).
gccacgcaggggcagaaaa

SEQ ID NO: 318904 - DNA, 19 bp, Homo sapiens
  siRNA target sequence for DSCAM (NM_001389.2,2944-2962).
gaaggaggaccgaatcatt

SEQ ID NO: 318905 - DNA, 19 bp, Homo sapiens
  siRNA target sequence for DSCAM (NM_001389.2,2967-2985).
ctgagatggcccgttatct

SEQ ID NO: 318906 - DNA, 19 bp, Homo sapiens
  siRNA target sequence for DSCAM (NM_001389.2,3004-3022).
gggagaagaggtgatttct

SEQ ID NO: 318907 - DNA, 19 bp, Homo sapiens
  siRNA target sequence for DSCAM (NM_001389.2,3005-3023).
ggagaagaggtgatttcta

SEQ ID NO: 318908 - DNA, 19 bp, Homo sapiens
  siRNA target sequence for DSCAM (NM_001389.2,3064-3082).
cttttcctgccatgctatt

SEQ ID NO: 318909 - DNA, 19 bp, Homo sapiens
  siRNA target sequence for DSCAM (NM_001389.2,3070-3088).
ctgccatgctattaattct

SEQ ID NO: 318910 - DNA, 19 bp, Homo sapiens
  siRNA target sequence for DSCAM (NM_001389.2,3092-3110).
ggggaggaccgtggaataa

SEQ ID NO: 318911 - DNA, 19 bp, Homo sapiens
  siRNA target sequence for DSCAM (NM_001389.2,3093-3111).
gggaggaccgtggaataat

SEQ ID NO: 318912 - DNA, 19 bp, Homo sapiens
  siRNA target sequence for DSCAM (NM_001389.2,3094-3112).
ggaggaccgtggaataatt

SEQ ID NO: 318913 - DNA, 19 bp, Homo sapiens
  siRNA target sequence for DSCAM (NM_001389.2,3137-3155).
gaccctcccgaaattgaga

SEQ ID NO: 318914 - DNA, 19 bp, Homo sapiens
  siRNA target sequence for DSCAM (NM_001389.2,3141-3159).
ctcccgaaattgagatcaa

SEQ ID NO: 318915 - DNA, 19 bp, Homo sapiens
  siRNA target sequence for DSCAM (NM_001389.2,3145-3163).
cgaaattgagatcaaagat

SEQ ID NO: 318916 - DNA, 19 bp, Homo sapiens
  siRNA target sequence for DSCAM (NM_001389.2,3164-3182).
gtcaaagcacgcacaatta

SEQ ID NO: 318917 - DNA, 19 bp, Homo sapiens
  siRNA target sequence for DSCAM (NM_001389.2,3219-3237).
ccatcacaggctacgatat

SEQ ID NO: 318918 - DNA, 19 bp, Homo sapiens
  siRNA target sequence for DSCAM (NM_001389.2,3220-3238).
catcacaggctacgatatt

SEQ ID NO: 318919 - DNA, 19 bp, Homo sapiens
  siRNA target sequence for DSCAM (NM_001389.2,3223-3241).
cacaggctacgatattgaa

SEQ ID NO: 318920 - DNA, 19 bp, Homo sapiens
  siRNA target sequence for DSCAM (NM_001389.2,3228-3246).
gctacgatattgaatgcaa

SEQ ID NO: 318921 - DNA, 19 bp, Homo sapiens
  siRNA target sequence for DSCAM (NM_001389.2,3229-3247).
ctacgatattgaatgcaaa

SEQ ID NO: 318922 - DNA, 19 bp, Homo sapiens
  siRNA target sequence for DSCAM (NM_001389.2,3232-3250).
cgatattgaatgcaaaaat

SEQ ID NO: 318923 - DNA, 19 bp, Homo sapiens
  siRNA target sequence for DSCAM (NM_001389.2,3312-3330).
ccaccatcattgatatcca

SEQ ID NO: 318924 - DNA, 19 bp, Homo sapiens
  siRNA target sequence for DSCAM (NM_001389.2,3454-3472).
cctggagcctatatcatct

SEQ ID NO: 318925 - DNA, 19 bp, Homo sapiens
  siRNA target sequence for DSCAM (NM_001389.2,3493-3511).
gaaggctcccaagaaacat

SEQ ID NO: 318926 - DNA, 19 bp, Homo sapiens
  siRNA target sequence for DSCAM (NM_001389.2,3529-3547).
ccgtggctaccaaataggt

SEQ ID NO: 318927 - DNA, 19 bp, Homo sapiens
  siRNA target sequence for DSCAM (NM_001389.2,3530-3548).
cgtggctaccaaataggtt

SEQ ID NO: 318928 - DNA, 19 bp, Homo sapiens
  siRNA target sequence for DSCAM (NM_001389.2,3566-3584).
gggggtaacttccaattca

SEQ ID NO: 318929 - DNA, 19 bp, Homo sapiens
  siRNA target sequence for DSCAM (NM_001389.2,3569-3587).
ggtaacttccaattcaaca

SEQ ID NO: 318930 - DNA, 19 bp, Homo sapiens
  siRNA target sequence for DSCAM (NM_001389.2,3577-3595).
ccaattcaacattatcagt

SEQ ID NO: 318931 - DNA, 19 bp, Homo sapiens
  siRNA target sequence for DSCAM (NM_001389.2,3606-3624).
gcggggacagtgaggttta

SEQ ID NO: 318932 - DNA, 19 bp, Homo sapiens
  siRNA target sequence for DSCAM (NM_001389.2,3780-3798).
caccagaaagcatatcaat

SEQ ID NO: 318933 - DNA, 19 bp, Homo sapiens
  siRNA target sequence for DSCAM (NM_001389.2,3845-3863).
gggttcagagtcatttact

SEQ ID NO: 318934 - DNA, 19 bp, Homo sapiens
  siRNA target sequence for DSCAM (NM_001389.2,4136-4154).
cgaaagtacactgtattct

SEQ ID NO: 318935 - DNA, 19 bp, Homo sapiens
  siRNA target sequence for DSCAM (NM_001389.2,4193-4211).
gcctctcccgactcgtttt

SEQ ID NO: 318936 - DNA, 19 bp, Homo sapiens
  siRNA target sequence for DSCAM (NM_001389.2,4197-4215).
ctcccgactcgttttccta

SEQ ID NO: 318937 - DNA, 19 bp, Homo sapiens
  siRNA target sequence for DSCAM (NM_001389.2,4287-4305).
gcaacagcagtgaaatcat

SEQ ID NO: 318938 - DNA, 19 bp, Homo sapiens
  siRNA target sequence for DSCAM (NM_001389.2,4308-4326).
cagtcgagccactagcaaa

SEQ ID NO: 318939 - DNA, 19 bp, Homo sapiens
  siRNA target sequence for DSCAM (NM_001389.2,4312-4330).
cgagccactagcaaaagct

SEQ ID NO: 318940 - DNA, 19 bp, Homo sapiens
  siRNA target sequence for DSCAM (NM_001389.2,4371-4389).
catggatgaaagacattgt

SEQ ID NO: 318941 - DNA, 19 bp, Homo sapiens
  siRNA target sequence for DSCAM (NM_001389.2,4450-4468).
cgggacacccagtctagta

SEQ ID NO: 318942 - DNA, 19 bp, Homo sapiens
  siRNA target sequence for DSCAM (NM_001389.2,4451-4469).
gggacacccagtctagtaa

SEQ ID NO: 318943 - DNA, 19 bp, Homo sapiens
  siRNA target sequence for DSCAM (NM_001389.2,4455-4473).
cacccagtctagtaacgat

SEQ ID NO: 318944 - DNA, 19 bp, Homo sapiens
  siRNA target sequence for DSCAM (NM_001389.2,4481-4499).
cggaggagcatctttagca

SEQ ID NO: 318945 - DNA, 19 bp, Homo sapiens
  siRNA target sequence for DSCAM (NM_001389.2,4497-4515).
gcaacggaagcttcattat

SEQ ID NO: 318946 - DNA, 19 bp, Homo sapiens
  siRNA target sequence for DSCAM (NM_001389.2,4498-4516).
caacggaagcttcattatt

SEQ ID NO: 318947 - DNA, 19 bp, Homo sapiens
  siRNA target sequence for DSCAM (NM_001389.2,4532-4550).
gaagactccggctattaca

SEQ ID NO: 318948 - DNA, 19 bp, Homo sapiens
  siRNA target sequence for DSCAM (NM_001389.2,4698-4716).
gctctatcagaggatacat

SEQ ID NO: 318949 - DNA, 19 bp, Homo sapiens
  siRNA target sequence for DSCAM (NM_001389.2,4721-4739).
cagtactccgaggacaata

SEQ ID NO: 318950 - DNA, 19 bp, Homo sapiens
  siRNA target sequence for DSCAM (NM_001389.2,4723-4741).
gtactccgaggacaatagt

SEQ ID NO: 318951 - DNA, 19 bp, Homo sapiens
  siRNA target sequence for DSCAM (NM_001389.2,4768-4786).
ccccagcgaacgttcctat

SEQ ID NO: 318952 - DNA, 19 bp, Homo sapiens
  siRNA target sequence for DSCAM (NM_001389.2,4778-4796).
cgttcctatcgcttggaaa

SEQ ID NO: 318953 - DNA, 19 bp, Homo sapiens
  siRNA target sequence for DSCAM (NM_001389.2,4779-4797).
gttcctatcgcttggaaaa

SEQ ID NO: 318954 - DNA, 19 bp, Homo sapiens
  siRNA target sequence for DSCAM (NM_001389.2,4782-4800).
cctatcgcttggaaaatct

SEQ ID NO: 318955 - DNA, 19 bp, Homo sapiens
  siRNA target sequence for DSCAM (NM_001389.2,4801-4819).
caaatgtgggacttggtat

SEQ ID NO: 318956 - DNA, 19 bp, Homo sapiens
  siRNA target sequence for DSCAM (NM_001389.2,4851-4869).
gcccagggcgcataagtga

SEQ ID NO: 318957 - DNA, 19 bp, Homo sapiens
  siRNA target sequence for DSCAM (NM_001389.2,4853-4871).
ccagggcgcataagtgaaa

SEQ ID NO: 318958 - DNA, 19 bp, Homo sapiens
  siRNA target sequence for DSCAM (NM_001389.2,5182-5200).
cgatggcagtacaattcct

SEQ ID NO: 318959 - DNA, 19 bp, Homo sapiens
  siRNA target sequence for DSCAM (NM_001389.2,5212-5230).
gtcagttgtccaaaacgaa

SEQ ID NO: 318960 - DNA, 19 bp, Homo sapiens
  siRNA target sequence for DSCAM (NM_001389.2,5401-5419).
gaatacccggacttcagat

SEQ ID NO: 318961 - DNA, 19 bp, Homo sapiens
  siRNA target sequence for DSCAM (NM_001389.2,5406-5424).
cccggacttcagatacgtt

SEQ ID NO: 318962 - DNA, 19 bp, Homo sapiens
  siRNA target sequence for DSCAM (NM_001389.2,5407-5425).
ccggacttcagatacgtta

SEQ ID NO: 318963 - DNA, 19 bp, Homo sapiens
  siRNA target sequence for DSCAM (NM_001389.2,5408-5426).
cggacttcagatacgttaa

SEQ ID NO: 318964 - DNA, 19 bp, Homo sapiens
  siRNA target sequence for DSCAM (NM_001389.2,5467-5485).
cagggctcagcttttgatt

SEQ ID NO: 318965 - DNA, 19 bp, Homo sapiens
  siRNA target sequence for DSCAM (NM_001389.2,5469-5487).
gggctcagcttttgattga

SEQ ID NO: 318966 - DNA, 19 bp, Homo sapiens
  siRNA target sequence for DSCAM (NM_001389.2,5470-5488).
ggctcagcttttgattgaa

SEQ ID NO: 318967 - DNA, 19 bp, Homo sapiens
  siRNA target sequence for DSCAM (NM_001389.2,5497-5515).
cacgatggagaccattgat

SEQ ID NO: 318968 - DNA, 19 bp, Homo sapiens
  siRNA target sequence for DSCAM (NM_001389.2,5588-5606).
cacacggtccattaccaat

SEQ ID NO: 318969 - DNA, 19 bp, Homo sapiens
  siRNA target sequence for DSCAM (NM_001389.2,5626-5644).
gcccttagtggatgtttca

SEQ ID NO: 318970 - DNA, 19 bp, Homo sapiens
  siRNA target sequence for DSCAM (NM_001389.2,5878-5896).
catggtctccacagaaagt

SEQ ID NO: 318971 - DNA, 19 bp, Homo sapiens
  siRNA target sequence for DSCAM (NM_001389.2,5957-5975).
ctgaggcacgccaagttca

SEQ ID NO: 318972 - DNA, 19 bp, Homo sapiens
  siRNA target sequence for DSCAM (NM_001389.2,5980-5998).
cacggagtgcttcatatca

SEQ ID NO: 318973 - DNA, 19 bp, Homo sapiens
  siRNA target sequence for DSCAM (NM_001389.2,5982-6000).
cggagtgcttcatatcaga

SEQ ID NO: 318974 - DNA, 19 bp, Homo sapiens
  siRNA target sequence for DSCAM (NM_001389.2,6021-6039).
cggcagggacaaatgagta

SEQ ID NO: 318975 - DNA, 19 bp, Homo sapiens
  siRNA target sequence for DSCAM (NM_001389.2,6159-6177).
ggccaggtgacctcataca

SEQ ID NO: 318976 - DNA, 19 bp, Homo sapiens
  siRNA target sequence for DSCAM (NM_001389.2,6161-6179).
ccaggtgacctcatacatt

SEQ ID NO: 318977 - DNA, 19 bp, Homo sapiens
  siRNA target sequence for DSCAM (NM_001389.2,6162-6180).
caggtgacctcatacattt

SEQ ID NO: 318978 - DNA, 19 bp, Homo sapiens
  siRNA target sequence for DSCAM (NM_001389.2,6176-6194).
catttgcctccatacctta

SEQ ID NO: 318979 - DNA, 19 bp, Homo sapiens
  siRNA target sequence for DSCAM (NM_001389.2,6416-6434).
ggacaggcagctaaaatga

SEQ ID NO: 318980 - DNA, 19 bp, Homo sapiens
  siRNA target sequence for DSCAM (NM_001389.2,6435-6453).
gcagctcccaagaatcact

SEQ ID NO: 318981 - DNA, 19 bp, Homo sapiens
  siRNA target sequence for DSCAM (NM_001389.2,6488-6506).
ccttacgcaaaatcttaca

SEQ ID NO: 318982 - DNA, 19 bp, Homo sapiens
  siRNA target sequence for E48 (NM_003695.1,100-118).
gcaactgcaagcattctgt

SEQ ID NO: 318983 - DNA, 19 bp, Homo sapiens
  siRNA target sequence for EFNB1 (NM_004429.3,939-957).
ggtgatctatccgaaaatt

SEQ ID NO: 318984 - DNA, 19 bp, Homo sapiens
  siRNA target sequence for EFNB1 (NM_004429.3,1078-1096).
gtgttggtcacctgcaata

SEQ ID NO: 318985 - DNA, 19 bp, Homo sapiens
  siRNA target sequence for EFNB1 (NM_004429.3,1249-1267).
cgcacacgcaccatgaaga

SEQ ID NO: 318986 - DNA, 19 bp, Homo sapiens
  siRNA target sequence for EFNB1 (NM_004429.3,1250-1268).
gcacacgcaccatgaagat

SEQ ID NO: 318987 - DNA, 19 bp, Homo sapiens
  siRNA target sequence for EFNB1 (NM_004429.3,1523-1541).
gtgccggttgcgtcatctt

SEQ ID NO: 318988 - DNA, 19 bp, Homo sapiens
  siRNA target sequence for EFNB1 (NM_004429.3,1708-1726).
cggactacagagaacaact

SEQ ID NO: 318989 - DNA, 19 bp, Homo sapiens
  siRNA target sequence for ESDN (NM_080927.2,601-619).
gagagtggaacccttacat

SEQ ID NO: 318990 - DNA, 19 bp, Homo sapiens
  siRNA target sequence for ESDN (NM_080927.2,611-629).
cccttacatccataaacta

SEQ ID NO: 318991 - DNA, 19 bp, Homo sapiens
  siRNA target sequence for ESDN (NM_080927.2,665-683).
gggagatccgtgtaaagat

SEQ ID NO: 318992 - DNA, 19 bp, Homo sapiens
  siRNA target sequence for ESDN (NM_080927.2,688-706).
gagagagttcgcatcaaat

SEQ ID NO: 318993 - DNA, 19 bp, Homo sapiens
  siRNA target sequence for ESDN (NM_080927.2,690-708).
gagagttcgcatcaaattt

SEQ ID NO: 318994 - DNA, 19 bp, Homo sapiens
  siRNA target sequence for ESDN (NM_080927.2,776-794).
gagtcagcagaactgaaat

SEQ ID NO: 318995 - DNA, 19 bp, Homo sapiens
  siRNA target sequence for ESDN (NM_080927.2,809-827).
gtctggggttgcaaatgaa

SEQ ID NO: 318996 - DNA, 19 bp, Homo sapiens
  siRNA target sequence for ESDN (NM_080927.2,814-832).
gggttgcaaatgaaccatt

SEQ ID NO: 318997 - DNA, 19 bp, Homo sapiens
  siRNA target sequence for ESDN (NM_080927.2,873-891).
gagtggaatccatgtttct

SEQ ID NO: 318998 - DNA, 19 bp, Homo sapiens
  siRNA target sequence for ESDN (NM_080927.2,886-904).
gtttctggacgcggatttt

SEQ ID NO: 318999 - DNA, 19 bp, Homo sapiens
  siRNA target sequence for ESDN (NM_080927.2,906-924).
ggcctcatactctgttata

SEQ ID NO: 319000 - DNA, 19 bp, Homo sapiens
  siRNA target sequence for ESDN (NM_080927.2,909-927).
ctcatactctgttatagat

SEQ ID NO: 319001 - DNA, 19 bp, Homo sapiens
  siRNA target sequence for ESDN (NM_080927.2,951-969).
ggacactgcatccaatttt

SEQ ID NO: 319002 - DNA, 19 bp, Homo sapiens
  siRNA target sequence for ESDN (NM_080927.2,952-970).
gacactgcatccaattttt

SEQ ID NO: 319003 - DNA, 19 bp, Homo sapiens
  siRNA target sequence for ESDN (NM_080927.2,976-994).
cctgagttcagtaagtact

SEQ ID NO: 319004 - DNA, 19 bp, Homo sapiens
  siRNA target sequence for ESDN (NM_080927.2,1026-1044).
gatatctggaacaattcct

SEQ ID NO: 319005 - DNA, 19 bp, Homo sapiens
  siRNA target sequence for ESDN (NM_080927.2,1034-1052).
gaacaattcctcatggata

SEQ ID NO: 319006 - DNA, 19 bp, Homo sapiens
  siRNA target sequence for ESDN (NM_080927.2,1090-1108).
gcaggagtagtgtcaaaca

SEQ ID NO: 319007 - DNA, 19 bp, Homo sapiens
  siRNA target sequence for ESDN (NM_080927.2,1117-1135).
ggccaaatcagtgttgtaa

SEQ ID NO: 319008 - DNA, 19 bp, Homo sapiens
  siRNA target sequence for ESDN (NM_080927.2,1119-1137).
ccaaatcagtgttgtaatt

SEQ ID NO: 319009 - DNA, 19 bp, Homo sapiens
  siRNA target sequence for ESDN (NM_080927.2,1149-1167).
cccctattatgaaagttct

SEQ ID NO: 319010 - DNA, 19 bp, Homo sapiens
  siRNA target sequence for ESDN (NM_080927.2,1150-1168).
ccctattatgaaagttctt

SEQ ID NO: 319011 - DNA, 19 bp, Homo sapiens
  siRNA target sequence for ESDN (NM_080927.2,1189-1207).
gtggtgggacacttatcta

SEQ ID NO: 319012 - DNA, 19 bp, Homo sapiens
  siRNA target sequence for ESDN (NM_080927.2,1194-1212).
gggacacttatctacaagt

SEQ ID NO: 319013 - DNA, 19 bp, Homo sapiens
  siRNA target sequence for ESDN (NM_080927.2,1198-1216).
cacttatctacaagtcttt

SEQ ID NO: 319014 - DNA, 19 bp, Homo sapiens
  siRNA target sequence for ESDN (NM_080927.2,1269-1287).
gatcgcggatcctcaaata

SEQ ID NO: 319015 - DNA, 19 bp, Homo sapiens
  siRNA target sequence for ESDN (NM_080927.2,1272-1290).
cgcggatcctcaaataaca

SEQ ID NO: 319016 - DNA, 19 bp, Homo sapiens
  siRNA target sequence for ESDN (NM_080927.2,1402-1420).
gaataccagtggttacaaa

SEQ ID NO: 319017 - DNA, 19 bp, Homo sapiens
  siRNA target sequence for ESDN (NM_080927.2,1472-1490).
ccatggtggagcacaatta

SEQ ID NO: 319018 - DNA, 19 bp, Homo sapiens
  siRNA target sequence for ESDN (NM_080927.2,1556-1574).
ctggtgtggagcaagataa

SEQ ID NO: 319019 - DNA, 19 bp, Homo sapiens
  siRNA target sequence for ESDN (NM_080927.2,1561-1579).
gtggagcaagataagatat

SEQ ID NO: 319020 - DNA, 19 bp, Homo sapiens
  siRNA target sequence for ESDN (NM_080927.2,1563-1581).
ggagcaagataagatattt

SEQ ID NO: 319021 - DNA, 19 bp, Homo sapiens
  siRNA target sequence for ESDN (NM_080927.2,1566-1584).
gcaagataagatatttcaa

SEQ ID NO: 319022 - DNA, 19 bp, Homo sapiens
  siRNA target sequence for ESDN (NM_080927.2,1603-1621).
caggatgtgcgtaataact

SEQ ID NO: 319023 - DNA, 19 bp, Homo sapiens
  siRNA target sequence for ESDN (NM_080927.2,1630-1648).
ccaattattgcacgtttta

SEQ ID NO: 319024 - DNA, 19 bp, Homo sapiens
  siRNA target sequence for ESDN (NM_080927.2,1631-1649).
caattattgcacgttttat

SEQ ID NO: 319025 - DNA, 19 bp, Homo sapiens
  siRNA target sequence for ESDN (NM_080927.2,1699-1717).
ctgctcggatgtcagttta

SEQ ID NO: 319026 - DNA, 19 bp, Homo sapiens
  siRNA target sequence for ESDN (NM_080927.2,1701-1719).
gctcggatgtcagtttatt

SEQ ID NO: 319027 - DNA, 19 bp, Homo sapiens
  siRNA target sequence for ESDN (NM_080927.2,1704-1722).
cggatgtcagtttattcct

SEQ ID NO: 319028 - DNA, 19 bp, Homo sapiens
  siRNA target sequence for ESDN (NM_080927.2,1705-1723).
ggatgtcagtttattccta

SEQ ID NO: 319029 - DNA, 19 bp, Homo sapiens
  siRNA target sequence for ESDN (NM_080927.2,1706-1724).
gatgtcagtttattcctaa

SEQ ID NO: 319030 - DNA, 19 bp, Homo sapiens
  siRNA target sequence for ESDN (NM_080927.2,1787-1805).
ctacagcccctccaaaaat

SEQ ID NO: 319031 - DNA, 19 bp, Homo sapiens
  siRNA target sequence for ESDN (NM_080927.2,1813-1831).
ggtcgtgccccaaaattta

SEQ ID NO: 319032 - DNA, 19 bp, Homo sapiens
  siRNA target sequence for ESDN (NM_080927.2,1846-1864).
cctcgcagtagcaatgaat

SEQ ID NO: 319033 - DNA, 19 bp, Homo sapiens
  siRNA target sequence for ESDN (NM_080927.2,1886-1904).
caactgccagtcctgatat

SEQ ID NO: 319034 - DNA, 19 bp, Homo sapiens
  siRNA target sequence for ESDN (NM_080927.2,1897-1915).
cctgatatcagaaatacta

SEQ ID NO: 319035 - DNA, 19 bp, Homo sapiens
  siRNA target sequence for ESDN (NM_080927.2,1946-1964).
cgctggctgcagttcttgt

SEQ ID NO: 319036 - DNA, 19 bp, Homo sapiens
  siRNA target sequence for ESDN (NM_080927.2,1980-1998).
ggtcctcactactctcatt

SEQ ID NO: 319037 - DNA, 19 bp, Homo sapiens
  siRNA target sequence for ESDN (NM_080927.2,1984-2002).
ctcactactctcattctca

SEQ ID NO: 319038 - DNA, 19 bp, Homo sapiens
  siRNA target sequence for ESDN (NM_080927.2,1986-2004).
cactactctcattctcata

SEQ ID NO: 319039 - DNA, 19 bp, Homo sapiens
  siRNA target sequence for ESDN (NM_080927.2,1988-2006).
ctactctcattctcatatt

SEQ ID NO: 319040 - DNA, 19 bp, Homo sapiens
  siRNA target sequence for ESDN (NM_080927.2,2050-2068).
ggcacctatgacttacctt

SEQ ID NO: 319041 - DNA, 19 bp, Homo sapiens
  siRNA target sequence for ESDN (NM_080927.2,2156-2174).
gcagcagcgaagttaatca

SEQ ID NO: 319042 - DNA, 19 bp, Homo sapiens
  siRNA target sequence for ESDN (NM_080927.2,2232-2250).
gccactggtaggaggaatt

SEQ ID NO: 319043 - DNA, 19 bp, Homo sapiens
  siRNA target sequence for ESDN (NM_080927.2,2251-2269).
gttggtacacttcatcaaa

SEQ ID NO: 319044 - DNA, 19 bp, Homo sapiens
  siRNA target sequence for ESDN (NM_080927.2,2254-2272).
ggtacacttcatcaaagat

SEQ ID NO: 319045 - DNA, 19 bp, Homo sapiens
  siRNA target sequence for ESDN (NM_080927.2,2263-2281).
catcaaagatctaccttta

SEQ ID NO: 319046 - DNA, 19 bp, Homo sapiens
  siRNA target sequence for ESDN (NM_080927.2,2314-2332).
gacctagatccttacaact

SEQ ID NO: 319047 - DNA, 19 bp, Homo sapiens
  siRNA target sequence for ESDN (NM_080927.2,2333-2351).
caccagggcaggaagttta

SEQ ID NO: 319048 - DNA, 19 bp, Homo sapiens
  siRNA target sequence for ESDN (NM_080927.2,2362-2380).
gctgaaccactcccaatta

SEQ ID NO: 319049 - DNA, 19 bp, Homo sapiens
  siRNA target sequence for ESDN (NM_080927.2,2424-2442).
gcaccccacaacttcagtt

SEQ ID NO: 319050 - DNA, 19 bp, Homo sapiens
  siRNA target sequence for ESDN (NM_080927.2,2489-2507).
ccccactagtgggaactta

SEQ ID NO: 319051 - DNA, 19 bp, Homo sapiens
  siRNA target sequence for ESDN (NM_080927.2,2491-2509).
ccactagtgggaacttaca

SEQ ID NO: 319052 - DNA, 19 bp, Homo sapiens
  siRNA target sequence for ESDN (NM_080927.2,2492-2510).
cactagtgggaacttacaa

SEQ ID NO: 319053 - DNA, 19 bp, Homo sapiens
  siRNA target sequence for ESDN (NM_080927.2,2545-2563).
gcccaggcccagtatgata

SEQ ID NO: 319054 - DNA, 19 bp, Homo sapiens
  siRNA target sequence for ESDN (NM_080927.2,2591-2609).
ctgccccagacgaattggt

SEQ ID NO: 319055 - DNA, 19 bp, Homo sapiens
  siRNA target sequence for FLOT2 (NM_004475.1,161-179).
cggccgagggggtagcttt

SEQ ID NO: 319056 - DNA, 19 bp, Homo sapiens
  siRNA target sequence for FLOT2 (NM_004475.1,162-180).
ggccgagggggtagcttta

SEQ ID NO: 319057 - DNA, 19 bp, Homo sapiens
  siRNA target sequence for FLOT2 (NM_004475.1,163-181).
gccgagggggtagctttaa

SEQ ID NO: 319058 - DNA, 19 bp, Homo sapiens
  siRNA target sequence for FLOT2 (NM_004475.1,193-211).
gtcgcccaggtgaagatca

SEQ ID NO: 319059 - DNA, 19 bp, Homo sapiens
  siRNA target sequence for FLOT2 (NM_004475.1,246-264).
gcagtttctgggtaagaat

SEQ ID NO: 319060 - DNA, 19 bp, Homo sapiens
  siRNA target sequence for FLOT2 (NM_004475.1,406-424).
ggccgcatgggcattgaga

SEQ ID NO: 319061 - DNA, 19 bp, Homo sapiens
  siRNA target sequence for FLOT2 (NM_004475.1,454-472).
gacaaagtggactatctga

SEQ ID NO: 319062 - DNA, 19 bp, Homo sapiens
  siRNA target sequence for FLOT2 (NM_004475.1,629-647).
gagccttcgagctgcaaaa

SEQ ID NO: 319063 - DNA, 19 bp, Homo sapiens
  siRNA target sequence for FLOT2 (NM_004475.1,659-677).
gtgaggaggttaacatcaa

SEQ ID NO: 319064 - DNA, 19 bp, Homo sapiens
  siRNA target sequence for FLOT2 (NM_004475.1,759-777).
ggttgtgcagcgcaagaaa

SEQ ID NO: 319065 - DNA, 19 bp, Homo sapiens
  siRNA target sequence for FLOT2 (NM_004475.1,1106-1124).
ccaaggtcgatgagattgt

SEQ ID NO: 319066 - DNA, 19 bp, Homo sapiens
  siRNA target sequence for FLOT2 (NM_004475.1,1208-1226).
caggcgtggacctgtctaa

SEQ ID NO: 319067 - DNA, 19 bp, Homo sapiens
  siRNA target sequence for FLOT2 (NM_004475.1,1211-1229).
gcgtggacctgtctaagat

SEQ ID NO: 319068 - DNA, 19 bp, Homo sapiens
  siRNA target sequence for FLOT2 (NM_004475.1,1212-1230).
cgtggacctgtctaagata

SEQ ID NO: 319069 - DNA, 19 bp, Homo sapiens
  siRNA target sequence for FLOT2 (NM_004475.1,1223-1241).
ctaagatacccctgatcaa

SEQ ID NO: 319070 - DNA, 19 bp, Homo sapiens
  siRNA target sequence for IGSF1 (NM_001555.1,152-170).
gatgagtctgggtatgaca

SEQ ID NO: 319071 - DNA, 19 bp, Homo sapiens
  siRNA target sequence for IGSF1 (NM_001555.1,424-442).
caaagcccagtaaagttct

SEQ ID NO: 319072 - DNA, 19 bp, Homo sapiens
  siRNA target sequence for IGSF1 (NM_001555.1,503-521).
cgctcttcctgggtgtaat

SEQ ID NO: 319073 - DNA, 19 bp, Homo sapiens
  siRNA target sequence for IGSF1 (NM_001555.1,507-525).
cttcctgggtgtaatgtta

SEQ ID NO: 319074 - DNA, 19 bp, Homo sapiens
  siRNA target sequence for IGSF1 (NM_001555.1,510-528).
cctgggtgtaatgttaaca

SEQ ID NO: 319075 - DNA, 19 bp, Homo sapiens
  siRNA target sequence for IGSF1 (NM_001555.1,569-587).
gtttaaagagggatatgca

SEQ ID NO: 319076 - DNA, 19 bp, Homo sapiens
  siRNA target sequence for IGSF1 (NM_001555.1,820-838).
ggtgccaagggccaatcta

SEQ ID NO: 319077 - DNA, 19 bp, Homo sapiens
  siRNA target sequence for IGSF1 (NM_001555.1,825-843).
caagggccaatctatggaa

SEQ ID NO: 319078 - DNA, 19 bp, Homo sapiens
  siRNA target sequence for IGSF1 (NM_001555.1,841-859).
gaatgacctttgctctaat

SEQ ID NO: 319079 - DNA, 19 bp, Homo sapiens
  siRNA target sequence for IGSF1 (NM_001555.1,853-871).
ctctaatgagggttgaaga

SEQ ID NO: 319080 - DNA, 19 bp, Homo sapiens
  siRNA target sequence for IGSF1 (NM_001555.1,952-970).
ctggacattacctctgttt

SEQ ID NO: 319081 - DNA, 19 bp, Homo sapiens
  siRNA target sequence for IGSF1 (NM_001555.1,974-992).
ctatgacgcatcatataga

SEQ ID NO: 319082 - DNA, 19 bp, Homo sapiens
  siRNA target sequence for IGSF1 (NM_001555.1,991-1009).
gaggttcactccttagtga

SEQ ID NO: 319083 - DNA, 19 bp, Homo sapiens
  siRNA target sequence for IGSF1 (NM_001555.1,1066-1084).
ccagtgctgtggtccaaat

SEQ ID NO: 319084 - DNA, 19 bp, Homo sapiens
  siRNA target sequence for IGSF1 (NM_001555.1,1080-1098).
caaatgggtcagaatgtga

SEQ ID NO: 319085 - DNA, 19 bp, Homo sapiens
  siRNA target sequence for IGSF1 (NM_001555.1,1158-1176).
gacaaaccacttcaatttt

SEQ ID NO: 319086 - DNA, 19 bp, Homo sapiens
  siRNA target sequence for IGSF1 (NM_001555.1,1247-1265).
ctatagctgccactatctt

SEQ ID NO: 319087 - DNA, 19 bp, Homo sapiens
  siRNA target sequence for IGSF1 (NM_001555.1,1311-1329).
gagcttatggttgtagata

SEQ ID NO: 319088 - DNA, 19 bp, Homo sapiens
  siRNA target sequence for IGSF1 (NM_001555.1,1394-1412).
ccttcagtgccgagtatct

SEQ ID NO: 319089 - DNA, 19 bp, Homo sapiens
  siRNA target sequence for IGSF1 (NM_001555.1,1411-1429).
ctcatccagtactggaatt

SEQ ID NO: 319090 - DNA, 19 bp, Homo sapiens
  siRNA target sequence for IGSF1 (NM_001555.1,1473-1491).
gtaaacggagacttcatca

SEQ ID NO: 319091 - DNA, 19 bp, Homo sapiens
  siRNA target sequence for IGSF1 (NM_001555.1,1512-1530).
ggcacagggacctacagtt

SEQ ID NO: 319092 - DNA, 19 bp, Homo sapiens
  siRNA target sequence for IGSF1 (NM_001555.1,1540-1558).
gcgtagagacacatcctaa

SEQ ID NO: 319093 - DNA, 19 bp, Homo sapiens
  siRNA target sequence for IGSF1 (NM_001555.1,1606-1624).
gctatctcacctggaatta

SEQ ID NO: 319094 - DNA, 19 bp, Homo sapiens
  siRNA target sequence for IGSF1 (NM_001555.1,1616-1634).
ctggaattacgttctgaat

SEQ ID NO: 319095 - DNA, 19 bp, Homo sapiens
  siRNA target sequence for IGSF1 (NM_001555.1,1638-1656).
gctatcaggttgtctctaa

SEQ ID NO: 319096 - DNA, 19 bp, Homo sapiens
  siRNA target sequence for IGSF1 (NM_001555.1,1639-1657).
ctatcaggttgtctctaat

SEQ ID NO: 319097 - DNA, 19 bp, Homo sapiens
  siRNA target sequence for IGSF1 (NM_001555.1,1683-1701).
gtagtgctgtggataaggt

SEQ ID NO: 319098 - DNA, 19 bp, Homo sapiens
  siRNA target sequence for IGSF1 (NM_001555.1,1802-1820).
gtgcaatggggtattgata

SEQ ID NO: 319099 - DNA, 19 bp, Homo sapiens
  siRNA target sequence for IGSF1 (NM_001555.1,1804-1822).
gcaatggggtattgataga

SEQ ID NO: 319100 - DNA, 19 bp, Homo sapiens
  siRNA target sequence for IGSF1 (NM_001555.1,1862-1880).
gtgggcagagaccaacttt

SEQ ID NO: 319101 - DNA, 19 bp, Homo sapiens
  siRNA target sequence for IGSF1 (NM_001555.1,1930-1948).
gctcaactaaggagtttgt

SEQ ID NO: 319102 - DNA, 19 bp, Homo sapiens
  siRNA target sequence for IGSF1 (NM_001555.1,2329-2347).
gccgcactcacactgaaaa

SEQ ID NO: 319103 - DNA, 19 bp, Homo sapiens
  siRNA target sequence for IGSF1 (NM_001555.1,2330-2348).
ccgcactcacactgaaaaa

SEQ ID NO: 319104 - DNA, 19 bp, Homo sapiens
  siRNA target sequence for IGSF1 (NM_001555.1,2379-2397).
ccgctggagcttgtcataa

SEQ ID NO: 319105 - DNA, 19 bp, Homo sapiens
  siRNA target sequence for IGSF1 (NM_001555.1,2409-2427).
cctaagcccttcttcaaga

SEQ ID NO: 319106 - DNA, 19 bp, Homo sapiens
  siRNA target sequence for IGSF1 (NM_001555.1,2454-2472).
ggtgcccgagtgactttca

SEQ ID NO: 319107 - DNA, 19 bp, Homo sapiens
  siRNA target sequence for IGSF1 (NM_001555.1,2455-2473).
gtgcccgagtgactttcaa

SEQ ID NO: 319108 - DNA, 19 bp, Homo sapiens
  siRNA target sequence for IGSF1 (NM_001555.1,2489-2507).
ccagcatatgagctttatt

SEQ ID NO: 319109 - DNA, 19 bp, Homo sapiens
  siRNA target sequence for IGSF1 (NM_001555.1,2517-2535).
gatggaagtgaaatagcat

SEQ ID NO: 319110 - DNA, 19 bp, Homo sapiens
  siRNA target sequence for IGSF1 (NM_001555.1,2564-2582).
ggccagtgcagctcacttt

SEQ ID NO: 319111 - DNA, 19 bp, Homo sapiens
  siRNA target sequence for IGSF1 (NM_001555.1,2623-2641).
gctgccgatattatgactt

SEQ ID NO: 319112 - DNA, 19 bp, Homo sapiens
  siRNA target sequence for IGSF1 (NM_001555.1,2624-2642).
ctgccgatattatgacttt

SEQ ID NO: 319113 - DNA, 19 bp, Homo sapiens
  siRNA target sequence for IGSF1 (NM_001555.1,2627-2645).
ccgatattatgacttttct

SEQ ID NO: 319114 - DNA, 19 bp, Homo sapiens
  siRNA target sequence for IGSF1 (NM_001555.1,2628-2646).
cgatattatgacttttcta

SEQ ID NO: 319115 - DNA, 19 bp, Homo sapiens
  siRNA target sequence for IGSF1 (NM_001555.1,2811-2829).
gcccatgttcccttacagt

SEQ ID NO: 319116 - DNA, 19 bp, Homo sapiens
  siRNA target sequence for IGSF1 (NM_001555.1,2892-2910).
gggaactatagctgtatct

SEQ ID NO: 319117 - DNA, 19 bp, Homo sapiens
  siRNA target sequence for IGSF1 (NM_001555.1,2897-2915).
ctatagctgtatctactat

SEQ ID NO: 319118 - DNA, 19 bp, Homo sapiens
  siRNA target sequence for IGSF1 (NM_001555.1,2927-2945).
gtcaaacagggggtcatat

SEQ ID NO: 319119 - DNA, 19 bp, Homo sapiens
  siRNA target sequence for IGSF1 (NM_001555.1,2929-2947).
caaacagggggtcatatct

SEQ ID NO: 319120 - DNA, 19 bp, Homo sapiens
  siRNA target sequence for IGSF1 (NM_001555.1,2935-2953).
gggggtcatatctcagtat

SEQ ID NO: 319121 - DNA, 19 bp, Homo sapiens
  siRNA target sequence for IGSF1 (NM_001555.1,2984-3002).
ccctaagccatggttgttt

SEQ ID NO: 319122 - DNA, 19 bp, Homo sapiens
  siRNA target sequence for IGSF1 (NM_001555.1,3026-3044).
catggggcagaatgttact

SEQ ID NO: 319123 - DNA, 19 bp, Homo sapiens
  siRNA target sequence for IGSF1 (NM_001555.1,3061-3079).
cggtccatggagtaggata

SEQ ID NO: 319124 - DNA, 19 bp, Homo sapiens
  siRNA target sequence for IGSF1 (NM_001555.1,3065-3083).
ccatggagtaggatacatt

SEQ ID NO: 319125 - DNA, 19 bp, Homo sapiens
  siRNA target sequence for IGSF1 (NM_001555.1,3076-3094).
gatacattctgcacaaaga

SEQ ID NO: 319126 - DNA, 19 bp, Homo sapiens
  siRNA target sequence for IGSF1 (NM_001555.1,3119-3137).
ctggggatccaccagtaat

SEQ ID NO: 319127 - DNA, 19 bp, Homo sapiens
  siRNA target sequence for IGSF1 (NM_001555.1,3149-3167).
ccccatcaccaatatatct

SEQ ID NO: 319128 - DNA, 19 bp, Homo sapiens
  siRNA target sequence for IGSF1 (NM_001555.1,3204-3222).
cctgactggaccagttcta

SEQ ID NO: 319129 - DNA, 19 bp, Homo sapiens
  siRNA target sequence for IGSF1 (NM_001555.1,3207-3225).
gactggaccagttctatca

SEQ ID NO: 319130 - DNA, 19 bp, Homo sapiens
  siRNA target sequence for IGSF1 (NM_001555.1,3211-3229).
ggaccagttctatcaagat

SEQ ID NO: 319131 - DNA, 19 bp, Homo sapiens
  siRNA target sequence for IGSF1 (NM_001555.1,3212-3230).
gaccagttctatcaagata

SEQ ID NO: 319132 - DNA, 19 bp, Homo sapiens
  siRNA target sequence for IGSF1 (NM_001555.1,3214-3232).
ccagttctatcaagataca

SEQ ID NO: 319133 - DNA, 19 bp, Homo sapiens
  siRNA target sequence for IGSF1 (NM_001555.1,3272-3290).
ccccaaacccagcctatta

SEQ ID NO: 319134 - DNA, 19 bp, Homo sapiens
  siRNA target sequence for IGSF1 (NM_001555.1,3312-3330).
gcccctggcgaaaatatga

SEQ ID NO: 319135 - DNA, 19 bp, Homo sapiens
  siRNA target sequence for IGSF1 (NM_001555.1,3348-3366).
gaactgccagactcaacat

SEQ ID NO: 319136 - DNA, 19 bp, Homo sapiens
  siRNA target sequence for IGSF1 (NM_001555.1,3468-3486).
gggatctatagctgtgttt

SEQ ID NO: 319137 - DNA, 19 bp, Homo sapiens
  siRNA target sequence for IGSF1 (NM_001555.1,3583-3601).
ggcccagcaccatgttcaa

SEQ ID NO: 319138 - DNA, 19 bp, Homo sapiens
  siRNA target sequence for IGSF1 (NM_001555.1,3586-3604).
ccagcaccatgttcaagtt

SEQ ID NO: 319139 - DNA, 19 bp, Homo sapiens
  siRNA target sequence for IGSF1 (NM_001555.1,3678-3696).
gaagcacctcagcagtttt

SEQ ID NO: 319140 - DNA, 19 bp, Homo sapiens
  siRNA target sequence for IGSF1 (NM_001555.1,3771-3789).
caggcctaccctgatatct

SEQ ID NO: 319141 - DNA, 19 bp, Homo sapiens
  siRNA target sequence for IGSF1 (NM_001555.1,3848-3866).
gtgcactgtagggaacatt

SEQ ID NO: 319142 - DNA, 19 bp, Homo sapiens
  siRNA target sequence for IGSF1 (NM_001555.1,4032-4050).
gccaattctccttcatcaa

SEQ ID NO: 319143 - DNA, 19 bp, Homo sapiens
  siRNA target sequence for IGSF1 (NM_001555.1,4045-4063).
catcaacctctcagagaat

SEQ ID NO: 319144 - DNA, 19 bp, Homo sapiens
  siRNA target sequence for IGSF1 (NM_001555.1,4070-4088).
ggaactgcccgttccaata

SEQ ID NO: 319145 - DNA, 19 bp, Homo sapiens
  siRNA target sequence for IGSF1 (NM_001555.1,4071-4089).
gaactgcccgttccaatat

SEQ ID NO: 319146 - DNA, 19 bp, Homo sapiens
  siRNA target sequence for L1CAM (NM_000425.2,314-332).
gggcaacaacagcaacttt

SEQ ID NO: 319147 - DNA, 19 bp, Homo sapiens
  siRNA target sequence for L1CAM (NM_000425.2,357-375).
cgctgctttgccagcaata

SEQ ID NO: 319148 - DNA, 19 bp, Homo sapiens
  siRNA target sequence for L1CAM (NM_000425.2,513-531).
gagcctctccggatctact

SEQ ID NO: 319149 - DNA, 19 bp, Homo sapiens
  siRNA target sequence for L1CAM (NM_000425.2,541-559).
gcaagatcttgcacatcaa

SEQ ID NO: 319150 - DNA, 19 bp, Homo sapiens
  siRNA target sequence for L1CAM (NM_000425.2,984-1002).
cggcatgcgtactatgtca

SEQ ID NO: 319151 - DNA, 19 bp, Homo sapiens
  siRNA target sequence for L1CAM (NM_000425.2,1034-1052).
gccccagagccatctatat

SEQ ID NO: 319152 - DNA, 19 bp, Homo sapiens
  siRNA target sequence for L1CAM (NM_000425.2,1216-1234).
caatggtgacccaatgtga

SEQ ID NO: 319153 - DNA, 19 bp, Homo sapiens
  siRNA target sequence for L1CAM (NM_000425.2,1491-1509).
gacaccggacgctacttct

SEQ ID NO: 319154 - DNA, 19 bp, Homo sapiens
  siRNA target sequence for L1CAM (NM_000425.2,1515-1533).
gctgccaatgaccaaaaca

SEQ ID NO: 319155 - DNA, 19 bp, Homo sapiens
  siRNA target sequence for L1CAM (NM_000425.2,1547-1565).
ggctaacctgaaggttaaa

SEQ ID NO: 319156 - DNA, 19 bp, Homo sapiens
  siRNA target sequence for L1CAM (NM_000425.2,1941-1959).
cacaatgcccccattgaga

SEQ ID NO: 319157 - DNA, 19 bp, Homo sapiens
  siRNA target sequence for L1CAM (NM_000425.2,1943-1961).
caatgcccccattgagaaa

SEQ ID NO: 319158 - DNA, 19 bp, Homo sapiens
  siRNA target sequence for L1CAM (NM_000425.2,1948-1966).
cccccattgagaaatatga

SEQ ID NO: 319159 - DNA, 19 bp, Homo sapiens
  siRNA target sequence for L1CAM (NM_000425.2,2548-2566).
gccacctccgcggatacaa

SEQ ID NO: 319160 - DNA, 19 bp, Homo sapiens
  siRNA target sequence for L1CAM (NM_000425.2,2549-2567).
ccacctccgcggatacaat

SEQ ID NO: 319161 - DNA, 19 bp, Homo sapiens
  siRNA target sequence for L1CAM (NM_000425.2,2553-2571).
ctccgcggatacaatgtga

SEQ ID NO: 319162 - DNA, 19 bp, Homo sapiens
  siRNA target sequence for L1CAM (NM_000425.2,3091-3109).
cagccacagcgggtgaaaa

SEQ ID NO: 319163 - DNA, 19 bp, Homo sapiens
  siRNA target sequence for L1CAM (NM_000425.2,3093-3111).
gccacagcgggtgaaaact

SEQ ID NO: 319164 - DNA, 19 bp, Homo sapiens
  siRNA target sequence for L1CAM (NM_000425.2,3094-3112).
ccacagcgggtgaaaacta

SEQ ID NO: 319165 - DNA, 19 bp, Homo sapiens
  siRNA target sequence for L1CAM (NM_000425.2,3138-3156).
gagggccagtgcaacttca

SEQ ID NO: 319166 - DNA, 19 bp, Homo sapiens
  siRNA target sequence for L1CAM (NM_000425.2,3205-3223).
ccctttcgccacagtatgt

SEQ ID NO: 319167 - DNA, 19 bp, Homo sapiens
  siRNA target sequence for L1CAM (NM_000425.2,3275-3293).
ctacgagatccacttgttt

SEQ ID NO: 319168 - DNA, 19 bp, Homo sapiens
  siRNA target sequence for L1CAM (NM_000425.2,3301-3319).
ggatgttccggcaccaaat

SEQ ID NO: 319169 - DNA, 19 bp, Homo sapiens
  siRNA target sequence for L1CAM (NM_000425.2,3512-3530).
ggcccgaccgatgaaagat

SEQ ID NO: 319170 - DNA, 19 bp, Homo sapiens
  siRNA target sequence for L1CAM (NM_000425.2,3514-3532).
cccgaccgatgaaagatga

SEQ ID NO: 319171 - DNA, 19 bp, Homo sapiens
  siRNA target sequence for L1CAM (NM_000425.2,3601-3619).
cgctcaacggggacatcaa

SEQ ID NO: 319172 - DNA, 19 bp, Homo sapiens
  siRNA target sequence for L1CAM (NM_000425.2,3635-3653).
cgacagcctggccgattat

SEQ ID NO: 319173 - DNA, 19 bp, Homo sapiens
  siRNA target sequence for L1CAM (NM_000425.2,3655-3673).
ggggcagcgtggatgttca

SEQ ID NO: 319174 - DNA, 19 bp, Homo sapiens
  siRNA target sequence for L1CAM (NM_000425.2,3658-3676).
gcagcgtggatgttcagtt

SEQ ID NO: 319175 - DNA, 19 bp, Homo sapiens
  siRNA target sequence for L1CAM (NM_000425.2,3661-3679).
gcgtggatgttcagttcaa

SEQ ID NO: 319176 - DNA, 19 bp, Homo sapiens
  siRNA target sequence for L1CAM (NM_000425.2,3680-3698).
cgaggatggttcgttcatt

SEQ ID NO: 319177 - DNA, 19 bp, Homo sapiens
  siRNA target sequence for LSAMP (NM_002338.1,83-101).
ctgttcgcagcgtggattt

SEQ ID NO: 319178 - DNA, 19 bp, Homo sapiens
  siRNA target sequence for LSAMP (NM_002338.1,85-103).
gttcgcagcgtggatttta

SEQ ID NO: 319179 - DNA, 19 bp, Homo sapiens
  siRNA target sequence for LSAMP (NM_002338.1,106-124).
cgaggcacggacaacatca

SEQ ID NO: 319180 - DNA, 19 bp, Homo sapiens
  siRNA target sequence for LSAMP (NM_002338.1,195-213).
gaaccgttctggcatcatt

SEQ ID NO: 319181 - DNA, 19 bp, Homo sapiens
  siRNA target sequence for LSAMP (NM_002338.1,198-216).
ccgttctggcatcattttt

SEQ ID NO: 319182 - DNA, 19 bp, Homo sapiens
  siRNA target sequence for LSAMP (NM_002338.1,265-283).
cgccattctctggaataca

SEQ ID NO: 319183 - DNA, 19 bp, Homo sapiens
  siRNA target sequence for LSAMP (NM_002338.1,385-403).
caagtcccaccaaagatct

SEQ ID NO: 319184 - DNA, 19 bp, Homo sapiens
  siRNA target sequence for LSAMP (NM_002338.1,470-488).
gccgtcctgaacctgttat

SEQ ID NO: 319185 - DNA, 19 bp, Homo sapiens
  siRNA target sequence for LSAMP (NM_002338.1,509-527).
caactggaagggaatttga

SEQ ID NO: 319186 - DNA, 19 bp, Homo sapiens
  siRNA target sequence for LSAMP (NM_002338.1,566-584).
gggagcagtcaggcaaata

SEQ ID NO: 319187 - DNA, 19 bp, Homo sapiens
  siRNA target sequence for LSAMP (NM_002338.1,611-629).
cctcggcggatgtcaaaca

SEQ ID NO: 319188 - DNA, 19 bp, Homo sapiens
  siRNA target sequence for LSAMP (NM_002338.1,612-630).
ctcggcggatgtcaaacaa

SEQ ID NO: 319189 - DNA, 19 bp, Homo sapiens
  siRNA target sequence for LSAMP (NM_002338.1,614-632).
cggcggatgtcaaacaagt

SEQ ID NO: 319190 - DNA, 19 bp, Homo sapiens
  siRNA target sequence for LSAMP (NM_002338.1,617-635).
cggatgtcaaacaagtcaa

SEQ ID NO: 319191 - DNA, 19 bp, Homo sapiens
  siRNA target sequence for LSAMP (NM_002338.1,652-670).
cctcccactatcacagaat

SEQ ID NO: 319192 - DNA, 19 bp, Homo sapiens
  siRNA target sequence for LSAMP (NM_002338.1,656-674).
ccactatcacagaatccaa

SEQ ID NO: 319193 - DNA, 19 bp, Homo sapiens
  siRNA target sequence for LSAMP (NM_002338.1,697-715).
cgacaagcttcactcaaat

SEQ ID NO: 319194 - DNA, 19 bp, Homo sapiens
  siRNA target sequence for LSAMP (NM_002338.1,756-774).
ccgggatgacactaggata

SEQ ID NO: 319195 - DNA, 19 bp, Homo sapiens
  siRNA target sequence for LSAMP (NM_002338.1,757-775).
cgggatgacactaggataa

SEQ ID NO: 319196 - DNA, 19 bp, Homo sapiens
  siRNA target sequence for LSAMP (NM_002338.1,758-776).
gggatgacactaggataaa

SEQ ID NO: 319197 - DNA, 19 bp, Homo sapiens
  siRNA target sequence for LSAMP (NM_002338.1,759-777).
ggatgacactaggataaat

SEQ ID NO: 319198 - DNA, 19 bp, Homo sapiens
  siRNA target sequence for LSAMP (NM_002338.1,925-943).
gggtcggtgagaggaataa

SEQ ID NO: 319199 - DNA, 19 bp, Homo sapiens
  siRNA target sequence for LSAMP (NM_002338.1,926-944).
ggtcggtgagaggaataaa

SEQ ID NO: 319200 - DNA, 19 bp, Homo sapiens
  siRNA target sequence for LSAMP (NM_002338.1,927-945).
gtcggtgagaggaataaat

SEQ ID NO: 319201 - DNA, 19 bp, Homo sapiens
  siRNA target sequence for MCAM (NM_006500.1,200-218).
ccatgtcgactggttttct

SEQ ID NO: 319202 - DNA, 19 bp, Homo sapiens
  siRNA target sequence for MCAM (NM_006500.1,351-369).
caagacgagcgcatcttct

SEQ ID NO: 319203 - DNA, 19 bp, Homo sapiens
  siRNA target sequence for MCAM (NM_006500.1,410-428).
ccagctccgcgtctacaaa

SEQ ID NO: 319204 - DNA, 19 bp, Homo sapiens
  siRNA target sequence for MCAM (NM_006500.1,615-633).
gagtcgagtggtttgtaca

SEQ ID NO: 319205 - DNA, 19 bp, Homo sapiens
  siRNA target sequence for MCAM (NM_006500.1,634-652).
ccttgcagagtattctgaa

SEQ ID NO: 319206 - DNA, 19 bp, Homo sapiens
  siRNA target sequence for MCAM (NM_006500.1,659-677).
gctggttaaagaagacaaa

SEQ ID NO: 319207 - DNA, 19 bp, Homo sapiens
  siRNA target sequence for MCAM (NM_006500.1,819-837).
ggggaccgcgtggaaatca

SEQ ID NO: 319208 - DNA, 19 bp, Homo sapiens
  siRNA target sequence for MCAM (NM_006500.1,968-986).
cagtgggcgctatgaatgt

SEQ ID NO: 319209 - DNA, 19 bp, Homo sapiens
  siRNA target sequence for MCAM (NM_006500.1,970-988).
gtgggcgctatgaatgtca

SEQ ID NO: 319210 - DNA, 19 bp, Homo sapiens
  siRNA target sequence for MCAM (NM_006500.1,1427-1445).
cggcacggcaagtgaacaa

SEQ ID NO: 319211 - DNA, 19 bp, Homo sapiens
  siRNA target sequence for MCAM (NM_006500.1,1502-1520).
gttggagacaggtgttgaa

SEQ ID NO: 319212 - DNA, 19 bp, Homo sapiens
  siRNA target sequence for MCAM (NM_006500.1,1531-1549).
ccaacgacctgggcaaaaa

SEQ ID NO: 319213 - DNA, 19 bp, Homo sapiens
  siRNA target sequence for MCAM (NM_006500.1,1749-1767).
ctgggcgctgtcctctatt

SEQ ID NO: 319214 - DNA, 19 bp, Homo sapiens
  siRNA target sequence for MCAM (NM_006500.1,1753-1771).
gcgctgtcctctatttcct

SEQ ID NO: 319215 - DNA, 19 bp, Homo sapiens
  siRNA target sequence for MCAM (NM_006500.1,1844-1862).
cgaacttgtagttgaagtt

SEQ ID NO: 319216 - DNA, 19 bp, Homo sapiens
  siRNA target sequence for MCAM (NM_006500.1,1854-1872).
gttgaagttaagtcagata

SEQ ID NO: 319217 - DNA, 19 bp, Homo sapiens
  siRNA target sequence for MFGE8 (NM_005928.1,153-171).
ctgccacaacggtggttta

SEQ ID NO: 319218 - DNA, 19 bp, Homo sapiens
  siRNA target sequence for MFGE8 (NM_005928.1,166-184).
ggtttatgcgaggagattt

SEQ ID NO: 319219 - DNA, 19 bp, Homo sapiens
  siRNA target sequence for MFGE8 (NM_005928.1,416-434).
ccagcagcaatgacgataa

SEQ ID NO: 319220 - DNA, 19 bp, Homo sapiens
  siRNA target sequence for MFGE8 (NM_005928.1,548-566).
gccttaatggacacgaatt

SEQ ID NO: 319221 - DNA, 19 bp, Homo sapiens
  siRNA target sequence for MFGE8 (NM_005928.1,556-574).
ggacacgaattcgatttca

SEQ ID NO: 319222 - DNA, 19 bp, Homo sapiens
  siRNA target sequence for MFGE8 (NM_005928.1,557-575).
gacacgaattcgatttcat

SEQ ID NO: 319223 - DNA, 19 bp, Homo sapiens
  siRNA target sequence for MFGE8 (NM_005928.1,567-585).
cgatttcatccatgatgtt

SEQ ID NO: 319224 - DNA, 19 bp, Homo sapiens
  siRNA target sequence for MFGE8 (NM_005928.1,568-586).
gatttcatccatgatgtta

SEQ ID NO: 319225 - DNA, 19 bp, Homo sapiens
  siRNA target sequence for MFGE8 (NM_005928.1,607-625).
gtgggtaactggaacaaaa

SEQ ID NO: 319226 - DNA, 19 bp, Homo sapiens
  siRNA target sequence for MFGE8 (NM_005928.1,664-682).
gctcagtacgtgagattgt

SEQ ID NO: 319227 - DNA, 19 bp, Homo sapiens
  siRNA target sequence for MFGE8 (NM_005928.1,665-683).
ctcagtacgtgagattgta

SEQ ID NO: 319228 - DNA, 19 bp, Homo sapiens
  siRNA target sequence for MFGE8 (NM_005928.1,900-918).
ggggagctacggtaacgat

SEQ ID NO: 319229 - DNA, 19 bp, Homo sapiens
  siRNA target sequence for MFGE8 (NM_005928.1,1073-1091).
ctggcagcagtaagatctt

SEQ ID NO: 319230 - DNA, 19 bp, Homo sapiens
  siRNA target sequence for NINJ1 (NM_004148.2,286-304).
ccagcttcgccttctatgt

SEQ ID NO: 319231 - DNA, 19 bp, Homo sapiens
  siRNA target sequence for NINJ1 (NM_004148.2,375-393).
gtcaagtacgaccttaaca

SEQ ID NO: 319232 - DNA, 19 bp, Homo sapiens
  siRNA target sequence for NRXN1 (NM_004801.2,563-581).
gcaacaccacgctcttcat

SEQ ID NO: 319233 - DNA, 19 bp, Homo sapiens
  siRNA target sequence for NRXN1 (NM_004801.2,957-975).
cagccaagaagacaacaat

SEQ ID NO: 319234 - DNA, 19 bp, Homo sapiens
  siRNA target sequence for NRXN1 (NM_004801.2,959-977).
gccaagaagacaacaatgt

SEQ ID NO: 319235 - DNA, 19 bp, Homo sapiens
  siRNA target sequence for NRXN1 (NM_004801.2,983-1001).
gtctggcgcacctgatgat

SEQ ID NO: 319236 - DNA, 19 bp, Homo sapiens
  siRNA target sequence for NRXN1 (NM_004801.2,1044-1062).
cacgttcaaaggatctgaa

SEQ ID NO: 319237 - DNA, 19 bp, Homo sapiens
  siRNA target sequence for NRXN1 (NM_004801.2,1080-1098).
gtctcaaaaccccattcaa

SEQ ID NO: 319238 - DNA, 19 bp, Homo sapiens
  siRNA target sequence for NRXN1 (NM_004801.2,1163-1181).
ctgggaaatcggctgatta

SEQ ID NO: 319239 - DNA, 19 bp, Homo sapiens
  siRNA target sequence for NRXN1 (NM_004801.2,1166-1184).
ggaaatcggctgattatgt

SEQ ID NO: 319240 - DNA, 19 bp, Homo sapiens
  siRNA target sequence for NRXN1 (NM_004801.2,1173-1191).
ggctgattatgtcaatctt

SEQ ID NO: 319241 - DNA, 19 bp, Homo sapiens
  siRNA target sequence for NRXN1 (NM_004801.2,1260-1278).
gcctgtgaatggaaagttt

SEQ ID NO: 319242 - DNA, 19 bp, Homo sapiens
  siRNA target sequence for NRXN1 (NM_004801.2,1344-1362).
cgctatggtgacaatatca

SEQ ID NO: 319243 - DNA, 19 bp, Homo sapiens
  siRNA target sequence for NRXN1 (NM_004801.2,1346-1364).
ctatggtgacaatatcagt

SEQ ID NO: 319244 - DNA, 19 bp, Homo sapiens
  siRNA target sequence for NRXN1 (NM_004801.2,1386-1404).
gggctacacgcaagaagat

SEQ ID NO: 319245 - DNA, 19 bp, Homo sapiens
  siRNA target sequence for NRXN1 (NM_004801.2,1389-1407).
ctacacgcaagaagattat

SEQ ID NO: 319246 - DNA, 19 bp, Homo sapiens
  siRNA target sequence for NRXN1 (NM_004801.2,1394-1412).
cgcaagaagattataccat

SEQ ID NO: 319247 - DNA, 19 bp, Homo sapiens
  siRNA target sequence for NRXN1 (NM_004801.2,1469-1487).
cagggtcaccagtcagtaa

SEQ ID NO: 319248 - DNA, 19 bp, Homo sapiens
  siRNA target sequence for NRXN1 (NM_004801.2,1471-1489).
gggtcaccagtcagtaaca

SEQ ID NO: 319249 - DNA, 19 bp, Homo sapiens
  siRNA target sequence for NRXN1 (NM_004801.2,1472-1490).
ggtcaccagtcagtaacaa

SEQ ID NO: 319250 - DNA, 19 bp, Homo sapiens
  siRNA target sequence for NRXN1 (NM_004801.2,1477-1495).
ccagtcagtaacaacttta

SEQ ID NO: 319251 - DNA, 19 bp, Homo sapiens
  siRNA target sequence for NRXN1 (NM_004801.2,1478-1496).
cagtcagtaacaactttat

SEQ ID NO: 319252 - DNA, 19 bp, Homo sapiens
  siRNA target sequence for NRXN1 (NM_004801.2,1491-1509).
ctttatgggctgtctcaaa

SEQ ID NO: 319253 - DNA, 19 bp, Homo sapiens
  siRNA target sequence for NRXN1 (NM_004801.2,1531-1549).
gatgtgaggctggaattat

SEQ ID NO: 319254 - DNA, 19 bp, Homo sapiens
  siRNA target sequence for NRXN1 (NM_004801.2,1559-1577).
ccaagcaaggagatcctaa

SEQ ID NO: 319255 - DNA, 19 bp, Homo sapiens
  siRNA target sequence for NRXN1 (NM_004801.2,1588-1606).
catggagtggtggcattta

SEQ ID NO: 319256 - DNA, 19 bp, Homo sapiens
  siRNA target sequence for NRXN1 (NM_004801.2,1694-1712).
ctggctccatatcatttga

SEQ ID NO: 319257 - DNA, 19 bp, Homo sapiens
  siRNA target sequence for NRXN1 (NM_004801.2,1696-1714).
ggctccatatcatttgatt

SEQ ID NO: 319258 - DNA, 19 bp, Homo sapiens
  siRNA target sequence for NRXN1 (NM_004801.2,1728-1746).
gccaaatggcctcatctta

SEQ ID NO: 319259 - DNA, 19 bp, Homo sapiens
  siRNA target sequence for NRXN1 (NM_004801.2,1752-1770).
ccatggcaagccaagacat

SEQ ID NO: 319260 - DNA, 19 bp, Homo sapiens
  siRNA target sequence for NRXN1 (NM_004801.2,1761-1779).
gccaagacatcagaaagat

SEQ ID NO: 319261 - DNA, 19 bp, Homo sapiens
  siRNA target sequence for NRXN1 (NM_004801.2,1857-1875).
catggggtcaggtactata

SEQ ID NO: 319262 - DNA, 19 bp, Homo sapiens
  siRNA target sequence for NRXN1 (NM_004801.2,1860-1878).
ggggtcaggtactataaaa

SEQ ID NO: 319263 - DNA, 19 bp, Homo sapiens
  siRNA target sequence for NRXN1 (NM_004801.2,1941-1959).
cggacggtcaggtaccatt

SEQ ID NO: 319264 - DNA, 19 bp, Homo sapiens
  siRNA target sequence for NRXN1 (NM_004801.2,1942-1960).
ggacggtcaggtaccattt

SEQ ID NO: 319265 - DNA, 19 bp, Homo sapiens
  siRNA target sequence for NRXN1 (NM_004801.2,1946-1964).
ggtcaggtaccatttctgt

SEQ ID NO: 319266 - DNA, 19 bp, Homo sapiens
  siRNA target sequence for NRXN1 (NM_004801.2,2117-2135).
gctgcatcagggatttgtt

SEQ ID NO: 319267 - DNA, 19 bp, Homo sapiens
  siRNA target sequence for NRXN1 (NM_004801.2,2120-2138).
gcatcagggatttgttcat

SEQ ID NO: 319268 - DNA, 19 bp, Homo sapiens
  siRNA target sequence for NRXN1 (NM_004801.2,2160-2178).
ccggcaaatggctgaagtt

SEQ ID NO: 319269 - DNA, 19 bp, Homo sapiens
  siRNA target sequence for NRXN1 (NM_004801.2,2162-2180).
ggcaaatggctgaagttca

SEQ ID NO: 319270 - DNA, 19 bp, Homo sapiens
  siRNA target sequence for NRXN1 (NM_004801.2,2164-2182).
caaatggctgaagttcaaa

SEQ ID NO: 319271 - DNA, 19 bp, Homo sapiens
  siRNA target sequence for NRXN1 (NM_004801.2,2200-2218).
ccttcctgctcaaaggaaa

SEQ ID NO: 319272 - DNA, 19 bp, Homo sapiens
  siRNA target sequence for NRXN1 (NM_004801.2,2232-2250).
ccttagcaacccttgcaaa

SEQ ID NO: 319273 - DNA, 19 bp, Homo sapiens
  siRNA target sequence for NRXN1 (NM_004801.2,2233-2251).
cttagcaacccttgcaaaa

SEQ ID NO: 319274 - DNA, 19 bp, Homo sapiens
  siRNA target sequence for NRXN1 (NM_004801.2,2238-2256).
caacccttgcaaaaacaat

SEQ ID NO: 319275 - DNA, 19 bp, Homo sapiens
  siRNA target sequence for NRXN1 (NM_004801.2,2267-2285).
gggatgggtggaacagata

SEQ ID NO: 319276 - DNA, 19 bp, Homo sapiens
  siRNA target sequence for NRXN1 (NM_004801.2,2268-2286).
ggatgggtggaacagatat

SEQ ID NO: 319277 - DNA, 19 bp, Homo sapiens
  siRNA target sequence for NRXN1 (NM_004801.2,2272-2290).
gggtggaacagatatgtct

SEQ ID NO: 319278 - DNA, 19 bp, Homo sapiens
  siRNA target sequence for NRXN1 (NM_004801.2,2352-2370).
ctatgatgggagcatgttt

SEQ ID NO: 319279 - DNA, 19 bp, Homo sapiens
  siRNA target sequence for NRXN1 (NM_004801.2,2356-2374).
gatgggagcatgtttatga

SEQ ID NO: 319280 - DNA, 19 bp, Homo sapiens
  siRNA target sequence for NRXN1 (NM_004801.2,2383-2401).
ctccccgtagtcatgcata

SEQ ID NO: 319281 - DNA, 19 bp, Homo sapiens
  siRNA target sequence for NRXN1 (NM_004801.2,2430-2448).
ccgatcccagcgtgcatat

SEQ ID NO: 319282 - DNA, 19 bp, Homo sapiens
  siRNA target sequence for NRXN1 (NM_004801.2,2509-2527).
gcaggacgtgtgaaactga

SEQ ID NO: 319283 - DNA, 19 bp, Homo sapiens
  siRNA target sequence for NRXN1 (NM_004801.2,2520-2538).
gaaactgacggtcaatcta

SEQ ID NO: 319284 - DNA, 19 bp, Homo sapiens
  siRNA target sequence for NRXN1 (NM_004801.2,2526-2544).
gacggtcaatctagattgt

SEQ ID NO: 319285 - DNA, 19 bp, Homo sapiens
  siRNA target sequence for NRXN1 (NM_004801.2,2528-2546).
cggtcaatctagattgtat

SEQ ID NO: 319286 - DNA, 19 bp, Homo sapiens
  siRNA target sequence for NRXN1 (NM_004801.2,2530-2548).
gtcaatctagattgtatca

SEQ ID NO: 319287 - DNA, 19 bp, Homo sapiens
  siRNA target sequence for NRXN1 (NM_004801.2,2619-2637).
gcacacagtgcgtgtagtt

SEQ ID NO: 319288 - DNA, 19 bp, Homo sapiens
  siRNA target sequence for NRXN1 (NM_004801.2,2632-2650).
gtagttcggcgtggaaaaa

SEQ ID NO: 319289 - DNA, 19 bp, Homo sapiens
  siRNA target sequence for NRXN1 (NM_004801.2,2635-2653).
gttcggcgtggaaaaagtt

SEQ ID NO: 319290 - DNA, 19 bp, Homo sapiens
  siRNA target sequence for NRXN1 (NM_004801.2,2638-2656).
cggcgtggaaaaagtttaa

SEQ ID NO: 319291 - DNA, 19 bp, Homo sapiens
  siRNA target sequence for NRXN1 (NM_004801.2,2639-2657).
ggcgtggaaaaagtttaaa

SEQ ID NO: 319292 - DNA, 19 bp, Homo sapiens
  siRNA target sequence for NRXN1 (NM_004801.2,2711-2729).
ctaggctggagttccataa

SEQ ID NO: 319293 - DNA, 19 bp, Homo sapiens
  siRNA target sequence for NRXN1 (NM_004801.2,2748-2766).
cacagaacgacggtatctt

SEQ ID NO: 319294 - DNA, 19 bp, Homo sapiens
  siRNA target sequence for NRXN1 (NM_004801.2,2752-2770).
gaacgacggtatctttctt

SEQ ID NO: 319295 - DNA, 19 bp, Homo sapiens
  siRNA target sequence for NRXN1 (NM_004801.2,2799-2817).
gcagagcttgacatttaat

SEQ ID NO: 319296 - DNA, 19 bp, Homo sapiens
  siRNA target sequence for NRXN1 (NM_004801.2,2922-2940).
gaccaaatcgagctatgtt

SEQ ID NO: 319297 - DNA, 19 bp, Homo sapiens
  siRNA target sequence for NRXN1 (NM_004801.2,2999-3017).
catccctagatggattaat

SEQ ID NO: 319298 - DNA, 19 bp, Homo sapiens
  siRNA target sequence for NRXN1 (NM_004801.2,3064-3082).
gttaaagggtacttacatt

SEQ ID NO: 319299 - DNA, 19 bp, Homo sapiens
  siRNA target sequence for NRXN1 (NM_004801.2,3075-3093).
cttacattacgtgtttgat

SEQ ID NO: 319300 - DNA, 19 bp, Homo sapiens
  siRNA target sequence for NRXN1 (NM_004801.2,3136-3154).
cctctcaatgacaatcagt

SEQ ID NO: 319301 - DNA, 19 bp, Homo sapiens
  siRNA target sequence for NRXN1 (NM_004801.2,3153-3171).
gtggcacaacgtgatgata

SEQ ID NO: 319302 - DNA, 19 bp, Homo sapiens
  siRNA target sequence for NRXN1 (NM_004801.2,3156-3174).
gcacaacgtgatgatatca

SEQ ID NO: 319303 - DNA, 19 bp, Homo sapiens
  siRNA target sequence for NRXN1 (NM_004801.2,3157-3175).
cacaacgtgatgatatcaa

SEQ ID NO: 319304 - DNA, 19 bp, Homo sapiens
  siRNA target sequence for NRXN1 (NM_004801.2,3189-3207).
cctccacactgtaaagatt

SEQ ID NO: 319305 - DNA, 19 bp, Homo sapiens
  siRNA target sequence for NRXN1 (NM_004801.2,3236-3254).
ccggagccaggaacttaga

SEQ ID NO: 319306 - DNA, 19 bp, Homo sapiens
  siRNA target sequence for NRXN1 (NM_004801.2,3255-3273).
cctcaagagtgacttatat

SEQ ID NO: 319307 - DNA, 19 bp, Homo sapiens
  siRNA target sequence for NRXN1 (NM_004801.2,3261-3279).
gagtgacttatatatagga

SEQ ID NO: 319308 - DNA, 19 bp, Homo sapiens
  siRNA target sequence for NRXN1 (NM_004801.2,3305-3323).
ccttaccaaaacttgtaca

SEQ ID NO: 319309 - DNA, 19 bp, Homo sapiens
  siRNA target sequence for NRXN1 (NM_004801.2,3306-3324).
cttaccaaaacttgtacat

SEQ ID NO: 319310 - DNA, 19 bp, Homo sapiens
  siRNA target sequence for NRXN1 (NM_004801.2,3417-3435).
gatcgagagaggatgtgaa

SEQ ID NO: 319311 - DNA, 19 bp, Homo sapiens
  siRNA target sequence for NRXN1 (NM_004801.2,3478-3496).
ggtgtgtgcttgcaacaat

SEQ ID NO: 319312 - DNA, 19 bp, Homo sapiens
  siRNA target sequence for NRXN1 (NM_004801.2,3557-3575).
ctgggacgacatatatctt

SEQ ID NO: 319313 - DNA, 19 bp, Homo sapiens
  siRNA target sequence for NRXN1 (NM_004801.2,3559-3577).
gggacgacatatatcttta

SEQ ID NO: 319314 - DNA, 19 bp, Homo sapiens
  siRNA target sequence for NRXN1 (NM_004801.2,3563-3581).
cgacatatatctttagcaa

SEQ ID NO: 319315 - DNA, 19 bp, Homo sapiens
  siRNA target sequence for NRXN1 (NM_004801.2,3586-3604).
ggtggacaaatcacgtata

SEQ ID NO: 319316 - DNA, 19 bp, Homo sapiens
  siRNA target sequence for NRXN1 (NM_004801.2,3587-3605).
gtggacaaatcacgtataa

SEQ ID NO: 319317 - DNA, 19 bp, Homo sapiens
  siRNA target sequence for NRXN1 (NM_004801.2,3589-3607).
ggacaaatcacgtataagt

SEQ ID NO: 319318 - DNA, 19 bp, Homo sapiens
  siRNA target sequence for NRXN1 (NM_004801.2,3600-3618).
gtataagtggcctcctaat

SEQ ID NO: 319319 - DNA, 19 bp, Homo sapiens
  siRNA target sequence for NRXN1 (NM_004801.2,3640-3658).
gacagactggccataggtt

SEQ ID NO: 319320 - DNA, 19 bp, Homo sapiens
  siRNA target sequence for NRXN1 (NM_004801.2,3642-3660).
cagactggccataggtttt

SEQ ID NO: 319321 - DNA, 19 bp, Homo sapiens
  siRNA target sequence for NRXN1 (NM_004801.2,3646-3664).
ctggccataggttttagca

SEQ ID NO: 319322 - DNA, 19 bp, Homo sapiens
  siRNA target sequence for NRXN1 (NM_004801.2,3688-3706).
gtgcgagtggacagttctt

SEQ ID NO: 319323 - DNA, 19 bp, Homo sapiens
  siRNA target sequence for NRXN1 (NM_004801.2,3690-3708).
gcgagtggacagttcttca

SEQ ID NO: 319324 - DNA, 19 bp, Homo sapiens
  siRNA target sequence for NRXN1 (NM_004801.2,3720-3738).
ctacctagaactgcatata

SEQ ID NO: 319325 - DNA, 19 bp, Homo sapiens
  siRNA target sequence for NRXN1 (NM_004801.2,3786-3804).
cgccattgaagaatccaat

SEQ ID NO: 319326 - DNA, 19 bp, Homo sapiens
  siRNA target sequence for NRXN1 (NM_004801.2,3796-3814).
gaatccaatgcaatcatta

SEQ ID NO: 319327 - DNA, 19 bp, Homo sapiens
  siRNA target sequence for NRXN1 (NM_004801.2,3800-3818).
ccaatgcaatcattaatga

SEQ ID NO: 319328 - DNA, 19 bp, Homo sapiens
  siRNA target sequence for NRXN1 (NM_004801.2,3908-3926).
cagggcgtcagctcacaat

SEQ ID NO: 319329 - DNA, 19 bp, Homo sapiens
  siRNA target sequence for NRXN1 (NM_004801.2,3910-3928).
gggcgtcagctcacaatct

SEQ ID NO: 319330 - DNA, 19 bp, Homo sapiens
  siRNA target sequence for NRXN1 (NM_004801.2,3911-3929).
ggcgtcagctcacaatctt

SEQ ID NO: 319331 - DNA, 19 bp, Homo sapiens
  siRNA target sequence for NRXN1 (NM_004801.2,3913-3931).
cgtcagctcacaatcttca

SEQ ID NO: 319332 - DNA, 19 bp, Homo sapiens
  siRNA target sequence for NRXN1 (NM_004801.2,3935-3953).
gccaagcaaccataataat

SEQ ID NO: 319333 - DNA, 19 bp, Homo sapiens
  siRNA target sequence for NRXN1 (NM_004801.2,3936-3954).
ccaagcaaccataataatt

SEQ ID NO: 319334 - DNA, 19 bp, Homo sapiens
  siRNA target sequence for NRXN1 (NM_004801.2,3991-4009).
ctctctgggctgtactaca

SEQ ID NO: 319335 - DNA, 19 bp, Homo sapiens
  siRNA target sequence for NRXN1 (NM_004801.2,4057-4075).
gccatagtgggaaatgtga

SEQ ID NO: 319336 - DNA, 19 bp, Homo sapiens
  siRNA target sequence for NRXN1 (NM_004801.2,4138-4156).
gagatgtccacatcaatta

SEQ ID NO: 319337 - DNA, 19 bp, Homo sapiens
  siRNA target sequence for NRXN1 (NM_138735.1,974-992).
cgcaccacatccaccattt

SEQ ID NO: 319338 - DNA, 19 bp, Homo sapiens
  siRNA target sequence for NRXN1 (NM_138735.1,999-1017).
cagcagcaagcatcattca

SEQ ID NO: 319339 - DNA, 19 bp, Homo sapiens
  siRNA target sequence for NRXN1 (NM_138735.1,1012-1030).
cattcagtgcctattgcaa

SEQ ID NO: 319340 - DNA, 19 bp, Homo sapiens
  siRNA target sequence for NRXN1 (NM_138735.1,1018-1036).
gtgcctattgcaatctaca

SEQ ID NO: 319341 - DNA, 19 bp, Homo sapiens
  siRNA target sequence for NRXN2 (NM_015080.2,933-951).
cgctgagcaccgtcaagta

SEQ ID NO: 319342 - DNA, 19 bp, Homo sapiens
  siRNA target sequence for NRXN2 (NM_015080.2,1190-1208).
ccggctcacctgacgttaa

SEQ ID NO: 319343 - DNA, 19 bp, Homo sapiens
  siRNA target sequence for NRXN2 (NM_015080.2,1191-1209).
cggctcacctgacgttaaa

SEQ ID NO: 319344 - DNA, 19 bp, Homo sapiens
  siRNA target sequence for NRXN2 (NM_015080.2,1300-1318).
gtttgtggcgaccttcaaa

SEQ ID NO: 319345 - DNA, 19 bp, Homo sapiens
  siRNA target sequence for NRXN2 (NM_015080.2,1527-1545).
ccgtcaatggcaagttcaa

SEQ ID NO: 319346 - DNA, 19 bp, Homo sapiens
  siRNA target sequence for NRXN2 (NM_015080.2,1790-1808).
ctcaaggacgtggtctata

SEQ ID NO: 319347 - DNA, 19 bp, Homo sapiens
  siRNA target sequence for NRXN2 (NM_015080.2,1796-1814).
gacgtggtctataagaaca

SEQ ID NO: 319348 - DNA, 19 bp, Homo sapiens
  siRNA target sequence for NRXN2 (NM_015080.2,1798-1816).
cgtggtctataagaacaat

SEQ ID NO: 319349 - DNA, 19 bp, Homo sapiens
  siRNA target sequence for NRXN2 (NM_015080.2,1871-1889).
ctgcagggggacttgtcat

SEQ ID NO: 319350 - DNA, 19 bp, Homo sapiens
  siRNA target sequence for NRXN2 (NM_015080.2,2116-2134).
ggacggccacctctatctt

SEQ ID NO: 319351 - DNA, 19 bp, Homo sapiens
  siRNA target sequence for NRXN2 (NM_015080.2,2175-2193).
ccagccgcaaggtcaatga

SEQ ID NO: 319352 - DNA, 19 bp, Homo sapiens
  siRNA target sequence for NRXN2 (NM_015080.2,2176-2194).
cagccgcaaggtcaatgat

SEQ ID NO: 319353 - DNA, 19 bp, Homo sapiens
  siRNA target sequence for NRXN2 (NM_015080.2,2239-2257).
ctccatctcagtgaatagt

SEQ ID NO: 319354 - DNA, 19 bp, Homo sapiens
  siRNA target sequence for NRXN2 (NM_015080.2,2587-2605).
catcgggaccggctttctt

SEQ ID NO: 319355 - DNA, 19 bp, Homo sapiens
  siRNA target sequence for NRXN2 (NM_015080.2,2645-2663).
gatggctccatgtacatga

SEQ ID NO: 319356 - DNA, 19 bp, Homo sapiens
  siRNA target sequence for NRXN2 (NM_015080.2,2705-2723).
gtgtccctgcgtttcatgt

SEQ ID NO: 319357 - DNA, 19 bp, Homo sapiens
  siRNA target sequence for NRXN2 (NM_015080.2,2842-2860).
cggctgcgcacccagtaaa

SEQ ID NO: 319358 - DNA, 19 bp, Homo sapiens
  siRNA target sequence for NRXN2 (NM_015080.2,3085-3103).
gagtgggctcgtgttcaat

SEQ ID NO: 319359 - DNA, 19 bp, Homo sapiens
  siRNA target sequence for NRXN2 (NM_015080.2,3475-3493).
cgtgcacacgctcaagatt

SEQ ID NO: 319360 - DNA, 19 bp, Homo sapiens
  siRNA target sequence for NRXN2 (NM_015080.2,3528-3546).
cccgaaacctcgatctcaa

SEQ ID NO: 319361 - DNA, 19 bp, Homo sapiens
  siRNA target sequence for NRXN2 (NM_015080.2,3529-3547).
ccgaaacctcgatctcaaa

SEQ ID NO: 319362 - DNA, 19 bp, Homo sapiens
  siRNA target sequence for NRXN2 (NM_015080.2,3564-3582).
gcggtctgagcaagaatat

SEQ ID NO: 319363 - DNA, 19 bp, Homo sapiens
  siRNA target sequence for NRXN2 (NM_015080.2,3567-3585).
gtctgagcaagaatatgtt

SEQ ID NO: 319364 - DNA, 19 bp, Homo sapiens
  siRNA target sequence for NRXN2 (NM_015080.2,3802-3820).
ctgcaccatgacttcctat

SEQ ID NO: 319365 - DNA, 19 bp, Homo sapiens
  siRNA target sequence for NRXN2 (NM_015080.2,3839-3857).
gatcccgggaccacataca

SEQ ID NO: 319366 - DNA, 19 bp, Homo sapiens
  siRNA target sequence for NRXN2 (NM_015080.2,3843-3861).
ccgggaccacatacatctt

SEQ ID NO: 319367 - DNA, 19 bp, Homo sapiens
  siRNA target sequence for NRXN2 (NM_015080.2,3844-3862).
cgggaccacatacatcttt

SEQ ID NO: 319368 - DNA, 19 bp, Homo sapiens
  siRNA target sequence for NRXN2 (NM_015080.2,4055-4073).
gtgggcacggacgacatta

SEQ ID NO: 319369 - DNA, 19 bp, Homo sapiens
  siRNA target sequence for NRXN2 (NM_015080.2,4058-4076).
ggcacggacgacattacca

SEQ ID NO: 319370 - DNA, 19 bp, Homo sapiens
  siRNA target sequence for NRXN2 (NM_015080.2,4081-4099).
cgagcccaacgccatagta

SEQ ID NO: 319371 - DNA, 19 bp, Homo sapiens
  siRNA target sequence for NRXN2 (NM_015080.2,4082-4100).
gagcccaacgccatagtaa

SEQ ID NO: 319372 - DNA, 19 bp, Homo sapiens
  siRNA target sequence for NRXN2 (NM_015080.2,4185-4203).
ggtacccggcaggaaactt

SEQ ID NO: 319373 - DNA, 19 bp, Homo sapiens
  siRNA target sequence for NRXN2 (NM_015080.2,4186-4204).
gtacccggcaggaaacttt

SEQ ID NO: 319374 - DNA, 19 bp, Homo sapiens
  siRNA target sequence for NRXN2 (NM_015080.2,4189-4207).
cccggcaggaaactttgat

SEQ ID NO: 319375 - DNA, 19 bp, Homo sapiens
  siRNA target sequence for NRXN2 (NM_015080.2,4191-4209).
cggcaggaaactttgataa

SEQ ID NO: 319376 - DNA, 19 bp, Homo sapiens
  siRNA target sequence for NRXN2 (NM_015080.2,4194-4212).
caggaaactttgataacga

SEQ ID NO: 319377 - DNA, 19 bp, Homo sapiens
  siRNA target sequence for NRXN2 (NM_015080.2,4221-4239).
cgattgctagacagagaat

SEQ ID NO: 319378 - DNA, 19 bp, Homo sapiens
  siRNA target sequence for NRXN2 (NM_015080.2,4246-4264).
ccggcttggtcgagtagta

SEQ ID NO: 319379 - DNA, 19 bp, Homo sapiens
  siRNA target sequence for NRXN2 (NM_015080.2,4248-4266).
ggcttggtcgagtagtaga

SEQ ID NO: 319380 - DNA, 19 bp, Homo sapiens
  siRNA target sequence for NRXN2 (NM_015080.2,4249-4267).
gcttggtcgagtagtagat

SEQ ID NO: 319381 - DNA, 19 bp, Homo sapiens
  siRNA target sequence for NRXN2 (NM_015080.2,4290-4308).
gccagctgaccatcttcaa

SEQ ID NO: 319382 - DNA, 19 bp, Homo sapiens
  siRNA target sequence for NRXN2 (NM_015080.2,4369-4387).
gtccggcctctactacaat

SEQ ID NO: 319383 - DNA, 19 bp, Homo sapiens
  siRNA target sequence for NRXN2 (NM_015080.2,4684-4702).
cagtactggaggagagtta

SEQ ID NO: 319384 - DNA, 19 bp, Homo sapiens
  siRNA target sequence for NRXN2 (NM_015080.2,4689-4707).
ctggaggagagttaatatt

SEQ ID NO: 319385 - DNA, 19 bp, Homo sapiens
  siRNA target sequence for NRXN2 (NM_015080.2,4962-4980).
cggacgacgaggactttta

SEQ ID NO: 319386 - DNA, 19 bp, Homo sapiens
  siRNA target sequence for OMD (NM_005014.1,103-121).
gggttttttaagtccaata

SEQ ID NO: 319387 - DNA, 19 bp, Homo sapiens
  siRNA target sequence for OMD (NM_005014.1,155-173).
cattgccaatatgaaactt

SEQ ID NO: 319388 - DNA, 19 bp, Homo sapiens
  siRNA target sequence for OMD (NM_005014.1,202-220).
gccagatgatgattaccaa

SEQ ID NO: 319389 - DNA, 19 bp, Homo sapiens
  siRNA target sequence for OMD (NM_005014.1,229-247).
cccatttcgtcaaaatgta

SEQ ID NO: 319390 - DNA, 19 bp, Homo sapiens
  siRNA target sequence for OMD (NM_005014.1,250-268).
ctacggagttccttttcat

SEQ ID NO: 319391 - DNA, 19 bp, Homo sapiens
  siRNA target sequence for OMD (NM_005014.1,282-300).
gctgtgtcagtgaatgctt

SEQ ID NO: 319392 - DNA, 19 bp, Homo sapiens
  siRNA target sequence for OMD (NM_005014.1,297-315).
gcttctgtccaactaactt

SEQ ID NO: 319393 - DNA, 19 bp, Homo sapiens
  siRNA target sequence for OMD (NM_005014.1,349-367).
caagactatcccaaatatt

SEQ ID NO: 319394 - DNA, 19 bp, Homo sapiens
  siRNA target sequence for OMD (NM_005014.1,416-434).
gtgactgcaaattcattca

SEQ ID NO: 319395 - DNA, 19 bp, Homo sapiens
  siRNA target sequence for OMD (NM_005014.1,436-454).
caatgcaactcatcttaaa

SEQ ID NO: 319396 - DNA, 19 bp, Homo sapiens
  siRNA target sequence for OMD (NM_005014.1,497-515).
gattatggtgtgtttgcta

SEQ ID NO: 319397 - DNA, 19 bp, Homo sapiens
  siRNA target sequence for OMD (NM_005014.1,536-554).
cttcatctagagcataata

SEQ ID NO: 319398 - DNA, 19 bp, Homo sapiens
  siRNA target sequence for OMD (NM_005014.1,597-615).
gactccttcttggttacaa

SEQ ID NO: 319399 - DNA, 19 bp, Homo sapiens
  siRNA target sequence for OMD (NM_005014.1,601-619).
ccttcttggttacaatgaa

SEQ ID NO: 319400 - DNA, 19 bp, Homo sapiens
  siRNA target sequence for OMD (NM_005014.1,602-620).
cttcttggttacaatgaaa

SEQ ID NO: 319401 - DNA, 19 bp, Homo sapiens
  siRNA target sequence for OMD (NM_005014.1,641-659).
gctatggatgggctagtaa

SEQ ID NO: 319402 - DNA, 19 bp, Homo sapiens
  siRNA target sequence for OMD (NM_005014.1,642-660).
ctatggatgggctagtaaa

SEQ ID NO: 319403 - DNA, 19 bp, Homo sapiens
  siRNA target sequence for OMD (NM_005014.1,647-665).
gatgggctagtaaacttga

SEQ ID NO: 319404 - DNA, 19 bp, Homo sapiens
  siRNA target sequence for OMD (NM_005014.1,754-772).
cctctgcagtaacagatta

SEQ ID NO: 319405 - DNA, 19 bp, Homo sapiens
  siRNA target sequence for OMD (NM_005014.1,801-819).
cacttatgtatctgtcttt

SEQ ID NO: 319406 - DNA, 19 bp, Homo sapiens
  siRNA target sequence for OMD (NM_005014.1,840-858).
ctatacccgaaaaatactt

SEQ ID NO: 319407 - DNA, 19 bp, Homo sapiens
  siRNA target sequence for OMD (NM_005014.1,856-874).
cttcgacaaacttccaaaa

SEQ ID NO: 319408 - DNA, 19 bp, Homo sapiens
  siRNA target sequence for OMD (NM_005014.1,859-877).
cgacaaacttccaaaactt

SEQ ID NO: 319409 - DNA, 19 bp, Homo sapiens
  siRNA target sequence for OMD (NM_005014.1,875-893).
cttcatactctaagaatgt

SEQ ID NO: 319410 - DNA, 19 bp, Homo sapiens
  siRNA target sequence for OMD (NM_005014.1,905-923).
ctacaagacatcccatata

SEQ ID NO: 319411 - DNA, 19 bp, Homo sapiens
  siRNA target sequence for OMD (NM_005014.1,908-926).
caagacatcccatataata

SEQ ID NO: 319412 - DNA, 19 bp, Homo sapiens
  siRNA target sequence for OMD (NM_005014.1,957-975).
gtgttggacacaacaaatt

SEQ ID NO: 319413 - DNA, 19 bp, Homo sapiens
  siRNA target sequence for OMD (NM_005014.1,979-997).
gcaagcattctatattcca

SEQ ID NO: 319414 - DNA, 19 bp, Homo sapiens
  siRNA target sequence for OMD (NM_005014.1,980-998).
caagcattctatattccaa

SEQ ID NO: 319415 - DNA, 19 bp, Homo sapiens
  siRNA target sequence for OMD (NM_005014.1,1068-1086).
ctattgacccactacatta

SEQ ID NO: 319416 - DNA, 19 bp, Homo sapiens
  siRNA target sequence for OMD (NM_005014.1,1077-1095).
cactacattaccaccattt

SEQ ID NO: 319417 - DNA, 19 bp, Homo sapiens
  siRNA target sequence for OMD (NM_005014.1,1082-1100).
cattaccaccatttaacat

SEQ ID NO: 319418 - DNA, 19 bp, Homo sapiens
  siRNA target sequence for OMD (NM_005014.1,1102-1120).
cattcgtgtggaccaaaat

SEQ ID NO: 319419 - DNA, 19 bp, Homo sapiens
  siRNA target sequence for OMD (NM_005014.1,1133-1151).
ccaataagctcatacatct

SEQ ID NO: 319420 - DNA, 19 bp, Homo sapiens
  siRNA target sequence for OMD (NM_005014.1,1153-1171).
cttctgcttccctcatata

SEQ ID NO: 319421 - DNA, 19 bp, Homo sapiens
  siRNA target sequence for OMD (NM_005014.1,1200-1218).
gcactaatggtcaaacaat

SEQ ID NO: 319422 - DNA, 19 bp, Homo sapiens
  siRNA target sequence for OMD (NM_005014.1,1203-1221).
ctaatggtcaaacaataca

SEQ ID NO: 319423 - DNA, 19 bp, Homo sapiens
  siRNA target sequence for OMD (NM_005014.1,1208-1226).
ggtcaaacaatacaactaa

SEQ ID NO: 319424 - DNA, 19 bp, Homo sapiens
  siRNA target sequence for OMD (NM_005014.1,1240-1258).
caggagatttccagatgat

SEQ ID NO: 319425 - DNA, 19 bp, Homo sapiens
  siRNA target sequence for OMD (NM_005014.1,1328-1346).
gggcactttgaccttcatt

SEQ ID NO: 319426 - DNA, 19 bp, Homo sapiens
  siRNA target sequence for OMD (NM_005014.1,1329-1347).
ggcactttgaccttcatta

SEQ ID NO: 319427 - DNA, 19 bp, Homo sapiens
  siRNA target sequence for OMD (NM_005014.1,1330-1348).
gcactttgaccttcattat

SEQ ID NO: 319428 - DNA, 19 bp, Homo sapiens
  siRNA target sequence for OMD (NM_005014.1,1333-1351).
ctttgaccttcattattat

SEQ ID NO: 319429 - DNA, 19 bp, Homo sapiens
  siRNA target sequence for OMG (NM_002544.2,1372-1390).
gcaagagaatattatacat

SEQ ID NO: 319430 - DNA, 19 bp, Homo sapiens
  siRNA target sequence for OMG (NM_002544.2,1399-1417).
gtcttataaccactttact

SEQ ID NO: 319431 - DNA, 19 bp, Homo sapiens
  siRNA target sequence for OMG (NM_002544.2,1430-1448).
cagttaacccaatatacca

SEQ ID NO: 319432 - DNA, 19 bp, Homo sapiens
  siRNA target sequence for OMG (NM_002544.2,1432-1450).
gttaacccaatataccaat

SEQ ID NO: 319433 - DNA, 19 bp, Homo sapiens
  siRNA target sequence for OMG (NM_002544.2,1508-1526).
cggtctctgtggaacatgt

SEQ ID NO: 319434 - DNA, 19 bp, Homo sapiens
  siRNA target sequence for OMG (NM_002544.2,1550-1568).
cttcttgacaaatctgata

SEQ ID NO: 319435 - DNA, 19 bp, Homo sapiens
  siRNA target sequence for OMG (NM_002544.2,1572-1590).
cttatcagtggaatcttaa

SEQ ID NO: 319436 - DNA, 19 bp, Homo sapiens
  siRNA target sequence for OMG (NM_002544.2,1619-1637).
gaaaaggttgtcctcatta

SEQ ID NO: 319437 - DNA, 19 bp, Homo sapiens
  siRNA target sequence for OMG (NM_002544.2,1630-1648).
cctcattaaaaatacacta

SEQ ID NO: 319438 - DNA, 19 bp, Homo sapiens
  siRNA target sequence for OMG (NM_002544.2,1631-1649).
ctcattaaaaatacactaa

SEQ ID NO: 319439 - DNA, 19 bp, Homo sapiens
  siRNA target sequence for OMG (NM_002544.2,1650-1668).
gaagtctcgaggttctcaa

SEQ ID NO: 319440 - DNA, 19 bp, Homo sapiens
  siRNA target sequence for OMG (NM_002544.2,1661-1679).
gttctcaacctcagtagta

SEQ ID NO: 319441 - DNA, 19 bp, Homo sapiens
  siRNA target sequence for OMG (NM_002544.2,1670-1688).
ctcagtagtaacaaacttt

SEQ ID NO: 319442 - DNA, 19 bp, Homo sapiens
  siRNA target sequence for OMG (NM_002544.2,1710-1728).
cctccaaactacatatcgt

SEQ ID NO: 319443 - DNA, 19 bp, Homo sapiens
  siRNA target sequence for OMG (NM_002544.2,1726-1744).
cgtggacctgtctaataat

SEQ ID NO: 319444 - DNA, 19 bp, Homo sapiens
  siRNA target sequence for OMG (NM_002544.2,1727-1745).
gtggacctgtctaataatt

SEQ ID NO: 319445 - DNA, 19 bp, Homo sapiens
  siRNA target sequence for OMG (NM_002544.2,1729-1747).
ggacctgtctaataattct

SEQ ID NO: 319446 - DNA, 19 bp, Homo sapiens
  siRNA target sequence for OMG (NM_002544.2,1730-1748).
gacctgtctaataattctt

SEQ ID NO: 319447 - DNA, 19 bp, Homo sapiens
  siRNA target sequence for OMG (NM_002544.2,1733-1751).
ctgtctaataattctttga

SEQ ID NO: 319448 - DNA, 19 bp, Homo sapiens
  siRNA target sequence for OMG (NM_002544.2,1735-1753).
gtctaataattctttgaca

SEQ ID NO: 319449 - DNA, 19 bp, Homo sapiens
  siRNA target sequence for OMG (NM_002544.2,1760-1778).
cttccaggtacattaataa

SEQ ID NO: 319450 - DNA, 19 bp, Homo sapiens
  siRNA target sequence for OMG (NM_002544.2,1808-1826).
cacaacaataagttcacat

SEQ ID NO: 319451 - DNA, 19 bp, Homo sapiens
  siRNA target sequence for OMG (NM_002544.2,1813-1831).
caataagttcacattcatt

SEQ ID NO: 319452 - DNA, 19 bp, Homo sapiens
  siRNA target sequence for OMG (NM_002544.2,1828-1846).
cattccagaccaatctttt

SEQ ID NO: 319453 - DNA, 19 bp, Homo sapiens
  siRNA target sequence for OMG (NM_002544.2,1855-1873).
ctttcagttgcaagagata

SEQ ID NO: 319454 - DNA, 19 bp, Homo sapiens
  siRNA target sequence for OMG (NM_002544.2,1865-1883).
caagagataaccctttaca

SEQ ID NO: 319455 - DNA, 19 bp, Homo sapiens
  siRNA target sequence for OMG (NM_002544.2,1868-1886).
gagataaccctttacaata

SEQ ID NO: 319456 - DNA, 19 bp, Homo sapiens
  siRNA target sequence for OMG (NM_002544.2,1960-1978).
gatagggactccatgttct

SEQ ID NO: 319457 - DNA, 19 bp, Homo sapiens
  siRNA target sequence for OMG (NM_002544.2,2063-2081).
cagacagtggacaccatta

SEQ ID NO: 319458 - DNA, 19 bp, Homo sapiens
  siRNA target sequence for OMG (NM_002544.2,2170-2188).
caaagacaccacctttact

SEQ ID NO: 319459 - DNA, 19 bp, Homo sapiens
  siRNA target sequence for OMG (NM_002544.2,2181-2199).
cctttactagcactgataa

SEQ ID NO: 319460 - DNA, 19 bp, Homo sapiens
  siRNA target sequence for OMG (NM_002544.2,2210-2228).
ccctatccagaagatacat

SEQ ID NO: 319461 - DNA, 19 bp, Homo sapiens
  siRNA target sequence for OMG (NM_002544.2,2232-2250).
cagagactatcaattcaca

SEQ ID NO: 319462 - DNA, 19 bp, Homo sapiens
  siRNA target sequence for OMG (NM_002544.2,2262-2280).
ctgcaactctaactattca

SEQ ID NO: 319463 - DNA, 19 bp, Homo sapiens
  siRNA target sequence for OMG (NM_002544.2,2288-2306).
gatggaatggtcacaaaca

SEQ ID NO: 319464 - DNA, 19 bp, Homo sapiens
  siRNA target sequence for OMG (NM_002544.2,2291-2309).
ggaatggtcacaaacacaa

SEQ ID NO: 319465 - DNA, 19 bp, Homo sapiens
  siRNA target sequence for OMG (NM_002544.2,2310-2328).
gcctcactagctcaacaaa

SEQ ID NO: 319466 - DNA, 19 bp, Homo sapiens
  siRNA target sequence for OMG (NM_002544.2,2311-2329).
cctcactagctcaacaaaa

SEQ ID NO: 319467 - DNA, 19 bp, Homo sapiens
  siRNA target sequence for OMG (NM_002544.2,2312-2330).
ctcactagctcaacaaaat

SEQ ID NO: 319468 - DNA, 19 bp, Homo sapiens
  siRNA target sequence for OMG (NM_002544.2,2314-2332).
cactagctcaacaaaatca

SEQ ID NO: 319469 - DNA, 19 bp, Homo sapiens
  siRNA target sequence for OMG (NM_002544.2,2340-2358).
cacccatgaccctaagtat

SEQ ID NO: 319470 - DNA, 19 bp, Homo sapiens
  siRNA target sequence for OMG (NM_002544.2,2342-2360).
cccatgaccctaagtatca

SEQ ID NO: 319471 - DNA, 19 bp, Homo sapiens
  siRNA target sequence for OMG (NM_002544.2,2344-2362).
catgaccctaagtatcact

SEQ ID NO: 319472 - DNA, 19 bp, Homo sapiens
  siRNA target sequence for OMG (NM_002544.2,2361-2379).
ctagtggcatgccaaataa

SEQ ID NO: 319473 - DNA, 19 bp, Homo sapiens
  siRNA target sequence for OMG (NM_002544.2,2399-2417).
caaagcacaacccttaact

SEQ ID NO: 319474 - DNA, 19 bp, Homo sapiens
  siRNA target sequence for PUNC (NM_004884.1,474-492).
gccaatgggtccttgatga

SEQ ID NO: 319475 - DNA, 19 bp, Homo sapiens
  siRNA target sequence for PUNC (NM_004884.1,744-762).
gacaatgagaggtacacat

SEQ ID NO: 319476 - DNA, 19 bp, Homo sapiens
  siRNA target sequence for PUNC (NM_004884.1,1063-1081).
gcacaggaaacctcatcat

SEQ ID NO: 319477 - DNA, 19 bp, Homo sapiens
  siRNA target sequence for PUNC (NM_004884.1,1321-1339).
gccacgtcaggctcaagaa

SEQ ID NO: 319478 - DNA, 19 bp, Homo sapiens
  siRNA target sequence for PUNC (NM_004884.1,1326-1344).
gtcaggctcaagaataaca

SEQ ID NO: 319479 - DNA, 19 bp, Homo sapiens
  siRNA target sequence for PUNC (NM_004884.1,1600-1618).
caccggagctggagtatca

SEQ ID NO: 319480 - DNA, 19 bp, Homo sapiens
  siRNA target sequence for PUNC (NM_004884.1,1678-1696).
cctacagtttctacatcaa

SEQ ID NO: 319481 - DNA, 19 bp, Homo sapiens
  siRNA target sequence for PUNC (NM_004884.1,2142-2160).
ggggtcacttgcatcatct

SEQ ID NO: 319482 - DNA, 19 bp, Homo sapiens
  siRNA target sequence for PUNC (NM_004884.1,2198-2216).
ggtcctcctgtgtaaagat

SEQ ID NO: 319483 - DNA, 19 bp, Homo sapiens
  siRNA target sequence for SRPX (NM_006307.2,191-209).
gagactcaccactagaaga

SEQ ID NO: 319484 - DNA, 19 bp, Homo sapiens
  siRNA target sequence for SRPX (NM_006307.2,210-228).
cgatgaagtcgggtattca

SEQ ID NO: 319485 - DNA, 19 bp, Homo sapiens
  siRNA target sequence for SRPX (NM_006307.2,221-239).
ggtattcacaccctagata

SEQ ID NO: 319486 - DNA, 19 bp, Homo sapiens
  siRNA target sequence for SRPX (NM_006307.2,222-240).
gtattcacaccctagatat

SEQ ID NO: 319487 - DNA, 19 bp, Homo sapiens
  siRNA target sequence for SRPX (NM_006307.2,229-247).
caccctagatataaagata

SEQ ID NO: 319488 - DNA, 19 bp, Homo sapiens
  siRNA target sequence for SRPX (NM_006307.2,261-279).
ccccatcaaggtgaagtat

SEQ ID NO: 319489 - DNA, 19 bp, Homo sapiens
  siRNA target sequence for SRPX (NM_006307.2,299-317).
cccctcaaggaggatacta

SEQ ID NO: 319490 - DNA, 19 bp, Homo sapiens
  siRNA target sequence for SRPX (NM_006307.2,302-320).
ctcaaggaggatactacaa

SEQ ID NO: 319491 - DNA, 19 bp, Homo sapiens
  siRNA target sequence for SRPX (NM_006307.2,420-438).
caaggtcatctgcaaacaa

SEQ ID NO: 319492 - DNA, 19 bp, Homo sapiens
  siRNA target sequence for SRPX (NM_006307.2,466-484).
gcaaatggagggtttaagt

SEQ ID NO: 319493 - DNA, 19 bp, Homo sapiens
  siRNA target sequence for SRPX (NM_006307.2,490-508).
gatggtgcctactttaact

SEQ ID NO: 319494 - DNA, 19 bp, Homo sapiens
  siRNA target sequence for SRPX (NM_006307.2,507-525).
ctcccggtgtgagtattat

SEQ ID NO: 319495 - DNA, 19 bp, Homo sapiens
  siRNA target sequence for SRPX (NM_006307.2,510-528).
ccggtgtgagtattattgt

SEQ ID NO: 319496 - DNA, 19 bp, Homo sapiens
  siRNA target sequence for SRPX (NM_006307.2,511-529).
cggtgtgagtattattgtt

SEQ ID NO: 319497 - DNA, 19 bp, Homo sapiens
  siRNA target sequence for SRPX (NM_006307.2,513-531).
gtgtgagtattattgttca

SEQ ID NO: 319498 - DNA, 19 bp, Homo sapiens
  siRNA target sequence for SRPX (NM_006307.2,553-571).
gagcggaccgtcacatgta

SEQ ID NO: 319499 - DNA, 19 bp, Homo sapiens
  siRNA target sequence for SRPX (NM_006307.2,619-637).
gaacctcctagaatcaagt

SEQ ID NO: 319500 - DNA, 19 bp, Homo sapiens
  siRNA target sequence for SRPX (NM_006307.2,733-751).
cttactgatgtcattctaa

SEQ ID NO: 319501 - DNA, 19 bp, Homo sapiens
  siRNA target sequence for SRPX (NM_006307.2,795-813).
gatccagtacacagtctat

SEQ ID NO: 319502 - DNA, 19 bp, Homo sapiens
  siRNA target sequence for SRPX (NM_006307.2,825-843).
gaataagggcacttgcaaa

SEQ ID NO: 319503 - DNA, 19 bp, Homo sapiens
  siRNA target sequence for SRPX (NM_006307.2,831-849).
gggcacttgcaaatttcga

SEQ ID NO: 319504 - DNA, 19 bp, Homo sapiens
  siRNA target sequence for SRPX (NM_006307.2,836-854).
cttgcaaatttcgagttaa

SEQ ID NO: 319505 - DNA, 19 bp, Homo sapiens
  siRNA target sequence for SRPX (NM_006307.2,887-905).
ccccagagaatggttacat

SEQ ID NO: 319506 - DNA, 19 bp, Homo sapiens
  siRNA target sequence for SRPX (NM_006307.2,911-929).
gctccagcgacggtgataa

SEQ ID NO: 319507 - DNA, 19 bp, Homo sapiens
  siRNA target sequence for SRPX (NM_006307.2,912-930).
ctccagcgacggtgataat

SEQ ID NO: 319508 - DNA, 19 bp, Homo sapiens
  siRNA target sequence for SRPX (NM_006307.2,914-932).
ccagcgacggtgataatta

SEQ ID NO: 319509 - DNA, 19 bp, Homo sapiens
  siRNA target sequence for SRPX (NM_006307.2,915-933).
cagcgacggtgataattat

SEQ ID NO: 319510 - DNA, 19 bp, Homo sapiens
  siRNA target sequence for SRPX (NM_006307.2,918-936).
cgacggtgataattatgga

SEQ ID NO: 319511 - DNA, 19 bp, Homo sapiens
  siRNA target sequence for SRPX (NM_006307.2,985-1003).
cctgcccgagtatgtcaat

SEQ ID NO: 319512 - DNA, 19 bp, Homo sapiens
  siRNA target sequence for SRPX (NM_006307.2,989-1007).
cccgagtatgtcaatccaa

SEQ ID NO: 319513 - DNA, 19 bp, Homo sapiens
  siRNA target sequence for SRPX (NM_006307.2,1181-1199).
cacagtgtggccttgatct

SEQ ID NO: 319514 - DNA, 19 bp, Homo sapiens
  siRNA target sequence for SRPX (NM_006307.2,1251-1269).
caggataggagcaaagatt

SEQ ID NO: 319515 - DNA, 19 bp, Homo sapiens
  siRNA target sequence for SRPX (NM_006307.2,1444-1462).
gtcctacaagccgaaatga

SEQ ID NO: 319516 - DNA, 19 bp, Homo sapiens
  siRNA target sequence for TROAP (NM_005480.2,332-350).
ccaggcagagacatcacaa

SEQ ID NO: 319517 - DNA, 19 bp, Homo sapiens
  siRNA target sequence for TROAP (NM_005480.2,400-418).
ctagccctaggggtcaaaa

SEQ ID NO: 319518 - DNA, 19 bp, Homo sapiens
  siRNA target sequence for TROAP (NM_005480.2,403-421).
gccctaggggtcaaaatgt

SEQ ID NO: 319519 - DNA, 19 bp, Homo sapiens
  siRNA target sequence for TROAP (NM_005480.2,451-469).
ctccagggaccatagagtt

SEQ ID NO: 319520 - DNA, 19 bp, Homo sapiens
  siRNA target sequence for TROAP (NM_005480.2,540-558).
cagcctagtctggctaaaa

SEQ ID NO: 319521 - DNA, 19 bp, Homo sapiens
  siRNA target sequence for TROAP (NM_005480.2,702-720).
cctcgaggccggacattgt

SEQ ID NO: 319522 - DNA, 19 bp, Homo sapiens
  siRNA target sequence for TROAP (NM_005480.2,959-977).
gcgagtaccattaagagaa

SEQ ID NO: 319523 - DNA, 19 bp, Homo sapiens
  siRNA target sequence for TROAP (NM_005480.2,960-978).
cgagtaccattaagagaaa

SEQ ID NO: 319524 - DNA, 19 bp, Homo sapiens
  siRNA target sequence for TROAP (NM_005480.2,1153-1171).
gtctcaccgttcaacctaa

SEQ ID NO: 319525 - DNA, 19 bp, Homo sapiens
  siRNA target sequence for TROAP (NM_005480.2,1155-1173).
ctcaccgttcaacctaaaa

SEQ ID NO: 319526 - DNA, 19 bp, Homo sapiens
  siRNA target sequence for TROAP (NM_005480.2,1280-1298).
ggttgccgtccggttgttt

SEQ ID NO: 319527 - DNA, 19 bp, Homo sapiens
  siRNA target sequence for TROAP (NM_005480.2,1302-1320).
caggagagttgtataaggt

SEQ ID NO: 319528 - DNA, 19 bp, Homo sapiens
  siRNA target sequence for TROAP (NM_005480.2,1524-1542).
ctgactgagatttctagaa

SEQ ID NO: 319529 - DNA, 19 bp, Homo sapiens
  siRNA target sequence for TROAP (NM_005480.2,1526-1544).
gactgagatttctagaact

SEQ ID NO: 319530 - DNA, 19 bp, Homo sapiens
  siRNA target sequence for TROAP (NM_005480.2,1584-1602).
cctggactgttaaaacact

SEQ ID NO: 319531 - DNA, 19 bp, Homo sapiens
  siRNA target sequence for TROAP (NM_005480.2,2113-2131).
caaccaccagcctgatctt

SEQ ID NO: 319532 - DNA, 19 bp, Homo sapiens
  siRNA target sequence for TROAP (NM_005480.2,2241-2259).
ctgagggagcgcctcaaat

SEQ ID NO: 319533 - DNA, 19 bp, Homo sapiens
  siRNA target sequence for TROAP (NM_005480.2,2249-2267).
gcgcctcaaatcgtgttta

SEQ ID NO: 319534 - DNA, 19 bp, Homo sapiens
  siRNA target sequence for TROAP (NM_005480.2,2250-2268).
cgcctcaaatcgtgtttaa

SEQ ID NO: 319535 - DNA, 19 bp, Homo sapiens
  siRNA target sequence for DAP4 (NM_014902.2,649-667).
ccccgcatccactacaact

SEQ ID NO: 319536 - DNA, 19 bp, Homo sapiens
  siRNA target sequence for DAP4 (NM_014902.2,710-728).
cccaagccaccaagatcaa

SEQ ID NO: 319537 - DNA, 19 bp, Homo sapiens
  siRNA target sequence for DAP4 (NM_014902.2,788-806).
gcttcagcaccctccaatt

SEQ ID NO: 319538 - DNA, 19 bp, Homo sapiens
  siRNA target sequence for DAP4 (NM_014902.2,871-889).
gtccagcggcttttcttca

SEQ ID NO: 319539 - DNA, 19 bp, Homo sapiens
  siRNA target sequence for DAP4 (NM_014902.2,1408-1426).
cagggtctagcctaccatt

SEQ ID NO: 319540 - DNA, 19 bp, Homo sapiens
  siRNA target sequence for DAP4 (NM_014902.2,1412-1430).
gtctagcctaccattacct

SEQ ID NO: 319541 - DNA, 19 bp, Homo sapiens
  siRNA target sequence for DAP4 (NM_014902.2,2071-2089).
cgcacgcttccgagttcat

SEQ ID NO: 319542 - DNA, 19 bp, Homo sapiens
  siRNA target sequence for DAP4 (NM_014902.2,2090-2108).
catgcctagtggcgtataa

SEQ ID NO: 319543 - DNA, 19 bp, Homo sapiens
  siRNA target sequence for DAP4 (NM_014902.2,2093-2111).
gcctagtggcgtataagaa

SEQ ID NO: 319544 - DNA, 19 bp, Homo sapiens
  siRNA target sequence for DAP4 (NM_014902.2,2095-2113).
ctagtggcgtataagaaga

SEQ ID NO: 319545 - DNA, 19 bp, Homo sapiens
  siRNA target sequence for DAP4 (NM_014902.2,2128-2146).
cctccacgcaccacttcaa

SEQ ID NO: 319546 - DNA, 19 bp, Homo sapiens
  siRNA target sequence for DAP4 (NM_014902.2,2427-2445).
gtcatcgataggaatacaa

SEQ ID NO: 319547 - DNA, 19 bp, Homo sapiens
  siRNA target sequence for DAP4 (NM_014902.2,2492-2510).
ccaaagcgatcgatgtgat

SEQ ID NO: 319548 - DNA, 19 bp, Homo sapiens
  siRNA target sequence for DAP4 (NM_014902.2,2593-2611).
gactcaagctgtaagtcat

SEQ ID NO: 319549 - DNA, 19 bp, Homo sapiens
  siRNA target sequence for DAP4 (NM_014902.2,2833-2851).
gacggctactggttcctaa

SEQ ID NO: 319550 - DNA, 19 bp, Homo sapiens
  siRNA target sequence for DAP4 (NM_014902.2,2966-2984).
gcagtgcccagctactgat

SEQ ID NO: 319551 - DNA, 19 bp, Homo sapiens
  siRNA target sequence for DAP4 (NM_014902.2,3094-3112).
ctgtccatcgaggatatca

SEQ ID NO: 319552 - DNA, 19 bp, Homo sapiens
  siRNA target sequence for DAP4 (NM_183006.1,843-861).
ctggagctcttgaagcaat

SEQ ID NO: 319553 - DNA, 19 bp, Homo sapiens
  siRNA target sequence for DAP4 (NM_183006.1,1210-1228).
cgataggaatacaagttga

SEQ ID NO: 319554 - DNA, 19 bp, Homo sapiens
  siRNA target sequence for DAP4 (NM_183006.1,1258-1276).
ccagtcccgctaccaaatt

SEQ ID NO: 319555 - DNA, 19 bp, Homo sapiens
  siRNA target sequence for DAP4 (NM_183006.1,1261-1279).
gtcccgctaccaaattcca

SEQ ID NO: 319556 - DNA, 19 bp, Homo sapiens
  siRNA target sequence for EFNA5 (NM_001962.1,414-432).
gaggggtgactaccatatt

SEQ ID NO: 319557 - DNA, 19 bp, Homo sapiens
  siRNA target sequence for EFNA5 (NM_001962.1,416-434).
ggggtgactaccatattga

SEQ ID NO: 319558 - DNA, 19 bp, Homo sapiens
  siRNA target sequence for EFNA5 (NM_001962.1,417-435).
gggtgactaccatattgat

SEQ ID NO: 319559 - DNA, 19 bp, Homo sapiens
  siRNA target sequence for EFNA5 (NM_001962.1,480-498).
ggactccgtcccagaagat

SEQ ID NO: 319560 - DNA, 19 bp, Homo sapiens
  siRNA target sequence for EFNA5 (NM_001962.1,516-534).
cctctacatggtgaacttt

SEQ ID NO: 319561 - DNA, 19 bp, Homo sapiens
  siRNA target sequence for EFNA5 (NM_001962.1,549-567).
ctgcgaccacacttccaaa

SEQ ID NO: 319562 - DNA, 19 bp, Homo sapiens
  siRNA target sequence for EFNA5 (NM_001962.1,591-609).
ccggcctcactctccaaat

SEQ ID NO: 319563 - DNA, 19 bp, Homo sapiens
  siRNA target sequence for EFNA5 (NM_001962.1,605-623).
caaatggaccgctgaagtt

SEQ ID NO: 319564 - DNA, 19 bp, Homo sapiens
  siRNA target sequence for EFNA5 (NM_001962.1,676-694).
ccaggccgagaatatttct

SEQ ID NO: 319565 - DNA, 19 bp, Homo sapiens
  siRNA target sequence for EFNA5 (NM_001962.1,721-739).
ggaagaaggtcctgtctaa

SEQ ID NO: 319566 - DNA, 19 bp, Homo sapiens
  siRNA target sequence for EFNA5 (NM_001962.1,725-743).
gaaggtcctgtctaaagct

SEQ ID NO: 319567 - DNA, 19 bp, Homo sapiens
  siRNA target sequence for EFNA5 (NM_001962.1,760-778).
ccaacaaatagctgtatga

SEQ ID NO: 319568 - DNA, 19 bp, Homo sapiens
  siRNA target sequence for EFNA5 (NM_001962.1,771-789).
ctgtatgaaaactataggt

SEQ ID NO: 319569 - DNA, 19 bp, Homo sapiens
  siRNA target sequence for EFNA5 (NM_001962.1,796-814).
gatcgtgttttcgatgtta

SEQ ID NO: 319570 - DNA, 19 bp, Homo sapiens
  siRNA target sequence for EFNA5 (NM_001962.1,800-818).
gtgttttcgatgttaacga

SEQ ID NO: 319571 - DNA, 19 bp, Homo sapiens
  siRNA target sequence for EFNA5 (NM_001962.1,807-825).
cgatgttaacgacaaagta

SEQ ID NO: 319572 - DNA, 19 bp, Homo sapiens
  siRNA target sequence for EFNA5 (NM_001962.1,845-863).
cagatgacaccgtacatga

SEQ ID NO: 319573 - DNA, 19 bp, Homo sapiens
  siRNA target sequence for EFNA5 (NM_001962.1,885-903).
cgagaacgcggcacaaaca

SEQ ID NO: 319574 - DNA, 19 bp, Homo sapiens
  siRNA target sequence for EFNA5 (NM_001962.1,918-936).
ccgccttttggcaatccta

SEQ ID NO: 319575 - DNA, 19 bp, Homo sapiens
  siRNA target sequence for EFNA5 (NM_001962.1,943-961).
ctcctggcgatgcttttga

SEQ ID NO: 319576 - DNA, 19 bp, Homo sapiens
  siRNA target sequence for EFNA5 (NM_001962.1,945-963).
cctggcgatgcttttgaca

SEQ ID NO: 319577 - DNA, 19 bp, Homo sapiens
  siRNA target sequence for EFNA5 (NM_001962.1,946-964).
ctggcgatgcttttgacat

SEQ ID NO: 319578 - DNA, 19 bp, Homo sapiens
  siRNA target sequence for EFNA5 (NM_001962.1,949-967).
gcgatgcttttgacattat

SEQ ID NO: 319579 - DNA, 19 bp, Homo sapiens
  siRNA target sequence for EFNB2 (NM_004093.2,41-59).
gactccgtgtggaagtact

SEQ ID NO: 319580 - DNA, 19 bp, Homo sapiens
  siRNA target sequence for EFNB2 (NM_004093.2,84-102).
gcagaactgcgatttccaa

SEQ ID NO: 319581 - DNA, 19 bp, Homo sapiens
  siRNA target sequence for EFNB2 (NM_004093.2,90-108).
ctgcgatttccaaatcgat

SEQ ID NO: 319582 - DNA, 19 bp, Homo sapiens
  siRNA target sequence for EFNB2 (NM_004093.2,99-117).
ccaaatcgatagttttaga

SEQ ID NO: 319583 - DNA, 19 bp, Homo sapiens
  siRNA target sequence for EFNB2 (NM_004093.2,110-128).
gttttagagcctatctatt

SEQ ID NO: 319584 - DNA, 19 bp, Homo sapiens
  siRNA target sequence for EFNB2 (NM_004093.2,119-137).
cctatctattggaattcct

SEQ ID NO: 319585 - DNA, 19 bp, Homo sapiens
  siRNA target sequence for EFNB2 (NM_004093.2,135-153).
cctcgaactccaaatttct

SEQ ID NO: 319586 - DNA, 19 bp, Homo sapiens
  siRNA target sequence for EFNB2 (NM_004093.2,136-154).
ctcgaactccaaatttcta

SEQ ID NO: 319587 - DNA, 19 bp, Homo sapiens
  siRNA target sequence for EFNB2 (NM_004093.2,159-177).
gacaaggactggtactata

SEQ ID NO: 319588 - DNA, 19 bp, Homo sapiens
  siRNA target sequence for EFNB2 (NM_004093.2,169-187).
ggtactatacccacagata

SEQ ID NO: 319589 - DNA, 19 bp, Homo sapiens
  siRNA target sequence for EFNB2 (NM_004093.2,210-228).
gccccaaagtggactctaa

SEQ ID NO: 319590 - DNA, 19 bp, Homo sapiens
  siRNA target sequence for EFNB2 (NM_004093.2,233-251).
gttggccagtatgaatatt

SEQ ID NO: 319591 - DNA, 19 bp, Homo sapiens
  siRNA target sequence for EFNB2 (NM_004093.2,236-254).
ggccagtatgaatattata

SEQ ID NO: 319592 - DNA, 19 bp, Homo sapiens
  siRNA target sequence for EFNB2 (NM_004093.2,281-299).
gcagacagatgcactatta

SEQ ID NO: 319593 - DNA, 19 bp, Homo sapiens
  siRNA target sequence for EFNB2 (NM_004093.2,282-300).
cagacagatgcactattaa

SEQ ID NO: 319594 - DNA, 19 bp, Homo sapiens
  siRNA target sequence for EFNB2 (NM_004093.2,329-347).
gccaaaccagaccaagata

SEQ ID NO: 319595 - DNA, 19 bp, Homo sapiens
  siRNA target sequence for EFNB2 (NM_004093.2,330-348).
ccaaaccagaccaagatat

SEQ ID NO: 319596 - DNA, 19 bp, Homo sapiens
  siRNA target sequence for EFNB2 (NM_004093.2,390-408).
ggggtctagaatttcagaa

SEQ ID NO: 319597 - DNA, 19 bp, Homo sapiens
  siRNA target sequence for EFNB2 (NM_004093.2,412-430).
caaagattattacattata

SEQ ID NO: 319598 - DNA, 19 bp, Homo sapiens
  siRNA target sequence for EFNB2 (NM_004093.2,447-465).
ctttggagggcctggataa

SEQ ID NO: 319599 - DNA, 19 bp, Homo sapiens
  siRNA target sequence for EFNB2 (NM_004093.2,536-554).
gctggatcaaccaggaata

SEQ ID NO: 319600 - DNA, 19 bp, Homo sapiens
  siRNA target sequence for EFNB2 (NM_004093.2,537-555).
ctggatcaaccaggaataa

SEQ ID NO: 319601 - DNA, 19 bp, Homo sapiens
  siRNA target sequence for EFNB2 (NM_004093.2,607-625).
gacaacaagtccctttgta

SEQ ID NO: 319602 - DNA, 19 bp, Homo sapiens
  siRNA target sequence for EFNB2 (NM_004093.2,665-683).
ggacattcggggaacaaca

SEQ ID NO: 319603 - DNA, 19 bp, Homo sapiens
  siRNA target sequence for EFNB2 (NM_004093.2,666-684).
gacattcggggaacaacat

SEQ ID NO: 319604 - DNA, 19 bp, Homo sapiens
  siRNA target sequence for EFNB2 (NM_004093.2,694-712).
cgaagtggccttatttgca

SEQ ID NO: 319605 - DNA, 19 bp, Homo sapiens
  siRNA target sequence for EFNB2 (NM_004093.2,720-738).
cttcaggatgcatcatctt

SEQ ID NO: 319606 - DNA, 19 bp, Homo sapiens
  siRNA target sequence for IFRD1 (NM_001550.1,372-390).
gagccattgcagtggttat

SEQ ID NO: 319607 - DNA, 19 bp, Homo sapiens
  siRNA target sequence for IFRD1 (NM_001550.1,419-437).
gaccagaagtccttgatga

SEQ ID NO: 319608 - DNA, 19 bp, Homo sapiens
  siRNA target sequence for IFRD1 (NM_001550.1,446-464).
ctcaagaagacctagagta

SEQ ID NO: 319609 - DNA, 19 bp, Homo sapiens
  siRNA target sequence for IFRD1 (NM_001550.1,484-502).
gacctaaccctggataaga

SEQ ID NO: 319610 - DNA, 19 bp, Homo sapiens
  siRNA target sequence for IFRD1 (NM_001550.1,591-609).
gactttaactgatagcatt

SEQ ID NO: 319611 - DNA, 19 bp, Homo sapiens
  siRNA target sequence for IFRD1 (NM_001550.1,649-667).
gcagctgcagcgttagcat

SEQ ID NO: 319612 - DNA, 19 bp, Homo sapiens
  siRNA target sequence for IFRD1 (NM_001550.1,687-705).
gggccctggaattgaaagt

SEQ ID NO: 319613 - DNA, 19 bp, Homo sapiens
  siRNA target sequence for IFRD1 (NM_001550.1,722-740).
ctcttggaccaatcctaaa

SEQ ID NO: 319614 - DNA, 19 bp, Homo sapiens
  siRNA target sequence for IFRD1 (NM_001550.1,752-770).
gtgatgggtcagctagtat

SEQ ID NO: 319615 - DNA, 19 bp, Homo sapiens
  siRNA target sequence for IFRD1 (NM_001550.1,771-789).
gcaggctaggcaaacttgt

SEQ ID NO: 319616 - DNA, 19 bp, Homo sapiens
  siRNA target sequence for IFRD1 (NM_001550.1,876-894).
cactaaatcctatctcaaa

SEQ ID NO: 319617 - DNA, 19 bp, Homo sapiens
  siRNA target sequence for IFRD1 (NM_001550.1,878-896).
ctaaatcctatctcaaaga

SEQ ID NO: 319618 - DNA, 19 bp, Homo sapiens
  siRNA target sequence for IFRD1 (NM_001550.1,897-915).
gaaagacactactgttatt

SEQ ID NO: 319619 - DNA, 19 bp, Homo sapiens
  siRNA target sequence for IFRD1 (NM_001550.1,977-995).
ccatatgcccaatcaatga

SEQ ID NO: 319620 - DNA, 19 bp, Homo sapiens
  siRNA target sequence for IFRD1 (NM_001550.1,983-1001).
gcccaatcaatgaagtgaa

SEQ ID NO: 319621 - DNA, 19 bp, Homo sapiens
  siRNA target sequence for IFRD1 (NM_001550.1,1008-1026).
gcttgagatgcatttccat

SEQ ID NO: 319622 - DNA, 19 bp, Homo sapiens
  siRNA target sequence for IFRD1 (NM_001550.1,1201-1219).
gccaaagtggacaagagaa

SEQ ID NO: 319623 - DNA, 19 bp, Homo sapiens
  siRNA target sequence for IFRD1 (NM_001550.1,1217-1235).
gaaagcagcggtcagtttt

SEQ ID NO: 319624 - DNA, 19 bp, Homo sapiens
  siRNA target sequence for IFRD1 (NM_001550.1,1294-1312).
ggtcctgaacgcatgtata

SEQ ID NO: 319625 - DNA, 19 bp, Homo sapiens
  siRNA target sequence for IFRD1 (NM_001550.1,1295-1313).
gtcctgaacgcatgtatat

SEQ ID NO: 319626 - DNA, 19 bp, Homo sapiens
  siRNA target sequence for IFRD1 (NM_001550.1,1298-1316).
ctgaacgcatgtatattga

SEQ ID NO: 319627 - DNA, 19 bp, Homo sapiens
  siRNA target sequence for IFRD1 (NM_001550.1,1333-1351).
cacacctatgacaccttta

SEQ ID NO: 319628 - DNA, 19 bp, Homo sapiens
  siRNA target sequence for IFRD1 (NM_001550.1,1337-1355).
cctatgacacctttaagga

SEQ ID NO: 319629 - DNA, 19 bp, Homo sapiens
  siRNA target sequence for IFRD1 (NM_001550.1,1377-1395).
gtacccacttgcagtcaaa

SEQ ID NO: 319630 - DNA, 19 bp, Homo sapiens
  siRNA target sequence for IFRD1 (NM_001550.1,1470-1488).
gaagatttctcgtttcgaa

SEQ ID NO: 319631 - DNA, 19 bp, Homo sapiens
  siRNA target sequence for IFRD1 (NM_001550.1,1480-1498).
cgtttcgaaaggcatttat

SEQ ID NO: 319632 - DNA, 19 bp, Homo sapiens
  siRNA target sequence for IFRD1 (NM_001550.1,1486-1504).
gaaaggcatttatataact

SEQ ID NO: 319633 - DNA, 19 bp, Homo sapiens
  siRNA target sequence for IFRD1 (NM_001550.1,1535-1553).
gaagcaaatgtcgagataa

SEQ ID NO: 319634 - DNA, 19 bp, Homo sapiens
  siRNA target sequence for SPAG6 (NM_012443.2,224-242).
gcgactagaccccaaaaca

SEQ ID NO: 319635 - DNA, 19 bp, Homo sapiens
  siRNA target sequence for SPAG6 (NM_012443.2,225-243).
cgactagaccccaaaacat

SEQ ID NO: 319636 - DNA, 19 bp, Homo sapiens
  siRNA target sequence for SPAG6 (NM_012443.2,254-272).
cagaacgcgggtgtaatgt

SEQ ID NO: 319637 - DNA, 19 bp, Homo sapiens
  siRNA target sequence for SPAG6 (NM_012443.2,256-274).
gaacgcgggtgtaatgtct

SEQ ID NO: 319638 - DNA, 19 bp, Homo sapiens
  siRNA target sequence for SPAG6 (NM_012443.2,295-313).
ggacgtggtcccaacaatt

SEQ ID NO: 319639 - DNA, 19 bp, Homo sapiens
  siRNA target sequence for SPAG6 (NM_012443.2,338-356).
gggagactggccaattata

SEQ ID NO: 319640 - DNA, 19 bp, Homo sapiens
  siRNA target sequence for SPAG6 (NM_012443.2,342-360).
gactggccaattataatga

SEQ ID NO: 319641 - DNA, 19 bp, Homo sapiens
  siRNA target sequence for SPAG6 (NM_012443.2,425-443).
cagaatcgcttctacaaga

SEQ ID NO: 319642 - DNA, 19 bp, Homo sapiens
  siRNA target sequence for SPAG6 (NM_012443.2,427-445).
gaatcgcttctacaagaaa

SEQ ID NO: 319643 - DNA, 19 bp, Homo sapiens
  siRNA target sequence for SPAG6 (NM_012443.2,460-478).
gttacgagcagttggtaaa

SEQ ID NO: 319644 - DNA, 19 bp, Homo sapiens
  siRNA target sequence for SPAG6 (NM_012443.2,521-539).
ctggatacgctggtcatat

SEQ ID NO: 319645 - DNA, 19 bp, Homo sapiens
  siRNA target sequence for SPAG6 (NM_012443.2,524-542).
gatacgctggtcatatgct

SEQ ID NO: 319646 - DNA, 19 bp, Homo sapiens
  siRNA target sequence for SPAG6 (NM_012443.2,533-551).
gtcatatgcttggaagatt

SEQ ID NO: 319647 - DNA, 19 bp, Homo sapiens
  siRNA target sequence for SPAG6 (NM_012443.2,576-594).
cagcctgggcacttagata

SEQ ID NO: 319648 - DNA, 19 bp, Homo sapiens
  siRNA target sequence for SPAG6 (NM_012443.2,580-598).
ctgggcacttagatatatt

SEQ ID NO: 319649 - DNA, 19 bp, Homo sapiens
  siRNA target sequence for SPAG6 (NM_012443.2,583-601).
ggcacttagatatattgca

SEQ ID NO: 319650 - DNA, 19 bp, Homo sapiens
  siRNA target sequence for SPAG6 (NM_012443.2,704-722).
gcttcggccctcagtgata

SEQ ID NO: 319651 - DNA, 19 bp, Homo sapiens
  siRNA target sequence for SPAG6 (NM_012443.2,705-723).
cttcggccctcagtgatat

SEQ ID NO: 319652 - DNA, 19 bp, Homo sapiens
  siRNA target sequence for SPAG6 (NM_012443.2,810-828).
ctaaattgaagcatcagat

SEQ ID NO: 319653 - DNA, 19 bp, Homo sapiens
  siRNA target sequence for SPAG6 (NM_012443.2,836-854).
gctctcagtcaggtttcaa

SEQ ID NO: 319654 - DNA, 19 bp, Homo sapiens
  siRNA target sequence for SPAG6 (NM_012443.2,861-879).
ccgtggatctggcagaaat

SEQ ID NO: 319655 - DNA, 19 bp, Homo sapiens
  siRNA target sequence for SPAG6 (NM_012443.2,954-972).
cttctactttaattagaga

SEQ ID NO: 319656 - DNA, 19 bp, Homo sapiens
  siRNA target sequence for SPAG6 (NM_012443.2,995-1013).
ctttcacagctggtagtta

SEQ ID NO: 319657 - DNA, 19 bp, Homo sapiens
  siRNA target sequence for SPAG6 (NM_012443.2,1023-1041).
gggttgctgccgtgattga

SEQ ID NO: 319658 - DNA, 19 bp, Homo sapiens
  siRNA target sequence for SPAG6 (NM_012443.2,1025-1043).
gttgctgccgtgattgact

SEQ ID NO: 319659 - DNA, 19 bp, Homo sapiens
  siRNA target sequence for SPAG6 (NM_012443.2,1071-1089).
ggctgcctggcatcatgat

SEQ ID NO: 319660 - DNA, 19 bp, Homo sapiens
  siRNA target sequence for SPAG6 (NM_012443.2,1081-1099).
catcatgatgcttggttat

SEQ ID NO: 319661 - DNA, 19 bp, Homo sapiens
  siRNA target sequence for SPAG6 (NM_012443.2,1178-1196).
gaagaaccggaagatcata

SEQ ID NO: 319662 - DNA, 19 bp, Homo sapiens
  siRNA target sequence for SPAG6 (NM_012443.2,1181-1199).
gaaccggaagatcatatta

SEQ ID NO: 319663 - DNA, 19 bp, Homo sapiens
  siRNA target sequence for SPAG6 (NM_012443.2,1324-1342).
ggatctccaagtaaaaagt

SEQ ID NO: 319664 - DNA, 19 bp, Homo sapiens
  siRNA target sequence for SPAG6 (NM_012443.2,1459-1477).
gctgccgcatgatagcaaa

SEQ ID NO: 319665 - DNA, 19 bp, Homo sapiens
  siRNA target sequence for SPAG6 (NM_012443.2,1473-1491).
gcaaagctcgacgactttt

SEQ ID NO: 319666 - DNA, 19 bp, Homo sapiens
  siRNA target sequence for SPAG6 (NM_012443.2,1474-1492).
caaagctcgacgacttttt

SEQ ID NO: 319667 - DNA, 19 bp, Homo sapiens
  siRNA target sequence for SPAG6 (NM_012443.2,1478-1496).
gctcgacgactttttgtaa

SEQ ID NO: 319668 - DNA, 19 bp, Homo sapiens
  siRNA target sequence for SPAG6 (NM_012443.2,1481-1499).
cgacgactttttgtaacaa

SEQ ID NO: 319669 - DNA, 19 bp, Homo sapiens
  siRNA target sequence for SPAG6 (NM_012443.2,1500-1518).
gtggtggccttaaaaaagt

SEQ ID NO: 319670 - DNA, 19 bp, Homo sapiens
  siRNA target sequence for SPAG6 (NM_012443.2,1553-1571).
caagaatacatcaacagta

SEQ ID NO: 319671 - DNA, 19 bp, Homo sapiens
  siRNA target sequence for SPAG6 (NM_012443.2,1578-1596).
gttgttaccccgaggaaat

SEQ ID NO: 319672 - DNA, 19 bp, Homo sapiens
  siRNA target sequence for SPAG6 (NM_012443.2,1581-1599).
gttaccccgaggaaatagt

SEQ ID NO: 319673 - DNA, 19 bp, Homo sapiens
  siRNA target sequence for SPAG6 (NM_012443.2,1589-1607).
gaggaaatagtgaggtatt

SEQ ID NO: 319674 - DNA, 19 bp, Homo sapiens
  siRNA target sequence for SPAG6 (NM_012443.2,1612-1630).
ccctggatattcagataca

SEQ ID NO: 319675 - DNA, 19 bp, Homo sapiens
  siRNA target sequence for SPAG6 (NM_012443.2,1639-1657).
gagggtggacagctatcaa

SEQ ID NO: 319676 - DNA, 19 bp, Homo sapiens
  siRNA target sequence for MLF1 (NM_022443.2,164-182).
cttgcacaccgagaaaata

SEQ ID NO: 319677 - DNA, 19 bp, Homo sapiens
  siRNA target sequence for MLF1 (NM_022443.2,185-203).
cgacagatgataagaagtt

SEQ ID NO: 319678 - DNA, 19 bp, Homo sapiens
  siRNA target sequence for MLF1 (NM_022443.2,193-211).
gataagaagtttttctgaa

SEQ ID NO: 319679 - DNA, 19 bp, Homo sapiens
  siRNA target sequence for MLF1 (NM_022443.2,251-269).
gggagagctcataatcgta

SEQ ID NO: 319680 - DNA, 19 bp, Homo sapiens
  siRNA target sequence for MLF1 (NM_022443.2,281-299).
gatggtgaagattctttga

SEQ ID NO: 319681 - DNA, 19 bp, Homo sapiens
  siRNA target sequence for MLF1 (NM_022443.2,331-349).
ggaccaaatggtgtcaaat

SEQ ID NO: 319682 - DNA, 19 bp, Homo sapiens
  siRNA target sequence for MLF1 (NM_022443.2,426-444).
cttcctcagttatgactta

SEQ ID NO: 319683 - DNA, 19 bp, Homo sapiens
  siRNA target sequence for MLF1 (NM_022443.2,432-450).
cagttatgacttattccaa

SEQ ID NO: 319684 - DNA, 19 bp, Homo sapiens
  siRNA target sequence for MLF1 (NM_022443.2,458-476).
gatgaaccgccaaaggttt

SEQ ID NO: 319685 - DNA, 19 bp, Homo sapiens
  siRNA target sequence for MLF1 (NM_022443.2,570-588).
ctattggtcatcatatcca

SEQ ID NO: 319686 - DNA, 19 bp, Homo sapiens
  siRNA target sequence for MLF1 (NM_022443.2,590-608).
gaccgagctcatgtcatta

SEQ ID NO: 319687 - DNA, 19 bp, Homo sapiens
  siRNA target sequence for MLF1 (NM_022443.2,675-693).
gtgatgctcatgcttttga

SEQ ID NO: 319688 - DNA, 19 bp, Homo sapiens
  siRNA target sequence for MLF1 (NM_022443.2,724-742).
caaaccaggacgacacaat

SEQ ID NO: 319689 - DNA, 19 bp, Homo sapiens
  siRNA target sequence for MLF1 (NM_022443.2,732-750).
gacgacacaatctaggaaa

SEQ ID NO: 319690 - DNA, 19 bp, Homo sapiens
  siRNA target sequence for MLF1 (NM_022443.2,762-780).
gaagtgttggccatgagaa

SEQ ID NO: 319691 - DNA, 19 bp, Homo sapiens
  siRNA target sequence for MLF1 (NM_022443.2,782-800).
cctggctcccgagaactta

SEQ ID NO: 319692 - DNA, 19 bp, Homo sapiens
  siRNA target sequence for MLF1 (NM_022443.2,783-801).
ctggctcccgagaacttaa

SEQ ID NO: 319693 - DNA, 19 bp, Homo sapiens
  siRNA target sequence for MLF1 (NM_022443.2,785-803).
ggctcccgagaacttaaaa

SEQ ID NO: 319694 - DNA, 19 bp, Homo sapiens
  siRNA target sequence for MLF1 (NM_022443.2,787-805).
ctcccgagaacttaaaaga

SEQ ID NO: 319695 - DNA, 19 bp, Homo sapiens
  siRNA target sequence for MLF1 (NM_022443.2,808-826).
ggagaaacctcaacaaagt

SEQ ID NO: 319696 - DNA, 19 bp, Homo sapiens
  siRNA target sequence for MLF1 (NM_022443.2,842-860).
ggaaggagatcaaatgttt

SEQ ID NO: 319697 - DNA, 19 bp, Homo sapiens
  siRNA target sequence for MLF1 (NM_022443.2,864-882).
gggacaaactccacatcaa

SEQ ID NO: 319698 - DNA, 19 bp, Homo sapiens
  siRNA target sequence for MLF1 (NM_022443.2,865-883).
ggacaaactccacatcaaa

SEQ ID NO: 319699 - DNA, 19 bp, Homo sapiens
  siRNA target sequence for CRISP1 (NM_001131.2,127-145).
gcctatgttgtccatgaaa

SEQ ID NO: 319700 - DNA, 19 bp, Homo sapiens
  siRNA target sequence for CRISP1 (NM_001131.2,128-146).
cctatgttgtccatgaaaa

SEQ ID NO: 319701 - DNA, 19 bp, Homo sapiens
  siRNA target sequence for CRISP1 (NM_001131.2,153-171).
cagctagagaccaatttaa

SEQ ID NO: 319702 - DNA, 19 bp, Homo sapiens
  siRNA target sequence for CRISP1 (NM_001131.2,155-173).
gctagagaccaatttaata

SEQ ID NO: 319703 - DNA, 19 bp, Homo sapiens
  siRNA target sequence for CRISP1 (NM_001131.2,181-199).
caccgacttgccaaatgta

SEQ ID NO: 319704 - DNA, 19 bp, Homo sapiens
  siRNA target sequence for CRISP1 (NM_001131.2,183-201).
ccgacttgccaaatgtaca

SEQ ID NO: 319705 - DNA, 19 bp, Homo sapiens
  siRNA target sequence for CRISP1 (NM_001131.2,197-215).
gtacaagaagagatcgtta

SEQ ID NO: 319706 - DNA, 19 bp, Homo sapiens
  siRNA target sequence for CRISP1 (NM_001131.2,200-218).
caagaagagatcgttaata

SEQ ID NO: 319707 - DNA, 19 bp, Homo sapiens
  siRNA target sequence for CRISP1 (NM_001131.2,206-224).
gagatcgttaatatacaca

SEQ ID NO: 319708 - DNA, 19 bp, Homo sapiens
  siRNA target sequence for CRISP1 (NM_001131.2,226-244).
cgccctcaggagaagagta

SEQ ID NO: 319709 - DNA, 19 bp, Homo sapiens
  siRNA target sequence for CRISP1 (NM_001131.2,229-247).
cctcaggagaagagtagtt

SEQ ID NO: 319710 - DNA, 19 bp, Homo sapiens
  siRNA target sequence for CRISP1 (NM_001131.2,377-395).
ggagaaaatatgcatatga

SEQ ID NO: 319711 - DNA, 19 bp, Homo sapiens
  siRNA target sequence for CRISP1 (NM_001131.2,388-406).
gcatatgacatcttatcct

SEQ ID NO: 319712 - DNA, 19 bp, Homo sapiens
  siRNA target sequence for CRISP1 (NM_001131.2,436-454).
gtacagtgagtctacaagt

SEQ ID NO: 319713 - DNA, 19 bp, Homo sapiens
  siRNA target sequence for CRISP1 (NM_001131.2,441-459).
gtgagtctacaagtttcaa

SEQ ID NO: 319714 - DNA, 19 bp, Homo sapiens
  siRNA target sequence for CRISP1 (NM_001131.2,445-463).
gtctacaagtttcaaacat

SEQ ID NO: 319715 - DNA, 19 bp, Homo sapiens
  siRNA target sequence for CRISP1 (NM_001131.2,471-489).
ggacaacaacggatgatga

SEQ ID NO: 319716 - DNA, 19 bp, Homo sapiens
  siRNA target sequence for CRISP1 (NM_001131.2,572-590).
ggatcacctcgatatctct

SEQ ID NO: 319717 - DNA, 19 bp, Homo sapiens
  siRNA target sequence for CRISP1 (NM_001131.2,573-591).
gatcacctcgatatctcta

SEQ ID NO: 319718 - DNA, 19 bp, Homo sapiens
  siRNA target sequence for CRISP1 (NM_001131.2,578-596).
cctcgatatctctacgttt

SEQ ID NO: 319719 - DNA, 19 bp, Homo sapiens
  siRNA target sequence for CRISP1 (NM_001131.2,582-600).
gatatctctacgtttgtca

SEQ ID NO: 319720 - DNA, 19 bp, Homo sapiens
  siRNA target sequence for CRISP1 (NM_001131.2,587-605).
ctctacgtttgtcactatt

SEQ ID NO: 319721 - DNA, 19 bp, Homo sapiens
  siRNA target sequence for CRISP1 (NM_001131.2,589-607).
ctacgtttgtcactattgt

SEQ ID NO: 319722 - DNA, 19 bp, Homo sapiens
  siRNA target sequence for CRISP1 (NM_001131.2,592-610).
cgtttgtcactattgtcat

SEQ ID NO: 319723 - DNA, 19 bp, Homo sapiens
  siRNA target sequence for CRISP1 (NM_001131.2,649-667).
gacaggcgtcccatgtgaa

SEQ ID NO: 319724 - DNA, 19 bp, Homo sapiens
  siRNA target sequence for CRISP1 (NM_001131.2,665-683).
gaagcctgcccaagtaact

SEQ ID NO: 319725 - DNA, 19 bp, Homo sapiens
  siRNA target sequence for CRISP1 (NM_001131.2,702-720).
ctaacccctgcatctacta

SEQ ID NO: 319726 - DNA, 19 bp, Homo sapiens
  siRNA target sequence for CRISP1 (NM_001131.2,708-726).
cctgcatctactatgatga

SEQ ID NO: 319727 - DNA, 19 bp, Homo sapiens
  siRNA target sequence for CRISP1 (NM_001131.2,730-748).
cttcgactgtgacatacaa

SEQ ID NO: 319728 - DNA, 19 bp, Homo sapiens
  siRNA target sequence for CRISP1 (NM_001131.2,761-779).
ggatgcaaccactcaacaa

SEQ ID NO: 319729 - DNA, 19 bp, Homo sapiens
  siRNA target sequence for CRISP1 (NM_001131.2,777-795).
caactatcctattctgtaa

SEQ ID NO: 319730 - DNA, 19 bp, Homo sapiens
  siRNA target sequence for NP25 (NM_013259.1,232-250).
cctgtgcaagctgataaat

SEQ ID NO: 319731 - DNA, 19 bp, Homo sapiens
  siRNA target sequence for NP25 (NM_013259.1,233-251).
ctgtgcaagctgataaata

SEQ ID NO: 319732 - DNA, 19 bp, Homo sapiens
  siRNA target sequence for NP25 (NM_013259.1,235-253).
gtgcaagctgataaatagt

SEQ ID NO: 319733 - DNA, 19 bp, Homo sapiens
  siRNA target sequence for NP25 (NM_013259.1,237-255).
gcaagctgataaatagttt

SEQ ID NO: 319734 - DNA, 19 bp, Homo sapiens
  siRNA target sequence for NP25 (NM_013259.1,364-382).
cagaaccaccgacatcttt

SEQ ID NO: 319735 - DNA, 19 bp, Homo sapiens
  siRNA target sequence for NP25 (NM_013259.1,366-384).
gaaccaccgacatctttca

SEQ ID NO: 319736 - DNA, 19 bp, Homo sapiens
  siRNA target sequence for NP25 (NM_013259.1,551-569).
cgccagggacagaacgtaa

SEQ ID NO: 319737 - DNA, 19 bp, Homo sapiens
  siRNA target sequence for NP25 (NM_013259.1,553-571).
ccagggacagaacgtaata

SEQ ID NO: 319738 - DNA, 19 bp, Homo sapiens
  siRNA target sequence for NP25 (NM_013259.1,759-777).
ctgtccctggtttttgcaa

SEQ ID NO: 319739 - DNA, 19 bp, Homo sapiens
  siRNA target sequence for PCP4 (NM_006198.1,100-118).
caagacatctggtgaaaat

SEQ ID NO: 319740 - DNA, 19 bp, Homo sapiens
  siRNA target sequence for PCP4 (NM_006198.1,201-219).
ctcagttcagaaaattcca

SEQ ID NO: 319741 - DNA, 19 bp, Homo sapiens
  siRNA target sequence for PNMA1 (NM_006029.3,799-817).
ggtctcctaccgaatgctt

SEQ ID NO: 319742 - DNA, 19 bp, Homo sapiens
  siRNA target sequence for PNMA1 (NM_006029.3,809-827).
cgaatgcttgggagaatgt

SEQ ID NO: 319743 - DNA, 19 bp, Homo sapiens
  siRNA target sequence for PNMA1 (NM_006029.3,865-883).
gctcactggcgctgtagat

SEQ ID NO: 319744 - DNA, 19 bp, Homo sapiens
  siRNA target sequence for PNMA1 (NM_006029.3,866-884).
ctcactggcgctgtagatt

SEQ ID NO: 319745 - DNA, 19 bp, Homo sapiens
  siRNA target sequence for PNMA1 (NM_006029.3,920-938).
ggggtctggaaagtgttat

SEQ ID NO: 319746 - DNA, 19 bp, Homo sapiens
  siRNA target sequence for PNMA1 (NM_006029.3,1003-1021).
gtggaccgtgcaagatgtt

SEQ ID NO: 319747 - DNA, 19 bp, Homo sapiens
  siRNA target sequence for PNMA1 (NM_006029.3,1026-1044).
gtgtccttgggtttcagaa

SEQ ID NO: 319748 - DNA, 19 bp, Homo sapiens
  siRNA target sequence for PNMA1 (NM_006029.3,1073-1091).
ccagcagagatgctaaact

SEQ ID NO: 319749 - DNA, 19 bp, Homo sapiens
  siRNA target sequence for PNMA1 (NM_006029.3,1074-1092).
cagcagagatgctaaacta

SEQ ID NO: 319750 - DNA, 19 bp, Homo sapiens
  siRNA target sequence for PNMA1 (NM_006029.3,1076-1094).
gcagagatgctaaactata

SEQ ID NO: 319751 - DNA, 19 bp, Homo sapiens
  siRNA target sequence for PNMA1 (NM_006029.3,1077-1095).
cagagatgctaaactatat

SEQ ID NO: 319752 - DNA, 19 bp, Homo sapiens
  siRNA target sequence for PNMA1 (NM_006029.3,1084-1102).
gctaaactatattttggat

SEQ ID NO: 319753 - DNA, 19 bp, Homo sapiens
  siRNA target sequence for PNMA1 (NM_006029.3,1177-1195).
gcctggagaggaaaccttt

SEQ ID NO: 319754 - DNA, 19 bp, Homo sapiens
  siRNA target sequence for PNMA1 (NM_006029.3,1203-1221).
ggctggagcacactaatga

SEQ ID NO: 319755 - DNA, 19 bp, Homo sapiens
  siRNA target sequence for PNMA1 (NM_006029.3,1237-1255).
gcaggtgtccgatgtagaa

SEQ ID NO: 319756 - DNA, 19 bp, Homo sapiens
  siRNA target sequence for PNMA1 (NM_006029.3,1238-1256).
caggtgtccgatgtagaaa

SEQ ID NO: 319757 - DNA, 19 bp, Homo sapiens
  siRNA target sequence for PNMA1 (NM_006029.3,1265-1283).
cggttgatggagagtctta

SEQ ID NO: 319758 - DNA, 19 bp, Homo sapiens
  siRNA target sequence for PNMA1 (NM_006029.3,1267-1285).
gttgatggagagtcttaga

SEQ ID NO: 319759 - DNA, 19 bp, Homo sapiens
  siRNA target sequence for PNMA1 (NM_006029.3,1395-1413).
gggatgcccagatcaaatt

SEQ ID NO: 319760 - DNA, 19 bp, Homo sapiens
  siRNA target sequence for PNMA1 (NM_006029.3,1427-1445).
cagaacccgggagaaaaat

SEQ ID NO: 319761 - DNA, 19 bp, Homo sapiens
  siRNA target sequence for PNMA1 (NM_006029.3,1432-1450).
cccgggagaaaaattgtct

SEQ ID NO: 319762 - DNA, 19 bp, Homo sapiens
  siRNA target sequence for PNMA1 (NM_006029.3,1501-1519).
ggccattgataaagataat

SEQ ID NO: 319763 - DNA, 19 bp, Homo sapiens
  siRNA target sequence for PNMA1 (NM_006029.3,1503-1521).
ccattgataaagataatgt

SEQ ID NO: 319764 - DNA, 19 bp, Homo sapiens
  siRNA target sequence for PNMA1 (NM_006029.3,1616-1634).
gccccaaacctctttcagt

SEQ ID NO: 319765 - DNA, 19 bp, Homo sapiens
  siRNA target sequence for RNF103 (NM_005667.2,1017-1035).
cgtcctggccaggtttttt

SEQ ID NO: 319766 - DNA, 19 bp, Homo sapiens
  siRNA target sequence for RNF103 (NM_005667.2,1038-1056).
ggccattgtgtggtatgaa

SEQ ID NO: 319767 - DNA, 19 bp, Homo sapiens
  siRNA target sequence for RNF103 (NM_005667.2,1039-1057).
gccattgtgtggtatgaaa

SEQ ID NO: 319768 - DNA, 19 bp, Homo sapiens
  siRNA target sequence for RNF103 (NM_005667.2,1090-1108).
gtggcgctgagcttcaaga

SEQ ID NO: 319769 - DNA, 19 bp, Homo sapiens
  siRNA target sequence for RNF103 (NM_005667.2,1243-1261).
gcatccgaatcggtttcta

SEQ ID NO: 319770 - DNA, 19 bp, Homo sapiens
  siRNA target sequence for RNF103 (NM_005667.2,1253-1271).
cggtttctagtaccaattt

SEQ ID NO: 319771 - DNA, 19 bp, Homo sapiens
  siRNA target sequence for RNF103 (NM_005667.2,1327-1345).
ctggttcaggtcatagcaa

SEQ ID NO: 319772 - DNA, 19 bp, Homo sapiens
  siRNA target sequence for RNF103 (NM_005667.2,1398-1416).
ggtgtcaagatttggaata

SEQ ID NO: 319773 - DNA, 19 bp, Homo sapiens
  siRNA target sequence for RNF103 (NM_005667.2,1417-1435).
cgtacaggcacatttaact

SEQ ID NO: 319774 - DNA, 19 bp, Homo sapiens
  siRNA target sequence for RNF103 (NM_005667.2,1473-1491).
ggtccgatccacactcatt

SEQ ID NO: 319775 - DNA, 19 bp, Homo sapiens
  siRNA target sequence for RNF103 (NM_005667.2,1474-1492).
gtccgatccacactcatta

SEQ ID NO: 319776 - DNA, 19 bp, Homo sapiens
  siRNA target sequence for RNF103 (NM_005667.2,1477-1495).
cgatccacactcattatgt

SEQ ID NO: 319777 - DNA, 19 bp, Homo sapiens
  siRNA target sequence for RNF103 (NM_005667.2,1547-1565).
gtggacgcaagattgaagt

SEQ ID NO: 319778 - DNA, 19 bp, Homo sapiens
  siRNA target sequence for RNF103 (NM_005667.2,1600-1618).
gcttctcggatcaaaacca

SEQ ID NO: 319779 - DNA, 19 bp, Homo sapiens
  siRNA target sequence for RNF103 (NM_005667.2,1601-1619).
cttctcggatcaaaaccat

SEQ ID NO: 319780 - DNA, 19 bp, Homo sapiens
  siRNA target sequence for RNF103 (NM_005667.2,1604-1622).
ctcggatcaaaaccattta

SEQ ID NO: 319781 - DNA, 19 bp, Homo sapiens
  siRNA target sequence for RNF103 (NM_005667.2,1658-1676).
gtgatcagtattggttaaa

SEQ ID NO: 319782 - DNA, 19 bp, Homo sapiens
  siRNA target sequence for RNF103 (NM_005667.2,1721-1739).
ctgcactaagtataaagtt

SEQ ID NO: 319783 - DNA, 19 bp, Homo sapiens
  siRNA target sequence for RNF103 (NM_005667.2,1781-1799).
gggacaacaagagttatat

SEQ ID NO: 319784 - DNA, 19 bp, Homo sapiens
  siRNA target sequence for RNF103 (NM_005667.2,1824-1842).
gccatcatacatacttaga

SEQ ID NO: 319785 - DNA, 19 bp, Homo sapiens
  siRNA target sequence for RNF103 (NM_005667.2,1825-1843).
ccatcatacatacttagaa

SEQ ID NO: 319786 - DNA, 19 bp, Homo sapiens
  siRNA target sequence for RNF103 (NM_005667.2,1872-1890).
ccacacaggcgaatttata

SEQ ID NO: 319787 - DNA, 19 bp, Homo sapiens
  siRNA target sequence for RNF103 (NM_005667.2,1873-1891).
cacacaggcgaatttatat

SEQ ID NO: 319788 - DNA, 19 bp, Homo sapiens
  siRNA target sequence for RNF103 (NM_005667.2,1894-1912).
cttcaggccatggattcat

SEQ ID NO: 319789 - DNA, 19 bp, Homo sapiens
  siRNA target sequence for RNF103 (NM_005667.2,1931-1949).
ccgaggtaaatgatctgtt

SEQ ID NO: 319790 - DNA, 19 bp, Homo sapiens
  siRNA target sequence for RNF103 (NM_005667.2,1932-1950).
cgaggtaaatgatctgttt

SEQ ID NO: 319791 - DNA, 19 bp, Homo sapiens
  siRNA target sequence for RNF103 (NM_005667.2,1935-1953).
ggtaaatgatctgtttgtt

SEQ ID NO: 319792 - DNA, 19 bp, Homo sapiens
  siRNA target sequence for RNF103 (NM_005667.2,1958-1976).
gcttggttctagttaatct

SEQ ID NO: 319793 - DNA, 19 bp, Homo sapiens
  siRNA target sequence for RNF103 (NM_005667.2,1959-1977).
cttggttctagttaatctt

SEQ ID NO: 319794 - DNA, 19 bp, Homo sapiens
  siRNA target sequence for RNF103 (NM_005667.2,2003-2021).
cacaaggagctaccataaa

SEQ ID NO: 319795 - DNA, 19 bp, Homo sapiens
  siRNA target sequence for RNF103 (NM_005667.2,2012-2030).
ctaccataaagcgatttgt

SEQ ID NO: 319796 - DNA, 19 bp, Homo sapiens
  siRNA target sequence for RNF103 (NM_005667.2,2022-2040).
gcgatttgtggttctcata

SEQ ID NO: 319797 - DNA, 19 bp, Homo sapiens
  siRNA target sequence for RNF103 (NM_005667.2,2023-2041).
cgatttgtggttctcataa

SEQ ID NO: 319798 - DNA, 19 bp, Homo sapiens
  siRNA target sequence for RNF103 (NM_005667.2,2042-2060).
gcactttagggacatataa

SEQ ID NO: 319799 - DNA, 19 bp, Homo sapiens
  siRNA target sequence for RNF103 (NM_005667.2,2050-2068).
gggacatataattctctat

SEQ ID NO: 319800 - DNA, 19 bp, Homo sapiens
  siRNA target sequence for RNF103 (NM_005667.2,2051-2069).
ggacatataattctctatt

SEQ ID NO: 319801 - DNA, 19 bp, Homo sapiens
  siRNA target sequence for RNF103 (NM_005667.2,2052-2070).
gacatataattctctatta

SEQ ID NO: 319802 - DNA, 19 bp, Homo sapiens
  siRNA target sequence for RNF103 (NM_005667.2,2054-2072).
catataattctctattaat

SEQ ID NO: 319803 - DNA, 19 bp, Homo sapiens
  siRNA target sequence for RNF103 (NM_005667.2,2104-2122).
cagctaccttacttagata

SEQ ID NO: 319804 - DNA, 19 bp, Homo sapiens
  siRNA target sequence for RNF103 (NM_005667.2,2131-2149).
gaatatagcttaaaattgt

SEQ ID NO: 319805 - DNA, 19 bp, Homo sapiens
  siRNA target sequence for RNF103 (NM_005667.2,2226-2244).
gtttctcagtacatacctt

SEQ ID NO: 319806 - DNA, 19 bp, Homo sapiens
  siRNA target sequence for RNF103 (NM_005667.2,2237-2255).
cataccttggtcatggttt

SEQ ID NO: 319807 - DNA, 19 bp, Homo sapiens
  siRNA target sequence for RNF103 (NM_005667.2,2246-2264).
gtcatggtttactaattga

SEQ ID NO: 319808 - DNA, 19 bp, Homo sapiens
  siRNA target sequence for RNF103 (NM_005667.2,2285-2303).
ggcgcaacaacaacaatga

SEQ ID NO: 319809 - DNA, 19 bp, Homo sapiens
  siRNA target sequence for RNF103 (NM_005667.2,2365-2383).
ctcttccacccgattgctt

SEQ ID NO: 319810 - DNA, 19 bp, Homo sapiens
  siRNA target sequence for RNF103 (NM_005667.2,2374-2392).
ccgattgcttcttttcaga

SEQ ID NO: 319811 - DNA, 19 bp, Homo sapiens
  siRNA target sequence for RNF103 (NM_005667.2,2415-2433).
ggacgaagaccctgactta

SEQ ID NO: 319812 - DNA, 19 bp, Homo sapiens
  siRNA target sequence for RNF103 (NM_005667.2,2478-2496).
gataccaactgattatatt

SEQ ID NO: 319813 - DNA, 19 bp, Homo sapiens
  siRNA target sequence for RNF103 (NM_005667.2,2506-2524).
ccaatgtggcgatttaaat

SEQ ID NO: 319814 - DNA, 19 bp, Homo sapiens
  siRNA target sequence for RNF103 (NM_005667.2,2553-2571).
gtcggaggggtctcaagat

SEQ ID NO: 319815 - DNA, 19 bp, Homo sapiens
  siRNA target sequence for RNF103 (NM_005667.2,2556-2574).
ggaggggtctcaagatact

SEQ ID NO: 319816 - DNA, 19 bp, Homo sapiens
  siRNA target sequence for RNF103 (NM_005667.2,2559-2577).
ggggtctcaagatactgaa

SEQ ID NO: 319817 - DNA, 19 bp, Homo sapiens
  siRNA target sequence for RNF103 (NM_005667.2,2560-2578).
gggtctcaagatactgaaa

SEQ ID NO: 319818 - DNA, 19 bp, Homo sapiens
  siRNA target sequence for RNF103 (NM_005667.2,2561-2579).
ggtctcaagatactgaaaa

SEQ ID NO: 319819 - DNA, 19 bp, Homo sapiens
  siRNA target sequence for RNF103 (NM_005667.2,2595-2613).
gaacacagacactttgagt

SEQ ID NO: 319820 - DNA, 19 bp, Homo sapiens
  siRNA target sequence for RNF103 (NM_005667.2,2640-2658).
gcaaagcgtacttcacaat

SEQ ID NO: 319821 - DNA, 19 bp, Homo sapiens
  siRNA target sequence for RNF103 (NM_005667.2,2641-2659).
caaagcgtacttcacaatt

SEQ ID NO: 319822 - DNA, 19 bp, Homo sapiens
  siRNA target sequence for RNF103 (NM_005667.2,2693-2711).
cttgttcatgtgccaataa

SEQ ID NO: 319823 - DNA, 19 bp, Homo sapiens
  siRNA target sequence for RNF103 (NM_005667.2,2702-2720).
gtgccaataaatattgtca

SEQ ID NO: 319824 - DNA, 19 bp, Homo sapiens
  siRNA target sequence for RNF103 (NM_005667.2,2719-2737).
cagaccagcccatgtgaaa

SEQ ID NO: 319825 - DNA, 19 bp, Homo sapiens
  siRNA target sequence for RNF103 (NM_005667.2,2744-2762).
ggaggtcatatggatcata

SEQ ID NO: 319826 - DNA, 19 bp, Homo sapiens
  siRNA target sequence for RNF103 (NM_005667.2,2745-2763).
gaggtcatatggatcatat

SEQ ID NO: 319827 - DNA, 19 bp, Homo sapiens
  siRNA target sequence for RNF103 (NM_005667.2,2747-2765).
ggtcatatggatcatataa

SEQ ID NO: 319828 - DNA, 19 bp, Homo sapiens
  siRNA target sequence for RNF103 (NM_005667.2,2756-2774).
gatcatataacactaatga

SEQ ID NO: 319829 - DNA, 19 bp, Homo sapiens
  siRNA target sequence for RNF103 (NM_005667.2,2766-2784).
cactaatgaagatatggaa

SEQ ID NO: 319830 - DNA, 19 bp, Homo sapiens
  siRNA target sequence for RNF103 (NM_005667.2,2781-2799).
ggaacctgattggttaact

SEQ ID NO: 319831 - DNA, 19 bp, Homo sapiens
  siRNA target sequence for RNF103 (NM_005667.2,2782-2800).
gaacctgattggttaactt

SEQ ID NO: 319832 - DNA, 19 bp, Homo sapiens
  siRNA target sequence for RNF103 (NM_005667.2,2899-2917).
catcagaattgcattgtga

SEQ ID NO: 319833 - DNA, 19 bp, Homo sapiens
  siRNA target sequence for RNF103 (NM_005667.2,2954-2972).
gccggtggccttcttataa

SEQ ID NO: 319834 - DNA, 19 bp, Homo sapiens
  siRNA target sequence for RNF103 (NM_005667.2,2955-2973).
ccggtggccttcttataaa

SEQ ID NO: 319835 - DNA, 19 bp, Homo sapiens
  siRNA target sequence for RNF103 (NM_005667.2,2956-2974).
cggtggccttcttataaaa

SEQ ID NO: 319836 - DNA, 19 bp, Homo sapiens
  siRNA target sequence for C4orf6 (NM_005750.1,197-215).
cacaagactcacaattcaa

SEQ ID NO: 319837 - DNA, 19 bp, Homo sapiens
  siRNA target sequence for C4orf6 (NM_005750.1,265-283).
ggaaggaacacgcaaaaat

SEQ ID NO: 319838 - DNA, 19 bp, Homo sapiens
  siRNA target sequence for C4orf6 (NM_005750.1,266-284).
gaaggaacacgcaaaaatt

SEQ ID NO: 319839 - DNA, 19 bp, Homo sapiens
  siRNA target sequence for C4orf6 (NM_005750.1,269-287).
ggaacacgcaaaaattttt

SEQ ID NO: 319840 - DNA, 19 bp, Homo sapiens
  siRNA target sequence for C4orf6 (NM_005750.1,289-307).
ccttcttctttcaattgga

SEQ ID NO: 319841 - DNA, 19 bp, Homo sapiens
  siRNA target sequence for C4orf6 (NM_005750.1,308-326).
cactatggacggaaatcca

SEQ ID NO: 319842 - DNA, 19 bp, Homo sapiens
  siRNA target sequence for CLN8 (NM_018941.2,256-274).
ggcacatcagagagcattt

SEQ ID NO: 319843 - DNA, 19 bp, Homo sapiens
  siRNA target sequence for CLN8 (NM_018941.2,435-453).
ggccacgcgtgcagtcttt

SEQ ID NO: 319844 - DNA, 19 bp, Homo sapiens
  siRNA target sequence for CLN8 (NM_018941.2,557-575).
cgacagcaacgggattctt

SEQ ID NO: 319845 - DNA, 19 bp, Homo sapiens
  siRNA target sequence for CLN8 (NM_018941.2,558-576).
gacagcaacgggattcttt

SEQ ID NO: 319846 - DNA, 19 bp, Homo sapiens
  siRNA target sequence for CLN8 (NM_018941.2,562-580).
gcaacgggattcttttgct

SEQ ID NO: 319847 - DNA, 19 bp, Homo sapiens
  siRNA target sequence for CLN8 (NM_018941.2,598-616).
cacctgtccaacttgatct

SEQ ID NO: 319848 - DNA, 19 bp, Homo sapiens
  siRNA target sequence for CLN8 (NM_018941.2,639-657).
ggttatccaccatctcttt

SEQ ID NO: 319849 - DNA, 19 bp, Homo sapiens
  siRNA target sequence for CLN8 (NM_018941.2,783-801).
ctggtccgagtctctgttt

SEQ ID NO: 319850 - DNA, 19 bp, Homo sapiens
  siRNA target sequence for CLN8 (NM_018941.2,814-832).
cagtggctgatgattcaca

SEQ ID NO: 319851 - DNA, 19 bp, Homo sapiens
  siRNA target sequence for CLN8 (NM_018941.2,818-836).
ggctgatgattcacatgtt

SEQ ID NO: 319852 - DNA, 19 bp, Homo sapiens
  siRNA target sequence for CLN8 (NM_018941.2,838-856).
cactgccgcatggttctaa

SEQ ID NO: 319853 - DNA, 19 bp, Homo sapiens
  siRNA target sequence for CLN8 (NM_018941.2,842-860).
gccgcatggttctaaccta

SEQ ID NO: 319854 - DNA, 19 bp, Homo sapiens
  siRNA target sequence for CLN8 (NM_018941.2,949-967).
gctctgcttacgctaatca

SEQ ID NO: 319855 - DNA, 19 bp, Homo sapiens
  siRNA target sequence for CLN8 (NM_018941.2,950-968).
ctctgcttacgctaatcat

SEQ ID NO: 319856 - DNA, 19 bp, Homo sapiens
  siRNA target sequence for CLN8 (NM_018941.2,952-970).
ctgcttacgctaatcatta

SEQ ID NO: 319857 - DNA, 19 bp, Homo sapiens
  siRNA target sequence for CLN8 (NM_018941.2,954-972).
gcttacgctaatcattaat

SEQ ID NO: 319858 - DNA, 19 bp, Homo sapiens
  siRNA target sequence for CLN8 (NM_018941.2,959-977).
cgctaatcattaatccata

SEQ ID NO: 319859 - DNA, 19 bp, Homo sapiens
  siRNA target sequence for CLN8 (NM_018941.2,973-991).
ccatattggacccataaga

SEQ ID NO: 319860 - DNA, 19 bp, Homo sapiens
  siRNA target sequence for DAB1 (NM_021080.3,754-772).
gtgaagccactttgataaa

SEQ ID NO: 319861 - DNA, 19 bp, Homo sapiens
  siRNA target sequence for DAB1 (NM_021080.3,756-774).
gaagccactttgataaaga

SEQ ID NO: 319862 - DNA, 19 bp, Homo sapiens
  siRNA target sequence for DAB1 (NM_021080.3,795-813).
cggtacaaagccaaattga

SEQ ID NO: 319863 - DNA, 19 bp, Homo sapiens
  siRNA target sequence for DAB1 (NM_021080.3,796-814).
ggtacaaagccaaattgat

SEQ ID NO: 319864 - DNA, 19 bp, Homo sapiens
  siRNA target sequence for DAB1 (NM_021080.3,806-824).
caaattgatcgggattgat

SEQ ID NO: 319865 - DNA, 19 bp, Homo sapiens
  siRNA target sequence for DAB1 (NM_021080.3,812-830).
gatcgggattgatgaagtt

SEQ ID NO: 319866 - DNA, 19 bp, Homo sapiens
  siRNA target sequence for DAB1 (NM_021080.3,837-855).
gctcggggagacaagttat

SEQ ID NO: 319867 - DNA, 19 bp, Homo sapiens
  siRNA target sequence for DAB1 (NM_021080.3,841-859).
ggggagacaagttatgtca

SEQ ID NO: 319868 - DNA, 19 bp, Homo sapiens
  siRNA target sequence for DAB1 (NM_021080.3,842-860).
gggagacaagttatgtcaa

SEQ ID NO: 319869 - DNA, 19 bp, Homo sapiens
  siRNA target sequence for DAB1 (NM_021080.3,846-864).
gacaagttatgtcaagatt

SEQ ID NO: 319870 - DNA, 19 bp, Homo sapiens
  siRNA target sequence for DAB1 (NM_021080.3,861-879).
gattccatgatgaaactca

SEQ ID NO: 319871 - DNA, 19 bp, Homo sapiens
  siRNA target sequence for DAB1 (NM_021080.3,1000-1018).
ctgttcatgaaatatccta

SEQ ID NO: 319872 - DNA, 19 bp, Homo sapiens
  siRNA target sequence for DAB1 (NM_021080.3,1138-1156).
gagatctctttcaactcat

SEQ ID NO: 319873 - DNA, 19 bp, Homo sapiens
  siRNA target sequence for DAB1 (NM_021080.3,1140-1158).
gatctctttcaactcattt

SEQ ID NO: 319874 - DNA, 19 bp, Homo sapiens
  siRNA target sequence for DAB1 (NM_021080.3,1263-1281).
gtgtaccagtacattgtgt

SEQ ID NO: 319875 - DNA, 19 bp, Homo sapiens
  siRNA target sequence for DAB1 (NM_021080.3,1308-1326).
gatcccgaaacggaagaaa

SEQ ID NO: 319876 - DNA, 19 bp, Homo sapiens
  siRNA target sequence for DAB1 (NM_021080.3,1311-1329).
cccgaaacggaagaaaaca

SEQ ID NO: 319877 - DNA, 19 bp, Homo sapiens
  siRNA target sequence for DAB1 (NM_021080.3,1312-1330).
ccgaaacggaagaaaacat

SEQ ID NO: 319878 - DNA, 19 bp, Homo sapiens
  siRNA target sequence for DAB1 (NM_021080.3,1430-1448).
gtccacaccccctgatata

SEQ ID NO: 319879 - DNA, 19 bp, Homo sapiens
  siRNA target sequence for DAB1 (NM_021080.3,1482-1500).
gcctttatcccatcttcat

SEQ ID NO: 319880 - DNA, 19 bp, Homo sapiens
  siRNA target sequence for DAB1 (NM_021080.3,1564-1582).
cctcaggttacgttgcaat

SEQ ID NO: 319881 - DNA, 19 bp, Homo sapiens
  siRNA target sequence for DAB1 (NM_021080.3,1697-1715).
gggccagccgggtctcttt

SEQ ID NO: 319882 - DNA, 19 bp, Homo sapiens
  siRNA target sequence for DAB1 (NM_021080.3,1767-1785).
gccttcatgcccacacaaa

SEQ ID NO: 319883 - DNA, 19 bp, Homo sapiens
  siRNA target sequence for DAB1 (NM_021080.3,1906-1924).
gcaaagaaacgtttaagga

SEQ ID NO: 319884 - DNA, 19 bp, Homo sapiens
  siRNA target sequence for DAB1 (NM_021080.3,1999-2017).
ccttctccagttacttcaa

SEQ ID NO: 319885 - DNA, 19 bp, Homo sapiens
  siRNA target sequence for DAB1 (NM_021080.3,2061-2079).
gacatctcccagttgaatt

SEQ ID NO: 319886 - DNA, 19 bp, Homo sapiens
  siRNA target sequence for DAB1 (NM_021080.3,2266-2284).
catccaacagtgatccatt

SEQ ID NO: 319887 - DNA, 19 bp, Homo sapiens
  siRNA target sequence for DAB1 (NM_021080.3,2300-2318).
ggagcccagtggtgataat

SEQ ID NO: 319888 - DNA, 19 bp, Homo sapiens
  siRNA target sequence for DAB1 (NM_021080.3,2301-2319).
gagcccagtggtgataata

SEQ ID NO: 319889 - DNA, 19 bp, Homo sapiens
  siRNA target sequence for DAB1 (NM_021080.3,2306-2324).
cagtggtgataatataagt

SEQ ID NO: 319890 - DNA, 19 bp, Homo sapiens
  siRNA target sequence for FCMD (NM_006731.1,132-150).
cgtggttttggccctttta

SEQ ID NO: 319891 - DNA, 19 bp, Homo sapiens
  siRNA target sequence for FCMD (NM_006731.1,133-151).
gtggttttggcccttttaa

SEQ ID NO: 319892 - DNA, 19 bp, Homo sapiens
  siRNA target sequence for FCMD (NM_006731.1,153-171).
gctgacaagttctgcattt

SEQ ID NO: 319893 - DNA, 19 bp, Homo sapiens
  siRNA target sequence for FCMD (NM_006731.1,175-193).
ctgtttcagttgtactact

SEQ ID NO: 319894 - DNA, 19 bp, Homo sapiens
  siRNA target sequence for FCMD (NM_006731.1,245-263).
gaagccgaattggatttga

SEQ ID NO: 319895 - DNA, 19 bp, Homo sapiens
  siRNA target sequence for FCMD (NM_006731.1,269-287).
cacagtggcgtgcagttaa

SEQ ID NO: 319896 - DNA, 19 bp, Homo sapiens
  siRNA target sequence for FCMD (NM_006731.1,271-289).
cagtggcgtgcagttaaaa

SEQ ID NO: 319897 - DNA, 19 bp, Homo sapiens
  siRNA target sequence for FCMD (NM_006731.1,275-293).
ggcgtgcagttaaaaaatt

SEQ ID NO: 319898 - DNA, 19 bp, Homo sapiens
  siRNA target sequence for FCMD (NM_006731.1,341-359).
ctttgatactggaattgat

SEQ ID NO: 319899 - DNA, 19 bp, Homo sapiens
  siRNA target sequence for FCMD (NM_006731.1,459-477).
gtatcacctatggaagaat

SEQ ID NO: 319900 - DNA, 19 bp, Homo sapiens
  siRNA target sequence for FCMD (NM_006731.1,489-507).
gtttcggatagctgagaat

SEQ ID NO: 319901 - DNA, 19 bp, Homo sapiens
  siRNA target sequence for FCMD (NM_006731.1,517-535).
cagtgcctaaagattgaga

SEQ ID NO: 319902 - DNA, 19 bp, Homo sapiens
  siRNA target sequence for FCMD (NM_006731.1,564-582).
ctcactctctggaactgaa

SEQ ID NO: 319903 - DNA, 19 bp, Homo sapiens
  siRNA target sequence for FCMD (NM_006731.1,580-598).
gaaatccccctgcactata

SEQ ID NO: 319904 - DNA, 19 bp, Homo sapiens
  siRNA target sequence for FCMD (NM_006731.1,620-638).
cgatccacttggtagtctt

SEQ ID NO: 319905 - DNA, 19 bp, Homo sapiens
  siRNA target sequence for FCMD (NM_006731.1,621-639).
gatccacttggtagtcttt

SEQ ID NO: 319906 - DNA, 19 bp, Homo sapiens
  siRNA target sequence for FCMD (NM_006731.1,624-642).
ccacttggtagtctttcat

SEQ ID NO: 319907 - DNA, 19 bp, Homo sapiens
  siRNA target sequence for FCMD (NM_006731.1,667-685).
cacggccacttgagactta

SEQ ID NO: 319908 - DNA, 19 bp, Homo sapiens
  siRNA target sequence for FCMD (NM_006731.1,669-687).
cggccacttgagacttaaa

SEQ ID NO: 319909 - DNA, 19 bp, Homo sapiens
  siRNA target sequence for FCMD (NM_006731.1,671-689).
gccacttgagacttaaaga

SEQ ID NO: 319910 - DNA, 19 bp, Homo sapiens
  siRNA target sequence for FCMD (NM_006731.1,682-700).
cttaaagaacacattgaca

SEQ ID NO: 319911 - DNA, 19 bp, Homo sapiens
  siRNA target sequence for FCMD (NM_006731.1,723-741).
gttacagtttggtcgttat

SEQ ID NO: 319912 - DNA, 19 bp, Homo sapiens
  siRNA target sequence for FCMD (NM_006731.1,760-778).
ccagagttacagcaagtta

SEQ ID NO: 319913 - DNA, 19 bp, Homo sapiens
  siRNA target sequence for FCMD (NM_006731.1,765-783).
gttacagcaagttactgtt

SEQ ID NO: 319914 - DNA, 19 bp, Homo sapiens
  siRNA target sequence for FCMD (NM_006731.1,819-837).
gcactttgtagaagaagta

SEQ ID NO: 319915 - DNA, 19 bp, Homo sapiens
  siRNA target sequence for FCMD (NM_006731.1,839-857).
cacactctaggtttattga

SEQ ID NO: 319916 - DNA, 19 bp, Homo sapiens
  siRNA target sequence for FCMD (NM_006731.1,894-912).
gtaccttgatgataacact

SEQ ID NO: 319917 - DNA, 19 bp, Homo sapiens
  siRNA target sequence for FCMD (NM_006731.1,931-949).
cggaagagtgcaaaggaat

SEQ ID NO: 319918 - DNA, 19 bp, Homo sapiens
  siRNA target sequence for FCMD (NM_006731.1,954-972).
gcaactagcagcgaaaaca

SEQ ID NO: 319919 - DNA, 19 bp, Homo sapiens
  siRNA target sequence for FCMD (NM_006731.1,955-973).
caactagcagcgaaaacat

SEQ ID NO: 319920 - DNA, 19 bp, Homo sapiens
  siRNA target sequence for FCMD (NM_006731.1,961-979).
gcagcgaaaacattaaaca

SEQ ID NO: 319921 - DNA, 19 bp, Homo sapiens
  siRNA target sequence for FCMD (NM_006731.1,962-980).
cagcgaaaacattaaacaa

SEQ ID NO: 319922 - DNA, 19 bp, Homo sapiens
  siRNA target sequence for FCMD (NM_006731.1,1022-1040).
gatggtatcgacaatgcaa

SEQ ID NO: 319923 - DNA, 19 bp, Homo sapiens
  siRNA target sequence for FCMD (NM_006731.1,1026-1044).
gtatcgacaatgcaacatt

SEQ ID NO: 319924 - DNA, 19 bp, Homo sapiens
  siRNA target sequence for FCMD (NM_006731.1,1060-1078).
gatgttgacctaggaattt

SEQ ID NO: 319925 - DNA, 19 bp, Homo sapiens
  siRNA target sequence for FCMD (NM_006731.1,1124-1142).
caggacttccgctcaaaca

SEQ ID NO: 319926 - DNA, 19 bp, Homo sapiens
  siRNA target sequence for FCMD (NM_006731.1,1126-1144).
ggacttccgctcaaacaca

SEQ ID NO: 319927 - DNA, 19 bp, Homo sapiens
  siRNA target sequence for FCMD (NM_006731.1,1129-1147).
cttccgctcaaacacaaat

SEQ ID NO: 319928 - DNA, 19 bp, Homo sapiens
  siRNA target sequence for FCMD (NM_006731.1,1287-1305).
cctgtttccgaagtttaca

SEQ ID NO: 319929 - DNA, 19 bp, Homo sapiens
  siRNA target sequence for FCMD (NM_006731.1,1308-1326).
gtgctggactgagtttgta

SEQ ID NO: 319930 - DNA, 19 bp, Homo sapiens
  siRNA target sequence for FCMD (NM_006731.1,1310-1328).
gctggactgagtttgtaga

SEQ ID NO: 319931 - DNA, 19 bp, Homo sapiens
  siRNA target sequence for FCMD (NM_006731.1,1313-1331).
ggactgagtttgtagacat

SEQ ID NO: 319932 - DNA, 19 bp, Homo sapiens
  siRNA target sequence for FCMD (NM_006731.1,1346-1364).
cctgtgaaaccctcgaata

SEQ ID NO: 319933 - DNA, 19 bp, Homo sapiens
  siRNA target sequence for FCMD (NM_006731.1,1349-1367).
gtgaaaccctcgaatacat

SEQ ID NO: 319934 - DNA, 19 bp, Homo sapiens
  siRNA target sequence for FCMD (NM_006731.1,1451-1469).
gaatctggcctatttctga

SEQ ID NO: 319935 - DNA, 19 bp, Homo sapiens
  siRNA target sequence for FCMD (NM_006731.1,1474-1492).
gatgaggttatccagttat

SEQ ID NO: 319936 - DNA, 19 bp, Homo sapiens
  siRNA target sequence for FCMD (NM_006731.1,1477-1495).
gaggttatccagttatatt

SEQ ID NO: 319937 - DNA, 19 bp, Homo sapiens
  siRNA target sequence for MAB21L2 (NM_006439.3,901-919).
ctggtttaccagctcaata

SEQ ID NO: 319938 - DNA, 19 bp, Homo sapiens
  siRNA target sequence for MAB21L2 (NM_006439.3,904-922).
gtttaccagctcaataagt

SEQ ID NO: 319939 - DNA, 19 bp, Homo sapiens
  siRNA target sequence for MAB21L2 (NM_006439.3,968-986).
ccatccgagaggtctgtaa

SEQ ID NO: 319940 - DNA, 19 bp, Homo sapiens
  siRNA target sequence for MAB21L2 (NM_006439.3,1102-1120).
gaggtggtgctctacctaa

SEQ ID NO: 319941 - DNA, 19 bp, Homo sapiens
  siRNA target sequence for MAB21L2 (NM_006439.3,1166-1184).
gctgcgcagtgctcaaact

SEQ ID NO: 319942 - DNA, 19 bp, Homo sapiens
  siRNA target sequence for MAB21L2 (NM_006439.3,1213-1231).
ctctgggtcgagttcatca

SEQ ID NO: 319943 - DNA, 19 bp, Homo sapiens
  siRNA target sequence for MAB21L2 (NM_006439.3,1372-1390).
cgctatgtggtgcaaatca

SEQ ID NO: 319944 - DNA, 19 bp, Homo sapiens
  siRNA target sequence for MAB21L2 (NM_006439.3,1675-1693).
ggccagccgctcaacaact

SEQ ID NO: 319945 - DNA, 19 bp, Homo sapiens
  siRNA target sequence for MAB21L2 (NM_006439.3,1676-1694).
gccagccgctcaacaacta

SEQ ID NO: 319946 - DNA, 19 bp, Homo sapiens
  siRNA target sequence for MAB21L2 (NM_006439.3,1821-1839).
ccgctgccctcactacttt

SEQ ID NO: 319947 - DNA, 19 bp, Homo sapiens
  siRNA target sequence for MOBP (NM_006501.1,66-84).
gaacacttcagcatacact

SEQ ID NO: 319948 - DNA, 19 bp, Homo sapiens
  siRNA target sequence for MOBP (NM_006501.1,93-111).
ccgttcaccttcctcaatt

SEQ ID NO: 319949 - DNA, 19 bp, Homo sapiens
  siRNA target sequence for MOBP (NM_006501.1,132-150).
cggaaatacagcatctgta

SEQ ID NO: 319950 - DNA, 19 bp, Homo sapiens
  siRNA target sequence for MOBP (NM_006501.1,528-546).
gggtcccccgtcaaagctt

SEQ ID NO: 319951 - DNA, 19 bp, Homo sapiens
  siRNA target sequence for NEURL (NM_004210.3,167-185).
ccccagaacctcaaagact

SEQ ID NO: 319952 - DNA, 19 bp, Homo sapiens
  siRNA target sequence for NEURL (NM_004210.3,1229-1247).
gtggaccgcaaggaattct

SEQ ID NO: 319953 - DNA, 19 bp, Homo sapiens
  siRNA target sequence for NUMBL (NM_004756.2,326-344).
gggcaccatgaacaagtta

SEQ ID NO: 319954 - DNA, 19 bp, Homo sapiens
  siRNA target sequence for NUMBL (NM_004756.2,585-603).
cgagtggtggacgacaaaa

SEQ ID NO: 319955 - DNA, 19 bp, Homo sapiens
  siRNA target sequence for NUMBL (NM_004756.2,588-606).
gtggtggacgacaaaacca

SEQ ID NO: 319956 - DNA, 19 bp, Homo sapiens
  siRNA target sequence for NUMBL (NM_004756.2,618-636).
gtcgaccagaccatcgaaa

SEQ ID NO: 319957 - DNA, 19 bp, Homo sapiens
  siRNA target sequence for NUMBL (NM_004756.2,674-692).
ggctttctcctatatctgt

SEQ ID NO: 319958 - DNA, 19 bp, Homo sapiens
  siRNA target sequence for NUMBL (NM_004756.2,767-785).
cgctgtgggctgtgctttt

SEQ ID NO: 319959 - DNA, 19 bp, Homo sapiens
  siRNA target sequence for NUMBL (NM_004756.2,807-825).
cagcgacgggagaaggaat

SEQ ID NO: 319960 - DNA, 19 bp, Homo sapiens
  siRNA target sequence for NUMBL (NM_004756.2,1151-1169).
gaagaactcgcctttcaaa

SEQ ID NO: 319961 - DNA, 19 bp, Homo sapiens
  siRNA target sequence for NUMBL (NM_004756.2,1296-1314).
ctgtgcacacagatcagtt

SEQ ID NO: 319962 - DNA, 19 bp, Homo sapiens
  siRNA target sequence for OLFM1 (NM_006334.2,634-652).
gaacatgtctcaatccata

SEQ ID NO: 319963 - DNA, 19 bp, Homo sapiens
  siRNA target sequence for OLFM1 (NM_006334.2,720-738).
gactggagtccaagttcaa

SEQ ID NO: 319964 - DNA, 19 bp, Homo sapiens
  siRNA target sequence for OLFM1 (NM_014279.2,774-792).
ggcagtttaaggcgataaa

SEQ ID NO: 319965 - DNA, 19 bp, Homo sapiens
  siRNA target sequence for OLFM1 (NM_014279.2,775-793).
gcagtttaaggcgataaaa

SEQ ID NO: 319966 - DNA, 19 bp, Homo sapiens
  siRNA target sequence for OLFM1 (NM_014279.2,786-804).
cgataaaagcgaaaatgga

SEQ ID NO: 319967 - DNA, 19 bp, Homo sapiens
  siRNA target sequence for OLFM1 (NM_014279.2,794-812).
gcgaaaatggatgaactta

SEQ ID NO: 319968 - DNA, 19 bp, Homo sapiens
  siRNA target sequence for OLFM1 (NM_014279.2,844-862).
ggccgatgccaaattggta

SEQ ID NO: 319969 - DNA, 19 bp, Homo sapiens
  siRNA target sequence for OLFM1 (NM_014279.2,845-863).
gccgatgccaaattggtat

SEQ ID NO: 319970 - DNA, 19 bp, Homo sapiens
  siRNA target sequence for OLFM1 (NM_014279.2,846-864).
ccgatgccaaattggtatt

SEQ ID NO: 319971 - DNA, 19 bp, Homo sapiens
  siRNA target sequence for OLFM1 (NM_014279.2,1143-1161).
gcttcgtacgtgagtacaa

SEQ ID NO: 319972 - DNA, 19 bp, Homo sapiens
  siRNA target sequence for OLFM1 (NM_014279.2,1241-1259).
gtctacaacggttctatct

SEQ ID NO: 319973 - DNA, 19 bp, Homo sapiens
  siRNA target sequence for OLFM1 (NM_014279.2,1250-1268).
ggttctatctacttcaaca

SEQ ID NO: 319974 - DNA, 19 bp, Homo sapiens
  siRNA target sequence for OLFM1 (NM_014279.2,1251-1269).
gttctatctacttcaacaa

SEQ ID NO: 319975 - DNA, 19 bp, Homo sapiens
  siRNA target sequence for OLFM1 (NM_014279.2,1337-1355).
gactatgccggttacaaca

SEQ ID NO: 319976 - DNA, 19 bp, Homo sapiens
  siRNA target sequence for OLFM1 (NM_058199.2,791-809).
gttgctggacagatgcatt

SEQ ID NO: 319977 - DNA, 19 bp, Homo sapiens
  siRNA target sequence for OLFM1 (NM_058199.2,794-812).
gctggacagatgcattcat

SEQ ID NO: 319978 - DNA, 19 bp, Homo sapiens
  siRNA target sequence for OLFM1 (NM_058199.2,797-815).
ggacagatgcattcattca

SEQ ID NO: 319979 - DNA, 19 bp, Homo sapiens
  siRNA target sequence for SCRG1 (NM_007281.1,486-504).
cgcctctcttgctacagaa

SEQ ID NO: 319980 - DNA, 19 bp, Homo sapiens
  siRNA target sequence for SCRG1 (NM_007281.1,550-568).
ctgacctgacacagattga

SEQ ID NO: 319981 - DNA, 19 bp, Homo sapiens
  siRNA target sequence for SEMA3A (NM_006080.1,168-186).
ggccaacagctccagttat

SEQ ID NO: 319982 - DNA, 19 bp, Homo sapiens
  siRNA target sequence for SEMA3A (NM_006080.1,176-194).
gctccagttatcatacctt

SEQ ID NO: 319983 - DNA, 19 bp, Homo sapiens
  siRNA target sequence for SEMA3A (NM_006080.1,229-247).
ggagcaaaggatcacatat

SEQ ID NO: 319984 - DNA, 19 bp, Homo sapiens
  siRNA target sequence for SEMA3A (NM_006080.1,230-248).
gagcaaaggatcacatatt

SEQ ID NO: 319985 - DNA, 19 bp, Homo sapiens
  siRNA target sequence for SEMA3A (NM_006080.1,259-277).
ctggttaatatcaaggatt

SEQ ID NO: 319986 - DNA, 19 bp, Homo sapiens
  siRNA target sequence for SEMA3A (NM_006080.1,285-303).
gattgtgtggccagtatct

SEQ ID NO: 319987 - DNA, 19 bp, Homo sapiens
  siRNA target sequence for SEMA3A (NM_006080.1,289-307).
gtgtggccagtatcttaca

SEQ ID NO: 319988 - DNA, 19 bp, Homo sapiens
  siRNA target sequence for SEMA3A (NM_006080.1,345-363).
cctgaaagaatgtgctaat

SEQ ID NO: 319989 - DNA, 19 bp, Homo sapiens
  siRNA target sequence for SEMA3A (NM_006080.1,431-449).
caatttgcacctacattga

SEQ ID NO: 319990 - DNA, 19 bp, Homo sapiens
  siRNA target sequence for SEMA3A (NM_006080.1,510-528).
ccgtgggaagagtccatat

SEQ ID NO: 319991 - DNA, 19 bp, Homo sapiens
  siRNA target sequence for SEMA3A (NM_006080.1,545-563).
cagcatcccttttaataga

SEQ ID NO: 319992 - DNA, 19 bp, Homo sapiens
  siRNA target sequence for SEMA3A (NM_006080.1,602-620).
ggcgagactttgctatctt

SEQ ID NO: 319993 - DNA, 19 bp, Homo sapiens
  siRNA target sequence for SEMA3A (NM_006080.1,671-689).
ggtggctcaatgatccaaa

SEQ ID NO: 319994 - DNA, 19 bp, Homo sapiens
  siRNA target sequence for SEMA3A (NM_006080.1,733-751).
gatgacaaagtatactttt

SEQ ID NO: 319995 - DNA, 19 bp, Homo sapiens
  siRNA target sequence for SEMA3A (NM_006080.1,736-754).
gacaaagtatactttttct

SEQ ID NO: 319996 - DNA, 19 bp, Homo sapiens
  siRNA target sequence for SEMA3A (NM_006080.1,753-771).
cttccgtgaaaatgcaata

SEQ ID NO: 319997 - DNA, 19 bp, Homo sapiens
  siRNA target sequence for SEMA3A (NM_006080.1,756-774).
ccgtgaaaatgcaatagat

SEQ ID NO: 319998 - DNA, 19 bp, Homo sapiens
  siRNA target sequence for SEMA3A (NM_006080.1,801-819).
cgctagaataggtcagata

SEQ ID NO: 319999 - DNA, 19 bp, Homo sapiens
  siRNA target sequence for SEMA3A (NM_006080.1,802-820).
gctagaataggtcagatat

SEQ ID NO: 320000 - DNA, 19 bp, Homo sapiens
  siRNA target sequence for SEMA3A (NM_006080.1,812-830).
gtcagatatgcaagaatga

SEQ ID NO: 320001 - DNA, 19 bp, Homo sapiens
  siRNA target sequence for SEMA3A (NM_006080.1,841-859).
cacagaagtctggtgaata

SEQ ID NO: 320002 - DNA, 19 bp, Homo sapiens
  siRNA target sequence for SEMA3A (NM_006080.1,853-871).
gtgaataaatggacaacat

SEQ ID NO: 320003 - DNA, 19 bp, Homo sapiens
  siRNA target sequence for SEMA3A (NM_006080.1,931-949).
gatgaactgcaggatgtat

SEQ ID NO: 320004 - DNA, 19 bp, Homo sapiens
  siRNA target sequence for SEMA3A (NM_006080.1,940-958).
caggatgtattcctaatga

SEQ ID NO: 320005 - DNA, 19 bp, Homo sapiens
  siRNA target sequence for SEMA3A (NM_006080.1,943-961).
gatgtattcctaatgaact

SEQ ID NO: 320006 - DNA, 19 bp, Homo sapiens
  siRNA target sequence for SEMA3A (NM_006080.1,1030-1048).
gccgtgtgtatgtatagca

SEQ ID NO: 320007 - DNA, 19 bp, Homo sapiens
  siRNA target sequence for SEMA3A (NM_006080.1,1031-1049).
ccgtgtgtatgtatagcat

SEQ ID NO: 320008 - DNA, 19 bp, Homo sapiens
  siRNA target sequence for SEMA3A (NM_006080.1,1065-1083).
ggtgttccttggtccatat

SEQ ID NO: 320009 - DNA, 19 bp, Homo sapiens
  siRNA target sequence for SEMA3A (NM_006080.1,1093-1111).
gatggacccaactatcaat

SEQ ID NO: 320010 - DNA, 19 bp, Homo sapiens
  siRNA target sequence for SEMA3A (NM_006080.1,1229-1247).
gtcatccagccatgtacaa

SEQ ID NO: 320011 - DNA, 19 bp, Homo sapiens
  siRNA target sequence for SEMA3A (NM_006080.1,1279-1297).
gtgatcaaaacggatgtaa

SEQ ID NO: 320012 - DNA, 19 bp, Homo sapiens
  siRNA target sequence for SEMA3A (NM_006080.1,1348-1366).
cagtatgatgttatgttta

SEQ ID NO: 320013 - DNA, 19 bp, Homo sapiens
  siRNA target sequence for SEMA3A (NM_006080.1,1362-1380).
gtttatcggaacagatgtt

SEQ ID NO: 320014 - DNA, 19 bp, Homo sapiens
  siRNA target sequence for SEMA3A (NM_006080.1,1382-1400).
ggaccgttcttaaagtagt

SEQ ID NO: 320015 - DNA, 19 bp, Homo sapiens
  siRNA target sequence for SEMA3A (NM_006080.1,1383-1401).
gaccgttcttaaagtagtt

SEQ ID NO: 320016 - DNA, 19 bp, Homo sapiens
  siRNA target sequence for SEMA3A (NM_006080.1,1386-1404).
cgttcttaaagtagtttca

SEQ ID NO: 320017 - DNA, 19 bp, Homo sapiens
  siRNA target sequence for SEMA3A (NM_006080.1,1387-1405).
gttcttaaagtagtttcaa

SEQ ID NO: 320018 - DNA, 19 bp, Homo sapiens
  siRNA target sequence for SEMA3A (NM_006080.1,1413-1431).
ggagacttggtatgattta

SEQ ID NO: 320019 - DNA, 19 bp, Homo sapiens
  siRNA target sequence for SEMA3A (NM_006080.1,1416-1434).
gacttggtatgatttagaa

SEQ ID NO: 320020 - DNA, 19 bp, Homo sapiens
  siRNA target sequence for SEMA3A (NM_006080.1,1418-1436).
cttggtatgatttagaaga

SEQ ID NO: 320021 - DNA, 19 bp, Homo sapiens
  siRNA target sequence for SEMA3A (NM_006080.1,1465-1483).
cgggaaccgactgctattt

SEQ ID NO: 320022 - DNA, 19 bp, Homo sapiens
  siRNA target sequence for SEMA3A (NM_006080.1,1467-1485).
ggaaccgactgctatttca

SEQ ID NO: 320023 - DNA, 19 bp, Homo sapiens
  siRNA target sequence for SEMA3A (NM_006080.1,1500-1518).
cactaagcagcaacaacta

SEQ ID NO: 320024 - DNA, 19 bp, Homo sapiens
  siRNA target sequence for SEMA3A (NM_006080.1,1502-1520).
ctaagcagcaacaactata

SEQ ID NO: 320025 - DNA, 19 bp, Homo sapiens
  siRNA target sequence for SEMA3A (NM_006080.1,1510-1528).
caacaactatatattggtt

SEQ ID NO: 320026 - DNA, 19 bp, Homo sapiens
  siRNA target sequence for SEMA3A (NM_006080.1,1552-1570).
cctttacaccggtgtgata

SEQ ID NO: 320027 - DNA, 19 bp, Homo sapiens
  siRNA target sequence for SEMA3A (NM_006080.1,1553-1571).
ctttacaccggtgtgatat

SEQ ID NO: 320028 - DNA, 19 bp, Homo sapiens
  siRNA target sequence for SEMA3A (NM_006080.1,1626-1644).
ggatggttctgcatgttct

SEQ ID NO: 320029 - DNA, 19 bp, Homo sapiens
  siRNA target sequence for SEMA3A (NM_006080.1,1669-1687).
cgcacaagacgacaagata

SEQ ID NO: 320030 - DNA, 19 bp, Homo sapiens
  siRNA target sequence for SEMA3A (NM_006080.1,1670-1688).
gcacaagacgacaagatat

SEQ ID NO: 320031 - DNA, 19 bp, Homo sapiens
  siRNA target sequence for SEMA3A (NM_006080.1,1671-1689).
cacaagacgacaagatata

SEQ ID NO: 320032 - DNA, 19 bp, Homo sapiens
  siRNA target sequence for SEMA3A (NM_006080.1,1676-1694).
gacgacaagatataagaaa

SEQ ID NO: 320033 - DNA, 19 bp, Homo sapiens
  siRNA target sequence for SEMA3A (NM_006080.1,1718-1736).
cagacttacaccatgataa

SEQ ID NO: 320034 - DNA, 19 bp, Homo sapiens
  siRNA target sequence for SEMA3A (NM_006080.1,1751-1769).
gccctgaagagagaatcat

SEQ ID NO: 320035 - DNA, 19 bp, Homo sapiens
  siRNA target sequence for SEMA3A (NM_006080.1,1753-1771).
cctgaagagagaatcatct

SEQ ID NO: 320036 - DNA, 19 bp, Homo sapiens
  siRNA target sequence for SEMA3A (NM_006080.1,1770-1788).
ctatggtgtagagaatagt

SEQ ID NO: 320037 - DNA, 19 bp, Homo sapiens
  siRNA target sequence for SEMA3A (NM_006080.1,1880-1898).
gagtggatgatcatatcat

SEQ ID NO: 320038 - DNA, 19 bp, Homo sapiens
  siRNA target sequence for SEMA3A (NM_006080.1,1882-1900).
gtggatgatcatatcatca

SEQ ID NO: 320039 - DNA, 19 bp, Homo sapiens
  siRNA target sequence for SEMA3A (NM_006080.1,1914-1932).
ccttctgctacgtagtcta

SEQ ID NO: 320040 - DNA, 19 bp, Homo sapiens
  siRNA target sequence for SEMA3A (NM_006080.1,1987-2005).
caaactcttcttaaggtaa

SEQ ID NO: 320041 - DNA, 19 bp, Homo sapiens
  siRNA target sequence for SEMA3A (NM_006080.1,2001-2019).
ggtaaccctggaagtcatt

SEQ ID NO: 320042 - DNA, 19 bp, Homo sapiens
  siRNA target sequence for SEMA3A (NM_006080.1,2059-2077).
gatggagatggctctaaga

SEQ ID NO: 320043 - DNA, 19 bp, Homo sapiens
  siRNA target sequence for SEMA3A (NM_006080.1,2173-2191).
gagttctgtgaacaagttt

SEQ ID NO: 320044 - DNA, 19 bp, Homo sapiens
  siRNA target sequence for SEMA3A (NM_006080.1,2192-2210).
ggaaaagggaccgaaaaca

SEQ ID NO: 320045 - DNA, 19 bp, Homo sapiens
  siRNA target sequence for SEMA3A (NM_006080.1,2289-2307).
caggaggacccacgaattt

SEQ ID NO: 320046 - DNA, 19 bp, Homo sapiens
  siRNA target sequence for SEMA3A (NM_006080.1,2291-2309).
ggaggacccacgaatttga

SEQ ID NO: 320047 - DNA, 19 bp, Homo sapiens
  siRNA target sequence for SEMA6B (NM_020241.2,257-275).
caacaggacgctgttcatt

SEQ ID NO: 320048 - DNA, 19 bp, Homo sapiens
  siRNA target sequence for SEMA6B (NM_020241.2,361-379).
ctaaccccagcgacataaa

SEQ ID NO: 320049 - DNA, 19 bp, Homo sapiens
  siRNA target sequence for SEMA6B (NM_020241.2,411-429).
gagtgtcgaaacttcgtaa

SEQ ID NO: 320050 - DNA, 19 bp, Homo sapiens
  siRNA target sequence for SEMA6B (NM_020241.2,415-433).
gtcgaaacttcgtaaaggt

SEQ ID NO: 320051 - DNA, 19 bp, Homo sapiens
  siRNA target sequence for SEMA6B (NM_020241.2,489-507).
ccggtgtgcgccaactaca

SEQ ID NO: 320052 - DNA, 19 bp, Homo sapiens
  siRNA target sequence for SEMA6B (NM_020241.2,629-647).
cgacttcctagccattgat

SEQ ID NO: 320053 - DNA, 19 bp, Homo sapiens
  siRNA target sequence for SEMA6B (NM_020241.2,683-701).
cctgcgcaccgtgaaacat

SEQ ID NO: 320054 - DNA, 19 bp, Homo sapiens
  siRNA target sequence for SEMA6B (NM_020241.2,712-730).
ggttcaaagagccttactt

SEQ ID NO: 320055 - DNA, 19 bp, Homo sapiens
  siRNA target sequence for SEMA6B (NM_020241.2,713-731).
gttcaaagagccttacttt

SEQ ID NO: 320056 - DNA, 19 bp, Homo sapiens
  siRNA target sequence for SEMA6B (NM_020241.2,750-768).
ggcagccatgtctacttct

SEQ ID NO: 320057 - DNA, 19 bp, Homo sapiens
  siRNA target sequence for SEMA6B (NM_020241.2,927-945).
gactcccatttctacttca

SEQ ID NO: 320058 - DNA, 19 bp, Homo sapiens
  siRNA target sequence for SEMA6B (NM_020241.2,996-1014).
gtcctggccgttttttcca

SEQ ID NO: 320059 - DNA, 19 bp, Homo sapiens
  siRNA target sequence for SEMA6B (NM_020241.2,1204-1222).
gcgccttgccggatgacat

SEQ ID NO: 320060 - DNA, 19 bp, Homo sapiens
  siRNA target sequence for SEMA6B (NM_020241.2,1213-1231).
cggatgacatcctcaactt

SEQ ID NO: 320061 - DNA, 19 bp, Homo sapiens
  siRNA target sequence for SEMA6B (NM_032108.2,1620-1638).
cagtactcggggtgtatga

SEQ ID NO: 320062 - DNA, 19 bp, Homo sapiens
  siRNA target sequence for SEMA6C (NM_030913.2,300-318).
caaggtacttccccattat

SEQ ID NO: 320063 - DNA, 19 bp, Homo sapiens
  siRNA target sequence for SEMA6C (NM_030913.2,303-321).
ggtacttccccattatcct

SEQ ID NO: 320064 - DNA, 19 bp, Homo sapiens
  siRNA target sequence for SEMA6C (NM_030913.2,364-382).
ggctggactttcagagatt

SEQ ID NO: 320065 - DNA, 19 bp, Homo sapiens
  siRNA target sequence for SEMA6C (NM_030913.2,467-485).
gctggtgcccaacaagtat

SEQ ID NO: 320066 - DNA, 19 bp, Homo sapiens
  siRNA target sequence for SEMA6C (NM_030913.2,545-563).
gtgctacaactatattcgt

SEQ ID NO: 320067 - DNA, 19 bp, Homo sapiens
  siRNA target sequence for SEMA6C (NM_030913.2,551-569).
caactatattcgtgttctt

SEQ ID NO: 320068 - DNA, 19 bp, Homo sapiens
  siRNA target sequence for SEMA6C (NM_030913.2,598-616).
cctgtggaacgaactcatt

SEQ ID NO: 320069 - DNA, 19 bp, Homo sapiens
  siRNA target sequence for SEMA6C (NM_030913.2,683-701).
ggctcgatgcccctttgat

SEQ ID NO: 320070 - DNA, 19 bp, Homo sapiens
  siRNA target sequence for SEMA6C (NM_030913.2,710-728).
gtccaacgtggccatcttt

SEQ ID NO: 320071 - DNA, 19 bp, Homo sapiens
  siRNA target sequence for SEMA6C (NM_030913.2,771-789).
gccagtgatgctgtagttt

SEQ ID NO: 320072 - DNA, 19 bp, Homo sapiens
  siRNA target sequence for SEMA6C (NM_030913.2,772-790).
ccagtgatgctgtagttta

SEQ ID NO: 320073 - DNA, 19 bp, Homo sapiens
  siRNA target sequence for SEMA6C (NM_030913.2,819-837).
cgctccgccaagtatgact

SEQ ID NO: 320074 - DNA, 19 bp, Homo sapiens
  siRNA target sequence for SEMA6C (NM_030913.2,882-900).
ggagaccatgtctacttct

SEQ ID NO: 320075 - DNA, 19 bp, Homo sapiens
  siRNA target sequence for SEMA6C (NM_030913.2,883-901).
gagaccatgtctacttctt

SEQ ID NO: 320076 - DNA, 19 bp, Homo sapiens
  siRNA target sequence for SEMA6C (NM_030913.2,953-971).
ccgcgtagcccgagtatgt

SEQ ID NO: 320077 - DNA, 19 bp, Homo sapiens
  siRNA target sequence for SEMA6C (NM_030913.2,954-972).
cgcgtagcccgagtatgta

SEQ ID NO: 320078 - DNA, 19 bp, Homo sapiens
  siRNA target sequence for SEMA6C (NM_030913.2,955-973).
gcgtagcccgagtatgtaa

SEQ ID NO: 320079 - DNA, 19 bp, Homo sapiens
  siRNA target sequence for SEMA6C (NM_030913.2,956-974).
cgtagcccgagtatgtaaa

SEQ ID NO: 320080 - DNA, 19 bp, Homo sapiens
  siRNA target sequence for SEMA6C (NM_030913.2,1356-1374).
gatgtcctgaccttcatca

SEQ ID NO: 320081 - DNA, 19 bp, Homo sapiens
  siRNA target sequence for SEMA6C (NM_030913.2,1482-1500).
ggtccccacagtaacatca

SEQ ID NO: 320082 - DNA, 19 bp, Homo sapiens
  siRNA target sequence for EVC (NM_014556.2,494-512).
ccgccttccaacagcaata

SEQ ID NO: 320083 - DNA, 19 bp, Homo sapiens
  siRNA target sequence for EVC (NM_014556.2,593-611).
ccgtctctgcatgaaaact

SEQ ID NO: 320084 - DNA, 19 bp, Homo sapiens
  siRNA target sequence for EVC (NM_014556.2,595-613).
gtctctgcatgaaaactta

SEQ ID NO: 320085 - DNA, 19 bp, Homo sapiens
  siRNA target sequence for EVC (NM_014556.2,870-888).
ggcaggaaaagcatatgat

SEQ ID NO: 320086 - DNA, 19 bp, Homo sapiens
  siRNA target sequence for EVC (NM_014556.2,920-938).
gaccttcttcctaaaaaga

SEQ ID NO: 320087 - DNA, 19 bp, Homo sapiens
  siRNA target sequence for EVC (NM_014556.2,1102-1120).
ctctgaacagctaatcgat

SEQ ID NO: 320088 - DNA, 19 bp, Homo sapiens
  siRNA target sequence for EVC (NM_014556.2,1104-1122).
ctgaacagctaatcgataa

SEQ ID NO: 320089 - DNA, 19 bp, Homo sapiens
  siRNA target sequence for EVC (NM_014556.2,1106-1124).
gaacagctaatcgataata

SEQ ID NO: 320090 - DNA, 19 bp, Homo sapiens
  siRNA target sequence for EVC (NM_014556.2,1111-1129).
gctaatcgataatatggaa

SEQ ID NO: 320091 - DNA, 19 bp, Homo sapiens
  siRNA target sequence for EVC (NM_014556.2,1169-1187).
gtggaccagtttaagtgtt

SEQ ID NO: 320092 - DNA, 19 bp, Homo sapiens
  siRNA target sequence for EVC (NM_014556.2,1199-1217).
gcccgacagctgatgatga

SEQ ID NO: 320093 - DNA, 19 bp, Homo sapiens
  siRNA target sequence for EVC (NM_014556.2,1218-1236).
ctctgacggaaagaatgat

SEQ ID NO: 320094 - DNA, 19 bp, Homo sapiens
  siRNA target sequence for EVC (NM_014556.2,1248-1266).
ggctattgtgcgattctca

SEQ ID NO: 320095 - DNA, 19 bp, Homo sapiens
  siRNA target sequence for EVC (NM_014556.2,1310-1328).
gcgcacatggcaaaagtga

SEQ ID NO: 320096 - DNA, 19 bp, Homo sapiens
  siRNA target sequence for EVC (NM_014556.2,1311-1329).
cgcacatggcaaaagtgat

SEQ ID NO: 320097 - DNA, 19 bp, Homo sapiens
  siRNA target sequence for EVC (NM_014556.2,1553-1571).
gagggaacggcaaaactca

SEQ ID NO: 320098 - DNA, 19 bp, Homo sapiens
  siRNA target sequence for EVC (NM_014556.2,1623-1641).
ctgctgacccggaaaagtt

SEQ ID NO: 320099 - DNA, 19 bp, Homo sapiens
  siRNA target sequence for EVC (NM_014556.2,1626-1644).
ctgacccggaaaagtttct

SEQ ID NO: 320100 - DNA, 19 bp, Homo sapiens
  siRNA target sequence for EVC (NM_014556.2,1836-1854).
cggaagagtgtgactactt

SEQ ID NO: 320101 - DNA, 19 bp, Homo sapiens
  siRNA target sequence for EVC (NM_014556.2,2471-2489).
gacagggatgacttcaaga

SEQ ID NO: 320102 - DNA, 19 bp, Homo sapiens
  siRNA target sequence for EVC (NM_014556.2,2547-2565).
gcctggtgcaggcgtatta

SEQ ID NO: 320103 - DNA, 19 bp, Homo sapiens
  siRNA target sequence for EVC (NM_014556.2,2653-2671).
caaactgcggaaaaagcaa

SEQ ID NO: 320104 - DNA, 19 bp, Homo sapiens
  siRNA target sequence for EVC (NM_014556.2,2876-2894).
gctgaacagaacttcatct

SEQ ID NO: 320105 - DNA, 19 bp, Homo sapiens
  siRNA target sequence for EVC (NM_014556.2,2972-2990).
cccctaaggactaaaagga

SEQ ID NO: 320106 - DNA, 19 bp, Homo sapiens
  siRNA target sequence for EVC (NM_014556.2,2973-2991).
ccctaaggactaaaaggaa

SEQ ID NO: 320107 - DNA, 19 bp, Homo sapiens
  siRNA target sequence for EVC (NM_014556.2,3088-3106).
gctgagtcagcaagaaagt

SEQ ID NO: 320108 - DNA, 19 bp, Homo sapiens
  siRNA target sequence for EVC (NM_014556.2,3113-3131).
ggggacagtgggaactcaa

SEQ ID NO: 320109 - DNA, 19 bp, Homo sapiens
  siRNA target sequence for CSRP3 (NM_003476.1,93-111).
cgtctaccatgcagaagaa

SEQ ID NO: 320110 - DNA, 19 bp, Homo sapiens
  siRNA target sequence for CSRP3 (NM_003476.1,109-127).
gaaatccagtgcaatggaa

SEQ ID NO: 320111 - DNA, 19 bp, Homo sapiens
  siRNA target sequence for CSRP3 (NM_003476.1,197-215).
ctcatgagtcggagatcta

SEQ ID NO: 320112 - DNA, 19 bp, Homo sapiens
  siRNA target sequence for CSRP3 (NM_003476.1,199-217).
catgagtcggagatctact

SEQ ID NO: 320113 - DNA, 19 bp, Homo sapiens
  siRNA target sequence for CSRP3 (NM_003476.1,225-243).
gtgctatgggcgcagatat

SEQ ID NO: 320114 - DNA, 19 bp, Homo sapiens
  siRNA target sequence for CSRP3 (NM_003476.1,356-374).
ccagcaacccttccaaatt

SEQ ID NO: 320115 - DNA, 19 bp, Homo sapiens
  siRNA target sequence for CSRP3 (NM_003476.1,369-387).
caaattcactgcgaagttt

SEQ ID NO: 320116 - DNA, 19 bp, Homo sapiens
  siRNA target sequence for CSRP3 (NM_003476.1,503-521).
gtctggagtccacaaatgt

SEQ ID NO: 320117 - DNA, 19 bp, Homo sapiens
  siRNA target sequence for CSRP3 (NM_003476.1,596-614).
gaggccttacacaacaagt

SEQ ID NO: 320118 - DNA, 19 bp, Homo sapiens
  siRNA target sequence for VAMP5 (NM_006634.2,133-151).
cggaaattatgcgtaacaa

SEQ ID NO: 320119 - DNA, 19 bp, Homo sapiens
  siRNA target sequence for VAMP5 (NM_006634.2,135-153).
gaaattatgcgtaacaact

SEQ ID NO: 320120 - DNA, 19 bp, Homo sapiens
  siRNA target sequence for CAV3 (NM_001234.3,98-116).
gcccagatcgtcaaggata

SEQ ID NO: 320121 - DNA, 19 bp, Homo sapiens
  siRNA target sequence for CAV3 (NM_001234.3,99-117).
cccagatcgtcaaggatat

SEQ ID NO: 320122 - DNA, 19 bp, Homo sapiens
  siRNA target sequence for CAV3 (NM_001234.3,145-163).
ccgagaccccaagaacatt

SEQ ID NO: 320123 - DNA, 19 bp, Homo sapiens
  siRNA target sequence for CAV3 (NM_001234.3,146-164).
cgagaccccaagaacatta

SEQ ID NO: 320124 - DNA, 19 bp, Homo sapiens
  siRNA target sequence for CAV3 (NM_001234.3,370-388).
ggcggtggtgccatgcatt

SEQ ID NO: 320125 - DNA, 19 bp, Homo sapiens
  siRNA target sequence for CAV3 (NM_001234.3,372-390).
cggtggtgccatgcattaa

SEQ ID NO: 320126 - DNA, 19 bp, Homo sapiens
  siRNA target sequence for FHL3 (NM_004468.1,79-97).
ctgtatggacgcaagtaca

SEQ ID NO: 320127 - DNA, 19 bp, Homo sapiens
  siRNA target sequence for FHL3 (NM_004468.1,189-207).
ctcgagggagctgttctat

SEQ ID NO: 320128 - DNA, 19 bp, Homo sapiens
  siRNA target sequence for FHL3 (NM_004468.1,375-393).
ccggaagctggaatatgga

SEQ ID NO: 320129 - DNA, 19 bp, Homo sapiens
  siRNA target sequence for FHL3 (NM_004468.1,741-759).
caagtatgtgtcctttgaa

SEQ ID NO: 320130 - DNA, 19 bp, Homo sapiens
  siRNA target sequence for SGCB (NM_000232.2,129-147).
caacagtaactttaaagct

SEQ ID NO: 320131 - DNA, 19 bp, Homo sapiens
  siRNA target sequence for SGCB (NM_000232.2,149-167).
gatacattccgattgatga

SEQ ID NO: 320132 - DNA, 19 bp, Homo sapiens
  siRNA target sequence for SGCB (NM_000232.2,153-171).
cattccgattgatgaagat

SEQ ID NO: 320133 - DNA, 19 bp, Homo sapiens
  siRNA target sequence for SGCB (NM_000232.2,243-261).
cctggctgtcatcaattta

SEQ ID NO: 320134 - DNA, 19 bp, Homo sapiens
  siRNA target sequence for SGCB (NM_000232.2,244-262).
ctggctgtcatcaatttaa

SEQ ID NO: 320135 - DNA, 19 bp, Homo sapiens
  siRNA target sequence for SGCB (NM_000232.2,247-265).
gctgtcatcaatttaataa

SEQ ID NO: 320136 - DNA, 19 bp, Homo sapiens
  siRNA target sequence for SGCB (NM_000232.2,255-273).
caatttaataataacactt

SEQ ID NO: 320137 - DNA, 19 bp, Homo sapiens
  siRNA target sequence for SGCB (NM_000232.2,301-319).
ccaaatggctgtgatagta

SEQ ID NO: 320138 - DNA, 19 bp, Homo sapiens
  siRNA target sequence for SGCB (NM_000232.2,302-320).
caaatggctgtgatagtat

SEQ ID NO: 320139 - DNA, 19 bp, Homo sapiens
  siRNA target sequence for SGCB (NM_000232.2,335-353).
gtggcctgcttcgatttaa

SEQ ID NO: 320140 - DNA, 19 bp, Homo sapiens
  siRNA target sequence for SGCB (NM_000232.2,338-356).
gcctgcttcgatttaagca

SEQ ID NO: 320141 - DNA, 19 bp, Homo sapiens
  siRNA target sequence for SGCB (NM_000232.2,343-361).
cttcgatttaagcaagtat

SEQ ID NO: 320142 - DNA, 19 bp, Homo sapiens
  siRNA target sequence for SGCB (NM_000232.2,371-389).
gagtgatccaccctcttta

SEQ ID NO: 320143 - DNA, 19 bp, Homo sapiens
  siRNA target sequence for SGCB (NM_000232.2,373-391).
gtgatccaccctctttata

SEQ ID NO: 320144 - DNA, 19 bp, Homo sapiens
  siRNA target sequence for SGCB (NM_000232.2,375-393).
gatccaccctctttataaa

SEQ ID NO: 320145 - DNA, 19 bp, Homo sapiens
  siRNA target sequence for SGCB (NM_000232.2,379-397).
caccctctttataaaagca

SEQ ID NO: 320146 - DNA, 19 bp, Homo sapiens
  siRNA target sequence for SGCB (NM_000232.2,480-498).
cagtgtagaaaacaacaaa

SEQ ID NO: 320147 - DNA, 19 bp, Homo sapiens
  siRNA target sequence for SGCB (NM_000232.2,514-532).
gacatcggcatgcagtttt

SEQ ID NO: 320148 - DNA, 19 bp, Homo sapiens
  siRNA target sequence for SGCB (NM_000232.2,538-556).
ccgaggactcaaaatatct

SEQ ID NO: 320149 - DNA, 19 bp, Homo sapiens
  siRNA target sequence for SGCB (NM_000232.2,539-557).
cgaggactcaaaatatctt

SEQ ID NO: 320150 - DNA, 19 bp, Homo sapiens
  siRNA target sequence for SGCB (NM_000232.2,563-581).
gcacagactatgaaactca

SEQ ID NO: 320151 - DNA, 19 bp, Homo sapiens
  siRNA target sequence for SGCB (NM_000232.2,594-612).
gccaagtggagtgaaaagt

SEQ ID NO: 320152 - DNA, 19 bp, Homo sapiens
  siRNA target sequence for SGCB (NM_000232.2,595-613).
ccaagtggagtgaaaagtt

SEQ ID NO: 320153 - DNA, 19 bp, Homo sapiens
  siRNA target sequence for SGCB (NM_000232.2,622-640).
caaaaggcatctactgaaa

SEQ ID NO: 320154 - DNA, 19 bp, Homo sapiens
  siRNA target sequence for SGCB (NM_000232.2,692-710).
ctattgtgcgtggaaatga

SEQ ID NO: 320155 - DNA, 19 bp, Homo sapiens
  siRNA target sequence for SGCB (NM_000232.2,703-721).
ggaaatgaaggtgtattca

SEQ ID NO: 320156 - DNA, 19 bp, Homo sapiens
  siRNA target sequence for SGCB (NM_000232.2,704-722).
gaaatgaaggtgtattcat

SEQ ID NO: 320157 - DNA, 19 bp, Homo sapiens
  siRNA target sequence for SGCB (NM_000232.2,728-746).
gcaaaaccattgaatttca

SEQ ID NO: 320158 - DNA, 19 bp, Homo sapiens
  siRNA target sequence for SGCB (NM_000232.2,780-798).
cagtatcatcctaaatgga

SEQ ID NO: 320159 - DNA, 19 bp, Homo sapiens
  siRNA target sequence for SGCB (NM_000232.2,904-922).
ctcttcaaggtgcaagtaa

SEQ ID NO: 320160 - DNA, 19 bp, Homo sapiens
  siRNA target sequence for SGCB (NM_000232.2,954-972).
caacccctgtggaaacact

SEQ ID NO: 320161 - DNA, 19 bp, Homo sapiens
  siRNA target sequence for SGCD (NM_000337.3,488-506).
gaccatctggattctcaaa

SEQ ID NO: 320162 - DNA, 19 bp, Homo sapiens
  siRNA target sequence for SGCD (NM_000337.3,490-508).
ccatctggattctcaaagt

SEQ ID NO: 320163 - DNA, 19 bp, Homo sapiens
  siRNA target sequence for SGCD (NM_000337.3,509-527).
catgaacttcacaattgat

SEQ ID NO: 320164 - DNA, 19 bp, Homo sapiens
  siRNA target sequence for SGCD (NM_000337.3,574-592).
gagactctgaattcttaca

SEQ ID NO: 320165 - DNA, 19 bp, Homo sapiens
  siRNA target sequence for SGCD (NM_000337.3,614-632).
ccagtcccgaccaggtaat

SEQ ID NO: 320166 - DNA, 19 bp, Homo sapiens
  siRNA target sequence for SGCD (NM_000337.3,628-646).
gtaatgccctgtacttcaa

SEQ ID NO: 320167 - DNA, 19 bp, Homo sapiens
  siRNA target sequence for SGCD (NM_000337.3,649-667).
ctgccagaaatgttacagt

SEQ ID NO: 320168 - DNA, 19 bp, Homo sapiens
  siRNA target sequence for SGCD (NM_000337.3,695-713).
gctaactcagcttataaca

SEQ ID NO: 320169 - DNA, 19 bp, Homo sapiens
  siRNA target sequence for SGCD (NM_000337.3,718-736).
caaaagccgtagaagctta

SEQ ID NO: 320170 - DNA, 19 bp, Homo sapiens
  siRNA target sequence for SGCD (NM_000337.3,724-742).
ccgtagaagcttatggtaa

SEQ ID NO: 320171 - DNA, 19 bp, Homo sapiens
  siRNA target sequence for SGCD (NM_000337.3,725-743).
cgtagaagcttatggtaaa

SEQ ID NO: 320172 - DNA, 19 bp, Homo sapiens
  siRNA target sequence for SGCD (NM_000337.3,814-832).
ctgaaagattacgagtttt

SEQ ID NO: 320173 - DNA, 19 bp, Homo sapiens
  siRNA target sequence for SGCD (NM_000337.3,843-861).
ggcacagtgttccctaaat

SEQ ID NO: 320174 - DNA, 19 bp, Homo sapiens
  siRNA target sequence for SGCD (NM_000337.3,845-863).
cacagtgttccctaaatct

SEQ ID NO: 320175 - DNA, 19 bp, Homo sapiens
  siRNA target sequence for SGCD (NM_000337.3,892-910).
ccttcaaagaactaaggtt

SEQ ID NO: 320176 - DNA, 19 bp, Homo sapiens
  siRNA target sequence for SGCD (NM_000337.3,946-964).
caaaaggagtggaaatcaa

SEQ ID NO: 320177 - DNA, 19 bp, Homo sapiens
  siRNA target sequence for SGCD (NM_000337.3,1004-1022).
gctgagactggaatccaaa

SEQ ID NO: 320178 - DNA, 19 bp, Homo sapiens
  siRNA target sequence for SGCD (NM_000337.3,1127-1145).
ctgcgccaatgggagatta

SEQ ID NO: 320179 - DNA, 19 bp, Homo sapiens
  siRNA target sequence for SGCD (NM_000337.3,1129-1147).
gcgccaatgggagattatt

SEQ ID NO: 320180 - DNA, 19 bp, Homo sapiens
  siRNA target sequence for SGCD (NM_000337.3,1168-1186).
ggtccacttgtcagataaa

SEQ ID NO: 320181 - DNA, 19 bp, Homo sapiens
  siRNA target sequence for SGCD (NM_172244.1,1038-1056).
gatgagaaggacagaagtt

SEQ ID NO: 320182 - DNA, 19 bp, Homo sapiens
  siRNA target sequence for SGCD (NM_172244.1,1079-1097).
gccaacccttcccataact

SEQ ID NO: 320183 - DNA, 19 bp, Homo sapiens
  siRNA target sequence for SGCG (NM_000231.1,128-146).
gtgcgtgagcagtacacta

SEQ ID NO: 320184 - DNA, 19 bp, Homo sapiens
  siRNA target sequence for SGCG (NM_000231.1,174-192).
ggccagagaatcagtatgt

SEQ ID NO: 320185 - DNA, 19 bp, Homo sapiens
  siRNA target sequence for SGCG (NM_000231.1,219-237).
gaaagcgctgtctctactt

SEQ ID NO: 320186 - DNA, 19 bp, Homo sapiens
  siRNA target sequence for SGCG (NM_000231.1,225-243).
gctgtctctacttgtttgt

SEQ ID NO: 320187 - DNA, 19 bp, Homo sapiens
  siRNA target sequence for SGCG (NM_000231.1,228-246).
gtctctacttgtttgttct

SEQ ID NO: 320188 - DNA, 19 bp, Homo sapiens
  siRNA target sequence for SGCG (NM_000231.1,262-280).
cctcgttgtgaatttagct

SEQ ID NO: 320189 - DNA, 19 bp, Homo sapiens
  siRNA target sequence for SGCG (NM_000231.1,269-287).
gtgaatttagctcttacaa

SEQ ID NO: 320190 - DNA, 19 bp, Homo sapiens
  siRNA target sequence for SGCG (NM_000231.1,285-303).
caatttggattcttaaagt

SEQ ID NO: 320191 - DNA, 19 bp, Homo sapiens
  siRNA target sequence for SGCG (NM_000231.1,440-458).
caatcaacccagaatgtga

SEQ ID NO: 320192 - DNA, 19 bp, Homo sapiens
  siRNA target sequence for SGCG (NM_000231.1,510-528).
gtcccaaaatggtagaagt

SEQ ID NO: 320193 - DNA, 19 bp, Homo sapiens
  siRNA target sequence for SGCG (NM_000231.1,559-577).
cgacggcaagccactattt

SEQ ID NO: 320194 - DNA, 19 bp, Homo sapiens
  siRNA target sequence for SGCG (NM_000231.1,560-578).
gacggcaagccactattta

SEQ ID NO: 320195 - DNA, 19 bp, Homo sapiens
  siRNA target sequence for SGCG (NM_000231.1,562-580).
cggcaagccactatttact

SEQ ID NO: 320196 - DNA, 19 bp, Homo sapiens
  siRNA target sequence for SGCG (NM_000231.1,565-583).
caagccactatttactgta

SEQ ID NO: 320197 - DNA, 19 bp, Homo sapiens
  siRNA target sequence for SGCG (NM_000231.1,568-586).
gccactatttactgtagat

SEQ ID NO: 320198 - DNA, 19 bp, Homo sapiens
  siRNA target sequence for SGCG (NM_000231.1,570-588).
cactatttactgtagatga

SEQ ID NO: 320199 - DNA, 19 bp, Homo sapiens
  siRNA target sequence for SGCG (NM_000231.1,630-648).
ggcctgaaggggctctttt

SEQ ID NO: 320200 - DNA, 19 bp, Homo sapiens
  siRNA target sequence for SGCG (NM_000231.1,638-656).
ggggctctttttgaacatt

SEQ ID NO: 320201 - DNA, 19 bp, Homo sapiens
  siRNA target sequence for SGCG (NM_000231.1,676-694).
cagagccgacccgtttcaa

SEQ ID NO: 320202 - DNA, 19 bp, Homo sapiens
  siRNA target sequence for SGCG (NM_000231.1,678-696).
gagccgacccgtttcaaga

SEQ ID NO: 320203 - DNA, 19 bp, Homo sapiens
  siRNA target sequence for SGCG (NM_000231.1,686-704).
ccgtttcaagaccttagat

SEQ ID NO: 320204 - DNA, 19 bp, Homo sapiens
  siRNA target sequence for SGCG (NM_000231.1,687-705).
cgtttcaagaccttagatt

SEQ ID NO: 320205 - DNA, 19 bp, Homo sapiens
  siRNA target sequence for SGCG (NM_000231.1,688-706).
gtttcaagaccttagatta

SEQ ID NO: 320206 - DNA, 19 bp, Homo sapiens
  siRNA target sequence for SGCG (NM_000231.1,692-710).
caagaccttagattagaat

SEQ ID NO: 320207 - DNA, 19 bp, Homo sapiens
  siRNA target sequence for SGCG (NM_000231.1,714-732).
ccactcggagtctaagcat

SEQ ID NO: 320208 - DNA, 19 bp, Homo sapiens
  siRNA target sequence for SGCG (NM_000231.1,739-757).
cccaaggggtgtgcatatt

SEQ ID NO: 320209 - DNA, 19 bp, Homo sapiens
  siRNA target sequence for SGCG (NM_000231.1,741-759).
caaggggtgtgcatattca

SEQ ID NO: 320210 - DNA, 19 bp, Homo sapiens
  siRNA target sequence for SGCG (NM_000231.1,762-780).
ctcacgctgggaaaattga

SEQ ID NO: 320211 - DNA, 19 bp, Homo sapiens
  siRNA target sequence for SGCG (NM_000231.1,781-799).
ggcgctttctcaaatggat

SEQ ID NO: 320212 - DNA, 19 bp, Homo sapiens
  siRNA target sequence for SGCG (NM_000231.1,796-814).
ggatattctttttcatagt

SEQ ID NO: 320213 - DNA, 19 bp, Homo sapiens
  siRNA target sequence for SGCG (NM_000231.1,797-815).
gatattctttttcatagta

SEQ ID NO: 320214 - DNA, 19 bp, Homo sapiens
  siRNA target sequence for SGCG (NM_000231.1,897-915).
cacagagcctctacgaaat

SEQ ID NO: 320215 - DNA, 19 bp, Homo sapiens
  siRNA target sequence for SGCG (NM_000231.1,901-919).
gagcctctacgaaatctgt

SEQ ID NO: 320216 - DNA, 19 bp, Homo sapiens
  siRNA target sequence for KRTHA2 (NM_002278.2,164-182).
ctgtgcctgggctatgtct

SEQ ID NO: 320217 - DNA, 19 bp, Homo sapiens
  siRNA target sequence for KRTHA2 (NM_002278.2,794-812).
cttggggaccgccttaaca

SEQ ID NO: 320218 - DNA, 19 bp, Homo sapiens
  siRNA target sequence for KRTHA2 (NM_002278.2,908-926).
gtggaggaatggttcaata

SEQ ID NO: 320219 - DNA, 19 bp, Homo sapiens
  siRNA target sequence for KRTHA2 (NM_002278.2,931-949).
gatggaggagcttaaccaa

SEQ ID NO: 320220 - DNA, 19 bp, Homo sapiens
  siRNA target sequence for SCEL (NM_003843.2,191-209).
cacggaagcagcaggattt

SEQ ID NO: 320221 - DNA, 19 bp, Homo sapiens
  siRNA target sequence for SCEL (NM_003843.2,241-259).
caggataacagttggataa

SEQ ID NO: 320222 - DNA, 19 bp, Homo sapiens
  siRNA target sequence for SCEL (NM_003843.2,408-426).
caggatctcagacagaaat

SEQ ID NO: 320223 - DNA, 19 bp, Homo sapiens
  siRNA target sequence for SCEL (NM_003843.2,427-445).
gatgctgctaaaacatata

SEQ ID NO: 320224 - DNA, 19 bp, Homo sapiens
  siRNA target sequence for SCEL (NM_003843.2,449-467).
ccaataccttggataacca

SEQ ID NO: 320225 - DNA, 19 bp, Homo sapiens
  siRNA target sequence for SCEL (NM_003843.2,450-468).
caataccttggataaccaa

SEQ ID NO: 320226 - DNA, 19 bp, Homo sapiens
  siRNA target sequence for SCEL (NM_003843.2,480-498).
gagcatgtccatgtttaga

SEQ ID NO: 320227 - DNA, 19 bp, Homo sapiens
  siRNA target sequence for SCEL (NM_003843.2,520-538).
caacctggcggttcattga

SEQ ID NO: 320228 - DNA, 19 bp, Homo sapiens
  siRNA target sequence for SCEL (NM_003843.2,758-776).
cacctaaaccaggtgtata

SEQ ID NO: 320229 - DNA, 19 bp, Homo sapiens
  siRNA target sequence for SCEL (NM_003843.2,760-778).
cctaaaccaggtgtatata

SEQ ID NO: 320230 - DNA, 19 bp, Homo sapiens
  siRNA target sequence for SCEL (NM_003843.2,858-876).
gaatcaaggtcttgatagt

SEQ ID NO: 320231 - DNA, 19 bp, Homo sapiens
  siRNA target sequence for SCEL (NM_003843.2,926-944).
gccttgaaagtctcatcta

SEQ ID NO: 320232 - DNA, 19 bp, Homo sapiens
  siRNA target sequence for SCEL (NM_003843.2,927-945).
ccttgaaagtctcatctat

SEQ ID NO: 320233 - DNA, 19 bp, Homo sapiens
  siRNA target sequence for SCEL (NM_003843.2,928-946).
cttgaaagtctcatctata

SEQ ID NO: 320234 - DNA, 19 bp, Homo sapiens
  siRNA target sequence for SCEL (NM_003843.2,931-949).
gaaagtctcatctatatga

SEQ ID NO: 320235 - DNA, 19 bp, Homo sapiens
  siRNA target sequence for SCEL (NM_003843.2,948-966).
gagtacccggacagataaa

SEQ ID NO: 320236 - DNA, 19 bp, Homo sapiens
  siRNA target sequence for SCEL (NM_003843.2,991-1009).
ggaagtccgattaaagtta

SEQ ID NO: 320237 - DNA, 19 bp, Homo sapiens
  siRNA target sequence for SCEL (NM_003843.2,992-1010).
gaagtccgattaaagttaa

SEQ ID NO: 320238 - DNA, 19 bp, Homo sapiens
  siRNA target sequence for SCEL (NM_003843.2,995-1013).
gtccgattaaagttaatca

SEQ ID NO: 320239 - DNA, 19 bp, Homo sapiens
  siRNA target sequence for SCEL (NM_003843.2,997-1015).
ccgattaaagttaatcaaa

SEQ ID NO: 320240 - DNA, 19 bp, Homo sapiens
  siRNA target sequence for SCEL (NM_003843.2,1040-1058).
gacaaaatctcgaatctgt

SEQ ID NO: 320241 - DNA, 19 bp, Homo sapiens
  siRNA target sequence for SCEL (NM_003843.2,1051-1069).
gaatctgttgctaaagtga

SEQ ID NO: 320242 - DNA, 19 bp, Homo sapiens
  siRNA target sequence for SCEL (NM_003843.2,1111-1129).
gataatgctactgaagtaa

SEQ ID NO: 320243 - DNA, 19 bp, Homo sapiens
  siRNA target sequence for SCEL (NM_003843.2,1218-1236).
gggccagagccttgataat

SEQ ID NO: 320244 - DNA, 19 bp, Homo sapiens
  siRNA target sequence for SCEL (NM_003843.2,1242-1260).
caaagtgacccctgaagta

SEQ ID NO: 320245 - DNA, 19 bp, Homo sapiens
  siRNA target sequence for SCEL (NM_003843.2,1276-1294).
ggttccaaagaccttaata

SEQ ID NO: 320246 - DNA, 19 bp, Homo sapiens
  siRNA target sequence for SCEL (NM_003843.2,1346-1364).
gtctcgacagcctcattaa

SEQ ID NO: 320247 - DNA, 19 bp, Homo sapiens
  siRNA target sequence for SCEL (NM_003843.2,1449-1467).
cagtgaacaaggtcttgat

SEQ ID NO: 320248 - DNA, 19 bp, Homo sapiens
  siRNA target sequence for SCEL (NM_003843.2,1451-1469).
gtgaacaaggtcttgatga

SEQ ID NO: 320249 - DNA, 19 bp, Homo sapiens
  siRNA target sequence for SCEL (NM_003843.2,1482-1500).
cagccccaaagctgtcaaa

SEQ ID NO: 320250 - DNA, 19 bp, Homo sapiens
  siRNA target sequence for SCEL (NM_003843.2,1546-1564).
cctgaaattttcacaaaca

SEQ ID NO: 320251 - DNA, 19 bp, Homo sapiens
  siRNA target sequence for SCEL (NM_003843.2,1590-1608).
cctcatcaaagtaaatcct

SEQ ID NO: 320252 - DNA, 19 bp, Homo sapiens
  siRNA target sequence for SCEL (NM_003843.2,1600-1618).
gtaaatcctgcagtaatca

SEQ ID NO: 320253 - DNA, 19 bp, Homo sapiens
  siRNA target sequence for SCEL (NM_003843.2,1607-1625).
ctgcagtaatcagaaacaa

SEQ ID NO: 320254 - DNA, 19 bp, Homo sapiens
  siRNA target sequence for SCEL (NM_003843.2,1663-1681).
ccttcagctcttagaaaca

SEQ ID NO: 320255 - DNA, 19 bp, Homo sapiens
  siRNA target sequence for SCEL (NM_003843.2,1743-1761).
gaatggaagctctaacact

SEQ ID NO: 320256 - DNA, 19 bp, Homo sapiens
  siRNA target sequence for SCEL (NM_003843.2,1781-1799).
cacaggatactgttgtgta

SEQ ID NO: 320257 - DNA, 19 bp, Homo sapiens
  siRNA target sequence for SCEL (NM_003843.2,1786-1804).
gatactgttgtgtacacaa

SEQ ID NO: 320258 - DNA, 19 bp, Homo sapiens
  siRNA target sequence for SCEL (NM_003843.2,1840-1858).
ggatatcaggagaatatct

SEQ ID NO: 320259 - DNA, 19 bp, Homo sapiens
  siRNA target sequence for SCEL (NM_003843.2,1894-1912).
gataggtctgtcattgaaa

SEQ ID NO: 320260 - DNA, 19 bp, Homo sapiens
  siRNA target sequence for SCEL (NM_003843.2,1899-1917).
gtctgtcattgaaagagat

SEQ ID NO: 320261 - DNA, 19 bp, Homo sapiens
  siRNA target sequence for SCEL (NM_003843.2,1962-1980).
gattttagatgaattacaa

SEQ ID NO: 320262 - DNA, 19 bp, Homo sapiens
  siRNA target sequence for SCEL (NM_003843.2,2038-2056).
ctacaagcgggtgatagta

SEQ ID NO: 320263 - DNA, 19 bp, Homo sapiens
  siRNA target sequence for SCEL (NM_003843.2,2084-2102).
gtgaaccttgctactctaa

SEQ ID NO: 320264 - DNA, 19 bp, Homo sapiens
  siRNA target sequence for SCEL (NM_003843.2,2086-2104).
gaaccttgctactctaaaa

SEQ ID NO: 320265 - DNA, 19 bp, Homo sapiens
  siRNA target sequence for SCEL (NM_003843.2,2089-2107).
ccttgctactctaaaatta

SEQ ID NO: 320266 - DNA, 19 bp, Homo sapiens
  siRNA target sequence for SCEL (NM_144777.1,837-855).
caaagtggccacttcactt

SEQ ID NO: 320267 - DNA, 19 bp, Homo sapiens
  siRNA target sequence for TNFAIP2 (NM_006291.2,1108-1126).
ccaatgtgagggagttgat

SEQ ID NO: 320268 - DNA, 19 bp, Homo sapiens
  siRNA target sequence for TNFAIP2 (NM_006291.2,1379-1397).
gaattacagggccaatgtt

SEQ ID NO: 320269 - DNA, 19 bp, Homo sapiens
  siRNA target sequence for TNFAIP2 (NM_006291.2,1395-1413).
gttattgccaacatcaaca

SEQ ID NO: 320270 - DNA, 19 bp, Homo sapiens
  siRNA target sequence for TNFAIP2 (NM_006291.2,1913-1931).
gattgaggtggccacttat

SEQ ID NO: 320271 - DNA, 19 bp, Homo sapiens
  siRNA target sequence for TNFAIP2 (NM_006291.2,1980-1998).
gccatcaaggggaacctat

SEQ ID NO: 320272 - DNA, 19 bp, Homo sapiens
  siRNA target sequence for TNFAIP2 (NM_006291.2,2067-2085).
cccctattttcccttataa

SEQ ID NO: 320273 - DNA, 19 bp, Homo sapiens
  siRNA target sequence for ANKRD7 (NM_019644.1,280-298).
cccagatctgagggatatt

SEQ ID NO: 320274 - DNA, 19 bp, Homo sapiens
  siRNA target sequence for ANKRD7 (NM_019644.1,287-305).
ctgagggatattcgttata

SEQ ID NO: 320275 - DNA, 19 bp, Homo sapiens
  siRNA target sequence for ANKRD7 (NM_019644.1,289-307).
gagggatattcgttataat

SEQ ID NO: 320276 - DNA, 19 bp, Homo sapiens
  siRNA target sequence for ANKRD7 (NM_019644.1,323-341).
gctgtttgtggtcaaagtt

SEQ ID NO: 320277 - DNA, 19 bp, Homo sapiens
  siRNA target sequence for ANKRD7 (NM_019644.1,402-420).
ggtatactccactattagt

SEQ ID NO: 320278 - DNA, 19 bp, Homo sapiens
  siRNA target sequence for ANKRD7 (NM_019644.1,413-431).
ctattagttgccgttatta

SEQ ID NO: 320279 - DNA, 19 bp, Homo sapiens
  siRNA target sequence for ANKRD7 (NM_019644.1,419-437).
gttgccgttattaacaata

SEQ ID NO: 320280 - DNA, 19 bp, Homo sapiens
  siRNA target sequence for ANKRD7 (NM_019644.1,425-443).
gttattaacaataatccaa

SEQ ID NO: 320281 - DNA, 19 bp, Homo sapiens
  siRNA target sequence for ANKRD7 (NM_019644.1,531-549).
gtgaaccaccatgtttagt

SEQ ID NO: 320282 - DNA, 19 bp, Homo sapiens
  siRNA target sequence for ANKRD7 (NM_019644.1,533-551).
gaaccaccatgtttagtaa

SEQ ID NO: 320283 - DNA, 19 bp, Homo sapiens
  siRNA target sequence for MEA (NM_014623.1,70-88).
ccggatggcaacagtagtt

SEQ ID NO: 320284 - DNA, 19 bp, Homo sapiens
  siRNA target sequence for MEA (NM_014623.1,72-90).
ggatggcaacagtagttct

SEQ ID NO: 320285 - DNA, 19 bp, Homo sapiens
  siRNA target sequence for MEA (NM_014623.1,73-91).
gatggcaacagtagttcta

SEQ ID NO: 320286 - DNA, 19 bp, Homo sapiens
  siRNA target sequence for MEA (NM_014623.1,295-313).
gggggatggagatgtagtt

SEQ ID NO: 320287 - DNA, 19 bp, Homo sapiens
  siRNA target sequence for MEA (NM_014623.1,315-333).
ctgacatccaggatcgaat

SEQ ID NO: 320288 - DNA, 19 bp, Homo sapiens
  siRNA target sequence for MEA (NM_014623.1,356-374).
ccagacccaccattagaga

SEQ ID NO: 320289 - DNA, 19 bp, Homo sapiens
  siRNA target sequence for MEA (NM_014623.1,503-521).
gcctgggctcgggagatat

SEQ ID NO: 320290 - DNA, 19 bp, Homo sapiens
  siRNA target sequence for CCNI (NM_006835.2,637-655).
gcggaaaatgccttcaaat

SEQ ID NO: 320291 - DNA, 19 bp, Homo sapiens
  siRNA target sequence for CCNI (NM_006835.2,692-710).
caatggctggccaaactca

SEQ ID NO: 320292 - DNA, 19 bp, Homo sapiens
  siRNA target sequence for CCNI (NM_006835.2,701-719).
gccaaactcaagtaccaat

SEQ ID NO: 320293 - DNA, 19 bp, Homo sapiens
  siRNA target sequence for CCNI (NM_006835.2,702-720).
ccaaactcaagtaccaatt

SEQ ID NO: 320294 - DNA, 19 bp, Homo sapiens
  siRNA target sequence for CCNI (NM_006835.2,721-739).
caacctttacccagaaaca

SEQ ID NO: 320295 - DNA, 19 bp, Homo sapiens
  siRNA target sequence for CCNI (NM_006835.2,753-771).
gcagtcttttggataggtt

SEQ ID NO: 320296 - DNA, 19 bp, Homo sapiens
  siRNA target sequence for CCNI (NM_006835.2,754-772).
cagtcttttggataggttt

SEQ ID NO: 320297 - DNA, 19 bp, Homo sapiens
  siRNA target sequence for CCNI (NM_006835.2,780-798).
ccgtaaaggctcatccaaa

SEQ ID NO: 320298 - DNA, 19 bp, Homo sapiens
  siRNA target sequence for CCNI (NM_006835.2,781-799).
cgtaaaggctcatccaaaa

SEQ ID NO: 320299 - DNA, 19 bp, Homo sapiens
  siRNA target sequence for CCNI (NM_006835.2,782-800).
gtaaaggctcatccaaaat

SEQ ID NO: 320300 - DNA, 19 bp, Homo sapiens
  siRNA target sequence for CCNI (NM_006835.2,979-997).
cacaccattggattttctt

SEQ ID NO: 320301 - DNA, 19 bp, Homo sapiens
  siRNA target sequence for CCNI (NM_006835.2,1010-1028).
gccattgcagtgtcaacta

SEQ ID NO: 320302 - DNA, 19 bp, Homo sapiens
  siRNA target sequence for CCNI (NM_006835.2,1026-1044).
ctaggcctcagttactttt

SEQ ID NO: 320303 - DNA, 19 bp, Homo sapiens
  siRNA target sequence for CCNI (NM_006835.2,1084-1102).
ccttaccaagcaactactt

SEQ ID NO: 320304 - DNA, 19 bp, Homo sapiens
  siRNA target sequence for CCNI (NM_006835.2,1116-1134).
gcaaccaacttctgcaatt

SEQ ID NO: 320305 - DNA, 19 bp, Homo sapiens
  siRNA target sequence for CCNI (NM_006835.2,1120-1138).
ccaacttctgcaattcaga

SEQ ID NO: 320306 - DNA, 19 bp, Homo sapiens
  siRNA target sequence for CCNI (NM_006835.2,1158-1176).
ccatggttagtctggaaat

SEQ ID NO: 320307 - DNA, 19 bp, Homo sapiens
  siRNA target sequence for CCNI (NM_006835.2,1197-1215).
ggctttctcttacaattga

SEQ ID NO: 320308 - DNA, 19 bp, Homo sapiens
  siRNA target sequence for CCNI (NM_006835.2,1310-1328).
ctgaattccgtttatgtct

SEQ ID NO: 320309 - DNA, 19 bp, Homo sapiens
  siRNA target sequence for CCNI (NM_006835.2,1551-1569).
gaatcaaacggctctataa

SEQ ID NO: 320310 - DNA, 19 bp, Homo sapiens
  siRNA target sequence for CCNI (NM_006835.2,1559-1577).
cggctctataatgaagata

SEQ ID NO: 320311 - DNA, 19 bp, Homo sapiens
  siRNA target sequence for CCNI (NM_006835.2,1560-1578).
ggctctataatgaagataa

SEQ ID NO: 320312 - DNA, 19 bp, Homo sapiens
  siRNA target sequence for FSHPRH1 (NM_006733.1,319-337).
cacaaggtagtagtagttt

SEQ ID NO: 320313 - DNA, 19 bp, Homo sapiens
  siRNA target sequence for FSHPRH1 (NM_006733.1,324-342).
ggtagtagtagttttcaga

SEQ ID NO: 320314 - DNA, 19 bp, Homo sapiens
  siRNA target sequence for FSHPRH1 (NM_006733.1,347-365).
gctttcagcctggaaagta

SEQ ID NO: 320315 - DNA, 19 bp, Homo sapiens
  siRNA target sequence for FSHPRH1 (NM_006733.1,376-394).
caagcaactcgaagaacat

SEQ ID NO: 320316 - DNA, 19 bp, Homo sapiens
  siRNA target sequence for FSHPRH1 (NM_006733.1,383-401).
ctcgaagaacatctcaaaa

SEQ ID NO: 320317 - DNA, 19 bp, Homo sapiens
  siRNA target sequence for FSHPRH1 (NM_006733.1,385-403).
cgaagaacatctcaaaaca

SEQ ID NO: 320318 - DNA, 19 bp, Homo sapiens
  siRNA target sequence for FSHPRH1 (NM_006733.1,386-404).
gaagaacatctcaaaacat

SEQ ID NO: 320319 - DNA, 19 bp, Homo sapiens
  siRNA target sequence for FSHPRH1 (NM_006733.1,475-493).
cagtgggatattttgagaa

SEQ ID NO: 320320 - DNA, 19 bp, Homo sapiens
  siRNA target sequence for FSHPRH1 (NM_006733.1,572-590).
gaatgggttagcttcagaa

SEQ ID NO: 320321 - DNA, 19 bp, Homo sapiens
  siRNA target sequence for FSHPRH1 (NM_006733.1,665-683).
catgatcccagcaacagta

SEQ ID NO: 320322 - DNA, 19 bp, Homo sapiens
  siRNA target sequence for FSHPRH1 (NM_006733.1,668-686).
gatcccagcaacagtaata

SEQ ID NO: 320323 - DNA, 19 bp, Homo sapiens
  siRNA target sequence for FSHPRH1 (NM_006733.1,671-689).
cccagcaacagtaatatca

SEQ ID NO: 320324 - DNA, 19 bp, Homo sapiens
  siRNA target sequence for FSHPRH1 (NM_006733.1,742-760).
gtagcaccaaggtactttt

SEQ ID NO: 320325 - DNA, 19 bp, Homo sapiens
  siRNA target sequence for FSHPRH1 (NM_006733.1,745-763).
gcaccaaggtactttttta

SEQ ID NO: 320326 - DNA, 19 bp, Homo sapiens
  siRNA target sequence for FSHPRH1 (NM_006733.1,749-767).
caaggtacttttttatcgt

SEQ ID NO: 320327 - DNA, 19 bp, Homo sapiens
  siRNA target sequence for FSHPRH1 (NM_006733.1,905-923).
gaatgtcaaaccatttcgt

SEQ ID NO: 320328 - DNA, 19 bp, Homo sapiens
  siRNA target sequence for FSHPRH1 (NM_006733.1,916-934).
catttcgtgtgagaaaact

SEQ ID NO: 320329 - DNA, 19 bp, Homo sapiens
  siRNA target sequence for FSHPRH1 (NM_006733.1,978-996).
gctttgttgtcactgtata

SEQ ID NO: 320330 - DNA, 19 bp, Homo sapiens
  siRNA target sequence for FSHPRH1 (NM_006733.1,979-997).
ctttgttgtcactgtataa

SEQ ID NO: 320331 - DNA, 19 bp, Homo sapiens
  siRNA target sequence for FSHPRH1 (NM_006733.1,1008-1026).
cctgctctgatttcagtat

SEQ ID NO: 320332 - DNA, 19 bp, Homo sapiens
  siRNA target sequence for FSHPRH1 (NM_006733.1,1011-1029).
gctctgatttcagtatctt

SEQ ID NO: 320333 - DNA, 19 bp, Homo sapiens
  siRNA target sequence for FSHPRH1 (NM_006733.1,1123-1141).
cagaacctctgaagttgat

SEQ ID NO: 320334 - DNA, 19 bp, Homo sapiens
  siRNA target sequence for FSHPRH1 (NM_006733.1,1125-1143).
gaacctctgaagttgatgt

SEQ ID NO: 320335 - DNA, 19 bp, Homo sapiens
  siRNA target sequence for FSHPRH1 (NM_006733.1,1139-1157).
gatgttaggtccagctaat

SEQ ID NO: 320336 - DNA, 19 bp, Homo sapiens
  siRNA target sequence for FSHPRH1 (NM_006733.1,1142-1160).
gttaggtccagctaatgtt

SEQ ID NO: 320337 - DNA, 19 bp, Homo sapiens
  siRNA target sequence for FSHPRH1 (NM_006733.1,1194-1212).
gttataccagtgctcaatt

SEQ ID NO: 320338 - DNA, 19 bp, Homo sapiens
  siRNA target sequence for FSHPRH1 (NM_006733.1,1385-1403).
gcttcactacattaactgt

SEQ ID NO: 320339 - DNA, 19 bp, Homo sapiens
  siRNA target sequence for FSHPRH1 (NM_006733.1,1701-1719).
ctagcgcagctcttcttta

SEQ ID NO: 320340 - DNA, 19 bp, Homo sapiens
  siRNA target sequence for FSHPRH1 (NM_006733.1,1756-1774).
gtctgaaagagctattgca

SEQ ID NO: 320341 - DNA, 19 bp, Homo sapiens
  siRNA target sequence for FSHPRH1 (NM_006733.1,1913-1931).
gcgcttggagagcaacaat

SEQ ID NO: 320342 - DNA, 19 bp, Homo sapiens
  siRNA target sequence for FSHPRH1 (NM_006733.1,1914-1932).
cgcttggagagcaacaata

SEQ ID NO: 320343 - DNA, 19 bp, Homo sapiens
  siRNA target sequence for FSHPRH1 (NM_006733.1,1916-1934).
cttggagagcaacaatact

SEQ ID NO: 320344 - DNA, 19 bp, Homo sapiens
  siRNA target sequence for FSHPRH1 (NM_006733.1,1920-1938).
gagagcaacaatactttct

SEQ ID NO: 320345 - DNA, 19 bp, Homo sapiens
  siRNA target sequence for FSHPRH1 (NM_006733.1,1965-1983).
gagaaggtgtgtgacatat

SEQ ID NO: 320346 - DNA, 19 bp, Homo sapiens
  siRNA target sequence for FSHPRH1 (NM_006733.1,2091-2109).
cacagatatcgtaaaaatt

SEQ ID NO: 320347 - DNA, 19 bp, Homo sapiens
  siRNA target sequence for FSHPRH1 (NM_006733.1,2144-2162).
gacaaaatcagagttcaat

SEQ ID NO: 320348 - DNA, 19 bp, Homo sapiens
  siRNA target sequence for FSHPRH1 (NM_006733.1,2165-2183).
cagcagcaagacttatcaa

SEQ ID NO: 320349 - DNA, 19 bp, Homo sapiens
  siRNA target sequence for FSHPRH1 (NM_006733.1,2167-2185).
gcagcaagacttatcaaga

SEQ ID NO: 320350 - DNA, 19 bp, Homo sapiens
  siRNA target sequence for FSHPRH1 (NM_006733.1,2281-2299).
ctggagtggctgaatataa

SEQ ID NO: 320351 - DNA, 19 bp, Homo sapiens
  siRNA target sequence for FSHPRH1 (NM_006733.1,2283-2301).
ggagtggctgaatataaaa

SEQ ID NO: 320352 - DNA, 19 bp, Homo sapiens
  siRNA target sequence for FSHPRH1 (NM_006733.1,2316-2334).
gtccatcatccttctttct

SEQ ID NO: 320353 - DNA, 19 bp, Homo sapiens
  siRNA target sequence for FSHPRH1 (NM_006733.1,2342-2360).
cgctgtttcctttttgcta

SEQ ID NO: 320354 - DNA, 19 bp, Homo sapiens
  siRNA target sequence for FSHPRH1 (NM_006733.1,2420-2438).
ctggtatttggactattta

SEQ ID NO: 320355 - DNA, 19 bp, Homo sapiens
  siRNA target sequence for FSHPRH1 (NM_006733.1,2422-2440).
ggtatttggactatttatt

SEQ ID NO: 320356 - DNA, 19 bp, Homo sapiens
  siRNA target sequence for FSHPRH1 (NM_006733.1,2449-2467).
ggttacaaggcttgaaact

SEQ ID NO: 320357 - DNA, 19 bp, Homo sapiens
  siRNA target sequence for FSHPRH1 (NM_006733.1,2450-2468).
gttacaaggcttgaaactt

SEQ ID NO: 320358 - DNA, 19 bp, Homo sapiens
  siRNA target sequence for FSHPRH1 (NM_006733.1,2513-2531).
gggcataaactgcaacaat

SEQ ID NO: 320359 - DNA, 19 bp, Homo sapiens
  siRNA target sequence for SPAG11 (NM_016512.2,401-419).
ggctcgaggaccctcattt

SEQ ID NO: 320360 - DNA, 19 bp, Homo sapiens
  siRNA target sequence for SPAG11 (NM_016512.2,402-420).
gctcgaggaccctcattta

SEQ ID NO: 320361 - DNA, 19 bp, Homo sapiens
  siRNA target sequence for SPAG11 (NM_016512.2,405-423).
cgaggaccctcatttagga

SEQ ID NO: 320362 - DNA, 19 bp, Homo sapiens
  siRNA target sequence for SPAG11 (NM_016512.2,406-424).
gaggaccctcatttaggat

SEQ ID NO: 320363 - DNA, 19 bp, Homo sapiens
  siRNA target sequence for SPAG11 (NM_058201.1,502-520).
gttgcgtatcaaatacaga

SEQ ID NO: 320364 - DNA, 19 bp, Homo sapiens
  siRNA target sequence for SPAG11 (NM_058203.1,433-451).
gccaagaatactgtaatta

SEQ ID NO: 320365 - DNA, 19 bp, Homo sapiens
  siRNA target sequence for SPAG11 (NM_058203.1,434-452).
ccaagaatactgtaattat

SEQ ID NO: 320366 - DNA, 19 bp, Homo sapiens
  siRNA target sequence for SPAG11 (NM_058203.1,445-463).
gtaattatatggaaacaca

SEQ ID NO: 320367 - DNA, 19 bp, Homo sapiens
  siRNA target sequence for SPAG11 (NM_058203.1,489-507).
gacgcctgctgtttacatt

SEQ ID NO: 320368 - DNA, 19 bp, Homo sapiens
  siRNA target sequence for SPAG9 (NM_003971.3,430-448).
cagacccgagtggaatctt

SEQ ID NO: 320369 - DNA, 19 bp, Homo sapiens
  siRNA target sequence for SPAG9 (NM_003971.3,432-450).
gacccgagtggaatcttta

SEQ ID NO: 320370 - DNA, 19 bp, Homo sapiens
  siRNA target sequence for SPAG9 (NM_003971.3,435-453).
ccgagtggaatctttagaa

SEQ ID NO: 320371 - DNA, 19 bp, Homo sapiens
  siRNA target sequence for SPAG9 (NM_003971.3,436-454).
cgagtggaatctttagaat

SEQ ID NO: 320372 - DNA, 19 bp, Homo sapiens
  siRNA target sequence for SPAG9 (NM_003971.3,441-459).
ggaatctttagaatctcaa

SEQ ID NO: 320373 - DNA, 19 bp, Homo sapiens
  siRNA target sequence for SPAG9 (NM_003971.3,569-587).
ctgagatgatccataatta

SEQ ID NO: 320374 - DNA, 19 bp, Homo sapiens
  siRNA target sequence for SPAG9 (NM_003971.3,571-589).
gagatgatccataattata

SEQ ID NO: 320375 - DNA, 19 bp, Homo sapiens
  siRNA target sequence for SPAG9 (NM_003971.3,576-594).
gatccataattatatggaa

SEQ ID NO: 320376 - DNA, 19 bp, Homo sapiens
  siRNA target sequence for SPAG9 (NM_003971.3,621-639).
gctctcagggagtgatcaa

SEQ ID NO: 320377 - DNA, 19 bp, Homo sapiens
  siRNA target sequence for SPAG9 (NM_003971.3,626-644).
cagggagtgatcaactaga

SEQ ID NO: 320378 - DNA, 19 bp, Homo sapiens
  siRNA target sequence for SPAG9 (NM_003971.3,628-646).
gggagtgatcaactagaat

SEQ ID NO: 320379 - DNA, 19 bp, Homo sapiens
  siRNA target sequence for SPAG9 (NM_003971.3,647-665).
ccacagctcatagtagaat

SEQ ID NO: 320380 - DNA, 19 bp, Homo sapiens
  siRNA target sequence for SPAG9 (NM_003971.3,648-666).
cacagctcatagtagaatt

SEQ ID NO: 320381 - DNA, 19 bp, Homo sapiens
  siRNA target sequence for SPAG9 (NM_003971.3,676-694).
cgccctatatcattaggaa

SEQ ID NO: 320382 - DNA, 19 bp, Homo sapiens
  siRNA target sequence for SPAG9 (NM_003971.3,840-858).
ccaaggcggatctaaagct

SEQ ID NO: 320383 - DNA, 19 bp, Homo sapiens
  siRNA target sequence for SPAG9 (NM_003971.3,841-859).
caaggcggatctaaagcta

SEQ ID NO: 320384 - DNA, 19 bp, Homo sapiens
  siRNA target sequence for SPAG9 (NM_003971.3,869-887).
catcaacagctaattcaga

SEQ ID NO: 320385 - DNA, 19 bp, Homo sapiens
  siRNA target sequence for SPAG9 (NM_003971.3,892-910).
gcaacaattcctactgata

SEQ ID NO: 320386 - DNA, 19 bp, Homo sapiens
  siRNA target sequence for SPAG9 (NM_003971.3,902-920).
ctactgatactcccttaaa

SEQ ID NO: 320387 - DNA, 19 bp, Homo sapiens
  siRNA target sequence for SPAG9 (NM_003971.3,905-923).
ctgatactcccttaaagga

SEQ ID NO: 320388 - DNA, 19 bp, Homo sapiens
  siRNA target sequence for SPAG9 (NM_003971.3,946-964).
gttacagatgcgccaaata

SEQ ID NO: 320389 - DNA, 19 bp, Homo sapiens
  siRNA target sequence for SPAG9 (NM_003971.3,957-975).
gccaaataaatcagagata

SEQ ID NO: 320390 - DNA, 19 bp, Homo sapiens
  siRNA target sequence for SPAG9 (NM_003971.3,972-990).
gataagcaaacacattgaa

SEQ ID NO: 320391 - DNA, 19 bp, Homo sapiens
  siRNA target sequence for SPAG9 (NM_003971.3,977-995).
gcaaacacattgaagtaca

SEQ ID NO: 320392 - DNA, 19 bp, Homo sapiens
  siRNA target sequence for SPAG9 (NM_003971.3,996-1014).
ggtagcccaggaaactaga

SEQ ID NO: 320393 - DNA, 19 bp, Homo sapiens
  siRNA target sequence for SPAG9 (NM_003971.3,997-1015).
gtagcccaggaaactagaa

SEQ ID NO: 320394 - DNA, 19 bp, Homo sapiens
  siRNA target sequence for SPAG9 (NM_003971.3,1022-1040).
ctactggctctgctgaaaa

SEQ ID NO: 320395 - DNA, 19 bp, Homo sapiens
  siRNA target sequence for SPAG9 (NM_003971.3,1057-1075).
gttcaagcaatcatcgaat

SEQ ID NO: 320396 - DNA, 19 bp, Homo sapiens
  siRNA target sequence for SPAG9 (NM_003971.3,1060-1078).
caagcaatcatcgaatcta

SEQ ID NO: 320397 - DNA, 19 bp, Homo sapiens
  siRNA target sequence for SPAG9 (NM_003971.3,1079-1097).
ctcctgagctggatatgga

SEQ ID NO: 320398 - DNA, 19 bp, Homo sapiens
  siRNA target sequence for SPAG9 (NM_003971.3,1132-1150).
cccaccaaaggcatagaga

SEQ ID NO: 320399 - DNA, 19 bp, Homo sapiens
  siRNA target sequence for SPAG9 (NM_003971.3,1133-1151).
ccaccaaaggcatagagaa

SEQ ID NO: 320400 - DNA, 19 bp, Homo sapiens
  siRNA target sequence for SPAG9 (NM_003971.3,1227-1245).
ggatgaaggagcagattta

SEQ ID NO: 320401 - DNA, 19 bp, Homo sapiens
  siRNA target sequence for SPAG9 (NM_003971.3,1235-1253).
gagcagatttactaggaat

SEQ ID NO: 320402 - DNA, 19 bp, Homo sapiens
  siRNA target sequence for SPAG9 (NM_003971.3,1250-1268).
gaatgggtcgggaagttga

SEQ ID NO: 320403 - DNA, 19 bp, Homo sapiens
  siRNA target sequence for SPAG9 (NM_003971.3,1254-1272).
gggtcgggaagttgagaat

SEQ ID NO: 320404 - DNA, 19 bp, Homo sapiens
  siRNA target sequence for SPAG9 (NM_003971.3,1256-1274).
gtcgggaagttgagaatct

SEQ ID NO: 320405 - DNA, 19 bp, Homo sapiens
  siRNA target sequence for SPAG9 (NM_003971.3,1258-1276).
cgggaagttgagaatctta

SEQ ID NO: 320406 - DNA, 19 bp, Homo sapiens
  siRNA target sequence for SPAG9 (NM_003971.3,1259-1277).
gggaagttgagaatcttat

SEQ ID NO: 320407 - DNA, 19 bp, Homo sapiens
  siRNA target sequence for SPAG9 (NM_003971.3,1260-1278).
ggaagttgagaatcttata

SEQ ID NO: 320408 - DNA, 19 bp, Homo sapiens
  siRNA target sequence for SPAG9 (NM_003971.3,1267-1285).
gagaatcttatattagaaa

SEQ ID NO: 320409 - DNA, 19 bp, Homo sapiens
  siRNA target sequence for SPAG9 (NM_003971.3,1289-1307).
cacaactgttggaaaccaa

SEQ ID NO: 320410 - DNA, 19 bp, Homo sapiens
  siRNA target sequence for SPAG9 (NM_003971.3,1533-1551).
gaggaaacggtttactaga

SEQ ID NO: 320411 - DNA, 19 bp, Homo sapiens
  siRNA target sequence for SPAG9 (NM_003971.3,1536-1554).
gaaacggtttactagagta

SEQ ID NO: 320412 - DNA, 19 bp, Homo sapiens
  siRNA target sequence for SPAG9 (NM_003971.3,1540-1558).
cggtttactagagtagaaa

SEQ ID NO: 320413 - DNA, 19 bp, Homo sapiens
  siRNA target sequence for SPAG9 (NM_003971.3,1541-1559).
ggtttactagagtagaaat

SEQ ID NO: 320414 - DNA, 19 bp, Homo sapiens
  siRNA target sequence for SPAG9 (NM_003971.3,1575-1593).
ggagcgaaaccagtataaa

SEQ ID NO: 320415 - DNA, 19 bp, Homo sapiens
  siRNA target sequence for SPAG9 (NM_003971.3,1579-1597).
cgaaaccagtataaagaga

SEQ ID NO: 320416 - DNA, 19 bp, Homo sapiens
  siRNA target sequence for SPAG9 (NM_003971.3,1743-1761).
gcctgaaccacctgttaat

SEQ ID NO: 320417 - DNA, 19 bp, Homo sapiens
  siRNA target sequence for SPAG9 (NM_003971.3,1747-1765).
gaaccacctgttaatctga

SEQ ID NO: 320418 - DNA, 19 bp, Homo sapiens
  siRNA target sequence for SPAG9 (NM_003971.3,1751-1769).
cacctgttaatctgaagta

SEQ ID NO: 320419 - DNA, 19 bp, Homo sapiens
  siRNA target sequence for SPAG9 (NM_003971.3,1774-1792).
gcacccacgtctcatgtta

SEQ ID NO: 320420 - DNA, 19 bp, Homo sapiens
  siRNA target sequence for SPAG9 (NM_003971.3,1892-1910).
cctcacgcagagaacaaaa

SEQ ID NO: 320421 - DNA, 19 bp, Homo sapiens
  siRNA target sequence for SPAG9 (NM_003971.3,1917-1935).
gcagtatcgtcaggtaaaa

SEQ ID NO: 320422 - DNA, 19 bp, Homo sapiens
  siRNA target sequence for SPAG9 (NM_003971.3,1920-1938).
gtatcgtcaggtaaaagca

SEQ ID NO: 320423 - DNA, 19 bp, Homo sapiens
  siRNA target sequence for SPAG9 (NM_003971.3,1979-1997).
ggagtctgcctcagaagta

SEQ ID NO: 320424 - DNA, 19 bp, Homo sapiens
  siRNA target sequence for SPAG9 (NM_003971.3,1995-2013).
gtacaaacaggtaaccaat

SEQ ID NO: 320425 - DNA, 19 bp, Homo sapiens
  siRNA target sequence for SPAG9 (NM_003971.3,2009-2027).
ccaatggtcaaggtgaaaa

SEQ ID NO: 320426 - DNA, 19 bp, Homo sapiens
  siRNA target sequence for SPAG9 (NM_003971.3,2104-2122).
gctgttggagtcaatttat

SEQ ID NO: 320427 - DNA, 19 bp, Homo sapiens
  siRNA target sequence for SPAG9 (NM_003971.3,2178-2196).
ggatgttgctggtttggat

SEQ ID NO: 320428 - DNA, 19 bp, Homo sapiens
  siRNA target sequence for SPAG9 (NM_003971.3,2179-2197).
gatgttgctggtttggata

SEQ ID NO: 320429 - DNA, 19 bp, Homo sapiens
  siRNA target sequence for SPAG9 (NM_003971.3,2219-2237).
gtgcctctcagagtagttt

SEQ ID NO: 320430 - DNA, 19 bp, Homo sapiens
  siRNA target sequence for SPAG9 (NM_003971.3,2223-2241).
ctctcagagtagtttagat

SEQ ID NO: 320431 - DNA, 19 bp, Homo sapiens
  siRNA target sequence for SPAG9 (NM_003971.3,2231-2249).
gtagtttagataagttaga

SEQ ID NO: 320432 - DNA, 19 bp, Homo sapiens
  siRNA target sequence for SPAG9 (NM_003971.3,2324-2342).
gcactcattcggctacaaa

SEQ ID NO: 320433 - DNA, 19 bp, Homo sapiens
  siRNA target sequence for SPAG9 (NM_003971.3,2325-2343).
cactcattcggctacaaaa

SEQ ID NO: 320434 - DNA, 19 bp, Homo sapiens
  siRNA target sequence for SPAG9 (NM_003971.3,2327-2345).
ctcattcggctacaaaagt

SEQ ID NO: 320435 - DNA, 19 bp, Homo sapiens
  siRNA target sequence for SPAG9 (NM_003971.3,2333-2351).
cggctacaaaagttcttat

SEQ ID NO: 320436 - DNA, 19 bp, Homo sapiens
  siRNA target sequence for SPAG9 (NM_003971.3,2334-2352).
ggctacaaaagttcttatt

SEQ ID NO: 320437 - DNA, 19 bp, Homo sapiens
  siRNA target sequence for SPAG9 (NM_003971.3,2407-2425).
catgttctgtgcattgcaa

SEQ ID NO: 320438 - DNA, 19 bp, Homo sapiens
  siRNA target sequence for SPAG9 (NM_003971.3,2451-2469).
ctaccctgcaggagaagat

SEQ ID NO: 320439 - DNA, 19 bp, Homo sapiens
  siRNA target sequence for SPAG9 (NM_003971.3,2778-2796).
cacagagcatgtctttaca

SEQ ID NO: 320440 - DNA, 19 bp, Homo sapiens
  siRNA target sequence for SPAG9 (NM_003971.3,2858-2876).
cagatgcatataaagatca

SEQ ID NO: 320441 - DNA, 19 bp, Homo sapiens
  siRNA target sequence for SPAG9 (NM_003971.3,2882-2900).
cagtactgccaaatgaaca

SEQ ID NO: 320442 - DNA, 19 bp, Homo sapiens
  siRNA target sequence for SPAG9 (NM_003971.3,2922-2940).
ccagaaaatgagtagtctt

SEQ ID NO: 320443 - DNA, 19 bp, Homo sapiens
  siRNA target sequence for SPAG9 (NM_003971.3,2952-2970).
gtggcttggagctcaaaat

SEQ ID NO: 320444 - DNA, 19 bp, Homo sapiens
  siRNA target sequence for SPAG9 (NM_003971.3,3008-3026).
ggaaatgtctccattccat

SEQ ID NO: 320445 - DNA, 19 bp, Homo sapiens
  siRNA target sequence for SPAG9 (NM_003971.3,3018-3036).
ccattccattaaacttaaa

SEQ ID NO: 320446 - DNA, 19 bp, Homo sapiens
  siRNA target sequence for SPAG9 (NM_003971.3,3031-3049).
cttaaagattcgattctca

SEQ ID NO: 320447 - DNA, 19 bp, Homo sapiens
  siRNA target sequence for SPAG9 (NM_003971.3,3089-3107).
ctgacggcacccttgcaat

SEQ ID NO: 320448 - DNA, 19 bp, Homo sapiens
  siRNA target sequence for SPAG9 (NM_003971.3,3093-3111).
cggcacccttgcaatcttt

SEQ ID NO: 320449 - DNA, 19 bp, Homo sapiens
  siRNA target sequence for SPAG9 (NM_003971.3,3127-3145).
gggcagtgggatttgtcaa

SEQ ID NO: 320450 - DNA, 19 bp, Homo sapiens
  siRNA target sequence for SPAG9 (NM_003971.3,3134-3152).
gggatttgtcaaactatca

SEQ ID NO: 320451 - DNA, 19 bp, Homo sapiens
  siRNA target sequence for SPAG9 (NM_003971.3,3163-3181).
cttggacggcctcatcatt

SEQ ID NO: 320452 - DNA, 19 bp, Homo sapiens
  siRNA target sequence for SPAG9 (NM_003971.3,3195-3213).
gactgtggtacatgacaaa

SEQ ID NO: 320453 - DNA, 19 bp, Homo sapiens
  siRNA target sequence for SPAG9 (NM_003971.3,3199-3217).
gtggtacatgacaaagtct

SEQ ID NO: 320454 - DNA, 19 bp, Homo sapiens
  siRNA target sequence for SPAG9 (NM_003971.3,3214-3232).
gtctggtgtggctatagga

SEQ ID NO: 320455 - DNA, 19 bp, Homo sapiens
  siRNA target sequence for SPAG9 (NM_003971.3,3221-3239).
gtggctataggaacaaaat

SEQ ID NO: 320456 - DNA, 19 bp, Homo sapiens
  siRNA target sequence for SPAG9 (NM_003971.3,3249-3267).
gcagccaaaggccatgaaa

SEQ ID NO: 320457 - DNA, 19 bp, Homo sapiens
  siRNA target sequence for SPAG9 (NM_003971.3,3346-3364).
gtctccattcgcttggatt

SEQ ID NO: 320458 - DNA, 19 bp, Homo sapiens
  siRNA target sequence for SPAG9 (NM_003971.3,3378-3396).
ctatcatgcacacacttat

SEQ ID NO: 320459 - DNA, 19 bp, Homo sapiens
  siRNA target sequence for SPAG9 (NM_003971.3,3386-3404).
cacacacttatcaacatct

SEQ ID NO: 320460 - DNA, 19 bp, Homo sapiens
  siRNA target sequence for SPAG9 (NM_003971.3,3414-3432).
ggacattgagccttatgta

SEQ ID NO: 320461 - DNA, 19 bp, Homo sapiens
  siRNA target sequence for SPAG9 (NM_003971.3,3415-3433).
gacattgagccttatgtaa

SEQ ID NO: 320462 - DNA, 19 bp, Homo sapiens
  siRNA target sequence for SPAG9 (NM_003971.3,3421-3439).
gagccttatgtaagcaaaa

SEQ ID NO: 320463 - DNA, 19 bp, Homo sapiens
  siRNA target sequence for SPAG9 (NM_003971.3,3424-3442).
ccttatgtaagcaaaatgt

SEQ ID NO: 320464 - DNA, 19 bp, Homo sapiens
  siRNA target sequence for SPAG9 (NM_003971.3,3425-3443).
cttatgtaagcaaaatgtt

SEQ ID NO: 320465 - DNA, 19 bp, Homo sapiens
  siRNA target sequence for SPAG9 (NM_003971.3,3484-3502).
gctcttatggtgtcttgta

SEQ ID NO: 320466 - DNA, 19 bp, Homo sapiens
  siRNA target sequence for SPAG9 (NM_003971.3,3596-3614).
gaagtgtaatccgtgtata

SEQ ID NO: 320467 - DNA, 19 bp, Homo sapiens
  siRNA target sequence for SPAG9 (NM_003971.3,3606-3624).
ccgtgtatatggtgatgaa

SEQ ID NO: 320468 - DNA, 19 bp, Homo sapiens
  siRNA target sequence for SPAG9 (NM_003971.3,3607-3625).
cgtgtatatggtgatgaaa

SEQ ID NO: 320469 - DNA, 19 bp, Homo sapiens
  siRNA target sequence for SPAG9 (NM_003971.3,3648-3666).
gacatttataccctattgt

SEQ ID NO: 320470 - DNA, 19 bp, Homo sapiens
  siRNA target sequence for SPAG9 (NM_003971.3,3699-3717).
gcaccgggatgctgtgaaa

SEQ ID NO: 320471 - DNA, 19 bp, Homo sapiens
  siRNA target sequence for SPAG9 (NM_003971.3,3700-3718).
caccgggatgctgtgaaat

SEQ ID NO: 320472 - DNA, 19 bp, Homo sapiens
  siRNA target sequence for SPAG9 (NM_003971.3,3728-3746).
cagtcccaggtcaagtcat

SEQ ID NO: 320473 - DNA, 19 bp, Homo sapiens
  siRNA target sequence for SPAG9 (NM_003971.3,3774-3792).
ggatctgacgggtgacaaa

SEQ ID NO: 320474 - DNA, 19 bp, Homo sapiens
  siRNA target sequence for SPAG9 (NM_003971.3,3823-3841).
cagacgcccttgaagtcta

SEQ ID NO: 320475 - DNA, 19 bp, Homo sapiens
  siRNA target sequence for SPAG9 (NM_003971.3,3876-3894).
cttccgaatgggtgatgaa

SEQ ID NO: 320476 - DNA, 19 bp, Homo sapiens
  siRNA target sequence for SPAG9 (NM_172345.1,315-333).
ctgctatcttagtatctct

SEQ ID NO: 320477 - DNA, 19 bp, Homo sapiens
  siRNA target sequence for SPAG9 (NM_172345.1,344-362).
ctgcttgtgcacttttcta

SEQ ID NO: 320478 - DNA, 19 bp, Homo sapiens
  siRNA target sequence for SPAG9 (NM_172345.1,346-364).
gcttgtgcacttttctatt

SEQ ID NO: 320479 - DNA, 19 bp, Homo sapiens
  siRNA target sequence for SPAG9 (NM_172345.1,388-406).
gcagaacctaccaaggata

SEQ ID NO: 320480 - DNA, 19 bp, Homo sapiens
  siRNA target sequence for D8S2298E (NM_005671.1,26-44).
gtggggttgttggcatttt

SEQ ID NO: 320481 - DNA, 19 bp, Homo sapiens
  siRNA target sequence for D8S2298E (NM_005671.1,84-102).
gcgtgggatcccggatata

SEQ ID NO: 320482 - DNA, 19 bp, Homo sapiens
  siRNA target sequence for D8S2298E (NM_005671.1,89-107).
ggatcccggatataggaat

SEQ ID NO: 320483 - DNA, 19 bp, Homo sapiens
  siRNA target sequence for D8S2298E (NM_005671.1,103-121).
ggaatcaaggattttcttt

SEQ ID NO: 320484 - DNA, 19 bp, Homo sapiens
  siRNA target sequence for D8S2298E (NM_005671.1,142-160).
ctactgcttgctcttctta

SEQ ID NO: 320485 - DNA, 19 bp, Homo sapiens
  siRNA target sequence for D8S2298E (NM_005671.1,183-201).
ctcatggcttaactcattt

SEQ ID NO: 320486 - DNA, 19 bp, Homo sapiens
  siRNA target sequence for D8S2298E (NM_005671.1,302-320).
gcagatacatagagaatgt

SEQ ID NO: 320487 - DNA, 19 bp, Homo sapiens
  siRNA target sequence for D8S2298E (NM_005671.1,303-321).
cagatacatagagaatgtt

SEQ ID NO: 320488 - DNA, 19 bp, Homo sapiens
  siRNA target sequence for D8S2298E (NM_005671.1,357-375).
ggaggagcgcttttatcaa

SEQ ID NO: 320489 - DNA, 19 bp, Homo sapiens
  siRNA target sequence for D8S2298E (NM_005671.1,361-379).
gagcgcttttatcaaatga

SEQ ID NO: 320490 - DNA, 19 bp, Homo sapiens
  siRNA target sequence for D8S2298E (NM_005671.1,381-399).
gggtgaagcctggaaatta

SEQ ID NO: 320491 - DNA, 19 bp, Homo sapiens
  siRNA target sequence for D8S2298E (NM_005671.1,382-400).
ggtgaagcctggaaattaa

SEQ ID NO: 320492 - DNA, 19 bp, Homo sapiens
  siRNA target sequence for D8S2298E (NM_005671.1,385-403).
gaagcctggaaattaagca

SEQ ID NO: 320493 - DNA, 19 bp, Homo sapiens
  siRNA target sequence for D8S2298E (NM_005671.1,431-449).
gtacaagtcagacatcttt

SEQ ID NO: 320494 - DNA, 19 bp, Homo sapiens
  siRNA target sequence for D8S2298E (NM_005671.1,483-501).
gaacttgcctaaaccttta

SEQ ID NO: 320495 - DNA, 19 bp, Homo sapiens
  siRNA target sequence for D8S2298E (NM_005671.1,489-507).
gcctaaacctttaactgaa

SEQ ID NO: 320496 - DNA, 19 bp, Homo sapiens
  siRNA target sequence for D8S2298E (NM_005671.1,491-509).
ctaaacctttaactgaatt

SEQ ID NO: 320497 - DNA, 19 bp, Homo sapiens
  siRNA target sequence for D8S2298E (NM_005671.1,537-555).
caaggagattcctgattta

SEQ ID NO: 320498 - DNA, 19 bp, Homo sapiens
  siRNA target sequence for D8S2298E (NM_005671.1,540-558).
ggagattcctgatttacct

SEQ ID NO: 320499 - DNA, 19 bp, Homo sapiens
  siRNA target sequence for D8S2298E (NM_005671.1,653-671).
gctcacaggtcttatttga

SEQ ID NO: 320500 - DNA, 19 bp, Homo sapiens
  siRNA target sequence for D8S2298E (NM_005671.1,761-779).
cgctggaggacataggaat

SEQ ID NO: 320501 - DNA, 19 bp, Homo sapiens
  siRNA target sequence for D8S2298E (NM_005671.1,763-781).
ctggaggacataggaataa

SEQ ID NO: 320502 - DNA, 19 bp, Homo sapiens
  siRNA target sequence for D8S2298E (NM_005671.1,765-783).
ggaggacataggaataact

SEQ ID NO: 320503 - DNA, 19 bp, Homo sapiens
  siRNA target sequence for D8S2298E (NM_005671.1,782-800).
ctgtggacactgtactcat

SEQ ID NO: 320504 - DNA, 19 bp, Homo sapiens
  siRNA target sequence for SPAG1 (NM_003114.3,345-363).
ggatattatcctgaactta

SEQ ID NO: 320505 - DNA, 19 bp, Homo sapiens
  siRNA target sequence for SPAG1 (NM_003114.3,435-453).
gcaacagcagccagtttta

SEQ ID NO: 320506 - DNA, 19 bp, Homo sapiens
  siRNA target sequence for SPAG1 (NM_003114.3,579-597).
ccagttcgtggttcaaaca

SEQ ID NO: 320507 - DNA, 19 bp, Homo sapiens
  siRNA target sequence for SPAG1 (NM_003114.3,603-621).
cttcatgtaggcaaggaaa

SEQ ID NO: 320508 - DNA, 19 bp, Homo sapiens
  siRNA target sequence for SPAG1 (NM_003114.3,665-683).
cgcggaatgggataaattt

SEQ ID NO: 320509 - DNA, 19 bp, Homo sapiens
  siRNA target sequence for SPAG1 (NM_003114.3,667-685).
cggaatgggataaatttga

SEQ ID NO: 320510 - DNA, 19 bp, Homo sapiens
  siRNA target sequence for SPAG1 (NM_003114.3,686-704).
cgtggagaaggaatgttta

SEQ ID NO: 320511 - DNA, 19 bp, Homo sapiens
  siRNA target sequence for SPAG1 (NM_003114.3,726-744).
gaaaagacggtaatagaca

SEQ ID NO: 320512 - DNA, 19 bp, Homo sapiens
  siRNA target sequence for SPAG1 (NM_003114.3,746-764).
gtcacacttgtctaaaatt

SEQ ID NO: 320513 - DNA, 19 bp, Homo sapiens
  siRNA target sequence for SPAG1 (NM_003114.3,748-766).
cacacttgtctaaaattga

SEQ ID NO: 320514 - DNA, 19 bp, Homo sapiens
  siRNA target sequence for SPAG1 (NM_003114.3,847-865).
ctttcaactcaggagatta

SEQ ID NO: 320515 - DNA, 19 bp, Homo sapiens
  siRNA target sequence for SPAG1 (NM_003114.3,851-869).
caactcaggagattatgaa

SEQ ID NO: 320516 - DNA, 19 bp, Homo sapiens
  siRNA target sequence for SPAG1 (NM_003114.3,870-888).
gaagcagtgatgtattata

SEQ ID NO: 320517 - DNA, 19 bp, Homo sapiens
  siRNA target sequence for SPAG1 (NM_003114.3,873-891).
gcagtgatgtattatacca

SEQ ID NO: 320518 - DNA, 19 bp, Homo sapiens
  siRNA target sequence for SPAG1 (NM_003114.3,910-928).
ccactgtagttgcctataa

SEQ ID NO: 320519 - DNA, 19 bp, Homo sapiens
  siRNA target sequence for SPAG1 (NM_003114.3,913-931).
ctgtagttgcctataacaa

SEQ ID NO: 320520 - DNA, 19 bp, Homo sapiens
  siRNA target sequence for SPAG1 (NM_003114.3,1029-1047).
ctgcgtcgtgctactacat

SEQ ID NO: 320521 - DNA, 19 bp, Homo sapiens
  siRNA target sequence for SPAG1 (NM_003114.3,1031-1049).
gcgtcgtgctactacatat

SEQ ID NO: 320522 - DNA, 19 bp, Homo sapiens
  siRNA target sequence for SPAG1 (NM_003114.3,1032-1050).
cgtcgtgctactacatata

SEQ ID NO: 320523 - DNA, 19 bp, Homo sapiens
  siRNA target sequence for SPAG1 (NM_003114.3,1033-1051).
gtcgtgctactacatataa

SEQ ID NO: 320524 - DNA, 19 bp, Homo sapiens
  siRNA target sequence for SPAG1 (NM_003114.3,1036-1054).
gtgctactacatataaaca

SEQ ID NO: 320525 - DNA, 19 bp, Homo sapiens
  siRNA target sequence for SPAG1 (NM_003114.3,1067-1085).
ccgggaagctacagaagat

SEQ ID NO: 320526 - DNA, 19 bp, Homo sapiens
  siRNA target sequence for SPAG1 (NM_003114.3,1068-1086).
cgggaagctacagaagatt

SEQ ID NO: 320527 - DNA, 19 bp, Homo sapiens
  siRNA target sequence for SPAG1 (NM_003114.3,1644-1662).
gatctaagtatcttatatt

SEQ ID NO: 320528 - DNA, 19 bp, Homo sapiens
  siRNA target sequence for SPAG1 (NM_003114.3,1700-1718).
cagtggctgcattcaagat

SEQ ID NO: 320529 - DNA, 19 bp, Homo sapiens
  siRNA target sequence for SPAG1 (NM_003114.3,1772-1790).
ggcgatggcctatgaaact

SEQ ID NO: 320530 - DNA, 19 bp, Homo sapiens
  siRNA target sequence for SPAG1 (NM_003114.3,1774-1792).
cgatggcctatgaaactct

SEQ ID NO: 320531 - DNA, 19 bp, Homo sapiens
  siRNA target sequence for SPAG1 (NM_003114.3,1775-1793).
gatggcctatgaaactcta

SEQ ID NO: 320532 - DNA, 19 bp, Homo sapiens
  siRNA target sequence for SPAG1 (NM_003114.3,1846-1864).
gtggactccagctagcaaa

SEQ ID NO: 320533 - DNA, 19 bp, Homo sapiens
  siRNA target sequence for SPAG1 (NM_003114.3,1849-1867).
gactccagctagcaaatga

SEQ ID NO: 320534 - DNA, 19 bp, Homo sapiens
  siRNA target sequence for SPAG1 (NM_003114.3,1899-1917).
gagctggatggaccaaatt

SEQ ID NO: 320535 - DNA, 19 bp, Homo sapiens
  siRNA target sequence for SPAG1 (NM_003114.3,1925-1943).
gaagctgtcacctattcct

SEQ ID NO: 320536 - DNA, 19 bp, Homo sapiens
  siRNA target sequence for SPAG1 (NM_003114.3,1975-1993).
ggcatccggcaaaagagat

SEQ ID NO: 320537 - DNA, 19 bp, Homo sapiens
  siRNA target sequence for SPAG1 (NM_003114.3,2033-2051).
gcagggcatcacagatgaa

SEQ ID NO: 320538 - DNA, 19 bp, Homo sapiens
  siRNA target sequence for SPAG1 (NM_003114.3,2129-2147).
cagcgaatgcttaaagatt

SEQ ID NO: 320539 - DNA, 19 bp, Homo sapiens
  siRNA target sequence for SPAG1 (NM_003114.3,2131-2149).
gcgaatgcttaaagattaa

SEQ ID NO: 320540 - DNA, 19 bp, Homo sapiens
  siRNA target sequence for SPAG1 (NM_003114.3,2156-2174).
ggaatgtgccatatataca

SEQ ID NO: 320541 - DNA, 19 bp, Homo sapiens
  siRNA target sequence for SPAG1 (NM_003114.3,2261-2279).
cgtgaaagccttctataga

SEQ ID NO: 320542 - DNA, 19 bp, Homo sapiens
  siRNA target sequence for SPAG1 (NM_003114.3,2306-2324).
gaattatcagaaaagctta

SEQ ID NO: 320543 - DNA, 19 bp, Homo sapiens
  siRNA target sequence for SPAG1 (NM_003114.3,2320-2338).
gcttaattgatctcaataa

SEQ ID NO: 320544 - DNA, 19 bp, Homo sapiens
  siRNA target sequence for SPAG1 (NM_003114.3,2345-2363).
cctactagatccaagtatt

SEQ ID NO: 320545 - DNA, 19 bp, Homo sapiens
  siRNA target sequence for SPAG1 (NM_003114.3,2346-2364).
ctactagatccaagtatta

SEQ ID NO: 320546 - DNA, 19 bp, Homo sapiens
  siRNA target sequence for SPAG1 (NM_003114.3,2390-2408).
ggtaactagactccttaat

SEQ ID NO: 320547 - DNA, 19 bp, Homo sapiens
  siRNA target sequence for SPAG1 (NM_003114.3,2395-2413).
ctagactccttaatcttaa

SEQ ID NO: 320548 - DNA, 19 bp, Homo sapiens
  siRNA target sequence for SPAG1 (NM_003114.3,2398-2416).
gactccttaatcttaagga

SEQ ID NO: 320549 - DNA, 19 bp, Homo sapiens
  siRNA target sequence for SPAG1 (NM_003114.3,2400-2418).
ctccttaatcttaaggata

SEQ ID NO: 320550 - DNA, 19 bp, Homo sapiens
  siRNA target sequence for SPAG1 (NM_003114.3,2586-2604).
ccgatagccaagcctaata

SEQ ID NO: 320551 - DNA, 19 bp, Homo sapiens
  siRNA target sequence for SPAG1 (NM_003114.3,2587-2605).
cgatagccaagcctaataa

SEQ ID NO: 320552 - DNA, 19 bp, Homo sapiens
  siRNA target sequence for SPAG1 (NM_003114.3,2588-2606).
gatagccaagcctaataat

SEQ ID NO: 320553 - DNA, 19 bp, Homo sapiens
  siRNA target sequence for SPAG1 (NM_003114.3,2597-2615).
gcctaataatgcctatgaa

SEQ ID NO: 320554 - DNA, 19 bp, Homo sapiens
  siRNA target sequence for SPAG1 (NM_003114.3,2704-2722).
cgatgtttttaagtaacaa

SEQ ID NO: 320555 - DNA, 19 bp, Homo sapiens
  siRNA target sequence for SPAG1 (NM_003114.3,2748-2766).
ctcattcagtctctgaaaa

SEQ ID NO: 320556 - DNA, 19 bp, Homo sapiens
  siRNA target sequence for SPAG1 (NM_003114.3,2907-2925).
gacacaccaaacaaccatt

SEQ ID NO: 320557 - DNA, 19 bp, Homo sapiens
  siRNA target sequence for SPAG1 (NM_003114.3,2937-2955).
gatatacaggccctaaaaa

SEQ ID NO: 320558 - DNA, 19 bp, Homo sapiens
  siRNA target sequence for VCY2 (NM_004678.1,366-384).
gcaggacaggatcattact

SEQ ID NO: 320559 - DNA, 19 bp, Homo sapiens
  siRNA target sequence for VCY2 (NM_004678.1,427-445).
gcatcatgacatattgctt

SEQ ID NO: 320560 - DNA, 19 bp, Homo sapiens
  siRNA target sequence for VCY2 (NM_004678.1,452-470).
gaacctaagtgatgttaat

SEQ ID NO: 320561 - DNA, 19 bp, Homo sapiens
  siRNA target sequence for VCY2 (NM_004678.1,474-492).
ctgcataggttgctaaaaa

SEQ ID NO: 320562 - DNA, 19 bp, Homo sapiens
  siRNA target sequence for VCY2 (NM_004678.1,476-494).
gcataggttgctaaaaaat

SEQ ID NO: 320563 - DNA, 19 bp, Homo sapiens
  siRNA target sequence for VCY2 (NM_004678.1,530-548).
gggcttgctgacatattat

SEQ ID NO: 320564 - DNA, 19 bp, Homo sapiens
  siRNA target sequence for VCY2 (NM_004678.1,583-601).
ctaggcccagcatacaaat

SEQ ID NO: 320565 - DNA, 19 bp, Homo sapiens
  siRNA target sequence for XKRY (NM_004677.1,762-780).
ctttgctgccattaagcta

SEQ ID NO: 320566 - DNA, 19 bp, Homo sapiens
  siRNA target sequence for XKRY (NM_004677.1,814-832).
cattcgttggtgattatct

SEQ ID NO: 320567 - DNA, 19 bp, Homo sapiens
  siRNA target sequence for XKRY (NM_004677.1,876-894).
ggggagcttacactttcta

SEQ ID NO: 320568 - DNA, 19 bp, Homo sapiens
  siRNA target sequence for XKRY (NM_004677.1,879-897).
gagcttacactttctatta

SEQ ID NO: 320569 - DNA, 19 bp, Homo sapiens
  siRNA target sequence for XKRY (NM_004677.1,881-899).
gcttacactttctattaat

SEQ ID NO: 320570 - DNA, 19 bp, Homo sapiens
  siRNA target sequence for XKRY (NM_004677.1,886-904).
cactttctattaatcatat

SEQ ID NO: 320571 - DNA, 19 bp, Homo sapiens
  siRNA target sequence for XKRY (NM_004677.1,998-1016).
gtatggatgcttatcttaa

SEQ ID NO: 320572 - DNA, 19 bp, Homo sapiens
  siRNA target sequence for XKRY (NM_004677.1,1012-1030).
cttaatcatgctagtatat

SEQ ID NO: 320573 - DNA, 19 bp, Homo sapiens
  siRNA target sequence for XKRY (NM_004677.1,1098-1116).
cacgaggtgggacatacaa

SEQ ID NO: 320574 - DNA, 19 bp, Homo sapiens
  siRNA target sequence for XKRY (NM_004677.1,1103-1121).
ggtgggacatacaatccta

SEQ ID NO: 320575 - DNA, 19 bp, Homo sapiens
  siRNA target sequence for RQCD1 (NM_005444.1,43-61).
gcacaagtggatagagaaa

SEQ ID NO: 320576 - DNA, 19 bp, Homo sapiens
  siRNA target sequence for RQCD1 (NM_005444.1,63-81).
gatctatcagtggatcaat

SEQ ID NO: 320577 - DNA, 19 bp, Homo sapiens
  siRNA target sequence for RQCD1 (NM_005444.1,128-146).
gtaagaagcgagaatctgt

SEQ ID NO: 320578 - DNA, 19 bp, Homo sapiens
  siRNA target sequence for RQCD1 (NM_005444.1,160-178).
cccatgctgtggcattcat

SEQ ID NO: 320579 - DNA, 19 bp, Homo sapiens
  siRNA target sequence for RQCD1 (NM_005444.1,162-180).
catgctgtggcattcattt

SEQ ID NO: 320580 - DNA, 19 bp, Homo sapiens
  siRNA target sequence for RQCD1 (NM_005444.1,165-183).
gctgtggcattcatttggt

SEQ ID NO: 320581 - DNA, 19 bp, Homo sapiens
  siRNA target sequence for RQCD1 (NM_005444.1,170-188).
ggcattcatttggtactat

SEQ ID NO: 320582 - DNA, 19 bp, Homo sapiens
  siRNA target sequence for RQCD1 (NM_005444.1,171-189).
gcattcatttggtactatt

SEQ ID NO: 320583 - DNA, 19 bp, Homo sapiens
  siRNA target sequence for RQCD1 (NM_005444.1,272-290).
gcaatgctctggcattact

SEQ ID NO: 320584 - DNA, 19 bp, Homo sapiens
  siRNA target sequence for RQCD1 (NM_005444.1,369-387).
gcacactgtcagcaaaaca

SEQ ID NO: 320585 - DNA, 19 bp, Homo sapiens
  siRNA target sequence for RQCD1 (NM_005444.1,386-404).
cacgtccctttgagtatct

SEQ ID NO: 320586 - DNA, 19 bp, Homo sapiens
  siRNA target sequence for RQCD1 (NM_005444.1,411-429).
caccagccttggagttatt

SEQ ID NO: 320587 - DNA, 19 bp, Homo sapiens
  siRNA target sequence for RQCD1 (NM_005444.1,438-456).
ggtgaaaacagatgaacaa

SEQ ID NO: 320588 - DNA, 19 bp, Homo sapiens
  siRNA target sequence for RQCD1 (NM_005444.1,457-475).
gaagtaatcaactttttat

SEQ ID NO: 320589 - DNA, 19 bp, Homo sapiens
  siRNA target sequence for RQCD1 (NM_005444.1,493-511).
cctttatgtttgcgaatta

SEQ ID NO: 320590 - DNA, 19 bp, Homo sapiens
  siRNA target sequence for RQCD1 (NM_005444.1,494-512).
ctttatgtttgcgaattat

SEQ ID NO: 320591 - DNA, 19 bp, Homo sapiens
  siRNA target sequence for RQCD1 (NM_005444.1,577-595).
gacactggtttggcttata

SEQ ID NO: 320592 - DNA, 19 bp, Homo sapiens
  siRNA target sequence for RQCD1 (NM_005444.1,579-597).
cactggtttggcttatata

SEQ ID NO: 320593 - DNA, 19 bp, Homo sapiens
  siRNA target sequence for RQCD1 (NM_005444.1,584-602).
gtttggcttatatatgtca

SEQ ID NO: 320594 - DNA, 19 bp, Homo sapiens
  siRNA target sequence for RQCD1 (NM_005444.1,704-722).
gttaccttcgactttcaga

SEQ ID NO: 320595 - DNA, 19 bp, Homo sapiens
  siRNA target sequence for RQCD1 (NM_005444.1,782-800).
ccttcgcccaggtgctaaa

SEQ ID NO: 320596 - DNA, 19 bp, Homo sapiens
  siRNA target sequence for RQCD1 (NM_005444.1,783-801).
cttcgcccaggtgctaaaa

SEQ ID NO: 320597 - DNA, 19 bp, Homo sapiens
  siRNA target sequence for RQCD1 (NM_005444.1,786-804).
cgcccaggtgctaaaagat

SEQ ID NO: 320598 - DNA, 19 bp, Homo sapiens
  siRNA target sequence for FLJ10292 (NM_018048.2,118-136).
gtttctggagttcgaattt

SEQ ID NO: 320599 - DNA, 19 bp, Homo sapiens
  siRNA target sequence for FLJ10292 (NM_018048.2,140-158).
ccggacggaaagcttagat

SEQ ID NO: 320600 - DNA, 19 bp, Homo sapiens
  siRNA target sequence for FLJ10292 (NM_018048.2,141-159).
cggacggaaagcttagata

SEQ ID NO: 320601 - DNA, 19 bp, Homo sapiens
  siRNA target sequence for FLJ10292 (NM_018048.2,142-160).
ggacggaaagcttagatat

SEQ ID NO: 320602 - DNA, 19 bp, Homo sapiens
  siRNA target sequence for FLJ10292 (NM_018048.2,405-423).
ctgaaggccttcgagtatt

SEQ ID NO: 320603 - DNA, 19 bp, Homo sapiens
  siRNA target sequence for FLJ10292 (NM_018048.2,411-429).
gccttcgagtattttacta

SEQ ID NO: 320604 - DNA, 19 bp, Homo sapiens
  siRNA target sequence for FLJ10292 (NM_018048.2,412-430).
ccttcgagtattttactat

SEQ ID NO: 320605 - DNA, 19 bp, Homo sapiens
  siRNA target sequence for FLJ10292 (NM_018048.2,413-431).
cttcgagtattttactatt

SEQ ID NO: 320606 - DNA, 19 bp, Homo sapiens
  siRNA target sequence for FLJ10292 (NM_018048.2,433-451).
ggtacaagacttgaaatgt

SEQ ID NO: 320607 - DNA, 19 bp, Homo sapiens
  siRNA target sequence for SEMG1 (NM_003007.2,737-755).
gtcctgcgcaccaagacaa

SEQ ID NO: 320608 - DNA, 19 bp, Homo sapiens
  siRNA target sequence for SEMG1 (NM_003007.2,1237-1255).
gagtctggccaatctacaa

SEQ ID NO: 320609 - DNA, 19 bp, Homo sapiens
  siRNA target sequence for SEMG1 (NM_003007.2,1245-1263).
ccaatctacaaatagagaa

SEQ ID NO: 320610 - DNA, 19 bp, Homo sapiens
  siRNA target sequence for SEMG1 (NM_003007.2,1310-1328).
ctcatgggggattggatat

SEQ ID NO: 320611 - DNA, 19 bp, Homo sapiens
  siRNA target sequence for SEMG1 (NM_003007.2,1316-1334).
ggggattggatattgtaat

SEQ ID NO: 320612 - DNA, 19 bp, Homo sapiens
  siRNA target sequence for SEMG1 (NM_003007.2,1361-1379).
gtcatttggcacaacatct

SEQ ID NO: 320613 - DNA, 19 bp, Homo sapiens
  siRNA target sequence for SEMG1 (NM_003007.2,1386-1404).
cgaccgaaacccattattt

SEQ ID NO: 320614 - DNA, 19 bp, Homo sapiens
  siRNA target sequence for SEMG1 (NM_003007.2,1387-1405).
gaccgaaacccattattta

SEQ ID NO: 320615 - DNA, 19 bp, Homo sapiens
  siRNA target sequence for SEMG1 (NM_003007.2,1389-1407).
ccgaaacccattatttaca

SEQ ID NO: 320616 - DNA, 19 bp, Homo sapiens
  siRNA target sequence for ACRV1 (NM_001612.4,282-300).
cttgctaatgagtctttat

SEQ ID NO: 320617 - DNA, 19 bp, Homo sapiens
  siRNA target sequence for ACRV1 (NM_001612.4,323-341).
catcaagtcagcctaatga

SEQ ID NO: 320618 - DNA, 19 bp, Homo sapiens
  siRNA target sequence for ACRV1 (NM_001612.4,347-365).
ctggctccatagatcatca

SEQ ID NO: 320619 - DNA, 19 bp, Homo sapiens
  siRNA target sequence for ACRV1 (NM_001612.4,349-367).
ggctccatagatcatcaaa

SEQ ID NO: 320620 - DNA, 19 bp, Homo sapiens
  siRNA target sequence for ACRV1 (NM_001612.4,351-369).
ctccatagatcatcaaact

SEQ ID NO: 320621 - DNA, 19 bp, Homo sapiens
  siRNA target sequence for ACRV1 (NM_001612.4,354-372).
catagatcatcaaacttca

SEQ ID NO: 320622 - DNA, 19 bp, Homo sapiens
  siRNA target sequence for ACRV1 (NM_001612.4,642-660).
cggagaacagcctttgagt

SEQ ID NO: 320623 - DNA, 19 bp, Homo sapiens
  siRNA target sequence for ACRV1 (NM_001612.4,787-805).
gcttcaggtgcaccaattt

SEQ ID NO: 320624 - DNA, 19 bp, Homo sapiens
  siRNA target sequence for ACRV1 (NM_001612.4,810-828).
cacatctacaggcacaata

SEQ ID NO: 320625 - DNA, 19 bp, Homo sapiens
  siRNA target sequence for ACRV1 (NM_001612.4,812-830).
catctacaggcacaatatt

SEQ ID NO: 320626 - DNA, 19 bp, Homo sapiens
  siRNA target sequence for ACRV1 (NM_001612.4,845-863).
gtgcttatatgaatgatca

SEQ ID NO: 320627 - DNA, 19 bp, Homo sapiens
  siRNA target sequence for ACRV1 (NM_001612.4,908-926).
cccagcagtgcatgttaaa

SEQ ID NO: 320628 - DNA, 19 bp, Homo sapiens
  siRNA target sequence for ACRV1 (NM_001612.4,1006-1024).
catggaacgaggatgcaaa

SEQ ID NO: 320629 - DNA, 19 bp, Homo sapiens
  siRNA target sequence for ACRV1 (NM_001612.4,1009-1027).
ggaacgaggatgcaaatta

SEQ ID NO: 320630 - DNA, 19 bp, Homo sapiens
  siRNA target sequence for ACRV1 (NM_001612.4,1010-1028).
gaacgaggatgcaaattat

SEQ ID NO: 320631 - DNA, 19 bp, Homo sapiens
  siRNA target sequence for ACRV1 (NM_001612.4,1031-1049).
gctgtcgaaatcaatcttt

SEQ ID NO: 320632 - DNA, 19 bp, Homo sapiens
  siRNA target sequence for ACRV1 (NM_020069.3,754-772).
cagccttcaggcacaatat

SEQ ID NO: 320633 - DNA, 19 bp, Homo sapiens
  siRNA target sequence for ACRV1 (NM_020069.3,756-774).
gccttcaggcacaatatta

SEQ ID NO: 320634 - DNA, 19 bp, Homo sapiens
  siRNA target sequence for ACRV1 (NM_020110.3,379-397).
caacttccaggcacaatat

SEQ ID NO: 320635 - DNA, 19 bp, Homo sapiens
  siRNA target sequence for ACRV1 (NM_020113.3,600-618).
cacatctacaggtggaaaa

SEQ ID NO: 320636 - DNA, 19 bp, Homo sapiens
  siRNA target sequence for ACRV1 (NM_020113.3,602-620).
catctacaggtggaaaact

SEQ ID NO: 320637 - DNA, 19 bp, Homo sapiens
  siRNA target sequence for AMN (NM_030943.1,74-92).
caggcggtctccaaactct

SEQ ID NO: 320638 - DNA, 19 bp, Homo sapiens
  siRNA target sequence for AMN (NM_030943.1,435-453).
gccacgacgacgtcttctt

SEQ ID NO: 320639 - DNA, 19 bp, Homo sapiens
  siRNA target sequence for AMN (NM_030943.1,1326-1344).
gcaccagccacagttactt

SEQ ID NO: 320640 - DNA, 19 bp, Homo sapiens
  siRNA target sequence for CLPTM1 (NM_001294.1,392-410).
gggaacagcacgatcttgt

SEQ ID NO: 320641 - DNA, 19 bp, Homo sapiens
  siRNA target sequence for CLPTM1 (NM_001294.1,503-521).
ccatctacatccacgttta

SEQ ID NO: 320642 - DNA, 19 bp, Homo sapiens
  siRNA target sequence for CLPTM1 (NM_001294.1,667-685).
gcggacccagaaatgatca

SEQ ID NO: 320643 - DNA, 19 bp, Homo sapiens
  siRNA target sequence for CLPTM1 (NM_001294.1,668-686).
cggacccagaaatgatcaa

SEQ ID NO: 320644 - DNA, 19 bp, Homo sapiens
  siRNA target sequence for CLPTM1 (NM_001294.1,790-808).
ccccctcccctggatcaat

SEQ ID NO: 320645 - DNA, 19 bp, Homo sapiens
  siRNA target sequence for CLPTM1 (NM_001294.1,791-809).
cccctcccctggatcaata

SEQ ID NO: 320646 - DNA, 19 bp, Homo sapiens
  siRNA target sequence for CLPTM1 (NM_001294.1,794-812).
ctcccctggatcaatatgt

SEQ ID NO: 320647 - DNA, 19 bp, Homo sapiens
  siRNA target sequence for CLPTM1 (NM_001294.1,824-842).
ccgtgagcggtgactacta

SEQ ID NO: 320648 - DNA, 19 bp, Homo sapiens
  siRNA target sequence for CLPTM1 (NM_001294.1,825-843).
cgtgagcggtgactactat

SEQ ID NO: 320649 - DNA, 19 bp, Homo sapiens
  siRNA target sequence for CLPTM1 (NM_001294.1,1136-1154).
ccttcaagaatgatatcca

SEQ ID NO: 320650 - DNA, 19 bp, Homo sapiens
  siRNA target sequence for CLPTM1 (NM_001294.1,1190-1208).
ccgtgcgctccgtcttctt

SEQ ID NO: 320651 - DNA, 19 bp, Homo sapiens
  siRNA target sequence for CLPTM1 (NM_001294.1,1408-1426).
gagtcctcgaccaaagtgt

SEQ ID NO: 320652 - DNA, 19 bp, Homo sapiens
  siRNA target sequence for CLPTM1 (NM_001294.1,1410-1428).
gtcctcgaccaaagtgtat

SEQ ID NO: 320653 - DNA, 19 bp, Homo sapiens
  siRNA target sequence for CLPTM1 (NM_001294.1,1412-1430).
cctcgaccaaagtgtatga

SEQ ID NO: 320654 - DNA, 19 bp, Homo sapiens
  siRNA target sequence for CLPTM1 (NM_001294.1,1413-1431).
ctcgaccaaagtgtatgat

SEQ ID NO: 320655 - DNA, 19 bp, Homo sapiens
  siRNA target sequence for CLPTM1 (NM_001294.1,1415-1433).
cgaccaaagtgtatgatga

SEQ ID NO: 320656 - DNA, 19 bp, Homo sapiens
  siRNA target sequence for CLPTM1 (NM_001294.1,1487-1505).
ccgtctacagtcttctgta

SEQ ID NO: 320657 - DNA, 19 bp, Homo sapiens
  siRNA target sequence for CLPTM1 (NM_001294.1,1678-1696).
gacctgttcgcctttgtca

SEQ ID NO: 320658 - DNA, 19 bp, Homo sapiens
  siRNA target sequence for CLPTM1 (NM_001294.1,1735-1753).
gacgatgtggttttcttca

SEQ ID NO: 320659 - DNA, 19 bp, Homo sapiens
  siRNA target sequence for DKK2 (NM_014421.1,914-932).
gtaagaagggcaaaaacct

SEQ ID NO: 320660 - DNA, 19 bp, Homo sapiens
  siRNA target sequence for DKK2 (NM_014421.1,947-965).
cttgtagcagtgataagga

SEQ ID NO: 320661 - DNA, 19 bp, Homo sapiens
  siRNA target sequence for DKK2 (NM_014421.1,1069-1087).
cccagtacccgctgcaata

SEQ ID NO: 320662 - DNA, 19 bp, Homo sapiens
  siRNA target sequence for DKK2 (NM_014421.1,1070-1088).
ccagtacccgctgcaataa

SEQ ID NO: 320663 - DNA, 19 bp, Homo sapiens
  siRNA target sequence for DKK2 (NM_014421.1,1071-1089).
cagtacccgctgcaataat

SEQ ID NO: 320664 - DNA, 19 bp, Homo sapiens
  siRNA target sequence for DKK2 (NM_014421.1,1165-1183).
cgaaaccacggtcattact

SEQ ID NO: 320665 - DNA, 19 bp, Homo sapiens
  siRNA target sequence for DKK2 (NM_014421.1,1194-1212).
cttgggatggcagaatcta

SEQ ID NO: 320666 - DNA, 19 bp, Homo sapiens
  siRNA target sequence for DKK2 (NM_014421.1,1222-1240).
cacactaagatgtcacata

SEQ ID NO: 320667 - DNA, 19 bp, Homo sapiens
  siRNA target sequence for DKK2 (NM_014421.1,1260-1278).
cccctgcctacgatcatca

SEQ ID NO: 320668 - DNA, 19 bp, Homo sapiens
  siRNA target sequence for DKK2 (NM_014421.1,1347-1365).
gggggaagtctgtaccaaa

SEQ ID NO: 320669 - DNA, 19 bp, Homo sapiens
  siRNA target sequence for DKK2 (NM_014421.1,1419-1437).
gaagggcctgtcttgcaaa

SEQ ID NO: 320670 - DNA, 19 bp, Homo sapiens
  siRNA target sequence for DKK2 (NM_014421.1,1423-1441).
ggcctgtcttgcaaagtat

SEQ ID NO: 320671 - DNA, 19 bp, Homo sapiens
  siRNA target sequence for DKK2 (NM_014421.1,1474-1492).
ctccatgtgtgtcagaaaa

SEQ ID NO: 320672 - DNA, 19 bp, Homo sapiens
  siRNA target sequence for DKK3 (NM_013253.3,380-398).
gcgaggttgaggaactgat

SEQ ID NO: 320673 - DNA, 19 bp, Homo sapiens
  siRNA target sequence for DKK3 (NM_013253.3,422-440).
gcagcgcggtggaagagat

SEQ ID NO: 320674 - DNA, 19 bp, Homo sapiens
  siRNA target sequence for DKK3 (NM_013253.3,499-517).
cccagctatcacaatgaga

SEQ ID NO: 320675 - DNA, 19 bp, Homo sapiens
  siRNA target sequence for DKK3 (NM_013253.3,524-542).
cagacacgaaggttggaaa

SEQ ID NO: 320676 - DNA, 19 bp, Homo sapiens
  siRNA target sequence for DKK3 (NM_013253.3,526-544).
gacacgaaggttggaaata

SEQ ID NO: 320677 - DNA, 19 bp, Homo sapiens
  siRNA target sequence for DKK3 (NM_013253.3,528-546).
cacgaaggttggaaataat

SEQ ID NO: 320678 - DNA, 19 bp, Homo sapiens
  siRNA target sequence for DKK3 (NM_013253.3,556-574).
gtgcaccgagaaattcaca

SEQ ID NO: 320679 - DNA, 19 bp, Homo sapiens
  siRNA target sequence for DKK3 (NM_013253.3,604-622).
gtcttttcagagacagtta

SEQ ID NO: 320680 - DNA, 19 bp, Homo sapiens
  siRNA target sequence for DKK3 (NM_013253.3,1055-1073).
gccacagcctggtgtatgt

SEQ ID NO: 320681 - DNA, 19 bp, Homo sapiens
  siRNA target sequence for DKK3 (NM_013253.3,1130-1148).
gagaggtccccgatgagta

SEQ ID NO: 320682 - DNA, 19 bp, Homo sapiens
  siRNA target sequence for DKK3 (NM_013253.3,1134-1152).
ggtccccgatgagtatgaa

SEQ ID NO: 320683 - DNA, 19 bp, Homo sapiens
  siRNA target sequence for GTL3 (NM_013242.1,454-472).
gaagacgctgggaattaaa

SEQ ID NO: 320684 - DNA, 19 bp, Homo sapiens
  siRNA target sequence for GTL3 (NM_013242.1,523-541).
cgaagtgcaggtactagat

SEQ ID NO: 320685 - DNA, 19 bp, Homo sapiens
  siRNA target sequence for GTL3 (NM_013242.1,532-550).
ggtactagatgacaagaat

SEQ ID NO: 320686 - DNA, 19 bp, Homo sapiens
  siRNA target sequence for GTL3 (NM_013242.1,558-576).
gtcgctttcgggcaagtaa

SEQ ID NO: 320687 - DNA, 19 bp, Homo sapiens
  siRNA target sequence for GTL3 (NM_013242.1,560-578).
cgctttcgggcaagtaact

SEQ ID NO: 320688 - DNA, 19 bp, Homo sapiens
  siRNA target sequence for GTL3 (NM_013242.1,561-579).
gctttcgggcaagtaacta

SEQ ID NO: 320689 - DNA, 19 bp, Homo sapiens
  siRNA target sequence for GTL3 (NM_013242.1,638-656).
ggctggaaccagattcagt

SEQ ID NO: 320690 - DNA, 19 bp, Homo sapiens
  siRNA target sequence for GTL3 (NM_013242.1,680-698).
cgagcatacggcaccaatt

SEQ ID NO: 320691 - DNA, 19 bp, Homo sapiens
  siRNA target sequence for GTL3 (NM_013242.1,681-699).
gagcatacggcaccaatta

SEQ ID NO: 320692 - DNA, 19 bp, Homo sapiens
  siRNA target sequence for GTL3 (NM_013242.1,683-701).
gcatacggcaccaattaca

SEQ ID NO: 320693 - DNA, 19 bp, Homo sapiens
  siRNA target sequence for GTL3 (NM_013242.1,684-702).
catacggcaccaattacat

SEQ ID NO: 320694 - DNA, 19 bp, Homo sapiens
  siRNA target sequence for GTL3 (NM_013242.1,714-732).
gagtgcagatccatgcaaa

SEQ ID NO: 320695 - DNA, 19 bp, Homo sapiens
  siRNA target sequence for GTL3 (NM_013242.1,716-734).
gtgcagatccatgcaaatt

SEQ ID NO: 320696 - DNA, 19 bp, Homo sapiens
  siRNA target sequence for GTL3 (NM_013242.1,737-755).
cgcatccgacgggtttact

SEQ ID NO: 320697 - DNA, 19 bp, Homo sapiens
  siRNA target sequence for GTL3 (NM_013242.1,738-756).
gcatccgacgggtttactt

SEQ ID NO: 320698 - DNA, 19 bp, Homo sapiens
  siRNA target sequence for GTL3 (NM_013242.1,788-806).
ccggcagagttcaaactgt

SEQ ID NO: 320699 - DNA, 19 bp, Homo sapiens
  siRNA target sequence for GTL3 (NM_013242.1,789-807).
cggcagagttcaaactgta

SEQ ID NO: 320700 - DNA, 19 bp, Homo sapiens
  siRNA target sequence for ID2 (NM_002166.4,277-295).
ccgatgagcctgctataca

SEQ ID NO: 320701 - DNA, 19 bp, Homo sapiens
  siRNA target sequence for ID2 (NM_002166.4,278-296).
cgatgagcctgctatacaa

SEQ ID NO: 320702 - DNA, 19 bp, Homo sapiens
  siRNA target sequence for LOC56920 (NM_020163.1,129-147).
caaccgctctgccatcttt

SEQ ID NO: 320703 - DNA, 19 bp, Homo sapiens
  siRNA target sequence for LOC56920 (NM_020163.1,179-197).
ccatgtacctagatgagta

SEQ ID NO: 320704 - DNA, 19 bp, Homo sapiens
  siRNA target sequence for LOC56920 (NM_020163.1,305-323).
gggaggagtgtgttcgaaa

SEQ ID NO: 320705 - DNA, 19 bp, Homo sapiens
  siRNA target sequence for LOC56920 (NM_020163.1,531-549).
ctttgccagcaccttcata

SEQ ID NO: 320706 - DNA, 19 bp, Homo sapiens
  siRNA target sequence for LOC56920 (NM_020163.1,832-850).
cgggtgctggtgaacaaat

SEQ ID NO: 320707 - DNA, 19 bp, Homo sapiens
  siRNA target sequence for LOC56920 (NM_020163.1,902-920).
gtgccgagacccactttga

SEQ ID NO: 320708 - DNA, 19 bp, Homo sapiens
  siRNA target sequence for LOC56920 (NM_020163.1,1040-1058).
cagacatctgggaggtttt

SEQ ID NO: 320709 - DNA, 19 bp, Homo sapiens
  siRNA target sequence for LOC56920 (NM_020163.1,1226-1244).
gagcccaccccctcatgtt

SEQ ID NO: 320710 - DNA, 19 bp, Homo sapiens
  siRNA target sequence for LOC56920 (NM_020163.1,1345-1363).
gggacctacgatgtcattt

SEQ ID NO: 320711 - DNA, 19 bp, Homo sapiens
  siRNA target sequence for LOC56920 (NM_020163.1,1346-1364).
ggacctacgatgtcatttt

SEQ ID NO: 320712 - DNA, 19 bp, Homo sapiens
  siRNA target sequence for LOC56920 (NM_020163.1,1475-1493).
cacctatcaccgaaatgga

SEQ ID NO: 320713 - DNA, 19 bp, Homo sapiens
  siRNA target sequence for LOC56920 (NM_020163.1,1501-1519).
gtcaaaaggcaaatgctat

SEQ ID NO: 320714 - DNA, 19 bp, Homo sapiens
  siRNA target sequence for LOC56920 (NM_020163.1,1777-1795).
ggcacggagcacaatagca

SEQ ID NO: 320715 - DNA, 19 bp, Homo sapiens
  siRNA target sequence for LOC56920 (NM_020163.1,1929-1947).
caggcttagccgtttcgat

SEQ ID NO: 320716 - DNA, 19 bp, Homo sapiens
  siRNA target sequence for NRLN1 (NM_145234.2,137-155).
gaggcatgaaatacatctt

SEQ ID NO: 320717 - DNA, 19 bp, Homo sapiens
  siRNA target sequence for NRLN1 (NM_145234.2,216-234).
gacatattgcatgtttcaa

SEQ ID NO: 320718 - DNA, 19 bp, Homo sapiens
  siRNA target sequence for NRLN1 (NM_145234.2,218-236).
catattgcatgtttcaaga

SEQ ID NO: 320719 - DNA, 19 bp, Homo sapiens
  siRNA target sequence for NRLN1 (NM_145234.2,342-360).
ccgagtcagatgtccaaat

SEQ ID NO: 320720 - DNA, 19 bp, Homo sapiens
  siRNA target sequence for NRLN1 (NM_145234.2,449-467).
gcaagtcttgcgagtacaa

SEQ ID NO: 320721 - DNA, 19 bp, Homo sapiens
  siRNA target sequence for NRLN1 (NM_145234.2,450-468).
caagtcttgcgagtacaat

SEQ ID NO: 320722 - DNA, 19 bp, Homo sapiens
  siRNA target sequence for NRLN1 (NM_145234.2,460-478).
gagtacaatgggacaactt

SEQ ID NO: 320723 - DNA, 19 bp, Homo sapiens
  siRNA target sequence for NRLN1 (NM_145234.2,519-537).
gaatcggcaacccaatcaa

SEQ ID NO: 320724 - DNA, 19 bp, Homo sapiens
  siRNA target sequence for NRLN1 (NM_145234.2,558-576).
ggagggaaacgtgtattgt

SEQ ID NO: 320725 - DNA, 19 bp, Homo sapiens
  siRNA target sequence for NRLN1 (NM_145234.2,708-726).
caacagagaagcaagacat

SEQ ID NO: 320726 - DNA, 19 bp, Homo sapiens
  siRNA target sequence for NRLN1 (NM_145234.2,803-821).
gtcaccggggagctcttat

SEQ ID NO: 320727 - DNA, 19 bp, Homo sapiens
  siRNA target sequence for NRLN1 (NM_145234.2,807-825).
ccggggagctcttatggat

SEQ ID NO: 320728 - DNA, 19 bp, Homo sapiens
  siRNA target sequence for NRLN1 (NM_145234.2,808-826).
cggggagctcttatggatt

SEQ ID NO: 320729 - DNA, 19 bp, Homo sapiens
  siRNA target sequence for NRLN1 (NM_145234.2,839-857).
caggaaccattgtgcaaat

SEQ ID NO: 320730 - DNA, 19 bp, Homo sapiens
  siRNA target sequence for NRLN1 (NM_145234.2,845-863).
ccattgtgcaaattgtcat

SEQ ID NO: 320731 - DNA, 19 bp, Homo sapiens
  siRNA target sequence for NRLN1 (NM_145234.2,850-868).
gtgcaaattgtcatcaata

SEQ ID NO: 320732 - DNA, 19 bp, Homo sapiens
  siRNA target sequence for NRLN1 (NM_145234.2,884-902).
gacaagtgtgtgtttccaa

SEQ ID NO: 320733 - DNA, 19 bp, Homo sapiens
  siRNA target sequence for NRLN1 (NM_145234.2,963-981).
ggagtgtgtgctatgtact

SEQ ID NO: 320734 - DNA, 19 bp, Homo sapiens
  siRNA target sequence for NRLN1 (NM_145234.2,966-984).
gtgtgtgctatgtacttgt

SEQ ID NO: 320735 - DNA, 19 bp, Homo sapiens
  siRNA target sequence for NRLN1 (NM_145234.2,968-986).
gtgtgctatgtacttgtaa

SEQ ID NO: 320736 - DNA, 19 bp, Homo sapiens
  siRNA target sequence for NRLN1 (NM_145234.2,1038-1056).
caagtatcctcaaaaaata

SEQ ID NO: 320737 - DNA, 19 bp, Homo sapiens
  siRNA target sequence for NRLN1 (NM_145234.2,1077-1095).
gtgtccaggtaaaaaagca

SEQ ID NO: 320738 - DNA, 19 bp, Homo sapiens
  siRNA target sequence for NRLN1 (NM_145234.2,1105-1123).
ccaggccaaagctttgaca

SEQ ID NO: 320739 - DNA, 19 bp, Homo sapiens
  siRNA target sequence for NRLN1 (NM_145234.2,1106-1124).
caggccaaagctttgacaa

SEQ ID NO: 320740 - DNA, 19 bp, Homo sapiens
  siRNA target sequence for NRLN1 (NM_145234.2,1109-1127).
gccaaagctttgacaataa

SEQ ID NO: 320741 - DNA, 19 bp, Homo sapiens
  siRNA target sequence for NRLN1 (NM_145234.2,1120-1138).
gacaataaaggctacttct

SEQ ID NO: 320742 - DNA, 19 bp, Homo sapiens
  siRNA target sequence for NRLN1 (NM_145234.2,1239-1257).
ggtccacgtttggactatt

SEQ ID NO: 320743 - DNA, 19 bp, Homo sapiens
  siRNA target sequence for NRLN1 (NM_145234.2,1242-1260).
ccacgtttggactattcga

SEQ ID NO: 320744 - DNA, 19 bp, Homo sapiens
  siRNA target sequence for NRLN1 (NM_145234.2,1243-1261).
cacgtttggactattcgaa

SEQ ID NO: 320745 - DNA, 19 bp, Homo sapiens
  siRNA target sequence for NRLN1 (NM_145234.2,1392-1410).
cagccagatgtgttcaagt

SEQ ID NO: 320746 - DNA, 19 bp, Homo sapiens
  siRNA target sequence for NRLN1 (NM_145234.2,1426-1444).
gagcttgaagatttagtca

SEQ ID NO: 320747 - DNA, 19 bp, Homo sapiens
  siRNA target sequence for NUMB (NM_003744.3,276-294).
caaattacggcaaagtttt

SEQ ID NO: 320748 - DNA, 19 bp, Homo sapiens
  siRNA target sequence for NUMB (NM_003744.3,361-379).
ggcgttcgcaccggaaaat

SEQ ID NO: 320749 - DNA, 19 bp, Homo sapiens
  siRNA target sequence for NUMB (NM_003744.3,363-381).
cgttcgcaccggaaaatgt

SEQ ID NO: 320750 - DNA, 19 bp, Homo sapiens
  siRNA target sequence for NUMB (NM_003744.3,364-382).
gttcgcaccggaaaatgta

SEQ ID NO: 320751 - DNA, 19 bp, Homo sapiens
  siRNA target sequence for NUMB (NM_003744.3,380-398).
gtagcttcccggttaagta

SEQ ID NO: 320752 - DNA, 19 bp, Homo sapiens
  siRNA target sequence for NUMB (NM_003744.3,454-472).
gtaaaaagattgaaagcta

SEQ ID NO: 320753 - DNA, 19 bp, Homo sapiens
  siRNA target sequence for NUMB (NM_003744.3,556-574).
gttgaccagacgatagaga

SEQ ID NO: 320754 - DNA, 19 bp, Homo sapiens
  siRNA target sequence for NUMB (NM_003744.3,562-580).
cagacgatagagaaagttt

SEQ ID NO: 320755 - DNA, 19 bp, Homo sapiens
  siRNA target sequence for NUMB (NM_003744.3,590-608).
ccccagacaggaactttga

SEQ ID NO: 320756 - DNA, 19 bp, Homo sapiens
  siRNA target sequence for NUMB (NM_003744.3,592-610).
ccagacaggaactttgata

SEQ ID NO: 320757 - DNA, 19 bp, Homo sapiens
  siRNA target sequence for NUMB (NM_003744.3,719-737).
cttttgcagcctgtttaga

SEQ ID NO: 320758 - DNA, 19 bp, Homo sapiens
  siRNA target sequence for NUMB (NM_003744.3,764-782).
gtggagtgactgctacttt

SEQ ID NO: 320759 - DNA, 19 bp, Homo sapiens
  siRNA target sequence for NUMB (NM_003744.3,787-805).
gctagtcggaccactttta

SEQ ID NO: 320760 - DNA, 19 bp, Homo sapiens
  siRNA target sequence for NUMB (NM_003744.3,906-924).
gatagtcgttggttcatca

SEQ ID NO: 320761 - DNA, 19 bp, Homo sapiens
  siRNA target sequence for NUMB (NM_003744.3,1028-1046).
ggcatgctccaattgaaca

SEQ ID NO: 320762 - DNA, 19 bp, Homo sapiens
  siRNA target sequence for NUMB (NM_003744.3,1081-1099).
gctcttagccagaagatgt

SEQ ID NO: 320763 - DNA, 19 bp, Homo sapiens
  siRNA target sequence for NUMB (NM_003744.3,1121-1139).
ccctacgcatcaatgagtt

SEQ ID NO: 320764 - DNA, 19 bp, Homo sapiens
  siRNA target sequence for NUMB (NM_003744.3,1319-1337).
ctcctaccttccaagctaa

SEQ ID NO: 320765 - DNA, 19 bp, Homo sapiens
  siRNA target sequence for NUMB (NM_003744.3,1385-1403).
ctctagcacccgtagcaat

SEQ ID NO: 320766 - DNA, 19 bp, Homo sapiens
  siRNA target sequence for NUMB (NM_003744.3,1479-1497).
gaccgagtggggtcaatct

SEQ ID NO: 320767 - DNA, 19 bp, Homo sapiens
  siRNA target sequence for NUMB (NM_003744.3,1482-1500).
cgagtggggtcaatcttct

SEQ ID NO: 320768 - DNA, 19 bp, Homo sapiens
  siRNA target sequence for NUMB (NM_003744.3,1521-1539).
cttccaggccggtcataga

SEQ ID NO: 320769 - DNA, 19 bp, Homo sapiens
  siRNA target sequence for NUMB (NM_003744.3,1554-1572).
ggccgaccgatggttagaa

SEQ ID NO: 320770 - DNA, 19 bp, Homo sapiens
  siRNA target sequence for NUMB (NM_003744.3,1556-1574).
ccgaccgatggttagaaga

SEQ ID NO: 320771 - DNA, 19 bp, Homo sapiens
  siRNA target sequence for NUMB (NM_003744.3,1565-1583).
ggttagaagaggtgtctaa

SEQ ID NO: 320772 - DNA, 19 bp, Homo sapiens
  siRNA target sequence for NUMB (NM_003744.3,1668-1686).
gccagcatcacctttccaa

SEQ ID NO: 320773 - DNA, 19 bp, Homo sapiens
  siRNA target sequence for NUMB (NM_003744.3,1678-1696).
cctttccaagggaatgcat

SEQ ID NO: 320774 - DNA, 19 bp, Homo sapiens
  siRNA target sequence for NUMB (NM_003744.3,1836-1854).
gatggtggccaacgtattt

SEQ ID NO: 320775 - DNA, 19 bp, Homo sapiens
  siRNA target sequence for NUMB (NM_003744.3,1989-2007).
cggttctgcagctttcaat

SEQ ID NO: 320776 - DNA, 19 bp, Homo sapiens
  siRNA target sequence for NUMB (NM_003744.3,2069-2087).
gcccagtggatccttttga

SEQ ID NO: 320777 - DNA, 19 bp, Homo sapiens
  siRNA target sequence for NUMB (NM_003744.3,2070-2088).
cccagtggatccttttgaa

SEQ ID NO: 320778 - DNA, 19 bp, Homo sapiens
  siRNA target sequence for NUMB (NM_003744.3,2094-2112).
gtgggctgcattagaaaat

SEQ ID NO: 320779 - DNA, 19 bp, Homo sapiens
  siRNA target sequence for NUMB (NM_003744.3,2115-2133).
gtccaagcagcgtactaat

SEQ ID NO: 320780 - DNA, 19 bp, Homo sapiens
  siRNA target sequence for NUMB (NM_003744.3,2148-2166).
ccctttctccagtgactta

SEQ ID NO: 320781 - DNA, 19 bp, Homo sapiens
  siRNA target sequence for NUMB (NM_003744.3,2172-2190).
gacgtttgaaattgaactt

SEQ ID NO: 320782 - DNA, 19 bp, Homo sapiens
  siRNA target sequence for SEMA3F (NM_004186.2,201-219).
gcttgtcgccggtcttctt

SEQ ID NO: 320783 - DNA, 19 bp, Homo sapiens
  siRNA target sequence for SEMA3F (NM_004186.2,289-307).
cgggtccggctctcattca

SEQ ID NO: 320784 - DNA, 19 bp, Homo sapiens
  siRNA target sequence for SEMA3F (NM_004186.2,290-308).
gggtccggctctcattcaa

SEQ ID NO: 320785 - DNA, 19 bp, Homo sapiens
  siRNA target sequence for SEMA3F (NM_004186.2,291-309).
ggtccggctctcattcaaa

SEQ ID NO: 320786 - DNA, 19 bp, Homo sapiens
  siRNA target sequence for SEMA3F (NM_004186.2,329-347).
ccgcccacttcttcaactt

SEQ ID NO: 320787 - DNA, 19 bp, Homo sapiens
  siRNA target sequence for SEMA3F (NM_004186.2,359-377).
caaccgactaccgaatctt

SEQ ID NO: 320788 - DNA, 19 bp, Homo sapiens
  siRNA target sequence for SEMA3F (NM_004186.2,456-474).
ccgcgagcccctcattata

SEQ ID NO: 320789 - DNA, 19 bp, Homo sapiens
  siRNA target sequence for SEMA3F (NM_004186.2,458-476).
gcgagcccctcattataca

SEQ ID NO: 320790 - DNA, 19 bp, Homo sapiens
  siRNA target sequence for SEMA3F (NM_004186.2,460-478).
gagcccctcattatacact

SEQ ID NO: 320791 - DNA, 19 bp, Homo sapiens
  siRNA target sequence for SEMA3F (NM_004186.2,734-752).
cagccccacgccaggatta

SEQ ID NO: 320792 - DNA, 19 bp, Homo sapiens
  siRNA target sequence for SEMA3F (NM_004186.2,736-754).
gccccacgccaggattaca

SEQ ID NO: 320793 - DNA, 19 bp, Homo sapiens
  siRNA target sequence for SEMA3F (NM_004186.2,737-755).
ccccacgccaggattacat

SEQ ID NO: 320794 - DNA, 19 bp, Homo sapiens
  siRNA target sequence for SEMA3F (NM_004186.2,824-842).
cagcatcggccctcatcaa

SEQ ID NO: 320795 - DNA, 19 bp, Homo sapiens
  siRNA target sequence for SEMA3F (NM_004186.2,827-845).
catcggccctcatcaatga

SEQ ID NO: 320796 - DNA, 19 bp, Homo sapiens
  siRNA target sequence for SEMA3F (NM_004186.2,856-874).
gctggtgtgtacatcgatt

SEQ ID NO: 320797 - DNA, 19 bp, Homo sapiens
  siRNA target sequence for SEMA3F (NM_004186.2,923-941).
ccatgcgcacggatcagta

SEQ ID NO: 320798 - DNA, 19 bp, Homo sapiens
  siRNA target sequence for SEMA3F (NM_004186.2,996-1014).
cagtgcggagcgcaatgat

SEQ ID NO: 320799 - DNA, 19 bp, Homo sapiens
  siRNA target sequence for SEMA3F (NM_004186.2,1005-1023).
gcgcaatgatgataagctt

SEQ ID NO: 320800 - DNA, 19 bp, Homo sapiens
  siRNA target sequence for SEMA3F (NM_004186.2,1006-1024).
cgcaatgatgataagcttt

SEQ ID NO: 320801 - DNA, 19 bp, Homo sapiens
  siRNA target sequence for SEMA3F (NM_004186.2,1007-1025).
gcaatgatgataagcttta

SEQ ID NO: 320802 - DNA, 19 bp, Homo sapiens
  siRNA target sequence for SEMA3F (NM_004186.2,1258-1276).
gtcatttacgctgtcttta

SEQ ID NO: 320803 - DNA, 19 bp, Homo sapiens
  siRNA target sequence for SEMA3F (NM_004186.2,1442-1460).
gaaccttcacgccatctat

SEQ ID NO: 320804 - DNA, 19 bp, Homo sapiens
  siRNA target sequence for SEMA3F (NM_004186.2,1483-1501).
gatgaggtgatcaacttca

SEQ ID NO: 320805 - DNA, 19 bp, Homo sapiens
  siRNA target sequence for SEMA3F (NM_004186.2,1578-1596).
ctaccgccttaccactatt

SEQ ID NO: 320806 - DNA, 19 bp, Homo sapiens
  siRNA target sequence for SEMA3F (NM_004186.2,1628-1646).
gctatgaggtgcttttcct

SEQ ID NO: 320807 - DNA, 19 bp, Homo sapiens
  siRNA target sequence for SEMA3F (NM_004186.2,1664-1682).
cagtgcagaaggtcattgt

SEQ ID NO: 320808 - DNA, 19 bp, Homo sapiens
  siRNA target sequence for SEMA3F (NM_004186.2,1911-1929).
ggcctgctcccgctataca

SEQ ID NO: 320809 - DNA, 19 bp, Homo sapiens
  siRNA target sequence for SEMA3F (NM_004186.2,1987-2005).
cagtgccgtgggttcaact

SEQ ID NO: 320810 - DNA, 19 bp, Homo sapiens
  siRNA target sequence for SEMA3F (NM_004186.2,2087-2105).
cgccccaagccactgttaa

SEQ ID NO: 320811 - DNA, 19 bp, Homo sapiens
  siRNA target sequence for SEMA3F (NM_004186.2,2089-2107).
ccccaagccactgttaagt

SEQ ID NO: 320812 - DNA, 19 bp, Homo sapiens
  siRNA target sequence for SEMA3F (NM_004186.2,2234-2252).
cagccactgagaacaactt

SEQ ID NO: 320813 - DNA, 19 bp, Homo sapiens
  siRNA target sequence for SEMA3F (NM_004186.2,2240-2258).
ctgagaacaactttaagca

SEQ ID NO: 320814 - DNA, 19 bp, Homo sapiens
  siRNA target sequence for SEMA6D (NM_020858.1,536-554).
gtcgactatcactattcaa

SEQ ID NO: 320815 - DNA, 19 bp, Homo sapiens
  siRNA target sequence for SEMA6D (NM_020858.1,556-574).
gcaatatccggtttttaga

SEQ ID NO: 320816 - DNA, 19 bp, Homo sapiens
  siRNA target sequence for SEMA6D (NM_020858.1,578-596).
cgcccttcaggcaatgaat

SEQ ID NO: 320817 - DNA, 19 bp, Homo sapiens
  siRNA target sequence for SEMA6D (NM_020858.1,619-637).
gctgatgttgaaaattcga

SEQ ID NO: 320818 - DNA, 19 bp, Homo sapiens
  siRNA target sequence for SEMA6D (NM_020858.1,656-674).
ggcagggatcaagtttata

SEQ ID NO: 320819 - DNA, 19 bp, Homo sapiens
  siRNA target sequence for SEMA6D (NM_020858.1,661-679).
ggatcaagtttatacagta

SEQ ID NO: 320820 - DNA, 19 bp, Homo sapiens
  siRNA target sequence for SEMA6D (NM_020858.1,727-745).
gacatggcgatcaagacaa

SEQ ID NO: 320821 - DNA, 19 bp, Homo sapiens
  siRNA target sequence for SEMA6D (NM_020858.1,741-759).
gacaacaggatcgagaaaa

SEQ ID NO: 320822 - DNA, 19 bp, Homo sapiens
  siRNA target sequence for SEMA6D (NM_020858.1,743-761).
caacaggatcgagaaaact

SEQ ID NO: 320823 - DNA, 19 bp, Homo sapiens
  siRNA target sequence for SEMA6D (NM_020858.1,764-782).
gctatgaaaggcaagcata

SEQ ID NO: 320824 - DNA, 19 bp, Homo sapiens
  siRNA target sequence for SEMA6D (NM_020858.1,773-791).
ggcaagcataaagatgaat

SEQ ID NO: 320825 - DNA, 19 bp, Homo sapiens
  siRNA target sequence for SEMA6D (NM_020858.1,822-840).
gaaacgatgagatggtttt

SEQ ID NO: 320826 - DNA, 19 bp, Homo sapiens
  siRNA target sequence for SEMA6D (NM_020858.1,866-884).
cccatgtgtagatactaca

SEQ ID NO: 320827 - DNA, 19 bp, Homo sapiens
  siRNA target sequence for SEMA6D (NM_020858.1,880-898).
ctacaggttgagtacctta

SEQ ID NO: 320828 - DNA, 19 bp, Homo sapiens
  siRNA target sequence for SEMA6D (NM_020858.1,883-901).
caggttgagtaccttagaa

SEQ ID NO: 320829 - DNA, 19 bp, Homo sapiens
  siRNA target sequence for SEMA6D (NM_020858.1,889-907).
gagtaccttagaatatgat

SEQ ID NO: 320830 - DNA, 19 bp, Homo sapiens
  siRNA target sequence for SEMA6D (NM_020858.1,1015-1033).
ggccagcgatgccgttatt

SEQ ID NO: 320831 - DNA, 19 bp, Homo sapiens
  siRNA target sequence for SEMA6D (NM_020858.1,1016-1034).
gccagcgatgccgttattt

SEQ ID NO: 320832 - DNA, 19 bp, Homo sapiens
  siRNA target sequence for SEMA6D (NM_020858.1,1017-1035).
ccagcgatgccgttattta

SEQ ID NO: 320833 - DNA, 19 bp, Homo sapiens
  siRNA target sequence for SEMA6D (NM_020858.1,1018-1036).
cagcgatgccgttatttat

SEQ ID NO: 320834 - DNA, 19 bp, Homo sapiens
  siRNA target sequence for SEMA6D (NM_020858.1,1021-1039).
cgatgccgttatttatcga

SEQ ID NO: 320835 - DNA, 19 bp, Homo sapiens
  siRNA target sequence for SEMA6D (NM_020858.1,1022-1040).
gatgccgttatttatcgaa

SEQ ID NO: 320836 - DNA, 19 bp, Homo sapiens
  siRNA target sequence for SEMA6D (NM_020858.1,1056-1074).
ctgcccttcgcacaataaa

SEQ ID NO: 320837 - DNA, 19 bp, Homo sapiens
  siRNA target sequence for SEMA6D (NM_020858.1,1058-1076).
gcccttcgcacaataaaat

SEQ ID NO: 320838 - DNA, 19 bp, Homo sapiens
  siRNA target sequence for SEMA6D (NM_020858.1,1059-1077).
cccttcgcacaataaaata

SEQ ID NO: 320839 - DNA, 19 bp, Homo sapiens
  siRNA target sequence for SEMA6D (NM_020858.1,1116-1134).
ccatagaatatggaaacta

SEQ ID NO: 320840 - DNA, 19 bp, Homo sapiens
  siRNA target sequence for SEMA6D (NM_020858.1,1117-1135).
catagaatatggaaactat

SEQ ID NO: 320841 - DNA, 19 bp, Homo sapiens
  siRNA target sequence for SEMA6D (NM_020858.1,1154-1172).
gaaatcgctgtcgaacata

SEQ ID NO: 320842 - DNA, 19 bp, Homo sapiens
  siRNA target sequence for SEMA6D (NM_020858.1,1159-1177).
cgctgtcgaacataataat

SEQ ID NO: 320843 - DNA, 19 bp, Homo sapiens
  siRNA target sequence for SEMA6D (NM_020858.1,1160-1178).
gctgtcgaacataataatt

SEQ ID NO: 320844 - DNA, 19 bp, Homo sapiens
  siRNA target sequence for SEMA6D (NM_020858.1,1301-1319).
ggagattcgtttttctact

SEQ ID NO: 320845 - DNA, 19 bp, Homo sapiens
  siRNA target sequence for SEMA6D (NM_020858.1,1308-1326).
cgtttttctactttgatgt

SEQ ID NO: 320846 - DNA, 19 bp, Homo sapiens
  siRNA target sequence for SEMA6D (NM_020858.1,1322-1340).
gatgttctgcagtctatta

SEQ ID NO: 320847 - DNA, 19 bp, Homo sapiens
  siRNA target sequence for SEMA6D (NM_020858.1,1330-1348).
gcagtctattacagacata

SEQ ID NO: 320848 - DNA, 19 bp, Homo sapiens
  siRNA target sequence for SEMA6D (NM_020858.1,1331-1349).
cagtctattacagacataa

SEQ ID NO: 320849 - DNA, 19 bp, Homo sapiens
  siRNA target sequence for SEMA6D (NM_020858.1,1373-1391).
gtggtcggggtgtttacca

SEQ ID NO: 320850 - DNA, 19 bp, Homo sapiens
  siRNA target sequence for SEMA6D (NM_020858.1,1418-1436).
gctgtctgtgcatttagca

SEQ ID NO: 320851 - DNA, 19 bp, Homo sapiens
  siRNA target sequence for SEMA6D (NM_020858.1,1480-1498).
gaaaactccagattctgtt

SEQ ID NO: 320852 - DNA, 19 bp, Homo sapiens
  siRNA target sequence for SEMA6D (NM_020858.1,1559-1577).
ggccttgccgaagcttata

SEQ ID NO: 320853 - DNA, 19 bp, Homo sapiens
  siRNA target sequence for SEMA6D (NM_020858.1,1560-1578).
gccttgccgaagcttataa

SEQ ID NO: 320854 - DNA, 19 bp, Homo sapiens
  siRNA target sequence for SEMA6D (NM_020858.1,1565-1583).
gccgaagcttataaaacct

SEQ ID NO: 320855 - DNA, 19 bp, Homo sapiens
  siRNA target sequence for SEMA6D (NM_020858.1,1588-1606).
cgatttcccggatgaaact

SEQ ID NO: 320856 - DNA, 19 bp, Homo sapiens
  siRNA target sequence for SEMA6D (NM_020858.1,1596-1614).
cggatgaaactctgtcatt

SEQ ID NO: 320857 - DNA, 19 bp, Homo sapiens
  siRNA target sequence for SEMA6D (NM_020858.1,1730-1748).
ggaccctaccagaactaca

SEQ ID NO: 320858 - DNA, 19 bp, Homo sapiens
  siRNA target sequence for SEMA6D (NM_020858.1,1741-1759).
gaactacacagtcatcttt

SEQ ID NO: 320859 - DNA, 19 bp, Homo sapiens
  siRNA target sequence for SEMA6D (NM_020858.1,1769-1787).
gaagctggcatggtactta

SEQ ID NO: 320860 - DNA, 19 bp, Homo sapiens
  siRNA target sequence for SEMA6D (NM_020858.1,1773-1791).
ctggcatggtacttaaagt

SEQ ID NO: 320861 - DNA, 19 bp, Homo sapiens
  siRNA target sequence for SEMA6D (NM_020858.1,1827-1845).
gcgtattactggaagagat

SEQ ID NO: 320862 - DNA, 19 bp, Homo sapiens
  siRNA target sequence for SEMA6D (NM_020858.1,1943-1961).
gcgttctctagctgcatta

SEQ ID NO: 320863 - DNA, 19 bp, Homo sapiens
  siRNA target sequence for SEMA6D (NM_020858.1,1944-1962).
cgttctctagctgcattat

SEQ ID NO: 320864 - DNA, 19 bp, Homo sapiens
  siRNA target sequence for SEMA6D (NM_020858.1,1979-1997).
cgctgtgagcgttatggat

SEQ ID NO: 320865 - DNA, 19 bp, Homo sapiens
  siRNA target sequence for SEMA6D (NM_020858.1,1985-2003).
gagcgttatggatcatgta

SEQ ID NO: 320866 - DNA, 19 bp, Homo sapiens
  siRNA target sequence for SEMA6D (NM_020858.1,1998-2016).
catgtaaaaagtcttgtat

SEQ ID NO: 320867 - DNA, 19 bp, Homo sapiens
  siRNA target sequence for SEMA6D (NM_020858.1,2030-2048).
ccgtattgtggctggttaa

SEQ ID NO: 320868 - DNA, 19 bp, Homo sapiens
  siRNA target sequence for SEMA6D (NM_020858.1,2155-2173).
cggcaacacagctcatcta

SEQ ID NO: 320869 - DNA, 19 bp, Homo sapiens
  siRNA target sequence for SEMA6D (NM_020858.1,2221-2239).
ccagatggtccacatgaat

SEQ ID NO: 320870 - DNA, 19 bp, Homo sapiens
  siRNA target sequence for SEMA6D (NM_020858.1,2288-2306).
gcaggtgtggcagtatact

SEQ ID NO: 320871 - DNA, 19 bp, Homo sapiens
  siRNA target sequence for SEMA6D (NM_020858.1,2305-2323).
ctgctatcgagacatgttt

SEQ ID NO: 320872 - DNA, 19 bp, Homo sapiens
  siRNA target sequence for SEMA6D (NM_020858.1,2307-2325).
gctatcgagacatgtttgt

SEQ ID NO: 320873 - DNA, 19 bp, Homo sapiens
  siRNA target sequence for SEMA6D (NM_020858.1,2308-2326).
ctatcgagacatgtttgtt

SEQ ID NO: 320874 - DNA, 19 bp, Homo sapiens
  siRNA target sequence for SEMA6D (NM_020858.1,2320-2338).
gtttgttcggaaaaacaga

SEQ ID NO: 320875 - DNA, 19 bp, Homo sapiens
  siRNA target sequence for SEMA6D (NM_020858.1,2376-2394).
cagactccagtggaagttt

SEQ ID NO: 320876 - DNA, 19 bp, Homo sapiens
  siRNA target sequence for SEMA6D (NM_020858.1,2398-2416).
caaactgaatggtctcttt

SEQ ID NO: 320877 - DNA, 19 bp, Homo sapiens
  siRNA target sequence for SEMA6D (NM_020858.1,2422-2440).
ccctgtcaaggaataccaa

SEQ ID NO: 320878 - DNA, 19 bp, Homo sapiens
  siRNA target sequence for SEMA6D (NM_020858.1,2745-2763).
caaatgctacccatgacta

SEQ ID NO: 320879 - DNA, 19 bp, Homo sapiens
  siRNA target sequence for SEMA6D (NM_020858.1,2750-2768).
gctacccatgactacaaca

SEQ ID NO: 320880 - DNA, 19 bp, Homo sapiens
  siRNA target sequence for SEMA6D (NM_020858.1,2759-2777).
gactacaacacgtctttct

SEQ ID NO: 320881 - DNA, 19 bp, Homo sapiens
  siRNA target sequence for SEMA6D (NM_020858.1,2761-2779).
ctacaacacgtctttctca

SEQ ID NO: 320882 - DNA, 19 bp, Homo sapiens
  siRNA target sequence for SEMA6D (NM_020858.1,2822-2840).
gatcaccctctcacaaagt

SEQ ID NO: 320883 - DNA, 19 bp, Homo sapiens
  siRNA target sequence for SEMA6D (NM_020858.1,2825-2843).
caccctctcacaaagtcat

SEQ ID NO: 320884 - DNA, 19 bp, Homo sapiens
  siRNA target sequence for SEMA6D (NM_020858.1,2858-2876).
caccggcgttctgttgatt

SEQ ID NO: 320885 - DNA, 19 bp, Homo sapiens
  siRNA target sequence for SEMA6D (NM_020858.1,2877-2895).
ccagaaataccctcaatga

SEQ ID NO: 320886 - DNA, 19 bp, Homo sapiens
  siRNA target sequence for SEMA6D (NM_020858.1,2878-2896).
cagaaataccctcaatgat

SEQ ID NO: 320887 - DNA, 19 bp, Homo sapiens
  siRNA target sequence for SEMA6D (NM_020858.1,2906-2924).
catctgaatgacccaaata

SEQ ID NO: 320888 - DNA, 19 bp, Homo sapiens
  siRNA target sequence for SEMA6D (NM_020858.1,2909-2927).
ctgaatgacccaaatagta

SEQ ID NO: 320889 - DNA, 19 bp, Homo sapiens
  siRNA target sequence for SEMA6D (NM_020858.1,2956-2974).
gatggcacaccagaactta

SEQ ID NO: 320890 - DNA, 19 bp, Homo sapiens
  siRNA target sequence for SEMA6D (NM_020858.1,3000-3018).
ctgaggtcccacctaaagt

SEQ ID NO: 320891 - DNA, 19 bp, Homo sapiens
  siRNA target sequence for SEMA6D (NM_020858.1,3026-3044).
cgggaggcatcgctatact

SEQ ID NO: 320892 - DNA, 19 bp, Homo sapiens
  siRNA target sequence for SEMA6D (NM_020858.1,3132-3150).
gacaaagaggttatcacaa

SEQ ID NO: 320893 - DNA, 19 bp, Homo sapiens
  siRNA target sequence for SEMA6D (NM_020858.1,3157-3175).
ctcccagaggcactctata

SEQ ID NO: 320894 - DNA, 19 bp, Homo sapiens
  siRNA target sequence for SEMA6D (NM_020858.1,3193-3211).
cttaaactcaccaaatggt

SEQ ID NO: 320895 - DNA, 19 bp, Homo sapiens
  siRNA target sequence for SEMA6D (NM_020858.1,3222-3240).
ccagacagcctagtatgaa

SEQ ID NO: 320896 - DNA, 19 bp, Homo sapiens
  siRNA target sequence for SEMA6D (NM_020858.1,3269-3287).
ggggcgaaggtggactata

SEQ ID NO: 320897 - DNA, 19 bp, Homo sapiens
  siRNA target sequence for SEMA6D (NM_020858.1,3337-3355).
gagcagctacaccagtaat

SEQ ID NO: 320898 - DNA, 19 bp, Homo sapiens
  siRNA target sequence for SEMA6D (NM_020858.1,3365-3383).
cctaggacgggactaaaga

SEQ ID NO: 320899 - DNA, 19 bp, Homo sapiens
  siRNA target sequence for SEMA6D (NM_020858.1,3385-3403).
gacgccgtccttaaaacct

SEQ ID NO: 320900 - DNA, 19 bp, Homo sapiens
  siRNA target sequence for SEMA6D (NM_020858.1,3455-3473).
ctgaacaaatacacatact

SEQ ID NO: 320901 - DNA, 19 bp, Homo sapiens
  siRNA target sequence for SEMA6D (NM_153617.1,2135-2153).
ggggactgccatgaaattt

SEQ ID NO: 320902 - DNA, 19 bp, Homo sapiens
  siRNA target sequence for SEMA6D (NM_153617.1,2136-2154).
gggactgccatgaaatttt

SEQ ID NO: 320903 - DNA, 19 bp, Homo sapiens
  siRNA target sequence for SEMA6D (NM_153617.1,2160-2178).
cttcaactacaccagatta

SEQ ID NO: 320904 - DNA, 19 bp, Homo sapiens
  siRNA target sequence for SEMA6D (NM_153617.1,2163-2181).
caactacaccagattacaa

SEQ ID NO: 320905 - DNA, 19 bp, Homo sapiens
  siRNA target sequence for SEMA6D (NM_153618.1,2206-2224).
catggaggtatcttcatct

SEQ ID NO: 320906 - DNA, 19 bp, Homo sapiens
  siRNA target sequence for SEMA6D (NM_153618.1,2240-2258).
gcaagtatcccagaaatca

SEQ ID NO: 320907 - DNA, 19 bp, Homo sapiens
  siRNA target sequence for SEMA6D (NM_153618.1,2257-2275).
cacacctaaagtgattgat

SEQ ID NO: 320908 - DNA, 19 bp, Homo sapiens
  siRNA target sequence for SEMA6D (NM_153618.1,2298-2316).
gctctcggaaatttgtagt

SEQ ID NO: 320909 - DNA, 19 bp, Homo sapiens
  siRNA target sequence for SEMA6D (NM_153618.1,2299-2317).
ctctcggaaatttgtagtt

SEQ ID NO: 320910 - DNA, 19 bp, Homo sapiens
  siRNA target sequence for SEMA6D (NM_153618.1,2301-2319).
ctcggaaatttgtagttca

SEQ ID NO: 320911 - DNA, 19 bp, Homo sapiens
  siRNA target sequence for SPRY4 (NM_030964.2,212-230).
cccctagaagcctgtttct

SEQ ID NO: 320912 - DNA, 19 bp, Homo sapiens
  siRNA target sequence for SPRY4 (NM_030964.2,576-594).
ctgaccaacggctcttaga

SEQ ID NO: 320913 - DNA, 19 bp, Homo sapiens
  siRNA target sequence for SPRY4 (NM_030964.2,825-843).
cccagactctggtcaacta

SEQ ID NO: 320914 - DNA, 19 bp, Homo sapiens
  siRNA target sequence for SPRY4 (NM_030964.2,826-844).
ccagactctggtcaactat

SEQ ID NO: 320915 - DNA, 19 bp, Homo sapiens
  siRNA target sequence for TCP11 (NM_018679.2,454-472).
catattggggtcatttcca

SEQ ID NO: 320916 - DNA, 19 bp, Homo sapiens
  siRNA target sequence for TCP11 (NM_018679.2,465-483).
catttccaacagctatgaa

SEQ ID NO: 320917 - DNA, 19 bp, Homo sapiens
  siRNA target sequence for TCP11 (NM_018679.2,637-655).
ccagaaccgcctgagaatt

SEQ ID NO: 320918 - DNA, 19 bp, Homo sapiens
  siRNA target sequence for TCP11 (NM_018679.2,643-661).
ccgcctgagaattgagatt

SEQ ID NO: 320919 - DNA, 19 bp, Homo sapiens
  siRNA target sequence for TCP11 (NM_018679.2,732-750).
ctaagtacgttctcaacat

SEQ ID NO: 320920 - DNA, 19 bp, Homo sapiens
  siRNA target sequence for TCP11 (NM_018679.2,961-979).
gcagcctagtctccttaat

SEQ ID NO: 320921 - DNA, 19 bp, Homo sapiens
  siRNA target sequence for TCP11 (NM_018679.2,965-983).
cctagtctccttaatcaca

SEQ ID NO: 320922 - DNA, 19 bp, Homo sapiens
  siRNA target sequence for TCP11 (NM_018679.2,1127-1145).
ctgtgtcagggcttcttga

SEQ ID NO: 320923 - DNA, 19 bp, Homo sapiens
  siRNA target sequence for TCP11 (NM_018679.2,1297-1315).
gtttggctcaccccaattt

SEQ ID NO: 320924 - DNA, 19 bp, Homo sapiens
  siRNA target sequence for TCP11 (NM_018679.2,1370-1388).
cctgaggaagctatactga

SEQ ID NO: 320925 - DNA, 19 bp, Homo sapiens
  siRNA target sequence for TCP11 (NM_018679.2,1445-1463).
gttgctctaagcagtgata

SEQ ID NO: 320926 - DNA, 19 bp, Homo sapiens
  siRNA target sequence for TCP11 (NM_018679.2,1532-1550).
gatcagcggatccatttgt

SEQ ID NO: 320927 - DNA, 19 bp, Homo sapiens
  siRNA target sequence for TCP11 (NM_018679.2,1574-1592).
ggtgtgcagcggtctctat

SEQ ID NO: 320928 - DNA, 19 bp, Homo sapiens
  siRNA target sequence for TCP11 (NM_018679.2,1575-1593).
gtgtgcagcggtctctatt

SEQ ID NO: 320929 - DNA, 19 bp, Homo sapiens
  siRNA target sequence for TCP11 (NM_018679.2,1635-1653).
cagaactgggccaaaagtt

SEQ ID NO: 320930 - DNA, 19 bp, Homo sapiens
  siRNA target sequence for TCP11 (NM_018679.2,1682-1700).
gtgtttggtccctactaca

SEQ ID NO: 320931 - DNA, 19 bp, Homo sapiens
  siRNA target sequence for UPK2 (NM_006760.1,106-124).
gggctgcagacttcaacat

SEQ ID NO: 320932 - DNA, 19 bp, Homo sapiens
  siRNA target sequence for UPK2 (NM_006760.1,108-126).
gctgcagacttcaacatct

SEQ ID NO: 320933 - DNA, 19 bp, Homo sapiens
  siRNA target sequence for UPK2 (NM_006760.1,362-380).
cctcgtgccaggaaccaaa

SEQ ID NO: 320934 - DNA, 19 bp, Homo sapiens
  siRNA target sequence for UPK2 (NM_006760.1,363-381).
ctcgtgccaggaaccaaat

SEQ ID NO: 320935 - DNA, 19 bp, Homo sapiens
  siRNA target sequence for UPK2 (NM_006760.1,366-384).
gtgccaggaaccaaattct

SEQ ID NO: 320936 - DNA, 19 bp, Homo sapiens
  siRNA target sequence for UPK2 (NM_006760.1,370-388).
caggaaccaaattctacat

SEQ ID NO: 320937 - DNA, 19 bp, Homo sapiens
  siRNA target sequence for UPK2 (NM_006760.1,453-471).
cctcgaaggaacatggaat

SEQ ID NO: 320938 - DNA, 19 bp, Homo sapiens
  siRNA target sequence for WHSC2 (NM_005663.2,406-424).
cccaacgttcaggatattt

SEQ ID NO: 320939 - DNA, 19 bp, Homo sapiens
  siRNA target sequence for WHSC2 (NM_005663.2,407-425).
ccaacgttcaggatatttt

SEQ ID NO: 320940 - DNA, 19 bp, Homo sapiens
  siRNA target sequence for WHSC2 (NM_005663.2,481-499).
gagtgccagtacttgaaca

SEQ ID NO: 320941 - DNA, 19 bp, Homo sapiens
  siRNA target sequence for WHSC2 (NM_005663.2,538-556).
ccggtgaagcattttcagt

SEQ ID NO: 320942 - DNA, 19 bp, Homo sapiens
  siRNA target sequence for WHSC2 (NM_005663.2,540-558).
ggtgaagcattttcagtta

SEQ ID NO: 320943 - DNA, 19 bp, Homo sapiens
  siRNA target sequence for WHSC2 (NM_005663.2,975-993).
ggtgtccacgcagaaactt

SEQ ID NO: 320944 - DNA, 19 bp, Homo sapiens
  siRNA target sequence for WHSC2 (NM_005663.2,1157-1175).
cgttgccagcgcagttcaa

SEQ ID NO: 320945 - DNA, 19 bp, Homo sapiens
  siRNA target sequence for WHSC2 (NM_005663.2,1395-1413).
gttcaagacggccaacaaa

SEQ ID NO: 320946 - DNA, 19 bp, Homo sapiens
  siRNA target sequence for WHSC2 (NM_005663.2,1603-1621).
cagtggacgcgcttcaaga

SEQ ID NO: 320947 - DNA, 19 bp, Homo sapiens
  siRNA target sequence for WHSC2 (NM_005663.2,1607-1625).
ggacgcgcttcaagaagta

SEQ ID NO: 320948 - DNA, 19 bp, Homo sapiens
  siRNA target sequence for WHSC2 (NM_005663.2,1610-1628).
cgcgcttcaagaagtacaa

SEQ ID NO: 320949 - DNA, 19 bp, Homo sapiens
  siRNA target sequence for DOCK9 (NM_015296.1,86-104).
gcggagactcggaagttca

SEQ ID NO: 320950 - DNA, 19 bp, Homo sapiens
  siRNA target sequence for DOCK9 (NM_015296.1,181-199).
cctggcaaagccaaagcta

SEQ ID NO: 320951 - DNA, 19 bp, Homo sapiens
  siRNA target sequence for DOCK9 (NM_015296.1,186-204).
caaagccaaagctaattga

SEQ ID NO: 320952 - DNA, 19 bp, Homo sapiens
  siRNA target sequence for DOCK9 (NM_015296.1,205-223).
gccactcgactatgaaaat

SEQ ID NO: 320953 - DNA, 19 bp, Homo sapiens
  siRNA target sequence for DOCK9 (NM_015296.1,247-265).
gatcctgaacgactgttta

SEQ ID NO: 320954 - DNA, 19 bp, Homo sapiens
  siRNA target sequence for DOCK9 (NM_015296.1,274-292).
gctgctcttcccttacgat

SEQ ID NO: 320955 - DNA, 19 bp, Homo sapiens
  siRNA target sequence for DOCK9 (NM_015296.1,280-298).
cttcccttacgatgacttt

SEQ ID NO: 320956 - DNA, 19 bp, Homo sapiens
  siRNA target sequence for DOCK9 (NM_015296.1,315-333).
gacgacagggtcgatacat

SEQ ID NO: 320957 - DNA, 19 bp, Homo sapiens
  siRNA target sequence for DOCK9 (NM_015296.1,317-335).
cgacagggtcgatacatat

SEQ ID NO: 320958 - DNA, 19 bp, Homo sapiens
  siRNA target sequence for DOCK9 (NM_015296.1,320-338).
cagggtcgatacatatgct

SEQ ID NO: 320959 - DNA, 19 bp, Homo sapiens
  siRNA target sequence for DOCK9 (NM_015296.1,387-405).
cagagtgcatcaaaaccta

SEQ ID NO: 320960 - DNA, 19 bp, Homo sapiens
  siRNA target sequence for DOCK9 (NM_015296.1,417-435).
ggcatcttgtgaactataa

SEQ ID NO: 320961 - DNA, 19 bp, Homo sapiens
  siRNA target sequence for DOCK9 (NM_015296.1,462-480).
gacagcttccgaacaaagt

SEQ ID NO: 320962 - DNA, 19 bp, Homo sapiens
  siRNA target sequence for DOCK9 (NM_015296.1,471-489).
cgaacaaagtggtcaagtt

SEQ ID NO: 320963 - DNA, 19 bp, Homo sapiens
  siRNA target sequence for DOCK9 (NM_015296.1,634-652).
catgaggtcatttaagaga

SEQ ID NO: 320964 - DNA, 19 bp, Homo sapiens
  siRNA target sequence for DOCK9 (NM_015296.1,654-672).
gatttttccacctgattca

SEQ ID NO: 320965 - DNA, 19 bp, Homo sapiens
  siRNA target sequence for DOCK9 (NM_015296.1,674-692).
cttggcgatggatcctata

SEQ ID NO: 320966 - DNA, 19 bp, Homo sapiens
  siRNA target sequence for DOCK9 (NM_015296.1,677-695).
ggcgatggatcctataatt

SEQ ID NO: 320967 - DNA, 19 bp, Homo sapiens
  siRNA target sequence for DOCK9 (NM_015296.1,678-696).
gcgatggatcctataattt

SEQ ID NO: 320968 - DNA, 19 bp, Homo sapiens
  siRNA target sequence for DOCK9 (NM_015296.1,764-782).
ggtgtcgttcagaacaaca

SEQ ID NO: 320969 - DNA, 19 bp, Homo sapiens
  siRNA target sequence for DOCK9 (NM_015296.1,765-783).
gtgtcgttcagaacaacaa

SEQ ID NO: 320970 - DNA, 19 bp, Homo sapiens
  siRNA target sequence for DOCK9 (NM_015296.1,814-832).
gcaggacaaaagtagttat

SEQ ID NO: 320971 - DNA, 19 bp, Homo sapiens
  siRNA target sequence for DOCK9 (NM_015296.1,818-836).
gacaaaagtagttatctct

SEQ ID NO: 320972 - DNA, 19 bp, Homo sapiens
  siRNA target sequence for DOCK9 (NM_015296.1,862-880).
ggaagaatggatcacaatt

SEQ ID NO: 320973 - DNA, 19 bp, Homo sapiens
  siRNA target sequence for DOCK9 (NM_015296.1,866-884).
gaatggatcacaattctaa

SEQ ID NO: 320974 - DNA, 19 bp, Homo sapiens
  siRNA target sequence for DOCK9 (NM_015296.1,937-955).
cgactctcacgaagatgat

SEQ ID NO: 320975 - DNA, 19 bp, Homo sapiens
  siRNA target sequence for DOCK9 (NM_015296.1,975-993).
gttctggttccggtttaga

SEQ ID NO: 320976 - DNA, 19 bp, Homo sapiens
  siRNA target sequence for DOCK9 (NM_015296.1,981-999).
gttccggtttagatagcta

SEQ ID NO: 320977 - DNA, 19 bp, Homo sapiens
  siRNA target sequence for DOCK9 (NM_015296.1,1117-1135).
gccagaagtgaagtcattt

SEQ ID NO: 320978 - DNA, 19 bp, Homo sapiens
  siRNA target sequence for DOCK9 (NM_015296.1,1129-1147).
gtcatttgaagagaagttt

SEQ ID NO: 320979 - DNA, 19 bp, Homo sapiens
  siRNA target sequence for DOCK9 (NM_015296.1,1159-1177).
ccttgtcaagtgcaatgat

SEQ ID NO: 320980 - DNA, 19 bp, Homo sapiens
  siRNA target sequence for DOCK9 (NM_015296.1,1160-1178).
cttgtcaagtgcaatgatt

SEQ ID NO: 320981 - DNA, 19 bp, Homo sapiens
  siRNA target sequence for DOCK9 (NM_015296.1,1197-1215).
gctgtgttgccgaaaatga

SEQ ID NO: 320982 - DNA, 19 bp, Homo sapiens
  siRNA target sequence for DOCK9 (NM_015296.1,1200-1218).
gtgttgccgaaaatgaaga

SEQ ID NO: 320983 - DNA, 19 bp, Homo sapiens
  siRNA target sequence for DOCK9 (NM_015296.1,1214-1232).
gaagaaggacccactacaa

SEQ ID NO: 320984 - DNA, 19 bp, Homo sapiens
  siRNA target sequence for DOCK9 (NM_015296.1,1221-1239).
gacccactacaaatgttga

SEQ ID NO: 320985 - DNA, 19 bp, Homo sapiens
  siRNA target sequence for DOCK9 (NM_015296.1,1254-1272).
ctctatccctgtttgacat

SEQ ID NO: 320986 - DNA, 19 bp, Homo sapiens
  siRNA target sequence for DOCK9 (NM_015296.1,1260-1278).
ccctgtttgacataaaata

SEQ ID NO: 320987 - DNA, 19 bp, Homo sapiens
  siRNA target sequence for DOCK9 (NM_015296.1,1262-1280).
ctgtttgacataaaataca

SEQ ID NO: 320988 - DNA, 19 bp, Homo sapiens
  siRNA target sequence for DOCK9 (NM_015296.1,1304-1322).
cacgtagacctgaaccatt

SEQ ID NO: 320989 - DNA, 19 bp, Homo sapiens
  siRNA target sequence for DOCK9 (NM_015296.1,1430-1448).
ccgaagcagggaatatttt

SEQ ID NO: 320990 - DNA, 19 bp, Homo sapiens
  siRNA target sequence for DOCK9 (NM_015296.1,1458-1476).
gtcctcatccagatatatt

SEQ ID NO: 320991 - DNA, 19 bp, Homo sapiens
  siRNA target sequence for DOCK9 (NM_015296.1,1461-1479).
ctcatccagatatatttct

SEQ ID NO: 320992 - DNA, 19 bp, Homo sapiens
  siRNA target sequence for DOCK9 (NM_015296.1,1524-1542).
gcgctgagccatatatgaa

SEQ ID NO: 320993 - DNA, 19 bp, Homo sapiens
  siRNA target sequence for DOCK9 (NM_015296.1,1525-1543).
cgctgagccatatatgaaa

SEQ ID NO: 320994 - DNA, 19 bp, Homo sapiens
  siRNA target sequence for DOCK9 (NM_015296.1,1526-1544).
gctgagccatatatgaaaa

SEQ ID NO: 320995 - DNA, 19 bp, Homo sapiens
  siRNA target sequence for DOCK9 (NM_015296.1,1529-1547).
gagccatatatgaaaagtt

SEQ ID NO: 320996 - DNA, 19 bp, Homo sapiens
  siRNA target sequence for DOCK9 (NM_015296.1,1531-1549).
gccatatatgaaaagttca

SEQ ID NO: 320997 - DNA, 19 bp, Homo sapiens
  siRNA target sequence for DOCK9 (NM_015296.1,1637-1655).
gcagcaaggacattgttta

SEQ ID NO: 320998 - DNA, 19 bp, Homo sapiens
  siRNA target sequence for DOCK9 (NM_015296.1,1641-1659).
caaggacattgtttaagga

SEQ ID NO: 320999 - DNA, 19 bp, Homo sapiens
  siRNA target sequence for DOCK9 (NM_015296.1,1717-1735).
caataagctatccaatgat

SEQ ID NO: 321000 - DNA, 19 bp, Homo sapiens
  siRNA target sequence for DOCK9 (NM_015296.1,1802-1820).
ggcaatctagacattacaa

SEQ ID NO: 321001 - DNA, 19 bp, Homo sapiens
  siRNA target sequence for DOCK9 (NM_015296.1,1803-1821).
gcaatctagacattacaat

SEQ ID NO: 321002 - DNA, 19 bp, Homo sapiens
  siRNA target sequence for DOCK9 (NM_015296.1,1804-1822).
caatctagacattacaatt

SEQ ID NO: 321003 - DNA, 19 bp, Homo sapiens
  siRNA target sequence for DOCK9 (NM_015296.1,1808-1826).
ctagacattacaattgata

SEQ ID NO: 321004 - DNA, 19 bp, Homo sapiens
  siRNA target sequence for DOCK9 (NM_015296.1,1838-1856).
gacttccctaattatgtta

SEQ ID NO: 321005 - DNA, 19 bp, Homo sapiens
  siRNA target sequence for DOCK9 (NM_015296.1,1911-1929).
cgtttgaagtggaggaatt

SEQ ID NO: 321006 - DNA, 19 bp, Homo sapiens
  siRNA target sequence for DOCK9 (NM_015296.1,1955-1973).
cagccttacaccatctaca

SEQ ID NO: 321007 - DNA, 19 bp, Homo sapiens
  siRNA target sequence for DOCK9 (NM_015296.1,1972-1990).
caccaatcacctttacgtt

SEQ ID NO: 321008 - DNA, 19 bp, Homo sapiens
  siRNA target sequence for DOCK9 (NM_015296.1,1974-1992).
ccaatcacctttacgttta

SEQ ID NO: 321009 - DNA, 19 bp, Homo sapiens
  siRNA target sequence for DOCK9 (NM_015296.1,1975-1993).
caatcacctttacgtttat

SEQ ID NO: 321010 - DNA, 19 bp, Homo sapiens
  siRNA target sequence for DOCK9 (NM_015296.1,1995-2013).
ctaagtacttgaaatacga

SEQ ID NO: 321011 - DNA, 19 bp, Homo sapiens
  siRNA target sequence for DOCK9 (NM_015296.1,2048-2066).
gcgatttgcattgaattca

SEQ ID NO: 321012 - DNA, 19 bp, Homo sapiens
  siRNA target sequence for DOCK9 (NM_015296.1,2049-2067).
cgatttgcattgaattcaa

SEQ ID NO: 321013 - DNA, 19 bp, Homo sapiens
  siRNA target sequence for DOCK9 (NM_015296.1,2084-2102).
gactctcagccccttaagt

SEQ ID NO: 321014 - DNA, 19 bp, Homo sapiens
  siRNA target sequence for DOCK9 (NM_015296.1,2090-2108).
cagccccttaagtgcattt

SEQ ID NO: 321015 - DNA, 19 bp, Homo sapiens
  siRNA target sequence for DOCK9 (NM_015296.1,2092-2110).
gccccttaagtgcatttat

SEQ ID NO: 321016 - DNA, 19 bp, Homo sapiens
  siRNA target sequence for DOCK9 (NM_015296.1,2115-2133).
gacctggtgggccagtttt

SEQ ID NO: 321017 - DNA, 19 bp, Homo sapiens
  siRNA target sequence for DOCK9 (NM_015296.1,2117-2135).
cctggtgggccagttttca

SEQ ID NO: 321018 - DNA, 19 bp, Homo sapiens
  siRNA target sequence for DOCK9 (NM_015296.1,2120-2138).
ggtgggccagttttcacaa

SEQ ID NO: 321019 - DNA, 19 bp, Homo sapiens
  siRNA target sequence for DOCK9 (NM_015296.1,2143-2161).
cgcctttgctgcagtttta

SEQ ID NO: 321020 - DNA, 19 bp, Homo sapiens
  siRNA target sequence for DOCK9 (NM_015296.1,2210-2228).
cccactcagctgcatgaaa

SEQ ID NO: 321021 - DNA, 19 bp, Homo sapiens
  siRNA target sequence for DOCK9 (NM_015296.1,2262-2280).
gctgtgacaactcaagtaa

SEQ ID NO: 321022 - DNA, 19 bp, Homo sapiens
  siRNA target sequence for DOCK9 (NM_015296.1,2263-2281).
ctgtgacaactcaagtaaa

SEQ ID NO: 321023 - DNA, 19 bp, Homo sapiens
  siRNA target sequence for DOCK9 (NM_015296.1,2440-2458).
gcattatggtccggaaatt

SEQ ID NO: 321024 - DNA, 19 bp, Homo sapiens
  siRNA target sequence for DOCK9 (NM_015296.1,2441-2459).
cattatggtccggaaatta

SEQ ID NO: 321025 - DNA, 19 bp, Homo sapiens
  siRNA target sequence for DOCK9 (NM_015296.1,2506-2524).
ggtttctacagtgtatact

SEQ ID NO: 321026 - DNA, 19 bp, Homo sapiens
  siRNA target sequence for DOCK9 (NM_015296.1,2592-2610).
gaaacgaacttgtaaagta

SEQ ID NO: 321027 - DNA, 19 bp, Homo sapiens
  siRNA target sequence for DOCK9 (NM_015296.1,2597-2615).
gaacttgtaaagtacctta

SEQ ID NO: 321028 - DNA, 19 bp, Homo sapiens
  siRNA target sequence for DOCK9 (NM_015296.1,2600-2618).
cttgtaaagtaccttaaga

SEQ ID NO: 321029 - DNA, 19 bp, Homo sapiens
  siRNA target sequence for DOCK9 (NM_015296.1,2653-2671).
cttcttgcccactatccta

SEQ ID NO: 321030 - DNA, 19 bp, Homo sapiens
  siRNA target sequence for DOCK9 (NM_015296.1,2725-2743).
cgtgactcgggtcattatt

SEQ ID NO: 321031 - DNA, 19 bp, Homo sapiens
  siRNA target sequence for DOCK9 (NM_015296.1,2728-2746).
gactcgggtcattattcat

SEQ ID NO: 321032 - DNA, 19 bp, Homo sapiens
  siRNA target sequence for DOCK9 (NM_015296.1,2779-2797).
gagccacttgaggtcatat

SEQ ID NO: 321033 - DNA, 19 bp, Homo sapiens
  siRNA target sequence for DOCK9 (NM_015296.1,2781-2799).
gccacttgaggtcatatgt

SEQ ID NO: 321034 - DNA, 19 bp, Homo sapiens
  siRNA target sequence for DOCK9 (NM_015296.1,2782-2800).
ccacttgaggtcatatgtt

SEQ ID NO: 321035 - DNA, 19 bp, Homo sapiens
  siRNA target sequence for DOCK9 (NM_015296.1,2842-2860).
caagacagtgcatgaagaa

SEQ ID NO: 321036 - DNA, 19 bp, Homo sapiens
  siRNA target sequence for DOCK9 (NM_015296.1,2871-2889).
ccatgaccacgattctcaa

SEQ ID NO: 321037 - DNA, 19 bp, Homo sapiens
  siRNA target sequence for DOCK9 (NM_015296.1,2910-2928).
ccagcaacaaactactgaa

SEQ ID NO: 321038 - DNA, 19 bp, Homo sapiens
  siRNA target sequence for DOCK9 (NM_015296.1,2913-2931).
gcaacaaactactgaagta

SEQ ID NO: 321039 - DNA, 19 bp, Homo sapiens
  siRNA target sequence for DOCK9 (NM_015296.1,2944-2962).
ctttgatgtactgatcaaa

SEQ ID NO: 321040 - DNA, 19 bp, Homo sapiens
  siRNA target sequence for DOCK9 (NM_015296.1,2948-2966).
gatgtactgatcaaatcta

SEQ ID NO: 321041 - DNA, 19 bp, Homo sapiens
  siRNA target sequence for DOCK9 (NM_015296.1,2964-2982).
ctatggctcagcatttgat

SEQ ID NO: 321042 - DNA, 19 bp, Homo sapiens
  siRNA target sequence for DOCK9 (NM_015296.1,2969-2987).
gctcagcatttgatagaga

SEQ ID NO: 321043 - DNA, 19 bp, Homo sapiens
  siRNA target sequence for DOCK9 (NM_015296.1,2970-2988).
ctcagcatttgatagagaa

SEQ ID NO: 321044 - DNA, 19 bp, Homo sapiens
  siRNA target sequence for DOCK9 (NM_015296.1,2984-3002).
gagaactccaaagttaagt

SEQ ID NO: 321045 - DNA, 19 bp, Homo sapiens
  siRNA target sequence for DOCK9 (NM_015296.1,3007-3025).
gcgaaaccagagatttcct

SEQ ID NO: 321046 - DNA, 19 bp, Homo sapiens
  siRNA target sequence for DOCK9 (NM_015296.1,3042-3060).
cagtggaaaccgttgtaaa

SEQ ID NO: 321047 - DNA, 19 bp, Homo sapiens
  siRNA target sequence for DOCK9 (NM_015296.1,3044-3062).
gtggaaaccgttgtaaata

SEQ ID NO: 321048 - DNA, 19 bp, Homo sapiens
  siRNA target sequence for DOCK9 (NM_015296.1,3085-3103).
gaagtttcgagataatcca

SEQ ID NO: 321049 - DNA, 19 bp, Homo sapiens
  siRNA target sequence for DOCK9 (NM_015296.1,3187-3205).
gcagatcaacaactacatt

SEQ ID NO: 321050 - DNA, 19 bp, Homo sapiens
  siRNA target sequence for DOCK9 (NM_015296.1,3196-3214).
caactacattagctgtttt

SEQ ID NO: 321051 - DNA, 19 bp, Homo sapiens
  siRNA target sequence for DOCK9 (NM_015296.1,3269-3287).
gtgtgcaaccatgaacatt

SEQ ID NO: 321052 - DNA, 19 bp, Homo sapiens
  siRNA target sequence for DOCK9 (NM_015296.1,3301-3319).
cttaccaatgccatttgga

SEQ ID NO: 321053 - DNA, 19 bp, Homo sapiens
  siRNA target sequence for DOCK9 (NM_015296.1,3349-3367).
ccagcttgactactcatta

SEQ ID NO: 321054 - DNA, 19 bp, Homo sapiens
  siRNA target sequence for DOCK9 (NM_015296.1,3350-3368).
cagcttgactactcattaa

SEQ ID NO: 321055 - DNA, 19 bp, Homo sapiens
  siRNA target sequence for DOCK9 (NM_015296.1,3352-3370).
gcttgactactcattaaca

SEQ ID NO: 321056 - DNA, 19 bp, Homo sapiens
  siRNA target sequence for DOCK9 (NM_015296.1,3523-3541).
gagccatcaggcaaggata

SEQ ID NO: 321057 - DNA, 19 bp, Homo sapiens
  siRNA target sequence for DOCK9 (NM_015296.1,3562-3580).
gtttggtctgctgattgaa

SEQ ID NO: 321058 - DNA, 19 bp, Homo sapiens
  siRNA target sequence for DOCK9 (NM_015296.1,3567-3585).
gtctgctgattgaaaacgt

SEQ ID NO: 321059 - DNA, 19 bp, Homo sapiens
  siRNA target sequence for DOCK9 (NM_015296.1,3584-3602).
gtccagcggatcaatgtga

SEQ ID NO: 321060 - DNA, 19 bp, Homo sapiens
  siRNA target sequence for DOCK9 (NM_015296.1,3740-3758).
gccatctccggcattgctt

SEQ ID NO: 321061 - DNA, 19 bp, Homo sapiens
  siRNA target sequence for DOCK9 (NM_015296.1,3748-3766).
cggcattgcttctccatat

SEQ ID NO: 321062 - DNA, 19 bp, Homo sapiens
  siRNA target sequence for DOCK9 (NM_015296.1,3749-3767).
ggcattgcttctccatata

SEQ ID NO: 321063 - DNA, 19 bp, Homo sapiens
  siRNA target sequence for DOCK9 (NM_015296.1,3768-3786).
caacctcaactccaaacat

SEQ ID NO: 321064 - DNA, 19 bp, Homo sapiens
  siRNA target sequence for DOCK9 (NM_015296.1,3771-3789).
cctcaactccaaacatcaa

SEQ ID NO: 321065 - DNA, 19 bp, Homo sapiens
  siRNA target sequence for DOCK9 (NM_015296.1,3847-3865).
ccttccagaaaggaatagt

SEQ ID NO: 321066 - DNA, 19 bp, Homo sapiens
  siRNA target sequence for DOCK9 (NM_015296.1,3918-3936).
ccgtggttcgctgtgataa

SEQ ID NO: 321067 - DNA, 19 bp, Homo sapiens
  siRNA target sequence for DOCK9 (NM_015296.1,3919-3937).
cgtggttcgctgtgataaa

SEQ ID NO: 321068 - DNA, 19 bp, Homo sapiens
  siRNA target sequence for DOCK9 (NM_015296.1,3922-3940).
ggttcgctgtgataaactt

SEQ ID NO: 321069 - DNA, 19 bp, Homo sapiens
  siRNA target sequence for DOCK9 (NM_015296.1,3938-3956).
cttgaccagtctgagatta

SEQ ID NO: 321070 - DNA, 19 bp, Homo sapiens
  siRNA target sequence for DOCK9 (NM_015296.1,3970-3988).
gtgtttcctctacatctta

SEQ ID NO: 321071 - DNA, 19 bp, Homo sapiens
  siRNA target sequence for DOCK9 (NM_015296.1,3993-4011).
gcatgtctgatgatgcttt

SEQ ID NO: 321072 - DNA, 19 bp, Homo sapiens
  siRNA target sequence for DOCK9 (NM_015296.1,3997-4015).
gtctgatgatgctttgttt

SEQ ID NO: 321073 - DNA, 19 bp, Homo sapiens
  siRNA target sequence for DOCK9 (NM_015296.1,4163-4181).
gataactctctcactttta

SEQ ID NO: 321074 - DNA, 19 bp, Homo sapiens
  siRNA target sequence for DOCK9 (NM_015296.1,4195-4213).
ccactcggacgcagatgtt

SEQ ID NO: 321075 - DNA, 19 bp, Homo sapiens
  siRNA target sequence for DOCK9 (NM_015296.1,4229-4247).
cttgaagccaacattgcta

SEQ ID NO: 321076 - DNA, 19 bp, Homo sapiens
  siRNA target sequence for DOCK9 (NM_015296.1,4266-4284).
ctctggacacgctttctct

SEQ ID NO: 321077 - DNA, 19 bp, Homo sapiens
  siRNA target sequence for DOCK9 (NM_015296.1,4268-4286).
ctggacacgctttctctat

SEQ ID NO: 321078 - DNA, 19 bp, Homo sapiens
  siRNA target sequence for DOCK9 (NM_015296.1,4270-4288).
ggacacgctttctctattt

SEQ ID NO: 321079 - DNA, 19 bp, Homo sapiens
  siRNA target sequence for DOCK9 (NM_015296.1,4271-4289).
gacacgctttctctattta

SEQ ID NO: 321080 - DNA, 19 bp, Homo sapiens
  siRNA target sequence for DOCK9 (NM_015296.1,4273-4291).
cacgctttctctatttaca

SEQ ID NO: 321081 - DNA, 19 bp, Homo sapiens
  siRNA target sequence for DOCK9 (NM_015296.1,4315-4333).
ggccgaccatggacataat

SEQ ID NO: 321082 - DNA, 19 bp, Homo sapiens
  siRNA target sequence for DOCK9 (NM_015296.1,4326-4344).
gacataatcctctcatgaa

SEQ ID NO: 321083 - DNA, 19 bp, Homo sapiens
  siRNA target sequence for DOCK9 (NM_015296.1,4376-4394).
caaaaacatcagtctgaaa

SEQ ID NO: 321084 - DNA, 19 bp, Homo sapiens
  siRNA target sequence for DOCK9 (NM_015296.1,4385-4403).
cagtctgaaacggctttaa

SEQ ID NO: 321085 - DNA, 19 bp, Homo sapiens
  siRNA target sequence for DOCK9 (NM_015296.1,4387-4405).
gtctgaaacggctttaaaa

SEQ ID NO: 321086 - DNA, 19 bp, Homo sapiens
  siRNA target sequence for DOCK9 (NM_015296.1,4409-4427).
gtcttcactgccttaaggt

SEQ ID NO: 321087 - DNA, 19 bp, Homo sapiens
  siRNA target sequence for DOCK9 (NM_015296.1,4416-4434).
ctgccttaaggtccttaat

SEQ ID NO: 321088 - DNA, 19 bp, Homo sapiens
  siRNA target sequence for DOCK9 (NM_015296.1,4485-4503).
ctctgtgttacgagattct

SEQ ID NO: 321089 - DNA, 19 bp, Homo sapiens
  siRNA target sequence for DOCK9 (NM_015296.1,4487-4505).
ctgtgttacgagattctca

SEQ ID NO: 321090 - DNA, 19 bp, Homo sapiens
  siRNA target sequence for DOCK9 (NM_015296.1,4583-4601).
gattacactggaaagaagt

SEQ ID NO: 321091 - DNA, 19 bp, Homo sapiens
  siRNA target sequence for DOCK9 (NM_015296.1,4614-4632).
cacatttgcaagtcatcat

SEQ ID NO: 321092 - DNA, 19 bp, Homo sapiens
  siRNA target sequence for DOCK9 (NM_015296.1,4694-4712).
ctgtccatcatcaacaact

SEQ ID NO: 321093 - DNA, 19 bp, Homo sapiens
  siRNA target sequence for DOCK9 (NM_015296.1,4717-4735).
caacagtgaccggcttatt

SEQ ID NO: 321094 - DNA, 19 bp, Homo sapiens
  siRNA target sequence for DOCK9 (NM_015296.1,4722-4740).
gtgaccggcttattaagca

SEQ ID NO: 321095 - DNA, 19 bp, Homo sapiens
  siRNA target sequence for DOCK9 (NM_015296.1,4779-4797).
ggatacgcacggtgctaat

SEQ ID NO: 321096 - DNA, 19 bp, Homo sapiens
  siRNA target sequence for DOCK9 (NM_015296.1,4983-5001).
ccctagtggcagaatatct

SEQ ID NO: 321097 - DNA, 19 bp, Homo sapiens
  siRNA target sequence for DOCK9 (NM_015296.1,4985-5003).
ctagtggcagaatatctca

SEQ ID NO: 321098 - DNA, 19 bp, Homo sapiens
  siRNA target sequence for DOCK9 (NM_015296.1,5077-5095).
gggaggcgtgtttagacaa

SEQ ID NO: 321099 - DNA, 19 bp, Homo sapiens
  siRNA target sequence for DOCK9 (NM_015296.1,5112-5130).
gggtcattaccccaaacat

SEQ ID NO: 321100 - DNA, 19 bp, Homo sapiens
  siRNA target sequence for DOCK9 (NM_015296.1,5258-5276).
gccgacatctacaaactta

SEQ ID NO: 321101 - DNA, 19 bp, Homo sapiens
  siRNA target sequence for DOCK9 (NM_015296.1,5259-5277).
ccgacatctacaaacttat

SEQ ID NO: 321102 - DNA, 19 bp, Homo sapiens
  siRNA target sequence for DOCK9 (NM_015296.1,5489-5507).
ggaaaggagtatatttaca

SEQ ID NO: 321103 - DNA, 19 bp, Homo sapiens
  siRNA target sequence for DOCK9 (NM_015296.1,5521-5539).
cacaccgctgtcggaaatt

SEQ ID NO: 321104 - DNA, 19 bp, Homo sapiens
  siRNA target sequence for DOCK9 (NM_015296.1,5526-5544).
cgctgtcggaaatttctca

SEQ ID NO: 321105 - DNA, 19 bp, Homo sapiens
  siRNA target sequence for DOCK9 (NM_015296.1,5560-5578).
gtactcggataaatttggt

SEQ ID NO: 321106 - DNA, 19 bp, Homo sapiens
  siRNA target sequence for DOCK9 (NM_015296.1,5621-5639).
cctaaggatctggattcta

SEQ ID NO: 321107 - DNA, 19 bp, Homo sapiens
  siRNA target sequence for DOCK9 (NM_015296.1,5671-5689).
ccccttctttgacgaaaaa

SEQ ID NO: 321108 - DNA, 19 bp, Homo sapiens
  siRNA target sequence for DOCK9 (NM_015296.1,5673-5691).
ccttctttgacgaaaaaga

SEQ ID NO: 321109 - DNA, 19 bp, Homo sapiens
  siRNA target sequence for DOCK9 (NM_015296.1,5906-5924).
gccattgacgagatgagta

SEQ ID NO: 321110 - DNA, 19 bp, Homo sapiens
  siRNA target sequence for DOCK9 (NM_015296.1,5907-5925).
ccattgacgagatgagtaa

SEQ ID NO: 321111 - DNA, 19 bp, Homo sapiens
  siRNA target sequence for DOCK9 (NM_015296.1,5960-5978).
gccgaggtggacatgatca

SEQ ID NO: 321112 - DNA, 19 bp, Homo sapiens
  siRNA target sequence for DOCK9 (NM_015296.1,5962-5980).
cgaggtggacatgatcaaa

SEQ ID NO: 321113 - DNA, 19 bp, Homo sapiens
  siRNA target sequence for DOCK9 (NM_015296.1,6042-6060).
cgcgagctttcttagatga

SEQ ID NO: 321114 - DNA, 19 bp, Homo sapiens
  siRNA target sequence for DOCK9 (NM_015296.1,6043-6061).
gcgagctttcttagatgat

SEQ ID NO: 321115 - DNA, 19 bp, Homo sapiens
  siRNA target sequence for DOCK9 (NM_015296.1,6044-6062).
cgagctttcttagatgata

SEQ ID NO: 321116 - DNA, 19 bp, Homo sapiens
  siRNA target sequence for DOCK9 (NM_015296.1,6047-6065).
gctttcttagatgatacaa

SEQ ID NO: 321117 - DNA, 19 bp, Homo sapiens
  siRNA target sequence for DOCK9 (NM_015296.1,6048-6066).
ctttcttagatgatacaaa

SEQ ID NO: 321118 - DNA, 19 bp, Homo sapiens
  siRNA target sequence for DOCK9 (NM_015296.1,6073-6091).
gcgatatcctgacaataaa

SEQ ID NO: 321119 - DNA, 19 bp, Homo sapiens
  siRNA target sequence for DOCK9 (NM_015296.1,6151-6169).
ggtaaacgaacgtctgatt

SEQ ID NO: 321120 - DNA, 19 bp, Homo sapiens
  siRNA target sequence for DOCK9 (NM_015296.1,6152-6170).
gtaaacgaacgtctgatta

SEQ ID NO: 321121 - DNA, 19 bp, Homo sapiens
  siRNA target sequence for DOCK9 (NM_015296.1,6157-6175).
cgaacgtctgattaaagaa

SEQ ID NO: 321122 - DNA, 19 bp, Homo sapiens
  siRNA target sequence for DOCK9 (NM_015296.1,6182-6200).
ctcgagtatcaggaagaaa

SEQ ID NO: 321123 - DNA, 19 bp, Homo sapiens
  siRNA target sequence for HCP5 (NM_006674.1,442-460).
cctggaaatgcgactgaaa

SEQ ID NO: 321124 - DNA, 19 bp, Homo sapiens
  siRNA target sequence for HCP5 (NM_006674.1,443-461).
ctggaaatgcgactgaaat

SEQ ID NO: 321125 - DNA, 19 bp, Homo sapiens
  siRNA target sequence for HCP5 (NM_006674.1,632-650).
cctggggatcaggatctat

SEQ ID NO: 321126 - DNA, 19 bp, Homo sapiens
  siRNA target sequence for MGC10471 (NM_030818.2,228-246).
ggaaaggggtcaacaagta

SEQ ID NO: 321127 - DNA, 19 bp, Homo sapiens
  siRNA target sequence for MGC10471 (NM_030818.2,346-364).
cctcatcatccgattcgaa

SEQ ID NO: 321128 - DNA, 19 bp, Homo sapiens
  siRNA target sequence for MGC10471 (NM_030818.2,356-374).
cgattcgaaatgccatata

SEQ ID NO: 321129 - DNA, 19 bp, Homo sapiens
  siRNA target sequence for MGC10471 (NM_030818.2,408-426).
gcatgggtgttcgttacaa

SEQ ID NO: 321130 - DNA, 19 bp, Homo sapiens
  siRNA target sequence for MGC10471 (NM_030818.2,409-427).
catgggtgttcgttacaat

SEQ ID NO: 321131 - DNA, 19 bp, Homo sapiens
  siRNA target sequence for MGC10471 (NM_030818.2,582-600).
gggacatggcggacaatga

SEQ ID NO: 321132 - DNA, 19 bp, Homo sapiens
  siRNA target sequence for MGC10471 (NM_030818.2,1220-1238).
gactgtcctccggaaacaa

SEQ ID NO: 321133 - DNA, 19 bp, Homo sapiens
  siRNA target sequence for MGC10471 (NM_030818.2,1222-1240).
ctgtcctccggaaacaact

SEQ ID NO: 321134 - DNA, 19 bp, Homo sapiens
  siRNA target sequence for NDP52 (NM_005831.3,159-177).
gtgtggagaagttctacat

SEQ ID NO: 321135 - DNA, 19 bp, Homo sapiens
  siRNA target sequence for NDP52 (NM_005831.3,186-204).
gggacgtcacatgtcatta

SEQ ID NO: 321136 - DNA, 19 bp, Homo sapiens
  siRNA target sequence for NDP52 (NM_005831.3,187-205).
ggacgtcacatgtcattat

SEQ ID NO: 321137 - DNA, 19 bp, Homo sapiens
  siRNA target sequence for NDP52 (NM_005831.3,188-206).
gacgtcacatgtcattata

SEQ ID NO: 321138 - DNA, 19 bp, Homo sapiens
  siRNA target sequence for NDP52 (NM_005831.3,223-241).
catccctcgtcgaaaggat

SEQ ID NO: 321139 - DNA, 19 bp, Homo sapiens
  siRNA target sequence for NDP52 (NM_005831.3,228-246).
ctcgtcgaaaggattggat

SEQ ID NO: 321140 - DNA, 19 bp, Homo sapiens
  siRNA target sequence for NDP52 (NM_005831.3,238-256).
ggattggattggcatcttt

SEQ ID NO: 321141 - DNA, 19 bp, Homo sapiens
  siRNA target sequence for NDP52 (NM_005831.3,268-286).
gaagacaacccgtgagtat

SEQ ID NO: 321142 - DNA, 19 bp, Homo sapiens
  siRNA target sequence for NDP52 (NM_005831.3,291-309).
ccttcatgtgggttacttt

SEQ ID NO: 321143 - DNA, 19 bp, Homo sapiens
  siRNA target sequence for NDP52 (NM_005831.3,306-324).
ctttgcccattgacctaaa

SEQ ID NO: 321144 - DNA, 19 bp, Homo sapiens
  siRNA target sequence for NDP52 (NM_005831.3,311-329).
cccattgacctaaacaaca

SEQ ID NO: 321145 - DNA, 19 bp, Homo sapiens
  siRNA target sequence for NDP52 (NM_005831.3,347-365).
gaagtccaattcaaagctt

SEQ ID NO: 321146 - DNA, 19 bp, Homo sapiens
  siRNA target sequence for NDP52 (NM_005831.3,427-445).
ccggggagcaagtattcct

SEQ ID NO: 321147 - DNA, 19 bp, Homo sapiens
  siRNA target sequence for NDP52 (NM_005831.3,428-446).
cggggagcaagtattcctt

SEQ ID NO: 321148 - DNA, 19 bp, Homo sapiens
  siRNA target sequence for NDP52 (NM_005831.3,429-447).
ggggagcaagtattccttt

SEQ ID NO: 321149 - DNA, 19 bp, Homo sapiens
  siRNA target sequence for NDP52 (NM_005831.3,434-452).
gcaagtattcctttccaat

SEQ ID NO: 321150 - DNA, 19 bp, Homo sapiens
  siRNA target sequence for NDP52 (NM_005831.3,599-617).
caggctgagctccaaaaga

SEQ ID NO: 321151 - DNA, 19 bp, Homo sapiens
  siRNA target sequence for NDP52 (NM_005831.3,699-717).
cagagctgcttcaactgaa

SEQ ID NO: 321152 - DNA, 19 bp, Homo sapiens
  siRNA target sequence for NDP52 (NM_005831.3,719-737).
gaacaaaaccagaagatgt

SEQ ID NO: 321153 - DNA, 19 bp, Homo sapiens
  siRNA target sequence for NDP52 (NM_005831.3,781-799).
ggcccagctgtcaactcaa

SEQ ID NO: 321154 - DNA, 19 bp, Homo sapiens
  siRNA target sequence for NDP52 (NM_005831.3,821-839).
gttcagggagatcaagata

SEQ ID NO: 321155 - DNA, 19 bp, Homo sapiens
  siRNA target sequence for NDP52 (NM_005831.3,880-898).
cctctttctcagtttaact

SEQ ID NO: 321156 - DNA, 19 bp, Homo sapiens
  siRNA target sequence for NDP52 (NM_005831.3,960-978).
ctactgcaatgaagaaaca

SEQ ID NO: 321157 - DNA, 19 bp, Homo sapiens
  siRNA target sequence for NDP52 (NM_005831.3,1017-1035).
gactgagtgagaacgaaat

SEQ ID NO: 321158 - DNA, 19 bp, Homo sapiens
  siRNA target sequence for NDP52 (NM_005831.3,1019-1037).
ctgagtgagaacgaaatta

SEQ ID NO: 321159 - DNA, 19 bp, Homo sapiens
  siRNA target sequence for NDP52 (NM_005831.3,1030-1048).
cgaaattatatgtaatgct

SEQ ID NO: 321160 - DNA, 19 bp, Homo sapiens
  siRNA target sequence for NDP52 (NM_005831.3,1107-1125).
gcagattgctcagttacat

SEQ ID NO: 321161 - DNA, 19 bp, Homo sapiens
  siRNA target sequence for NDP52 (NM_005831.3,1119-1137).
gttacatgggtctggattt

SEQ ID NO: 321162 - DNA, 19 bp, Homo sapiens
  siRNA target sequence for NDP52 (NM_005831.3,1123-1141).
catgggtctggattttaat

SEQ ID NO: 321163 - DNA, 19 bp, Homo sapiens
  siRNA target sequence for NDP52 (NM_005831.3,1193-1211).
ccaggacttgcctatggaa

SEQ ID NO: 321164 - DNA, 19 bp, Homo sapiens
  siRNA target sequence for NDP52 (NM_005831.3,1194-1212).
caggacttgcctatggaaa

SEQ ID NO: 321165 - DNA, 19 bp, Homo sapiens
  siRNA target sequence for NDP52 (NM_005831.3,1202-1220).
gcctatggaaacccatatt

SEQ ID NO: 321166 - DNA, 19 bp, Homo sapiens
  siRNA target sequence for NDP52 (NM_005831.3,1213-1231).
cccatattctggtatccaa

SEQ ID NO: 321167 - DNA, 19 bp, Homo sapiens
  siRNA target sequence for NDP52 (NM_005831.3,1279-1297).
caaagcagatgatatttgt

SEQ ID NO: 321168 - DNA, 19 bp, Homo sapiens
  siRNA target sequence for NDP52 (NM_005831.3,1344-1362).
gtccaatttgtgacaagat

SEQ ID NO: 321169 - DNA, 19 bp, Homo sapiens
  siRNA target sequence for NDP52 (NM_005831.3,1347-1365).
caatttgtgacaagatctt

SEQ ID NO: 321170 - DNA, 19 bp, Homo sapiens
  siRNA target sequence for ALS2CR12 (NM_139163.1,56-74).
cccaaccctctcatctact

SEQ ID NO: 321171 - DNA, 19 bp, Homo sapiens
  siRNA target sequence for ALS2CR12 (NM_139163.1,101-119).
ggaccacggaagctaatca

SEQ ID NO: 321172 - DNA, 19 bp, Homo sapiens
  siRNA target sequence for ALS2CR12 (NM_139163.1,102-120).
gaccacggaagctaatcaa

SEQ ID NO: 321173 - DNA, 19 bp, Homo sapiens
  siRNA target sequence for ALS2CR12 (NM_139163.1,104-122).
ccacggaagctaatcaaga

SEQ ID NO: 321174 - DNA, 19 bp, Homo sapiens
  siRNA target sequence for ALS2CR12 (NM_139163.1,128-146).
caactaccacgcaagaact

SEQ ID NO: 321175 - DNA, 19 bp, Homo sapiens
  siRNA target sequence for ALS2CR12 (NM_139163.1,179-197).
ccagctccaaaaaatcaca

SEQ ID NO: 321176 - DNA, 19 bp, Homo sapiens
  siRNA target sequence for ALS2CR12 (NM_139163.1,182-200).
gctccaaaaaatcacaatt

SEQ ID NO: 321177 - DNA, 19 bp, Homo sapiens
  siRNA target sequence for ALS2CR12 (NM_139163.1,252-270).
caaggcaagaagagactaa

SEQ ID NO: 321178 - DNA, 19 bp, Homo sapiens
  siRNA target sequence for ALS2CR12 (NM_139163.1,260-278).
gaagagactaataaatcat

SEQ ID NO: 321179 - DNA, 19 bp, Homo sapiens
  siRNA target sequence for ALS2CR12 (NM_139163.1,320-338).
cggaatcgggaacagattt

SEQ ID NO: 321180 - DNA, 19 bp, Homo sapiens
  siRNA target sequence for ALS2CR12 (NM_139163.1,322-340).
gaatcgggaacagatttct

SEQ ID NO: 321181 - DNA, 19 bp, Homo sapiens
  siRNA target sequence for ALS2CR12 (NM_139163.1,394-412).
cccggacaaaggcagattt

SEQ ID NO: 321182 - DNA, 19 bp, Homo sapiens
  siRNA target sequence for ALS2CR12 (NM_139163.1,395-413).
ccggacaaaggcagatttt

SEQ ID NO: 321183 - DNA, 19 bp, Homo sapiens
  siRNA target sequence for ALS2CR12 (NM_139163.1,434-452).
gacctagaagagcaaatct

SEQ ID NO: 321184 - DNA, 19 bp, Homo sapiens
  siRNA target sequence for ALS2CR12 (NM_139163.1,457-475).
gctgacagcaataattgaa

SEQ ID NO: 321185 - DNA, 19 bp, Homo sapiens
  siRNA target sequence for ALS2CR12 (NM_139163.1,511-529).
gctctccagtgaaatggat

SEQ ID NO: 321186 - DNA, 19 bp, Homo sapiens
  siRNA target sequence for ALS2CR12 (NM_139163.1,606-624).
gtgagttggagaacaacta

SEQ ID NO: 321187 - DNA, 19 bp, Homo sapiens
  siRNA target sequence for ALS2CR12 (NM_139163.1,714-732).
gtacgtatcaggacagtat

SEQ ID NO: 321188 - DNA, 19 bp, Homo sapiens
  siRNA target sequence for ALS2CR12 (NM_139163.1,717-735).
cgtatcaggacagtattta

SEQ ID NO: 321189 - DNA, 19 bp, Homo sapiens
  siRNA target sequence for ALS2CR12 (NM_139163.1,718-736).
gtatcaggacagtatttat

SEQ ID NO: 321190 - DNA, 19 bp, Homo sapiens
  siRNA target sequence for ALS2CR12 (NM_139163.1,790-808).
gaagttcgagcgagaaaat

SEQ ID NO: 321191 - DNA, 19 bp, Homo sapiens
  siRNA target sequence for ALS2CR12 (NM_139163.1,832-850).
gatgaccaaaaaattcgaa

SEQ ID NO: 321192 - DNA, 19 bp, Homo sapiens
  siRNA target sequence for ALS2CR12 (NM_139163.1,951-969).
gtgacaccttgcaattaga

SEQ ID NO: 321193 - DNA, 19 bp, Homo sapiens
  siRNA target sequence for ALS2CR12 (NM_139163.1,997-1015).
ctggagaagagaccaaata

SEQ ID NO: 321194 - DNA, 19 bp, Homo sapiens
  siRNA target sequence for ALS2CR12 (NM_139163.1,1097-1115).
ctagagtcactgaacacaa

SEQ ID NO: 321195 - DNA, 19 bp, Homo sapiens
  siRNA target sequence for ALS2CR12 (NM_139163.1,1108-1126).
gaacacaaacctctactat

SEQ ID NO: 321196 - DNA, 19 bp, Homo sapiens
  siRNA target sequence for ALS2CR12 (NM_139163.1,1239-1257).
cggaagagaacattcatct

SEQ ID NO: 321197 - DNA, 19 bp, Homo sapiens
  siRNA target sequence for ALS2CR12 (NM_139163.1,1253-1271).
catctgaagcaaaagataa

SEQ ID NO: 321198 - DNA, 19 bp, Homo sapiens
  siRNA target sequence for ALS2CR12 (NM_139163.1,1307-1325).
gggagattggcctctatta

SEQ ID NO: 321199 - DNA, 19 bp, Homo sapiens
  siRNA target sequence for ANGPTL3 (NM_014495.1,55-73).
gttcctctagttatttcct

SEQ ID NO: 321200 - DNA, 19 bp, Homo sapiens
  siRNA target sequence for ANGPTL3 (NM_014495.1,82-100).
gatcaagacaattcatcat

SEQ ID NO: 321201 - DNA, 19 bp, Homo sapiens
  siRNA target sequence for ANGPTL3 (NM_014495.1,88-106).
gacaattcatcatttgatt

SEQ ID NO: 321202 - DNA, 19 bp, Homo sapiens
  siRNA target sequence for ANGPTL3 (NM_014495.1,136-154).
gctatgttagacgatgtaa

SEQ ID NO: 321203 - DNA, 19 bp, Homo sapiens
  siRNA target sequence for ANGPTL3 (NM_014495.1,137-155).
ctatgttagacgatgtaaa

SEQ ID NO: 321204 - DNA, 19 bp, Homo sapiens
  siRNA target sequence for ANGPTL3 (NM_014495.1,141-159).
gttagacgatgtaaaaatt

SEQ ID NO: 321205 - DNA, 19 bp, Homo sapiens
  siRNA target sequence for ANGPTL3 (NM_014495.1,180-198).
gttgggacatggtcttaaa

SEQ ID NO: 321206 - DNA, 19 bp, Homo sapiens
  siRNA target sequence for ANGPTL3 (NM_014495.1,184-202).
ggacatggtcttaaagact

SEQ ID NO: 321207 - DNA, 19 bp, Homo sapiens
  siRNA target sequence for ANGPTL3 (NM_014495.1,213-231).
gacgaagggccaaattaat

SEQ ID NO: 321208 - DNA, 19 bp, Homo sapiens
  siRNA target sequence for ANGPTL3 (NM_014495.1,215-233).
cgaagggccaaattaatga

SEQ ID NO: 321209 - DNA, 19 bp, Homo sapiens
  siRNA target sequence for ANGPTL3 (NM_014495.1,219-237).
gggccaaattaatgacata

SEQ ID NO: 321210 - DNA, 19 bp, Homo sapiens
  siRNA target sequence for ANGPTL3 (NM_014495.1,323-341).
gaagaactacatataaact

SEQ ID NO: 321211 - DNA, 19 bp, Homo sapiens
  siRNA target sequence for ANGPTL3 (NM_014495.1,451-469).
gagcaactaactaacttaa

SEQ ID NO: 321212 - DNA, 19 bp, Homo sapiens
  siRNA target sequence for ANGPTL3 (NM_014495.1,499-517).
ccagaagtaacttcactta

SEQ ID NO: 321213 - DNA, 19 bp, Homo sapiens
  siRNA target sequence for ANGPTL3 (NM_014495.1,500-518).
cagaagtaacttcacttaa

SEQ ID NO: 321214 - DNA, 19 bp, Homo sapiens
  siRNA target sequence for ANGPTL3 (NM_014495.1,564-582).
gaccgtggaagaccaatat

SEQ ID NO: 321215 - DNA, 19 bp, Homo sapiens
  siRNA target sequence for ANGPTL3 (NM_014495.1,566-584).
ccgtggaagaccaatataa

SEQ ID NO: 321216 - DNA, 19 bp, Homo sapiens
  siRNA target sequence for ANGPTL3 (NM_014495.1,567-585).
cgtggaagaccaatataaa

SEQ ID NO: 321217 - DNA, 19 bp, Homo sapiens
  siRNA target sequence for ANGPTL3 (NM_014495.1,630-648).
gctcagaaggactagtatt

SEQ ID NO: 321218 - DNA, 19 bp, Homo sapiens
  siRNA target sequence for ANGPTL3 (NM_014495.1,649-667).
caagaacccacagaaattt

SEQ ID NO: 321219 - DNA, 19 bp, Homo sapiens
  siRNA target sequence for ANGPTL3 (NM_014495.1,819-837).
caactctcaagtttttcat

SEQ ID NO: 321220 - DNA, 19 bp, Homo sapiens
  siRNA target sequence for ANGPTL3 (NM_014495.1,859-877).
ggtagtccatggacattaa

SEQ ID NO: 321221 - DNA, 19 bp, Homo sapiens
  siRNA target sequence for ANGPTL3 (NM_014495.1,860-878).
gtagtccatggacattaat

SEQ ID NO: 321222 - DNA, 19 bp, Homo sapiens
  siRNA target sequence for ANGPTL3 (NM_014495.1,866-884).
catggacattaattcaaca

SEQ ID NO: 321223 - DNA, 19 bp, Homo sapiens
  siRNA target sequence for ANGPTL3 (NM_014495.1,872-890).
cattaattcaacatcgaat

SEQ ID NO: 321224 - DNA, 19 bp, Homo sapiens
  siRNA target sequence for ANGPTL3 (NM_014495.1,886-904).
cgaatagatggatcacaaa

SEQ ID NO: 321225 - DNA, 19 bp, Homo sapiens
  siRNA target sequence for ANGPTL3 (NM_014495.1,913-931).
gaaacgtgggagaactaca

SEQ ID NO: 321226 - DNA, 19 bp, Homo sapiens
  siRNA target sequence for ANGPTL3 (NM_014495.1,917-935).
cgtgggagaactacaaata

SEQ ID NO: 321227 - DNA, 19 bp, Homo sapiens
  siRNA target sequence for ANGPTL3 (NM_014495.1,944-962).
ggaggcttgatggagaatt

SEQ ID NO: 321228 - DNA, 19 bp, Homo sapiens
  siRNA target sequence for ANGPTL3 (NM_014495.1,945-963).
gaggcttgatggagaattt

SEQ ID NO: 321229 - DNA, 19 bp, Homo sapiens
  siRNA target sequence for ANGPTL3 (NM_014495.1,949-967).
cttgatggagaattttggt

SEQ ID NO: 321230 - DNA, 19 bp, Homo sapiens
  siRNA target sequence for ANGPTL3 (NM_014495.1,966-984).
gttgggcctagagaagata

SEQ ID NO: 321231 - DNA, 19 bp, Homo sapiens
  siRNA target sequence for ANGPTL3 (NM_014495.1,1091-1109).
ccaactatacgctacatct

SEQ ID NO: 321232 - DNA, 19 bp, Homo sapiens
  siRNA target sequence for ANGPTL3 (NM_014495.1,1092-1110).
caactatacgctacatcta

SEQ ID NO: 321233 - DNA, 19 bp, Homo sapiens
  siRNA target sequence for ANGPTL3 (NM_014495.1,1095-1113).
ctatacgctacatctagtt

SEQ ID NO: 321234 - DNA, 19 bp, Homo sapiens
  siRNA target sequence for ANGPTL3 (NM_014495.1,1139-1157).
caatcccggaaaacaaaga

SEQ ID NO: 321235 - DNA, 19 bp, Homo sapiens
  siRNA target sequence for ANGPTL3 (NM_014495.1,1186-1204).
gcaaaaggacacttcaact

SEQ ID NO: 321236 - DNA, 19 bp, Homo sapiens
  siRNA target sequence for ANGPTL3 (NM_014495.1,1226-1244).
gctggtggtggcatgatga

SEQ ID NO: 321237 - DNA, 19 bp, Homo sapiens
  siRNA target sequence for ANGPTL3 (NM_014495.1,1339-1357).
ggaaggttatactctataa

SEQ ID NO: 321238 - DNA, 19 bp, Homo sapiens
  siRNA target sequence for ANGPTL3 (NM_014495.1,1371-1389).
gttgatccatccaacagat

SEQ ID NO: 321239 - DNA, 19 bp, Homo sapiens
  siRNA target sequence for ANGPTL3 (NM_014495.1,1374-1392).
gatccatccaacagattca

SEQ ID NO: 321240 - DNA, 19 bp, Homo sapiens
  siRNA target sequence for ANGPTL4 (NM_016109.2,302-320).
cgtcctgggacgagatgaa

SEQ ID NO: 321241 - DNA, 19 bp, Homo sapiens
  siRNA target sequence for ANGPTL4 (NM_016109.2,536-554).
gcaggatccagcaactctt

SEQ ID NO: 321242 - DNA, 19 bp, Homo sapiens
  siRNA target sequence for ANGPTL4 (NM_016109.2,712-730).
gacccggctcacaatgtca

SEQ ID NO: 321243 - DNA, 19 bp, Homo sapiens
  siRNA target sequence for ANGPTL4 (NM_016109.2,814-832).
caggggtctccgccatttt

SEQ ID NO: 321244 - DNA, 19 bp, Homo sapiens
  siRNA target sequence for ANGPTL4 (NM_016109.2,818-836).
ggtctccgccatttttggt

SEQ ID NO: 321245 - DNA, 19 bp, Homo sapiens
  siRNA target sequence for ANGPTL4 (NM_016109.2,1198-1216).
ctccgcagggacaagaact

SEQ ID NO: 321246 - DNA, 19 bp, Homo sapiens
  siRNA target sequence for ANGPTL4 (NM_016109.2,1315-1333).
cttaagaagggaatcttct

SEQ ID NO: 321247 - DNA, 19 bp, Homo sapiens
  siRNA target sequence for BICD2 (NM_015250.1,380-398).
cctccaaggagcagtacta

SEQ ID NO: 321248 - DNA, 19 bp, Homo sapiens
  siRNA target sequence for BICD2 (NM_015250.1,553-571).
gacatcaaggagtacaaat

SEQ ID NO: 321249 - DNA, 19 bp, Homo sapiens
  siRNA target sequence for BICD2 (NM_015250.1,677-695).
gcctcaagcatgagatcaa

SEQ ID NO: 321250 - DNA, 19 bp, Homo sapiens
  siRNA target sequence for BICD2 (NM_015250.1,805-823).
gagcgcgaacagaagaaca

SEQ ID NO: 321251 - DNA, 19 bp, Homo sapiens
  siRNA target sequence for BICD2 (NM_015250.1,835-853).
gagctgtcacactacatga

SEQ ID NO: 321252 - DNA, 19 bp, Homo sapiens
  siRNA target sequence for BICD2 (NM_015250.1,1218-1236).
gacccgcctcacagagaat

SEQ ID NO: 321253 - DNA, 19 bp, Homo sapiens
  siRNA target sequence for BICD2 (NM_015250.1,1220-1238).
cccgcctcacagagaatct

SEQ ID NO: 321254 - DNA, 19 bp, Homo sapiens
  siRNA target sequence for BICD2 (NM_015250.1,1921-1939).
cgggagcccatgaacatct

SEQ ID NO: 321255 - DNA, 19 bp, Homo sapiens
  siRNA target sequence for BICD2 (NM_015250.1,2221-2239).
gttaccgagaccatgatga

SEQ ID NO: 321256 - DNA, 19 bp, Homo sapiens
  siRNA target sequence for BICD2 (NM_015250.1,2312-2330).
ccaggtgtgacgagtacat

SEQ ID NO: 321257 - DNA, 19 bp, Homo sapiens
  siRNA target sequence for BICD2 (NM_015250.1,2313-2331).
caggtgtgacgagtacatt

SEQ ID NO: 321258 - DNA, 19 bp, Homo sapiens
  siRNA target sequence for BICD2 (NM_015250.1,2316-2334).
gtgtgacgagtacattaca

SEQ ID NO: 321259 - DNA, 19 bp, Homo sapiens
  siRNA target sequence for BICD2 (NM_015250.1,2318-2336).
gtgacgagtacattacaca

SEQ ID NO: 321260 - DNA, 19 bp, Homo sapiens
  siRNA target sequence for C14orf102 (NM_017970.2,300-318).
ggaagcatcagcatcataa

SEQ ID NO: 321261 - DNA, 19 bp, Homo sapiens
  siRNA target sequence for C14orf102 (NM_017970.2,543-561).
ctgcgaactgggagtacaa

SEQ ID NO: 321262 - DNA, 19 bp, Homo sapiens
  siRNA target sequence for C14orf102 (NM_017970.2,545-563).
gcgaactgggagtacaagt

SEQ ID NO: 321263 - DNA, 19 bp, Homo sapiens
  siRNA target sequence for C14orf102 (NM_017970.2,573-591).
gaggggatatagcaagata

SEQ ID NO: 321264 - DNA, 19 bp, Homo sapiens
  siRNA target sequence for C14orf102 (NM_017970.2,575-593).
ggggatatagcaagataca

SEQ ID NO: 321265 - DNA, 19 bp, Homo sapiens
  siRNA target sequence for C14orf102 (NM_017970.2,576-594).
gggatatagcaagatacaa

SEQ ID NO: 321266 - DNA, 19 bp, Homo sapiens
  siRNA target sequence for C14orf102 (NM_017970.2,578-596).
gatatagcaagatacaaga

SEQ ID NO: 321267 - DNA, 19 bp, Homo sapiens
  siRNA target sequence for C14orf102 (NM_017970.2,626-644).
cctaagaagcagtgcatat

SEQ ID NO: 321268 - DNA, 19 bp, Homo sapiens
  siRNA target sequence for C14orf102 (NM_017970.2,688-706).
ggttgaacgctattttact

SEQ ID NO: 321269 - DNA, 19 bp, Homo sapiens
  siRNA target sequence for C14orf102 (NM_017970.2,689-707).
gttgaacgctattttacta

SEQ ID NO: 321270 - DNA, 19 bp, Homo sapiens
  siRNA target sequence for C14orf102 (NM_017970.2,692-710).
gaacgctattttactaaga

SEQ ID NO: 321271 - DNA, 19 bp, Homo sapiens
  siRNA target sequence for C14orf102 (NM_017970.2,695-713).
cgctattttactaagaaga

SEQ ID NO: 321272 - DNA, 19 bp, Homo sapiens
  siRNA target sequence for C14orf102 (NM_017970.2,744-762).
ccattagcagtaaaactga

SEQ ID NO: 321273 - DNA, 19 bp, Homo sapiens
  siRNA target sequence for C14orf102 (NM_017970.2,745-763).
cattagcagtaaaactgaa

SEQ ID NO: 321274 - DNA, 19 bp, Homo sapiens
  siRNA target sequence for C14orf102 (NM_017970.2,812-830).
gatgcggctcctgttacaa

SEQ ID NO: 321275 - DNA, 19 bp, Homo sapiens
  siRNA target sequence for C14orf102 (NM_017970.2,843-861).
ctctggggatttatgatca

SEQ ID NO: 321276 - DNA, 19 bp, Homo sapiens
  siRNA target sequence for C14orf102 (NM_017970.2,1036-1054).
ggacgaggtcatgaaaagt

SEQ ID NO: 321277 - DNA, 19 bp, Homo sapiens
  siRNA target sequence for C14orf102 (NM_017970.2,1221-1239).
cctccactctggtcaaaga

SEQ ID NO: 321278 - DNA, 19 bp, Homo sapiens
  siRNA target sequence for C14orf102 (NM_017970.2,1279-1297).
cctttggcagaaatacctt

SEQ ID NO: 321279 - DNA, 19 bp, Homo sapiens
  siRNA target sequence for C14orf102 (NM_017970.2,1313-1331).
cagtttagtaccttttcga

SEQ ID NO: 321280 - DNA, 19 bp, Homo sapiens
  siRNA target sequence for C14orf102 (NM_017970.2,1315-1333).
gtttagtaccttttcgata

SEQ ID NO: 321281 - DNA, 19 bp, Homo sapiens
  siRNA target sequence for C14orf102 (NM_017970.2,1320-1338).
gtaccttttcgatatcaaa

SEQ ID NO: 321282 - DNA, 19 bp, Homo sapiens
  siRNA target sequence for C14orf102 (NM_017970.2,1324-1342).
cttttcgatatcaaaaatt

SEQ ID NO: 321283 - DNA, 19 bp, Homo sapiens
  siRNA target sequence for C14orf102 (NM_017970.2,1387-1405).
ggacggcagcatcttatct

SEQ ID NO: 321284 - DNA, 19 bp, Homo sapiens
  siRNA target sequence for C14orf102 (NM_017970.2,1490-1508).
gagaaggccatctcattgt

SEQ ID NO: 321285 - DNA, 19 bp, Homo sapiens
  siRNA target sequence for C14orf102 (NM_017970.2,1542-1560).
ccgacagcgtgaaagatct

SEQ ID NO: 321286 - DNA, 19 bp, Homo sapiens
  siRNA target sequence for C14orf102 (NM_017970.2,1552-1570).
gaaagatctgcctaccaaa

SEQ ID NO: 321287 - DNA, 19 bp, Homo sapiens
  siRNA target sequence for C14orf102 (NM_017970.2,1863-1881).
ccgagagacaggtgttgtt

SEQ ID NO: 321288 - DNA, 19 bp, Homo sapiens
  siRNA target sequence for C14orf102 (NM_017970.2,1864-1882).
cgagagacaggtgttgttt

SEQ ID NO: 321289 - DNA, 19 bp, Homo sapiens
  siRNA target sequence for C14orf102 (NM_017970.2,1908-1926).
gactttccagccatgatct

SEQ ID NO: 321290 - DNA, 19 bp, Homo sapiens
  siRNA target sequence for C14orf102 (NM_017970.2,2162-2180).
gagttcatccgcaatgtct

SEQ ID NO: 321291 - DNA, 19 bp, Homo sapiens
  siRNA target sequence for C14orf102 (NM_017970.2,2229-2247).
gcttctcctggttacagta

SEQ ID NO: 321292 - DNA, 19 bp, Homo sapiens
  siRNA target sequence for C14orf102 (NM_017970.2,2268-2286).
ggtgcctgcacactaaaaa

SEQ ID NO: 321293 - DNA, 19 bp, Homo sapiens
  siRNA target sequence for C14orf102 (NM_017970.2,2331-2349).
ccaagaatctccttaagga

SEQ ID NO: 321294 - DNA, 19 bp, Homo sapiens
  siRNA target sequence for C14orf102 (NM_017970.2,2418-2436).
cggaggatgccagaaaagt

SEQ ID NO: 321295 - DNA, 19 bp, Homo sapiens
  siRNA target sequence for C14orf102 (NM_017970.2,2562-2580).
ctcgagctgttcacatatt

SEQ ID NO: 321296 - DNA, 19 bp, Homo sapiens
  siRNA target sequence for C14orf102 (NM_017970.2,2564-2582).
cgagctgttcacatattaa

SEQ ID NO: 321297 - DNA, 19 bp, Homo sapiens
  siRNA target sequence for C14orf102 (NM_017970.2,2567-2585).
gctgttcacatattaacca

SEQ ID NO: 321298 - DNA, 19 bp, Homo sapiens
  siRNA target sequence for C14orf102 (NM_017970.2,2568-2586).
ctgttcacatattaaccaa

SEQ ID NO: 321299 - DNA, 19 bp, Homo sapiens
  siRNA target sequence for C14orf102 (NM_017970.2,2626-2644).
ggtgttggctgttcacatt

SEQ ID NO: 321300 - DNA, 19 bp, Homo sapiens
  siRNA target sequence for C14orf102 (NM_017970.2,2627-2645).
gtgttggctgttcacattt

SEQ ID NO: 321301 - DNA, 19 bp, Homo sapiens
  siRNA target sequence for C14orf102 (NM_017970.2,2796-2814).
ctgctgtgcagatatacga

SEQ ID NO: 321302 - DNA, 19 bp, Homo sapiens
  siRNA target sequence for C14orf102 (NM_017970.2,2812-2830).
cgaacaggtgtttgcaaaa

SEQ ID NO: 321303 - DNA, 19 bp, Homo sapiens
  siRNA target sequence for C14orf102 (NM_017970.2,2987-3005).
gcactctcacaggctttaa

SEQ ID NO: 321304 - DNA, 19 bp, Homo sapiens
  siRNA target sequence for C14orf102 (NM_017970.2,2988-3006).
cactctcacaggctttaaa

SEQ ID NO: 321305 - DNA, 19 bp, Homo sapiens
  siRNA target sequence for C14orf102 (NM_017970.2,2990-3008).
ctctcacaggctttaaagt

SEQ ID NO: 321306 - DNA, 19 bp, Homo sapiens
  siRNA target sequence for C14orf102 (NM_017970.2,2994-3012).
cacaggctttaaagttgta

SEQ ID NO: 321307 - DNA, 19 bp, Homo sapiens
  siRNA target sequence for C14orf102 (NM_017970.2,3033-3051).
ggaggtcctatgtacagat

SEQ ID NO: 321308 - DNA, 19 bp, Homo sapiens
  siRNA target sequence for C14orf102 (NM_017970.2,3034-3052).
gaggtcctatgtacagatt

SEQ ID NO: 321309 - DNA, 19 bp, Homo sapiens
  siRNA target sequence for C14orf102 (NM_017970.2,3036-3054).
ggtcctatgtacagattca

SEQ ID NO: 321310 - DNA, 19 bp, Homo sapiens
  siRNA target sequence for C14orf102 (NM_017970.2,3039-3057).
cctatgtacagattcagaa

SEQ ID NO: 321311 - DNA, 19 bp, Homo sapiens
  siRNA target sequence for C14orf102 (NM_017970.2,3044-3062).
gtacagattcagaataagt

SEQ ID NO: 321312 - DNA, 19 bp, Homo sapiens
  siRNA target sequence for C14orf102 (NM_017970.2,3065-3083).
cacagtgccagcaaaacca

SEQ ID NO: 321313 - DNA, 19 bp, Homo sapiens
  siRNA target sequence for C14orf102 (NM_017970.2,3205-3223).
gatccacgccacaattcct

SEQ ID NO: 321314 - DNA, 19 bp, Homo sapiens
  siRNA target sequence for C14orf102 (NM_017970.2,3222-3240).
ctgagaccggcttaatgca

SEQ ID NO: 321315 - DNA, 19 bp, Homo sapiens
  siRNA target sequence for C14orf102 (NM_017970.2,3319-3337).
gaactttctggtttcctta

SEQ ID NO: 321316 - DNA, 19 bp, Homo sapiens
  siRNA target sequence for C14orf102 (NM_017970.2,3351-3369).
gaagcaaaggtgtattcta

SEQ ID NO: 321317 - DNA, 19 bp, Homo sapiens
  siRNA target sequence for C14orf102 (NM_017970.2,3410-3428).
ctggacgccgtggagtatt

SEQ ID NO: 321318 - DNA, 19 bp, Homo sapiens
  siRNA target sequence for C14orf44 (NM_152445.1,145-163).
ggaggggagccgtcagata

SEQ ID NO: 321319 - DNA, 19 bp, Homo sapiens
  siRNA target sequence for C14orf44 (NM_152445.1,146-164).
gaggggagccgtcagatat

SEQ ID NO: 321320 - DNA, 19 bp, Homo sapiens
  siRNA target sequence for C14orf44 (NM_152445.1,148-166).
ggggagccgtcagatattt

SEQ ID NO: 321321 - DNA, 19 bp, Homo sapiens
  siRNA target sequence for C14orf44 (NM_152445.1,210-228).
ccggggatgggctggtttt

SEQ ID NO: 321322 - DNA, 19 bp, Homo sapiens
  siRNA target sequence for C14orf44 (NM_152445.1,290-308).
gactcaactgggagcattt

SEQ ID NO: 321323 - DNA, 19 bp, Homo sapiens
  siRNA target sequence for C14orf44 (NM_152445.1,300-318).
ggagcatttaccagaactt

SEQ ID NO: 321324 - DNA, 19 bp, Homo sapiens
  siRNA target sequence for C14orf44 (NM_152445.1,303-321).
gcatttaccagaacttaca

SEQ ID NO: 321325 - DNA, 19 bp, Homo sapiens
  siRNA target sequence for C14orf44 (NM_152445.1,595-613).
ctcctgggcatcatccatt

SEQ ID NO: 321326 - DNA, 19 bp, Homo sapiens
  siRNA target sequence for C14orf44 (NM_152445.1,598-616).
ctgggcatcatccattact

SEQ ID NO: 321327 - DNA, 19 bp, Homo sapiens
  siRNA target sequence for C14orf44 (NM_152445.1,600-618).
gggcatcatccattactgt

SEQ ID NO: 321328 - DNA, 19 bp, Homo sapiens
  siRNA target sequence for C14orf44 (NM_152445.1,789-807).
ccctctaccaagagatcat

SEQ ID NO: 321329 - DNA, 19 bp, Homo sapiens
  siRNA target sequence for C14orf44 (NM_152445.1,1006-1024).
gccagcccttggggataaa

SEQ ID NO: 321330 - DNA, 19 bp, Homo sapiens
  siRNA target sequence for C14orf44 (NM_152445.1,1034-1052).
gctgagctcttcaggaaaa

SEQ ID NO: 321331 - DNA, 19 bp, Homo sapiens
  siRNA target sequence for C14orf44 (NM_152445.1,1100-1118).
cctatcgcctcctctagta

SEQ ID NO: 321332 - DNA, 19 bp, Homo sapiens
  siRNA target sequence for C14orf44 (NM_152445.1,1101-1119).
ctatcgcctcctctagtaa

SEQ ID NO: 321333 - DNA, 19 bp, Homo sapiens
  siRNA target sequence for C14orf44 (NM_152445.1,1172-1190).
gggtttctgcacactaact

SEQ ID NO: 321334 - DNA, 19 bp, Homo sapiens
  siRNA target sequence for C14orf44 (NM_152445.1,1173-1191).
ggtttctgcacactaactt

SEQ ID NO: 321335 - DNA, 19 bp, Homo sapiens
  siRNA target sequence for C14orf44 (NM_152445.1,1502-1520).
gtcagaagtgcacttgaaa

SEQ ID NO: 321336 - DNA, 19 bp, Homo sapiens
  siRNA target sequence for C14orf44 (NM_152445.1,1528-1546).
caaagcagatgagagtatt

SEQ ID NO: 321337 - DNA, 19 bp, Homo sapiens
  siRNA target sequence for C14orf44 (NM_152445.1,1613-1631).
gccatggatccccataaaa

SEQ ID NO: 321338 - DNA, 19 bp, Homo sapiens
  siRNA target sequence for C14orf44 (NM_152445.1,1670-1688).
cggaacaatgaccgtaaaa

SEQ ID NO: 321339 - DNA, 19 bp, Homo sapiens
  siRNA target sequence for C14orf44 (NM_152445.1,1681-1699).
ccgtaaaagagcgaaagaa

SEQ ID NO: 321340 - DNA, 19 bp, Homo sapiens
  siRNA target sequence for C14orf44 (NM_152445.1,1743-1761).
ggccctatctctttgaaca

SEQ ID NO: 321341 - DNA, 19 bp, Homo sapiens
  siRNA target sequence for C14orf44 (NM_152445.1,1791-1809).
cagaacagtggtatctaga

SEQ ID NO: 321342 - DNA, 19 bp, Homo sapiens
  siRNA target sequence for C14orf44 (NM_152445.1,1835-1853).
gaagactttgtgagaaaca

SEQ ID NO: 321343 - DNA, 19 bp, Homo sapiens
  siRNA target sequence for C14orf44 (NM_152445.1,1909-1927).
caggttccaagaaactaca

SEQ ID NO: 321344 - DNA, 19 bp, Homo sapiens
  siRNA target sequence for C14orf44 (NM_152445.1,1954-1972).
gggtttagaaggatctcta

SEQ ID NO: 321345 - DNA, 19 bp, Homo sapiens
  siRNA target sequence for C20orf11 (NM_017896.2,187-205).
gcagaaaaacccgatgaaa

SEQ ID NO: 321346 - DNA, 19 bp, Homo sapiens
  siRNA target sequence for C20orf11 (NM_017896.2,198-216).
cgatgaaatcacgaaagat

SEQ ID NO: 321347 - DNA, 19 bp, Homo sapiens
  siRNA target sequence for C20orf11 (NM_017896.2,381-399).
caagatccgggagatgata

SEQ ID NO: 321348 - DNA, 19 bp, Homo sapiens
  siRNA target sequence for C20orf11 (NM_017896.2,396-414).
gatactgaaaggtcagatt

SEQ ID NO: 321349 - DNA, 19 bp, Homo sapiens
  siRNA target sequence for C20orf11 (NM_017896.2,418-436).
gaggccatcgccttgatca

SEQ ID NO: 321350 - DNA, 19 bp, Homo sapiens
  siRNA target sequence for C20orf11 (NM_017896.2,464-482).
caaaccggtatctttactt

SEQ ID NO: 321351 - DNA, 19 bp, Homo sapiens
  siRNA target sequence for C20orf11 (NM_017896.2,693-711).
gtggagtgaagttaaccaa

SEQ ID NO: 321352 - DNA, 19 bp, Homo sapiens
  siRNA target sequence for C20orf11 (NM_017896.2,708-726).
ccaagctgtgctagattat

SEQ ID NO: 321353 - DNA, 19 bp, Homo sapiens
  siRNA target sequence for C20orf11 (NM_017896.2,712-730).
gctgtgctagattatgaaa

SEQ ID NO: 321354 - DNA, 19 bp, Homo sapiens
  siRNA target sequence for C20orf11 (NM_017896.2,831-849).
cctcagcaagggtgtgatt

SEQ ID NO: 321355 - DNA, 19 bp, Homo sapiens
  siRNA target sequence for C20orf96 (NM_153269.1,196-214).
gttccaggttccggattat

SEQ ID NO: 321356 - DNA, 19 bp, Homo sapiens
  siRNA target sequence for C20orf96 (NM_153269.1,199-217).
ccaggttccggattatgtt

SEQ ID NO: 321357 - DNA, 19 bp, Homo sapiens
  siRNA target sequence for C20orf96 (NM_153269.1,280-298).
cagccttcatacaagcaaa

SEQ ID NO: 321358 - DNA, 19 bp, Homo sapiens
  siRNA target sequence for C20orf96 (NM_153269.1,284-302).
cttcatacaagcaaaatga

SEQ ID NO: 321359 - DNA, 19 bp, Homo sapiens
  siRNA target sequence for C20orf96 (NM_153269.1,425-443).
gccaaaatctggttaatga

SEQ ID NO: 321360 - DNA, 19 bp, Homo sapiens
  siRNA target sequence for C20orf96 (NM_153269.1,426-444).
ccaaaatctggttaatgaa

SEQ ID NO: 321361 - DNA, 19 bp, Homo sapiens
  siRNA target sequence for C20orf96 (NM_153269.1,777-795).
cttacatggaccatgagta

SEQ ID NO: 321362 - DNA, 19 bp, Homo sapiens
  siRNA target sequence for C20orf96 (NM_153269.1,809-827).
gtccagatctccactctta

SEQ ID NO: 321363 - DNA, 19 bp, Homo sapiens
  siRNA target sequence for C20orf96 (NM_153269.1,831-849).
gccagctgcagcaggttaa

SEQ ID NO: 321364 - DNA, 19 bp, Homo sapiens
  siRNA target sequence for C20orf96 (NM_153269.1,894-912).
gaaaggtcctggaatcctt

SEQ ID NO: 321365 - DNA, 19 bp, Homo sapiens
  siRNA target sequence for C20orf96 (NM_153269.1,1070-1088).
gagaacatgcctgtattaa

SEQ ID NO: 321366 - DNA, 19 bp, Homo sapiens
  siRNA target sequence for C20orf96 (NM_153269.1,1124-1142).
gaaccccgagaggtcatat

SEQ ID NO: 321367 - DNA, 19 bp, Homo sapiens
  siRNA target sequence for C20orf96 (NM_153269.1,1128-1146).
cccgagaggtcatatttga

SEQ ID NO: 321368 - DNA, 19 bp, Homo sapiens
  siRNA target sequence for C20orf96 (NM_153269.1,1176-1194).
ccccagacatggatgtcat

SEQ ID NO: 321369 - DNA, 19 bp, Homo sapiens
  siRNA target sequence for C8orf13 (NM_053279.1,870-888).
gagcatcgatgaagctata

SEQ ID NO: 321370 - DNA, 19 bp, Homo sapiens
  siRNA target sequence for C8orf13 (NM_053279.1,956-974).
gcctgcgtggcgacatcaa

SEQ ID NO: 321371 - DNA, 19 bp, Homo sapiens
  siRNA target sequence for C8orf13 (NM_053279.1,958-976).
ctgcgtggcgacatcaaca

SEQ ID NO: 321372 - DNA, 19 bp, Homo sapiens
  siRNA target sequence for C8orf13 (NM_053279.1,972-990).
caacaagctgaaaatcgaa

SEQ ID NO: 321373 - DNA, 19 bp, Homo sapiens
  siRNA target sequence for C8orf13 (NM_053279.1,1106-1124).
ccacaccactcaagcttat

SEQ ID NO: 321374 - DNA, 19 bp, Homo sapiens
  siRNA target sequence for C8orf13 (NM_053279.1,1107-1125).
cacaccactcaagcttatt

SEQ ID NO: 321375 - DNA, 19 bp, Homo sapiens
  siRNA target sequence for C8orf13 (NM_053279.1,1127-1145).
gcgtgaccaagatgaacat

SEQ ID NO: 321376 - DNA, 19 bp, Homo sapiens
  siRNA target sequence for DACT1 (NM_016651.4,410-428).
ctgtttgaggcgaagagat

SEQ ID NO: 321377 - DNA, 19 bp, Homo sapiens
  siRNA target sequence for DACT1 (NM_016651.4,453-471).
gagcttgacaagcagataa

SEQ ID NO: 321378 - DNA, 19 bp, Homo sapiens
  siRNA target sequence for DACT1 (NM_016651.4,455-473).
gcttgacaagcagataagt

SEQ ID NO: 321379 - DNA, 19 bp, Homo sapiens
  siRNA target sequence for DACT1 (NM_016651.4,576-594).
ctttccaattcctctaact

SEQ ID NO: 321380 - DNA, 19 bp, Homo sapiens
  siRNA target sequence for DACT1 (NM_016651.4,686-704).
caaatctgcagatctcata

SEQ ID NO: 321381 - DNA, 19 bp, Homo sapiens
  siRNA target sequence for DACT1 (NM_016651.4,691-709).
ctgcagatctcataggatt

SEQ ID NO: 321382 - DNA, 19 bp, Homo sapiens
  siRNA target sequence for DACT1 (NM_016651.4,699-717).
ctcataggattgttggaat

SEQ ID NO: 321383 - DNA, 19 bp, Homo sapiens
  siRNA target sequence for DACT1 (NM_016651.4,990-1008).
gagctagatgccgtcaaaa

SEQ ID NO: 321384 - DNA, 19 bp, Homo sapiens
  siRNA target sequence for DACT1 (NM_016651.4,992-1010).
gctagatgccgtcaaaaca

SEQ ID NO: 321385 - DNA, 19 bp, Homo sapiens
  siRNA target sequence for DACT1 (NM_016651.4,1115-1133).
ccctgtaaggaccaacaaa

SEQ ID NO: 321386 - DNA, 19 bp, Homo sapiens
  siRNA target sequence for DACT1 (NM_016651.4,1177-1195).
ggaacgggagcgtttgtgt

SEQ ID NO: 321387 - DNA, 19 bp, Homo sapiens
  siRNA target sequence for DACT1 (NM_016651.4,1222-1240).
gcaacagtgtgaaccttaa

SEQ ID NO: 321388 - DNA, 19 bp, Homo sapiens
  siRNA target sequence for DACT1 (NM_016651.4,1230-1248).
gtgaaccttaagaattcga

SEQ ID NO: 321389 - DNA, 19 bp, Homo sapiens
  siRNA target sequence for DACT1 (NM_016651.4,1232-1250).
gaaccttaagaattcgaaa

SEQ ID NO: 321390 - DNA, 19 bp, Homo sapiens
  siRNA target sequence for DACT1 (NM_016651.4,1263-1281).
ccctctggcgggatacctt

SEQ ID NO: 321391 - DNA, 19 bp, Homo sapiens
  siRNA target sequence for DACT1 (NM_016651.4,1273-1291).
ggataccttctctgaacaa

SEQ ID NO: 321392 - DNA, 19 bp, Homo sapiens
  siRNA target sequence for DACT1 (NM_016651.4,1314-1332).
cagtggtcgaaagaatcaa

SEQ ID NO: 321393 - DNA, 19 bp, Homo sapiens
  siRNA target sequence for DACT1 (NM_016651.4,1336-1354).
ccgaacaagccgaaagcaa

SEQ ID NO: 321394 - DNA, 19 bp, Homo sapiens
  siRNA target sequence for DACT1 (NM_016651.4,1393-1411).
cctccgaccttcagagtaa

SEQ ID NO: 321395 - DNA, 19 bp, Homo sapiens
  siRNA target sequence for DACT1 (NM_016651.4,1552-1570).
cgcaggagaacaaagttgt

SEQ ID NO: 321396 - DNA, 19 bp, Homo sapiens
  siRNA target sequence for DACT1 (NM_016651.4,1566-1584).
gttgtacagcccctgaaaa

SEQ ID NO: 321397 - DNA, 19 bp, Homo sapiens
  siRNA target sequence for DACT1 (NM_016651.4,1722-1740).
ctggtcaaggcccagttta

SEQ ID NO: 321398 - DNA, 19 bp, Homo sapiens
  siRNA target sequence for DACT1 (NM_016651.4,1857-1875).
cccaccgtcagggagaaaa

SEQ ID NO: 321399 - DNA, 19 bp, Homo sapiens
  siRNA target sequence for DACT1 (NM_016651.4,1897-1915).
gtcgcttcccagatgactt

SEQ ID NO: 321400 - DNA, 19 bp, Homo sapiens
  siRNA target sequence for DACT1 (NM_016651.4,2052-2070).
gcggtggtggccaaaccta

SEQ ID NO: 321401 - DNA, 19 bp, Homo sapiens
  siRNA target sequence for DACT1 (NM_016651.4,2053-2071).
cggtggtggccaaacctaa

SEQ ID NO: 321402 - DNA, 19 bp, Homo sapiens
  siRNA target sequence for DACT1 (NM_016651.4,2104-2122).
cctcggccgagatttccta

SEQ ID NO: 321403 - DNA, 19 bp, Homo sapiens
  siRNA target sequence for DACT1 (NM_016651.4,2426-2444).
ccagactctgcccattcaa

SEQ ID NO: 321404 - DNA, 19 bp, Homo sapiens
  siRNA target sequence for DACT1 (NM_016651.4,2476-2494).
ccgcaaaaacctttgtcaa

SEQ ID NO: 321405 - DNA, 19 bp, Homo sapiens
  siRNA target sequence for DACT1 (NM_016651.4,2477-2495).
cgcaaaaacctttgtcaaa

SEQ ID NO: 321406 - DNA, 19 bp, Homo sapiens
  siRNA target sequence for FLJ20366 (NM_017786.1,258-276).
cttctgggcgagaaaggat

SEQ ID NO: 321407 - DNA, 19 bp, Homo sapiens
  siRNA target sequence for FLJ20366 (NM_017786.1,370-388).
gaaggcttcaccagaaaga

SEQ ID NO: 321408 - DNA, 19 bp, Homo sapiens
  siRNA target sequence for FLJ20366 (NM_017786.1,405-423).
ggttggtgaaggaagcatt

SEQ ID NO: 321409 - DNA, 19 bp, Homo sapiens
  siRNA target sequence for FLJ20366 (NM_017786.1,449-467).
caaagtcaggccttgtgaa

SEQ ID NO: 321410 - DNA, 19 bp, Homo sapiens
  siRNA target sequence for FLJ20366 (NM_017786.1,472-490).
ggtagtgaagctgatttta

SEQ ID NO: 321411 - DNA, 19 bp, Homo sapiens
  siRNA target sequence for FLJ20366 (NM_017786.1,518-536).
ccgctcctgaggtccatat

SEQ ID NO: 321412 - DNA, 19 bp, Homo sapiens
  siRNA target sequence for FLJ20366 (NM_017786.1,520-538).
gctcctgaggtccatatgt

SEQ ID NO: 321413 - DNA, 19 bp, Homo sapiens
  siRNA target sequence for FLJ20366 (NM_017786.1,552-570).
caagcggtcttcttcttca

SEQ ID NO: 321414 - DNA, 19 bp, Homo sapiens
  siRNA target sequence for FLJ20366 (NM_017786.1,684-702).
gagccctgtcaatatccat

SEQ ID NO: 321415 - DNA, 19 bp, Homo sapiens
  siRNA target sequence for FLJ20366 (NM_017786.1,795-813).
catgtcttgcggtgaaaat

SEQ ID NO: 321416 - DNA, 19 bp, Homo sapiens
  siRNA target sequence for FLJ20366 (NM_017786.1,798-816).
gtcttgcggtgaaaatcat

SEQ ID NO: 321417 - DNA, 19 bp, Homo sapiens
  siRNA target sequence for FLJ20366 (NM_017786.1,829-847).
ccaaacccagagcagtatt

SEQ ID NO: 321418 - DNA, 19 bp, Homo sapiens
  siRNA target sequence for FLJ20366 (NM_017786.1,830-848).
caaacccagagcagtattt

SEQ ID NO: 321419 - DNA, 19 bp, Homo sapiens
  siRNA target sequence for FLJ20366 (NM_017786.1,877-895).
gtgagacacctcaaaacca

SEQ ID NO: 321420 - DNA, 19 bp, Homo sapiens
  siRNA target sequence for FLJ20366 (NM_017786.1,910-928).
gagcgccgactccatgaaa

SEQ ID NO: 321421 - DNA, 19 bp, Homo sapiens
  siRNA target sequence for FLJ20366 (NM_017786.1,935-953).
gtgaaatcgtggagcttaa

SEQ ID NO: 321422 - DNA, 19 bp, Homo sapiens
  siRNA target sequence for FLJ20366 (NM_017786.1,937-955).
gaaatcgtggagcttaagt

SEQ ID NO: 321423 - DNA, 19 bp, Homo sapiens
  siRNA target sequence for FLJ20366 (NM_017786.1,1011-1029).
ggcccagttggcactcaaa

SEQ ID NO: 321424 - DNA, 19 bp, Homo sapiens
  siRNA target sequence for FLJ20366 (NM_017786.1,1034-1052).
ccaggaaagagattaaaca

SEQ ID NO: 321425 - DNA, 19 bp, Homo sapiens
  siRNA target sequence for FLJ20366 (NM_017786.1,1080-1098).
gagcagcttggctgataaa

SEQ ID NO: 321426 - DNA, 19 bp, Homo sapiens
  siRNA target sequence for FLJ20366 (NM_017786.1,1082-1100).
gcagcttggctgataaaga

SEQ ID NO: 321427 - DNA, 19 bp, Homo sapiens
  siRNA target sequence for FLJ20366 (NM_017786.1,1085-1103).
gcttggctgataaagataa

SEQ ID NO: 321428 - DNA, 19 bp, Homo sapiens
  siRNA target sequence for FLJ20366 (NM_017786.1,1203-1221).
cgaactgtgcctagacttt

SEQ ID NO: 321429 - DNA, 19 bp, Homo sapiens
  siRNA target sequence for FLJ20366 (NM_017786.1,1657-1675).
gccttagtggttgatttaa

SEQ ID NO: 321430 - DNA, 19 bp, Homo sapiens
  siRNA target sequence for FLJ20366 (NM_017786.1,1659-1677).
cttagtggttgatttaact

SEQ ID NO: 321431 - DNA, 19 bp, Homo sapiens
  siRNA target sequence for FLJ20366 (NM_017786.1,1908-1926).
ggttctgtgggcattcagt

SEQ ID NO: 321432 - DNA, 19 bp, Homo sapiens
  siRNA target sequence for FLJ20366 (NM_017786.1,1938-1956).
gggaacggatcctgtgtat

SEQ ID NO: 321433 - DNA, 19 bp, Homo sapiens
  siRNA target sequence for FLJ20366 (NM_017786.1,1939-1957).
ggaacggatcctgtgtata

SEQ ID NO: 321434 - DNA, 19 bp, Homo sapiens
  siRNA target sequence for FLJ20366 (NM_017786.1,1940-1958).
gaacggatcctgtgtataa

SEQ ID NO: 321435 - DNA, 19 bp, Homo sapiens
  siRNA target sequence for FLJ20366 (NM_017786.1,1943-1961).
cggatcctgtgtataacat

SEQ ID NO: 321436 - DNA, 19 bp, Homo sapiens
  siRNA target sequence for FLJ20366 (NM_017786.1,2013-2031).
caccgccttccgtatcaaa

SEQ ID NO: 321437 - DNA, 19 bp, Homo sapiens
  siRNA target sequence for GCC1 (NM_024523.5,530-548).
gtggtccgtgcctataaaa

SEQ ID NO: 321438 - DNA, 19 bp, Homo sapiens
  siRNA target sequence for GCC1 (NM_024523.5,742-760).
cagcaccaagggtgagttt

SEQ ID NO: 321439 - DNA, 19 bp, Homo sapiens
  siRNA target sequence for GCC1 (NM_024523.5,873-891).
gggaggtggacaaaagact

SEQ ID NO: 321440 - DNA, 19 bp, Homo sapiens
  siRNA target sequence for GCC1 (NM_024523.5,957-975).
cccgcatggaggcttctta

SEQ ID NO: 321441 - DNA, 19 bp, Homo sapiens
  siRNA target sequence for GCC1 (NM_024523.5,1204-1222).
ggacttggagcttaggtta

SEQ ID NO: 321442 - DNA, 19 bp, Homo sapiens
  siRNA target sequence for GCC1 (NM_024523.5,1207-1225).
cttggagcttaggttagaa

SEQ ID NO: 321443 - DNA, 19 bp, Homo sapiens
  siRNA target sequence for GCC1 (NM_024523.5,1414-1432).
ccatttccaggctcagtta

SEQ ID NO: 321444 - DNA, 19 bp, Homo sapiens
  siRNA target sequence for GCC1 (NM_024523.5,1509-1527).
cagccctggagaatcaaat

SEQ ID NO: 321445 - DNA, 19 bp, Homo sapiens
  siRNA target sequence for GCC1 (NM_024523.5,1656-1674).
ccagcaggtcccctttaga

SEQ ID NO: 321446 - DNA, 19 bp, Homo sapiens
  siRNA target sequence for GCC1 (NM_024523.5,1748-1766).
caggttgcggccaggaaaa

SEQ ID NO: 321447 - DNA, 19 bp, Homo sapiens
  siRNA target sequence for GCC1 (NM_024523.5,1840-1858).
gaaggctactgcactctat

SEQ ID NO: 321448 - DNA, 19 bp, Homo sapiens
  siRNA target sequence for GCC1 (NM_024523.5,1845-1863).
ctactgcactctattacca

SEQ ID NO: 321449 - DNA, 19 bp, Homo sapiens
  siRNA target sequence for GCC1 (NM_024523.5,2140-2158).
cagggaccgcacactgaaa

SEQ ID NO: 321450 - DNA, 19 bp, Homo sapiens
  siRNA target sequence for GCC1 (NM_024523.5,2142-2160).
gggaccgcacactgaaact

SEQ ID NO: 321451 - DNA, 19 bp, Homo sapiens
  siRNA target sequence for GCC1 (NM_024523.5,2331-2349).
gcctgacccaagcattaca

SEQ ID NO: 321452 - DNA, 19 bp, Homo sapiens
  siRNA target sequence for GCC1 (NM_024523.5,2332-2350).
cctgacccaagcattacaa

SEQ ID NO: 321453 - DNA, 19 bp, Homo sapiens
  siRNA target sequence for GCC1 (NM_024523.5,2335-2353).
gacccaagcattacaactt

SEQ ID NO: 321454 - DNA, 19 bp, Homo sapiens
  siRNA target sequence for GCC1 (NM_024523.5,2529-2547).
gccacatcgaaaagaacat

SEQ ID NO: 321455 - DNA, 19 bp, Homo sapiens
  siRNA target sequence for GCC1 (NM_024523.5,2649-2667).
cagccatactgactatctt

SEQ ID NO: 321456 - DNA, 19 bp, Homo sapiens
  siRNA target sequence for GCC2 (NM_014635.3,367-385).
gttggaacaatcacatata

SEQ ID NO: 321457 - DNA, 19 bp, Homo sapiens
  siRNA target sequence for GCC2 (NM_014635.3,424-442).
gatggcagtacgttccaaa

SEQ ID NO: 321458 - DNA, 19 bp, Homo sapiens
  siRNA target sequence for GCC2 (NM_014635.3,452-470).
gacaaagctaacttacaaa

SEQ ID NO: 321459 - DNA, 19 bp, Homo sapiens
  siRNA target sequence for GCC2 (NM_014635.3,486-504).
caatgaatacgcaattaga

SEQ ID NO: 321460 - DNA, 19 bp, Homo sapiens
  siRNA target sequence for GCC2 (NM_014635.3,490-508).
gaatacgcaattagaactt

SEQ ID NO: 321461 - DNA, 19 bp, Homo sapiens
  siRNA target sequence for GCC2 (NM_014635.3,495-513).
cgcaattagaactttcaga

SEQ ID NO: 321462 - DNA, 19 bp, Homo sapiens
  siRNA target sequence for GCC2 (NM_014635.3,585-603).
caggctttgaggagcaaat

SEQ ID NO: 321463 - DNA, 19 bp, Homo sapiens
  siRNA target sequence for GCC2 (NM_014635.3,626-644).
gacgctaccactgatgaaa

SEQ ID NO: 321464 - DNA, 19 bp, Homo sapiens
  siRNA target sequence for GCC2 (NM_014635.3,630-648).
ctaccactgatgaaaagaa

SEQ ID NO: 321465 - DNA, 19 bp, Homo sapiens
  siRNA target sequence for GCC2 (NM_014635.3,656-674).
gttactcaactccaaaata

SEQ ID NO: 321466 - DNA, 19 bp, Homo sapiens
  siRNA target sequence for GCC2 (NM_014635.3,731-749).
cttttacagttgaaagcta

SEQ ID NO: 321467 - DNA, 19 bp, Homo sapiens
  siRNA target sequence for GCC2 (NM_014635.3,761-779).
gaggtgaaagagttgatgt

SEQ ID NO: 321468 - DNA, 19 bp, Homo sapiens
  siRNA target sequence for GCC2 (NM_014635.3,772-790).
gttgatgtgccagattgaa

SEQ ID NO: 321469 - DNA, 19 bp, Homo sapiens
  siRNA target sequence for GCC2 (NM_014635.3,806-824).
catgaagcagagataaata

SEQ ID NO: 321470 - DNA, 19 bp, Homo sapiens
  siRNA target sequence for GCC2 (NM_014635.3,835-853).
gctaaaagagaacttagta

SEQ ID NO: 321471 - DNA, 19 bp, Homo sapiens
  siRNA target sequence for GCC2 (NM_014635.3,836-854).
ctaaaagagaacttagtaa

SEQ ID NO: 321472 - DNA, 19 bp, Homo sapiens
  siRNA target sequence for GCC2 (NM_014635.3,842-860).
gagaacttagtaaaacaat

SEQ ID NO: 321473 - DNA, 19 bp, Homo sapiens
  siRNA target sequence for GCC2 (NM_014635.3,844-862).
gaacttagtaaaacaatgt

SEQ ID NO: 321474 - DNA, 19 bp, Homo sapiens
  siRNA target sequence for GCC2 (NM_014635.3,940-958).
ccaagacaatcagatatgt

SEQ ID NO: 321475 - DNA, 19 bp, Homo sapiens
  siRNA target sequence for GCC2 (NM_014635.3,944-962).
gacaatcagatatgttcta

SEQ ID NO: 321476 - DNA, 19 bp, Homo sapiens
  siRNA target sequence for GCC2 (NM_014635.3,1016-1034).
cacttagaagataccttaa

SEQ ID NO: 321477 - DNA, 19 bp, Homo sapiens
  siRNA target sequence for GCC2 (NM_014635.3,1072-1090).
ggtaacttatatgaataat

SEQ ID NO: 321478 - DNA, 19 bp, Homo sapiens
  siRNA target sequence for GCC2 (NM_014635.3,1145-1163).
gaacgggaagacttagagt

SEQ ID NO: 321479 - DNA, 19 bp, Homo sapiens
  siRNA target sequence for GCC2 (NM_014635.3,1148-1166).
cgggaagacttagagttta

SEQ ID NO: 321480 - DNA, 19 bp, Homo sapiens
  siRNA target sequence for GCC2 (NM_014635.3,1149-1167).
gggaagacttagagtttaa

SEQ ID NO: 321481 - DNA, 19 bp, Homo sapiens
  siRNA target sequence for GCC2 (NM_014635.3,1193-1211).
gaagaacagggctgtgtaa

SEQ ID NO: 321482 - DNA, 19 bp, Homo sapiens
  siRNA target sequence for GCC2 (NM_014635.3,1199-1217).
cagggctgtgtaattgaaa

SEQ ID NO: 321483 - DNA, 19 bp, Homo sapiens
  siRNA target sequence for GCC2 (NM_014635.3,1235-1253).
gcaggtttaaataaacagt

SEQ ID NO: 321484 - DNA, 19 bp, Homo sapiens
  siRNA target sequence for GCC2 (NM_014635.3,1252-1270).
gttttgctatactgtagaa

SEQ ID NO: 321485 - DNA, 19 bp, Homo sapiens
  siRNA target sequence for GCC2 (NM_014635.3,1291-1309).
gagtcttaaggaacaacat

SEQ ID NO: 321486 - DNA, 19 bp, Homo sapiens
  siRNA target sequence for GCC2 (NM_014635.3,1494-1512).
gggaatctgctggaaaaat

SEQ ID NO: 321487 - DNA, 19 bp, Homo sapiens
  siRNA target sequence for GCC2 (NM_014635.3,1500-1518).
ctgctggaaaaataagtca

SEQ ID NO: 321488 - DNA, 19 bp, Homo sapiens
  siRNA target sequence for GCC2 (NM_014635.3,1517-1535).
caagagttcgaatcaatga

SEQ ID NO: 321489 - DNA, 19 bp, Homo sapiens
  siRNA target sequence for GCC2 (NM_014635.3,1537-1555).
gcaacagcaagcatctgat

SEQ ID NO: 321490 - DNA, 19 bp, Homo sapiens
  siRNA target sequence for GCC2 (NM_014635.3,1690-1708).
cataaagaaccttcaagaa

SEQ ID NO: 321491 - DNA, 19 bp, Homo sapiens
  siRNA target sequence for GCC2 (NM_014635.3,1711-1729).
gaatggagtatacttactt

SEQ ID NO: 321492 - DNA, 19 bp, Homo sapiens
  siRNA target sequence for GCC2 (NM_014635.3,1739-1757).
caaagagataccatgttaa

SEQ ID NO: 321493 - DNA, 19 bp, Homo sapiens
  siRNA target sequence for GCC2 (NM_014635.3,1835-1853).
gaaatggataatttccata

SEQ ID NO: 321494 - DNA, 19 bp, Homo sapiens
  siRNA target sequence for GCC2 (NM_014635.3,1866-1884).
gggaagaaagattgattct

SEQ ID NO: 321495 - DNA, 19 bp, Homo sapiens
  siRNA target sequence for GCC2 (NM_014635.3,1907-1925).
caaacaatccagtacaaca

SEQ ID NO: 321496 - DNA, 19 bp, Homo sapiens
  siRNA target sequence for GCC2 (NM_014635.3,1928-1946).
gaactagaacaaaaggtaa

SEQ ID NO: 321497 - DNA, 19 bp, Homo sapiens
  siRNA target sequence for GCC2 (NM_014635.3,1961-1979).
ggactagaggagactttaa

SEQ ID NO: 321498 - DNA, 19 bp, Homo sapiens
  siRNA target sequence for GCC2 (NM_014635.3,2092-2110).
caataaactcagttcagaa

SEQ ID NO: 321499 - DNA, 19 bp, Homo sapiens
  siRNA target sequence for GCC2 (NM_014635.3,2162-2180).
gttatccttaaagaacata

SEQ ID NO: 321500 - DNA, 19 bp, Homo sapiens
  siRNA target sequence for GCC2 (NM_014635.3,2177-2195).
catattactcaattagaaa

SEQ ID NO: 321501 - DNA, 19 bp, Homo sapiens
  siRNA target sequence for GCC2 (NM_014635.3,2252-2270).
gagcaagttcagaagttat

SEQ ID NO: 321502 - DNA, 19 bp, Homo sapiens
  siRNA target sequence for GCC2 (NM_014635.3,2410-2428).
ggcttttcagcgtgatgaa

SEQ ID NO: 321503 - DNA, 19 bp, Homo sapiens
  siRNA target sequence for GCC2 (NM_014635.3,2411-2429).
gcttttcagcgtgatgaaa

SEQ ID NO: 321504 - DNA, 19 bp, Homo sapiens
  siRNA target sequence for GCC2 (NM_014635.3,2483-2501).
cagtgtgaagaacttaagt

SEQ ID NO: 321505 - DNA, 19 bp, Homo sapiens
  siRNA target sequence for GCC2 (NM_014635.3,2502-2520).
ctttattgagagactatga

SEQ ID NO: 321506 - DNA, 19 bp, Homo sapiens
  siRNA target sequence for GCC2 (NM_014635.3,2581-2599).
gcagtctgatcttctagaa

SEQ ID NO: 321507 - DNA, 19 bp, Homo sapiens
  siRNA target sequence for GCC2 (NM_014635.3,2660-2678).
gaagtatctcaaacatgta

SEQ ID NO: 321508 - DNA, 19 bp, Homo sapiens
  siRNA target sequence for GCC2 (NM_014635.3,2680-2698).
caaaagtgaaatccataat

SEQ ID NO: 321509 - DNA, 19 bp, Homo sapiens
  siRNA target sequence for GCC2 (NM_014635.3,2734-2752).
cctaaagccactactagaa

SEQ ID NO: 321510 - DNA, 19 bp, Homo sapiens
  siRNA target sequence for GCC2 (NM_014635.3,2775-2793).
gagcagagttgatactatt

SEQ ID NO: 321511 - DNA, 19 bp, Homo sapiens
  siRNA target sequence for GCC2 (NM_014635.3,2777-2795).
gcagagttgatactattaa

SEQ ID NO: 321512 - DNA, 19 bp, Homo sapiens
  siRNA target sequence for GCC2 (NM_014635.3,2782-2800).
gttgatactattaaaggat

SEQ ID NO: 321513 - DNA, 19 bp, Homo sapiens
  siRNA target sequence for GCC2 (NM_014635.3,2814-2832).
caccttctgtaaaaaatga

SEQ ID NO: 321514 - DNA, 19 bp, Homo sapiens
  siRNA target sequence for GCC2 (NM_014635.3,2835-2853).
ctctgtcttcagtaaaaga

SEQ ID NO: 321515 - DNA, 19 bp, Homo sapiens
  siRNA target sequence for GCC2 (NM_014635.3,2996-3014).
gaatctcttcgatcagaaa

SEQ ID NO: 321516 - DNA, 19 bp, Homo sapiens
  siRNA target sequence for GCC2 (NM_014635.3,3033-3051).
ccatgagagatctcattca

SEQ ID NO: 321517 - DNA, 19 bp, Homo sapiens
  siRNA target sequence for GCC2 (NM_014635.3,3115-3133).
ggaaaaagaacgtgctaat

SEQ ID NO: 321518 - DNA, 19 bp, Homo sapiens
  siRNA target sequence for GCC2 (NM_014635.3,3157-3175).
ccttacaagacaattaaga

SEQ ID NO: 321519 - DNA, 19 bp, Homo sapiens
  siRNA target sequence for GCC2 (NM_014635.3,3221-3239).
ctcctggctcgtattgaga

SEQ ID NO: 321520 - DNA, 19 bp, Homo sapiens
  siRNA target sequence for GCC2 (NM_014635.3,3226-3244).
ggctcgtattgagacatta

SEQ ID NO: 321521 - DNA, 19 bp, Homo sapiens
  siRNA target sequence for GCC2 (NM_014635.3,3228-3246).
ctcgtattgagacattaca

SEQ ID NO: 321522 - DNA, 19 bp, Homo sapiens
  siRNA target sequence for GCC2 (NM_014635.3,3294-3312).
ccaaagcaatggtagacaa

SEQ ID NO: 321523 - DNA, 19 bp, Homo sapiens
  siRNA target sequence for GCC2 (NM_014635.3,3300-3318).
caatggtagacaaagaatt

SEQ ID NO: 321524 - DNA, 19 bp, Homo sapiens
  siRNA target sequence for GCC2 (NM_014635.3,3355-3373).
ggaacatgccactactgta

SEQ ID NO: 321525 - DNA, 19 bp, Homo sapiens
  siRNA target sequence for GCC2 (NM_014635.3,3356-3374).
gaacatgccactactgtaa

SEQ ID NO: 321526 - DNA, 19 bp, Homo sapiens
  siRNA target sequence for GCC2 (NM_014635.3,3363-3381).
ccactactgtaaatgaact

SEQ ID NO: 321527 - DNA, 19 bp, Homo sapiens
  siRNA target sequence for GCC2 (NM_014635.3,3389-3407).
cttcaggtacaacttcaaa

SEQ ID NO: 321528 - DNA, 19 bp, Homo sapiens
  siRNA target sequence for GCC2 (NM_014635.3,3464-3482).
gcccaacaaaccacattga

SEQ ID NO: 321529 - DNA, 19 bp, Homo sapiens
  siRNA target sequence for GCC2 (NM_014635.3,3498-3516).
ctgattatgaacgtttgat

SEQ ID NO: 321530 - DNA, 19 bp, Homo sapiens
  siRNA target sequence for GCC2 (NM_014635.3,3500-3518).
gattatgaacgtttgatga

SEQ ID NO: 321531 - DNA, 19 bp, Homo sapiens
  siRNA target sequence for GCC2 (NM_014635.3,3632-3650).
cagtcttcagtacaacaat

SEQ ID NO: 321532 - DNA, 19 bp, Homo sapiens
  siRNA target sequence for GCC2 (NM_014635.3,3634-3652).
gtcttcagtacaacaatat

SEQ ID NO: 321533 - DNA, 19 bp, Homo sapiens
  siRNA target sequence for GCC2 (NM_014635.3,3729-3747).
ctgatcacttaatacttca

SEQ ID NO: 321534 - DNA, 19 bp, Homo sapiens
  siRNA target sequence for GCC2 (NM_014635.3,3781-3799).
gcagcaagtagaagtctat

SEQ ID NO: 321535 - DNA, 19 bp, Homo sapiens
  siRNA target sequence for GCC2 (NM_014635.3,3782-3800).
cagcaagtagaagtctata

SEQ ID NO: 321536 - DNA, 19 bp, Homo sapiens
  siRNA target sequence for GCC2 (NM_014635.3,3784-3802).
gcaagtagaagtctataaa

SEQ ID NO: 321537 - DNA, 19 bp, Homo sapiens
  siRNA target sequence for GCC2 (NM_014635.3,3785-3803).
caagtagaagtctataaaa

SEQ ID NO: 321538 - DNA, 19 bp, Homo sapiens
  siRNA target sequence for GCC2 (NM_014635.3,3808-3826).
gctggctgaaataacatca

SEQ ID NO: 321539 - DNA, 19 bp, Homo sapiens
  siRNA target sequence for GCC2 (NM_014635.3,3940-3958).
ggcagaacaagctactgta

SEQ ID NO: 321540 - DNA, 19 bp, Homo sapiens
  siRNA target sequence for GCC2 (NM_014635.3,3954-3972).
ctgtaacctctgaattcga

SEQ ID NO: 321541 - DNA, 19 bp, Homo sapiens
  siRNA target sequence for GCC2 (NM_014635.3,3976-3994).
ctacaaagtccgagttcat

SEQ ID NO: 321542 - DNA, 19 bp, Homo sapiens
  siRNA target sequence for GCC2 (NM_014635.3,3979-3997).
caaagtccgagttcataat

SEQ ID NO: 321543 - DNA, 19 bp, Homo sapiens
  siRNA target sequence for GCC2 (NM_014635.3,3985-4003).
ccgagttcataatgttcta

SEQ ID NO: 321544 - DNA, 19 bp, Homo sapiens
  siRNA target sequence for GCC2 (NM_014635.3,4041-4059).
ctgagggcgctaaacaaga

SEQ ID NO: 321545 - DNA, 19 bp, Homo sapiens
  siRNA target sequence for GCC2 (NM_014635.3,4043-4061).
gagggcgctaaacaagaaa

SEQ ID NO: 321546 - DNA, 19 bp, Homo sapiens
  siRNA target sequence for GCC2 (NM_014635.3,4062-4080).
gggaacatctggaaatgct

SEQ ID NO: 321547 - DNA, 19 bp, Homo sapiens
  siRNA target sequence for GCC2 (NM_014635.3,4114-4132).
ccaaaataacttacagatt

SEQ ID NO: 321548 - DNA, 19 bp, Homo sapiens
  siRNA target sequence for GCC2 (NM_014635.3,4115-4133).
caaaataacttacagatta

SEQ ID NO: 321549 - DNA, 19 bp, Homo sapiens
  siRNA target sequence for GCC2 (NM_014635.3,4152-4170).
cattgcagtctgaacatga

SEQ ID NO: 321550 - DNA, 19 bp, Homo sapiens
  siRNA target sequence for GCC2 (NM_014635.3,4223-4241).
gcggaactccgggaaaaat

SEQ ID NO: 321551 - DNA, 19 bp, Homo sapiens
  siRNA target sequence for GCC2 (NM_014635.3,4224-4242).
cggaactccgggaaaaatt

SEQ ID NO: 321552 - DNA, 19 bp, Homo sapiens
  siRNA target sequence for GCC2 (NM_014635.3,4226-4244).
gaactccgggaaaaattgt

SEQ ID NO: 321553 - DNA, 19 bp, Homo sapiens
  siRNA target sequence for GCC2 (NM_014635.3,4233-4251).
gggaaaaattgtgttcaat

SEQ ID NO: 321554 - DNA, 19 bp, Homo sapiens
  siRNA target sequence for GCC2 (NM_014635.3,4319-4337).
gaggtccttcgaaatagct

SEQ ID NO: 321555 - DNA, 19 bp, Homo sapiens
  siRNA target sequence for GCC2 (NM_014635.3,4341-4359).
gagatcaagtgcgacattt

SEQ ID NO: 321556 - DNA, 19 bp, Homo sapiens
  siRNA target sequence for GCC2 (NM_014635.3,4374-4392).
gaaagacagtggagacatt

SEQ ID NO: 321557 - DNA, 19 bp, Homo sapiens
  siRNA target sequence for GCC2 (NM_014635.3,4423-4441).
gctcttccagcttaagaat

SEQ ID NO: 321558 - DNA, 19 bp, Homo sapiens
  siRNA target sequence for GCC2 (NM_014635.3,4755-4773).
cagaagcaaccaatgcaat

SEQ ID NO: 321559 - DNA, 19 bp, Homo sapiens
  siRNA target sequence for GCC2 (NM_181453.2,137-155).
ccctgggaccgggaaatct

SEQ ID NO: 321560 - DNA, 19 bp, Homo sapiens
  siRNA target sequence for GCC2 (NM_181453.2,138-156).
cctgggaccgggaaatcta

SEQ ID NO: 321561 - DNA, 19 bp, Homo sapiens
  siRNA target sequence for GCC2 (NM_181453.2,139-157).
ctgggaccgggaaatctaa

SEQ ID NO: 321562 - DNA, 19 bp, Homo sapiens
  siRNA target sequence for GCC2 (NM_181453.2,271-289).
gatcaaaacctgttactga

SEQ ID NO: 321563 - DNA, 19 bp, Homo sapiens
  siRNA target sequence for GCC2 (NM_181453.2,286-304).
ctgaaggaactggtgatat

SEQ ID NO: 321564 - DNA, 19 bp, Homo sapiens
  siRNA target sequence for GOLGA1 (NM_002077.1,413-431).
cggtctgtgagcaaggaat

SEQ ID NO: 321565 - DNA, 19 bp, Homo sapiens
  siRNA target sequence for GOLGA1 (NM_002077.1,567-585).
ctgaacaggtccgaaactt

SEQ ID NO: 321566 - DNA, 19 bp, Homo sapiens
  siRNA target sequence for GOLGA1 (NM_002077.1,578-596).
cgaaacttgcagaagataa

SEQ ID NO: 321567 - DNA, 19 bp, Homo sapiens
  siRNA target sequence for GOLGA1 (NM_002077.1,639-657).
ccatgcggaaatttcaaga

SEQ ID NO: 321568 - DNA, 19 bp, Homo sapiens
  siRNA target sequence for GOLGA1 (NM_002077.1,658-676).
gcagaatgagacattccaa

SEQ ID NO: 321569 - DNA, 19 bp, Homo sapiens
  siRNA target sequence for GOLGA1 (NM_002077.1,783-801).
cagcccagttacaggaaat

SEQ ID NO: 321570 - DNA, 19 bp, Homo sapiens
  siRNA target sequence for GOLGA1 (NM_002077.1,865-883).
gcagcaggaactaagtaaa

SEQ ID NO: 321571 - DNA, 19 bp, Homo sapiens
  siRNA target sequence for GOLGA1 (NM_002077.1,943-961).
ggcacgaaccagagaactt

SEQ ID NO: 321572 - DNA, 19 bp, Homo sapiens
  siRNA target sequence for GOLGA1 (NM_002077.1,971-989).
caggaggagttgatgaact

SEQ ID NO: 321573 - DNA, 19 bp, Homo sapiens
  siRNA target sequence for GOLGA1 (NM_002077.1,1060-1078).
gcagagagatcatgtgata

SEQ ID NO: 321574 - DNA, 19 bp, Homo sapiens
  siRNA target sequence for GOLGA1 (NM_002077.1,1157-1175).
ctttccattgatttgcaaa

SEQ ID NO: 321575 - DNA, 19 bp, Homo sapiens
  siRNA target sequence for GOLGA1 (NM_002077.1,1161-1179).
ccattgatttgcaaaaggt

SEQ ID NO: 321576 - DNA, 19 bp, Homo sapiens
  siRNA target sequence for GOLGA1 (NM_002077.1,1182-1200).
ctgctgaaactcaagagaa

SEQ ID NO: 321577 - DNA, 19 bp, Homo sapiens
  siRNA target sequence for GOLGA1 (NM_002077.1,1198-1216).
gaaagaagacgttatcaca

SEQ ID NO: 321578 - DNA, 19 bp, Homo sapiens
  siRNA target sequence for GOLGA1 (NM_002077.1,1202-1220).
gaagacgttatcacacatt

SEQ ID NO: 321579 - DNA, 19 bp, Homo sapiens
  siRNA target sequence for GOLGA1 (NM_002077.1,1308-1326).
cacttgctgagcagaattt

SEQ ID NO: 321580 - DNA, 19 bp, Homo sapiens
  siRNA target sequence for GOLGA1 (NM_002077.1,1365-1383).
gccaggctaaggccattaa

SEQ ID NO: 321581 - DNA, 19 bp, Homo sapiens
  siRNA target sequence for GOLGA1 (NM_002077.1,1367-1385).
caggctaaggccattaaca

SEQ ID NO: 321582 - DNA, 19 bp, Homo sapiens
  siRNA target sequence for GOLGA1 (NM_002077.1,1575-1593).
cgctagaagcccagatagt

SEQ ID NO: 321583 - DNA, 19 bp, Homo sapiens
  siRNA target sequence for GOLGA1 (NM_002077.1,1704-1722).
ctttacaaaatcaccaatt

SEQ ID NO: 321584 - DNA, 19 bp, Homo sapiens
  siRNA target sequence for GOLGA1 (NM_002077.1,2068-2086).
cgaagcactctcagtcaat

SEQ ID NO: 321585 - DNA, 19 bp, Homo sapiens
  siRNA target sequence for GOLGA1 (NM_002077.1,2072-2090).
gcactctcagtcaatgagt

SEQ ID NO: 321586 - DNA, 19 bp, Homo sapiens
  siRNA target sequence for GOLGA1 (NM_002077.1,2299-2317).
gaaaatcagacccgataat

SEQ ID NO: 321587 - DNA, 19 bp, Homo sapiens
  siRNA target sequence for GOLGA1 (NM_002077.1,2366-2384).
gcgccttccgtcacgaata

SEQ ID NO: 321588 - DNA, 19 bp, Homo sapiens
  siRNA target sequence for GOLGA1 (NM_002077.1,2367-2385).
cgccttccgtcacgaataa

SEQ ID NO: 321589 - DNA, 19 bp, Homo sapiens
  siRNA target sequence for GOLGA1 (NM_002077.1,2369-2387).
ccttccgtcacgaataaca

SEQ ID NO: 321590 - DNA, 19 bp, Homo sapiens
  siRNA target sequence for GOLGA1 (NM_002077.1,2405-2423).
cgcgagatcaactttgagt

SEQ ID NO: 321591 - DNA, 19 bp, Homo sapiens
  siRNA target sequence for GOLGA1 (NM_002077.1,2438-2456).
gttttaaaattcatgtctt

SEQ ID NO: 321592 - DNA, 19 bp, Homo sapiens
  siRNA target sequence for GOLGA1 (NM_002077.1,2460-2478).
gcgaatccgaggcttttca

SEQ ID NO: 321593 - DNA, 19 bp, Homo sapiens
  siRNA target sequence for GOLGA1 (NM_002077.1,2461-2479).
cgaatccgaggcttttcat

SEQ ID NO: 321594 - DNA, 19 bp, Homo sapiens
  siRNA target sequence for GOLGA1 (NM_002077.1,2467-2485).
cgaggcttttcatcttata

SEQ ID NO: 321595 - DNA, 19 bp, Homo sapiens
  siRNA target sequence for GOLGA2 (NM_004486.3,227-245).
ggacaatgctgctactcta

SEQ ID NO: 321596 - DNA, 19 bp, Homo sapiens
  siRNA target sequence for GOLGA2 (NM_004486.3,230-248).
caatgctgctactctacaa

SEQ ID NO: 321597 - DNA, 19 bp, Homo sapiens
  siRNA target sequence for GOLGA2 (NM_004486.3,308-326).
catggcggcatctcagaat

SEQ ID NO: 321598 - DNA, 19 bp, Homo sapiens
  siRNA target sequence for GOLGA2 (NM_004486.3,311-329).
ggcggcatctcagaatcat

SEQ ID NO: 321599 - DNA, 19 bp, Homo sapiens
  siRNA target sequence for GOLGA2 (NM_004486.3,313-331).
cggcatctcagaatcatga

SEQ ID NO: 321600 - DNA, 19 bp, Homo sapiens
  siRNA target sequence for GOLGA2 (NM_004486.3,314-332).
ggcatctcagaatcatgat

SEQ ID NO: 321601 - DNA, 19 bp, Homo sapiens
  siRNA target sequence for GOLGA2 (NM_004486.3,408-426).
cagctcaatggtcttgttt

SEQ ID NO: 321602 - DNA, 19 bp, Homo sapiens
  siRNA target sequence for GOLGA2 (NM_004486.3,431-449).
gtctgcgacatgtgtcaat

SEQ ID NO: 321603 - DNA, 19 bp, Homo sapiens
  siRNA target sequence for GOLGA2 (NM_004486.3,518-536).
cctggactccagctatgta

SEQ ID NO: 321604 - DNA, 19 bp, Homo sapiens
  siRNA target sequence for GOLGA2 (NM_004486.3,527-545).
cagctatgtaacaaacaaa

SEQ ID NO: 321605 - DNA, 19 bp, Homo sapiens
  siRNA target sequence for GOLGA2 (NM_004486.3,538-556).
caaacaaacaactcaatat

SEQ ID NO: 321606 - DNA, 19 bp, Homo sapiens
  siRNA target sequence for GOLGA2 (NM_004486.3,549-567).
ctcaatatcacgatagaga

SEQ ID NO: 321607 - DNA, 19 bp, Homo sapiens
  siRNA target sequence for GOLGA2 (NM_004486.3,653-671).
gcagttacaggttcacatt

SEQ ID NO: 321608 - DNA, 19 bp, Homo sapiens
  siRNA target sequence for GOLGA2 (NM_004486.3,683-701).
gatcctcgtatcagagaaa

SEQ ID NO: 321609 - DNA, 19 bp, Homo sapiens
  siRNA target sequence for GOLGA2 (NM_004486.3,1165-1183).
cggttagacaactacaaat

SEQ ID NO: 321610 - DNA, 19 bp, Homo sapiens
  siRNA target sequence for GOLGA2 (NM_004486.3,1665-1683).
ctgcagagcggatttgtaa

SEQ ID NO: 321611 - DNA, 19 bp, Homo sapiens
  siRNA target sequence for GOLGA2 (NM_004486.3,1680-1698).
gtaaagctgactaatgaga

SEQ ID NO: 321612 - DNA, 19 bp, Homo sapiens
  siRNA target sequence for GOLGA2 (NM_004486.3,1782-1800).
ctgagcgagctgaaggaaa

SEQ ID NO: 321613 - DNA, 19 bp, Homo sapiens
  siRNA target sequence for GOLGA2 (NM_004486.3,2534-2552).
caccattggagagtacatt

SEQ ID NO: 321614 - DNA, 19 bp, Homo sapiens
  siRNA target sequence for GOLGA2 (NM_004486.3,2978-2996).
ccgggctgacgagaatgat

SEQ ID NO: 321615 - DNA, 19 bp, Homo sapiens
  siRNA target sequence for GOLGA2 (NM_004486.3,2980-2998).
gggctgacgagaatgatga

SEQ ID NO: 321616 - DNA, 19 bp, Homo sapiens
  siRNA target sequence for GOLGA5 (NM_005113.2,256-274).
ctctcagtaggaaagacaa

SEQ ID NO: 321617 - DNA, 19 bp, Homo sapiens
  siRNA target sequence for GOLGA5 (NM_005113.2,276-294).
gccagcaacatatatagca

SEQ ID NO: 321618 - DNA, 19 bp, Homo sapiens
  siRNA target sequence for GOLGA5 (NM_005113.2,277-295).
ccagcaacatatatagcaa

SEQ ID NO: 321619 - DNA, 19 bp, Homo sapiens
  siRNA target sequence for GOLGA5 (NM_005113.2,281-299).
caacatatatagcaaaaat

SEQ ID NO: 321620 - DNA, 19 bp, Homo sapiens
  siRNA target sequence for GOLGA5 (NM_005113.2,284-302).
catatatagcaaaaatact

SEQ ID NO: 321621 - DNA, 19 bp, Homo sapiens
  siRNA target sequence for GOLGA5 (NM_005113.2,293-311).
caaaaatactgactatact

SEQ ID NO: 321622 - DNA, 19 bp, Homo sapiens
  siRNA target sequence for GOLGA5 (NM_005113.2,345-363).
cagactggacctaaatcta

SEQ ID NO: 321623 - DNA, 19 bp, Homo sapiens
  siRNA target sequence for GOLGA5 (NM_005113.2,351-369).
ggacctaaatctacgtata

SEQ ID NO: 321624 - DNA, 19 bp, Homo sapiens
  siRNA target sequence for GOLGA5 (NM_005113.2,352-370).
gacctaaatctacgtatat

SEQ ID NO: 321625 - DNA, 19 bp, Homo sapiens
  siRNA target sequence for GOLGA5 (NM_005113.2,379-397).
cagctgataacattcgaaa

SEQ ID NO: 321626 - DNA, 19 bp, Homo sapiens
  siRNA target sequence for GOLGA5 (NM_005113.2,382-400).
ctgataacattcgaaatca

SEQ ID NO: 321627 - DNA, 19 bp, Homo sapiens
  siRNA target sequence for GOLGA5 (NM_005113.2,413-431).
cttagctggcactgcaaat

SEQ ID NO: 321628 - DNA, 19 bp, Homo sapiens
  siRNA target sequence for GOLGA5 (NM_005113.2,418-436).
ctggcactgcaaatgtgaa

SEQ ID NO: 321629 - DNA, 19 bp, Homo sapiens
  siRNA target sequence for GOLGA5 (NM_005113.2,421-439).
gcactgcaaatgtgaaagt

SEQ ID NO: 321630 - DNA, 19 bp, Homo sapiens
  siRNA target sequence for GOLGA5 (NM_005113.2,461-479).
ggcctctcatcctgttgaa

SEQ ID NO: 321631 - DNA, 19 bp, Homo sapiens
  siRNA target sequence for GOLGA5 (NM_005113.2,462-480).
gcctctcatcctgttgaaa

SEQ ID NO: 321632 - DNA, 19 bp, Homo sapiens
  siRNA target sequence for GOLGA5 (NM_005113.2,463-481).
cctctcatcctgttgaaaa

SEQ ID NO: 321633 - DNA, 19 bp, Homo sapiens
  siRNA target sequence for GOLGA5 (NM_005113.2,507-525).
cattttgtgcgaagaaaaa

SEQ ID NO: 321634 - DNA, 19 bp, Homo sapiens
  siRNA target sequence for GOLGA5 (NM_005113.2,583-601).
ctaccgggagggtggaaat

SEQ ID NO: 321635 - DNA, 19 bp, Homo sapiens
  siRNA target sequence for GOLGA5 (NM_005113.2,587-605).
cgggagggtggaaatcaga

SEQ ID NO: 321636 - DNA, 19 bp, Homo sapiens
  siRNA target sequence for GOLGA5 (NM_005113.2,671-689).
cagtgtaaccaccatcaaa

SEQ ID NO: 321637 - DNA, 19 bp, Homo sapiens
  siRNA target sequence for GOLGA5 (NM_005113.2,675-693).
gtaaccaccatcaaaacca

SEQ ID NO: 321638 - DNA, 19 bp, Homo sapiens
  siRNA target sequence for GOLGA5 (NM_005113.2,817-835).
ccccaacacctaatgatga

SEQ ID NO: 321639 - DNA, 19 bp, Homo sapiens
  siRNA target sequence for GOLGA5 (NM_005113.2,887-905).
gaatgaagttcagtcttta

SEQ ID NO: 321640 - DNA, 19 bp, Homo sapiens
  siRNA target sequence for GOLGA5 (NM_005113.2,918-936).
gcctcgttactccaaagat

SEQ ID NO: 321641 - DNA, 19 bp, Homo sapiens
  siRNA target sequence for GOLGA5 (NM_005113.2,923-941).
gttactccaaagatccaaa

SEQ ID NO: 321642 - DNA, 19 bp, Homo sapiens
  siRNA target sequence for GOLGA5 (NM_005113.2,962-980).
caaagcaagagcaagagtt

SEQ ID NO: 321643 - DNA, 19 bp, Homo sapiens
  siRNA target sequence for GOLGA5 (NM_005113.2,1027-1045).
gactccgagcccaagtaga

SEQ ID NO: 321644 - DNA, 19 bp, Homo sapiens
  siRNA target sequence for GOLGA5 (NM_005113.2,1083-1101).
ctggctgtactgaaagtga

SEQ ID NO: 321645 - DNA, 19 bp, Homo sapiens
  siRNA target sequence for GOLGA5 (NM_005113.2,1129-1147).
gtactcgcacagaagcatt

SEQ ID NO: 321646 - DNA, 19 bp, Homo sapiens
  siRNA target sequence for GOLGA5 (NM_005113.2,1132-1150).
ctcgcacagaagcattaga

SEQ ID NO: 321647 - DNA, 19 bp, Homo sapiens
  siRNA target sequence for GOLGA5 (NM_005113.2,1143-1161).
gcattagaagccttacaga

SEQ ID NO: 321648 - DNA, 19 bp, Homo sapiens
  siRNA target sequence for GOLGA5 (NM_005113.2,1160-1178).
gagtgaaaaatcacgaata

SEQ ID NO: 321649 - DNA, 19 bp, Homo sapiens
  siRNA target sequence for GOLGA5 (NM_005113.2,1173-1191).
cgaataatgcaggatcaaa

SEQ ID NO: 321650 - DNA, 19 bp, Homo sapiens
  siRNA target sequence for GOLGA5 (NM_005113.2,1198-1216).
gtaacagcctgcagaatca

SEQ ID NO: 321651 - DNA, 19 bp, Homo sapiens
  siRNA target sequence for GOLGA5 (NM_005113.2,1309-1327).
ctgcacgccttaataaagt

SEQ ID NO: 321652 - DNA, 19 bp, Homo sapiens
  siRNA target sequence for GOLGA5 (NM_005113.2,1343-1361).
gaatttagcagaagcaatt

SEQ ID NO: 321653 - DNA, 19 bp, Homo sapiens
  siRNA target sequence for GOLGA5 (NM_005113.2,1365-1383).
ctggccgaaagaaaatact

SEQ ID NO: 321654 - DNA, 19 bp, Homo sapiens
  siRNA target sequence for GOLGA5 (NM_005113.2,1416-1434).
cagcaagtcaagctgtata

SEQ ID NO: 321655 - DNA, 19 bp, Homo sapiens
  siRNA target sequence for GOLGA5 (NM_005113.2,1419-1437).
caagtcaagctgtataagt

SEQ ID NO: 321656 - DNA, 19 bp, Homo sapiens
  siRNA target sequence for GOLGA5 (NM_005113.2,1470-1488).
gactacaagcaaaaagcta

SEQ ID NO: 321657 - DNA, 19 bp, Homo sapiens
  siRNA target sequence for GOLGA5 (NM_005113.2,1478-1496).
gcaaaaagctactagaata

SEQ ID NO: 321658 - DNA, 19 bp, Homo sapiens
  siRNA target sequence for GOLGA5 (NM_005113.2,1489-1507).
ctagaatactgcaatctaa

SEQ ID NO: 321659 - DNA, 19 bp, Homo sapiens
  siRNA target sequence for GOLGA5 (NM_005113.2,1542-1560).
ggttttgaaggcctagata

SEQ ID NO: 321660 - DNA, 19 bp, Homo sapiens
  siRNA target sequence for GOLGA5 (NM_005113.2,1660-1678).
gatccgaattacaggatat

SEQ ID NO: 321661 - DNA, 19 bp, Homo sapiens
  siRNA target sequence for GOLGA5 (NM_005113.2,1663-1681).
ccgaattacaggatatgga

SEQ ID NO: 321662 - DNA, 19 bp, Homo sapiens
  siRNA target sequence for GOLGA5 (NM_005113.2,1679-1697).
ggaggcacagcaagttaat

SEQ ID NO: 321663 - DNA, 19 bp, Homo sapiens
  siRNA target sequence for GOLGA5 (NM_005113.2,1727-1745).
ggatctgcatgaccaaata

SEQ ID NO: 321664 - DNA, 19 bp, Homo sapiens
  siRNA target sequence for GOLGA5 (NM_005113.2,1799-1817).
gcaggagttccactatata

SEQ ID NO: 321665 - DNA, 19 bp, Homo sapiens
  siRNA target sequence for GOLGA5 (NM_005113.2,1824-1842).
gatctttatcgaacaaaga

SEQ ID NO: 321666 - DNA, 19 bp, Homo sapiens
  siRNA target sequence for GOLGA5 (NM_005113.2,1869-1887).
cgagacgaagaaattcaaa

SEQ ID NO: 321667 - DNA, 19 bp, Homo sapiens
  siRNA target sequence for GOLGA5 (NM_005113.2,1892-1910).
caggaatcagcttaccaat

SEQ ID NO: 321668 - DNA, 19 bp, Homo sapiens
  siRNA target sequence for GOLGA5 (NM_005113.2,1894-1912).
ggaatcagcttaccaataa

SEQ ID NO: 321669 - DNA, 19 bp, Homo sapiens
  siRNA target sequence for GOLGA5 (NM_005113.2,1895-1913).
gaatcagcttaccaataaa

SEQ ID NO: 321670 - DNA, 19 bp, Homo sapiens
  siRNA target sequence for GOLGA5 (NM_005113.2,1927-1945).
gcagtcagtctgagttaga

SEQ ID NO: 321671 - DNA, 19 bp, Homo sapiens
  siRNA target sequence for GOLGA5 (NM_005113.2,1934-1952).
gtctgagttagaaaatcga

SEQ ID NO: 321672 - DNA, 19 bp, Homo sapiens
  siRNA target sequence for GOLGA5 (NM_005113.2,2046-2064).
ctcgaacagcagatgaact

SEQ ID NO: 321673 - DNA, 19 bp, Homo sapiens
  siRNA target sequence for GOLGA5 (NM_005113.2,2063-2081).
ctccgcctctggaagtagt

SEQ ID NO: 321674 - DNA, 19 bp, Homo sapiens
  siRNA target sequence for GOLGA5 (NM_005113.2,2066-2084).
cgcctctggaagtagtagt

SEQ ID NO: 321675 - DNA, 19 bp, Homo sapiens
  siRNA target sequence for GOLGA5 (NM_005113.2,2067-2085).
gcctctggaagtagtagta

SEQ ID NO: 321676 - DNA, 19 bp, Homo sapiens
  siRNA target sequence for GOLGA5 (NM_005113.2,2068-2086).
cctctggaagtagtagtaa

SEQ ID NO: 321677 - DNA, 19 bp, Homo sapiens
  siRNA target sequence for GOLGA5 (NM_005113.2,2083-2101).
gtaatgggtcttcgattaa

SEQ ID NO: 321678 - DNA, 19 bp, Homo sapiens
  siRNA target sequence for GOLGA5 (NM_005113.2,2088-2106).
gggtcttcgattaatatgt

SEQ ID NO: 321679 - DNA, 19 bp, Homo sapiens
  siRNA target sequence for GOLGA5 (NM_005113.2,2090-2108).
gtcttcgattaatatgtct

SEQ ID NO: 321680 - DNA, 19 bp, Homo sapiens
  siRNA target sequence for GOLGA5 (NM_005113.2,2096-2114).
gattaatatgtctggaatt

SEQ ID NO: 321681 - DNA, 19 bp, Homo sapiens
  siRNA target sequence for GOLGA5 (NM_005113.2,2128-2146).
gcactcgtctgcgaaatgt

SEQ ID NO: 321682 - DNA, 19 bp, Homo sapiens
  siRNA target sequence for GOLGA5 (NM_005113.2,2129-2147).
cactcgtctgcgaaatgtt

SEQ ID NO: 321683 - DNA, 19 bp, Homo sapiens
  siRNA target sequence for GOLGA5 (NM_005113.2,2138-2156).
gcgaaatgttcctgttctt

SEQ ID NO: 321684 - DNA, 19 bp, Homo sapiens
  siRNA target sequence for GOLGA5 (NM_005113.2,2173-2191).
ctaatctggcaggaatgta

SEQ ID NO: 321685 - DNA, 19 bp, Homo sapiens
  siRNA target sequence for GOLGA5 (NM_005113.2,2182-2200).
caggaatgtacggaaaagt

SEQ ID NO: 321686 - DNA, 19 bp, Homo sapiens
  siRNA target sequence for GOLGA5 (NM_005113.2,2202-2220).
cgcaaagctgctagttcaa

SEQ ID NO: 321687 - DNA, 19 bp, Homo sapiens
  siRNA target sequence for GOLGA5 (NM_005113.2,2233-2251).
gtattcgcctgggaatttt

SEQ ID NO: 321688 - DNA, 19 bp, Homo sapiens
  siRNA target sequence for GOLGA5 (NM_005113.2,2245-2263).
gaatttttctccgaagata

SEQ ID NO: 321689 - DNA, 19 bp, Homo sapiens
  siRNA target sequence for GOLGA5 (NM_005113.2,2264-2282).
ccccatagcgcgagttttt

SEQ ID NO: 321690 - DNA, 19 bp, Homo sapiens
  siRNA target sequence for GOLGA5 (NM_005113.2,2266-2284).
ccatagcgcgagtttttgt

SEQ ID NO: 321691 - DNA, 19 bp, Homo sapiens
  siRNA target sequence for GOLGA5 (NM_005113.2,2267-2285).
catagcgcgagtttttgta

SEQ ID NO: 321692 - DNA, 19 bp, Homo sapiens
  siRNA target sequence for GOLGA5 (NM_005113.2,2271-2289).
gcgcgagtttttgtaatta

SEQ ID NO: 321693 - DNA, 19 bp, Homo sapiens
  siRNA target sequence for GOLGA5 (NM_005113.2,2272-2290).
cgcgagtttttgtaattat

SEQ ID NO: 321694 - DNA, 19 bp, Homo sapiens
  siRNA target sequence for GOLGA5 (NM_005113.2,2273-2291).
gcgagtttttgtaattata

SEQ ID NO: 321695 - DNA, 19 bp, Homo sapiens
  siRNA target sequence for GOLGA5 (NM_005113.2,2351-2369).
gcaccacgaccaaccatat

SEQ ID NO: 321696 - DNA, 19 bp, Homo sapiens
  siRNA target sequence for GOLGIN-67 (NM_015003.3,1039-1057).
ccatacgggagcagatact

SEQ ID NO: 321697 - DNA, 19 bp, Homo sapiens
  siRNA target sequence for GOLGIN-67 (NM_015003.3,1066-1084).
gacacgtgacacagttgaa

SEQ ID NO: 321698 - DNA, 19 bp, Homo sapiens
  siRNA target sequence for K6IRS2 (NM_080747.1,811-829).
ccttgacagatgagattaa

SEQ ID NO: 321699 - DNA, 19 bp, Homo sapiens
  siRNA target sequence for K6IRS2 (NM_080747.1,1370-1388).
gtctggcgaatatccaaat

SEQ ID NO: 321700 - DNA, 19 bp, Homo sapiens
  siRNA target sequence for K6IRS2 (NM_080747.1,1375-1393).
gcgaatatccaaattctgt

SEQ ID NO: 321701 - DNA, 19 bp, Homo sapiens
  siRNA target sequence for K6IRS2 (NM_080747.1,1458-1476).
ggcgcctcaagcagttata

SEQ ID NO: 321702 - DNA, 19 bp, Homo sapiens
  siRNA target sequence for K6IRS2 (NM_080747.1,1469-1487).
cagttatagctacaaaact

SEQ ID NO: 321703 - DNA, 19 bp, Homo sapiens
  siRNA target sequence for K6IRS2 (NM_080747.1,1536-1554).
gatccccttgccaaaacct

SEQ ID NO: 321704 - DNA, 19 bp, Homo sapiens
  siRNA target sequence for KIAA0373 (NM_014684.1,1214-1232).
gttgtagataatagtgttt

SEQ ID NO: 321705 - DNA, 19 bp, Homo sapiens
  siRNA target sequence for KIAA0373 (NM_014684.1,1241-1259).
gaactagaactggctaata

SEQ ID NO: 321706 - DNA, 19 bp, Homo sapiens
  siRNA target sequence for KIAA0373 (NM_014684.1,1254-1272).
ctaataaacagtacaatga

SEQ ID NO: 321707 - DNA, 19 bp, Homo sapiens
  siRNA target sequence for KIAA0373 (NM_014684.1,1271-1289).
gaactgactgctaagtaca

SEQ ID NO: 321708 - DNA, 19 bp, Homo sapiens
  siRNA target sequence for KIAA0373 (NM_014684.1,1281-1299).
ctaagtacagggacatctt

SEQ ID NO: 321709 - DNA, 19 bp, Homo sapiens
  siRNA target sequence for KIAA0373 (NM_014684.1,1291-1309).
ggacatcttgcaaaaagat

SEQ ID NO: 321710 - DNA, 19 bp, Homo sapiens
  siRNA target sequence for KIAA0373 (NM_014684.1,1292-1310).
gacatcttgcaaaaagata

SEQ ID NO: 321711 - DNA, 19 bp, Homo sapiens
  siRNA target sequence for KIAA0373 (NM_014684.1,1300-1318).
gcaaaaagataatatgctt

SEQ ID NO: 321712 - DNA, 19 bp, Homo sapiens
  siRNA target sequence for KIAA0373 (NM_014684.1,1307-1325).
gataatatgcttgttcaaa

SEQ ID NO: 321713 - DNA, 19 bp, Homo sapiens
  siRNA target sequence for KIAA0373 (NM_014684.1,1373-1391).
gaacaagtggagtctataa

SEQ ID NO: 321714 - DNA, 19 bp, Homo sapiens
  siRNA target sequence for KIAA0373 (NM_014684.1,1570-1588).
gcagcgggctgaacattgt

SEQ ID NO: 321715 - DNA, 19 bp, Homo sapiens
  siRNA target sequence for KIAA0373 (NM_014684.1,1573-1591).
gcgggctgaacattgtcaa

SEQ ID NO: 321716 - DNA, 19 bp, Homo sapiens
  siRNA target sequence for KIAA0373 (NM_014684.1,1574-1592).
cgggctgaacattgtcaaa

SEQ ID NO: 321717 - DNA, 19 bp, Homo sapiens
  siRNA target sequence for KIAA0373 (NM_014684.1,1575-1593).
gggctgaacattgtcaaaa

SEQ ID NO: 321718 - DNA, 19 bp, Homo sapiens
  siRNA target sequence for KIAA0373 (NM_014684.1,1580-1598).
gaacattgtcaaaaaatgt

SEQ ID NO: 321719 - DNA, 19 bp, Homo sapiens
  siRNA target sequence for KIAA0373 (NM_014684.1,1604-1622).
cacttacggacttcgttaa

SEQ ID NO: 321720 - DNA, 19 bp, Homo sapiens
  siRNA target sequence for KIAA0373 (NM_014684.1,1610-1628).
cggacttcgttaaagcaaa

SEQ ID NO: 321721 - DNA, 19 bp, Homo sapiens
  siRNA target sequence for KIAA0373 (NM_014684.1,1611-1629).
ggacttcgttaaagcaaat

SEQ ID NO: 321722 - DNA, 19 bp, Homo sapiens
  siRNA target sequence for KIAA0373 (NM_014684.1,1614-1632).
cttcgttaaagcaaatgga

SEQ ID NO: 321723 - DNA, 19 bp, Homo sapiens
  siRNA target sequence for KIAA0373 (NM_014684.1,1625-1643).
caaatggaggaacgtaatt

SEQ ID NO: 321724 - DNA, 19 bp, Homo sapiens
  siRNA target sequence for KIAA0373 (NM_014684.1,1702-1720).
ggaacagatgttaagagat

SEQ ID NO: 321725 - DNA, 19 bp, Homo sapiens
  siRNA target sequence for KIAA0373 (NM_014684.1,1764-1782).
ggcaacggattctagaatt

SEQ ID NO: 321726 - DNA, 19 bp, Homo sapiens
  siRNA target sequence for KIAA0373 (NM_014684.1,1765-1783).
gcaacggattctagaatta

SEQ ID NO: 321727 - DNA, 19 bp, Homo sapiens
  siRNA target sequence for KIAA0373 (NM_014684.1,1769-1787).
cggattctagaattagaga

SEQ ID NO: 321728 - DNA, 19 bp, Homo sapiens
  siRNA target sequence for KIAA0373 (NM_014684.1,1816-1834).
gtcaaaactgagagagatt

SEQ ID NO: 321729 - DNA, 19 bp, Homo sapiens
  siRNA target sequence for KIAA0373 (NM_014684.1,1825-1843).
gagagagatttctgatatt

SEQ ID NO: 321730 - DNA, 19 bp, Homo sapiens
  siRNA target sequence for KIAA0373 (NM_014684.1,1867-1885).
gaatgcacaacaacaatct

SEQ ID NO: 321731 - DNA, 19 bp, Homo sapiens
  siRNA target sequence for KIAA0373 (NM_014684.1,1884-1902).
ctagggacaaggaagtaga

SEQ ID NO: 321732 - DNA, 19 bp, Homo sapiens
  siRNA target sequence for KIAA0373 (NM_014684.1,1911-1929).
gaatgcaactgctagacta

SEQ ID NO: 321733 - DNA, 19 bp, Homo sapiens
  siRNA target sequence for KIAA0373 (NM_014684.1,1961-1979).
gccaagttgcaccaacata

SEQ ID NO: 321734 - DNA, 19 bp, Homo sapiens
  siRNA target sequence for KIAA0373 (NM_014684.1,1963-1981).
caagttgcaccaacataat

SEQ ID NO: 321735 - DNA, 19 bp, Homo sapiens
  siRNA target sequence for KIAA0373 (NM_014684.1,2115-2133).
ctcgtttggagggaagaaa

SEQ ID NO: 321736 - DNA, 19 bp, Homo sapiens
  siRNA target sequence for KIAA0373 (NM_014684.1,2147-2165).
ctgcgccaaacaattcagt

SEQ ID NO: 321737 - DNA, 19 bp, Homo sapiens
  siRNA target sequence for KIAA0373 (NM_014684.1,2164-2182).
gtctctacgacgacagttt

SEQ ID NO: 321738 - DNA, 19 bp, Homo sapiens
  siRNA target sequence for KIAA0373 (NM_014684.1,2215-2233).
gttctccaaaacaatgatt

SEQ ID NO: 321739 - DNA, 19 bp, Homo sapiens
  siRNA target sequence for KIAA0373 (NM_014684.1,2338-2356).
gggcctggaagagttaata

SEQ ID NO: 321740 - DNA, 19 bp, Homo sapiens
  siRNA target sequence for KIAA0373 (NM_014684.1,2339-2357).
ggcctggaagagttaataa

SEQ ID NO: 321741 - DNA, 19 bp, Homo sapiens
  siRNA target sequence for KIAA0373 (NM_014684.1,2358-2376).
gcactttaaaggataccaa

SEQ ID NO: 321742 - DNA, 19 bp, Homo sapiens
  siRNA target sequence for KIAA0373 (NM_014684.1,2390-2408).
gtaatcaactggcatatga

SEQ ID NO: 321743 - DNA, 19 bp, Homo sapiens
  siRNA target sequence for KIAA0373 (NM_014684.1,2420-2438).
cttcgtcttcaagaactta

SEQ ID NO: 321744 - DNA, 19 bp, Homo sapiens
  siRNA target sequence for KIAA0373 (NM_014684.1,2441-2459).
ctaaatcgggaattagtca

SEQ ID NO: 321745 - DNA, 19 bp, Homo sapiens
  siRNA target sequence for KIAA0373 (NM_014684.1,2499-2517).
ctgaatatgaacgtacaat

SEQ ID NO: 321746 - DNA, 19 bp, Homo sapiens
  siRNA target sequence for KIAA0373 (NM_014684.1,2501-2519).
gaatatgaacgtacaatca

SEQ ID NO: 321747 - DNA, 19 bp, Homo sapiens
  siRNA target sequence for KIAA0373 (NM_014684.1,2548-2566).
gaacaagtttcatgaagaa

SEQ ID NO: 321748 - DNA, 19 bp, Homo sapiens
  siRNA target sequence for KIAA0373 (NM_014684.1,2578-2596).
ctgggatcaaagagaagtt

SEQ ID NO: 321749 - DNA, 19 bp, Homo sapiens
  siRNA target sequence for KIAA0373 (NM_014684.1,2602-2620).
ggaacgccaactagacatt

SEQ ID NO: 321750 - DNA, 19 bp, Homo sapiens
  siRNA target sequence for KIAA0373 (NM_014684.1,2603-2621).
gaacgccaactagacattt

SEQ ID NO: 321751 - DNA, 19 bp, Homo sapiens
  siRNA target sequence for KIAA0373 (NM_014684.1,2626-2644).
ccgtcagcaaaatgaaata

SEQ ID NO: 321752 - DNA, 19 bp, Homo sapiens
  siRNA target sequence for KIAA0373 (NM_014684.1,2645-2663).
ctaaatgcggcacaaaagt

SEQ ID NO: 321753 - DNA, 19 bp, Homo sapiens
  siRNA target sequence for KIAA0373 (NM_014684.1,2682-2700).
caatccctgaccctagttt

SEQ ID NO: 321754 - DNA, 19 bp, Homo sapiens
  siRNA target sequence for KIAA0373 (NM_014684.1,2697-2715).
gtttgccccttccaaatca

SEQ ID NO: 321755 - DNA, 19 bp, Homo sapiens
  siRNA target sequence for KIAA0373 (NM_014684.1,2703-2721).
cccttccaaatcaacttga

SEQ ID NO: 321756 - DNA, 19 bp, Homo sapiens
  siRNA target sequence for KIAA0373 (NM_014684.1,2720-2738).
gagatcgctctaaggaaaa

SEQ ID NO: 321757 - DNA, 19 bp, Homo sapiens
  siRNA target sequence for KIAA0373 (NM_014684.1,2722-2740).
gatcgctctaaggaaaatt

SEQ ID NO: 321758 - DNA, 19 bp, Homo sapiens
  siRNA target sequence for KIAA0373 (NM_014684.1,2743-2761).
ggagaacattcgaataatt

SEQ ID NO: 321759 - DNA, 19 bp, Homo sapiens
  siRNA target sequence for KIAA0373 (NM_014684.1,2746-2764).
gaacattcgaataattcta

SEQ ID NO: 321760 - DNA, 19 bp, Homo sapiens
  siRNA target sequence for KIAA0373 (NM_014684.1,2772-2790).
gggcaacttgcaaatcact

SEQ ID NO: 321761 - DNA, 19 bp, Homo sapiens
  siRNA target sequence for KIAA0373 (NM_014684.1,2773-2791).
ggcaacttgcaaatcacta

SEQ ID NO: 321762 - DNA, 19 bp, Homo sapiens
  siRNA target sequence for KIAA0373 (NM_014684.1,2826-2844).
ggttagcagaacaaaatat

SEQ ID NO: 321763 - DNA, 19 bp, Homo sapiens
  siRNA target sequence for KIAA0373 (NM_014684.1,2831-2849).
gcagaacaaaatatactgt

SEQ ID NO: 321764 - DNA, 19 bp, Homo sapiens
  siRNA target sequence for KIAA0373 (NM_014684.1,2946-2964).
caaaatctcaccacacatt

SEQ ID NO: 321765 - DNA, 19 bp, Homo sapiens
  siRNA target sequence for KIAA0373 (NM_014684.1,2952-2970).
ctcaccacacattgaaaat

SEQ ID NO: 321766 - DNA, 19 bp, Homo sapiens
  siRNA target sequence for KIAA0373 (NM_014684.1,2972-2990).
gctcatcaaaccattgcaa

SEQ ID NO: 321767 - DNA, 19 bp, Homo sapiens
  siRNA target sequence for KIAA0373 (NM_014684.1,2992-3010).
catgcaagcaaggttaaat

SEQ ID NO: 321768 - DNA, 19 bp, Homo sapiens
  siRNA target sequence for KIAA0373 (NM_014684.1,3031-3049).
gaagtatcaacgtcttcta

SEQ ID NO: 321769 - DNA, 19 bp, Homo sapiens
  siRNA target sequence for KIAA0373 (NM_014684.1,3034-3052).
gtatcaacgtcttctagaa

SEQ ID NO: 321770 - DNA, 19 bp, Homo sapiens
  siRNA target sequence for KIAA0373 (NM_014684.1,3133-3151).
ggctgatagttcactaaat

SEQ ID NO: 321771 - DNA, 19 bp, Homo sapiens
  siRNA target sequence for KIAA0373 (NM_014684.1,3134-3152).
gctgatagttcactaaata

SEQ ID NO: 321772 - DNA, 19 bp, Homo sapiens
  siRNA target sequence for KIAA0373 (NM_014684.1,3135-3153).
ctgatagttcactaaataa

SEQ ID NO: 321773 - DNA, 19 bp, Homo sapiens
  siRNA target sequence for KIAA0373 (NM_014684.1,3141-3159).
gttcactaaataaattcaa

SEQ ID NO: 321774 - DNA, 19 bp, Homo sapiens
  siRNA target sequence for KIAA0373 (NM_014684.1,3165-3183).
cggcttgggatttaatgaa

SEQ ID NO: 321775 - DNA, 19 bp, Homo sapiens
  siRNA target sequence for KIAA0373 (NM_014684.1,3168-3186).
cttgggatttaatgaaaca

SEQ ID NO: 321776 - DNA, 19 bp, Homo sapiens
  siRNA target sequence for KIAA0373 (NM_014684.1,3203-3221).
cctaccaacaagcatttta

SEQ ID NO: 321777 - DNA, 19 bp, Homo sapiens
  siRNA target sequence for KIAA0373 (NM_014684.1,3273-3291).
cctcactcttggtcaaact

SEQ ID NO: 321778 - DNA, 19 bp, Homo sapiens
  siRNA target sequence for KIAA0373 (NM_014684.1,3274-3292).
ctcactcttggtcaaacta

SEQ ID NO: 321779 - DNA, 19 bp, Homo sapiens
  siRNA target sequence for KIAA0373 (NM_014684.1,3276-3294).
cactcttggtcaaactaaa

SEQ ID NO: 321780 - DNA, 19 bp, Homo sapiens
  siRNA target sequence for KIAA0373 (NM_014684.1,3278-3296).
ctcttggtcaaactaaaga

SEQ ID NO: 321781 - DNA, 19 bp, Homo sapiens
  siRNA target sequence for KIAA0373 (NM_014684.1,3284-3302).
gtcaaactaaagaaagtat

SEQ ID NO: 321782 - DNA, 19 bp, Homo sapiens
  siRNA target sequence for KIAA0373 (NM_014684.1,3413-3431).
gcggaagtagaggatttaa

SEQ ID NO: 321783 - DNA, 19 bp, Homo sapiens
  siRNA target sequence for KIAA0373 (NM_014684.1,3414-3432).
cggaagtagaggatttaaa

SEQ ID NO: 321784 - DNA, 19 bp, Homo sapiens
  siRNA target sequence for KIAA0373 (NM_014684.1,3477-3495).
ctgaacttcaggctcaaaa

SEQ ID NO: 321785 - DNA, 19 bp, Homo sapiens
  siRNA target sequence for KIAA0373 (NM_014684.1,3510-3528).
gagctccaacaactacaat

SEQ ID NO: 321786 - DNA, 19 bp, Homo sapiens
  siRNA target sequence for KIAA0373 (NM_014684.1,3512-3530).
gctccaacaactacaatga

SEQ ID NO: 321787 - DNA, 19 bp, Homo sapiens
  siRNA target sequence for KIAA0373 (NM_014684.1,3525-3543).
caatgagaaatctagtaga

SEQ ID NO: 321788 - DNA, 19 bp, Homo sapiens
  siRNA target sequence for KIAA0373 (NM_014684.1,3633-3651).
ctgctgaagaacgtattat

SEQ ID NO: 321789 - DNA, 19 bp, Homo sapiens
  siRNA target sequence for KIAA0373 (NM_014684.1,3673-3691).
ggcccatctcaatgttcaa

SEQ ID NO: 321790 - DNA, 19 bp, Homo sapiens
  siRNA target sequence for KIAA0373 (NM_014684.1,3682-3700).
caatgttcaacaaatcgtt

SEQ ID NO: 321791 - DNA, 19 bp, Homo sapiens
  siRNA target sequence for KIAA0373 (NM_014684.1,3697-3715).
cgttgatcgacatactaga

SEQ ID NO: 321792 - DNA, 19 bp, Homo sapiens
  siRNA target sequence for KIAA0373 (NM_014684.1,3705-3723).
gacatactagagagctaaa

SEQ ID NO: 321793 - DNA, 19 bp, Homo sapiens
  siRNA target sequence for KIAA0373 (NM_014684.1,3707-3725).
catactagagagctaaaga

SEQ ID NO: 321794 - DNA, 19 bp, Homo sapiens
  siRNA target sequence for KIAA0373 (NM_014684.1,3792-3810).
gagaaaactcactaactga

SEQ ID NO: 321795 - DNA, 19 bp, Homo sapiens
  siRNA target sequence for KIAA0373 (NM_014684.1,3927-3945).
gactaaccagtggattaca

SEQ ID NO: 321796 - DNA, 19 bp, Homo sapiens
  siRNA target sequence for KIAA0373 (NM_014684.1,3947-3965).
ggcaaacccctgacagata

SEQ ID NO: 321797 - DNA, 19 bp, Homo sapiens
  siRNA target sequence for KIAA0373 (NM_014684.1,3948-3966).
gcaaacccctgacagataa

SEQ ID NO: 321798 - DNA, 19 bp, Homo sapiens
  siRNA target sequence for KIAA0373 (NM_014684.1,3949-3967).
caaacccctgacagataat

SEQ ID NO: 321799 - DNA, 19 bp, Homo sapiens
  siRNA target sequence for KIAA0373 (NM_014684.1,3962-3980).
gataataaacaaagtctaa

SEQ ID NO: 321800 - DNA, 19 bp, Homo sapiens
  siRNA target sequence for KIAA0373 (NM_014684.1,4039-4057).
ggaagtagacctaaaacct

SEQ ID NO: 321801 - DNA, 19 bp, Homo sapiens
  siRNA target sequence for KIAA0373 (NM_014684.1,4040-4058).
gaagtagacctaaaaccta

SEQ ID NO: 321802 - DNA, 19 bp, Homo sapiens
  siRNA target sequence for KIAA0373 (NM_014684.1,4127-4145).
gaaggaattcgaaacaagt

SEQ ID NO: 321803 - DNA, 19 bp, Homo sapiens
  siRNA target sequence for KIAA0373 (NM_014684.1,4130-4148).
ggaattcgaaacaagttaa

SEQ ID NO: 321804 - DNA, 19 bp, Homo sapiens
  siRNA target sequence for KIAA0373 (NM_014684.1,4160-4178).
ggggaagtctttactttaa

SEQ ID NO: 321805 - DNA, 19 bp, Homo sapiens
  siRNA target sequence for KIAA0373 (NM_014684.1,4162-4180).
ggaagtctttactttaaca

SEQ ID NO: 321806 - DNA, 19 bp, Homo sapiens
  siRNA target sequence for KIAA0373 (NM_014684.1,4213-4231).
caaagccgataaagagaaa

SEQ ID NO: 321807 - DNA, 19 bp, Homo sapiens
  siRNA target sequence for KIAA0373 (NM_014684.1,4217-4235).
gccgataaagagaaactta

SEQ ID NO: 321808 - DNA, 19 bp, Homo sapiens
  siRNA target sequence for KIAA0373 (NM_014684.1,4219-4237).
cgataaagagaaacttact

SEQ ID NO: 321809 - DNA, 19 bp, Homo sapiens
  siRNA target sequence for KIAA0373 (NM_014684.1,4260-4278).
ctggcatgactgttgatca

SEQ ID NO: 321810 - DNA, 19 bp, Homo sapiens
  siRNA target sequence for KIAA0373 (NM_014684.1,4389-4407).
ctcgagattctgttgtaga

SEQ ID NO: 321811 - DNA, 19 bp, Homo sapiens
  siRNA target sequence for KIAA0373 (NM_014684.1,4465-4483).
gttttcaaaggatacatat

SEQ ID NO: 321812 - DNA, 19 bp, Homo sapiens
  siRNA target sequence for KIAA0373 (NM_014684.1,4470-4488).
caaaggatacatattctaa

SEQ ID NO: 321813 - DNA, 19 bp, Homo sapiens
  siRNA target sequence for KIAA0373 (NM_014684.1,4479-4497).
catattctaagccttcaat

SEQ ID NO: 321814 - DNA, 19 bp, Homo sapiens
  siRNA target sequence for KIAA0373 (NM_014684.1,4550-4568).
gaaaacttgaagttgtcat

SEQ ID NO: 321815 - DNA, 19 bp, Homo sapiens
  siRNA target sequence for KIAA0373 (NM_014684.1,4592-4610).
cagcttgaacaagcaaata

SEQ ID NO: 321816 - DNA, 19 bp, Homo sapiens
  siRNA target sequence for KIAA0373 (NM_014684.1,4694-4712).
cggaaacttggccatgtta

SEQ ID NO: 321817 - DNA, 19 bp, Homo sapiens
  siRNA target sequence for KIAA0373 (NM_014684.1,4721-4739).
ggtagaagtggaaagacaa

SEQ ID NO: 321818 - DNA, 19 bp, Homo sapiens
  siRNA target sequence for KIAA0373 (NM_014684.1,4882-4900).
ggctgaattagaaaaactt

SEQ ID NO: 321819 - DNA, 19 bp, Homo sapiens
  siRNA target sequence for KIAA0373 (NM_014684.1,4905-4923).
ctcatcttgggcatcagtt

SEQ ID NO: 321820 - DNA, 19 bp, Homo sapiens
  siRNA target sequence for KIAA0373 (NM_014684.1,4921-4939).
gttgagcatgcactatgaa

SEQ ID NO: 321821 - DNA, 19 bp, Homo sapiens
  siRNA target sequence for KIAA0373 (NM_014684.1,4926-4944).
gcatgcactatgaatccaa

SEQ ID NO: 321822 - DNA, 19 bp, Homo sapiens
  siRNA target sequence for KIAA0373 (NM_014684.1,4984-5002).
gcttcgtaaagaacttaaa

SEQ ID NO: 321823 - DNA, 19 bp, Homo sapiens
  siRNA target sequence for KIAA0373 (NM_014684.1,5030-5048).
cggatagcaaagaataatt

SEQ ID NO: 321824 - DNA, 19 bp, Homo sapiens
  siRNA target sequence for KIAA0373 (NM_014684.1,5068-5086).
gatgacagttcaactagaa

SEQ ID NO: 321825 - DNA, 19 bp, Homo sapiens
  siRNA target sequence for KIAA0373 (NM_014684.1,5148-5166).
gtaagagctggaaatccat

SEQ ID NO: 321826 - DNA, 19 bp, Homo sapiens
  siRNA target sequence for KIAA0373 (NM_014684.1,5235-5253).
gcattactgaccttaaaca

SEQ ID NO: 321827 - DNA, 19 bp, Homo sapiens
  siRNA target sequence for KIAA0373 (NM_014684.1,5320-5338).
gattaagattcttaaacat

SEQ ID NO: 321828 - DNA, 19 bp, Homo sapiens
  siRNA target sequence for KIAA0373 (NM_014684.1,5384-5402).
caagttcttagattagcta

SEQ ID NO: 321829 - DNA, 19 bp, Homo sapiens
  siRNA target sequence for KIAA0373 (NM_014684.1,5486-5504).
cctgatgctgatcaactaa

SEQ ID NO: 321830 - DNA, 19 bp, Homo sapiens
  siRNA target sequence for KIAA0373 (NM_014684.1,5487-5505).
ctgatgctgatcaactaaa

SEQ ID NO: 321831 - DNA, 19 bp, Homo sapiens
  siRNA target sequence for KIAA0373 (NM_014684.1,5668-5686).
gaagaatattctcttagaa

SEQ ID NO: 321832 - DNA, 19 bp, Homo sapiens
  siRNA target sequence for KIAA0373 (NM_014684.1,5708-5726).
gaacaattgggagttgaat

SEQ ID NO: 321833 - DNA, 19 bp, Homo sapiens
  siRNA target sequence for KIAA0373 (NM_014684.1,5780-5798).
gttaatttccccatttact

SEQ ID NO: 321834 - DNA, 19 bp, Homo sapiens
  siRNA target sequence for KRT23 (NM_015515.3,890-908).
gaaagccgcatcctgaaat

SEQ ID NO: 321835 - DNA, 19 bp, Homo sapiens
  siRNA target sequence for KRT23 (NM_015515.3,921-939).
gagatcctggcagtaagaa

SEQ ID NO: 321836 - DNA, 19 bp, Homo sapiens
  siRNA target sequence for KRT23 (NM_015515.3,1011-1029).
ctcagattattcttctcat

SEQ ID NO: 321837 - DNA, 19 bp, Homo sapiens
  siRNA target sequence for KRT23 (NM_015515.3,1082-1100).
cactcctttaagaaagact

SEQ ID NO: 321838 - DNA, 19 bp, Homo sapiens
  siRNA target sequence for KRT23 (NM_015515.3,1136-1154).
gacaacctgaccattgtca

SEQ ID NO: 321839 - DNA, 19 bp, Homo sapiens
  siRNA target sequence for KRT23 (NM_015515.3,1188-1206).
ggaaagagctcattctcat

SEQ ID NO: 321840 - DNA, 19 bp, Homo sapiens
  siRNA target sequence for KRT23 (NM_015515.3,1248-1266).
caagtgacttcaatgtcaa

SEQ ID NO: 321841 - DNA, 19 bp, Homo sapiens
  siRNA target sequence for KRT23 (NM_015515.3,1251-1269).
gtgacttcaatgtcaatgt

SEQ ID NO: 321842 - DNA, 19 bp, Homo sapiens
  siRNA target sequence for KRT23 (NM_015515.3,1286-1304).
cccagggaagatctgatta

SEQ ID NO: 321843 - DNA, 19 bp, Homo sapiens
  siRNA target sequence for KRT23 (NM_015515.3,1443-1461).
gtgacatccacgaactgaa

SEQ ID NO: 321844 - DNA, 19 bp, Homo sapiens
  siRNA target sequence for KRT23 (NM_015515.3,1507-1525).
cacgaaatctgctttggaa

SEQ ID NO: 321845 - DNA, 19 bp, Homo sapiens
  siRNA target sequence for KRT23 (NM_015515.3,1571-1589).
gacatgcaagagatcatct

SEQ ID NO: 321846 - DNA, 19 bp, Homo sapiens
  siRNA target sequence for KRT23 (NM_015515.3,1611-1629).
cgcagctacgccatgaact

SEQ ID NO: 321847 - DNA, 19 bp, Homo sapiens
  siRNA target sequence for KRT23 (NM_015515.3,1746-1764).
caaagtcgagcatgaaagt

SEQ ID NO: 321848 - DNA, 19 bp, Homo sapiens
  siRNA target sequence for KRT23 (NM_015515.3,1803-1821).
ccatcaacggaagattagt

SEQ ID NO: 321849 - DNA, 19 bp, Homo sapiens
  siRNA target sequence for KRT23 (NM_015515.3,1804-1822).
catcaacggaagattagtt

SEQ ID NO: 321850 - DNA, 19 bp, Homo sapiens
  siRNA target sequence for KRT23 (NM_015515.3,1810-1828).
cggaagattagttctttgt

SEQ ID NO: 321851 - DNA, 19 bp, Homo sapiens
  siRNA target sequence for KRT24 (NM_019016.1,303-321).
ctctgggacaggatttggt

SEQ ID NO: 321852 - DNA, 19 bp, Homo sapiens
  siRNA target sequence for KRT24 (NM_019016.1,367-385).
ggattctgtgggagttcta

SEQ ID NO: 321853 - DNA, 19 bp, Homo sapiens
  siRNA target sequence for KRT24 (NM_019016.1,504-522).
ccgcttggccaattaccta

SEQ ID NO: 321854 - DNA, 19 bp, Homo sapiens
  siRNA target sequence for KRT24 (NM_019016.1,614-632).
gtggatcgggaagagatta

SEQ ID NO: 321855 - DNA, 19 bp, Homo sapiens
  siRNA target sequence for KRT24 (NM_019016.1,620-638).
cgggaagagattatagcaa

SEQ ID NO: 321856 - DNA, 19 bp, Homo sapiens
  siRNA target sequence for KRT24 (NM_019016.1,944-962).
gggaggtgaccgtagaaat

SEQ ID NO: 321857 - DNA, 19 bp, Homo sapiens
  siRNA target sequence for KRT24 (NM_019016.1,948-966).
ggtgaccgtagaaatgaat

SEQ ID NO: 321858 - DNA, 19 bp, Homo sapiens
  siRNA target sequence for KRT24 (NM_019016.1,976-994).
gggaccgacctgaccaaat

SEQ ID NO: 321859 - DNA, 19 bp, Homo sapiens
  siRNA target sequence for KRT24 (NM_019016.1,978-996).
gaccgacctgaccaaatta

SEQ ID NO: 321860 - DNA, 19 bp, Homo sapiens
  siRNA target sequence for KRT24 (NM_019016.1,982-1000).
gacctgaccaaattactga

SEQ ID NO: 321861 - DNA, 19 bp, Homo sapiens
  siRNA target sequence for KRT24 (NM_019016.1,1051-1069).
gctgaggagcggttcaaca

SEQ ID NO: 321862 - DNA, 19 bp, Homo sapiens
  siRNA target sequence for KRT24 (NM_019016.1,1052-1070).
ctgaggagcggttcaacaa

SEQ ID NO: 321863 - DNA, 19 bp, Homo sapiens
  siRNA target sequence for KRT24 (NM_019016.1,1127-1145).
ccaagaatgagataacaga

SEQ ID NO: 321864 - DNA, 19 bp, Homo sapiens
  siRNA target sequence for KRT24 (NM_019016.1,1189-1207).
caactggccatgaaaagct

SEQ ID NO: 321865 - DNA, 19 bp, Homo sapiens
  siRNA target sequence for KRT24 (NM_019016.1,1486-1504).
gtatctggtgactcaagat

SEQ ID NO: 321866 - DNA, 19 bp, Homo sapiens
  siRNA target sequence for KRT24 (NM_019016.1,1542-1560).
gactagagtgactaagact

SEQ ID NO: 321867 - DNA, 19 bp, Homo sapiens
  siRNA target sequence for KRT6IRS (NM_033448.1,200-218).
gtgtccggagcctcaatgt

SEQ ID NO: 321868 - DNA, 19 bp, Homo sapiens
  siRNA target sequence for KRT6IRS (NM_033448.1,237-255).
gagtggaggctatggattt

SEQ ID NO: 321869 - DNA, 19 bp, Homo sapiens
  siRNA target sequence for KRT6IRS (NM_033448.1,313-331).
cctgtgtgcccaactgtat

SEQ ID NO: 321870 - DNA, 19 bp, Homo sapiens
  siRNA target sequence for KRT6IRS (NM_033448.1,352-370).
caggttaccgtcaatgaga

SEQ ID NO: 321871 - DNA, 19 bp, Homo sapiens
  siRNA target sequence for KRT6IRS (NM_033448.1,770-788).
ctgcttacgccaataaggt

SEQ ID NO: 321872 - DNA, 19 bp, Homo sapiens
  siRNA target sequence for KRT6IRS (NM_033448.1,970-988).
gagattgccttgaagagta

SEQ ID NO: 321873 - DNA, 19 bp, Homo sapiens
  siRNA target sequence for KRT6IRS (NM_033448.1,1051-1069).
catggggacgacctcaaaa

SEQ ID NO: 321874 - DNA, 19 bp, Homo sapiens
  siRNA target sequence for KRT6IRS (NM_033448.1,1054-1072).
ggggacgacctcaaaaaca

SEQ ID NO: 321875 - DNA, 19 bp, Homo sapiens
  siRNA target sequence for KRT6IRS (NM_033448.1,1419-1437).
cagtggcggcagtgtctat

SEQ ID NO: 321876 - DNA, 19 bp, Homo sapiens
  siRNA target sequence for KRT6IRS (NM_033448.1,1537-1555).
ggcagtgccaacgattaca

SEQ ID NO: 321877 - DNA, 19 bp, Homo sapiens
  siRNA target sequence for KRT6IRS (NM_033448.1,1538-1556).
gcagtgccaacgattacaa

SEQ ID NO: 321878 - DNA, 19 bp, Homo sapiens
  siRNA target sequence for KRT6IRS (NM_033448.1,1541-1559).
gtgccaacgattacaaaga

SEQ ID NO: 321879 - DNA, 19 bp, Homo sapiens
  siRNA target sequence for KRT6IRS (NM_033448.1,1543-1561).
gccaacgattacaaagaca

SEQ ID NO: 321880 - DNA, 19 bp, Homo sapiens
  siRNA target sequence for KRTHB1 (NM_002281.2,53-71).
gacctgcggatcaggattt

SEQ ID NO: 321881 - DNA, 19 bp, Homo sapiens
  siRNA target sequence for MCRS1 (NM_006337.3,380-398).
gagcagcctggcaaaatct

SEQ ID NO: 321882 - DNA, 19 bp, Homo sapiens
  siRNA target sequence for MCRS1 (NM_006337.3,1017-1035).
gaccaagtgctgaacttct

SEQ ID NO: 321883 - DNA, 19 bp, Homo sapiens
  siRNA target sequence for MCRS1 (NM_006337.3,1334-1352).
gggtccggcctggaagata

SEQ ID NO: 321884 - DNA, 19 bp, Homo sapiens
  siRNA target sequence for MCRS1 (NM_006337.3,1335-1353).
ggtccggcctggaagatat

SEQ ID NO: 321885 - DNA, 19 bp, Homo sapiens
  siRNA target sequence for MCRS1 (NM_006337.3,1414-1432).
gtcgacggcccatctacat

SEQ ID NO: 321886 - DNA, 19 bp, Homo sapiens
  siRNA target sequence for MCRS1 (NM_006337.3,1503-1521).
ctgcgattcgtcttcctta

SEQ ID NO: 321887 - DNA, 19 bp, Homo sapiens
  siRNA target sequence for MCRS1 (NM_006337.3,1506-1524).
cgattcgtcttccttatca

SEQ ID NO: 321888 - DNA, 19 bp, Homo sapiens
  siRNA target sequence for MCRS1 (NM_006337.3,1507-1525).
gattcgtcttccttatcaa

SEQ ID NO: 321889 - DNA, 19 bp, Homo sapiens
  siRNA target sequence for MGC33295 (NM_152505.2,359-377).
cttcggcgtggcattagaa

SEQ ID NO: 321890 - DNA, 19 bp, Homo sapiens
  siRNA target sequence for MGC33295 (NM_152505.2,411-429).
ccaggcacaggcgattttt

SEQ ID NO: 321891 - DNA, 19 bp, Homo sapiens
  siRNA target sequence for MGC33295 (NM_152505.2,448-466).
ccaataagagtgttgatta

SEQ ID NO: 321892 - DNA, 19 bp, Homo sapiens
  siRNA target sequence for MGC33295 (NM_152505.2,502-520).
ctcagtatgattattcaga

SEQ ID NO: 321893 - DNA, 19 bp, Homo sapiens
  siRNA target sequence for MGC33295 (NM_152505.2,616-634).
ctaaaatctcccaatctaa

SEQ ID NO: 321894 - DNA, 19 bp, Homo sapiens
  siRNA target sequence for MGC33295 (NM_152505.2,631-649).
ctaaaggccagaaggaaat

SEQ ID NO: 321895 - DNA, 19 bp, Homo sapiens
  siRNA target sequence for MGC33295 (NM_152505.2,637-655).
gccagaaggaaatatcagt

SEQ ID NO: 321896 - DNA, 19 bp, Homo sapiens
  siRNA target sequence for MGC33295 (NM_152505.2,727-745).
ctatggctcatcgaatact

SEQ ID NO: 321897 - DNA, 19 bp, Homo sapiens
  siRNA target sequence for MGC33295 (NM_152505.2,746-764).
ctcagcaaggcttcataaa

SEQ ID NO: 321898 - DNA, 19 bp, Homo sapiens
  siRNA target sequence for MGC33295 (NM_152505.2,809-827).
ggaagccatccttacagaa

SEQ ID NO: 321899 - DNA, 19 bp, Homo sapiens
  siRNA target sequence for MGC33295 (NM_152505.2,830-848).
ccaatttttgaaacaactt

SEQ ID NO: 321900 - DNA, 19 bp, Homo sapiens
  siRNA target sequence for MGC33295 (NM_152505.2,852-870).
cttaggcatttgaaagcta

SEQ ID NO: 321901 - DNA, 19 bp, Homo sapiens
  siRNA target sequence for MGC33295 (NM_152505.2,857-875).
gcatttgaaagctatagga

SEQ ID NO: 321902 - DNA, 19 bp, Homo sapiens
  siRNA target sequence for MGC33295 (NM_152505.2,867-885).
gctataggaaaatatgaga

SEQ ID NO: 321903 - DNA, 19 bp, Homo sapiens
  siRNA target sequence for MGC33295 (NM_152505.2,1006-1024).
ctgacagccagttactgaa

SEQ ID NO: 321904 - DNA, 19 bp, Homo sapiens
  siRNA target sequence for MGC33295 (NM_152505.2,1012-1030).
gccagttactgaagactaa

SEQ ID NO: 321905 - DNA, 19 bp, Homo sapiens
  siRNA target sequence for MGC33295 (NM_152505.2,1013-1031).
ccagttactgaagactaaa

SEQ ID NO: 321906 - DNA, 19 bp, Homo sapiens
  siRNA target sequence for MGC33295 (NM_152505.2,1085-1103).
ggaagaactcactcataaa

SEQ ID NO: 321907 - DNA, 19 bp, Homo sapiens
  siRNA target sequence for MGC33295 (NM_152505.2,1086-1104).
gaagaactcactcataaat

SEQ ID NO: 321908 - DNA, 19 bp, Homo sapiens
  siRNA target sequence for MGC33295 (NM_152505.2,1211-1229).
gactcggaagactttagca

SEQ ID NO: 321909 - DNA, 19 bp, Homo sapiens
  siRNA target sequence for MGC33295 (NM_152505.2,1353-1371).
gacacagaggactatccaa

SEQ ID NO: 321910 - DNA, 19 bp, Homo sapiens
  siRNA target sequence for MGC33295 (NM_152505.2,1355-1373).
cacagaggactatccaaaa

SEQ ID NO: 321911 - DNA, 19 bp, Homo sapiens
  siRNA target sequence for MGC33295 (NM_152505.2,1359-1377).
gaggactatccaaaagttt

SEQ ID NO: 321912 - DNA, 19 bp, Homo sapiens
  siRNA target sequence for MGC33295 (NM_152505.2,1361-1379).
ggactatccaaaagtttct

SEQ ID NO: 321913 - DNA, 19 bp, Homo sapiens
  siRNA target sequence for MGC33295 (NM_152505.2,1415-1433).
gccattcacaagtatgaga

SEQ ID NO: 321914 - DNA, 19 bp, Homo sapiens
  siRNA target sequence for MGC33295 (NM_152505.2,1439-1457).
gggaacccaaaaatcagat

SEQ ID NO: 321915 - DNA, 19 bp, Homo sapiens
  siRNA target sequence for MGC33295 (NM_152505.2,1549-1567).
gtgtgaataaactaccaaa

SEQ ID NO: 321916 - DNA, 19 bp, Homo sapiens
  siRNA target sequence for MGC33295 (NM_152505.2,1569-1587).
caagaggattctaagagaa

SEQ ID NO: 321917 - DNA, 19 bp, Homo sapiens
  siRNA target sequence for MGC33295 (NM_152505.2,1982-2000).
caagcatctcagtaacaga

SEQ ID NO: 321918 - DNA, 19 bp, Homo sapiens
  siRNA target sequence for MGC33295 (NM_152505.2,2033-2051).
gtatgagccctcatttggt

SEQ ID NO: 321919 - DNA, 19 bp, Homo sapiens
  siRNA target sequence for MGC33295 (NM_152505.2,2039-2057).
gccctcatttggtaagtct

SEQ ID NO: 321920 - DNA, 19 bp, Homo sapiens
  siRNA target sequence for MGC33295 (NM_152505.2,2049-2067).
ggtaagtcttccagaataa

SEQ ID NO: 321921 - DNA, 19 bp, Homo sapiens
  siRNA target sequence for MGC33295 (NM_152505.2,2131-2149).
gctatgtcttgaaaactga

SEQ ID NO: 321922 - DNA, 19 bp, Homo sapiens
  siRNA target sequence for MGC33295 (NM_152505.2,2251-2269).
gagactctaaagtaactgt

SEQ ID NO: 321923 - DNA, 19 bp, Homo sapiens
  siRNA target sequence for MGC33295 (NM_152505.2,2257-2275).
ctaaagtaactgtggtaaa

SEQ ID NO: 321924 - DNA, 19 bp, Homo sapiens
  siRNA target sequence for MGC33295 (NM_152505.2,2285-2303).
gccatcgtcacctacagaa

SEQ ID NO: 321925 - DNA, 19 bp, Homo sapiens
  siRNA target sequence for MGC33295 (NM_152505.2,2290-2308).
cgtcacctacagaaggaaa

SEQ ID NO: 321926 - DNA, 19 bp, Homo sapiens
  siRNA target sequence for MLPH (NM_024101.4,288-306).
cgttgaagggcaagattaa

SEQ ID NO: 321927 - DNA, 19 bp, Homo sapiens
  siRNA target sequence for MLPH (NM_024101.4,525-543).
cactggagtggtactatga

SEQ ID NO: 321928 - DNA, 19 bp, Homo sapiens
  siRNA target sequence for MLPH (NM_024101.4,1049-1067).
gcactcgggtcgaatgtca

SEQ ID NO: 321929 - DNA, 19 bp, Homo sapiens
  siRNA target sequence for MLPH (NM_024101.4,1050-1068).
cactcgggtcgaatgtcat

SEQ ID NO: 321930 - DNA, 19 bp, Homo sapiens
  siRNA target sequence for MLPH (NM_024101.4,1202-1220).
gagctgaataagcatattt

SEQ ID NO: 321931 - DNA, 19 bp, Homo sapiens
  siRNA target sequence for MLPH (NM_024101.4,1299-1317).
gcacggaggccgatgtaga

SEQ ID NO: 321932 - DNA, 19 bp, Homo sapiens
  siRNA target sequence for MLPH (NM_024101.4,1417-1435).
gcccaacagggacaaatca

SEQ ID NO: 321933 - DNA, 19 bp, Homo sapiens
  siRNA target sequence for MLPH (NM_024101.4,1473-1491).
cggctgcccatcaaaccaa

SEQ ID NO: 321934 - DNA, 19 bp, Homo sapiens
  siRNA target sequence for MLPH (NM_024101.4,1523-1541).
gaccccgtccagtacaaca

SEQ ID NO: 321935 - DNA, 19 bp, Homo sapiens
  siRNA target sequence for MLPH (NM_024101.4,1615-1633).
gagcgaggtttcagacatt

SEQ ID NO: 321936 - DNA, 19 bp, Homo sapiens
  siRNA target sequence for MLPH (NM_024101.4,1618-1636).
cgaggtttcagacattgaa

SEQ ID NO: 321937 - DNA, 19 bp, Homo sapiens
  siRNA target sequence for MLPH (NM_024101.4,1704-1722).
caaacctcccgatatttct

SEQ ID NO: 321938 - DNA, 19 bp, Homo sapiens
  siRNA target sequence for MLPH (NM_024101.4,1845-1863).
gtcaaggtaaagatgatga

SEQ ID NO: 321939 - DNA, 19 bp, Homo sapiens
  siRNA target sequence for MLPH (NM_024101.4,1913-1931).
cccaacgcgaggaaaggaa

SEQ ID NO: 321940 - DNA, 19 bp, Homo sapiens
  siRNA target sequence for MLPH (NM_024101.4,1914-1932).
ccaacgcgaggaaaggaat

SEQ ID NO: 321941 - DNA, 19 bp, Homo sapiens
  siRNA target sequence for OLFM2 (NM_058164.1,727-745).
catggatggctattacaaa

SEQ ID NO: 321942 - DNA, 19 bp, Homo sapiens
  siRNA target sequence for OLFM2 (NM_058164.1,853-871).
caacggctccctgttctat

SEQ ID NO: 321943 - DNA, 19 bp, Homo sapiens
  siRNA target sequence for OLFM2 (NM_058164.1,857-875).
ggctccctgttctataaca

SEQ ID NO: 321944 - DNA, 19 bp, Homo sapiens
  siRNA target sequence for OLFM2 (NM_058164.1,861-879).
ccctgttctataacaagta

SEQ ID NO: 321945 - DNA, 19 bp, Homo sapiens
  siRNA target sequence for OLFM2 (NM_058164.1,885-903).
gcaacgtggtggtcaaata

SEQ ID NO: 321946 - DNA, 19 bp, Homo sapiens
  siRNA target sequence for OLFM2 (NM_058164.1,1204-1222).
ggtctacttcgcctatttt

SEQ ID NO: 321947 - DNA, 19 bp, Homo sapiens
  siRNA target sequence for OLFM2 (NM_058164.1,1205-1223).
gtctacttcgcctatttta

SEQ ID NO: 321948 - DNA, 19 bp, Homo sapiens
  siRNA target sequence for PCNT2 (NM_006031.3,151-169).
cttccgacagagaaaaaca

SEQ ID NO: 321949 - DNA, 19 bp, Homo sapiens
  siRNA target sequence for PCNT2 (NM_006031.3,180-198).
gttcgcattcggagaaaaa

SEQ ID NO: 321950 - DNA, 19 bp, Homo sapiens
  siRNA target sequence for PCNT2 (NM_006031.3,721-739).
cacaaaggagtgtgaacaa

SEQ ID NO: 321951 - DNA, 19 bp, Homo sapiens
  siRNA target sequence for PCNT2 (NM_006031.3,1426-1444).
gctggagttagagaatctt

SEQ ID NO: 321952 - DNA, 19 bp, Homo sapiens
  siRNA target sequence for PCNT2 (NM_006031.3,1438-1456).
gaatcttcaagcatcatat

SEQ ID NO: 321953 - DNA, 19 bp, Homo sapiens
  siRNA target sequence for PCNT2 (NM_006031.3,1470-1488).
cacaatcacaagaagagat

SEQ ID NO: 321954 - DNA, 19 bp, Homo sapiens
  siRNA target sequence for PCNT2 (NM_006031.3,1521-1539).
ggaccagtagacaggaatt

SEQ ID NO: 321955 - DNA, 19 bp, Homo sapiens
  siRNA target sequence for PCNT2 (NM_006031.3,1573-1591).
ctctcgtgtggaagattta

SEQ ID NO: 321956 - DNA, 19 bp, Homo sapiens
  siRNA target sequence for PCNT2 (NM_006031.3,1771-1789).
gtcctgtgtgggtttagaa

SEQ ID NO: 321957 - DNA, 19 bp, Homo sapiens
  siRNA target sequence for PCNT2 (NM_006031.3,1809-1827).
gaaaagatcacgttgatga

SEQ ID NO: 321958 - DNA, 19 bp, Homo sapiens
  siRNA target sequence for PCNT2 (NM_006031.3,1864-1882).
cttccaggcggagttagaa

SEQ ID NO: 321959 - DNA, 19 bp, Homo sapiens
  siRNA target sequence for PCNT2 (NM_006031.3,2217-2235).
ctcgtctgaaggacgattt

SEQ ID NO: 321960 - DNA, 19 bp, Homo sapiens
  siRNA target sequence for PCNT2 (NM_006031.3,2269-2287).
ccagaaggaactaaataat

SEQ ID NO: 321961 - DNA, 19 bp, Homo sapiens
  siRNA target sequence for PCNT2 (NM_006031.3,2337-2355).
cggactggaaagttatgaa

SEQ ID NO: 321962 - DNA, 19 bp, Homo sapiens
  siRNA target sequence for PCNT2 (NM_006031.3,2375-2393).
gctgaggagaagttaacat

SEQ ID NO: 321963 - DNA, 19 bp, Homo sapiens
  siRNA target sequence for PCNT2 (NM_006031.3,2376-2394).
ctgaggagaagttaacatt

SEQ ID NO: 321964 - DNA, 19 bp, Homo sapiens
  siRNA target sequence for PCNT2 (NM_006031.3,3061-3079).
gctcttacgagcagacttt

SEQ ID NO: 321965 - DNA, 19 bp, Homo sapiens
  siRNA target sequence for PCNT2 (NM_006031.3,3103-3121).
ctctcttcaccaaacgatt

SEQ ID NO: 321966 - DNA, 19 bp, Homo sapiens
  siRNA target sequence for PCNT2 (NM_006031.3,3105-3123).
ctcttcaccaaacgatttt

SEQ ID NO: 321967 - DNA, 19 bp, Homo sapiens
  siRNA target sequence for PCNT2 (NM_006031.3,3117-3135).
cgattttgactcaagagtt

SEQ ID NO: 321968 - DNA, 19 bp, Homo sapiens
  siRNA target sequence for PCNT2 (NM_006031.3,3401-3419).
ctgaaagaccaggttttat

SEQ ID NO: 321969 - DNA, 19 bp, Homo sapiens
  siRNA target sequence for PCNT2 (NM_006031.3,3409-3427).
ccaggttttatccttaagt

SEQ ID NO: 321970 - DNA, 19 bp, Homo sapiens
  siRNA target sequence for PCNT2 (NM_006031.3,3420-3438).
ccttaagtcacgagataga

SEQ ID NO: 321971 - DNA, 19 bp, Homo sapiens
  siRNA target sequence for PCNT2 (NM_006031.3,3421-3439).
cttaagtcacgagatagaa

SEQ ID NO: 321972 - DNA, 19 bp, Homo sapiens
  siRNA target sequence for PCNT2 (NM_006031.3,3743-3761).
gacagaactttgtctgaat

SEQ ID NO: 321973 - DNA, 19 bp, Homo sapiens
  siRNA target sequence for PCNT2 (NM_006031.3,3795-3813).
gccacatgtgtgaaagctt

SEQ ID NO: 321974 - DNA, 19 bp, Homo sapiens
  siRNA target sequence for PCNT2 (NM_006031.3,3817-3835).
catgagcccagaaagtgta

SEQ ID NO: 321975 - DNA, 19 bp, Homo sapiens
  siRNA target sequence for PCNT2 (NM_006031.3,3931-3949).
ggaagaagcacgccaaatt

SEQ ID NO: 321976 - DNA, 19 bp, Homo sapiens
  siRNA target sequence for PCNT2 (NM_006031.3,3935-3953).
gaagcacgccaaattcatt

SEQ ID NO: 321977 - DNA, 19 bp, Homo sapiens
  siRNA target sequence for PCNT2 (NM_006031.3,3943-3961).
ccaaattcattctcgtttt

SEQ ID NO: 321978 - DNA, 19 bp, Homo sapiens
  siRNA target sequence for PCNT2 (NM_006031.3,4092-4110).
gtacccttgagggattcaa

SEQ ID NO: 321979 - DNA, 19 bp, Homo sapiens
  siRNA target sequence for PCNT2 (NM_006031.3,4512-4530).
gcaaccagcggcaattcat

SEQ ID NO: 321980 - DNA, 19 bp, Homo sapiens
  siRNA target sequence for PCNT2 (NM_006031.3,4672-4690).
ggttgagttgttacaacaa

SEQ ID NO: 321981 - DNA, 19 bp, Homo sapiens
  siRNA target sequence for PCNT2 (NM_006031.3,4743-4761).
cggcagatagacaagtgtt

SEQ ID NO: 321982 - DNA, 19 bp, Homo sapiens
  siRNA target sequence for PCNT2 (NM_006031.3,4744-4762).
ggcagatagacaagtgtta

SEQ ID NO: 321983 - DNA, 19 bp, Homo sapiens
  siRNA target sequence for PCNT2 (NM_006031.3,4784-4802).
cgtctggaggagatgaaca

SEQ ID NO: 321984 - DNA, 19 bp, Homo sapiens
  siRNA target sequence for PCNT2 (NM_006031.3,4930-4948).
cacgttgcagtctacacta

SEQ ID NO: 321985 - DNA, 19 bp, Homo sapiens
  siRNA target sequence for PCNT2 (NM_006031.3,4933-4951).
gttgcagtctacactagat

SEQ ID NO: 321986 - DNA, 19 bp, Homo sapiens
  siRNA target sequence for PCNT2 (NM_006031.3,5040-5058).
gcgagagcgaggttttgga

SEQ ID NO: 321987 - DNA, 19 bp, Homo sapiens
  siRNA target sequence for PCNT2 (NM_006031.3,5193-5211).
cgagcttgaaggtcatata

SEQ ID NO: 321988 - DNA, 19 bp, Homo sapiens
  siRNA target sequence for PCNT2 (NM_006031.3,5204-5222).
gtcatatataccagaagtt

SEQ ID NO: 321989 - DNA, 19 bp, Homo sapiens
  siRNA target sequence for PCNT2 (NM_006031.3,5206-5224).
catatataccagaagttct

SEQ ID NO: 321990 - DNA, 19 bp, Homo sapiens
  siRNA target sequence for PCNT2 (NM_006031.3,5236-5254).
gctgaaagccactattgaa

SEQ ID NO: 321991 - DNA, 19 bp, Homo sapiens
  siRNA target sequence for PCNT2 (NM_006031.3,5237-5255).
ctgaaagccactattgaaa

SEQ ID NO: 321992 - DNA, 19 bp, Homo sapiens
  siRNA target sequence for PCNT2 (NM_006031.3,5239-5257).
gaaagccactattgaaaat

SEQ ID NO: 321993 - DNA, 19 bp, Homo sapiens
  siRNA target sequence for PCNT2 (NM_006031.3,5312-5330).
ctccatgaagtcattgaga

SEQ ID NO: 321994 - DNA, 19 bp, Homo sapiens
  siRNA target sequence for PCNT2 (NM_006031.3,5691-5709).
cgacgattgccgagagaaa

SEQ ID NO: 321995 - DNA, 19 bp, Homo sapiens
  siRNA target sequence for PCNT2 (NM_006031.3,5692-5710).
gacgattgccgagagaaat

SEQ ID NO: 321996 - DNA, 19 bp, Homo sapiens
  siRNA target sequence for PCNT2 (NM_006031.3,5694-5712).
cgattgccgagagaaattt

SEQ ID NO: 321997 - DNA, 19 bp, Homo sapiens
  siRNA target sequence for PCNT2 (NM_006031.3,5695-5713).
gattgccgagagaaattta

SEQ ID NO: 321998 - DNA, 19 bp, Homo sapiens
  siRNA target sequence for PCNT2 (NM_006031.3,6187-6205).
gctgctcttggtgaaaaat

SEQ ID NO: 321999 - DNA, 19 bp, Homo sapiens
  siRNA target sequence for PCNT2 (NM_006031.3,6317-6335).
ctgaaccgtttgctgtatt

SEQ ID NO: 322000 - DNA, 19 bp, Homo sapiens
  siRNA target sequence for PCNT2 (NM_006031.3,6356-6374).
gatgctgccgacaccaaat

SEQ ID NO: 322001 - DNA, 19 bp, Homo sapiens
  siRNA target sequence for PCNT2 (NM_006031.3,6533-6551).
gcgtgtgatgccaatacaa

SEQ ID NO: 322002 - DNA, 19 bp, Homo sapiens
  siRNA target sequence for PCNT2 (NM_006031.3,6591-6609).
ccttgataccagatgaaat

SEQ ID NO: 322003 - DNA, 19 bp, Homo sapiens
  siRNA target sequence for PCNT2 (NM_006031.3,6612-6630).
cagattctcccattcaaga

SEQ ID NO: 322004 - DNA, 19 bp, Homo sapiens
  siRNA target sequence for PCNT2 (NM_006031.3,7022-7040).
gaagattttatcacaacat

SEQ ID NO: 322005 - DNA, 19 bp, Homo sapiens
  siRNA target sequence for PCNT2 (NM_006031.3,7046-7064).
gattctcaagaaacattaa

SEQ ID NO: 322006 - DNA, 19 bp, Homo sapiens
  siRNA target sequence for PCNT2 (NM_006031.3,7778-7796).
gttgaactgctggcttata

SEQ ID NO: 322007 - DNA, 19 bp, Homo sapiens
  siRNA target sequence for PCNT2 (NM_006031.3,7899-7917).
ctgtagtgcgagatttgaa

SEQ ID NO: 322008 - DNA, 19 bp, Homo sapiens
  siRNA target sequence for PCNT2 (NM_006031.3,7901-7919).
gtagtgcgagatttgaagt

SEQ ID NO: 322009 - DNA, 19 bp, Homo sapiens
  siRNA target sequence for PCNT2 (NM_006031.3,8635-8653).
cctgcacacccaaaaacga

SEQ ID NO: 322010 - DNA, 19 bp, Homo sapiens
  siRNA target sequence for PCNT2 (NM_006031.3,8694-8712).
cgtggttgcaggcagaatt

SEQ ID NO: 322011 - DNA, 19 bp, Homo sapiens
  siRNA target sequence for PCNT2 (NM_006031.3,8695-8713).
gtggttgcaggcagaatta

SEQ ID NO: 322012 - DNA, 19 bp, Homo sapiens
  siRNA target sequence for PCNT2 (NM_006031.3,8697-8715).
ggttgcaggcagaattaga

SEQ ID NO: 322013 - DNA, 19 bp, Homo sapiens
  siRNA target sequence for PCNT2 (NM_006031.3,8721-8739).
cacacccacggttgaaaga

SEQ ID NO: 322014 - DNA, 19 bp, Homo sapiens
  siRNA target sequence for PCNT2 (NM_006031.3,8830-8848).
ggagaagctgcgagaatta

SEQ ID NO: 322015 - DNA, 19 bp, Homo sapiens
  siRNA target sequence for PCNT2 (NM_006031.3,8833-8851).
gaagctgcgagaattagaa

SEQ ID NO: 322016 - DNA, 19 bp, Homo sapiens
  siRNA target sequence for PCNT2 (NM_006031.3,8858-8876).
cgtcagcgtgacttgcata

SEQ ID NO: 322017 - DNA, 19 bp, Homo sapiens
  siRNA target sequence for PCNT2 (NM_006031.3,8859-8877).
gtcagcgtgacttgcataa

SEQ ID NO: 322018 - DNA, 19 bp, Homo sapiens
  siRNA target sequence for PCNT2 (NM_006031.3,8861-8879).
cagcgtgacttgcataaga

SEQ ID NO: 322019 - DNA, 19 bp, Homo sapiens
  siRNA target sequence for PCNT2 (NM_006031.3,9075-9093).
ccgtggacaggacagttaa

SEQ ID NO: 322020 - DNA, 19 bp, Homo sapiens
  siRNA target sequence for PCNT2 (NM_006031.3,9099-9117).
ggacgtcatccaatgagaa

SEQ ID NO: 322021 - DNA, 19 bp, Homo sapiens
  siRNA target sequence for PCNT2 (NM_006031.3,9100-9118).
gacgtcatccaatgagaaa

SEQ ID NO: 322022 - DNA, 19 bp, Homo sapiens
  siRNA target sequence for PCNT2 (NM_006031.3,9115-9133).
gaaagcagtgatgtcttta

SEQ ID NO: 322023 - DNA, 19 bp, Homo sapiens
  siRNA target sequence for PCNT2 (NM_006031.3,9224-9242).
gacgtcctgctgaaagaca

SEQ ID NO: 322024 - DNA, 19 bp, Homo sapiens
  siRNA target sequence for PCNT2 (NM_006031.3,9241-9259).
caatgtttccctcacaaaa

SEQ ID NO: 322025 - DNA, 19 bp, Homo sapiens
  siRNA target sequence for PCNT2 (NM_006031.3,9303-9321).
ccgtgtctaagcttgagaa

SEQ ID NO: 322026 - DNA, 19 bp, Homo sapiens
  siRNA target sequence for PCNT2 (NM_006031.3,9462-9480).
cacacaccagcaatgtcaa

SEQ ID NO: 322027 - DNA, 19 bp, Homo sapiens
  siRNA target sequence for PCNT2 (NM_006031.3,9520-9538).
ctttagaaaagctctgatt

SEQ ID NO: 322028 - DNA, 19 bp, Homo sapiens
  siRNA target sequence for PCNT2 (NM_006031.3,9580-9598).
ggattctgaacaagaaaca

SEQ ID NO: 322029 - DNA, 19 bp, Homo sapiens
  siRNA target sequence for PCNT2 (NM_006031.3,9614-9632).
catttgggggtatttcctt

SEQ ID NO: 322030 - DNA, 19 bp, Homo sapiens
  siRNA target sequence for PCNT2 (NM_006031.3,9619-9637).
gggggtatttccttccaaa

SEQ ID NO: 322031 - DNA, 19 bp, Homo sapiens
  siRNA target sequence for PCNT2 (NM_006031.3,9690-9708).
gggtggtcattgcaatatt

SEQ ID NO: 322032 - DNA, 19 bp, Homo sapiens
  siRNA target sequence for PCNT2 (NM_006031.3,9691-9709).
ggtggtcattgcaatatta

SEQ ID NO: 322033 - DNA, 19 bp, Homo sapiens
  siRNA target sequence for PCNT2 (NM_006031.3,9692-9710).
gtggtcattgcaatattaa

SEQ ID NO: 322034 - DNA, 19 bp, Homo sapiens
  siRNA target sequence for PCNT2 (NM_006031.3,9711-9729).
gattacgttttttggttaa

SEQ ID NO: 322035 - DNA, 19 bp, Homo sapiens
  siRNA target sequence for PCNT2 (NM_006031.3,9716-9734).
cgttttttggttaagaaat

SEQ ID NO: 322036 - DNA, 19 bp, Homo sapiens
  siRNA target sequence for PCNT2 (NM_006031.3,9989-10007).
cattccttgacagagtata

SEQ ID NO: 322037 - DNA, 19 bp, Homo sapiens
  siRNA target sequence for PCNT2 (NM_006031.3,10003-10021).
gtatattcaccatttagaa

SEQ ID NO: 322038 - DNA, 19 bp, Homo sapiens
  siRNA target sequence for PCNT2 (NM_006031.3,10019-10037).
gaagtgatccagcaaagat

SEQ ID NO: 322039 - DNA, 19 bp, Homo sapiens
  siRNA target sequence for PCNT2 (NM_006031.3,10043-10061).
ggggtactaccagattcta

SEQ ID NO: 322040 - DNA, 19 bp, Homo sapiens
  siRNA target sequence for PCNT2 (NM_006031.3,10045-10063).
ggtactaccagattctact

SEQ ID NO: 322041 - DNA, 19 bp, Homo sapiens
  siRNA target sequence for PCNT2 (NM_006031.3,10046-10064).
gtactaccagattctactt

SEQ ID NO: 322042 - DNA, 19 bp, Homo sapiens
  siRNA target sequence for PCNT2 (NM_006031.3,10074-10092).
cctgccacccgatgattaa

SEQ ID NO: 322043 - DNA, 19 bp, Homo sapiens
  siRNA target sequence for PCNT2 (NM_006031.3,10075-10093).
ctgccacccgatgattaaa

SEQ ID NO: 322044 - DNA, 19 bp, Homo sapiens
  siRNA target sequence for PCNT2 (NM_006031.3,10077-10095).
gccacccgatgattaaaca

SEQ ID NO: 322045 - DNA, 19 bp, Homo sapiens
  siRNA target sequence for PCNT2 (NM_006031.3,10079-10097).
cacccgatgattaaacagt

SEQ ID NO: 322046 - DNA, 19 bp, Homo sapiens
  siRNA target sequence for PES1 (NM_014303.2,159-177).
ctgagcttggctgacttta

SEQ ID NO: 322047 - DNA, 19 bp, Homo sapiens
  siRNA target sequence for PES1 (NM_014303.2,178-196).
ggcggctgtgcattctgaa

SEQ ID NO: 322048 - DNA, 19 bp, Homo sapiens
  siRNA target sequence for PES1 (NM_014303.2,233-251).
ggttaacaagggttctaca

SEQ ID NO: 322049 - DNA, 19 bp, Homo sapiens
  siRNA target sequence for PES1 (NM_014303.2,250-268).
cagcagcccgaacgtttta

SEQ ID NO: 322050 - DNA, 19 bp, Homo sapiens
  siRNA target sequence for PES1 (NM_014303.2,253-271).
cagcccgaacgttttacct

SEQ ID NO: 322051 - DNA, 19 bp, Homo sapiens
  siRNA target sequence for PES1 (NM_014303.2,256-274).
cccgaacgttttaccttat

SEQ ID NO: 322052 - DNA, 19 bp, Homo sapiens
  siRNA target sequence for PES1 (NM_014303.2,258-276).
cgaacgttttaccttatca

SEQ ID NO: 322053 - DNA, 19 bp, Homo sapiens
  siRNA target sequence for PES1 (NM_014303.2,259-277).
gaacgttttaccttatcaa

SEQ ID NO: 322054 - DNA, 19 bp, Homo sapiens
  siRNA target sequence for PES1 (NM_014303.2,294-312).
ctccacgaacccattgtca

SEQ ID NO: 322055 - DNA, 19 bp, Homo sapiens
  siRNA target sequence for PES1 (NM_014303.2,399-417).
gacaataagcccaactaca

SEQ ID NO: 322056 - DNA, 19 bp, Homo sapiens
  siRNA target sequence for PES1 (NM_014303.2,572-590).
ggagttcatgcactacatt

SEQ ID NO: 322057 - DNA, 19 bp, Homo sapiens
  siRNA target sequence for PES1 (NM_014303.2,1109-1127).
catcatcaggagttttggt

SEQ ID NO: 322058 - DNA, 19 bp, Homo sapiens
  siRNA target sequence for PES1 (NM_014303.2,1134-1152).
gtgtcctgggacaaatctt

SEQ ID NO: 322059 - DNA, 19 bp, Homo sapiens
  siRNA target sequence for PES1 (NM_014303.2,1186-1204).
cccgcatcacccatcagat

SEQ ID NO: 322060 - DNA, 19 bp, Homo sapiens
  siRNA target sequence for PES1 (NM_014303.2,1299-1317).
cccgtggcagagtacttct

SEQ ID NO: 322061 - DNA, 19 bp, Homo sapiens
  siRNA target sequence for PES1 (NM_014303.2,1715-1733).
gtaccagaagatcatgttt

SEQ ID NO: 322062 - DNA, 19 bp, Homo sapiens
  siRNA target sequence for PES1 (NM_014303.2,1798-1816).
cggtgaggtctgagaagaa

SEQ ID NO: 322063 - DNA, 19 bp, Homo sapiens
  siRNA target sequence for PPP1R16A (NM_032902.4,753-771).
gaggctggggccaacatca

SEQ ID NO: 322064 - DNA, 19 bp, Homo sapiens
  siRNA target sequence for PPP1R16A (NM_032902.4,1633-1651).
ccccagtgcggcatctata

SEQ ID NO: 322065 - DNA, 19 bp, Homo sapiens
  siRNA target sequence for PPP1R16A (NM_032902.4,1635-1653).
ccagtgcggcatctatact

SEQ ID NO: 322066 - DNA, 19 bp, Homo sapiens
  siRNA target sequence for ProSAPiP1 (NM_014731.2,1893-1911).
gcctgtcgtacccaagaat

SEQ ID NO: 322067 - DNA, 19 bp, Homo sapiens
  siRNA target sequence for ProSAPiP1 (NM_014731.2,1894-1912).
cctgtcgtacccaagaatt

SEQ ID NO: 322068 - DNA, 19 bp, Homo sapiens
  siRNA target sequence for ProSAPiP1 (NM_014731.2,1895-1913).
ctgtcgtacccaagaattt

SEQ ID NO: 322069 - DNA, 19 bp, Homo sapiens
  siRNA target sequence for ProSAPiP1 (NM_014731.2,2252-2270).
gtgggtcgtcgtcatctat

SEQ ID NO: 322070 - DNA, 19 bp, Homo sapiens
  siRNA target sequence for ProSAPiP1 (NM_014731.2,2698-2716).
cggatagaggaaactaagt

SEQ ID NO: 322071 - DNA, 19 bp, Homo sapiens
  siRNA target sequence for ProSAPiP1 (NM_014731.2,2780-2798).
cggatgtgtcgcagaagtt

SEQ ID NO: 322072 - DNA, 19 bp, Homo sapiens
  siRNA target sequence for ProSAPiP1 (NM_014731.2,3388-3406).
cgcctcgagcgcattgagt

SEQ ID NO: 322073 - DNA, 19 bp, Homo sapiens
  siRNA target sequence for ProSAPiP1 (NM_014731.2,3397-3415).
cgcattgagtccacagaaa

SEQ ID NO: 322074 - DNA, 19 bp, Homo sapiens
  siRNA target sequence for PSTPIP2 (NM_024430.2,260-278).
cgtgtggacagtctgaaat

SEQ ID NO: 322075 - DNA, 19 bp, Homo sapiens
  siRNA target sequence for PSTPIP2 (NM_024430.2,432-450).
cataatggatgctatccat

SEQ ID NO: 322076 - DNA, 19 bp, Homo sapiens
  siRNA target sequence for PSTPIP2 (NM_024430.2,454-472).
caaaagagcttacaattca

SEQ ID NO: 322077 - DNA, 19 bp, Homo sapiens
  siRNA target sequence for PSTPIP2 (NM_024430.2,507-525).
gaaatgccgggacaaagat

SEQ ID NO: 322078 - DNA, 19 bp, Homo sapiens
  siRNA target sequence for PSTPIP2 (NM_024430.2,683-701).
ggcagagtgagcacatcaa

SEQ ID NO: 322079 - DNA, 19 bp, Homo sapiens
  siRNA target sequence for PSTPIP2 (NM_024430.2,753-771).
gaatgcattgtggttacat

SEQ ID NO: 322080 - DNA, 19 bp, Homo sapiens
  siRNA target sequence for PSTPIP2 (NM_024430.2,805-823).
gatgaacacccatcatgta

SEQ ID NO: 322081 - DNA, 19 bp, Homo sapiens
  siRNA target sequence for PSTPIP2 (NM_024430.2,922-940).
caccagatgatcccaatta

SEQ ID NO: 322082 - DNA, 19 bp, Homo sapiens
  siRNA target sequence for PSTPIP2 (NM_024430.2,966-984).
ctctatcagtaaaatcaat

SEQ ID NO: 322083 - DNA, 19 bp, Homo sapiens
  siRNA target sequence for SAV1 (NM_021818.2,911-929).
gactaaccatggttctgaa

SEQ ID NO: 322084 - DNA, 19 bp, Homo sapiens
  siRNA target sequence for SAV1 (NM_021818.2,1068-1086).
gagtcatccgaatttggaa

SEQ ID NO: 322085 - DNA, 19 bp, Homo sapiens
  siRNA target sequence for SAV1 (NM_021818.2,1075-1093).
ccgaatttggaacctatta

SEQ ID NO: 322086 - DNA, 19 bp, Homo sapiens
  siRNA target sequence for SAV1 (NM_021818.2,1076-1094).
cgaatttggaacctattat

SEQ ID NO: 322087 - DNA, 19 bp, Homo sapiens
  siRNA target sequence for SAV1 (NM_021818.2,1144-1162).
gtgtacctcggtatgatca

SEQ ID NO: 322088 - DNA, 19 bp, Homo sapiens
  siRNA target sequence for SAV1 (NM_021818.2,1221-1239).
cctgcaaatccatatcata

SEQ ID NO: 322089 - DNA, 19 bp, Homo sapiens
  siRNA target sequence for SAV1 (NM_021818.2,1323-1341).
ctggctgacctggatacat

SEQ ID NO: 322090 - DNA, 19 bp, Homo sapiens
  siRNA target sequence for SAV1 (NM_021818.2,1353-1371).
ctaaagttgctcttcatga

SEQ ID NO: 322091 - DNA, 19 bp, Homo sapiens
  siRNA target sequence for SAV1 (NM_021818.2,1374-1392).
gaattggagcagattgtta

SEQ ID NO: 322092 - DNA, 19 bp, Homo sapiens
  siRNA target sequence for SH3KBP1 (NM_031892.1,302-320).
ccatagtggagtttgacta

SEQ ID NO: 322093 - DNA, 19 bp, Homo sapiens
  siRNA target sequence for SH3KBP1 (NM_031892.1,347-365).
cgatcagcgtgggtgaaat

SEQ ID NO: 322094 - DNA, 19 bp, Homo sapiens
  siRNA target sequence for SH3KBP1 (NM_031892.1,428-446).
gtttgttccctgacaactt

SEQ ID NO: 322095 - DNA, 19 bp, Homo sapiens
  siRNA target sequence for SH3KBP1 (NM_031892.1,432-450).
gttccctgacaactttgta

SEQ ID NO: 322096 - DNA, 19 bp, Homo sapiens
  siRNA target sequence for SH3KBP1 (NM_031892.1,540-558).
gctgtcttctgaaacgatt

SEQ ID NO: 322097 - DNA, 19 bp, Homo sapiens
  siRNA target sequence for SH3KBP1 (NM_031892.1,541-559).
ctgtcttctgaaacgattt

SEQ ID NO: 322098 - DNA, 19 bp, Homo sapiens
  siRNA target sequence for SH3KBP1 (NM_031892.1,624-642).
ccagaatgacgatgaactt

SEQ ID NO: 322099 - DNA, 19 bp, Homo sapiens
  siRNA target sequence for SH3KBP1 (NM_031892.1,648-666).
gaaagttggcgacatcata

SEQ ID NO: 322100 - DNA, 19 bp, Homo sapiens
  siRNA target sequence for SH3KBP1 (NM_031892.1,796-814).
cagctatccaagtcaagtt

SEQ ID NO: 322101 - DNA, 19 bp, Homo sapiens
  siRNA target sequence for SH3KBP1 (NM_031892.1,798-816).
gctatccaagtcaagttta

SEQ ID NO: 322102 - DNA, 19 bp, Homo sapiens
  siRNA target sequence for SH3KBP1 (NM_031892.1,799-817).
ctatccaagtcaagtttaa

SEQ ID NO: 322103 - DNA, 19 bp, Homo sapiens
  siRNA target sequence for SH3KBP1 (NM_031892.1,902-920).
caatccagcccaagaaagt

SEQ ID NO: 322104 - DNA, 19 bp, Homo sapiens
  siRNA target sequence for SH3KBP1 (NM_031892.1,971-989).
gaccaaggtcaattgaagt

SEQ ID NO: 322105 - DNA, 19 bp, Homo sapiens
  siRNA target sequence for SH3KBP1 (NM_031892.1,997-1015).
gactttctgccggtagaaa

SEQ ID NO: 322106 - DNA, 19 bp, Homo sapiens
  siRNA target sequence for SH3KBP1 (NM_031892.1,1003-1021).
ctgccggtagaaaagacta

SEQ ID NO: 322107 - DNA, 19 bp, Homo sapiens
  siRNA target sequence for SH3KBP1 (NM_031892.1,1005-1023).
gccggtagaaaagactatt

SEQ ID NO: 322108 - DNA, 19 bp, Homo sapiens
  siRNA target sequence for SH3KBP1 (NM_031892.1,1048-1066).
gcaactccagactcatcaa

SEQ ID NO: 322109 - DNA, 19 bp, Homo sapiens
  siRNA target sequence for SH3KBP1 (NM_031892.1,1098-1116).
ggattactgcaaagtaata

SEQ ID NO: 322110 - DNA, 19 bp, Homo sapiens
  siRNA target sequence for SH3KBP1 (NM_031892.1,1099-1117).
gattactgcaaagtaatat

SEQ ID NO: 322111 - DNA, 19 bp, Homo sapiens
  siRNA target sequence for SH3KBP1 (NM_031892.1,1121-1139).
catatgaggcacagaatga

SEQ ID NO: 322112 - DNA, 19 bp, Homo sapiens
  siRNA target sequence for SH3KBP1 (NM_031892.1,1248-1266).
cgataacttcgtgaagtta

SEQ ID NO: 322113 - DNA, 19 bp, Homo sapiens
  siRNA target sequence for SH3KBP1 (NM_031892.1,1267-1285).
cttccaccggactttgaaa

SEQ ID NO: 322114 - DNA, 19 bp, Homo sapiens
  siRNA target sequence for SH3KBP1 (NM_031892.1,1319-1337).
catccgctcctgtcatcaa

SEQ ID NO: 322115 - DNA, 19 bp, Homo sapiens
  siRNA target sequence for SH3KBP1 (NM_031892.1,1346-1364).
caggcaccactgagagaaa

SEQ ID NO: 322116 - DNA, 19 bp, Homo sapiens
  siRNA target sequence for SH3KBP1 (NM_031892.1,1477-1495).
cctgccataccgccaaaaa

SEQ ID NO: 322117 - DNA, 19 bp, Homo sapiens
  siRNA target sequence for SH3KBP1 (NM_031892.1,1505-1523).
cacctaagaccaattctct

SEQ ID NO: 322118 - DNA, 19 bp, Homo sapiens
  siRNA target sequence for SH3KBP1 (NM_031892.1,1589-1607).
ggggtgacagtccaaagat

SEQ ID NO: 322119 - DNA, 19 bp, Homo sapiens
  siRNA target sequence for SH3KBP1 (NM_031892.1,1594-1612).
gacagtccaaagattgact

SEQ ID NO: 322120 - DNA, 19 bp, Homo sapiens
  siRNA target sequence for SH3KBP1 (NM_031892.1,1634-1652).
gcatcctggacaaagatct

SEQ ID NO: 322121 - DNA, 19 bp, Homo sapiens
  siRNA target sequence for SH3KBP1 (NM_031892.1,1675-1693).
gacttagaaggttttgact

SEQ ID NO: 322122 - DNA, 19 bp, Homo sapiens
  siRNA target sequence for SH3KBP1 (NM_031892.1,1690-1708).
gactccgtggtatcatcta

SEQ ID NO: 322123 - DNA, 19 bp, Homo sapiens
  siRNA target sequence for SH3KBP1 (NM_031892.1,1692-1710).
ctccgtggtatcatctact

SEQ ID NO: 322124 - DNA, 19 bp, Homo sapiens
  siRNA target sequence for SH3KBP1 (NM_031892.1,1728-1746).
gaccacaagcagaccaaaa

SEQ ID NO: 322125 - DNA, 19 bp, Homo sapiens
  siRNA target sequence for SH3KBP1 (NM_031892.1,1820-1838).
caagtcccgaagaggataa

SEQ ID NO: 322126 - DNA, 19 bp, Homo sapiens
  siRNA target sequence for SH3KBP1 (NM_031892.1,1833-1851).
ggataaggaggaacacatt

SEQ ID NO: 322127 - DNA, 19 bp, Homo sapiens
  siRNA target sequence for SH3KBP1 (NM_031892.1,1868-1886).
gagtggacgcgtcaaagaa

SEQ ID NO: 322128 - DNA, 19 bp, Homo sapiens
  siRNA target sequence for SH3KBP1 (NM_031892.1,1873-1891).
gacgcgtcaaagaaaactt

SEQ ID NO: 322129 - DNA, 19 bp, Homo sapiens
  siRNA target sequence for SH3KBP1 (NM_031892.1,2061-2079).
gttcggcacggaaggaaaa

SEQ ID NO: 322130 - DNA, 19 bp, Homo sapiens
  siRNA target sequence for SH3KBP1 (NM_031892.1,2064-2082).
cggcacggaaggaaaacca

SEQ ID NO: 322131 - DNA, 19 bp, Homo sapiens
  siRNA target sequence for SPAG4 (NM_003116.1,159-177).
caagcacacgcccaacttt

SEQ ID NO: 322132 - DNA, 19 bp, Homo sapiens
  siRNA target sequence for SPAG4 (NM_003116.1,508-526).
gtgttcaagagctttctga

SEQ ID NO: 322133 - DNA, 19 bp, Homo sapiens
  siRNA target sequence for SPAG4 (NM_003116.1,540-558).
ggggctgagcgtgttgtta

SEQ ID NO: 322134 - DNA, 19 bp, Homo sapiens
  siRNA target sequence for SPAG4 (NM_003116.1,541-559).
gggctgagcgtgttgttat

SEQ ID NO: 322135 - DNA, 19 bp, Homo sapiens
  siRNA target sequence for SPAG4 (NM_003116.1,880-898).
cggaagcccgactatgctt

SEQ ID NO: 322136 - DNA, 19 bp, Homo sapiens
  siRNA target sequence for SPAG4 (NM_003116.1,881-899).
ggaagcccgactatgcttt

SEQ ID NO: 322137 - DNA, 19 bp, Homo sapiens
  siRNA target sequence for SPAG4 (NM_003116.1,1197-1215).
cctccaggtttatgatgaa

SEQ ID NO: 322138 - DNA, 19 bp, Homo sapiens
  siRNA target sequence for SPAG4 (NM_003116.1,1239-1257).
caccttcgatgttgagaaa

SEQ ID NO: 322139 - DNA, 19 bp, Homo sapiens
  siRNA target sequence for SPAG4L (NM_080675.3,243-261).
gttgcctgtccgcaacaat

SEQ ID NO: 322140 - DNA, 19 bp, Homo sapiens
  siRNA target sequence for SPAG4L (NM_080675.3,440-458).
ggatgttttctattcactt

SEQ ID NO: 322141 - DNA, 19 bp, Homo sapiens
  siRNA target sequence for SPAG4L (NM_080675.3,454-472).
cacttaccatcgaaaatga

SEQ ID NO: 322142 - DNA, 19 bp, Homo sapiens
  siRNA target sequence for SPAG4L (NM_080675.3,614-632).
ccatgtccgatgagcaaaa

SEQ ID NO: 322143 - DNA, 19 bp, Homo sapiens
  siRNA target sequence for SPAG4L (NM_080675.3,615-633).
catgtccgatgagcaaaaa

SEQ ID NO: 322144 - DNA, 19 bp, Homo sapiens
  siRNA target sequence for SPAG4L (NM_080675.3,661-679).
cacggagattacatcgaaa

SEQ ID NO: 322145 - DNA, 19 bp, Homo sapiens
  siRNA target sequence for SPAG4L (NM_080675.3,672-690).
catcgaaaagccagacttt

SEQ ID NO: 322146 - DNA, 19 bp, Homo sapiens
  siRNA target sequence for SPAG4L (NM_080675.3,727-745).
cacacgtcagtcacctata

SEQ ID NO: 322147 - DNA, 19 bp, Homo sapiens
  siRNA target sequence for SPAG4L (NM_080675.3,731-749).
cgtcagtcacctataacca

SEQ ID NO: 322148 - DNA, 19 bp, Homo sapiens
  siRNA target sequence for SPAG4L (NM_080675.3,868-886).
ggccaggtgaccatccaat

SEQ ID NO: 322149 - DNA, 19 bp, Homo sapiens
  siRNA target sequence for SPAG4L (NM_080675.3,869-887).
gccaggtgaccatccaatt

SEQ ID NO: 322150 - DNA, 19 bp, Homo sapiens
  siRNA target sequence for SPAG4L (NM_080675.3,1100-1118).
gtgcggtcaaggtgaagat

SEQ ID NO: 322151 - DNA, 19 bp, Homo sapiens
  siRNA target sequence for SPAG4L (NM_080675.3,1102-1120).
gcggtcaaggtgaagatct

SEQ ID NO: 322152 - DNA, 19 bp, Homo sapiens
  siRNA target sequence for SPAG4L (NM_080675.3,1209-1227).
gaacccctaccctaagaga

SEQ ID NO: 322153 - DNA, 19 bp, Homo sapiens
  siRNA target sequence for SPAG4L (NM_080675.3,1213-1231).
ccctaccctaagagagatt

SEQ ID NO: 322154 - DNA, 19 bp, Homo sapiens
  siRNA target sequence for SSNA1 (NM_003731.1,318-336).
ctttgctcagcgttctcaa

SEQ ID NO: 322155 - DNA, 19 bp, Homo sapiens
  siRNA target sequence for TACC1 (NM_006283.1,354-372).
gtgcagtgggcgaaatgga

SEQ ID NO: 322156 - DNA, 19 bp, Homo sapiens
  siRNA target sequence for TACC1 (NM_006283.1,481-499).
gctcggattctgaaggtaa

SEQ ID NO: 322157 - DNA, 19 bp, Homo sapiens
  siRNA target sequence for TACC1 (NM_006283.1,526-544).
cgatccgatcacctttcaa

SEQ ID NO: 322158 - DNA, 19 bp, Homo sapiens
  siRNA target sequence for TACC1 (NM_006283.1,649-667).
catctaagacttgttctaa

SEQ ID NO: 322159 - DNA, 19 bp, Homo sapiens
  siRNA target sequence for TACC1 (NM_006283.1,704-722).
ctctcactcagtcaagaat

SEQ ID NO: 322160 - DNA, 19 bp, Homo sapiens
  siRNA target sequence for TACC1 (NM_006283.1,761-779).
catcgtgaggccattttca

SEQ ID NO: 322161 - DNA, 19 bp, Homo sapiens
  siRNA target sequence for TACC1 (NM_006283.1,764-782).
cgtgaggccattttcaata

SEQ ID NO: 322162 - DNA, 19 bp, Homo sapiens
  siRNA target sequence for TACC1 (NM_006283.1,809-827).
ggcagtcctcggaacaaaa

SEQ ID NO: 322163 - DNA, 19 bp, Homo sapiens
  siRNA target sequence for TACC1 (NM_006283.1,943-961).
ccgcagaagctgatctaaa

SEQ ID NO: 322164 - DNA, 19 bp, Homo sapiens
  siRNA target sequence for TACC1 (NM_006283.1,944-962).
cgcagaagctgatctaaaa

SEQ ID NO: 322165 - DNA, 19 bp, Homo sapiens
  siRNA target sequence for TACC1 (NM_006283.1,1099-1117).
ccaaggcatcctatcactt

SEQ ID NO: 322166 - DNA, 19 bp, Homo sapiens
  siRNA target sequence for TACC1 (NM_006283.1,1128-1146).
gagttggatgagaacacaa

SEQ ID NO: 322167 - DNA, 19 bp, Homo sapiens
  siRNA target sequence for TACC1 (NM_006283.1,1365-1383).
ctgactcccaagatacaaa

SEQ ID NO: 322168 - DNA, 19 bp, Homo sapiens
  siRNA target sequence for TACC1 (NM_006283.1,1367-1385).
gactcccaagatacaaaaa

SEQ ID NO: 322169 - DNA, 19 bp, Homo sapiens
  siRNA target sequence for TACC1 (NM_006283.1,1369-1387).
ctcccaagatacaaaaaga

SEQ ID NO: 322170 - DNA, 19 bp, Homo sapiens
  siRNA target sequence for TACC1 (NM_006283.1,1566-1584).
cactttgacccagataact

SEQ ID NO: 322171 - DNA, 19 bp, Homo sapiens
  siRNA target sequence for TACC1 (NM_006283.1,1568-1586).
ctttgacccagataacttt

SEQ ID NO: 322172 - DNA, 19 bp, Homo sapiens
  siRNA target sequence for TACC1 (NM_006283.1,1622-1640).
cttaacaagcagtgacttt

SEQ ID NO: 322173 - DNA, 19 bp, Homo sapiens
  siRNA target sequence for TACC1 (NM_006283.1,1648-1666).
ccactggtaatcacgttaa

SEQ ID NO: 322174 - DNA, 19 bp, Homo sapiens
  siRNA target sequence for TACC1 (NM_006283.1,1649-1667).
cactggtaatcacgttaat

SEQ ID NO: 322175 - DNA, 19 bp, Homo sapiens
  siRNA target sequence for TACC1 (NM_006283.1,1661-1679).
cgttaatgaaatcttagaa

SEQ ID NO: 322176 - DNA, 19 bp, Homo sapiens
  siRNA target sequence for TACC1 (NM_006283.1,1662-1680).
gttaatgaaatcttagaat

SEQ ID NO: 322177 - DNA, 19 bp, Homo sapiens
  siRNA target sequence for TACC1 (NM_006283.1,1691-1709).
ggcaaagtcgcgtttaata

SEQ ID NO: 322178 - DNA, 19 bp, Homo sapiens
  siRNA target sequence for TACC1 (NM_006283.1,1692-1710).
gcaaagtcgcgtttaataa

SEQ ID NO: 322179 - DNA, 19 bp, Homo sapiens
  siRNA target sequence for TACC1 (NM_006283.1,1724-1742).
ggtgaagaagcatgaaact

SEQ ID NO: 322180 - DNA, 19 bp, Homo sapiens
  siRNA target sequence for TACC1 (NM_006283.1,1751-1769).
cgccctggatgcatgttct

SEQ ID NO: 322181 - DNA, 19 bp, Homo sapiens
  siRNA target sequence for TACC1 (NM_006283.1,1782-1800).
gcagtgatctcccagattt

SEQ ID NO: 322182 - DNA, 19 bp, Homo sapiens
  siRNA target sequence for TACC1 (NM_006283.1,1828-1846).
ctactgatgaggagaaact

SEQ ID NO: 322183 - DNA, 19 bp, Homo sapiens
  siRNA target sequence for TACC1 (NM_006283.1,1853-1871).
cacgtcatgtggtcagaaa

SEQ ID NO: 322184 - DNA, 19 bp, Homo sapiens
  siRNA target sequence for TACC1 (NM_006283.1,1939-1957).
ctgtgtctaccataaatca

SEQ ID NO: 322185 - DNA, 19 bp, Homo sapiens
  siRNA target sequence for TACC1 (NM_006283.1,1949-1967).
cataaatcatgcgttttca

SEQ ID NO: 322186 - DNA, 19 bp, Homo sapiens
  siRNA target sequence for TACC1 (NM_006283.1,2131-2149).
cagccgtgctcaccttaat

SEQ ID NO: 322187 - DNA, 19 bp, Homo sapiens
  siRNA target sequence for TACC1 (NM_006283.1,2133-2151).
gccgtgctcaccttaataa

SEQ ID NO: 322188 - DNA, 19 bp, Homo sapiens
  siRNA target sequence for TACC1 (NM_006283.1,2135-2153).
cgtgctcaccttaataaga

SEQ ID NO: 322189 - DNA, 19 bp, Homo sapiens
  siRNA target sequence for TACC1 (NM_006283.1,2138-2156).
gctcaccttaataagagaa

SEQ ID NO: 322190 - DNA, 19 bp, Homo sapiens
  siRNA target sequence for TACC1 (NM_006283.1,2247-2265).
gctgaatatgaaaagacta

SEQ ID NO: 322191 - DNA, 19 bp, Homo sapiens
  siRNA target sequence for TACC1 (NM_006283.1,2261-2279).
gactattgctcaaatgatt

SEQ ID NO: 322192 - DNA, 19 bp, Homo sapiens
  siRNA target sequence for TACC1 (NM_006283.1,2263-2281).
ctattgctcaaatgattga

SEQ ID NO: 322193 - DNA, 19 bp, Homo sapiens
  siRNA target sequence for TACC1 (NM_006283.1,2372-2390).
ggaaaggtccctttctgat

SEQ ID NO: 322194 - DNA, 19 bp, Homo sapiens
  siRNA target sequence for TACC1 (NM_006283.1,2701-2719).
gtgatgagctgattgcaaa

SEQ ID NO: 322195 - DNA, 19 bp, Homo sapiens
  siRNA target sequence for TACC2 (NM_006997.1,140-158).
ggcttccgaggcaatgagt

SEQ ID NO: 322196 - DNA, 19 bp, Homo sapiens
  siRNA target sequence for TACC2 (NM_006997.1,141-159).
gcttccgaggcaatgagtt

SEQ ID NO: 322197 - DNA, 19 bp, Homo sapiens
  siRNA target sequence for TACC2 (NM_006997.1,151-169).
caatgagttccgattctga

SEQ ID NO: 322198 - DNA, 19 bp, Homo sapiens
  siRNA target sequence for TACC2 (NM_006997.1,191-209).
gtcaacgacccctgtcaaa

SEQ ID NO: 322199 - DNA, 19 bp, Homo sapiens
  siRNA target sequence for TACC2 (NM_006997.1,411-429).
gccagcagtgggacttaca

SEQ ID NO: 322200 - DNA, 19 bp, Homo sapiens
  siRNA target sequence for TACC2 (NM_006997.1,415-433).
gcagtgggacttacaactt

SEQ ID NO: 322201 - DNA, 19 bp, Homo sapiens
  siRNA target sequence for TACC2 (NM_006997.1,424-442).
cttacaacttggactttga

SEQ ID NO: 322202 - DNA, 19 bp, Homo sapiens
  siRNA target sequence for TACC2 (NM_006997.1,484-502).
gtgcctcagacgctaagaa

SEQ ID NO: 322203 - DNA, 19 bp, Homo sapiens
  siRNA target sequence for TACC2 (NM_006997.1,487-505).
cctcagacgctaagaatca

SEQ ID NO: 322204 - DNA, 19 bp, Homo sapiens
  siRNA target sequence for TACC2 (NM_006997.1,540-558).
gattccgtccccatctcta

SEQ ID NO: 322205 - DNA, 19 bp, Homo sapiens
  siRNA target sequence for TACC2 (NM_006997.1,685-703).
gtacccttaagcgaactaa

SEQ ID NO: 322206 - DNA, 19 bp, Homo sapiens
  siRNA target sequence for TACC2 (NM_006997.1,688-706).
cccttaagcgaactaaaaa

SEQ ID NO: 322207 - DNA, 19 bp, Homo sapiens
  siRNA target sequence for TACC2 (NM_006997.1,689-707).
ccttaagcgaactaaaaaa

SEQ ID NO: 322208 - DNA, 19 bp, Homo sapiens
  siRNA target sequence for TACC2 (NM_006997.1,825-843).
ctagcatctgagacgaaaa

SEQ ID NO: 322209 - DNA, 19 bp, Homo sapiens
  siRNA target sequence for TACC2 (NM_006997.1,865-883).
gtcctagcccagccttatt

SEQ ID NO: 322210 - DNA, 19 bp, Homo sapiens
  siRNA target sequence for TACC2 (NM_006997.1,999-1017).
ccccctgtcgggaggaaaa

SEQ ID NO: 322211 - DNA, 19 bp, Homo sapiens
  siRNA target sequence for TACC2 (NM_006997.1,1105-1123).
ccgtaaggctggagtttga

SEQ ID NO: 322212 - DNA, 19 bp, Homo sapiens
  siRNA target sequence for TACC2 (NM_006997.1,1112-1130).
gctggagtttgactattct

SEQ ID NO: 322213 - DNA, 19 bp, Homo sapiens
  siRNA target sequence for TACC2 (NM_006997.1,1169-1187).
ccctcctaccaaaaagata

SEQ ID NO: 322214 - DNA, 19 bp, Homo sapiens
  siRNA target sequence for TACC2 (NM_006997.1,1219-1237).
ggaggccaaagatgaaaaa

SEQ ID NO: 322215 - DNA, 19 bp, Homo sapiens
  siRNA target sequence for TACC2 (NM_006997.1,1240-1258).
cacccgagaaacttgacaa

SEQ ID NO: 322216 - DNA, 19 bp, Homo sapiens
  siRNA target sequence for TACC2 (NM_006997.1,1317-1335).
ggtacttacacctttgata

SEQ ID NO: 322217 - DNA, 19 bp, Homo sapiens
  siRNA target sequence for TACC2 (NM_006997.1,1318-1336).
gtacttacacctttgatat

SEQ ID NO: 322218 - DNA, 19 bp, Homo sapiens
  siRNA target sequence for TACC2 (NM_006997.1,1400-1418).
caaactgccccaacaatca

SEQ ID NO: 322219 - DNA, 19 bp, Homo sapiens
  siRNA target sequence for TACC2 (NM_006997.1,1404-1422).
ctgccccaacaatcataca

SEQ ID NO: 322220 - DNA, 19 bp, Homo sapiens
  siRNA target sequence for TACC2 (NM_006997.1,1407-1425).
ccccaacaatcatacaact

SEQ ID NO: 322221 - DNA, 19 bp, Homo sapiens
  siRNA target sequence for TACC2 (NM_006997.1,1408-1426).
cccaacaatcatacaactt

SEQ ID NO: 322222 - DNA, 19 bp, Homo sapiens
  siRNA target sequence for TACC2 (NM_006997.1,1409-1427).
ccaacaatcatacaacttt

SEQ ID NO: 322223 - DNA, 19 bp, Homo sapiens
  siRNA target sequence for TACC2 (NM_006997.1,1451-1469).
cgttgacccctttaagaca

SEQ ID NO: 322224 - DNA, 19 bp, Homo sapiens
  siRNA target sequence for TACC2 (NM_006997.1,1452-1470).
gttgacccctttaagacat

SEQ ID NO: 322225 - DNA, 19 bp, Homo sapiens
  siRNA target sequence for TACC2 (NM_006997.1,1551-1569).
gacggggatgggctaaaca

SEQ ID NO: 322226 - DNA, 19 bp, Homo sapiens
  siRNA target sequence for TACC2 (NM_006997.1,1594-1612).
ccctaaagactgacacatt

SEQ ID NO: 322227 - DNA, 19 bp, Homo sapiens
  siRNA target sequence for TACC2 (NM_006997.1,1595-1613).
cctaaagactgacacattt

SEQ ID NO: 322228 - DNA, 19 bp, Homo sapiens
  siRNA target sequence for TACC2 (NM_006997.1,1596-1614).
ctaaagactgacacattta

SEQ ID NO: 322229 - DNA, 19 bp, Homo sapiens
  siRNA target sequence for TACC2 (NM_006997.1,1817-1835).
ggacctgtccacctttgta

SEQ ID NO: 322230 - DNA, 19 bp, Homo sapiens
  siRNA target sequence for TACC2 (NM_006997.1,1818-1836).
gacctgtccacctttgtaa

SEQ ID NO: 322231 - DNA, 19 bp, Homo sapiens
  siRNA target sequence for TACC2 (NM_006997.1,1833-1851).
gtaaacgagaccaaattca

SEQ ID NO: 322232 - DNA, 19 bp, Homo sapiens
  siRNA target sequence for TACC2 (NM_006997.1,1953-1971).
caggccttgtaccttatgt

SEQ ID NO: 322233 - DNA, 19 bp, Homo sapiens
  siRNA target sequence for TACC2 (NM_006997.1,1955-1973).
ggccttgtaccttatgttt

SEQ ID NO: 322234 - DNA, 19 bp, Homo sapiens
  siRNA target sequence for TACC2 (NM_006997.1,1986-2004).
gagagccctgtcaagtcat

SEQ ID NO: 322235 - DNA, 19 bp, Homo sapiens
  siRNA target sequence for TACC2 (NM_006997.1,2285-2303).
ctgtggtgcacttgactat

SEQ ID NO: 322236 - DNA, 19 bp, Homo sapiens
  siRNA target sequence for TACC2 (NM_006997.1,2287-2305).
gtggtgcacttgactatct

SEQ ID NO: 322237 - DNA, 19 bp, Homo sapiens
  siRNA target sequence for TACC2 (NM_006997.1,2335-2353).
cactattcgctcagaaact

SEQ ID NO: 322238 - DNA, 19 bp, Homo sapiens
  siRNA target sequence for TACC2 (NM_006997.1,2469-2487).
gacgtctccatctccaaaa

SEQ ID NO: 322239 - DNA, 19 bp, Homo sapiens
  siRNA target sequence for TACC2 (NM_006997.1,2579-2597).
cgccagagcagagatcata

SEQ ID NO: 322240 - DNA, 19 bp, Homo sapiens
  siRNA target sequence for TACC2 (NM_006997.1,2647-2665).
ggcgggaagtgatggaaat

SEQ ID NO: 322241 - DNA, 19 bp, Homo sapiens
  siRNA target sequence for TACC2 (NM_006997.1,2693-2711).
gaccatcgctcagatgata

SEQ ID NO: 322242 - DNA, 19 bp, Homo sapiens
  siRNA target sequence for TACC2 (NM_006997.1,2695-2713).
ccatcgctcagatgataga

SEQ ID NO: 322243 - DNA, 19 bp, Homo sapiens
  siRNA target sequence for TACC2 (NM_006997.1,2817-2835).
gccgacctcttcagaagat

SEQ ID NO: 322244 - DNA, 19 bp, Homo sapiens
  siRNA target sequence for TACC2 (NM_006997.1,2818-2836).
ccgacctcttcagaagata

SEQ ID NO: 322245 - DNA, 19 bp, Homo sapiens
  siRNA target sequence for TACC2 (NM_006997.1,3128-3146).
gatttgtgacgaactgatt

SEQ ID NO: 322246 - DNA, 19 bp, Homo sapiens
  siRNA target sequence for TCP10 (NM_004610.1,1038-1056).
cctgatgggacaatcgtaa

SEQ ID NO: 322247 - DNA, 19 bp, Homo sapiens
  siRNA target sequence for TCP10 (NM_004610.1,1062-1080).
gaaaggaacggcgacaaaa

SEQ ID NO: 322248 - DNA, 19 bp, Homo sapiens
  siRNA target sequence for TCP10 (NM_004610.1,1066-1084).
ggaacggcgacaaaaccat

SEQ ID NO: 322249 - DNA, 19 bp, Homo sapiens
  siRNA target sequence for TCP10 (NM_004610.1,1067-1085).
gaacggcgacaaaaccatt

SEQ ID NO: 322250 - DNA, 19 bp, Homo sapiens
  siRNA target sequence for TCP10 (NM_004610.1,1197-1215).
gcctccgggagggttaaga

SEQ ID NO: 322251 - DNA, 19 bp, Homo sapiens
  siRNA target sequence for TCP10 (NM_004610.1,1298-1316).
gcagatttttgctaaaaca

SEQ ID NO: 322252 - DNA, 19 bp, Homo sapiens
  siRNA target sequence for TCP10L (NM_144659.1,314-332).
ggagtcatatagatgcttt

SEQ ID NO: 322253 - DNA, 19 bp, Homo sapiens
  siRNA target sequence for TPD52 (NM_005079.1,295-313).
gcggaaacttggaatcaat

SEQ ID NO: 322254 - DNA, 19 bp, Homo sapiens
  siRNA target sequence for TPD52 (NM_005079.1,296-314).
cggaaacttggaatcaatt

SEQ ID NO: 322255 - DNA, 19 bp, Homo sapiens
  siRNA target sequence for TPD52 (NM_005079.1,298-316).
gaaacttggaatcaattct

SEQ ID NO: 322256 - DNA, 19 bp, Homo sapiens
  siRNA target sequence for TPD52 (NM_005079.1,363-381).
cagcaacatctgcttacaa

SEQ ID NO: 322257 - DNA, 19 bp, Homo sapiens
  siRNA target sequence for TPD52 (NM_005079.1,365-383).
gcaacatctgcttacaaga

SEQ ID NO: 322258 - DNA, 19 bp, Homo sapiens
  siRNA target sequence for TPD52 (NM_005079.1,483-501).
ccccaacttttaaatcatt

SEQ ID NO: 322259 - DNA, 19 bp, Homo sapiens
  siRNA target sequence for TPD52 (NM_005079.1,503-521).
gaagaaaaggtcgaaaact

SEQ ID NO: 322260 - DNA, 19 bp, Homo sapiens
  siRNA target sequence for TPD52 (NM_005079.1,506-524).
gaaaaggtcgaaaacttaa

SEQ ID NO: 322261 - DNA, 19 bp, Homo sapiens
  siRNA target sequence for TPD52 (NM_005079.1,574-592).
cttgaattcggctgcaaat

SEQ ID NO: 322262 - DNA, 19 bp, Homo sapiens
  siRNA target sequence for TPD52 (NM_005079.1,577-595).
gaattcggctgcaaatgct

SEQ ID NO: 322263 - DNA, 19 bp, Homo sapiens
  siRNA target sequence for UVRAG (NM_003369.2,323-341).
gctgcccggaacattgtta

SEQ ID NO: 322264 - DNA, 19 bp, Homo sapiens
  siRNA target sequence for UVRAG (NM_003369.2,324-342).
ctgcccggaacattgttaa

SEQ ID NO: 322265 - DNA, 19 bp, Homo sapiens
  siRNA target sequence for UVRAG (NM_003369.2,326-344).
gcccggaacattgttaata

SEQ ID NO: 322266 - DNA, 19 bp, Homo sapiens
  siRNA target sequence for UVRAG (NM_003369.2,329-347).
cggaacattgttaatagaa

SEQ ID NO: 322267 - DNA, 19 bp, Homo sapiens
  siRNA target sequence for UVRAG (NM_003369.2,330-348).
ggaacattgttaatagaaa

SEQ ID NO: 322268 - DNA, 19 bp, Homo sapiens
  siRNA target sequence for UVRAG (NM_003369.2,350-368).
ggccatcagctccttgata

SEQ ID NO: 322269 - DNA, 19 bp, Homo sapiens
  siRNA target sequence for UVRAG (NM_003369.2,358-376).
gctccttgatacctacttt

SEQ ID NO: 322270 - DNA, 19 bp, Homo sapiens
  siRNA target sequence for UVRAG (NM_003369.2,361-379).
ccttgatacctactttaca

SEQ ID NO: 322271 - DNA, 19 bp, Homo sapiens
  siRNA target sequence for UVRAG (NM_003369.2,388-406).
gtgtagtactgaaaagata

SEQ ID NO: 322272 - DNA, 19 bp, Homo sapiens
  siRNA target sequence for UVRAG (NM_003369.2,456-474).
cgtggcgaagtctcgattt

SEQ ID NO: 322273 - DNA, 19 bp, Homo sapiens
  siRNA target sequence for UVRAG (NM_003369.2,457-475).
gtggcgaagtctcgatttt

SEQ ID NO: 322274 - DNA, 19 bp, Homo sapiens
  siRNA target sequence for UVRAG (NM_003369.2,462-480).
gaagtctcgattttggaat

SEQ ID NO: 322275 - DNA, 19 bp, Homo sapiens
  siRNA target sequence for UVRAG (NM_003369.2,484-502).
gccagaccgtcttgataca

SEQ ID NO: 322276 - DNA, 19 bp, Homo sapiens
  siRNA target sequence for UVRAG (NM_003369.2,485-503).
ccagaccgtcttgatacat

SEQ ID NO: 322277 - DNA, 19 bp, Homo sapiens
  siRNA target sequence for UVRAG (NM_003369.2,497-515).
gatacatctgtgtcttgtt

SEQ ID NO: 322278 - DNA, 19 bp, Homo sapiens
  siRNA target sequence for UVRAG (NM_003369.2,556-574).
gctgttgattgaatggaaa

SEQ ID NO: 322279 - DNA, 19 bp, Homo sapiens
  siRNA target sequence for UVRAG (NM_003369.2,579-597).
gtttggatgggctgaaata

SEQ ID NO: 322280 - DNA, 19 bp, Homo sapiens
  siRNA target sequence for UVRAG (NM_003369.2,598-616).
cttgggtcagcagattcat

SEQ ID NO: 322281 - DNA, 19 bp, Homo sapiens
  siRNA target sequence for UVRAG (NM_003369.2,610-628).
gattcatgcccgaaaccaa

SEQ ID NO: 322282 - DNA, 19 bp, Homo sapiens
  siRNA target sequence for UVRAG (NM_003369.2,618-636).
cccgaaaccaaaatgaaat

SEQ ID NO: 322283 - DNA, 19 bp, Homo sapiens
  siRNA target sequence for UVRAG (NM_003369.2,661-679).
ctatggtgctccatttgaa

SEQ ID NO: 322284 - DNA, 19 bp, Homo sapiens
  siRNA target sequence for UVRAG (NM_003369.2,665-683).
ggtgctccatttgaacata

SEQ ID NO: 322285 - DNA, 19 bp, Homo sapiens
  siRNA target sequence for UVRAG (NM_003369.2,693-711).
caaatgctcagaagactat

SEQ ID NO: 322286 - DNA, 19 bp, Homo sapiens
  siRNA target sequence for UVRAG (NM_003369.2,741-759).
gcaattcttacgatgtctt

SEQ ID NO: 322287 - DNA, 19 bp, Homo sapiens
  siRNA target sequence for UVRAG (NM_003369.2,780-798).
gagcccagtgtgcaattaa

SEQ ID NO: 322288 - DNA, 19 bp, Homo sapiens
  siRNA target sequence for UVRAG (NM_003369.2,783-801).
cccagtgtgcaattaaaca

SEQ ID NO: 322289 - DNA, 19 bp, Homo sapiens
  siRNA target sequence for UVRAG (NM_003369.2,804-822).
ctcaggtaactgttcagaa

SEQ ID NO: 322290 - DNA, 19 bp, Homo sapiens
  siRNA target sequence for UVRAG (NM_003369.2,989-1007).
gcattacaagacaaaggaa

SEQ ID NO: 322291 - DNA, 19 bp, Homo sapiens
  siRNA target sequence for UVRAG (NM_003369.2,998-1016).
gacaaaggaagtgcatttt

SEQ ID NO: 322292 - DNA, 19 bp, Homo sapiens
  siRNA target sequence for UVRAG (NM_003369.2,1127-1145).
cgttgcaggcagttactct

SEQ ID NO: 322293 - DNA, 19 bp, Homo sapiens
  siRNA target sequence for UVRAG (NM_003369.2,1259-1277).
gctgttgcccttggttata

SEQ ID NO: 322294 - DNA, 19 bp, Homo sapiens
  siRNA target sequence for UVRAG (NM_003369.2,1283-1301).
catctggtctccatgattt

SEQ ID NO: 322295 - DNA, 19 bp, Homo sapiens
  siRNA target sequence for UVRAG (NM_003369.2,1318-1336).
gcccctcagatatcctata

SEQ ID NO: 322296 - DNA, 19 bp, Homo sapiens
  siRNA target sequence for UVRAG (NM_003369.2,1320-1338).
ccctcagatatcctataat

SEQ ID NO: 322297 - DNA, 19 bp, Homo sapiens
  siRNA target sequence for UVRAG (NM_003369.2,1321-1339).
cctcagatatcctataatt

SEQ ID NO: 322298 - DNA, 19 bp, Homo sapiens
  siRNA target sequence for UVRAG (NM_003369.2,1326-1344).
gatatcctataattcataa

SEQ ID NO: 322299 - DNA, 19 bp, Homo sapiens
  siRNA target sequence for UVRAG (NM_003369.2,1340-1358).
cataaggggtctagatcaa

SEQ ID NO: 322300 - DNA, 19 bp, Homo sapiens
  siRNA target sequence for UVRAG (NM_003369.2,1346-1364).
gggtctagatcaacaatca

SEQ ID NO: 322301 - DNA, 19 bp, Homo sapiens
  siRNA target sequence for UVRAG (NM_003369.2,1347-1365).
ggtctagatcaacaatcaa

SEQ ID NO: 322302 - DNA, 19 bp, Homo sapiens
  siRNA target sequence for UVRAG (NM_003369.2,1403-1421).
gagtttccactgtatccaa

SEQ ID NO: 322303 - DNA, 19 bp, Homo sapiens
  siRNA target sequence for UVRAG (NM_003369.2,1441-1459).
gtttgattatggtgtctat

SEQ ID NO: 322304 - DNA, 19 bp, Homo sapiens
  siRNA target sequence for UVRAG (NM_003369.2,1454-1472).
gtctatcttctgaacaaaa

SEQ ID NO: 322305 - DNA, 19 bp, Homo sapiens
  siRNA target sequence for UVRAG (NM_003369.2,1674-1692).
cagacaaaggacatcgaaa

SEQ ID NO: 322306 - DNA, 19 bp, Homo sapiens
  siRNA target sequence for UVRAG (NM_003369.2,1840-1858).
cttggacttctccaaagaa

SEQ ID NO: 322307 - DNA, 19 bp, Homo sapiens
  siRNA target sequence for UVRAG (NM_003369.2,1877-1895).
gatctagttggcagcttaa

SEQ ID NO: 322308 - DNA, 19 bp, Homo sapiens
  siRNA target sequence for UVRAG (NM_003369.2,2115-2133).
gtgatcagctagaagcatt

SEQ ID NO: 322309 - DNA, 19 bp, Homo sapiens
  siRNA target sequence for UVRAG (NM_003369.2,2117-2135).
gatcagctagaagcattta

SEQ ID NO: 322310 - DNA, 19 bp, Homo sapiens
  siRNA target sequence for UVRAG (NM_003369.2,2120-2138).
cagctagaagcatttaact

SEQ ID NO: 322311 - DNA, 19 bp, Homo sapiens
  siRNA target sequence for UVRAG (NM_003369.2,2203-2221).
gttctcccgaaggatctat

SEQ ID NO: 322312 - DNA, 19 bp, Homo sapiens
  siRNA target sequence for UVRAG (NM_003369.2,2214-2232).
ggatctatgcactgaatga

SEQ ID NO: 322313 - DNA, 19 bp, Homo sapiens
  siRNA target sequence for VAMP1 (NM_014231.3,222-240).
cctaacatgaccagtaaca

SEQ ID NO: 322314 - DNA, 19 bp, Homo sapiens
  siRNA target sequence for VAMP1 (NM_014231.3,365-383).
ggcaggagcatcacaattt

SEQ ID NO: 322315 - DNA, 19 bp, Homo sapiens
  siRNA target sequence for VAMP1 (NM_014231.3,367-385).
caggagcatcacaatttga

SEQ ID NO: 322316 - DNA, 19 bp, Homo sapiens
  siRNA target sequence for VAMP1 (NM_014231.3,462-480).
gccatcatcgtggtagtta

SEQ ID NO: 322317 - DNA, 19 bp, Homo sapiens
  siRNA target sequence for VAMP1 (NM_014231.3,463-481).
ccatcatcgtggtagttat

SEQ ID NO: 322318 - DNA, 19 bp, Homo sapiens
  siRNA target sequence for VAMP1 (NM_014231.3,464-482).
catcatcgtggtagttatt

SEQ ID NO: 322319 - DNA, 19 bp, Homo sapiens
  siRNA target sequence for VAMP1 (NM_014231.3,471-489).
gtggtagttattgtaatct

SEQ ID NO: 322320 - DNA, 19 bp, Homo sapiens
  siRNA target sequence for VAMP1 (NM_014231.3,474-492).
gtagttattgtaatctact

SEQ ID NO: 322321 - DNA, 19 bp, Homo sapiens
  siRNA target sequence for VAMP2 (NM_014232.1,382-400).
gatcatcttgggagtgatt

SEQ ID NO: 322322 - DNA, 19 bp, Homo sapiens
  siRNA target sequence for VEZATIN (NM_017599.2,185-203).
ggaatgggctattaagcaa

SEQ ID NO: 322323 - DNA, 19 bp, Homo sapiens
  siRNA target sequence for VEZATIN (NM_017599.2,190-208).
gggctattaagcaaggtat

SEQ ID NO: 322324 - DNA, 19 bp, Homo sapiens
  siRNA target sequence for VEZATIN (NM_017599.2,222-240).
gctgaaaccatcaaaagtt

SEQ ID NO: 322325 - DNA, 19 bp, Homo sapiens
  siRNA target sequence for VEZATIN (NM_017599.2,229-247).
ccatcaaaagttggatttt

SEQ ID NO: 322326 - DNA, 19 bp, Homo sapiens
  siRNA target sequence for VEZATIN (NM_017599.2,253-271).
ctcagtgcaataagaaaga

SEQ ID NO: 322327 - DNA, 19 bp, Homo sapiens
  siRNA target sequence for VEZATIN (NM_017599.2,282-300).
cacaagttggatattggat

SEQ ID NO: 322328 - DNA, 19 bp, Homo sapiens
  siRNA target sequence for VEZATIN (NM_017599.2,298-316).
gattccgactcgactcatt

SEQ ID NO: 322329 - DNA, 19 bp, Homo sapiens
  siRNA target sequence for VEZATIN (NM_017599.2,302-320).
ccgactcgactcattacat

SEQ ID NO: 322330 - DNA, 19 bp, Homo sapiens
  siRNA target sequence for VEZATIN (NM_017599.2,303-321).
cgactcgactcattacata

SEQ ID NO: 322331 - DNA, 19 bp, Homo sapiens
  siRNA target sequence for VEZATIN (NM_017599.2,466-484).
gggatctctcaatgctatt

SEQ ID NO: 322332 - DNA, 19 bp, Homo sapiens
  siRNA target sequence for VEZATIN (NM_017599.2,467-485).
ggatctctcaatgctattt

SEQ ID NO: 322333 - DNA, 19 bp, Homo sapiens
  siRNA target sequence for VEZATIN (NM_017599.2,542-560).
ggtatggggagtgattcta

SEQ ID NO: 322334 - DNA, 19 bp, Homo sapiens
  siRNA target sequence for VEZATIN (NM_017599.2,543-561).
gtatggggagtgattctat

SEQ ID NO: 322335 - DNA, 19 bp, Homo sapiens
  siRNA target sequence for VEZATIN (NM_017599.2,547-565).
ggggagtgattctatttgt

SEQ ID NO: 322336 - DNA, 19 bp, Homo sapiens
  siRNA target sequence for VEZATIN (NM_017599.2,572-590).
ggtcataagagctttgaga

SEQ ID NO: 322337 - DNA, 19 bp, Homo sapiens
  siRNA target sequence for VEZATIN (NM_017599.2,595-613).
ggaggacagccaaactaca

SEQ ID NO: 322338 - DNA, 19 bp, Homo sapiens
  siRNA target sequence for VEZATIN (NM_017599.2,596-614).
gaggacagccaaactacaa

SEQ ID NO: 322339 - DNA, 19 bp, Homo sapiens
  siRNA target sequence for VEZATIN (NM_017599.2,598-616).
ggacagccaaactacaagt

SEQ ID NO: 322340 - DNA, 19 bp, Homo sapiens
  siRNA target sequence for VEZATIN (NM_017599.2,609-627).
ctacaagtgaccctaaaaa

SEQ ID NO: 322341 - DNA, 19 bp, Homo sapiens
  siRNA target sequence for VEZATIN (NM_017599.2,634-652).
gcgttcatttggaagatat

SEQ ID NO: 322342 - DNA, 19 bp, Homo sapiens
  siRNA target sequence for VEZATIN (NM_017599.2,680-698).
cctcgtgagaaaagcttta

SEQ ID NO: 322343 - DNA, 19 bp, Homo sapiens
  siRNA target sequence for VEZATIN (NM_017599.2,683-701).
cgtgagaaaagctttacgt

SEQ ID NO: 322344 - DNA, 19 bp, Homo sapiens
  siRNA target sequence for VEZATIN (NM_017599.2,694-712).
ctttacgtctcattcaaga

SEQ ID NO: 322345 - DNA, 19 bp, Homo sapiens
  siRNA target sequence for VEZATIN (NM_017599.2,711-729).
gaaaccgaagtgatttcca

SEQ ID NO: 322346 - DNA, 19 bp, Homo sapiens
  siRNA target sequence for VEZATIN (NM_017599.2,751-769).
ctgcttgcccatttaataa

SEQ ID NO: 322347 - DNA, 19 bp, Homo sapiens
  siRNA target sequence for VEZATIN (NM_017599.2,813-831).
gctgtctaccgaactctaa

SEQ ID NO: 322348 - DNA, 19 bp, Homo sapiens
  siRNA target sequence for VEZATIN (NM_017599.2,853-871).
ggctagctaccctatatat

SEQ ID NO: 322349 - DNA, 19 bp, Homo sapiens
  siRNA target sequence for VEZATIN (NM_017599.2,862-880).
ccctatatatgctgaaaaa

SEQ ID NO: 322350 - DNA, 19 bp, Homo sapiens
  siRNA target sequence for VEZATIN (NM_017599.2,947-965).
gggccttggacttagtgaa

SEQ ID NO: 322351 - DNA, 19 bp, Homo sapiens
  siRNA target sequence for VEZATIN (NM_017599.2,1051-1069).
cacagagttcagagttctt

SEQ ID NO: 322352 - DNA, 19 bp, Homo sapiens
  siRNA target sequence for VEZATIN (NM_017599.2,1070-1088).
cagacggttagccctatta

SEQ ID NO: 322353 - DNA, 19 bp, Homo sapiens
  siRNA target sequence for VEZATIN (NM_017599.2,1072-1090).
gacggttagccctattact

SEQ ID NO: 322354 - DNA, 19 bp, Homo sapiens
  siRNA target sequence for VEZATIN (NM_017599.2,1074-1092).
cggttagccctattacttt

SEQ ID NO: 322355 - DNA, 19 bp, Homo sapiens
  siRNA target sequence for VEZATIN (NM_017599.2,1137-1155).
ctgcctcatcgtatcttat

SEQ ID NO: 322356 - DNA, 19 bp, Homo sapiens
  siRNA target sequence for VEZATIN (NM_017599.2,1139-1157).
gcctcatcgtatcttatct

SEQ ID NO: 322357 - DNA, 19 bp, Homo sapiens
  siRNA target sequence for VEZATIN (NM_017599.2,1141-1159).
ctcatcgtatcttatctga

SEQ ID NO: 322358 - DNA, 19 bp, Homo sapiens
  siRNA target sequence for VEZATIN (NM_017599.2,1211-1229).
gcgcagctatgagttctat

SEQ ID NO: 322359 - DNA, 19 bp, Homo sapiens
  siRNA target sequence for VEZATIN (NM_017599.2,1223-1241).
gttctatcggtactttgaa

SEQ ID NO: 322360 - DNA, 19 bp, Homo sapiens
  siRNA target sequence for VEZATIN (NM_017599.2,1226-1244).
ctatcggtactttgaaact

SEQ ID NO: 322361 - DNA, 19 bp, Homo sapiens
  siRNA target sequence for VEZATIN (NM_017599.2,1253-1271).
gtcagtaccgcagtgttta

SEQ ID NO: 322362 - DNA, 19 bp, Homo sapiens
  siRNA target sequence for VEZATIN (NM_017599.2,1257-1275).
gtaccgcagtgtttatcca

SEQ ID NO: 322363 - DNA, 19 bp, Homo sapiens
  siRNA target sequence for VEZATIN (NM_017599.2,1289-1307).
gtcaagagaactgaataat

SEQ ID NO: 322364 - DNA, 19 bp, Homo sapiens
  siRNA target sequence for VEZATIN (NM_017599.2,1294-1312).
gagaactgaataatgttca

SEQ ID NO: 322365 - DNA, 19 bp, Homo sapiens
  siRNA target sequence for VEZATIN (NM_017599.2,1437-1455).
cccatcctagaacagaaat

SEQ ID NO: 322366 - DNA, 19 bp, Homo sapiens
  siRNA target sequence for VEZATIN (NM_017599.2,1439-1457).
catcctagaacagaaatta

SEQ ID NO: 322367 - DNA, 19 bp, Homo sapiens
  siRNA target sequence for VEZATIN (NM_017599.2,1529-1547).
gctacgaagaaatacagat

SEQ ID NO: 322368 - DNA, 19 bp, Homo sapiens
  siRNA target sequence for VEZATIN (NM_017599.2,1554-1572).
ggcaagcctgaaatagcat

SEQ ID NO: 322369 - DNA, 19 bp, Homo sapiens
  siRNA target sequence for VEZATIN (NM_017599.2,1559-1577).
gcctgaaatagcatgtgaa

SEQ ID NO: 322370 - DNA, 19 bp, Homo sapiens
  siRNA target sequence for VEZATIN (NM_017599.2,1607-1625).
gcagcctactctacacatt

SEQ ID NO: 322371 - DNA, 19 bp, Homo sapiens
  siRNA target sequence for VEZATIN (NM_017599.2,1652-1670).
gcaggaattagaagcttat

SEQ ID NO: 322372 - DNA, 19 bp, Homo sapiens
  siRNA target sequence for VEZATIN (NM_017599.2,1666-1684).
cttatgtagatgatataga

SEQ ID NO: 322373 - DNA, 19 bp, Homo sapiens
  siRNA target sequence for VEZATIN (NM_017599.2,1772-1790).
gagggtgctccaagaatta

SEQ ID NO: 322374 - DNA, 19 bp, Homo sapiens
  siRNA target sequence for VEZATIN (NM_017599.2,1775-1793).
ggtgctccaagaattaaaa

SEQ ID NO: 322375 - DNA, 19 bp, Homo sapiens
  siRNA target sequence for VEZATIN (NM_017599.2,1778-1796).
gctccaagaattaaaatct

SEQ ID NO: 322376 - DNA, 19 bp, Homo sapiens
  siRNA target sequence for VEZATIN (NM_017599.2,1865-1883).
ggtaaagtccgcatggaat

SEQ ID NO: 322377 - DNA, 19 bp, Homo sapiens
  siRNA target sequence for VEZATIN (NM_017599.2,1866-1884).
gtaaagtccgcatggaatt

SEQ ID NO: 322378 - DNA, 19 bp, Homo sapiens
  siRNA target sequence for ZCWCC1 (NM_014941.1,1475-1493).
gtacgggaatgggttaaaa

SEQ ID NO: 322379 - DNA, 19 bp, Homo sapiens
  siRNA target sequence for ZCWCC1 (NM_014941.1,1505-1523).
gcgcattgggaaggatttt

SEQ ID NO: 322380 - DNA, 19 bp, Homo sapiens
  siRNA target sequence for ZCWCC1 (NM_014941.1,1506-1524).
cgcattgggaaggatttta

SEQ ID NO: 322381 - DNA, 19 bp, Homo sapiens
  siRNA target sequence for ZCWCC1 (NM_014941.1,1565-1583).
cctgtctcgcacgtttcat

SEQ ID NO: 322382 - DNA, 19 bp, Homo sapiens
  siRNA target sequence for ZCWCC1 (NM_014941.1,1648-1666).
ctgtcacagacaatgtaga

SEQ ID NO: 322383 - DNA, 19 bp, Homo sapiens
  siRNA target sequence for ZCWCC1 (NM_014941.1,1684-1702).
cagaactcatctataagta

SEQ ID NO: 322384 - DNA, 19 bp, Homo sapiens
  siRNA target sequence for ZCWCC1 (NM_014941.1,1686-1704).
gaactcatctataagtact

SEQ ID NO: 322385 - DNA, 19 bp, Homo sapiens
  siRNA target sequence for ZCWCC1 (NM_014941.1,1725-1743).
gaagtgatgacccagttta

SEQ ID NO: 322386 - DNA, 19 bp, Homo sapiens
  siRNA target sequence for ZCWCC1 (NM_014941.1,1753-1771).
ctggggacagcggaacatt

SEQ ID NO: 322387 - DNA, 19 bp, Homo sapiens
  siRNA target sequence for ZCWCC1 (NM_014941.1,1762-1780).
gcggaacattggtgatcat

SEQ ID NO: 322388 - DNA, 19 bp, Homo sapiens
  siRNA target sequence for ZCWCC1 (NM_014941.1,1764-1782).
ggaacattggtgatcatct

SEQ ID NO: 322389 - DNA, 19 bp, Homo sapiens
  siRNA target sequence for ZCWCC1 (NM_014941.1,1765-1783).
gaacattggtgatcatctt

SEQ ID NO: 322390 - DNA, 19 bp, Homo sapiens
  siRNA target sequence for ZCWCC1 (NM_014941.1,1768-1786).
cattggtgatcatcttcaa

SEQ ID NO: 322391 - DNA, 19 bp, Homo sapiens
  siRNA target sequence for ZCWCC1 (NM_014941.1,1807-1825).
gagagccagaactagacat

SEQ ID NO: 322392 - DNA, 19 bp, Homo sapiens
  siRNA target sequence for ZCWCC1 (NM_014941.1,1909-1927).
ccgctgtgctctatattga

SEQ ID NO: 322393 - DNA, 19 bp, Homo sapiens
  siRNA target sequence for ZCWCC1 (NM_014941.1,1910-1928).
cgctgtgctctatattgat

SEQ ID NO: 322394 - DNA, 19 bp, Homo sapiens
  siRNA target sequence for ZCWCC1 (NM_014941.1,1930-1948).
cccggatgaggatcttcat

SEQ ID NO: 322395 - DNA, 19 bp, Homo sapiens
  siRNA target sequence for ZCWCC1 (NM_014941.1,2110-2128).
gcaaagctcggacattaga

SEQ ID NO: 322396 - DNA, 19 bp, Homo sapiens
  siRNA target sequence for ZCWCC1 (NM_014941.1,2111-2129).
caaagctcggacattagaa

SEQ ID NO: 322397 - DNA, 19 bp, Homo sapiens
  siRNA target sequence for ZCWCC1 (NM_014941.1,2242-2260).
ccaagcagcgagcacttaa

SEQ ID NO: 322398 - DNA, 19 bp, Homo sapiens
  siRNA target sequence for ZCWCC1 (NM_014941.1,2243-2261).
caagcagcgagcacttaaa

SEQ ID NO: 322399 - DNA, 19 bp, Homo sapiens
  siRNA target sequence for ZCWCC1 (NM_014941.1,2251-2269).
gagcacttaaagaacctaa

SEQ ID NO: 322400 - DNA, 19 bp, Homo sapiens
  siRNA target sequence for ZCWCC1 (NM_014941.1,2262-2280).
gaacctaaggaactgaatt

SEQ ID NO: 322401 - DNA, 19 bp, Homo sapiens
  siRNA target sequence for ZCWCC1 (NM_014941.1,2336-2354).
ctgtagccgactgatcaaa

SEQ ID NO: 322402 - DNA, 19 bp, Homo sapiens
  siRNA target sequence for ZCWCC1 (NM_014941.1,2341-2359).
gccgactgatcaaaatgta

SEQ ID NO: 322403 - DNA, 19 bp, Homo sapiens
  siRNA target sequence for ZCWCC1 (NM_014941.1,2346-2364).
ctgatcaaaatgtatgaga

SEQ ID NO: 322404 - DNA, 19 bp, Homo sapiens
  siRNA target sequence for ZCWCC1 (NM_014941.1,2441-2459).
ggagcctacacacaacaaa

SEQ ID NO: 322405 - DNA, 19 bp, Homo sapiens
  siRNA target sequence for ZCWCC1 (NM_014941.1,2511-2529).
gagcacctggcgcagtatt

SEQ ID NO: 322406 - DNA, 19 bp, Homo sapiens
  siRNA target sequence for ZCWCC1 (NM_014941.1,2520-2538).
gcgcagtattggaaggata

SEQ ID NO: 322407 - DNA, 19 bp, Homo sapiens
  siRNA target sequence for ZCWCC1 (NM_014941.1,2521-2539).
cgcagtattggaaggatat

SEQ ID NO: 322408 - DNA, 19 bp, Homo sapiens
  siRNA target sequence for ZCWCC1 (NM_014941.1,2550-2568).
cagaggggaatcatcaagt

SEQ ID NO: 322409 - DNA, 19 bp, Homo sapiens
  siRNA target sequence for ZCWCC1 (NM_014941.1,2617-2635).
ccagtgagctgcgttacaa

SEQ ID NO: 322410 - DNA, 19 bp, Homo sapiens
  siRNA target sequence for ZCWCC1 (NM_014941.1,2618-2636).
cagtgagctgcgttacaaa

SEQ ID NO: 322411 - DNA, 19 bp, Homo sapiens
  siRNA target sequence for ZCWCC1 (NM_014941.1,2672-2690).
gtgcgatttgtgtctgaaa

SEQ ID NO: 322412 - DNA, 19 bp, Homo sapiens
  siRNA target sequence for ZCWCC1 (NM_014941.1,2714-2732).
gagttctgtggaaaaagat

SEQ ID NO: 322413 - DNA, 19 bp, Homo sapiens
  siRNA target sequence for ZCWCC1 (NM_014941.1,2780-2798).
ccggtgtgaggcttctgaa

SEQ ID NO: 322414 - DNA, 19 bp, Homo sapiens
  siRNA target sequence for ZCWCC1 (NM_014941.1,2936-2954).
ccaagcagacctgaagaaa

SEQ ID NO: 322415 - DNA, 19 bp, Homo sapiens
  siRNA target sequence for ZCWCC1 (NM_014941.1,2937-2955).
caagcagacctgaagaaat

SEQ ID NO: 322416 - DNA, 19 bp, Homo sapiens
  siRNA target sequence for ZCWCC1 (NM_014941.1,3389-3407).
gcggagtgtcgcagtttct

SEQ ID NO: 322417 - DNA, 19 bp, Homo sapiens
  siRNA target sequence for ZCWCC1 (NM_014941.1,3391-3409).
ggagtgtcgcagtttctga

SEQ ID NO: 322418 - DNA, 19 bp, Homo sapiens
  siRNA target sequence for ZCWCC1 (NM_014941.1,3644-3662).
gcggtggaaggtgaagttt

SEQ ID NO: 322419 - DNA, 19 bp, Homo sapiens
  siRNA target sequence for ZCWCC1 (NM_014941.1,3649-3667).
ggaaggtgaagtttgacta

SEQ ID NO: 322420 - DNA, 19 bp, Homo sapiens
  siRNA target sequence for ZCWCC1 (NM_014941.1,3914-3932).
ccagatcctccggaattgt

SEQ ID NO: 322421 - DNA, 19 bp, Homo sapiens
  siRNA target sequence for ZCWCC1 (NM_014941.1,3915-3933).
cagatcctccggaattgtt

SEQ ID NO: 322422 - DNA, 19 bp, Homo sapiens
  siRNA target sequence for ZCWCC1 (NM_014941.1,3917-3935).
gatcctccggaattgttta

SEQ ID NO: 322423 - DNA, 19 bp, Homo sapiens
  siRNA target sequence for ZCWCC1 (NM_014941.1,3974-3992).
gcagctgagtgctatgaat

SEQ ID NO: 322424 - DNA, 19 bp, Homo sapiens
  siRNA target sequence for ZCWCC1 (NM_014941.1,3975-3993).
cagctgagtgctatgaatt

SEQ ID NO: 322425 - DNA, 19 bp, Homo sapiens
  siRNA target sequence for ZCWCC1 (NM_014941.1,3977-3995).
gctgagtgctatgaattca

SEQ ID NO: 322426 - DNA, 19 bp, Homo sapiens
  siRNA target sequence for ZCWCC1 (NM_014941.1,3994-4012).
cagatgagctaatatcttt

SEQ ID NO: 322427 - DNA, 19 bp, Homo sapiens
  siRNA target sequence for ZCWCC1 (NM_014941.1,4022-4040).
ggagtacttcaagcaatat

SEQ ID NO: 322428 - DNA, 19 bp, Homo sapiens
  siRNA target sequence for ZWINT (NM_007057.2,252-270).
cgaccccttggcttctgaa

SEQ ID NO: 322429 - DNA, 19 bp, Homo sapiens
  siRNA target sequence for ZWINT (NM_007057.2,279-297).
ccgacagaaggcaattgca

SEQ ID NO: 322430 - DNA, 19 bp, Homo sapiens
  siRNA target sequence for ZWINT (NM_007057.2,832-850).
cctgctggagatgtaaatt

SEQ ID NO: 322431 - DNA, 19 bp, Homo sapiens
  siRNA target sequence for ZWINT (NM_007057.2,833-851).
ctgctggagatgtaaattt

SEQ ID NO: 322432 - DNA, 19 bp, Homo sapiens
  siRNA target sequence for DCTN4 (NM_016221.2,39-57).
gtcggaccgggttctctat

SEQ ID NO: 322433 - DNA, 19 bp, Homo sapiens
  siRNA target sequence for DCTN4 (NM_016221.2,41-59).
cggaccgggttctctatct

SEQ ID NO: 322434 - DNA, 19 bp, Homo sapiens
  siRNA target sequence for DCTN4 (NM_016221.2,42-60).
ggaccgggttctctatcta

SEQ ID NO: 322435 - DNA, 19 bp, Homo sapiens
  siRNA target sequence for DCTN4 (NM_016221.2,89-107).
cgctctcgcaactctactt

SEQ ID NO: 322436 - DNA, 19 bp, Homo sapiens
  siRNA target sequence for DCTN4 (NM_016221.2,153-171).
cgaggtggactcccattat

SEQ ID NO: 322437 - DNA, 19 bp, Homo sapiens
  siRNA target sequence for DCTN4 (NM_016221.2,154-172).
gaggtggactcccattatt

SEQ ID NO: 322438 - DNA, 19 bp, Homo sapiens
  siRNA target sequence for DCTN4 (NM_016221.2,156-174).
ggtggactcccattattgt

SEQ ID NO: 322439 - DNA, 19 bp, Homo sapiens
  siRNA target sequence for DCTN4 (NM_016221.2,173-191).
gtcccagttgtttagaaaa

SEQ ID NO: 322440 - DNA, 19 bp, Homo sapiens
  siRNA target sequence for DCTN4 (NM_016221.2,176-194).
ccagttgtttagaaaatat

SEQ ID NO: 322441 - DNA, 19 bp, Homo sapiens
  siRNA target sequence for DCTN4 (NM_016221.2,200-218).
cggctgaagccaaactaaa

SEQ ID NO: 322442 - DNA, 19 bp, Homo sapiens
  siRNA target sequence for DCTN4 (NM_016221.2,201-219).
ggctgaagccaaactaaaa

SEQ ID NO: 322443 - DNA, 19 bp, Homo sapiens
  siRNA target sequence for DCTN4 (NM_016221.2,222-240).
gaatagatgtgccaattgt

SEQ ID NO: 322444 - DNA, 19 bp, Homo sapiens
  siRNA target sequence for DCTN4 (NM_016221.2,345-363).
cctggcatgtggattttgt

SEQ ID NO: 322445 - DNA, 19 bp, Homo sapiens
  siRNA target sequence for DCTN4 (NM_016221.2,382-400).
gtgggcatggcagacaaat

SEQ ID NO: 322446 - DNA, 19 bp, Homo sapiens
  siRNA target sequence for DCTN4 (NM_016221.2,386-404).
gcatggcagacaaatctgt

SEQ ID NO: 322447 - DNA, 19 bp, Homo sapiens
  siRNA target sequence for DCTN4 (NM_016221.2,520-538).
ctggcacgacgtagaaact

SEQ ID NO: 322448 - DNA, 19 bp, Homo sapiens
  siRNA target sequence for DCTN4 (NM_016221.2,522-540).
ggcacgacgtagaaactat

SEQ ID NO: 322449 - DNA, 19 bp, Homo sapiens
  siRNA target sequence for DCTN4 (NM_016221.2,523-541).
gcacgacgtagaaactata

SEQ ID NO: 322450 - DNA, 19 bp, Homo sapiens
  siRNA target sequence for DCTN4 (NM_016221.2,524-542).
cacgacgtagaaactatat

SEQ ID NO: 322451 - DNA, 19 bp, Homo sapiens
  siRNA target sequence for DCTN4 (NM_016221.2,547-565).
ctggctttttcggacaaat

SEQ ID NO: 322452 - DNA, 19 bp, Homo sapiens
  siRNA target sequence for DCTN4 (NM_016221.2,549-567).
ggctttttcggacaaatat

SEQ ID NO: 322453 - DNA, 19 bp, Homo sapiens
  siRNA target sequence for DCTN4 (NM_016221.2,598-616).
gctggtgcatccatcagta

SEQ ID NO: 322454 - DNA, 19 bp, Homo sapiens
  siRNA target sequence for DCTN4 (NM_016221.2,700-718).
cctctacctgaagactatt

SEQ ID NO: 322455 - DNA, 19 bp, Homo sapiens
  siRNA target sequence for DCTN4 (NM_016221.2,701-719).
ctctacctgaagactatta

SEQ ID NO: 322456 - DNA, 19 bp, Homo sapiens
  siRNA target sequence for DCTN4 (NM_016221.2,703-721).
ctacctgaagactattata

SEQ ID NO: 322457 - DNA, 19 bp, Homo sapiens
  siRNA target sequence for DCTN4 (NM_016221.2,807-825).
ctatcctcgccacaaacat

SEQ ID NO: 322458 - DNA, 19 bp, Homo sapiens
  siRNA target sequence for DCTN4 (NM_016221.2,812-830).
ctcgccacaaacatcttct

SEQ ID NO: 322459 - DNA, 19 bp, Homo sapiens
  siRNA target sequence for DCTN4 (NM_016221.2,843-861).
cctgcgctgccgtaaatgt

SEQ ID NO: 322460 - DNA, 19 bp, Homo sapiens
  siRNA target sequence for DCTN4 (NM_016221.2,846-864).
gcgctgccgtaaatgtgaa

SEQ ID NO: 322461 - DNA, 19 bp, Homo sapiens
  siRNA target sequence for DCTN4 (NM_016221.2,851-869).
gccgtaaatgtgaacataa

SEQ ID NO: 322462 - DNA, 19 bp, Homo sapiens
  siRNA target sequence for DCTN4 (NM_016221.2,853-871).
cgtaaatgtgaacataatt

SEQ ID NO: 322463 - DNA, 19 bp, Homo sapiens
  siRNA target sequence for DCTN4 (NM_016221.2,893-911).
caacgtcaatcaaattcaa

SEQ ID NO: 322464 - DNA, 19 bp, Homo sapiens
  siRNA target sequence for DCTN4 (NM_016221.2,918-936).
gctggtcgctgtcaattat

SEQ ID NO: 322465 - DNA, 19 bp, Homo sapiens
  siRNA target sequence for DCTN4 (NM_016221.2,919-937).
ctggtcgctgtcaattata

SEQ ID NO: 322466 - DNA, 19 bp, Homo sapiens
  siRNA target sequence for DCTN4 (NM_016221.2,921-939).
ggtcgctgtcaattatatt

SEQ ID NO: 322467 - DNA, 19 bp, Homo sapiens
  siRNA target sequence for DCTN4 (NM_016221.2,924-942).
cgctgtcaattatattcca

SEQ ID NO: 322468 - DNA, 19 bp, Homo sapiens
  siRNA target sequence for DCTN4 (NM_016221.2,943-961).
gaagtgagaatcatgtcaa

SEQ ID NO: 322469 - DNA, 19 bp, Homo sapiens
  siRNA target sequence for DCTN4 (NM_016221.2,964-982).
cccaaccttcgctacatga

SEQ ID NO: 322470 - DNA, 19 bp, Homo sapiens
  siRNA target sequence for DCTN4 (NM_016221.2,965-983).
ccaaccttcgctacatgaa

SEQ ID NO: 322471 - DNA, 19 bp, Homo sapiens
  siRNA target sequence for DCTN4 (NM_016221.2,999-1017).
cctgactcttacaaatcca

SEQ ID NO: 322472 - DNA, 19 bp, Homo sapiens
  siRNA target sequence for DCTN4 (NM_016221.2,1057-1075).
gagggggaccctgatgata

SEQ ID NO: 322473 - DNA, 19 bp, Homo sapiens
  siRNA target sequence for DCTN4 (NM_016221.2,1061-1079).
gggaccctgatgatatcaa

SEQ ID NO: 322474 - DNA, 19 bp, Homo sapiens
  siRNA target sequence for DCTN4 (NM_016221.2,1139-1157).
cagcagagtacgatgagtt

SEQ ID NO: 322475 - DNA, 19 bp, Homo sapiens
  siRNA target sequence for DCTN4 (NM_016221.2,1177-1195).
caggacgatcctgacatta

SEQ ID NO: 322476 - DNA, 19 bp, Homo sapiens
  siRNA target sequence for DCTN4 (NM_016221.2,1179-1197).
ggacgatcctgacattata

SEQ ID NO: 322477 - DNA, 19 bp, Homo sapiens
  siRNA target sequence for DCTN4 (NM_016221.2,1210-1228).
gccaacaaagtgggtattt

SEQ ID NO: 322478 - DNA, 19 bp, Homo sapiens
  siRNA target sequence for DCTN4 (NM_016221.2,1222-1240).
ggtattttcatcaaagtta

SEQ ID NO: 322479 - DNA, 19 bp, Homo sapiens
  siRNA target sequence for DCTN4 (NM_016221.2,1314-1332).
cattcgccccattgaagaa

SEQ ID NO: 322480 - DNA, 19 bp, Homo sapiens
  siRNA target sequence for EPLIN (NM_016357.1,128-146).
gcaatggacctcactatca

SEQ ID NO: 322481 - DNA, 19 bp, Homo sapiens
  siRNA target sequence for EPLIN (NM_016357.1,129-147).
caatggacctcactatcat

SEQ ID NO: 322482 - DNA, 19 bp, Homo sapiens
  siRNA target sequence for EPLIN (NM_016357.1,193-211).
catcggctattgtggaaat

SEQ ID NO: 322483 - DNA, 19 bp, Homo sapiens
  siRNA target sequence for EPLIN (NM_016357.1,196-214).
cggctattgtggaaatatt

SEQ ID NO: 322484 - DNA, 19 bp, Homo sapiens
  siRNA target sequence for EPLIN (NM_016357.1,198-216).
gctattgtggaaatattct

SEQ ID NO: 322485 - DNA, 19 bp, Homo sapiens
  siRNA target sequence for EPLIN (NM_016357.1,260-278).
gagaagtaacaccgaaaat

SEQ ID NO: 322486 - DNA, 19 bp, Homo sapiens
  siRNA target sequence for EPLIN (NM_016357.1,262-280).
gaagtaacaccgaaaatct

SEQ ID NO: 322487 - DNA, 19 bp, Homo sapiens
  siRNA target sequence for EPLIN (NM_016357.1,509-527).
cctcgttcagggtcgatat

SEQ ID NO: 322488 - DNA, 19 bp, Homo sapiens
  siRNA target sequence for EPLIN (NM_016357.1,520-538).
gtcgatatccccacatcaa

SEQ ID NO: 322489 - DNA, 19 bp, Homo sapiens
  siRNA target sequence for EPLIN (NM_016357.1,539-557).
ggacggtgaggatcttaaa

SEQ ID NO: 322490 - DNA, 19 bp, Homo sapiens
  siRNA target sequence for EPLIN (NM_016357.1,558-576).
gaccactcaacagaaagta

SEQ ID NO: 322491 - DNA, 19 bp, Homo sapiens
  siRNA target sequence for EPLIN (NM_016357.1,648-666).
gcttcgggcaaaatagaga

SEQ ID NO: 322492 - DNA, 19 bp, Homo sapiens
  siRNA target sequence for EPLIN (NM_016357.1,649-667).
cttcgggcaaaatagagaa

SEQ ID NO: 322493 - DNA, 19 bp, Homo sapiens
  siRNA target sequence for EPLIN (NM_016357.1,652-670).
cgggcaaaatagagaaata

SEQ ID NO: 322494 - DNA, 19 bp, Homo sapiens
  siRNA target sequence for EPLIN (NM_016357.1,678-696).
ccgctgaacaggcttaaga

SEQ ID NO: 322495 - DNA, 19 bp, Homo sapiens
  siRNA target sequence for EPLIN (NM_016357.1,679-697).
cgctgaacaggcttaagat

SEQ ID NO: 322496 - DNA, 19 bp, Homo sapiens
  siRNA target sequence for EPLIN (NM_016357.1,681-699).
ctgaacaggcttaagatga

SEQ ID NO: 322497 - DNA, 19 bp, Homo sapiens
  siRNA target sequence for EPLIN (NM_016357.1,686-704).
caggcttaagatgatgttt

SEQ ID NO: 322498 - DNA, 19 bp, Homo sapiens
  siRNA target sequence for EPLIN (NM_016357.1,688-706).
ggcttaagatgatgtttga

SEQ ID NO: 322499 - DNA, 19 bp, Homo sapiens
  siRNA target sequence for EPLIN (NM_016357.1,711-729).
ggtgaaccaactcaaacta

SEQ ID NO: 322500 - DNA, 19 bp, Homo sapiens
  siRNA target sequence for EPLIN (NM_016357.1,712-730).
gtgaaccaactcaaactaa

SEQ ID NO: 322501 - DNA, 19 bp, Homo sapiens
  siRNA target sequence for EPLIN (NM_016357.1,790-808).
ctctagatgacctggaaat

SEQ ID NO: 322502 - DNA, 19 bp, Homo sapiens
  siRNA target sequence for EPLIN (NM_016357.1,816-834).
ggtcagttgtcatcttcta

SEQ ID NO: 322503 - DNA, 19 bp, Homo sapiens
  siRNA target sequence for EPLIN (NM_016357.1,895-913).
cctctataaaggatcgaat

SEQ ID NO: 322504 - DNA, 19 bp, Homo sapiens
  siRNA target sequence for EPLIN (NM_016357.1,949-967).
gctcaaccaactatacaaa

SEQ ID NO: 322505 - DNA, 19 bp, Homo sapiens
  siRNA target sequence for EPLIN (NM_016357.1,950-968).
ctcaaccaactatacaaat

SEQ ID NO: 322506 - DNA, 19 bp, Homo sapiens
  siRNA target sequence for EPLIN (NM_016357.1,978-996).
gccagtggtggcgaaatca

SEQ ID NO: 322507 - DNA, 19 bp, Homo sapiens
  siRNA target sequence for EPLIN (NM_016357.1,980-998).
cagtggtggcgaaatcaaa

SEQ ID NO: 322508 - DNA, 19 bp, Homo sapiens
  siRNA target sequence for EPLIN (NM_016357.1,982-1000).
gtggtggcgaaatcaaaat

SEQ ID NO: 322509 - DNA, 19 bp, Homo sapiens
  siRNA target sequence for EPLIN (NM_016357.1,985-1003).
gtggcgaaatcaaaattca

SEQ ID NO: 322510 - DNA, 19 bp, Homo sapiens
  siRNA target sequence for EPLIN (NM_016357.1,1131-1149).
cgtgactcccaggttaaga

SEQ ID NO: 322511 - DNA, 19 bp, Homo sapiens
  siRNA target sequence for EPLIN (NM_016357.1,1198-1216).
gagcctccagtctttctga

SEQ ID NO: 322512 - DNA, 19 bp, Homo sapiens
  siRNA target sequence for EPLIN (NM_016357.1,1281-1299).
cagaagacagtctatccaa

SEQ ID NO: 322513 - DNA, 19 bp, Homo sapiens
  siRNA target sequence for EPLIN (NM_016357.1,1315-1333).
ccaaccagcaggtgtttca

SEQ ID NO: 322514 - DNA, 19 bp, Homo sapiens
  siRNA target sequence for EPLIN (NM_016357.1,1351-1369).
gctcctattgcaacaacaa

SEQ ID NO: 322515 - DNA, 19 bp, Homo sapiens
  siRNA target sequence for EPLIN (NM_016357.1,1354-1372).
cctattgcaacaacaaact

SEQ ID NO: 322516 - DNA, 19 bp, Homo sapiens
  siRNA target sequence for EPLIN (NM_016357.1,1398-1416).
catggaagaatctattgta

SEQ ID NO: 322517 - DNA, 19 bp, Homo sapiens
  siRNA target sequence for EPLIN (NM_016357.1,1420-1438).
ctcacttcaatcaactctt

SEQ ID NO: 322518 - DNA, 19 bp, Homo sapiens
  siRNA target sequence for EPLIN (NM_016357.1,1444-1462).
ctaagggcaactatgatga

SEQ ID NO: 322519 - DNA, 19 bp, Homo sapiens
  siRNA target sequence for EPLIN (NM_016357.1,1487-1505).
ggatctatgggcaagcaaa

SEQ ID NO: 322520 - DNA, 19 bp, Homo sapiens
  siRNA target sequence for EPLIN (NM_016357.1,1488-1506).
gatctatgggcaagcaaaa

SEQ ID NO: 322521 - DNA, 19 bp, Homo sapiens
  siRNA target sequence for EPLIN (NM_016357.1,1495-1513).
gggcaagcaaaaatgaaaa

SEQ ID NO: 322522 - DNA, 19 bp, Homo sapiens
  siRNA target sequence for EPLIN (NM_016357.1,1581-1599).
gaagatgcccctattgcta

SEQ ID NO: 322523 - DNA, 19 bp, Homo sapiens
  siRNA target sequence for EPLIN (NM_016357.1,1804-1822).
ctgaggatgtcgatctaga

SEQ ID NO: 322524 - DNA, 19 bp, Homo sapiens
  siRNA target sequence for EPLIN (NM_016357.1,1829-1847).
gaagctaagacgatcttct

SEQ ID NO: 322525 - DNA, 19 bp, Homo sapiens
  siRNA target sequence for EPLIN (NM_016357.1,1832-1850).
gctaagacgatcttcttca

SEQ ID NO: 322526 - DNA, 19 bp, Homo sapiens
  siRNA target sequence for EPLIN (NM_016357.1,2098-2116).
gtaaggaaggtcatagttt

SEQ ID NO: 322527 - DNA, 19 bp, Homo sapiens
  siRNA target sequence for EPLIN (NM_016357.1,2123-2141).
ggagaatgagaatcttgta

SEQ ID NO: 322528 - DNA, 19 bp, Homo sapiens
  siRNA target sequence for EPLIN (NM_016357.1,2126-2144).
gaatgagaatcttgtagaa

SEQ ID NO: 322529 - DNA, 19 bp, Homo sapiens
  siRNA target sequence for EPLIN (NM_016357.1,2149-2167).
gtgcagactccgatgaaga

SEQ ID NO: 322530 - DNA, 19 bp, Homo sapiens
  siRNA target sequence for EPLIN (NM_016357.1,2216-2234).
gaattggtcgagttttgta

SEQ ID NO: 322531 - DNA, 19 bp, Homo sapiens
  siRNA target sequence for EPLIN (NM_016357.1,2221-2239).
ggtcgagttttgtagacaa

SEQ ID NO: 322532 - DNA, 19 bp, Homo sapiens
  siRNA target sequence for EPLIN (NM_016357.1,2237-2255).
caacacctttgctgaagaa

SEQ ID NO: 322533 - DNA, 19 bp, Homo sapiens
  siRNA target sequence for EPLIN (NM_016357.1,2342-2360).
gagaaatcggtattatgat

SEQ ID NO: 322534 - DNA, 19 bp, Homo sapiens
  siRNA target sequence for EPLIN (NM_016357.1,2344-2362).
gaaatcggtattatgatga

SEQ ID NO: 322535 - DNA, 19 bp, Homo sapiens
  siRNA target sequence for KRTAP11-1 (NM_175858.2,92-110).
gttccagtggcccaagtta

SEQ ID NO: 322536 - DNA, 19 bp, Homo sapiens
  siRNA target sequence for KRTAP11-1 (NM_175858.2,238-256).
ctgttaccggcgaacttca

SEQ ID NO: 322537 - DNA, 19 bp, Homo sapiens
  siRNA target sequence for KRTAP11-1 (NM_175858.2,290-308).
cgacaaactacctgtattt

SEQ ID NO: 322538 - DNA, 19 bp, Homo sapiens
  siRNA target sequence for KRTAP13-1 (NM_181599.1,332-350).
gtccctgccagacaactta

SEQ ID NO: 322539 - DNA, 19 bp, Homo sapiens
  siRNA target sequence for KRTAP13-1 (NM_181599.1,562-580).
ggatcaggcttctactatt

SEQ ID NO: 322540 - DNA, 19 bp, Homo sapiens
  siRNA target sequence for KRTAP7-1 (NM_181606.1,33-51).
cccaggataccctattcta

SEQ ID NO: 322541 - DNA, 19 bp, Homo sapiens
  siRNA target sequence for KRTAP7-1 (NM_181606.1,34-52).
ccaggataccctattctat

SEQ ID NO: 322542 - DNA, 19 bp, Homo sapiens
  siRNA target sequence for KRTAP8-1 (NM_175857.2,90-108).
ggctacccgctgggatata

SEQ ID NO: 322543 - DNA, 19 bp, Homo sapiens
  siRNA target sequence for KRTAP8-1 (NM_175857.2,197-215).
gagatactcgccatttgct

SEQ ID NO: 322544 - DNA, 19 bp, Homo sapiens
  siRNA target sequence for MGC45562 (NM_152349.1,217-235).
ctgcaagtggaaattgaat

SEQ ID NO: 322545 - DNA, 19 bp, Homo sapiens
  siRNA target sequence for MGC45562 (NM_152349.1,219-237).
gcaagtggaaattgaatct

SEQ ID NO: 322546 - DNA, 19 bp, Homo sapiens
  siRNA target sequence for MGC45562 (NM_152349.1,312-330).
cctagagactgtgattgaa

SEQ ID NO: 322547 - DNA, 19 bp, Homo sapiens
  siRNA target sequence for MGC45562 (NM_152349.1,510-528).
gcctaccacaagtagagtt

SEQ ID NO: 322548 - DNA, 19 bp, Homo sapiens
  siRNA target sequence for MGC45562 (NM_152349.1,572-590).
ctacaaaagtcccacaaaa

SEQ ID NO: 322549 - DNA, 19 bp, Homo sapiens
  siRNA target sequence for MGC45562 (NM_152349.1,580-598).
gtcccacaaaagtatgaga

SEQ ID NO: 322550 - DNA, 19 bp, Homo sapiens
  siRNA target sequence for MGC45562 (NM_152349.1,582-600).
cccacaaaagtatgagaat

SEQ ID NO: 322551 - DNA, 19 bp, Homo sapiens
  siRNA target sequence for MGC45562 (NM_152349.1,620-638).
ccaaacaggcaatcttaaa

SEQ ID NO: 322552 - DNA, 19 bp, Homo sapiens
  siRNA target sequence for MGC45562 (NM_152349.1,633-651).
cttaaatgggagtatcgtt

SEQ ID NO: 322553 - DNA, 19 bp, Homo sapiens
  siRNA target sequence for MGC45562 (NM_152349.1,667-685).
gctcatggcactattcaga

SEQ ID NO: 322554 - DNA, 19 bp, Homo sapiens
  siRNA target sequence for MGC45562 (NM_152349.1,742-760).
cctcgattgaggaaaaagt

SEQ ID NO: 322555 - DNA, 19 bp, Homo sapiens
  siRNA target sequence for MGC45562 (NM_152349.1,759-777).
gtctgtttctcttcgattt

SEQ ID NO: 322556 - DNA, 19 bp, Homo sapiens
  siRNA target sequence for MGC45562 (NM_152349.1,761-779).
ctgtttctcttcgatttga

SEQ ID NO: 322557 - DNA, 19 bp, Homo sapiens
  siRNA target sequence for MGC45562 (NM_152349.1,816-834).
gactaagcaggataatcta

SEQ ID NO: 322558 - DNA, 19 bp, Homo sapiens
  siRNA target sequence for MGC45562 (NM_152349.1,825-843).
ggataatctaccagatata

SEQ ID NO: 322559 - DNA, 19 bp, Homo sapiens
  siRNA target sequence for MGC45562 (NM_152349.1,847-865).
gtcaggcttatcatgagaa

SEQ ID NO: 322560 - DNA, 19 bp, Homo sapiens
  siRNA target sequence for MGC45562 (NM_152349.1,872-890).
gcagtattccctctatcaa

SEQ ID NO: 322561 - DNA, 19 bp, Homo sapiens
  siRNA target sequence for MGC45562 (NM_152349.1,873-891).
cagtattccctctatcaaa

SEQ ID NO: 322562 - DNA, 19 bp, Homo sapiens
  siRNA target sequence for C14orf31 (NM_152330.2,296-314).
ccttcccaacgatgaatct

SEQ ID NO: 322563 - DNA, 19 bp, Homo sapiens
  siRNA target sequence for C14orf31 (NM_152330.2,405-423).
ggactcagtgttatacaaa

SEQ ID NO: 322564 - DNA, 19 bp, Homo sapiens
  siRNA target sequence for C14orf31 (NM_152330.2,406-424).
gactcagtgttatacaaaa

SEQ ID NO: 322565 - DNA, 19 bp, Homo sapiens
  siRNA target sequence for C14orf31 (NM_152330.2,408-426).
ctcagtgttatacaaaata

SEQ ID NO: 322566 - DNA, 19 bp, Homo sapiens
  siRNA target sequence for C14orf31 (NM_152330.2,499-517).
gcaagggtatcgaccaatt

SEQ ID NO: 322567 - DNA, 19 bp, Homo sapiens
  siRNA target sequence for C14orf31 (NM_152330.2,500-518).
caagggtatcgaccaattt

SEQ ID NO: 322568 - DNA, 19 bp, Homo sapiens
  siRNA target sequence for C14orf31 (NM_152330.2,539-557).
cttccgtgtgcagtactat

SEQ ID NO: 322569 - DNA, 19 bp, Homo sapiens
  siRNA target sequence for C14orf31 (NM_152330.2,561-579).
gaaaatggcagattgatca

SEQ ID NO: 322570 - DNA, 19 bp, Homo sapiens
  siRNA target sequence for C14orf31 (NM_152330.2,610-628).
ggcacctgagaaaacaagt

SEQ ID NO: 322571 - DNA, 19 bp, Homo sapiens
  siRNA target sequence for C14orf31 (NM_152330.2,614-632).
cctgagaaaacaagttctt

SEQ ID NO: 322572 - DNA, 19 bp, Homo sapiens
  siRNA target sequence for C14orf31 (NM_152330.2,693-711).
gctgatcttgggaacttca

SEQ ID NO: 322573 - DNA, 19 bp, Homo sapiens
  siRNA target sequence for C14orf31 (NM_152330.2,694-712).
ctgatcttgggaacttcaa

SEQ ID NO: 322574 - DNA, 19 bp, Homo sapiens
  siRNA target sequence for C14orf31 (NM_152330.2,760-778).
catcttgggttgtttccaa

SEQ ID NO: 322575 - DNA, 19 bp, Homo sapiens
  siRNA target sequence for C14orf31 (NM_152330.2,811-829).
caaacatgcacaaagatca

SEQ ID NO: 322576 - DNA, 19 bp, Homo sapiens
  siRNA target sequence for C14orf31 (NM_152330.2,843-861).
gcttccgaagctcatctta

SEQ ID NO: 322577 - DNA, 19 bp, Homo sapiens
  siRNA target sequence for C14orf31 (NM_152330.2,844-862).
cttccgaagctcatcttaa

SEQ ID NO: 322578 - DNA, 19 bp, Homo sapiens
  siRNA target sequence for C14orf31 (NM_152330.2,887-905).
ggatgacgtcgctgttcat

SEQ ID NO: 322579 - DNA, 19 bp, Homo sapiens
  siRNA target sequence for C14orf31 (NM_152330.2,888-906).
gatgacgtcgctgttcatt

SEQ ID NO: 322580 - DNA, 19 bp, Homo sapiens
  siRNA target sequence for C14orf31 (NM_152330.2,891-909).
gacgtcgctgttcattact

SEQ ID NO: 322581 - DNA, 19 bp, Homo sapiens
  siRNA target sequence for C14orf31 (NM_152330.2,894-912).
gtcgctgttcattactaca

SEQ ID NO: 322582 - DNA, 19 bp, Homo sapiens
  siRNA target sequence for C14orf31 (NM_152330.2,897-915).
gctgttcattactacagat

SEQ ID NO: 322583 - DNA, 19 bp, Homo sapiens
  siRNA target sequence for C14orf31 (NM_152330.2,900-918).
gttcattactacagattgt

SEQ ID NO: 322584 - DNA, 19 bp, Homo sapiens
  siRNA target sequence for C14orf31 (NM_152330.2,908-926).
ctacagattgtataaggat

SEQ ID NO: 322585 - DNA, 19 bp, Homo sapiens
  siRNA target sequence for C14orf31 (NM_152330.2,943-961).
catcgctgactcttggatt

SEQ ID NO: 322586 - DNA, 19 bp, Homo sapiens
  siRNA target sequence for C14orf31 (NM_152330.2,965-983).
catgaggggaatacagatt

SEQ ID NO: 322587 - DNA, 19 bp, Homo sapiens
  siRNA target sequence for C14orf31 (NM_152330.2,970-988).
ggggaatacagatttttca

SEQ ID NO: 322588 - DNA, 19 bp, Homo sapiens
  siRNA target sequence for C14orf31 (NM_152330.2,1028-1046).
ctggacaaatgttggaaaa

SEQ ID NO: 322589 - DNA, 19 bp, Homo sapiens
  siRNA target sequence for C14orf31 (NM_152330.2,1096-1114).
ctgcccggaagctcatata

SEQ ID NO: 322590 - DNA, 19 bp, Homo sapiens
  siRNA target sequence for C14orf31 (NM_152330.2,1099-1117).
cccggaagctcatatacta

SEQ ID NO: 322591 - DNA, 19 bp, Homo sapiens
  siRNA target sequence for C14orf31 (NM_152330.2,1101-1119).
cggaagctcatatactaca

SEQ ID NO: 322592 - DNA, 19 bp, Homo sapiens
  siRNA target sequence for C14orf31 (NM_152330.2,1168-1186).
gccaccgcctctatatgaa

SEQ ID NO: 322593 - DNA, 19 bp, Homo sapiens
  siRNA target sequence for C14orf31 (NM_152330.2,1169-1187).
ccaccgcctctatatgaat

SEQ ID NO: 322594 - DNA, 19 bp, Homo sapiens
  siRNA target sequence for C14orf31 (NM_152330.2,1242-1260).
cagtaccgggaatcttaca

SEQ ID NO: 322595 - DNA, 19 bp, Homo sapiens
  siRNA target sequence for C14orf31 (NM_152330.2,1322-1340).
cagtgcgggcagcatgaaa

SEQ ID NO: 322596 - DNA, 19 bp, Homo sapiens
  siRNA target sequence for C14orf31 (NM_152330.2,1324-1342).
gtgcgggcagcatgaaaca

SEQ ID NO: 322597 - DNA, 19 bp, Homo sapiens
  siRNA target sequence for C14orf31 (NM_152330.2,1326-1344).
gcgggcagcatgaaacaca

SEQ ID NO: 322598 - DNA, 19 bp, Homo sapiens
  siRNA target sequence for C14orf31 (NM_152330.2,1327-1345).
cgggcagcatgaaacacaa

SEQ ID NO: 322599 - DNA, 19 bp, Homo sapiens
  siRNA target sequence for C14orf31 (NM_152330.2,1461-1479).
caccgcaagctgaaaacct

SEQ ID NO: 322600 - DNA, 19 bp, Homo sapiens
  siRNA target sequence for C14orf31 (NM_152330.2,1554-1572).
gacttacaggacgatgaaa

SEQ ID NO: 322601 - DNA, 19 bp, Homo sapiens
  siRNA target sequence for C14orf31 (NM_152330.2,1556-1574).
cttacaggacgatgaaata

SEQ ID NO: 322602 - DNA, 19 bp, Homo sapiens
  siRNA target sequence for C14orf31 (NM_152330.2,1695-1713).
cactctgggttgattgtga

SEQ ID NO: 322603 - DNA, 19 bp, Homo sapiens
  siRNA target sequence for C14orf31 (NM_152330.2,1735-1753).
cgagctcttcagaaacagt

SEQ ID NO: 322604 - DNA, 19 bp, Homo sapiens
  siRNA target sequence for C14orf31 (NM_152330.2,1744-1762).
cagaaacagttgttaagct

SEQ ID NO: 322605 - DNA, 19 bp, Homo sapiens
  siRNA target sequence for C14orf31 (NM_152330.2,1768-1786).
gccagagtactgattctct

SEQ ID NO: 322606 - DNA, 19 bp, Homo sapiens
  siRNA target sequence for C14orf31 (NM_152330.2,1769-1787).
ccagagtactgattctctt

SEQ ID NO: 322607 - DNA, 19 bp, Homo sapiens
  siRNA target sequence for C14orf31 (NM_152330.2,1795-1813).
ctatatgtcggaaaccaaa

SEQ ID NO: 322608 - DNA, 19 bp, Homo sapiens
  siRNA target sequence for C14orf31 (NM_152330.2,1842-1860).
ctcgatgacatcagacttt

SEQ ID NO: 322609 - DNA, 19 bp, Homo sapiens
  siRNA target sequence for C20orf42 (NM_017671.2,409-427).
cgttgaccatcccaatgaa

SEQ ID NO: 322610 - DNA, 19 bp, Homo sapiens
  siRNA target sequence for C20orf42 (NM_017671.2,442-460).
cgtcacactgagagtatct

SEQ ID NO: 322611 - DNA, 19 bp, Homo sapiens
  siRNA target sequence for C20orf42 (NM_017671.2,477-495).
gaggagtgatgctcaagtt

SEQ ID NO: 322612 - DNA, 19 bp, Homo sapiens
  siRNA target sequence for C20orf42 (NM_017671.2,480-498).
gagtgatgctcaagttagt

SEQ ID NO: 322613 - DNA, 19 bp, Homo sapiens
  siRNA target sequence for C20orf42 (NM_017671.2,484-502).
gatgctcaagttagtagaa

SEQ ID NO: 322614 - DNA, 19 bp, Homo sapiens
  siRNA target sequence for C20orf42 (NM_017671.2,497-515).
gtagaacagatcaatatat

SEQ ID NO: 322615 - DNA, 19 bp, Homo sapiens
  siRNA target sequence for C20orf42 (NM_017671.2,517-535).
ccaagactggtcagacttt

SEQ ID NO: 322616 - DNA, 19 bp, Homo sapiens
  siRNA target sequence for C20orf42 (NM_017671.2,580-598).
ctggaccctggacaaatat

SEQ ID NO: 322617 - DNA, 19 bp, Homo sapiens
  siRNA target sequence for C20orf42 (NM_017671.2,600-618).
gggtccaggcagatgcaaa

SEQ ID NO: 322618 - DNA, 19 bp, Homo sapiens
  siRNA target sequence for C20orf42 (NM_017671.2,651-669).
gccttcgtctgccgaattt

SEQ ID NO: 322619 - DNA, 19 bp, Homo sapiens
  siRNA target sequence for C20orf42 (NM_017671.2,653-671).
cttcgtctgccgaatttga

SEQ ID NO: 322620 - DNA, 19 bp, Homo sapiens
  siRNA target sequence for C20orf42 (NM_017671.2,656-674).
cgtctgccgaatttgaaga

SEQ ID NO: 322621 - DNA, 19 bp, Homo sapiens
  siRNA target sequence for C20orf42 (NM_017671.2,657-675).
gtctgccgaatttgaagat

SEQ ID NO: 322622 - DNA, 19 bp, Homo sapiens
  siRNA target sequence for C20orf42 (NM_017671.2,778-796).
gccgtctggtgactatttt

SEQ ID NO: 322623 - DNA, 19 bp, Homo sapiens
  siRNA target sequence for C20orf42 (NM_017671.2,779-797).
ccgtctggtgactatttta

SEQ ID NO: 322624 - DNA, 19 bp, Homo sapiens
  siRNA target sequence for C20orf42 (NM_017671.2,780-798).
cgtctggtgactattttaa

SEQ ID NO: 322625 - DNA, 19 bp, Homo sapiens
  siRNA target sequence for C20orf42 (NM_017671.2,829-847).
ggaacccataattgaagat

SEQ ID NO: 322626 - DNA, 19 bp, Homo sapiens
  siRNA target sequence for C20orf42 (NM_017671.2,900-918).
gtttatacagtaaaaccat

SEQ ID NO: 322627 - DNA, 19 bp, Homo sapiens
  siRNA target sequence for C20orf42 (NM_017671.2,986-1004).
cctttgacggaacaaaact

SEQ ID NO: 322628 - DNA, 19 bp, Homo sapiens
  siRNA target sequence for C20orf42 (NM_017671.2,1043-1061).
gaagcacttgcggatatgt

SEQ ID NO: 322629 - DNA, 19 bp, Homo sapiens
  siRNA target sequence for C20orf42 (NM_017671.2,1067-1085).
cctcggtctctggttgata

SEQ ID NO: 322630 - DNA, 19 bp, Homo sapiens
  siRNA target sequence for C20orf42 (NM_017671.2,1116-1134).
cctcacgctcccttatgga

SEQ ID NO: 322631 - DNA, 19 bp, Homo sapiens
  siRNA target sequence for C20orf42 (NM_017671.2,1117-1135).
ctcacgctcccttatggaa

SEQ ID NO: 322632 - DNA, 19 bp, Homo sapiens
  siRNA target sequence for C20orf42 (NM_017671.2,1156-1174).
gcagctgctcttacgattt

SEQ ID NO: 322633 - DNA, 19 bp, Homo sapiens
  siRNA target sequence for C20orf42 (NM_017671.2,1157-1175).
cagctgctcttacgattta

SEQ ID NO: 322634 - DNA, 19 bp, Homo sapiens
  siRNA target sequence for C20orf42 (NM_017671.2,1159-1177).
gctgctcttacgatttaaa

SEQ ID NO: 322635 - DNA, 19 bp, Homo sapiens
  siRNA target sequence for C20orf42 (NM_017671.2,1160-1178).
ctgctcttacgatttaaat

SEQ ID NO: 322636 - DNA, 19 bp, Homo sapiens
  siRNA target sequence for C20orf42 (NM_017671.2,1162-1180).
gctcttacgatttaaatat

SEQ ID NO: 322637 - DNA, 19 bp, Homo sapiens
  siRNA target sequence for C20orf42 (NM_017671.2,1189-1207).
cttcgacttgaatcctaaa

SEQ ID NO: 322638 - DNA, 19 bp, Homo sapiens
  siRNA target sequence for C20orf42 (NM_017671.2,1192-1210).
cgacttgaatcctaaatat

SEQ ID NO: 322639 - DNA, 19 bp, Homo sapiens
  siRNA target sequence for C20orf42 (NM_017671.2,1246-1264).
caggtgggccattctctta

SEQ ID NO: 322640 - DNA, 19 bp, Homo sapiens
  siRNA target sequence for C20orf42 (NM_017671.2,1248-1266).
ggtgggccattctcttaga

SEQ ID NO: 322641 - DNA, 19 bp, Homo sapiens
  siRNA target sequence for C20orf42 (NM_017671.2,1249-1267).
gtgggccattctcttagaa

SEQ ID NO: 322642 - DNA, 19 bp, Homo sapiens
  siRNA target sequence for C20orf42 (NM_017671.2,1310-1328).
ctacagtaccacattagca

SEQ ID NO: 322643 - DNA, 19 bp, Homo sapiens
  siRNA target sequence for C20orf42 (NM_017671.2,1333-1351).
gtcgttgtctgctgaaaca

SEQ ID NO: 322644 - DNA, 19 bp, Homo sapiens
  siRNA target sequence for C20orf42 (NM_017671.2,1335-1353).
cgttgtctgctgaaacaca

SEQ ID NO: 322645 - DNA, 19 bp, Homo sapiens
  siRNA target sequence for C20orf42 (NM_017671.2,1365-1383).
gcgagtccgaggttgatga

SEQ ID NO: 322646 - DNA, 19 bp, Homo sapiens
  siRNA target sequence for C20orf42 (NM_017671.2,1366-1384).
cgagtccgaggttgatgaa

SEQ ID NO: 322647 - DNA, 19 bp, Homo sapiens
  siRNA target sequence for C20orf42 (NM_017671.2,1369-1387).
gtccgaggttgatgaaata

SEQ ID NO: 322648 - DNA, 19 bp, Homo sapiens
  siRNA target sequence for C20orf42 (NM_017671.2,1441-1459).
ccttttggaggacattact

SEQ ID NO: 322649 - DNA, 19 bp, Homo sapiens
  siRNA target sequence for C20orf42 (NM_017671.2,1686-1704).
ctgttgccgatggtatgaa

SEQ ID NO: 322650 - DNA, 19 bp, Homo sapiens
  siRNA target sequence for C20orf42 (NM_017671.2,1702-1720).
gaatgaaatgtatttgaga

SEQ ID NO: 322651 - DNA, 19 bp, Homo sapiens
  siRNA target sequence for C20orf42 (NM_017671.2,1717-1735).
gagatgtgaccatgagaat

SEQ ID NO: 322652 - DNA, 19 bp, Homo sapiens
  siRNA target sequence for C20orf42 (NM_017671.2,1719-1737).
gatgtgaccatgagaatca

SEQ ID NO: 322653 - DNA, 19 bp, Homo sapiens
  siRNA target sequence for C20orf42 (NM_017671.2,1769-1787).
gcatcgaagggcaaaacca

SEQ ID NO: 322654 - DNA, 19 bp, Homo sapiens
  siRNA target sequence for C20orf42 (NM_017671.2,1770-1788).
catcgaagggcaaaaccat

SEQ ID NO: 322655 - DNA, 19 bp, Homo sapiens
  siRNA target sequence for C20orf42 (NM_017671.2,1878-1896).
gtctcgaaaacatggatat

SEQ ID NO: 322656 - DNA, 19 bp, Homo sapiens
  siRNA target sequence for C20orf42 (NM_017671.2,1880-1898).
ctcgaaaacatggatatga

SEQ ID NO: 322657 - DNA, 19 bp, Homo sapiens
  siRNA target sequence for C20orf42 (NM_017671.2,2068-2086).
ccttgtcagatttaaagga

SEQ ID NO: 322658 - DNA, 19 bp, Homo sapiens
  siRNA target sequence for C20orf42 (NM_017671.2,2069-2087).
cttgtcagatttaaaggaa

SEQ ID NO: 322659 - DNA, 19 bp, Homo sapiens
  siRNA target sequence for C20orf42 (NM_017671.2,2099-2117).
gacattctgggagtttcat

SEQ ID NO: 322660 - DNA, 19 bp, Homo sapiens
  siRNA target sequence for C20orf42 (NM_017671.2,2105-2123).
ctgggagtttcatataaca

SEQ ID NO: 322661 - DNA, 19 bp, Homo sapiens
  siRNA target sequence for C20orf42 (NM_017671.2,2115-2133).
catataacaggttgattaa

SEQ ID NO: 322662 - DNA, 19 bp, Homo sapiens
  siRNA target sequence for C20orf42 (NM_017671.2,2159-2177).
gtgacaacatggagattca

SEQ ID NO: 322663 - DNA, 19 bp, Homo sapiens
  siRNA target sequence for C20orf42 (NM_017671.2,2262-2280).
gcctgagtgcagattgcaa

SEQ ID NO: 322664 - DNA, 19 bp, Homo sapiens
  siRNA target sequence for C20orf42 (NM_017671.2,2266-2284).
gagtgcagattgcaagatt

SEQ ID NO: 322665 - DNA, 19 bp, Homo sapiens
  siRNA target sequence for C20orf42 (NM_017671.2,2268-2286).
gtgcagattgcaagattgt

SEQ ID NO: 322666 - DNA, 19 bp, Homo sapiens
  siRNA target sequence for C20orf42 (NM_017671.2,2281-2299).
gattgtgcacgagtacatt

SEQ ID NO: 322667 - DNA, 19 bp, Homo sapiens
  siRNA target sequence for C20orf42 (NM_017671.2,2325-2343).
gctccaaggaccagaatga

SEQ ID NO: 322668 - DNA, 19 bp, Homo sapiens
  siRNA target sequence for C20orf42 (NM_017671.2,2346-2364).
cactcgatgaggacttgtt

SEQ ID NO: 322669 - DNA, 19 bp, Homo sapiens
  siRNA target sequence for C20orf42 (NM_017671.2,2357-2375).
gacttgttccacaaattga

SEQ ID NO: 322670 - DNA, 19 bp, Homo sapiens
  siRNA target sequence for CDC42EP4 (NM_012121.3,419-437).
gacgaacagccctcttctt

SEQ ID NO: 322671 - DNA, 19 bp, Homo sapiens
  siRNA target sequence for CDC42EP4 (NM_012121.3,549-567).
cggccctgtttgtcaagaa

SEQ ID NO: 322672 - DNA, 19 bp, Homo sapiens
  siRNA target sequence for CDC42EP4 (NM_012121.3,550-568).
ggccctgtttgtcaagaat

SEQ ID NO: 322673 - DNA, 19 bp, Homo sapiens
  siRNA target sequence for DOCK2 (NM_004946.1,70-88).
ggcacggcgtggccatata

SEQ ID NO: 322674 - DNA, 19 bp, Homo sapiens
  siRNA target sequence for DOCK2 (NM_004946.1,72-90).
cacggcgtggccatataca

SEQ ID NO: 322675 - DNA, 19 bp, Homo sapiens
  siRNA target sequence for DOCK2 (NM_004946.1,76-94).
gcgtggccatatacaactt

SEQ ID NO: 322676 - DNA, 19 bp, Homo sapiens
  siRNA target sequence for DOCK2 (NM_004946.1,306-324).
gaagtgacaacgacacttt

SEQ ID NO: 322677 - DNA, 19 bp, Homo sapiens
  siRNA target sequence for DOCK2 (NM_004946.1,428-446).
gcttctctcaggaacctta

SEQ ID NO: 322678 - DNA, 19 bp, Homo sapiens
  siRNA target sequence for DOCK2 (NM_004946.1,480-498).
gtcacgtccaaaattgact

SEQ ID NO: 322679 - DNA, 19 bp, Homo sapiens
  siRNA target sequence for DOCK2 (NM_004946.1,482-500).
cacgtccaaaattgactat

SEQ ID NO: 322680 - DNA, 19 bp, Homo sapiens
  siRNA target sequence for DOCK2 (NM_004946.1,512-530).
ccttgagcttgatttgatt

SEQ ID NO: 322681 - DNA, 19 bp, Homo sapiens
  siRNA target sequence for DOCK2 (NM_004946.1,597-615).
catgaggaagcaactgata

SEQ ID NO: 322682 - DNA, 19 bp, Homo sapiens
  siRNA target sequence for DOCK2 (NM_004946.1,620-638).
cacagagcgtatcaaagaa

SEQ ID NO: 322683 - DNA, 19 bp, Homo sapiens
  siRNA target sequence for DOCK2 (NM_004946.1,646-664).
caaaagaccagccagatta

SEQ ID NO: 322684 - DNA, 19 bp, Homo sapiens
  siRNA target sequence for DOCK2 (NM_004946.1,651-669).
gaccagccagattatgcaa

SEQ ID NO: 322685 - DNA, 19 bp, Homo sapiens
  siRNA target sequence for DOCK2 (NM_004946.1,694-712).
ccacccatagcctctatgt

SEQ ID NO: 322686 - DNA, 19 bp, Homo sapiens
  siRNA target sequence for DOCK2 (NM_004946.1,697-715).
cccatagcctctatgtgtt

SEQ ID NO: 322687 - DNA, 19 bp, Homo sapiens
  siRNA target sequence for DOCK2 (NM_004946.1,782-800).
caagcaaacggtcataagt

SEQ ID NO: 322688 - DNA, 19 bp, Homo sapiens
  siRNA target sequence for DOCK2 (NM_004946.1,790-808).
cggtcataagtgagaacta

SEQ ID NO: 322689 - DNA, 19 bp, Homo sapiens
  siRNA target sequence for DOCK2 (NM_004946.1,946-964).
gcaagatggatcttaagga

SEQ ID NO: 322690 - DNA, 19 bp, Homo sapiens
  siRNA target sequence for DOCK2 (NM_004946.1,947-965).
caagatggatcttaaggat

SEQ ID NO: 322691 - DNA, 19 bp, Homo sapiens
  siRNA target sequence for DOCK2 (NM_004946.1,1003-1021).
cctttggggtggcagttat

SEQ ID NO: 322692 - DNA, 19 bp, Homo sapiens
  siRNA target sequence for DOCK2 (NM_004946.1,1091-1109).
cccggttacagctgagaat

SEQ ID NO: 322693 - DNA, 19 bp, Homo sapiens
  siRNA target sequence for DOCK2 (NM_004946.1,1307-1325).
gaacgacatctacattact

SEQ ID NO: 322694 - DNA, 19 bp, Homo sapiens
  siRNA target sequence for DOCK2 (NM_004946.1,1313-1331).
catctacattactctctta

SEQ ID NO: 322695 - DNA, 19 bp, Homo sapiens
  siRNA target sequence for DOCK2 (NM_004946.1,1316-1334).
ctacattactctcttacaa

SEQ ID NO: 322696 - DNA, 19 bp, Homo sapiens
  siRNA target sequence for DOCK2 (NM_004946.1,1409-1427).
caaaacgctgcctaatgca

SEQ ID NO: 322697 - DNA, 19 bp, Homo sapiens
  siRNA target sequence for DOCK2 (NM_004946.1,1468-1486).
gctccgttgtgtactatca

SEQ ID NO: 322698 - DNA, 19 bp, Homo sapiens
  siRNA target sequence for DOCK2 (NM_004946.1,1498-1516).
cacgctggatggaaacagt

SEQ ID NO: 322699 - DNA, 19 bp, Homo sapiens
  siRNA target sequence for DOCK2 (NM_004946.1,1525-1543).
ctgtccctattgaagacat

SEQ ID NO: 322700 - DNA, 19 bp, Homo sapiens
  siRNA target sequence for DOCK2 (NM_004946.1,1553-1571).
ccatctgcgattcatgttt

SEQ ID NO: 322701 - DNA, 19 bp, Homo sapiens
  siRNA target sequence for DOCK2 (NM_004946.1,1578-1596).
cggtcatctctggaatcta

SEQ ID NO: 322702 - DNA, 19 bp, Homo sapiens
  siRNA target sequence for DOCK2 (NM_004946.1,1582-1600).
catctctggaatctaaaga

SEQ ID NO: 322703 - DNA, 19 bp, Homo sapiens
  siRNA target sequence for DOCK2 (NM_004946.1,1667-1685).
cgatggattccatgactta

SEQ ID NO: 322704 - DNA, 19 bp, Homo sapiens
  siRNA target sequence for DOCK2 (NM_004946.1,1736-1754).
gacccttccttcttatcga

SEQ ID NO: 322705 - DNA, 19 bp, Homo sapiens
  siRNA target sequence for DOCK2 (NM_004946.1,2018-2036).
gatggagcattctcaaagt

SEQ ID NO: 322706 - DNA, 19 bp, Homo sapiens
  siRNA target sequence for DOCK2 (NM_004946.1,2054-2072).
cgtctttgatgccttgatt

SEQ ID NO: 322707 - DNA, 19 bp, Homo sapiens
  siRNA target sequence for DOCK2 (NM_004946.1,2087-2105).
cattgcagaccggaaattt

SEQ ID NO: 322708 - DNA, 19 bp, Homo sapiens
  siRNA target sequence for DOCK2 (NM_004946.1,2119-2137).
ccgttctggaggcttacat

SEQ ID NO: 322709 - DNA, 19 bp, Homo sapiens
  siRNA target sequence for DOCK2 (NM_004946.1,2155-2173).
cgaccttggcttacaagaa

SEQ ID NO: 322710 - DNA, 19 bp, Homo sapiens
  siRNA target sequence for DOCK2 (NM_004946.1,2156-2174).
gaccttggcttacaagaaa

SEQ ID NO: 322711 - DNA, 19 bp, Homo sapiens
  siRNA target sequence for DOCK2 (NM_004946.1,2182-2200).
cagtgctgaagacttactt

SEQ ID NO: 322712 - DNA, 19 bp, Homo sapiens
  siRNA target sequence for DOCK2 (NM_004946.1,2222-2240).
gcaatgtgagccaatccta

SEQ ID NO: 322713 - DNA, 19 bp, Homo sapiens
  siRNA target sequence for DOCK2 (NM_004946.1,2223-2241).
caatgtgagccaatcctaa

SEQ ID NO: 322714 - DNA, 19 bp, Homo sapiens
  siRNA target sequence for DOCK2 (NM_004946.1,2280-2298).
gttcggtcgaggacattat

SEQ ID NO: 322715 - DNA, 19 bp, Homo sapiens
  siRNA target sequence for DOCK2 (NM_004946.1,2283-2301).
cggtcgaggacattatttt

SEQ ID NO: 322716 - DNA, 19 bp, Homo sapiens
  siRNA target sequence for DOCK2 (NM_004946.1,2285-2303).
gtcgaggacattattttca

SEQ ID NO: 322717 - DNA, 19 bp, Homo sapiens
  siRNA target sequence for DOCK2 (NM_004946.1,2357-2375).
ctttgaatccatcaacaat

SEQ ID NO: 322718 - DNA, 19 bp, Homo sapiens
  siRNA target sequence for DOCK2 (NM_004946.1,2365-2383).
ccatcaacaatctgatgaa

SEQ ID NO: 322719 - DNA, 19 bp, Homo sapiens
  siRNA target sequence for DOCK2 (NM_004946.1,2366-2384).
catcaacaatctgatgaaa

SEQ ID NO: 322720 - DNA, 19 bp, Homo sapiens
  siRNA target sequence for DOCK2 (NM_004946.1,2372-2390).
caatctgatgaaaagtcaa

SEQ ID NO: 322721 - DNA, 19 bp, Homo sapiens
  siRNA target sequence for DOCK2 (NM_004946.1,2411-2429).
gcaggtggcggctttgaaa

SEQ ID NO: 322722 - DNA, 19 bp, Homo sapiens
  siRNA target sequence for DOCK2 (NM_004946.1,2412-2430).
caggtggcggctttgaaat

SEQ ID NO: 322723 - DNA, 19 bp, Homo sapiens
  siRNA target sequence for DOCK2 (NM_004946.1,2415-2433).
gtggcggctttgaaataca

SEQ ID NO: 322724 - DNA, 19 bp, Homo sapiens
  siRNA target sequence for DOCK2 (NM_004946.1,2462-2480).
ggtctttgatgcgaagtta

SEQ ID NO: 322725 - DNA, 19 bp, Homo sapiens
  siRNA target sequence for DOCK2 (NM_004946.1,2544-2562).
gtacagtctatgaatgaga

SEQ ID NO: 322726 - DNA, 19 bp, Homo sapiens
  siRNA target sequence for DOCK2 (NM_004946.1,2565-2583).
gtccagagcaacctcttta

SEQ ID NO: 322727 - DNA, 19 bp, Homo sapiens
  siRNA target sequence for DOCK2 (NM_004946.1,2567-2585).
ccagagcaacctctttaaa

SEQ ID NO: 322728 - DNA, 19 bp, Homo sapiens
  siRNA target sequence for DOCK2 (NM_004946.1,2839-2857).
gtcactttgtggcatgtat

SEQ ID NO: 322729 - DNA, 19 bp, Homo sapiens
  siRNA target sequence for DOCK2 (NM_004946.1,2854-2872).
gtatgacagccatcttaaa

SEQ ID NO: 322730 - DNA, 19 bp, Homo sapiens
  siRNA target sequence for DOCK2 (NM_004946.1,2886-2904).
cagcactactccttctaca

SEQ ID NO: 322731 - DNA, 19 bp, Homo sapiens
  siRNA target sequence for DOCK2 (NM_004946.1,3010-3028).
ccatgagcatggttcaaaa

SEQ ID NO: 322732 - DNA, 19 bp, Homo sapiens
  siRNA target sequence for DOCK2 (NM_004946.1,3039-3057).
ctgagagctatcaacaagt

SEQ ID NO: 322733 - DNA, 19 bp, Homo sapiens
  siRNA target sequence for DOCK2 (NM_004946.1,3041-3059).
gagagctatcaacaagttt

SEQ ID NO: 322734 - DNA, 19 bp, Homo sapiens
  siRNA target sequence for DOCK2 (NM_004946.1,3083-3101).
cctagaacacacgaacttt

SEQ ID NO: 322735 - DNA, 19 bp, Homo sapiens
  siRNA target sequence for DOCK2 (NM_004946.1,3087-3105).
gaacacacgaactttgagt

SEQ ID NO: 322736 - DNA, 19 bp, Homo sapiens
  siRNA target sequence for DOCK2 (NM_004946.1,3181-3199).
cacacgccaaatacaacaa

SEQ ID NO: 322737 - DNA, 19 bp, Homo sapiens
  siRNA target sequence for DOCK2 (NM_004946.1,3183-3201).
cacgccaaatacaacaaaa

SEQ ID NO: 322738 - DNA, 19 bp, Homo sapiens
  siRNA target sequence for DOCK2 (NM_004946.1,3187-3205).
ccaaatacaacaaaatcct

SEQ ID NO: 322739 - DNA, 19 bp, Homo sapiens
  siRNA target sequence for DOCK2 (NM_004946.1,3218-3236).
ggacatgagacggctaatt

SEQ ID NO: 322740 - DNA, 19 bp, Homo sapiens
  siRNA target sequence for DOCK2 (NM_004946.1,3263-3281).
caagcttggtcagaacaaa

SEQ ID NO: 322741 - DNA, 19 bp, Homo sapiens
  siRNA target sequence for DOCK2 (NM_004946.1,3297-3315).
ggcatggtaggacctatat

SEQ ID NO: 322742 - DNA, 19 bp, Homo sapiens
  siRNA target sequence for DOCK2 (NM_004946.1,3303-3321).
gtaggacctatattagaga

SEQ ID NO: 322743 - DNA, 19 bp, Homo sapiens
  siRNA target sequence for DOCK2 (NM_004946.1,3364-3382).
caatcttcttcgacatgat

SEQ ID NO: 322744 - DNA, 19 bp, Homo sapiens
  siRNA target sequence for DOCK2 (NM_004946.1,3380-3398).
gatgctgtgtgaatatcaa

SEQ ID NO: 322745 - DNA, 19 bp, Homo sapiens
  siRNA target sequence for DOCK2 (NM_004946.1,3469-3487).
gaggcgacgagcagtacat

SEQ ID NO: 322746 - DNA, 19 bp, Homo sapiens
  siRNA target sequence for DOCK2 (NM_004946.1,3498-3516).
gagtcaatcctgatggaat

SEQ ID NO: 322747 - DNA, 19 bp, Homo sapiens
  siRNA target sequence for DOCK2 (NM_004946.1,3734-3752).
ggactgtgacaattacaca

SEQ ID NO: 322748 - DNA, 19 bp, Homo sapiens
  siRNA target sequence for DOCK2 (NM_004946.1,3875-3893).
gctctacgagaccatcata

SEQ ID NO: 322749 - DNA, 19 bp, Homo sapiens
  siRNA target sequence for DOCK2 (NM_004946.1,3884-3902).
gaccatcataggctacttt

SEQ ID NO: 322750 - DNA, 19 bp, Homo sapiens
  siRNA target sequence for DOCK2 (NM_004946.1,3886-3904).
ccatcataggctactttga

SEQ ID NO: 322751 - DNA, 19 bp, Homo sapiens
  siRNA target sequence for DOCK2 (NM_004946.1,3895-3913).
gctactttgacaaaggaaa

SEQ ID NO: 322752 - DNA, 19 bp, Homo sapiens
  siRNA target sequence for DOCK2 (NM_004946.1,4048-4066).
ggcccaaaccagactactt

SEQ ID NO: 322753 - DNA, 19 bp, Homo sapiens
  siRNA target sequence for DOCK2 (NM_004946.1,4049-4067).
gcccaaaccagactacttt

SEQ ID NO: 322754 - DNA, 19 bp, Homo sapiens
  siRNA target sequence for DOCK2 (NM_004946.1,4108-4126).
ggaacaaagtgttcatcta

SEQ ID NO: 322755 - DNA, 19 bp, Homo sapiens
  siRNA target sequence for DOCK2 (NM_004946.1,4240-4258).
ccccaggccagtatatcca

SEQ ID NO: 322756 - DNA, 19 bp, Homo sapiens
  siRNA target sequence for DOCK2 (NM_004946.1,4314-4332).
gtgcctgaccagattataa

SEQ ID NO: 322757 - DNA, 19 bp, Homo sapiens
  siRNA target sequence for DOCK2 (NM_004946.1,4317-4335).
cctgaccagattataaact

SEQ ID NO: 322758 - DNA, 19 bp, Homo sapiens
  siRNA target sequence for DOCK2 (NM_004946.1,4345-4363).
ccaactacgtgcaaaggtt

SEQ ID NO: 322759 - DNA, 19 bp, Homo sapiens
  siRNA target sequence for DOCK2 (NM_004946.1,4391-4409).
gaccgtagacccagagaat

SEQ ID NO: 322760 - DNA, 19 bp, Homo sapiens
  siRNA target sequence for DOCK2 (NM_004946.1,4393-4411).
ccgtagacccagagaatga

SEQ ID NO: 322761 - DNA, 19 bp, Homo sapiens
  siRNA target sequence for DOCK2 (NM_004946.1,4416-4434).
gcttccatgtggattgaga

SEQ ID NO: 322762 - DNA, 19 bp, Homo sapiens
  siRNA target sequence for DOCK2 (NM_004946.1,4441-4459).
ccttcgtgactgcatacaa

SEQ ID NO: 322763 - DNA, 19 bp, Homo sapiens
  siRNA target sequence for DOCK2 (NM_004946.1,4496-4514).
catgtcgcagaccacaatt

SEQ ID NO: 322764 - DNA, 19 bp, Homo sapiens
  siRNA target sequence for DOCK2 (NM_004946.1,4499-4517).
gtcgcagaccacaattagt

SEQ ID NO: 322765 - DNA, 19 bp, Homo sapiens
  siRNA target sequence for DOCK2 (NM_004946.1,4546-4564).
ccacggccaatgagaagat

SEQ ID NO: 322766 - DNA, 19 bp, Homo sapiens
  siRNA target sequence for DOCK2 (NM_004946.1,4658-4676).
gggaggcttcgccaagtat

SEQ ID NO: 322767 - DNA, 19 bp, Homo sapiens
  siRNA target sequence for DOCK2 (NM_004946.1,4786-4804).
ggattaagatccatgagaa

SEQ ID NO: 322768 - DNA, 19 bp, Homo sapiens
  siRNA target sequence for DOCK2 (NM_004946.1,4897-4915).
gagagatgcctgactttga

SEQ ID NO: 322769 - DNA, 19 bp, Homo sapiens
  siRNA target sequence for DOCK2 (NM_004946.1,5147-5165).
gagaagcagcgtagttttt

SEQ ID NO: 322770 - DNA, 19 bp, Homo sapiens
  siRNA target sequence for DOCK2 (NM_004946.1,5272-5290).
cgtctgtcctctctcaaat

SEQ ID NO: 322771 - DNA, 19 bp, Homo sapiens
  siRNA target sequence for DOCK2 (NM_004946.1,5434-5452).
cacggaagaaggtcaatca

SEQ ID NO: 322772 - DNA, 19 bp, Homo sapiens
  siRNA target sequence for DOCK2 (NM_004946.1,5437-5455).
ggaagaaggtcaatcagtt

SEQ ID NO: 322773 - DNA, 19 bp, Homo sapiens
  siRNA target sequence for DOCK2 (NM_004946.1,5474-5492).
cagcaaatcggctgaagaa

SEQ ID NO: 322774 - DNA, 19 bp, Homo sapiens
  siRNA target sequence for EMS1 (NM_005231.2,239-257).
gggagaccgaccctgattt

SEQ ID NO: 322775 - DNA, 19 bp, Homo sapiens
  siRNA target sequence for EMS1 (NM_005231.2,240-258).
ggagaccgaccctgatttt

SEQ ID NO: 322776 - DNA, 19 bp, Homo sapiens
  siRNA target sequence for EMS1 (NM_005231.2,246-264).
cgaccctgattttgtgaat

SEQ ID NO: 322777 - DNA, 19 bp, Homo sapiens
  siRNA target sequence for EMS1 (NM_005231.2,319-337).
caccaggagcatatcaaca

SEQ ID NO: 322778 - DNA, 19 bp, Homo sapiens
  siRNA target sequence for EMS1 (NM_005231.2,321-339).
ccaggagcatatcaacata

SEQ ID NO: 322779 - DNA, 19 bp, Homo sapiens
  siRNA target sequence for EMS1 (NM_005231.2,384-402).
ggagaaggaacttgaaaca

SEQ ID NO: 322780 - DNA, 19 bp, Homo sapiens
  siRNA target sequence for EMS1 (NM_005231.2,444-462).
ggaacaagaccgaatggat

SEQ ID NO: 322781 - DNA, 19 bp, Homo sapiens
  siRNA target sequence for EMS1 (NM_005231.2,445-463).
gaacaagaccgaatggata

SEQ ID NO: 322782 - DNA, 19 bp, Homo sapiens
  siRNA target sequence for EMS1 (NM_005231.2,448-466).
caagaccgaatggataagt

SEQ ID NO: 322783 - DNA, 19 bp, Homo sapiens
  siRNA target sequence for EMS1 (NM_005231.2,467-485).
cagctgtcggccacgaata

SEQ ID NO: 322784 - DNA, 19 bp, Homo sapiens
  siRNA target sequence for EMS1 (NM_005231.2,470-488).
ctgtcggccacgaatatca

SEQ ID NO: 322785 - DNA, 19 bp, Homo sapiens
  siRNA target sequence for EMS1 (NM_005231.2,472-490).
gtcggccacgaatatcagt

SEQ ID NO: 322786 - DNA, 19 bp, Homo sapiens
  siRNA target sequence for EMS1 (NM_005231.2,480-498).
cgaatatcagtcgaaactt

SEQ ID NO: 322787 - DNA, 19 bp, Homo sapiens
  siRNA target sequence for EMS1 (NM_005231.2,481-499).
gaatatcagtcgaaacttt

SEQ ID NO: 322788 - DNA, 19 bp, Homo sapiens
  siRNA target sequence for EMS1 (NM_005231.2,581-599).
ctgtaggctttgaatacca

SEQ ID NO: 322789 - DNA, 19 bp, Homo sapiens
  siRNA target sequence for EMS1 (NM_005231.2,800-818).
gcgccgttggctttgagta

SEQ ID NO: 322790 - DNA, 19 bp, Homo sapiens
  siRNA target sequence for EMS1 (NM_005231.2,801-819).
cgccgttggctttgagtat

SEQ ID NO: 322791 - DNA, 19 bp, Homo sapiens
  siRNA target sequence for EMS1 (NM_005231.2,803-821).
ccgttggctttgagtatca

SEQ ID NO: 322792 - DNA, 19 bp, Homo sapiens
  siRNA target sequence for EMS1 (NM_005231.2,804-822).
cgttggctttgagtatcaa

SEQ ID NO: 322793 - DNA, 19 bp, Homo sapiens
  siRNA target sequence for EMS1 (NM_005231.2,1020-1038).
cgctgctgtggggtttgat

SEQ ID NO: 322794 - DNA, 19 bp, Homo sapiens
  siRNA target sequence for EMS1 (NM_005231.2,1421-1439).
cctcgagccccgtctatga

SEQ ID NO: 322795 - DNA, 19 bp, Homo sapiens
  siRNA target sequence for EMS1 (NM_005231.2,1694-1712).
gcgatgatgagatctcatt

SEQ ID NO: 322796 - DNA, 19 bp, Homo sapiens
  siRNA target sequence for EMS1 (NM_005231.2,1695-1713).
cgatgatgagatctcattt

SEQ ID NO: 322797 - DNA, 19 bp, Homo sapiens
  siRNA target sequence for EMS1 (NM_005231.2,1733-1751).
ccaacatcgagatgattga

SEQ ID NO: 322798 - DNA, 19 bp, Homo sapiens
  siRNA target sequence for FARP2 (NM_014808.1,126-144).
gatagaaggaacatacaga

SEQ ID NO: 322799 - DNA, 19 bp, Homo sapiens
  siRNA target sequence for FARP2 (NM_014808.1,244-262).
cacctgcacctcagagtaa

SEQ ID NO: 322800 - DNA, 19 bp, Homo sapiens
  siRNA target sequence for FARP2 (NM_014808.1,270-288).
ggacaacaccatggaaata

SEQ ID NO: 322801 - DNA, 19 bp, Homo sapiens
  siRNA target sequence for FARP2 (NM_014808.1,271-289).
gacaacaccatggaaatat

SEQ ID NO: 322802 - DNA, 19 bp, Homo sapiens
  siRNA target sequence for FARP2 (NM_014808.1,308-326).
gcgatggccaggtattact

SEQ ID NO: 322803 - DNA, 19 bp, Homo sapiens
  siRNA target sequence for FARP2 (NM_014808.1,310-328).
gatggccaggtattactga

SEQ ID NO: 322804 - DNA, 19 bp, Homo sapiens
  siRNA target sequence for FARP2 (NM_014808.1,331-349).
caagtgtggaagcgtttaa

SEQ ID NO: 322805 - DNA, 19 bp, Homo sapiens
  siRNA target sequence for FARP2 (NM_014808.1,369-387).
cttcgggatggagtttcaa

SEQ ID NO: 322806 - DNA, 19 bp, Homo sapiens
  siRNA target sequence for FARP2 (NM_014808.1,372-390).
cgggatggagtttcaaaat

SEQ ID NO: 322807 - DNA, 19 bp, Homo sapiens
  siRNA target sequence for FARP2 (NM_014808.1,404-422).
ggatttggcttgaacctat

SEQ ID NO: 322808 - DNA, 19 bp, Homo sapiens
  siRNA target sequence for FARP2 (NM_014808.1,418-436).
cctatgaaacccatcatta

SEQ ID NO: 322809 - DNA, 19 bp, Homo sapiens
  siRNA target sequence for FARP2 (NM_014808.1,465-483).
gcttcgcctagctgtaaaa

SEQ ID NO: 322810 - DNA, 19 bp, Homo sapiens
  siRNA target sequence for FARP2 (NM_014808.1,466-484).
cttcgcctagctgtaaaat

SEQ ID NO: 322811 - DNA, 19 bp, Homo sapiens
  siRNA target sequence for FARP2 (NM_014808.1,469-487).
cgcctagctgtaaaatttt

SEQ ID NO: 322812 - DNA, 19 bp, Homo sapiens
  siRNA target sequence for FARP2 (NM_014808.1,517-535).
gaatatacaagatacttgt

SEQ ID NO: 322813 - DNA, 19 bp, Homo sapiens
  siRNA target sequence for FARP2 (NM_014808.1,627-645).
ggaaataggagattacgat

SEQ ID NO: 322814 - DNA, 19 bp, Homo sapiens
  siRNA target sequence for FARP2 (NM_014808.1,699-717).
gcactgccttgagaagata

SEQ ID NO: 322815 - DNA, 19 bp, Homo sapiens
  siRNA target sequence for FARP2 (NM_014808.1,752-770).
ctgctgagtcggatttcca

SEQ ID NO: 322816 - DNA, 19 bp, Homo sapiens
  siRNA target sequence for FARP2 (NM_014808.1,768-786).
ccaggtgctcgaaattgct

SEQ ID NO: 322817 - DNA, 19 bp, Homo sapiens
  siRNA target sequence for FARP2 (NM_014808.1,784-802).
gctcgaaagttggaaatgt

SEQ ID NO: 322818 - DNA, 19 bp, Homo sapiens
  siRNA target sequence for FARP2 (NM_014808.1,796-814).
gaaatgtacggcatcagat

SEQ ID NO: 322819 - DNA, 19 bp, Homo sapiens
  siRNA target sequence for FARP2 (NM_014808.1,886-904).
cagggcaccaccaaaatca

SEQ ID NO: 322820 - DNA, 19 bp, Homo sapiens
  siRNA target sequence for FARP2 (NM_014808.1,917-935).
ggtccaaggtccgtaaact

SEQ ID NO: 322821 - DNA, 19 bp, Homo sapiens
  siRNA target sequence for FARP2 (NM_014808.1,918-936).
gtccaaggtccgtaaacta

SEQ ID NO: 322822 - DNA, 19 bp, Homo sapiens
  siRNA target sequence for FARP2 (NM_014808.1,953-971).
gatttcttatcaaacttca

SEQ ID NO: 322823 - DNA, 19 bp, Homo sapiens
  siRNA target sequence for FARP2 (NM_014808.1,993-1011).
ccaggacacattagaattt

SEQ ID NO: 322824 - DNA, 19 bp, Homo sapiens
  siRNA target sequence for FARP2 (NM_014808.1,997-1015).
gacacattagaatttttgt

SEQ ID NO: 322825 - DNA, 19 bp, Homo sapiens
  siRNA target sequence for FARP2 (NM_014808.1,1017-1035).
gggtagtagagatgaatgt

SEQ ID NO: 322826 - DNA, 19 bp, Homo sapiens
  siRNA target sequence for FARP2 (NM_014808.1,1022-1040).
gtagagatgaatgtaagaa

SEQ ID NO: 322827 - DNA, 19 bp, Homo sapiens
  siRNA target sequence for FARP2 (NM_014808.1,1131-1149).
ctcctccttcagatacagt

SEQ ID NO: 322828 - DNA, 19 bp, Homo sapiens
  siRNA target sequence for FARP2 (NM_014808.1,1154-1172).
gaactcagaaacaactagt

SEQ ID NO: 322829 - DNA, 19 bp, Homo sapiens
  siRNA target sequence for FARP2 (NM_014808.1,1254-1272).
gactgcagacctaccaaaa

SEQ ID NO: 322830 - DNA, 19 bp, Homo sapiens
  siRNA target sequence for FARP2 (NM_014808.1,1267-1285).
ccaaaacagagcatctcat

SEQ ID NO: 322831 - DNA, 19 bp, Homo sapiens
  siRNA target sequence for FARP2 (NM_014808.1,1319-1337).
cttcagcgaatgcctttta

SEQ ID NO: 322832 - DNA, 19 bp, Homo sapiens
  siRNA target sequence for FARP2 (NM_014808.1,1714-1732).
gcagacgaggcctacttca

SEQ ID NO: 322833 - DNA, 19 bp, Homo sapiens
  siRNA target sequence for FARP2 (NM_014808.1,1720-1738).
gaggcctacttcatagtca

SEQ ID NO: 322834 - DNA, 19 bp, Homo sapiens
  siRNA target sequence for FARP2 (NM_014808.1,1759-1777).
cgaacatacctcaaggatt

SEQ ID NO: 322835 - DNA, 19 bp, Homo sapiens
  siRNA target sequence for FARP2 (NM_014808.1,1991-2009).
ggaacatgcgccagttaaa

SEQ ID NO: 322836 - DNA, 19 bp, Homo sapiens
  siRNA target sequence for FARP2 (NM_014808.1,1999-2017).
cgccagttaaaggagttta

SEQ ID NO: 322837 - DNA, 19 bp, Homo sapiens
  siRNA target sequence for FARP2 (NM_014808.1,2002-2020).
cagttaaaggagtttacca

SEQ ID NO: 322838 - DNA, 19 bp, Homo sapiens
  siRNA target sequence for FARP2 (NM_014808.1,2065-2083).
gctaccaaacgctgtaaga

SEQ ID NO: 322839 - DNA, 19 bp, Homo sapiens
  siRNA target sequence for FARP2 (NM_014808.1,2069-2087).
ccaaacgctgtaagaagtt

SEQ ID NO: 322840 - DNA, 19 bp, Homo sapiens
  siRNA target sequence for FARP2 (NM_014808.1,2197-2215).
cgcctatgcggacattaca

SEQ ID NO: 322841 - DNA, 19 bp, Homo sapiens
  siRNA target sequence for FARP2 (NM_014808.1,2282-2300).
cactacagcacattctcat

SEQ ID NO: 322842 - DNA, 19 bp, Homo sapiens
  siRNA target sequence for FARP2 (NM_014808.1,2390-2408).
gtgagggctgccttcacaa

SEQ ID NO: 322843 - DNA, 19 bp, Homo sapiens
  siRNA target sequence for FARP2 (NM_014808.1,2425-2443).
ctgcagcagaggatgtttt

SEQ ID NO: 322844 - DNA, 19 bp, Homo sapiens
  siRNA target sequence for FARP2 (NM_014808.1,2561-2579).
ggtctgttccacactgttt

SEQ ID NO: 322845 - DNA, 19 bp, Homo sapiens
  siRNA target sequence for FARP2 (NM_014808.1,2583-2601).
catctacgcggctcagaaa

SEQ ID NO: 322846 - DNA, 19 bp, Homo sapiens
  siRNA target sequence for FARP2 (NM_014808.1,2744-2762).
cccccaacgaggtatctct

SEQ ID NO: 322847 - DNA, 19 bp, Homo sapiens
  siRNA target sequence for FARP2 (NM_014808.1,2915-2933).
caggatatctgctaagaaa

SEQ ID NO: 322848 - DNA, 19 bp, Homo sapiens
  siRNA target sequence for FARP2 (NM_014808.1,2917-2935).
ggatatctgctaagaaagt

SEQ ID NO: 322849 - DNA, 19 bp, Homo sapiens
  siRNA target sequence for FARP2 (NM_014808.1,2918-2936).
gatatctgctaagaaagtt

SEQ ID NO: 322850 - DNA, 19 bp, Homo sapiens
  siRNA target sequence for FARP2 (NM_014808.1,2962-2980).
ctctgggtcgtctttacca

SEQ ID NO: 322851 - DNA, 19 bp, Homo sapiens
  siRNA target sequence for FARP2 (NM_014808.1,2991-3009).
gttcttctacaaaactcat

SEQ ID NO: 322852 - DNA, 19 bp, Homo sapiens
  siRNA target sequence for FARP2 (NM_014808.1,3136-3154).
cgggctgagagcaagtaca

SEQ ID NO: 322853 - DNA, 19 bp, Homo sapiens
  siRNA target sequence for FARP2 (NM_014808.1,3139-3157).
gctgagagcaagtacacat

SEQ ID NO: 322854 - DNA, 19 bp, Homo sapiens
  siRNA target sequence for FARP2 (NM_014808.1,3140-3158).
ctgagagcaagtacacatt

SEQ ID NO: 322855 - DNA, 19 bp, Homo sapiens
  siRNA target sequence for FKSG43 (NM_032033.1,912-930).
ccacaagctgcccttctat

SEQ ID NO: 322856 - DNA, 19 bp, Homo sapiens
  siRNA target sequence for FKSG44 (NM_031904.2,892-910).
gccacgagctgccgtttta

SEQ ID NO: 322857 - DNA, 19 bp, Homo sapiens
  siRNA target sequence for FKSG44 (NM_031904.2,893-911).
ccacgagctgccgttttat

SEQ ID NO: 322858 - DNA, 19 bp, Homo sapiens
  siRNA target sequence for FLJ10210 (NM_018027.2,428-446).
gccgatgtcaagtacatct

SEQ ID NO: 322859 - DNA, 19 bp, Homo sapiens
  siRNA target sequence for FLJ10210 (NM_018027.2,568-586).
gatgaaacgggacacttaa

SEQ ID NO: 322860 - DNA, 19 bp, Homo sapiens
  siRNA target sequence for FLJ10210 (NM_018027.2,571-589).
gaaacgggacacttaaact

SEQ ID NO: 322861 - DNA, 19 bp, Homo sapiens
  siRNA target sequence for FLJ10210 (NM_018027.2,595-613).
cagctagatcgaagagtat

SEQ ID NO: 322862 - DNA, 19 bp, Homo sapiens
  siRNA target sequence for FLJ10210 (NM_018027.2,608-626).
gagtattggaacatgactt

SEQ ID NO: 322863 - DNA, 19 bp, Homo sapiens
  siRNA target sequence for FLJ10210 (NM_018027.2,619-637).
catgacttccctaaaaagt

SEQ ID NO: 322864 - DNA, 19 bp, Homo sapiens
  siRNA target sequence for FLJ10210 (NM_018027.2,636-654).
gtcaggacccgtggtttta

SEQ ID NO: 322865 - DNA, 19 bp, Homo sapiens
  siRNA target sequence for FLJ10210 (NM_018027.2,640-658).
ggacccgtggttttatact

SEQ ID NO: 322866 - DNA, 19 bp, Homo sapiens
  siRNA target sequence for FLJ10210 (NM_018027.2,641-659).
gacccgtggttttatactt

SEQ ID NO: 322867 - DNA, 19 bp, Homo sapiens
  siRNA target sequence for FLJ10210 (NM_018027.2,643-661).
cccgtggttttatactttt

SEQ ID NO: 322868 - DNA, 19 bp, Homo sapiens
  siRNA target sequence for FLJ10210 (NM_018027.2,645-663).
cgtggttttatacttttgt

SEQ ID NO: 322869 - DNA, 19 bp, Homo sapiens
  siRNA target sequence for FLJ10210 (NM_018027.2,668-686).
ggttctatatagaaagcat

SEQ ID NO: 322870 - DNA, 19 bp, Homo sapiens
  siRNA target sequence for FLJ10210 (NM_018027.2,733-751).
gcgaagtcctgcatctaca

SEQ ID NO: 322871 - DNA, 19 bp, Homo sapiens
  siRNA target sequence for FLJ10210 (NM_018027.2,771-789).
cagcgaagtggtgtttgaa

SEQ ID NO: 322872 - DNA, 19 bp, Homo sapiens
  siRNA target sequence for FLJ10210 (NM_018027.2,773-791).
gcgaagtggtgtttgaatt

SEQ ID NO: 322873 - DNA, 19 bp, Homo sapiens
  siRNA target sequence for FLJ10210 (NM_018027.2,774-792).
cgaagtggtgtttgaatta

SEQ ID NO: 322874 - DNA, 19 bp, Homo sapiens
  siRNA target sequence for FLJ10210 (NM_018027.2,778-796).
gtggtgtttgaattagctt

SEQ ID NO: 322875 - DNA, 19 bp, Homo sapiens
  siRNA target sequence for FLJ10210 (NM_018027.2,926-944).
gagtcattgagcactacaa

SEQ ID NO: 322876 - DNA, 19 bp, Homo sapiens
  siRNA target sequence for FLJ10210 (NM_018027.2,967-985).
ggtcaagcaatcgtaaact

SEQ ID NO: 322877 - DNA, 19 bp, Homo sapiens
  siRNA target sequence for FLJ10210 (NM_018027.2,968-986).
gtcaagcaatcgtaaacta

SEQ ID NO: 322878 - DNA, 19 bp, Homo sapiens
  siRNA target sequence for FLJ10210 (NM_018027.2,970-988).
caagcaatcgtaaactaca

SEQ ID NO: 322879 - DNA, 19 bp, Homo sapiens
  siRNA target sequence for FLJ10210 (NM_018027.2,973-991).
gcaatcgtaaactacatga

SEQ ID NO: 322880 - DNA, 19 bp, Homo sapiens
  siRNA target sequence for FLJ10210 (NM_018027.2,1010-1028).
caacctacggggttcacta

SEQ ID NO: 322881 - DNA, 19 bp, Homo sapiens
  siRNA target sequence for FLJ10210 (NM_018027.2,1014-1032).
ctacggggttcactattat

SEQ ID NO: 322882 - DNA, 19 bp, Homo sapiens
  siRNA target sequence for FLJ10210 (NM_018027.2,1017-1035).
cggggttcactattatgca

SEQ ID NO: 322883 - DNA, 19 bp, Homo sapiens
  siRNA target sequence for FLJ10210 (NM_018027.2,1093-1111).
cagtatgactaccatgata

SEQ ID NO: 322884 - DNA, 19 bp, Homo sapiens
  siRNA target sequence for FLJ10210 (NM_018027.2,1095-1113).
gtatgactaccatgataaa

SEQ ID NO: 322885 - DNA, 19 bp, Homo sapiens
  siRNA target sequence for FLJ10210 (NM_018027.2,1119-1137).
gccaagaaagatattccaa

SEQ ID NO: 322886 - DNA, 19 bp, Homo sapiens
  siRNA target sequence for FLJ10210 (NM_018027.2,1176-1194).
gttttccgtggaagttcat

SEQ ID NO: 322887 - DNA, 19 bp, Homo sapiens
  siRNA target sequence for FLJ10210 (NM_018027.2,1264-1282).
gcatgtccggcattgatca

SEQ ID NO: 322888 - DNA, 19 bp, Homo sapiens
  siRNA target sequence for FLJ10210 (NM_018027.2,1265-1283).
catgtccggcattgatcaa

SEQ ID NO: 322889 - DNA, 19 bp, Homo sapiens
  siRNA target sequence for FLJ10210 (NM_018027.2,1307-1325).
gccaacaccagttctatct

SEQ ID NO: 322890 - DNA, 19 bp, Homo sapiens
  siRNA target sequence for FLJ10210 (NM_018027.2,1338-1356).
gagtaagtccaaaatccat

SEQ ID NO: 322891 - DNA, 19 bp, Homo sapiens
  siRNA target sequence for FLJ10210 (NM_018027.2,1629-1647).
gggcaagctgccagtagaa

SEQ ID NO: 322892 - DNA, 19 bp, Homo sapiens
  siRNA target sequence for FLJ10210 (NM_018027.2,1631-1649).
gcaagctgccagtagaata

SEQ ID NO: 322893 - DNA, 19 bp, Homo sapiens
  siRNA target sequence for FLJ10210 (NM_018027.2,1665-1683).
ggaggaaccacccattgtt

SEQ ID NO: 322894 - DNA, 19 bp, Homo sapiens
  siRNA target sequence for FLJ10210 (NM_018027.2,1681-1699).
gttcggagaagaataggaa

SEQ ID NO: 322895 - DNA, 19 bp, Homo sapiens
  siRNA target sequence for FLJ10210 (NM_018027.2,1822-1840).
gaccccaacgtcagcaaaa

SEQ ID NO: 322896 - DNA, 19 bp, Homo sapiens
  siRNA target sequence for FLJ10210 (NM_018027.2,1826-1844).
ccaacgtcagcaaaaaact

SEQ ID NO: 322897 - DNA, 19 bp, Homo sapiens
  siRNA target sequence for FLJ10210 (NM_018027.2,1856-1874).
ggaaaacctcgtatctgaa

SEQ ID NO: 322898 - DNA, 19 bp, Homo sapiens
  siRNA target sequence for FLJ10210 (NM_018027.2,1950-1968).
gagggcttcgctgatcata

SEQ ID NO: 322899 - DNA, 19 bp, Homo sapiens
  siRNA target sequence for FLJ10210 (NM_018027.2,1952-1970).
gggcttcgctgatcataga

SEQ ID NO: 322900 - DNA, 19 bp, Homo sapiens
  siRNA target sequence for FLJ10210 (NM_018027.2,2180-2198).
cacccatcaagcccaaaat

SEQ ID NO: 322901 - DNA, 19 bp, Homo sapiens
  siRNA target sequence for FLJ10210 (NM_018027.2,2182-2200).
cccatcaagcccaaaatgt

SEQ ID NO: 322902 - DNA, 19 bp, Homo sapiens
  siRNA target sequence for FLJ10210 (NM_018027.2,2199-2217).
gtggagtgagtcctcttta

SEQ ID NO: 322903 - DNA, 19 bp, Homo sapiens
  siRNA target sequence for FLJ10210 (NM_018027.2,2201-2219).
ggagtgagtcctctttaga

SEQ ID NO: 322904 - DNA, 19 bp, Homo sapiens
  siRNA target sequence for FLJ10210 (NM_018027.2,2204-2222).
gtgagtcctctttagatga

SEQ ID NO: 322905 - DNA, 19 bp, Homo sapiens
  siRNA target sequence for FLJ10210 (NM_018027.2,2630-2648).
cgagctcggagcactacta

SEQ ID NO: 322906 - DNA, 19 bp, Homo sapiens
  siRNA target sequence for FLJ10210 (NM_018027.2,3348-3366).
ctcgacaccgtcaagtgaa

SEQ ID NO: 322907 - DNA, 19 bp, Homo sapiens
  siRNA target sequence for FLJ10210 (NM_018027.2,3350-3368).
cgacaccgtcaagtgaaat

SEQ ID NO: 322908 - DNA, 19 bp, Homo sapiens
  siRNA target sequence for FLJ10210 (NM_018027.2,3469-3487).
caccaaagtactgatgaat

SEQ ID NO: 322909 - DNA, 19 bp, Homo sapiens
  siRNA target sequence for FRMD1 (NM_024919.2,332-350).
cagagacgcgcagttcttt

SEQ ID NO: 322910 - DNA, 19 bp, Homo sapiens
  siRNA target sequence for FRMD1 (NM_024919.2,360-378).
gtggtcagaaacaatgagt

SEQ ID NO: 322911 - DNA, 19 bp, Homo sapiens
  siRNA target sequence for FRMD1 (NM_024919.2,507-525).
gaaaacggaagggtcataa

SEQ ID NO: 322912 - DNA, 19 bp, Homo sapiens
  siRNA target sequence for FRMD1 (NM_024919.2,535-553).
gggcacggcacctgtacta

SEQ ID NO: 322913 - DNA, 19 bp, Homo sapiens
  siRNA target sequence for FRMD1 (NM_024919.2,537-555).
gcacggcacctgtactact

SEQ ID NO: 322914 - DNA, 19 bp, Homo sapiens
  siRNA target sequence for NICAL (NM_022765.2,340-358).
gcgcatgcccactttgaga

SEQ ID NO: 322915 - DNA, 19 bp, Homo sapiens
  siRNA target sequence for NICAL (NM_022765.2,652-670).
gaaaagcgcaccaagttct

SEQ ID NO: 322916 - DNA, 19 bp, Homo sapiens
  siRNA target sequence for NICAL (NM_022765.2,719-737).
gggcactcggtgctaagaa

SEQ ID NO: 322917 - DNA, 19 bp, Homo sapiens
  siRNA target sequence for NICAL (NM_022765.2,721-739).
gcactcggtgctaagaagt

SEQ ID NO: 322918 - DNA, 19 bp, Homo sapiens
  siRNA target sequence for NICAL (NM_022765.2,924-942).
ccagctggccaactatgaa

SEQ ID NO: 322919 - DNA, 19 bp, Homo sapiens
  siRNA target sequence for NICAL (NM_022765.2,959-977).
cggctgcaggaggtaaatt

SEQ ID NO: 322920 - DNA, 19 bp, Homo sapiens
  siRNA target sequence for NICAL (NM_022765.2,962-980).
ctgcaggaggtaaattcgt

SEQ ID NO: 322921 - DNA, 19 bp, Homo sapiens
  siRNA target sequence for NICAL (NM_022765.2,989-1007).
gcttcaaagttcgagaaat

SEQ ID NO: 322922 - DNA, 19 bp, Homo sapiens
  siRNA target sequence for NICAL (NM_022765.2,1032-1050).
cacagccaactttgtgaat

SEQ ID NO: 322923 - DNA, 19 bp, Homo sapiens
  siRNA target sequence for NICAL (NM_022765.2,1090-1108).
ggtgtagccaggatctaca

SEQ ID NO: 322924 - DNA, 19 bp, Homo sapiens
  siRNA target sequence for NICAL (NM_022765.2,1176-1194).
ggacgacacccactacttt

SEQ ID NO: 322925 - DNA, 19 bp, Homo sapiens
  siRNA target sequence for NICAL (NM_022765.2,1347-1365).
gctcgggaaactagagttt

SEQ ID NO: 322926 - DNA, 19 bp, Homo sapiens
  siRNA target sequence for NICAL (NM_022765.2,1436-1454).
ctgctcgtgtgcaagagaa

SEQ ID NO: 322927 - DNA, 19 bp, Homo sapiens
  siRNA target sequence for NICAL (NM_022765.2,1746-1764).
ggtacgagacctgtatgat

SEQ ID NO: 322928 - DNA, 19 bp, Homo sapiens
  siRNA target sequence for NICAL (NM_022765.2,1794-1812).
caacgacaagacagataca

SEQ ID NO: 322929 - DNA, 19 bp, Homo sapiens
  siRNA target sequence for NICAL (NM_022765.2,1894-1912).
gtccacgtctccgatttgt

SEQ ID NO: 322930 - DNA, 19 bp, Homo sapiens
  siRNA target sequence for NICAL (NM_022765.2,1897-1915).
cacgtctccgatttgtctt

SEQ ID NO: 322931 - DNA, 19 bp, Homo sapiens
  siRNA target sequence for NICAL (NM_022765.2,2018-2036).
ctgcttgggcactaaaggt

SEQ ID NO: 322932 - DNA, 19 bp, Homo sapiens
  siRNA target sequence for NICAL (NM_022765.2,2198-2216).
ccagtgctgtattattcct

SEQ ID NO: 322933 - DNA, 19 bp, Homo sapiens
  siRNA target sequence for NICAL (NM_022765.2,2444-2462).
gtgtcaacggccatttctt

SEQ ID NO: 322934 - DNA, 19 bp, Homo sapiens
  siRNA target sequence for NICAL (NM_022765.2,2627-2645).
caccaagtgagaatagcat

SEQ ID NO: 322935 - DNA, 19 bp, Homo sapiens
  siRNA target sequence for NICAL (NM_022765.2,2757-2775).
gttgtcctcccttaacctt

SEQ ID NO: 322936 - DNA, 19 bp, Homo sapiens
  siRNA target sequence for NICAL (NM_022765.2,3008-3026).
cctcaggcaccatgaataa

SEQ ID NO: 322937 - DNA, 19 bp, Homo sapiens
  siRNA target sequence for NICAL (NM_022765.2,3011-3029).
caggcaccatgaataacta

SEQ ID NO: 322938 - DNA, 19 bp, Homo sapiens
  siRNA target sequence for NICAL (NM_022765.2,3101-3119).
ccatccaacggcgactaaa

SEQ ID NO: 322939 - DNA, 19 bp, Homo sapiens
  siRNA target sequence for NICAL (NM_022765.2,3102-3120).
catccaacggcgactaaat

SEQ ID NO: 322940 - DNA, 19 bp, Homo sapiens
  siRNA target sequence for NICAL (NM_022765.2,3106-3124).
caacggcgactaaatgaga

SEQ ID NO: 322941 - DNA, 19 bp, Homo sapiens
  siRNA target sequence for NICAL (NM_022765.2,3110-3128).
ggcgactaaatgagattga

SEQ ID NO: 322942 - DNA, 19 bp, Homo sapiens
  siRNA target sequence for NICAL (NM_022765.2,3241-3259).
ctcgttgacaagaaaaaca

SEQ ID NO: 322943 - DNA, 19 bp, Homo sapiens
  siRNA target sequence for NICAL (NM_022765.2,3340-3358).
gagctacgaggctacatga

SEQ ID NO: 322944 - DNA, 19 bp, Homo sapiens
  siRNA target sequence for STOM (NM_004099.4,162-180).
ggaccttgcggatggattt

SEQ ID NO: 322945 - DNA, 19 bp, Homo sapiens
  siRNA target sequence for STOM (NM_004099.4,280-298).
gattgggtcgcattttaca

SEQ ID NO: 322946 - DNA, 19 bp, Homo sapiens
  siRNA target sequence for STOM (NM_004099.4,312-330).
ggacctggtttgtttttta

SEQ ID NO: 322947 - DNA, 19 bp, Homo sapiens
  siRNA target sequence for STOM (NM_004099.4,432-450).
gtggatggtgtggtctatt

SEQ ID NO: 322948 - DNA, 19 bp, Homo sapiens
  siRNA target sequence for STOM (NM_004099.4,510-528).
cgtcttttggcacaaacta

SEQ ID NO: 322949 - DNA, 19 bp, Homo sapiens
  siRNA target sequence for STOM (NM_004099.4,625-643).
ctgatgcctggggaataaa

SEQ ID NO: 322950 - DNA, 19 bp, Homo sapiens
  siRNA target sequence for STOM (NM_004099.4,650-668).
gcgtgtggaaattaaggat

SEQ ID NO: 322951 - DNA, 19 bp, Homo sapiens
  siRNA target sequence for STOM (NM_004099.4,889-907).
ctctgcccatagatatgct

SEQ ID NO: 322952 - DNA, 19 bp, Homo sapiens
  siRNA target sequence for STOM (NM_004099.4,913-931).
gaatcataggggcaaaaca

SEQ ID NO: 322953 - DNA, 19 bp, Homo sapiens
  siRNA target sequence for URP2 (NM_031471.4,262-280).
ctggtcagaccatgctatt

SEQ ID NO: 322954 - DNA, 19 bp, Homo sapiens
  siRNA target sequence for URP2 (NM_031471.4,349-367).
cgacgcacgcctcttcttt

SEQ ID NO: 322955 - DNA, 19 bp, Homo sapiens
  siRNA target sequence for URP2 (NM_031471.4,1147-1165).
ggaccatctccgaatcttt

SEQ ID NO: 322956 - DNA, 19 bp, Homo sapiens
  siRNA target sequence for URP2 (NM_031471.4,1224-1242).
ccacactgtcctactacaa

SEQ ID NO: 322957 - DNA, 19 bp, Homo sapiens
  siRNA target sequence for URP2 (NM_031471.4,1298-1316).
gaggtggttcccgatgtta

SEQ ID NO: 322958 - DNA, 19 bp, Homo sapiens
  siRNA target sequence for URP2 (NM_031471.4,1604-1622).
cgtttccagcgaaagttca

SEQ ID NO: 322959 - DNA, 19 bp, Homo sapiens
  siRNA target sequence for URP2 (NM_031471.4,1605-1623).
gtttccagcgaaagttcaa

SEQ ID NO: 322960 - DNA, 19 bp, Homo sapiens
  siRNA target sequence for URP2 (NM_031471.4,1903-1921).
ggccatcgagtttgatgaa

SEQ ID NO: 322961 - DNA, 19 bp, Homo sapiens
  siRNA target sequence for URP2 (NM_031471.4,1905-1923).
ccatcgagtttgatgaaca

SEQ ID NO: 322962 - DNA, 19 bp, Homo sapiens
  siRNA target sequence for URP2 (NM_031471.4,1950-1968).
ctgccagctgccgaattgt

SEQ ID NO: 322963 - DNA, 19 bp, Homo sapiens
  siRNA target sequence for URP2 (NM_031471.4,1961-1979).
cgaattgtacacgagtata

SEQ ID NO: 322964 - DNA, 19 bp, Homo sapiens
  siRNA target sequence for URP2 (NM_031471.4,1962-1980).
gaattgtacacgagtatat

SEQ ID NO: 322965 - DNA, 19 bp, Homo sapiens
  siRNA target sequence for C14orf2 (NM_004894.1,102-120).
gccctactacaccaaagtt

SEQ ID NO: 322966 - DNA, 19 bp, Homo sapiens
  siRNA target sequence for C14orf2 (NM_004894.1,103-121).
ccctactacaccaaagttt

SEQ ID NO: 322967 - DNA, 19 bp, Homo sapiens
  siRNA target sequence for C14orf2 (NM_004894.1,104-122).
cctactacaccaaagttta

SEQ ID NO: 322968 - DNA, 19 bp, Homo sapiens
  siRNA target sequence for C14orf2 (NM_004894.1,153-171).
gggcttcatcgtttataaa

SEQ ID NO: 322969 - DNA, 19 bp, Homo sapiens
  siRNA target sequence for C14orf2 (NM_004894.1,174-192).
ccgggctgctgataaaaga

SEQ ID NO: 322970 - DNA, 19 bp, Homo sapiens
  siRNA target sequence for HAX1 (NM_006118.2,215-233).
ccacagagatccctttttt

SEQ ID NO: 322971 - DNA, 19 bp, Homo sapiens
  siRNA target sequence for HAX1 (NM_006118.2,239-257).
gatgactcgagatgaagat

SEQ ID NO: 322972 - DNA, 19 bp, Homo sapiens
  siRNA target sequence for HAX1 (NM_006118.2,300-318).
gggaacccaaggttccata

SEQ ID NO: 322973 - DNA, 19 bp, Homo sapiens
  siRNA target sequence for HAX1 (NM_006118.2,650-668).
gaggccatttcataggttt

SEQ ID NO: 322974 - DNA, 19 bp, Homo sapiens
  siRNA target sequence for HAX1 (NM_006118.2,764-782).
gccccagcccaaatcctat

SEQ ID NO: 322975 - DNA, 19 bp, Homo sapiens
  siRNA target sequence for HAX1 (NM_006118.2,765-783).
ccccagcccaaatcctatt

SEQ ID NO: 322976 - DNA, 19 bp, Homo sapiens
  siRNA target sequence for HAX1 (NM_006118.2,766-784).
cccagcccaaatcctattt

SEQ ID NO: 322977 - DNA, 19 bp, Homo sapiens
  siRNA target sequence for HAX1 (NM_006118.2,768-786).
cagcccaaatcctatttca

SEQ ID NO: 322978 - DNA, 19 bp, Homo sapiens
  siRNA target sequence for HAX1 (NM_006118.2,863-881).
ccggacagagactacagta

SEQ ID NO: 322979 - DNA, 19 bp, Homo sapiens
  siRNA target sequence for HAX1 (NM_006118.2,864-882).
cggacagagactacagtaa

SEQ ID NO: 322980 - DNA, 19 bp, Homo sapiens
  siRNA target sequence for TOMM70A (NM_014820.1,412-430).
catgaactctcttgataga

SEQ ID NO: 322981 - DNA, 19 bp, Homo sapiens
  siRNA target sequence for TOMM70A (NM_014820.1,431-449).
gcccaagcagccaagaata

SEQ ID NO: 322982 - DNA, 19 bp, Homo sapiens
  siRNA target sequence for TOMM70A (NM_014820.1,432-450).
cccaagcagccaagaataa

SEQ ID NO: 322983 - DNA, 19 bp, Homo sapiens
  siRNA target sequence for TOMM70A (NM_014820.1,433-451).
ccaagcagccaagaataaa

SEQ ID NO: 322984 - DNA, 19 bp, Homo sapiens
  siRNA target sequence for TOMM70A (NM_014820.1,485-503).
caagctattcagtgctata

SEQ ID NO: 322985 - DNA, 19 bp, Homo sapiens
  siRNA target sequence for TOMM70A (NM_014820.1,489-507).
ctattcagtgctatactga

SEQ ID NO: 322986 - DNA, 19 bp, Homo sapiens
  siRNA target sequence for TOMM70A (NM_014820.1,570-588).
ctgctgcctttgaacagtt

SEQ ID NO: 322987 - DNA, 19 bp, Homo sapiens
  siRNA target sequence for TOMM70A (NM_014820.1,607-625).
ggcacaagactgtacaaaa

SEQ ID NO: 322988 - DNA, 19 bp, Homo sapiens
  siRNA target sequence for TOMM70A (NM_014820.1,679-697).
ccatgagaagctagacaat

SEQ ID NO: 322989 - DNA, 19 bp, Homo sapiens
  siRNA target sequence for TOMM70A (NM_014820.1,721-739).
cactgctgtgtgtatatta

SEQ ID NO: 322990 - DNA, 19 bp, Homo sapiens
  siRNA target sequence for TOMM70A (NM_014820.1,766-784).
gctgttagccgataaagtt

SEQ ID NO: 322991 - DNA, 19 bp, Homo sapiens
  siRNA target sequence for TOMM70A (NM_014820.1,769-787).
gttagccgataaagttctt

SEQ ID NO: 322992 - DNA, 19 bp, Homo sapiens
  siRNA target sequence for TOMM70A (NM_014820.1,774-792).
ccgataaagttcttaaact

SEQ ID NO: 322993 - DNA, 19 bp, Homo sapiens
  siRNA target sequence for TOMM70A (NM_014820.1,845-863).
ccatctccacagtttatca

SEQ ID NO: 322994 - DNA, 19 bp, Homo sapiens
  siRNA target sequence for TOMM70A (NM_014820.1,879-897).
ctttcacggatgatatcat

SEQ ID NO: 322995 - DNA, 19 bp, Homo sapiens
  siRNA target sequence for TOMM70A (NM_014820.1,910-928).
gcttaaaggagagaaatct

SEQ ID NO: 322996 - DNA, 19 bp, Homo sapiens
  siRNA target sequence for TOMM70A (NM_014820.1,991-1009).
ggccaaacagtatatggaa

SEQ ID NO: 322997 - DNA, 19 bp, Homo sapiens
  siRNA target sequence for TOMM70A (NM_014820.1,1013-1031).
gaaaactacgataaaatca

SEQ ID NO: 322998 - DNA, 19 bp, Homo sapiens
  siRNA target sequence for TOMM70A (NM_014820.1,1030-1048).
cataagtgaatgctcaaaa

SEQ ID NO: 322999 - DNA, 19 bp, Homo sapiens
  siRNA target sequence for TOMM70A (NM_014820.1,1180-1198).
gaagcttcgagcaaatgct

SEQ ID NO: 323000 - DNA, 19 bp, Homo sapiens
  siRNA target sequence for TOMM70A (NM_014820.1,1243-1261).
gctgtccactcaagatttt

SEQ ID NO: 323001 - DNA, 19 bp, Homo sapiens
  siRNA target sequence for TOMM70A (NM_014820.1,1244-1262).
ctgtccactcaagatttta

SEQ ID NO: 323002 - DNA, 19 bp, Homo sapiens
  siRNA target sequence for TOMM70A (NM_014820.1,1248-1266).
ccactcaagattttaacat

SEQ ID NO: 323003 - DNA, 19 bp, Homo sapiens
  siRNA target sequence for TOMM70A (NM_014820.1,1311-1329).
gaggacagctgaaaatact

SEQ ID NO: 323004 - DNA, 19 bp, Homo sapiens
  siRNA target sequence for TOMM70A (NM_014820.1,1354-1372).
ggcagattttgatgaatgt

SEQ ID NO: 323005 - DNA, 19 bp, Homo sapiens
  siRNA target sequence for TOMM70A (NM_014820.1,1446-1464).
gaaacaactcttcacaaat

SEQ ID NO: 323006 - DNA, 19 bp, Homo sapiens
  siRNA target sequence for TOMM70A (NM_014820.1,1481-1499).
ggttttgaagaggtcataa

SEQ ID NO: 323007 - DNA, 19 bp, Homo sapiens
  siRNA target sequence for TOMM70A (NM_014820.1,1532-1550).
ctatacgcccaggcattaa

SEQ ID NO: 323008 - DNA, 19 bp, Homo sapiens
  siRNA target sequence for TOMM70A (NM_014820.1,1537-1555).
cgcccaggcattaacagat

SEQ ID NO: 323009 - DNA, 19 bp, Homo sapiens
  siRNA target sequence for TOMM70A (NM_014820.1,1543-1561).
ggcattaacagatcaacaa

SEQ ID NO: 323010 - DNA, 19 bp, Homo sapiens
  siRNA target sequence for TOMM70A (NM_014820.1,1545-1563).
cattaacagatcaacaaca

SEQ ID NO: 323011 - DNA, 19 bp, Homo sapiens
  siRNA target sequence for TOMM70A (NM_014820.1,1553-1571).
gatcaacaacagtttggta

SEQ ID NO: 323012 - DNA, 19 bp, Homo sapiens
  siRNA target sequence for TOMM70A (NM_014820.1,1611-1629).
cagataatgctacaacata

SEQ ID NO: 323013 - DNA, 19 bp, Homo sapiens
  siRNA target sequence for TOMM70A (NM_014820.1,1695-1713).
gcaaggctattgaaattga

SEQ ID NO: 323014 - DNA, 19 bp, Homo sapiens
  siRNA target sequence for TOMM70A (NM_014820.1,1781-1799).
gccattgacatgttcaaca

SEQ ID NO: 323015 - DNA, 19 bp, Homo sapiens
  siRNA target sequence for TOMM70A (NM_014820.1,1787-1805).
gacatgttcaacaaagcta

SEQ ID NO: 323016 - DNA, 19 bp, Homo sapiens
  siRNA target sequence for TOMM70A (NM_014820.1,1828-1846).
ggagatggcccatctgtat

SEQ ID NO: 323017 - DNA, 19 bp, Homo sapiens
  siRNA target sequence for TOMM70A (NM_014820.1,1834-1852).
ggcccatctgtattcactt

SEQ ID NO: 323018 - DNA, 19 bp, Homo sapiens
  siRNA target sequence for TOMM70A (NM_014820.1,1835-1853).
gcccatctgtattcacttt

SEQ ID NO: 323019 - DNA, 19 bp, Homo sapiens
  siRNA target sequence for TOMM70A (NM_014820.1,1883-1901).
gcaaagaaatacggattaa

SEQ ID NO: 323020 - DNA, 19 bp, Homo sapiens
  siRNA target sequence for TOMM70A (NM_014820.1,1888-1906).
gaaatacggattaaaacca

SEQ ID NO: 323021 - DNA, 19 bp, Homo sapiens
  siRNA target sequence for MRVI1 (NM_006069.2,466-484).
cccacaagaggctttctca

SEQ ID NO: 323022 - DNA, 19 bp, Homo sapiens
  siRNA target sequence for MRVI1 (NM_006069.2,921-939).
gagattgcaatagaacaaa

SEQ ID NO: 323023 - DNA, 19 bp, Homo sapiens
  siRNA target sequence for MRVI1 (NM_006069.2,984-1002).
ggcctagctcctgttacaa

SEQ ID NO: 323024 - DNA, 19 bp, Homo sapiens
  siRNA target sequence for MRVI1 (NM_006069.2,985-1003).
gcctagctcctgttacaaa

SEQ ID NO: 323025 - DNA, 19 bp, Homo sapiens
  siRNA target sequence for MRVI1 (NM_006069.2,987-1005).
ctagctcctgttacaaaca

SEQ ID NO: 323026 - DNA, 19 bp, Homo sapiens
  siRNA target sequence for MRVI1 (NM_006069.2,1322-1340).
ggaagaaaagcgttttgca

SEQ ID NO: 323027 - DNA, 19 bp, Homo sapiens
  siRNA target sequence for MRVI1 (NM_006069.2,1369-1387).
cccctggtctcaaagactt

SEQ ID NO: 323028 - DNA, 19 bp, Homo sapiens
  siRNA target sequence for MRVI1 (NM_006069.2,1372-1390).
ctggtctcaaagactttca

SEQ ID NO: 323029 - DNA, 19 bp, Homo sapiens
  siRNA target sequence for MRVI1 (NM_006069.2,1405-1423).
ccgtgcggatgcagaaact

SEQ ID NO: 323030 - DNA, 19 bp, Homo sapiens
  siRNA target sequence for MRVI1 (NM_006069.2,1440-1458).
gagcacatcctgatgagaa

SEQ ID NO: 323031 - DNA, 19 bp, Homo sapiens
  siRNA target sequence for MRVI1 (NM_006069.2,1481-1499).
gcttccagaccttagtgaa

SEQ ID NO: 323032 - DNA, 19 bp, Homo sapiens
  siRNA target sequence for MRVI1 (NM_006069.2,1559-1577).
gtcaaagagtggcttagat

SEQ ID NO: 323033 - DNA, 19 bp, Homo sapiens
  siRNA target sequence for MRVI1 (NM_006069.2,1561-1579).
caaagagtggcttagatgt

SEQ ID NO: 323034 - DNA, 19 bp, Homo sapiens
  siRNA target sequence for MRVI1 (NM_006069.2,1575-1593).
gatgtcatgcctaatattt

SEQ ID NO: 323035 - DNA, 19 bp, Homo sapiens
  siRNA target sequence for MRVI1 (NM_006069.2,1715-1733).
ctacactctggaatctaga

SEQ ID NO: 323036 - DNA, 19 bp, Homo sapiens
  siRNA target sequence for MRVI1 (NM_006069.2,1718-1736).
cactctggaatctagaatt

SEQ ID NO: 323037 - DNA, 19 bp, Homo sapiens
  siRNA target sequence for MRVI1 (NM_006069.2,1960-1978).
cgaaagcaacggaagtgat

SEQ ID NO: 323038 - DNA, 19 bp, Homo sapiens
  siRNA target sequence for MRVI1 (NM_006069.2,1983-2001).
cagtatgtggagaatctaa

SEQ ID NO: 323039 - DNA, 19 bp, Homo sapiens
  siRNA target sequence for MRVI1 (NM_006069.2,1998-2016).
ctaaagaggacgtatgaga

SEQ ID NO: 323040 - DNA, 19 bp, Homo sapiens
  siRNA target sequence for MRVI1 (NM_006069.2,2025-2043).
gcggagctcatggagttta

SEQ ID NO: 323041 - DNA, 19 bp, Homo sapiens
  siRNA target sequence for MRVI1 (NM_006069.2,2026-2044).
cggagctcatggagtttaa

SEQ ID NO: 323042 - DNA, 19 bp, Homo sapiens
  siRNA target sequence for MRVI1 (NM_006069.2,2420-2438).
ctacagcaagggattccaa

SEQ ID NO: 323043 - DNA, 19 bp, Homo sapiens
  siRNA target sequence for MRVI1 (NM_006069.2,2557-2575).
caagaagcagcaaacttga

SEQ ID NO: 323044 - DNA, 19 bp, Homo sapiens
  siRNA target sequence for MRVI1 (NM_006069.2,2678-2696).
ggggctctacaattcctat

SEQ ID NO: 323045 - DNA, 19 bp, Homo sapiens
  siRNA target sequence for MRVI1 (NM_006069.2,2679-2697).
gggctctacaattcctata

SEQ ID NO: 323046 - DNA, 19 bp, Homo sapiens
  siRNA target sequence for MRVI1 (NM_006069.2,2680-2698).
ggctctacaattcctataa

SEQ ID NO: 323047 - DNA, 19 bp, Homo sapiens
  siRNA target sequence for MRVI1 (NM_006069.2,2684-2702).
ctacaattcctataactct

SEQ ID NO: 323048 - DNA, 19 bp, Homo sapiens
  siRNA target sequence for PSMD1 (NM_002807.2,145-163).
ccgctggaattatttctct

SEQ ID NO: 323049 - DNA, 19 bp, Homo sapiens
  siRNA target sequence for PSMD1 (NM_002807.2,146-164).
cgctggaattatttctctt

SEQ ID NO: 323050 - DNA, 19 bp, Homo sapiens
  siRNA target sequence for PSMD1 (NM_002807.2,177-195).
gaaccacagcttaaggaat

SEQ ID NO: 323051 - DNA, 19 bp, Homo sapiens
  siRNA target sequence for PSMD1 (NM_002807.2,191-209).
ggaatttgcactacacaaa

SEQ ID NO: 323052 - DNA, 19 bp, Homo sapiens
  siRNA target sequence for PSMD1 (NM_002807.2,192-210).
gaatttgcactacacaaat

SEQ ID NO: 323053 - DNA, 19 bp, Homo sapiens
  siRNA target sequence for PSMD1 (NM_002807.2,248-266).
cgagtccgtagacaaaata

SEQ ID NO: 323054 - DNA, 19 bp, Homo sapiens
  siRNA target sequence for PSMD1 (NM_002807.2,310-328).
cagccttagtggcatctaa

SEQ ID NO: 323055 - DNA, 19 bp, Homo sapiens
  siRNA target sequence for PSMD1 (NM_002807.2,314-332).
cttagtggcatctaaagta

SEQ ID NO: 323056 - DNA, 19 bp, Homo sapiens
  siRNA target sequence for PSMD1 (NM_002807.2,356-374).
ggagtctctgaattatgct

SEQ ID NO: 323057 - DNA, 19 bp, Homo sapiens
  siRNA target sequence for PSMD1 (NM_002807.2,401-419).
caatgataactctgaatat

SEQ ID NO: 323058 - DNA, 19 bp, Homo sapiens
  siRNA target sequence for PSMD1 (NM_002807.2,420-438).
gtggaaactattatagcaa

SEQ ID NO: 323059 - DNA, 19 bp, Homo sapiens
  siRNA target sequence for PSMD1 (NM_002807.2,447-465).
gatcactacaccaaacaat

SEQ ID NO: 323060 - DNA, 19 bp, Homo sapiens
  siRNA target sequence for PSMD1 (NM_002807.2,526-544).
gcatcgtaaataaaatgtt

SEQ ID NO: 323061 - DNA, 19 bp, Homo sapiens
  siRNA target sequence for PSMD1 (NM_002807.2,542-560).
gttccagcgatgtctagat

SEQ ID NO: 323062 - DNA, 19 bp, Homo sapiens
  siRNA target sequence for PSMD1 (NM_002807.2,555-573).
ctagatgatcacaagtata

SEQ ID NO: 323063 - DNA, 19 bp, Homo sapiens
  siRNA target sequence for PSMD1 (NM_002807.2,604-622).
gaagactggacgtctttga

SEQ ID NO: 323064 - DNA, 19 bp, Homo sapiens
  siRNA target sequence for PSMD1 (NM_002807.2,629-647).
catactggagtcgaatgat

SEQ ID NO: 323065 - DNA, 19 bp, Homo sapiens
  siRNA target sequence for PSMD1 (NM_002807.2,672-690).
cttaagctctgcatgtctt

SEQ ID NO: 323066 - DNA, 19 bp, Homo sapiens
  siRNA target sequence for PSMD1 (NM_002807.2,707-725).
gtttcggaataaagtacta

SEQ ID NO: 323067 - DNA, 19 bp, Homo sapiens
  siRNA target sequence for PSMD1 (NM_002807.2,732-750).
ctagttaaaatctacatga

SEQ ID NO: 323068 - DNA, 19 bp, Homo sapiens
  siRNA target sequence for PSMD1 (NM_002807.2,812-830).
ggctgtgagtgatatctta

SEQ ID NO: 323069 - DNA, 19 bp, Homo sapiens
  siRNA target sequence for PSMD1 (NM_002807.2,816-834).
gtgagtgatatcttagaga

SEQ ID NO: 323070 - DNA, 19 bp, Homo sapiens
  siRNA target sequence for PSMD1 (NM_002807.2,857-875).
cctgatggcatatcagatt

SEQ ID NO: 323071 - DNA, 19 bp, Homo sapiens
  siRNA target sequence for PSMD1 (NM_002807.2,858-876).
ctgatggcatatcagattt

SEQ ID NO: 323072 - DNA, 19 bp, Homo sapiens
  siRNA target sequence for PSMD1 (NM_002807.2,974-992).
cactaatacgggtactgtt

SEQ ID NO: 323073 - DNA, 19 bp, Homo sapiens
  siRNA target sequence for PSMD1 (NM_002807.2,993-1011).
ccgggatcagagaaagaca

SEQ ID NO: 323074 - DNA, 19 bp, Homo sapiens
  siRNA target sequence for PSMD1 (NM_002807.2,1012-1030).
gtgactcgatggaaacaga

SEQ ID NO: 323075 - DNA, 19 bp, Homo sapiens
  siRNA target sequence for PSMD1 (NM_002807.2,1122-1140).
ggtgaaatggctattgagt

SEQ ID NO: 323076 - DNA, 19 bp, Homo sapiens
  siRNA target sequence for PSMD1 (NM_002807.2,1146-1164).
ctgcagttcttaatacgaa

SEQ ID NO: 323077 - DNA, 19 bp, Homo sapiens
  siRNA target sequence for PSMD1 (NM_002807.2,1151-1169).
gttcttaatacgaaacaat

SEQ ID NO: 323078 - DNA, 19 bp, Homo sapiens
  siRNA target sequence for PSMD1 (NM_002807.2,1154-1172).
cttaatacgaaacaataat

SEQ ID NO: 323079 - DNA, 19 bp, Homo sapiens
  siRNA target sequence for PSMD1 (NM_002807.2,1179-1197).
ctcatgattctaaaaaaca

SEQ ID NO: 323080 - DNA, 19 bp, Homo sapiens
  siRNA target sequence for PSMD1 (NM_002807.2,1202-1220).
ggatgcagtacggaattct

SEQ ID NO: 323081 - DNA, 19 bp, Homo sapiens
  siRNA target sequence for PSMD1 (NM_002807.2,1206-1224).
gcagtacggaattctgtat

SEQ ID NO: 323082 - DNA, 19 bp, Homo sapiens
  siRNA target sequence for PSMD1 (NM_002807.2,1212-1230).
cggaattctgtatgtcata

SEQ ID NO: 323083 - DNA, 19 bp, Homo sapiens
  siRNA target sequence for PSMD1 (NM_002807.2,1214-1232).
gaattctgtatgtcatact

SEQ ID NO: 323084 - DNA, 19 bp, Homo sapiens
  siRNA target sequence for PSMD1 (NM_002807.2,1237-1255).
ccgttatagcaaactcttt

SEQ ID NO: 323085 - DNA, 19 bp, Homo sapiens
  siRNA target sequence for PSMD1 (NM_002807.2,1238-1256).
cgttatagcaaactctttt

SEQ ID NO: 323086 - DNA, 19 bp, Homo sapiens
  siRNA target sequence for PSMD1 (NM_002807.2,1270-1288).
caaccagtgaccagtttct

SEQ ID NO: 323087 - DNA, 19 bp, Homo sapiens
  siRNA target sequence for PSMD1 (NM_002807.2,1287-1305).
cttagagataatttggaat

SEQ ID NO: 323088 - DNA, 19 bp, Homo sapiens
  siRNA target sequence for PSMD1 (NM_002807.2,1317-1335).
gccactaactgggcaaaat

SEQ ID NO: 323089 - DNA, 19 bp, Homo sapiens
  siRNA target sequence for PSMD1 (NM_002807.2,1318-1336).
ccactaactgggcaaaatt

SEQ ID NO: 323090 - DNA, 19 bp, Homo sapiens
  siRNA target sequence for PSMD1 (NM_002807.2,1345-1363).
cagccagtttgggtgtaat

SEQ ID NO: 323091 - DNA, 19 bp, Homo sapiens
  siRNA target sequence for PSMD1 (NM_002807.2,1348-1366).
ccagtttgggtgtaattca

SEQ ID NO: 323092 - DNA, 19 bp, Homo sapiens
  siRNA target sequence for PSMD1 (NM_002807.2,1351-1369).
gtttgggtgtaattcataa

SEQ ID NO: 323093 - DNA, 19 bp, Homo sapiens
  siRNA target sequence for PSMD1 (NM_002807.2,1394-1412).
gttaatggcaacatacctt

SEQ ID NO: 323094 - DNA, 19 bp, Homo sapiens
  siRNA target sequence for PSMD1 (NM_002807.2,1409-1427).
ccttcccaaggatacttct

SEQ ID NO: 323095 - DNA, 19 bp, Homo sapiens
  siRNA target sequence for PSMD1 (NM_002807.2,1532-1550).
cgccagcaatgatatcgtt

SEQ ID NO: 323096 - DNA, 19 bp, Homo sapiens
  siRNA target sequence for PSMD1 (NM_002807.2,1533-1551).
gccagcaatgatatcgtta

SEQ ID NO: 323097 - DNA, 19 bp, Homo sapiens
  siRNA target sequence for PSMD1 (NM_002807.2,1537-1555).
gcaatgatatcgttagaca

SEQ ID NO: 323098 - DNA, 19 bp, Homo sapiens
  siRNA target sequence for PSMD1 (NM_002807.2,1589-1607).
gggaactgcacgtcaagat

SEQ ID NO: 323099 - DNA, 19 bp, Homo sapiens
  siRNA target sequence for PSMD1 (NM_002807.2,1597-1615).
cacgtcaagatgtttatga

SEQ ID NO: 323100 - DNA, 19 bp, Homo sapiens
  siRNA target sequence for PSMD1 (NM_002807.2,1599-1617).
cgtcaagatgtttatgatt

SEQ ID NO: 323101 - DNA, 19 bp, Homo sapiens
  siRNA target sequence for PSMD1 (NM_002807.2,1674-1692).
gccctaggtttggttatgt

SEQ ID NO: 323102 - DNA, 19 bp, Homo sapiens
  siRNA target sequence for PSMD1 (NM_002807.2,1675-1693).
ccctaggtttggttatgtt

SEQ ID NO: 323103 - DNA, 19 bp, Homo sapiens
  siRNA target sequence for PSMD1 (NM_002807.2,1685-1703).
ggttatgttgggctctaaa

SEQ ID NO: 323104 - DNA, 19 bp, Homo sapiens
  siRNA target sequence for PSMD1 (NM_002807.2,1686-1704).
gttatgttgggctctaaaa

SEQ ID NO: 323105 - DNA, 19 bp, Homo sapiens
  siRNA target sequence for PSMD1 (NM_002807.2,1721-1739).
ggacatggttggttatgca

SEQ ID NO: 323106 - DNA, 19 bp, Homo sapiens
  siRNA target sequence for PSMD1 (NM_002807.2,1728-1746).
gttggttatgcacaagaaa

SEQ ID NO: 323107 - DNA, 19 bp, Homo sapiens
  siRNA target sequence for PSMD1 (NM_002807.2,1773-1791).
cttgcagttggcatagctt

SEQ ID NO: 323108 - DNA, 19 bp, Homo sapiens
  siRNA target sequence for PSMD1 (NM_002807.2,1870-1888).
ggtctggaatgtatactgt

SEQ ID NO: 323109 - DNA, 19 bp, Homo sapiens
  siRNA target sequence for PSMD1 (NM_002807.2,1903-1921).
gtggctctggtaacaacaa

SEQ ID NO: 323110 - DNA, 19 bp, Homo sapiens
  siRNA target sequence for PSMD1 (NM_002807.2,1995-2013).
cttgggttcattctattca

SEQ ID NO: 323111 - DNA, 19 bp, Homo sapiens
  siRNA target sequence for PSMD1 (NM_002807.2,2029-2047).
gcccaagtgttgtctcttt

SEQ ID NO: 323112 - DNA, 19 bp, Homo sapiens
  siRNA target sequence for PSMD1 (NM_002807.2,2044-2062).
ctttgttgtcagagagtta

SEQ ID NO: 323113 - DNA, 19 bp, Homo sapiens
  siRNA target sequence for PSMD1 (NM_002807.2,2158-2176).
caaacgaccccgtgaacta

SEQ ID NO: 323114 - DNA, 19 bp, Homo sapiens
  siRNA target sequence for PSMD1 (NM_002807.2,2184-2202).
caaggggcactcatagctt

SEQ ID NO: 323115 - DNA, 19 bp, Homo sapiens
  siRNA target sequence for PSMD1 (NM_002807.2,2199-2217).
gcttcagctctcatcatga

SEQ ID NO: 323116 - DNA, 19 bp, Homo sapiens
  siRNA target sequence for PSMD1 (NM_002807.2,2258-2276).
cagacagctgtattccaaa

SEQ ID NO: 323117 - DNA, 19 bp, Homo sapiens
  siRNA target sequence for PSMD1 (NM_002807.2,2267-2285).
gtattccaaagtcatcaat

SEQ ID NO: 323118 - DNA, 19 bp, Homo sapiens
  siRNA target sequence for PSMD1 (NM_002807.2,2308-2326).
ccaagtttggcgctattct

SEQ ID NO: 323119 - DNA, 19 bp, Homo sapiens
  siRNA target sequence for PSMD1 (NM_002807.2,2352-2370).
ggtcataatgtcacaatct

SEQ ID NO: 323120 - DNA, 19 bp, Homo sapiens
  siRNA target sequence for PSMD1 (NM_002807.2,2383-2401).
ggactgggcatactcatat

SEQ ID NO: 323121 - DNA, 19 bp, Homo sapiens
  siRNA target sequence for PSMD1 (NM_002807.2,2409-2427).
gtggttggcgtccttgtat

SEQ ID NO: 323122 - DNA, 19 bp, Homo sapiens
  siRNA target sequence for PSMD1 (NM_002807.2,2499-2517).
ggccttaacaaggacttaa

SEQ ID NO: 323123 - DNA, 19 bp, Homo sapiens
  siRNA target sequence for PSMD1 (NM_002807.2,2500-2518).
gccttaacaaggacttaaa

SEQ ID NO: 323124 - DNA, 19 bp, Homo sapiens
  siRNA target sequence for PSMD1 (NM_002807.2,2519-2537).
gatgccgaaagttcagtat

SEQ ID NO: 323125 - DNA, 19 bp, Homo sapiens
  siRNA target sequence for PSMD1 (NM_002807.2,2522-2540).
gccgaaagttcagtataaa

SEQ ID NO: 323126 - DNA, 19 bp, Homo sapiens
  siRNA target sequence for PSMD1 (NM_002807.2,2532-2550).
cagtataaatcgaactgta

SEQ ID NO: 323127 - DNA, 19 bp, Homo sapiens
  siRNA target sequence for PSMD1 (NM_002807.2,2546-2564).
ctgtaaaccatccacattt

SEQ ID NO: 323128 - DNA, 19 bp, Homo sapiens
  siRNA target sequence for PSMD1 (NM_002807.2,2824-2842).
gtagataccagcctttcaa

SEQ ID NO: 323129 - DNA, 19 bp, Homo sapiens
  siRNA target sequence for PSMD1 (NM_002807.2,2876-2894).
ggataccagtgaagacatt

SEQ ID NO: 323130 - DNA, 19 bp, Homo sapiens
  siRNA target sequence for PSMD1 (NM_002807.2,2920-2938).
cacatggcccaaaaatcga

SEQ ID NO: 323131 - DNA, 19 bp, Homo sapiens
  siRNA target sequence for PSMD1 (NM_002807.2,2964-2982).
ccagaaccatttgagtata

SEQ ID NO: 323132 - DNA, 19 bp, Homo sapiens
  siRNA target sequence for PSMD10 (NM_002814.2,104-122).
ggggtgtgtgtctaaccta

SEQ ID NO: 323133 - DNA, 19 bp, Homo sapiens
  siRNA target sequence for PSMD10 (NM_002814.2,106-124).
ggtgtgtgtctaacctaat

SEQ ID NO: 323134 - DNA, 19 bp, Homo sapiens
  siRNA target sequence for PSMD10 (NM_002814.2,414-432).
ggctgtactcccttacatt

SEQ ID NO: 323135 - DNA, 19 bp, Homo sapiens
  siRNA target sequence for PSMD10 (NM_002814.2,415-433).
gctgtactcccttacatta

SEQ ID NO: 323136 - DNA, 19 bp, Homo sapiens
  siRNA target sequence for PSMD10 (NM_002814.2,537-555).
gcagccaagggtaacttga

SEQ ID NO: 323137 - DNA, 19 bp, Homo sapiens
  siRNA target sequence for PSMD10 (NM_002814.2,554-572).
gaagatgattcatatcctt

SEQ ID NO: 323138 - DNA, 19 bp, Homo sapiens
  siRNA target sequence for PSMD10 (NM_002814.2,564-582).
catatccttctgtactaca

SEQ ID NO: 323139 - DNA, 19 bp, Homo sapiens
  siRNA target sequence for PSMD10 (NM_002814.2,739-757).
gtggcctgggtttaatact

SEQ ID NO: 323140 - DNA, 19 bp, Homo sapiens
  siRNA target sequence for PSMD10 (NM_002814.2,741-759).
ggcctgggtttaatactca

SEQ ID NO: 323141 - DNA, 19 bp, Homo sapiens
  siRNA target sequence for PSMD10 (NM_002814.2,742-760).
gcctgggtttaatactcaa

SEQ ID NO: 323142 - DNA, 19 bp, Homo sapiens
  siRNA target sequence for PSMD12 (NM_002816.2,271-289).
cgacatcccgtatcttagt

SEQ ID NO: 323143 - DNA, 19 bp, Homo sapiens
  siRNA target sequence for PSMD12 (NM_002816.2,272-290).
gacatcccgtatcttagtt

SEQ ID NO: 323144 - DNA, 19 bp, Homo sapiens
  siRNA target sequence for PSMD12 (NM_002816.2,305-323).
gtgctatgaggctaaagaa

SEQ ID NO: 323145 - DNA, 19 bp, Homo sapiens
  siRNA target sequence for PSMD12 (NM_002816.2,399-417).
gttcaacagtgctgtactt

SEQ ID NO: 323146 - DNA, 19 bp, Homo sapiens
  siRNA target sequence for PSMD12 (NM_002816.2,431-449).
cacagaccttcctatcaaa

SEQ ID NO: 323147 - DNA, 19 bp, Homo sapiens
  siRNA target sequence for PSMD12 (NM_002816.2,433-451).
cagaccttcctatcaaact

SEQ ID NO: 323148 - DNA, 19 bp, Homo sapiens
  siRNA target sequence for PSMD12 (NM_002816.2,441-459).
cctatcaaacttcgattaa

SEQ ID NO: 323149 - DNA, 19 bp, Homo sapiens
  siRNA target sequence for PSMD12 (NM_002816.2,442-460).
ctatcaaacttcgattaat

SEQ ID NO: 323150 - DNA, 19 bp, Homo sapiens
  siRNA target sequence for PSMD12 (NM_002816.2,462-480).
gatactctacgaatggtta

SEQ ID NO: 323151 - DNA, 19 bp, Homo sapiens
  siRNA target sequence for PSMD12 (NM_002816.2,476-494).
ggttaccgaaggcaagatt

SEQ ID NO: 323152 - DNA, 19 bp, Homo sapiens
  siRNA target sequence for PSMD12 (NM_002816.2,509-527).
gcgtgcgcgactgactaaa

SEQ ID NO: 323153 - DNA, 19 bp, Homo sapiens
  siRNA target sequence for PSMD12 (NM_002816.2,510-528).
cgtgcgcgactgactaaaa

SEQ ID NO: 323154 - DNA, 19 bp, Homo sapiens
  siRNA target sequence for PSMD12 (NM_002816.2,513-531).
gcgcgactgactaaaacat

SEQ ID NO: 323155 - DNA, 19 bp, Homo sapiens
  siRNA target sequence for PSMD12 (NM_002816.2,514-532).
cgcgactgactaaaacatt

SEQ ID NO: 323156 - DNA, 19 bp, Homo sapiens
  siRNA target sequence for PSMD12 (NM_002816.2,515-533).
gcgactgactaaaacatta

SEQ ID NO: 323157 - DNA, 19 bp, Homo sapiens
  siRNA target sequence for PSMD12 (NM_002816.2,577-595).
ccattttacaggagttaca

SEQ ID NO: 323158 - DNA, 19 bp, Homo sapiens
  siRNA target sequence for PSMD12 (NM_002816.2,604-622).
cctacgggtcaatggaaaa

SEQ ID NO: 323159 - DNA, 19 bp, Homo sapiens
  siRNA target sequence for PSMD12 (NM_002816.2,664-682).
gcctagctgtgaaggatta

SEQ ID NO: 323160 - DNA, 19 bp, Homo sapiens
  siRNA target sequence for PSMD12 (NM_002816.2,672-690).
gtgaaggattacattcgaa

SEQ ID NO: 323161 - DNA, 19 bp, Homo sapiens
  siRNA target sequence for PSMD12 (NM_002816.2,677-695).
ggattacattcgaacacaa

SEQ ID NO: 323162 - DNA, 19 bp, Homo sapiens
  siRNA target sequence for PSMD12 (NM_002816.2,678-696).
gattacattcgaacacaaa

SEQ ID NO: 323163 - DNA, 19 bp, Homo sapiens
  siRNA target sequence for PSMD12 (NM_002816.2,795-813).
gagggatcctatttgtcta

SEQ ID NO: 323164 - DNA, 19 bp, Homo sapiens
  siRNA target sequence for PSMD12 (NM_002816.2,824-842).
ctacagagcaatatatgat

SEQ ID NO: 323165 - DNA, 19 bp, Homo sapiens
  siRNA target sequence for PSMD12 (NM_002816.2,881-899).
ggctctgaagagtgttgta

SEQ ID NO: 323166 - DNA, 19 bp, Homo sapiens
  siRNA target sequence for PSMD12 (NM_002816.2,887-905).
gaagagtgttgtactctat

SEQ ID NO: 323167 - DNA, 19 bp, Homo sapiens
  siRNA target sequence for PSMD12 (NM_002816.2,890-908).
gagtgttgtactctatgtt

SEQ ID NO: 323168 - DNA, 19 bp, Homo sapiens
  siRNA target sequence for PSMD12 (NM_002816.2,892-910).
gtgttgtactctatgttat

SEQ ID NO: 323169 - DNA, 19 bp, Homo sapiens
  siRNA target sequence for PSMD12 (NM_002816.2,914-932).
ggctccttttgacaatgaa

SEQ ID NO: 323170 - DNA, 19 bp, Homo sapiens
  siRNA target sequence for PSMD12 (NM_002816.2,939-957).
gatttggttcaccgaataa

SEQ ID NO: 323171 - DNA, 19 bp, Homo sapiens
  siRNA target sequence for PSMD12 (NM_002816.2,952-970).
gaataagtggtgacaagaa

SEQ ID NO: 323172 - DNA, 19 bp, Homo sapiens
  siRNA target sequence for PSMD12 (NM_002816.2,958-976).
gtggtgacaagaagttaga

SEQ ID NO: 323173 - DNA, 19 bp, Homo sapiens
  siRNA target sequence for PSMD12 (NM_002816.2,1031-1049).
gcgttggtccacacttgtt

SEQ ID NO: 323174 - DNA, 19 bp, Homo sapiens
  siRNA target sequence for PSMD12 (NM_002816.2,1033-1051).
gttggtccacacttgttga

SEQ ID NO: 323175 - DNA, 19 bp, Homo sapiens
  siRNA target sequence for PSMD12 (NM_002816.2,1052-1070).
ggactatggaatggaatta

SEQ ID NO: 323176 - DNA, 19 bp, Homo sapiens
  siRNA target sequence for PSMD12 (NM_002816.2,1053-1071).
gactatggaatggaattaa

SEQ ID NO: 323177 - DNA, 19 bp, Homo sapiens
  siRNA target sequence for PSMD12 (NM_002816.2,1055-1073).
ctatggaatggaattaaga

SEQ ID NO: 323178 - DNA, 19 bp, Homo sapiens
  siRNA target sequence for PSMD12 (NM_002816.2,1090-1108).
gtcctgcaacggatgtttt

SEQ ID NO: 323179 - DNA, 19 bp, Homo sapiens
  siRNA target sequence for PSMD12 (NM_002816.2,1095-1113).
gcaacggatgtttttggtt

SEQ ID NO: 323180 - DNA, 19 bp, Homo sapiens
  siRNA target sequence for PSMD12 (NM_002816.2,1100-1118).
ggatgtttttggttctaca

SEQ ID NO: 323181 - DNA, 19 bp, Homo sapiens
  siRNA target sequence for PSMD12 (NM_002816.2,1145-1163).
cttgaagaacagagttgtt

SEQ ID NO: 323182 - DNA, 19 bp, Homo sapiens
  siRNA target sequence for PSMD12 (NM_002816.2,1151-1169).
gaacagagttgttgaacat

SEQ ID NO: 323183 - DNA, 19 bp, Homo sapiens
  siRNA target sequence for PSMD12 (NM_002816.2,1177-1195).
gaataatggccaagtatta

SEQ ID NO: 323184 - DNA, 19 bp, Homo sapiens
  siRNA target sequence for PSMD12 (NM_002816.2,1190-1208).
gtattatactcggataaca

SEQ ID NO: 323185 - DNA, 19 bp, Homo sapiens
  siRNA target sequence for PSMD12 (NM_002816.2,1252-1270).
ccgaagcctttctctcaaa

SEQ ID NO: 323186 - DNA, 19 bp, Homo sapiens
  siRNA target sequence for PSMD12 (NM_002816.2,1263-1281).
ctctcaaatctagtagtta

SEQ ID NO: 323187 - DNA, 19 bp, Homo sapiens
  siRNA target sequence for PSMD12 (NM_002816.2,1267-1285).
caaatctagtagttaacaa

SEQ ID NO: 323188 - DNA, 19 bp, Homo sapiens
  siRNA target sequence for PSMD12 (NM_002816.2,1286-1304).
gaccatctttgctaaagta

SEQ ID NO: 323189 - DNA, 19 bp, Homo sapiens
  siRNA target sequence for PSMD12 (NM_002816.2,1288-1306).
ccatctttgctaaagtaga

SEQ ID NO: 323190 - DNA, 19 bp, Homo sapiens
  siRNA target sequence for PSMD12 (NM_002816.2,1336-1354).
gacccaaggatccaaataa

SEQ ID NO: 323191 - DNA, 19 bp, Homo sapiens
  siRNA target sequence for PSMD12 (NM_002816.2,1365-1383).
gactggtctcagaaactga

SEQ ID NO: 323192 - DNA, 19 bp, Homo sapiens
  siRNA target sequence for PSMD12 (NM_002816.2,1406-1424).
caaaactacgcatctcata

SEQ ID NO: 323193 - DNA, 19 bp, Homo sapiens
  siRNA target sequence for PSMD12 (NM_174871.1,190-208).
ccaaggcttccgatatggt

SEQ ID NO: 323194 - DNA, 19 bp, Homo sapiens
  siRNA target sequence for PSMD12 (NM_174871.1,191-209).
caaggcttccgatatggta

SEQ ID NO: 323195 - DNA, 19 bp, Homo sapiens
  siRNA target sequence for PSMD2 (NM_002808.3,177-195).
ggataaacagcttcaagat

SEQ ID NO: 323196 - DNA, 19 bp, Homo sapiens
  siRNA target sequence for PSMD2 (NM_002808.3,217-235).
cgactaggggagaaggata

SEQ ID NO: 323197 - DNA, 19 bp, Homo sapiens
  siRNA target sequence for PSMD2 (NM_002808.3,220-238).
ctaggggagaaggatacat

SEQ ID NO: 323198 - DNA, 19 bp, Homo sapiens
  siRNA target sequence for PSMD2 (NM_002808.3,381-399).
ggagaataagcgttttgct

SEQ ID NO: 323199 - DNA, 19 bp, Homo sapiens
  siRNA target sequence for PSMD2 (NM_002808.3,491-509).
catggggtcatgagtatgt

SEQ ID NO: 323200 - DNA, 19 bp, Homo sapiens
  siRNA target sequence for PSMD2 (NM_002808.3,644-662).
cttgcgacctgcttatgga

SEQ ID NO: 323201 - DNA, 19 bp, Homo sapiens
  siRNA target sequence for PSMD2 (NM_002808.3,647-665).
gcgacctgcttatggaaat

SEQ ID NO: 323202 - DNA, 19 bp, Homo sapiens
  siRNA target sequence for PSMD2 (NM_002808.3,648-666).
cgacctgcttatggaaatt

SEQ ID NO: 323203 - DNA, 19 bp, Homo sapiens
  siRNA target sequence for PSMD2 (NM_002808.3,734-752).
ccagttgtgtgaattacgt

SEQ ID NO: 323204 - DNA, 19 bp, Homo sapiens
  siRNA target sequence for PSMD2 (NM_002808.3,1058-1076).
ccaaggtgcctgatgacat

SEQ ID NO: 323205 - DNA, 19 bp, Homo sapiens
  siRNA target sequence for PSMD2 (NM_002808.3,1063-1081).
gtgcctgatgacatctaca

SEQ ID NO: 323206 - DNA, 19 bp, Homo sapiens
  siRNA target sequence for PSMD2 (NM_002808.3,1065-1083).
gcctgatgacatctacaaa

SEQ ID NO: 323207 - DNA, 19 bp, Homo sapiens
  siRNA target sequence for PSMD2 (NM_002808.3,1143-1161).
gaacctggcctcctctttt

SEQ ID NO: 323208 - DNA, 19 bp, Homo sapiens
  siRNA target sequence for PSMD2 (NM_002808.3,1268-1286).
catctcttgggatgattct

SEQ ID NO: 323209 - DNA, 19 bp, Homo sapiens
  siRNA target sequence for PSMD2 (NM_002808.3,1335-1353).
ctcctctgaggactacatt

SEQ ID NO: 323210 - DNA, 19 bp, Homo sapiens
  siRNA target sequence for PSMD2 (NM_002808.3,1464-1482).
gagacttggttccatcttt

SEQ ID NO: 323211 - DNA, 19 bp, Homo sapiens
  siRNA target sequence for PSMD2 (NM_002808.3,1485-1503).
gctaggcttggcttatgct

SEQ ID NO: 323212 - DNA, 19 bp, Homo sapiens
  siRNA target sequence for PSMD2 (NM_002808.3,1540-1558).
cctgtgatgggagattcaa

SEQ ID NO: 323213 - DNA, 19 bp, Homo sapiens
  siRNA target sequence for PSMD2 (NM_002808.3,1543-1561).
gtgatgggagattcaaagt

SEQ ID NO: 323214 - DNA, 19 bp, Homo sapiens
  siRNA target sequence for PSMD2 (NM_002808.3,1589-1607).
ctttagcctgtggaatgat

SEQ ID NO: 323215 - DNA, 19 bp, Homo sapiens
  siRNA target sequence for PSMD2 (NM_002808.3,1617-1635).
gtcctgcaatggagatgta

SEQ ID NO: 323216 - DNA, 19 bp, Homo sapiens
  siRNA target sequence for PSMD2 (NM_002808.3,1620-1638).
ctgcaatggagatgtaact

SEQ ID NO: 323217 - DNA, 19 bp, Homo sapiens
  siRNA target sequence for PSMD2 (NM_002808.3,1672-1690).
gagactgagctcaaggata

SEQ ID NO: 323218 - DNA, 19 bp, Homo sapiens
  siRNA target sequence for PSMD2 (NM_002808.3,1680-1698).
gctcaaggatacttatgct

SEQ ID NO: 323219 - DNA, 19 bp, Homo sapiens
  siRNA target sequence for PSMD2 (NM_002808.3,1875-1893).
catttgtagcgaacacttt

SEQ ID NO: 323220 - DNA, 19 bp, Homo sapiens
  siRNA target sequence for PSMD2 (NM_002808.3,1998-2016).
ggggattgcccttattgct

SEQ ID NO: 323221 - DNA, 19 bp, Homo sapiens
  siRNA target sequence for PSMD2 (NM_002808.3,1999-2017).
gggattgcccttattgcta

SEQ ID NO: 323222 - DNA, 19 bp, Homo sapiens
  siRNA target sequence for PSMD2 (NM_002808.3,2091-2109).
ccggagggctgtaccttta

SEQ ID NO: 323223 - DNA, 19 bp, Homo sapiens
  siRNA target sequence for PSMD2 (NM_002808.3,2094-2112).
gagggctgtacctttagca

SEQ ID NO: 323224 - DNA, 19 bp, Homo sapiens
  siRNA target sequence for PSMD2 (NM_002808.3,2115-2133).
ggccctcatctctgtttca

SEQ ID NO: 323225 - DNA, 19 bp, Homo sapiens
  siRNA target sequence for PSMD2 (NM_002808.3,2227-2245).
gtgggcagtggtaccaata

SEQ ID NO: 323226 - DNA, 19 bp, Homo sapiens
  siRNA target sequence for PSMD2 (NM_002808.3,2268-2286).
gcgccagttagctcaatat

SEQ ID NO: 323227 - DNA, 19 bp, Homo sapiens
  siRNA target sequence for PSMD2 (NM_002808.3,2270-2288).
gccagttagctcaatatca

SEQ ID NO: 323228 - DNA, 19 bp, Homo sapiens
  siRNA target sequence for PSMD2 (NM_002808.3,2271-2289).
ccagttagctcaatatcat

SEQ ID NO: 323229 - DNA, 19 bp, Homo sapiens
  siRNA target sequence for PSMD2 (NM_002808.3,2442-2460).
cctggatgttcgaaacatt

SEQ ID NO: 323230 - DNA, 19 bp, Homo sapiens
  siRNA target sequence for PSMD2 (NM_002808.3,2445-2463).
ggatgttcgaaacattatt

SEQ ID NO: 323231 - DNA, 19 bp, Homo sapiens
  siRNA target sequence for PSMD2 (NM_002808.3,2467-2485).
ggcaaatcacactatgtat

SEQ ID NO: 323232 - DNA, 19 bp, Homo sapiens
  siRNA target sequence for PSMD2 (NM_002808.3,2513-2531).
cccgaatgctggttacgtt

SEQ ID NO: 323233 - DNA, 19 bp, Homo sapiens
  siRNA target sequence for PSMD2 (NM_002808.3,2514-2532).
ccgaatgctggttacgttt

SEQ ID NO: 323234 - DNA, 19 bp, Homo sapiens
  siRNA target sequence for PSMD2 (NM_002808.3,2599-2617).
gctggcaagccgaagacta

SEQ ID NO: 323235 - DNA, 19 bp, Homo sapiens
  siRNA target sequence for PSMD2 (NM_002808.3,2600-2618).
ctggcaagccgaagactat

SEQ ID NO: 323236 - DNA, 19 bp, Homo sapiens
  siRNA target sequence for PSMD2 (NM_002808.3,2602-2620).
ggcaagccgaagactatca

SEQ ID NO: 323237 - DNA, 19 bp, Homo sapiens
  siRNA target sequence for PSMD2 (NM_002808.3,2604-2622).
caagccgaagactatcaca

SEQ ID NO: 323238 - DNA, 19 bp, Homo sapiens
  siRNA target sequence for PSMD2 (NM_002808.3,2623-2641).
gggttccagacgcatacaa

SEQ ID NO: 323239 - DNA, 19 bp, Homo sapiens
  siRNA target sequence for PSMD2 (NM_002808.3,2736-2754).
gaagaaccccaattatgat

SEQ ID NO: 323240 - DNA, 19 bp, Homo sapiens
  siRNA target sequence for ADFP (NM_001122.2,182-200).
ggcatccgttgcagttgat

SEQ ID NO: 323241 - DNA, 19 bp, Homo sapiens
  siRNA target sequence for ADFP (NM_001122.2,392-410).
gctagagccgcaaattgca

SEQ ID NO: 323242 - DNA, 19 bp, Homo sapiens
  siRNA target sequence for ADFP (NM_001122.2,455-473).
gagactgcctattctgaat

SEQ ID NO: 323243 - DNA, 19 bp, Homo sapiens
  siRNA target sequence for ADFP (NM_001122.2,546-564).
gtgactggggccaaggatt

SEQ ID NO: 323244 - DNA, 19 bp, Homo sapiens
  siRNA target sequence for ADFP (NM_001122.2,693-711).
gtgagcagtggcgtagaaa

SEQ ID NO: 323245 - DNA, 19 bp, Homo sapiens
  siRNA target sequence for ADFP (NM_001122.2,695-713).
gagcagtggcgtagaaaat

SEQ ID NO: 323246 - DNA, 19 bp, Homo sapiens
  siRNA target sequence for ADFP (NM_001122.2,708-726).
gaaaatgcactcaccaaat

SEQ ID NO: 323247 - DNA, 19 bp, Homo sapiens
  siRNA target sequence for ADFP (NM_001122.2,727-745).
cagagctgttggtagaaca

SEQ ID NO: 323248 - DNA, 19 bp, Homo sapiens
  siRNA target sequence for ADFP (NM_001122.2,881-899).
ggctctcagcagggttaaa

SEQ ID NO: 323249 - DNA, 19 bp, Homo sapiens
  siRNA target sequence for ADFP (NM_001122.2,883-901).
ctctcagcagggttaaaga

SEQ ID NO: 323250 - DNA, 19 bp, Homo sapiens
  siRNA target sequence for ADFP (NM_001122.2,893-911).
ggttaaagaagctaagcaa

SEQ ID NO: 323251 - DNA, 19 bp, Homo sapiens
  siRNA target sequence for ADFP (NM_001122.2,1094-1112).
cattgagtcacgtactctt

SEQ ID NO: 323252 - DNA, 19 bp, Homo sapiens
  siRNA target sequence for ADFP (NM_001122.2,1100-1118).
gtcacgtactcttgcaatt

SEQ ID NO: 323253 - DNA, 19 bp, Homo sapiens
  siRNA target sequence for ADFP (NM_001122.2,1252-1270).
gcaatgctgcctcctttaa

SEQ ID NO: 323254 - DNA, 19 bp, Homo sapiens
  siRNA target sequence for ADFP (NM_001122.2,1378-1396).
ggctggtaggtccctttta

SEQ ID NO: 323255 - DNA, 19 bp, Homo sapiens
  siRNA target sequence for ADFP (NM_001122.2,1379-1397).
gctggtaggtcccttttat

SEQ ID NO: 323256 - DNA, 19 bp, Homo sapiens
  siRNA target sequence for ADFP (NM_001122.2,1466-1484).
ccagcgatctgagcataaa

SEQ ID NO: 323257 - DNA, 19 bp, Homo sapiens
  siRNA target sequence for ADFP (NM_001122.2,1469-1487).
gcgatctgagcataaaact

SEQ ID NO: 323258 - DNA, 19 bp, Homo sapiens
  siRNA target sequence for ADFP (NM_001122.2,1471-1489).
gatctgagcataaaactca

SEQ ID NO: 323259 - DNA, 19 bp, Homo sapiens
  siRNA target sequence for JPH3 (NM_020655.2,259-277).
ccagtgggggcaggtttaa

SEQ ID NO: 323260 - DNA, 19 bp, Homo sapiens
  siRNA target sequence for JPH3 (NM_020655.2,260-278).
cagtgggggcaggtttaat

SEQ ID NO: 323261 - DNA, 19 bp, Homo sapiens
  siRNA target sequence for JPH3 (NM_020655.2,732-750).
ctgaggacgtccatcaact

SEQ ID NO: 323262 - DNA, 19 bp, Homo sapiens
  siRNA target sequence for JPH3 (NM_020655.2,2118-2136).
gagacgcatccccagaaaa

SEQ ID NO: 323263 - DNA, 19 bp, Homo sapiens
  siRNA target sequence for JPH3 (NM_020655.2,2465-2483).
cggagtcgccattctgttt

SEQ ID NO: 323264 - DNA, 19 bp, Homo sapiens
  siRNA target sequence for JPH3 (NM_020655.2,2466-2484).
ggagtcgccattctgttta

SEQ ID NO: 323265 - DNA, 19 bp, Homo sapiens
  siRNA target sequence for JPH3 (NM_020655.2,2467-2485).
gagtcgccattctgtttat

SEQ ID NO: 323266 - DNA, 19 bp, Homo sapiens
  siRNA target sequence for JPH3 (NM_020655.2,2472-2490).
gccattctgtttattaact

SEQ ID NO: 323267 - DNA, 19 bp, Homo sapiens
  siRNA target sequence for PIGS (NM_033198.2,266-284).
caccgttgtgcatgaaaga

SEQ ID NO: 323268 - DNA, 19 bp, Homo sapiens
  siRNA target sequence for PIGS (NM_033198.2,392-410).
ggcagaagccatgttagat

SEQ ID NO: 323269 - DNA, 19 bp, Homo sapiens
  siRNA target sequence for PIGS (NM_033198.2,438-456).
ctgactgtgtacgtgatat

SEQ ID NO: 323270 - DNA, 19 bp, Homo sapiens
  siRNA target sequence for PIGS (NM_033198.2,440-458).
gactgtgtacgtgatatct

SEQ ID NO: 323271 - DNA, 19 bp, Homo sapiens
  siRNA target sequence for PIGS (NM_033198.2,442-460).
ctgtgtacgtgatatctga

SEQ ID NO: 323272 - DNA, 19 bp, Homo sapiens
  siRNA target sequence for PIGS (NM_033198.2,540-558).
cgggaggcctttaacatca

SEQ ID NO: 323273 - DNA, 19 bp, Homo sapiens
  siRNA target sequence for PIGS (NM_033198.2,682-700).
ccagcttgggctatgagat

SEQ ID NO: 323274 - DNA, 19 bp, Homo sapiens
  siRNA target sequence for PIGS (NM_033198.2,858-876).
gtgaatccccgctttgact

SEQ ID NO: 323275 - DNA, 19 bp, Homo sapiens
  siRNA target sequence for PIGS (NM_033198.2,879-897).
gcttcctccagctactatt

SEQ ID NO: 323276 - DNA, 19 bp, Homo sapiens
  siRNA target sequence for PIGS (NM_033198.2,968-986).
gtaccctgtgctcaacttt

SEQ ID NO: 323277 - DNA, 19 bp, Homo sapiens
  siRNA target sequence for PIGS (NM_033198.2,971-989).
ccctgtgctcaactttcta

SEQ ID NO: 323278 - DNA, 19 bp, Homo sapiens
  siRNA target sequence for PIGS (NM_033198.2,1009-1027).
cacactcaccgctgtacat

SEQ ID NO: 323279 - DNA, 19 bp, Homo sapiens
  siRNA target sequence for PIGS (NM_033198.2,1075-1093).
cccgctggggtggcattat

SEQ ID NO: 323280 - DNA, 19 bp, Homo sapiens
  siRNA target sequence for PIGS (NM_033198.2,1079-1097).
ctggggtggcattatggta

SEQ ID NO: 323281 - DNA, 19 bp, Homo sapiens
  siRNA target sequence for PIGS (NM_033198.2,1081-1099).
ggggtggcattatggtata

SEQ ID NO: 323282 - DNA, 19 bp, Homo sapiens
  siRNA target sequence for PIGS (NM_033198.2,1082-1100).
gggtggcattatggtatat

SEQ ID NO: 323283 - DNA, 19 bp, Homo sapiens
  siRNA target sequence for PIGS (NM_033198.2,1083-1101).
ggtggcattatggtatata

SEQ ID NO: 323284 - DNA, 19 bp, Homo sapiens
  siRNA target sequence for PIGS (NM_033198.2,1084-1102).
gtggcattatggtatataa

SEQ ID NO: 323285 - DNA, 19 bp, Homo sapiens
  siRNA target sequence for PIGS (NM_033198.2,1104-1122).
gttgactccaaaacctata

SEQ ID NO: 323286 - DNA, 19 bp, Homo sapiens
  siRNA target sequence for PIGS (NM_033198.2,1372-1390).
gcaacattgtcattaagga

SEQ ID NO: 323287 - DNA, 19 bp, Homo sapiens
  siRNA target sequence for SART2 (NM_013352.1,169-187).
gggctcccagtgtgttttt

SEQ ID NO: 323288 - DNA, 19 bp, Homo sapiens
  siRNA target sequence for SART2 (NM_013352.1,224-242).
cgacgagaacccagaagtt

SEQ ID NO: 323289 - DNA, 19 bp, Homo sapiens
  siRNA target sequence for SART2 (NM_013352.1,225-243).
gacgagaacccagaagtta

SEQ ID NO: 323290 - DNA, 19 bp, Homo sapiens
  siRNA target sequence for SART2 (NM_013352.1,435-453).
gcccgctggaatgaaattt

SEQ ID NO: 323291 - DNA, 19 bp, Homo sapiens
  siRNA target sequence for SART2 (NM_013352.1,468-486).
ggtgccttggcaatgttct

SEQ ID NO: 323292 - DNA, 19 bp, Homo sapiens
  siRNA target sequence for SART2 (NM_013352.1,491-509).
gctgtatcctgagaacatt

SEQ ID NO: 323293 - DNA, 19 bp, Homo sapiens
  siRNA target sequence for SART2 (NM_013352.1,494-512).
gtatcctgagaacattgaa

SEQ ID NO: 323294 - DNA, 19 bp, Homo sapiens
  siRNA target sequence for SART2 (NM_013352.1,604-622).
ctcactccctggttggttt

SEQ ID NO: 323295 - DNA, 19 bp, Homo sapiens
  siRNA target sequence for SART2 (NM_013352.1,630-648).
gcttatgacttcttgtaca

SEQ ID NO: 323296 - DNA, 19 bp, Homo sapiens
  siRNA target sequence for SART2 (NM_013352.1,631-649).
cttatgacttcttgtacaa

SEQ ID NO: 323297 - DNA, 19 bp, Homo sapiens
  siRNA target sequence for SART2 (NM_013352.1,694-712).
ccaatgcctcagggtatat

SEQ ID NO: 323298 - DNA, 19 bp, Homo sapiens
  siRNA target sequence for SART2 (NM_013352.1,700-718).
cctcagggtatatgtatga

SEQ ID NO: 323299 - DNA, 19 bp, Homo sapiens
  siRNA target sequence for SART2 (NM_013352.1,701-719).
ctcagggtatatgtatgaa

SEQ ID NO: 323300 - DNA, 19 bp, Homo sapiens
  siRNA target sequence for SART2 (NM_013352.1,733-751).
gaggatggggatttcaata

SEQ ID NO: 323301 - DNA, 19 bp, Homo sapiens
  siRNA target sequence for SART2 (NM_013352.1,762-780).
catcagcccaccaactgta

SEQ ID NO: 323302 - DNA, 19 bp, Homo sapiens
  siRNA target sequence for SART2 (NM_013352.1,799-817).
gcctagtcctgatgaatca

SEQ ID NO: 323303 - DNA, 19 bp, Homo sapiens
  siRNA target sequence for SART2 (NM_013352.1,800-818).
cctagtcctgatgaatcaa

SEQ ID NO: 323304 - DNA, 19 bp, Homo sapiens
  siRNA target sequence for SART2 (NM_013352.1,809-827).
gatgaatcaaggatatctt

SEQ ID NO: 323305 - DNA, 19 bp, Homo sapiens
  siRNA target sequence for SART2 (NM_013352.1,825-843).
cttcaagaagcctacttat

SEQ ID NO: 323306 - DNA, 19 bp, Homo sapiens
  siRNA target sequence for SART2 (NM_013352.1,828-846).
caagaagcctacttatgga

SEQ ID NO: 323307 - DNA, 19 bp, Homo sapiens
  siRNA target sequence for SART2 (NM_013352.1,862-880).
ccatcatggagaaatctct

SEQ ID NO: 323308 - DNA, 19 bp, Homo sapiens
  siRNA target sequence for SART2 (NM_013352.1,901-919).
cggatggctccctctatga

SEQ ID NO: 323309 - DNA, 19 bp, Homo sapiens
  siRNA target sequence for SART2 (NM_013352.1,933-951).
ggcagctacaccactagat

SEQ ID NO: 323310 - DNA, 19 bp, Homo sapiens
  siRNA target sequence for SART2 (NM_013352.1,935-953).
cagctacaccactagatca

SEQ ID NO: 323311 - DNA, 19 bp, Homo sapiens
  siRNA target sequence for SART2 (NM_013352.1,949-967).
gatcactcttccaatacat

SEQ ID NO: 323312 - DNA, 19 bp, Homo sapiens
  siRNA target sequence for SART2 (NM_013352.1,1006-1024).
gccatccgtggcttaaaca

SEQ ID NO: 323313 - DNA, 19 bp, Homo sapiens
  siRNA target sequence for SART2 (NM_013352.1,1007-1025).
ccatccgtggcttaaacaa

SEQ ID NO: 323314 - DNA, 19 bp, Homo sapiens
  siRNA target sequence for SART2 (NM_013352.1,1017-1035).
cttaaacaacactttgcat

SEQ ID NO: 323315 - DNA, 19 bp, Homo sapiens
  siRNA target sequence for SART2 (NM_013352.1,1076-1094).
ggctattgcggactcaaat

SEQ ID NO: 323316 - DNA, 19 bp, Homo sapiens
  siRNA target sequence for SART2 (NM_013352.1,1077-1095).
gctattgcggactcaaatt

SEQ ID NO: 323317 - DNA, 19 bp, Homo sapiens
  siRNA target sequence for SART2 (NM_013352.1,1078-1096).
ctattgcggactcaaatta

SEQ ID NO: 323318 - DNA, 19 bp, Homo sapiens
  siRNA target sequence for SART2 (NM_013352.1,1083-1101).
gcggactcaaattacaact

SEQ ID NO: 323319 - DNA, 19 bp, Homo sapiens
  siRNA target sequence for SART2 (NM_013352.1,1113-1131).
ccagaaagccaattagtgt

SEQ ID NO: 323320 - DNA, 19 bp, Homo sapiens
  siRNA target sequence for SART2 (NM_013352.1,1122-1140).
caattagtgttccttgata

SEQ ID NO: 323321 - DNA, 19 bp, Homo sapiens
  siRNA target sequence for SART2 (NM_013352.1,1172-1190).
gctagctgaccaaatcaga

SEQ ID NO: 323322 - DNA, 19 bp, Homo sapiens
  siRNA target sequence for SART2 (NM_013352.1,1173-1191).
ctagctgaccaaatcagaa

SEQ ID NO: 323323 - DNA, 19 bp, Homo sapiens
  siRNA target sequence for SART2 (NM_013352.1,1268-1286).
gtatgatggcagcttgaaa

SEQ ID NO: 323324 - DNA, 19 bp, Homo sapiens
  siRNA target sequence for SART2 (NM_013352.1,1312-1330).
cccctacactgcattattt

SEQ ID NO: 323325 - DNA, 19 bp, Homo sapiens
  siRNA target sequence for SART2 (NM_013352.1,1341-1359).
ggtgtcgtgacttatggaa

SEQ ID NO: 323326 - DNA, 19 bp, Homo sapiens
  siRNA target sequence for SART2 (NM_013352.1,1368-1386).
cctgcagaaatcaatagat

SEQ ID NO: 323327 - DNA, 19 bp, Homo sapiens
  siRNA target sequence for SART2 (NM_013352.1,1396-1414).
ccttcaagtctggaaaact

SEQ ID NO: 323328 - DNA, 19 bp, Homo sapiens
  siRNA target sequence for SART2 (NM_013352.1,1415-1433).
ggggggacgtgcaatatat

SEQ ID NO: 323329 - DNA, 19 bp, Homo sapiens
  siRNA target sequence for SART2 (NM_013352.1,1417-1435).
ggggacgtgcaatatatga

SEQ ID NO: 323330 - DNA, 19 bp, Homo sapiens
  siRNA target sequence for SART2 (NM_013352.1,1419-1437).
ggacgtgcaatatatgaca

SEQ ID NO: 323331 - DNA, 19 bp, Homo sapiens
  siRNA target sequence for SART2 (NM_013352.1,1420-1438).
gacgtgcaatatatgacat

SEQ ID NO: 323332 - DNA, 19 bp, Homo sapiens
  siRNA target sequence for SART2 (NM_013352.1,1540-1558).
gtgtgcctttcattactga

SEQ ID NO: 323333 - DNA, 19 bp, Homo sapiens
  siRNA target sequence for SART2 (NM_013352.1,1561-1579).
ctctgtacgggccaaagta

SEQ ID NO: 323334 - DNA, 19 bp, Homo sapiens
  siRNA target sequence for SART2 (NM_013352.1,1563-1581).
ctgtacgggccaaagtaca

SEQ ID NO: 323335 - DNA, 19 bp, Homo sapiens
  siRNA target sequence for SART2 (NM_013352.1,1572-1590).
ccaaagtacaccttcttca

SEQ ID NO: 323336 - DNA, 19 bp, Homo sapiens
  siRNA target sequence for SART2 (NM_013352.1,1672-1690).
caaaatggtctaaatacaa

SEQ ID NO: 323337 - DNA, 19 bp, Homo sapiens
  siRNA target sequence for SART2 (NM_013352.1,1767-1785).
gaaggtgtgggagcttata

SEQ ID NO: 323338 - DNA, 19 bp, Homo sapiens
  siRNA target sequence for SART2 (NM_013352.1,1896-1914).
gcagcgagcttcttccata

SEQ ID NO: 323339 - DNA, 19 bp, Homo sapiens
  siRNA target sequence for SART2 (NM_013352.1,1897-1915).
cagcgagcttcttccataa

SEQ ID NO: 323340 - DNA, 19 bp, Homo sapiens
  siRNA target sequence for SART2 (NM_013352.1,1951-1969).
gtgtccatggggctttcat

SEQ ID NO: 323341 - DNA, 19 bp, Homo sapiens
  siRNA target sequence for SART2 (NM_013352.1,1974-1992).
cagagagatggtctctata

SEQ ID NO: 323342 - DNA, 19 bp, Homo sapiens
  siRNA target sequence for SART2 (NM_013352.1,2035-2053).
cctttgcctcagtgacata

SEQ ID NO: 323343 - DNA, 19 bp, Homo sapiens
  siRNA target sequence for SART2 (NM_013352.1,2125-2143).
gggcagcttacctcttcat

SEQ ID NO: 323344 - DNA, 19 bp, Homo sapiens
  siRNA target sequence for SART2 (NM_013352.1,2126-2144).
ggcagcttacctcttcata

SEQ ID NO: 323345 - DNA, 19 bp, Homo sapiens
  siRNA target sequence for SART2 (NM_013352.1,2138-2156).
cttcatagggccatctata

SEQ ID NO: 323346 - DNA, 19 bp, Homo sapiens
  siRNA target sequence for SART2 (NM_013352.1,2146-2164).
ggccatctatagatgttca

SEQ ID NO: 323347 - DNA, 19 bp, Homo sapiens
  siRNA target sequence for SART2 (NM_013352.1,2290-2308).
ctgatcgtcacaaaattct

SEQ ID NO: 323348 - DNA, 19 bp, Homo sapiens
  siRNA target sequence for SART2 (NM_013352.1,2368-2386).
ctattgtggaacagaactt

SEQ ID NO: 323349 - DNA, 19 bp, Homo sapiens
  siRNA target sequence for SART2 (NM_013352.1,2379-2397).
cagaacttgcagcatttta

SEQ ID NO: 323350 - DNA, 19 bp, Homo sapiens
  siRNA target sequence for SART2 (NM_013352.1,2441-2459).
ccggaacacagctagcttt

SEQ ID NO: 323351 - DNA, 19 bp, Homo sapiens
  siRNA target sequence for SART2 (NM_013352.1,2442-2460).
cggaacacagctagcttta

SEQ ID NO: 323352 - DNA, 19 bp, Homo sapiens
  siRNA target sequence for SART2 (NM_013352.1,2472-2490).
gaacgcctgctgagatttt

SEQ ID NO: 323353 - DNA, 19 bp, Homo sapiens
  siRNA target sequence for SART2 (NM_013352.1,2511-2529).
gaggccattgacaggattt

SEQ ID NO: 323354 - DNA, 19 bp, Homo sapiens
  siRNA target sequence for SART2 (NM_013352.1,2513-2531).
ggccattgacaggattttt

SEQ ID NO: 323355 - DNA, 19 bp, Homo sapiens
  siRNA target sequence for SART2 (NM_013352.1,2581-2599).
gggcaggcaaacgctataa

SEQ ID NO: 323356 - DNA, 19 bp, Homo sapiens
  siRNA target sequence for SART2 (NM_013352.1,2582-2600).
ggcaggcaaacgctataaa

SEQ ID NO: 323357 - DNA, 19 bp, Homo sapiens
  siRNA target sequence for SART2 (NM_013352.1,2584-2602).
caggcaaacgctataaatt

SEQ ID NO: 323358 - DNA, 19 bp, Homo sapiens
  siRNA target sequence for SART2 (NM_013352.1,2606-2624).
ggatgctgtccctgatatt

SEQ ID NO: 323359 - DNA, 19 bp, Homo sapiens
  siRNA target sequence for SART2 (NM_013352.1,2730-2748).
gattttgcagatgtaacat

SEQ ID NO: 323360 - DNA, 19 bp, Homo sapiens
  siRNA target sequence for SART2 (NM_013352.1,2742-2760).
gtaacatacgagaaacata

SEQ ID NO: 323361 - DNA, 19 bp, Homo sapiens
  siRNA target sequence for SART2 (NM_013352.1,2796-2814).
gcacggatggtgacaacta

SEQ ID NO: 323362 - DNA, 19 bp, Homo sapiens
  siRNA target sequence for SART2 (NM_013352.1,2854-2872).
ggttgttcctgattctgaa

SEQ ID NO: 323363 - DNA, 19 bp, Homo sapiens
  siRNA target sequence for SART2 (NM_013352.1,2942-2960).
ccaaagatgtctttatgca

SEQ ID NO: 323364 - DNA, 19 bp, Homo sapiens
  siRNA target sequence for SART2 (NM_013352.1,3001-3019).
cttcttgttcccaatcaca

SEQ ID NO: 323365 - DNA, 19 bp, Homo sapiens
  siRNA target sequence for SDF2L1 (NM_022044.1,179-197).
gcactcgcacgacatcaaa

SEQ ID NO: 323366 - DNA, 19 bp, Homo sapiens
  siRNA target sequence for SDF2L1 (NM_022044.1,180-198).
cactcgcacgacatcaaat

SEQ ID NO: 323367 - DNA, 19 bp, Homo sapiens
  siRNA target sequence for SDF2L1 (NM_022044.1,600-618).
gccaacacgcacaatacgt

SEQ ID NO: 323368 - DNA, 19 bp, Homo sapiens
  siRNA target sequence for VPREB3 (NM_013378.1,227-245).
gcagtgcccctcgatatct

SEQ ID NO: 323369 - DNA, 19 bp, Homo sapiens
  siRNA target sequence for VPREB3 (NM_013378.1,284-302).
ctgacatccccgatcgatt

SEQ ID NO: 323370 - DNA, 19 bp, Homo sapiens
  siRNA target sequence for VPREB3 (NM_013378.1,364-382).
gaagacgacgcggattact

SEQ ID NO: 323371 - DNA, 19 bp, Homo sapiens
  siRNA target sequence for VPREB3 (NM_013378.1,367-385).
gacgacgcggattactact

SEQ ID NO: 323372 - DNA, 19 bp, Homo sapiens
  siRNA target sequence for PSMD11 (NM_002815.2,257-275).
gtacgacccttcttgaatt

SEQ ID NO: 323373 - DNA, 19 bp, Homo sapiens
  siRNA target sequence for PSMD11 (NM_002815.2,277-295).
catcagcaaggctaaagca

SEQ ID NO: 323374 - DNA, 19 bp, Homo sapiens
  siRNA target sequence for PSMD11 (NM_002815.2,431-449).
gcaagactggtgtctttgt

SEQ ID NO: 323375 - DNA, 19 bp, Homo sapiens
  siRNA target sequence for PSMD11 (NM_002815.2,440-458).
gtgtctttgtactttgata

SEQ ID NO: 323376 - DNA, 19 bp, Homo sapiens
  siRNA target sequence for PSMD11 (NM_002815.2,720-738).
ctgcgtactcatacttcta

SEQ ID NO: 323377 - DNA, 19 bp, Homo sapiens
  siRNA target sequence for PSMD11 (NM_002815.2,786-804).
catctctgaagtacatgtt

SEQ ID NO: 323378 - DNA, 19 bp, Homo sapiens
  siRNA target sequence for PSMD11 (NM_002815.2,885-903).
ggcagacagaagcattaaa

SEQ ID NO: 323379 - DNA, 19 bp, Homo sapiens
  siRNA target sequence for PSMD11 (NM_002815.2,980-998).
cgggatgacccaatcatca

SEQ ID NO: 323380 - DNA, 19 bp, Homo sapiens
  siRNA target sequence for PSMD11 (NM_002815.2,1002-1020).
cacacttggccaagttgta

SEQ ID NO: 323381 - DNA, 19 bp, Homo sapiens
  siRNA target sequence for PSMD11 (NM_002815.2,1015-1033).
gttgtatgataacttacta

SEQ ID NO: 323382 - DNA, 19 bp, Homo sapiens
  siRNA target sequence for PSMD11 (NM_002815.2,1039-1057).
gaatctgatccgagtcatt

SEQ ID NO: 323383 - DNA, 19 bp, Homo sapiens
  siRNA target sequence for PSMD11 (NM_002815.2,1049-1067).
cgagtcattgagccttttt

SEQ ID NO: 323384 - DNA, 19 bp, Homo sapiens
  siRNA target sequence for PSMD11 (NM_002815.2,1052-1070).
gtcattgagcctttttcca

SEQ ID NO: 323385 - DNA, 19 bp, Homo sapiens
  siRNA target sequence for PSMD11 (NM_002815.2,1068-1086).
ccagagtacagattgaaca

SEQ ID NO: 323386 - DNA, 19 bp, Homo sapiens
  siRNA target sequence for PSMD11 (NM_002815.2,1073-1091).
gtacagattgaacacatat

SEQ ID NO: 323387 - DNA, 19 bp, Homo sapiens
  siRNA target sequence for PSMD11 (NM_002815.2,1076-1094).
cagattgaacacatatcta

SEQ ID NO: 323388 - DNA, 19 bp, Homo sapiens
  siRNA target sequence for PSMD11 (NM_002815.2,1087-1105).
catatctagtctcatcaaa

SEQ ID NO: 323389 - DNA, 19 bp, Homo sapiens
  siRNA target sequence for PSMD11 (NM_002815.2,1114-1132).
ggccgacgtggaaaggaaa

SEQ ID NO: 323390 - DNA, 19 bp, Homo sapiens
  siRNA target sequence for PSMD11 (NM_002815.2,1115-1133).
gccgacgtggaaaggaaat

SEQ ID NO: 323391 - DNA, 19 bp, Homo sapiens
  siRNA target sequence for PSMD11 (NM_002815.2,1116-1134).
ccgacgtggaaaggaaatt

SEQ ID NO: 323392 - DNA, 19 bp, Homo sapiens
  siRNA target sequence for PSMD11 (NM_002815.2,1117-1135).
cgacgtggaaaggaaatta

SEQ ID NO: 323393 - DNA, 19 bp, Homo sapiens
  siRNA target sequence for PSMD11 (NM_002815.2,1182-1200).
gggagggtgtcctgattat

SEQ ID NO: 323394 - DNA, 19 bp, Homo sapiens
  siRNA target sequence for PSMD11 (NM_002815.2,1183-1201).
ggagggtgtcctgattatt

SEQ ID NO: 323395 - DNA, 19 bp, Homo sapiens
  siRNA target sequence for PSMD11 (NM_002815.2,1184-1202).
gagggtgtcctgattattt

SEQ ID NO: 323396 - DNA, 19 bp, Homo sapiens
  siRNA target sequence for PSMD11 (NM_002815.2,1208-1226).
gaacccccagtagataaaa

SEQ ID NO: 323397 - DNA, 19 bp, Homo sapiens
  siRNA target sequence for PSMD11 (NM_002815.2,1273-1291).
ggattccctctacaacaaa

SEQ ID NO: 323398 - DNA, 19 bp, Homo sapiens
  siRNA target sequence for PSMD13 (NM_002817.2,186-204).
cacttcaggtgcttgattt

SEQ ID NO: 323399 - DNA, 19 bp, Homo sapiens
  siRNA target sequence for PSMD13 (NM_002817.2,233-251).
gatggtctcattaagcttt

SEQ ID NO: 323400 - DNA, 19 bp, Homo sapiens
  siRNA target sequence for PSMD13 (NM_002817.2,237-255).
gtctcattaagctttatga

SEQ ID NO: 323401 - DNA, 19 bp, Homo sapiens
  siRNA target sequence for PSMD13 (NM_002817.2,295-313).
gtccctcgtggaaatcatt

SEQ ID NO: 323402 - DNA, 19 bp, Homo sapiens
  siRNA target sequence for PSMD13 (NM_002817.2,298-316).
cctcgtggaaatcattctt

SEQ ID NO: 323403 - DNA, 19 bp, Homo sapiens
  siRNA target sequence for PSMD13 (NM_002817.2,327-345).
gacagatgactgatcctaa

SEQ ID NO: 323404 - DNA, 19 bp, Homo sapiens
  siRNA target sequence for PSMD13 (NM_002817.2,341-359).
cctaatgtggctcttactt

SEQ ID NO: 323405 - DNA, 19 bp, Homo sapiens
  siRNA target sequence for PSMD13 (NM_002817.2,374-392).
cgtgagaaggtgaaaagta

SEQ ID NO: 323406 - DNA, 19 bp, Homo sapiens
  siRNA target sequence for PSMD13 (NM_002817.2,400-418).
ggcagtgatcctgtgtaaa

SEQ ID NO: 323407 - DNA, 19 bp, Homo sapiens
  siRNA target sequence for PSMD13 (NM_002817.2,423-441).
caattggagctctaaaatt

SEQ ID NO: 323408 - DNA, 19 bp, Homo sapiens
  siRNA target sequence for PSMD13 (NM_002817.2,522-540).
cggttcacagtcgtttcta

SEQ ID NO: 323409 - DNA, 19 bp, Homo sapiens
  siRNA target sequence for PSMD13 (NM_002817.2,580-598).
cgcgtcctactacaaagat

SEQ ID NO: 323410 - DNA, 19 bp, Homo sapiens
  siRNA target sequence for PSMD13 (NM_002817.2,689-707).
ctcggcgagggagttttta

SEQ ID NO: 323411 - DNA, 19 bp, Homo sapiens
  siRNA target sequence for PSMD13 (NM_002817.2,838-856).
gggccagcagcctgattta

SEQ ID NO: 323412 - DNA, 19 bp, Homo sapiens
  siRNA target sequence for PSMD13 (NM_002817.2,847-865).
gcctgatttagcagctaat

SEQ ID NO: 323413 - DNA, 19 bp, Homo sapiens
  siRNA target sequence for PSMD13 (NM_002817.2,1027-1045).
gctggtgaaaggcagtata

SEQ ID NO: 323414 - DNA, 19 bp, Homo sapiens
  siRNA target sequence for PSMD13 (NM_002817.2,1086-1104).
cccgagtgttggatttgca

SEQ ID NO: 323415 - DNA, 19 bp, Homo sapiens
  siRNA target sequence for PSMD13 (NM_002817.2,1087-1105).
ccgagtgttggatttgcaa

SEQ ID NO: 323416 - DNA, 19 bp, Homo sapiens
  siRNA target sequence for PSMD3 (NM_002809.2,519-537).
ggcttcttcacttcaaata

SEQ ID NO: 323417 - DNA, 19 bp, Homo sapiens
  siRNA target sequence for PSMD3 (NM_002809.2,520-538).
gcttcttcacttcaaataa

SEQ ID NO: 323418 - DNA, 19 bp, Homo sapiens
  siRNA target sequence for PSMD3 (NM_002809.2,541-559).
ccactcgagactttttgct

SEQ ID NO: 323419 - DNA, 19 bp, Homo sapiens
  siRNA target sequence for PSMD3 (NM_002809.2,692-710).
gaacagcaagcgctacaaa

SEQ ID NO: 323420 - DNA, 19 bp, Homo sapiens
  siRNA target sequence for PSMD3 (NM_002809.2,776-794).
ccttgtagccgcaaagtgt

SEQ ID NO: 323421 - DNA, 19 bp, Homo sapiens
  siRNA target sequence for PSMD3 (NM_002809.2,780-798).
gtagccgcaaagtgttact

SEQ ID NO: 323422 - DNA, 19 bp, Homo sapiens
  siRNA target sequence for PSMD3 (NM_002809.2,783-801).
gccgcaaagtgttactatt

SEQ ID NO: 323423 - DNA, 19 bp, Homo sapiens
  siRNA target sequence for PSMD3 (NM_002809.2,784-802).
ccgcaaagtgttactatta

SEQ ID NO: 323424 - DNA, 19 bp, Homo sapiens
  siRNA target sequence for PSMD3 (NM_002809.2,901-919).
ggcaggccaccctgttgaa

SEQ ID NO: 323425 - DNA, 19 bp, Homo sapiens
  siRNA target sequence for PSMD3 (NM_002809.2,999-1017).
caggccaacaacaatgagt

SEQ ID NO: 323426 - DNA, 19 bp, Homo sapiens
  siRNA target sequence for PSMD3 (NM_002809.2,1018-1036).
gggccaggtacctctacta

SEQ ID NO: 323427 - DNA, 19 bp, Homo sapiens
  siRNA target sequence for PSMD3 (NM_002809.2,1020-1038).
gccaggtacctctactaca

SEQ ID NO: 323428 - DNA, 19 bp, Homo sapiens
  siRNA target sequence for PSMD3 (NM_002809.2,1034-1052).
ctacacagggcgaatcaaa

SEQ ID NO: 323429 - DNA, 19 bp, Homo sapiens
  siRNA target sequence for PSMD3 (NM_002809.2,1121-1139).
cacagctgtcggcttcaaa

SEQ ID NO: 323430 - DNA, 19 bp, Homo sapiens
  siRNA target sequence for PSMD3 (NM_002809.2,1144-1162).
cggtgcacaagcttctcat

SEQ ID NO: 323431 - DNA, 19 bp, Homo sapiens
  siRNA target sequence for PSMD3 (NM_002809.2,1228-1246).
gctcactcatgccctattt

SEQ ID NO: 323432 - DNA, 19 bp, Homo sapiens
  siRNA target sequence for PSMD3 (NM_002809.2,1231-1249).
cactcatgccctatttcct

SEQ ID NO: 323433 - DNA, 19 bp, Homo sapiens
  siRNA target sequence for PSMD3 (NM_002809.2,1292-1310).
ccaggtcctggatcagttt

SEQ ID NO: 323434 - DNA, 19 bp, Homo sapiens
  siRNA target sequence for PSMD3 (NM_002809.2,1332-1350).
gggacctacaccctaatta

SEQ ID NO: 323435 - DNA, 19 bp, Homo sapiens
  siRNA target sequence for PSMD3 (NM_002809.2,1333-1351).
ggacctacaccctaattat

SEQ ID NO: 323436 - DNA, 19 bp, Homo sapiens
  siRNA target sequence for PSMD3 (NM_002809.2,1356-1374).
ctgcggcacaacgtgatta

SEQ ID NO: 323437 - DNA, 19 bp, Homo sapiens
  siRNA target sequence for PSMD3 (NM_002809.2,1359-1377).
cggcacaacgtgattaaga

SEQ ID NO: 323438 - DNA, 19 bp, Homo sapiens
  siRNA target sequence for PSMD3 (NM_002809.2,1361-1379).
gcacaacgtgattaagaca

SEQ ID NO: 323439 - DNA, 19 bp, Homo sapiens
  siRNA target sequence for PSMD3 (NM_002809.2,1548-1566).
gagatgattgacatctatt

SEQ ID NO: 323440 - DNA, 19 bp, Homo sapiens
  siRNA target sequence for PSMD3 (NM_002809.2,1606-1624).
ccttctgcctagatatcca

SEQ ID NO: 323441 - DNA, 19 bp, Homo sapiens
  siRNA target sequence for PSMD3 (NM_002809.2,1614-1632).
ctagatatccacaacatgt

SEQ ID NO: 323442 - DNA, 19 bp, Homo sapiens
  siRNA target sequence for PSMD3 (NM_002809.2,1653-1671).
cctcccaaatcgtacaaca

SEQ ID NO: 323443 - DNA, 19 bp, Homo sapiens
  siRNA target sequence for PSMD3 (NM_002809.2,1654-1672).
ctcccaaatcgtacaacaa

SEQ ID NO: 323444 - DNA, 19 bp, Homo sapiens
  siRNA target sequence for PSMD4 (NM_002810.1,157-175).
ctgtcaacatagtttgtca

SEQ ID NO: 323445 - DNA, 19 bp, Homo sapiens
  siRNA target sequence for PSMD4 (NM_002810.1,159-177).
gtcaacatagtttgtcatt

SEQ ID NO: 323446 - DNA, 19 bp, Homo sapiens
  siRNA target sequence for PSMD4 (NM_002810.1,203-221).
caacgtgggccttatcaca

SEQ ID NO: 323447 - DNA, 19 bp, Homo sapiens
  siRNA target sequence for PSMD4 (NM_002810.1,275-293).
cctgtccaagctacatact

SEQ ID NO: 323448 - DNA, 19 bp, Homo sapiens
  siRNA target sequence for PSMD4 (NM_002810.1,360-378).
cgacaaggcaagaatcaca

SEQ ID NO: 323449 - DNA, 19 bp, Homo sapiens
  siRNA target sequence for PSMD4 (NM_002810.1,536-554).
cacgttgaatggcaaagat

SEQ ID NO: 323450 - DNA, 19 bp, Homo sapiens
  siRNA target sequence for PSMD4 (NM_002810.1,660-678).
ggtgccagtgactttgaat

SEQ ID NO: 323451 - DNA, 19 bp, Homo sapiens
  siRNA target sequence for PSMD4 (NM_002810.1,661-679).
gtgccagtgactttgaatt

SEQ ID NO: 323452 - DNA, 19 bp, Homo sapiens
  siRNA target sequence for PSMD4 (NM_002810.1,713-731).
cttggcccttcgtgtatct

SEQ ID NO: 323453 - DNA, 19 bp, Homo sapiens
  siRNA target sequence for PSMD4 (NM_002810.1,719-737).
ccttcgtgtatctatggaa

SEQ ID NO: 323454 - DNA, 19 bp, Homo sapiens
  siRNA target sequence for PSMD4 (NM_002810.1,888-906).
cctgacctaagcagtatga

SEQ ID NO: 323455 - DNA, 19 bp, Homo sapiens
  siRNA target sequence for PSMD4 (NM_002810.1,968-986).
ggcggaatcagcagacatt

SEQ ID NO: 323456 - DNA, 19 bp, Homo sapiens
  siRNA target sequence for PSMD4 (NM_002810.1,1110-1128).
gaagccattcgaaatgcta

SEQ ID NO: 323457 - DNA, 19 bp, Homo sapiens
  siRNA target sequence for PSMD5 (NM_005047.2,201-219).
ctactttgtgtgtatccat

SEQ ID NO: 323458 - DNA, 19 bp, Homo sapiens
  siRNA target sequence for PSMD5 (NM_005047.2,293-311).
ctaattcaccctgatgatt

SEQ ID NO: 323459 - DNA, 19 bp, Homo sapiens
  siRNA target sequence for PSMD5 (NM_005047.2,368-386).
gttactgagattctaaata

SEQ ID NO: 323460 - DNA, 19 bp, Homo sapiens
  siRNA target sequence for PSMD5 (NM_005047.2,443-461).
gcaaaagcggctatcaaat

SEQ ID NO: 323461 - DNA, 19 bp, Homo sapiens
  siRNA target sequence for PSMD5 (NM_005047.2,462-480).
ccctgtcaagaatatcact

SEQ ID NO: 323462 - DNA, 19 bp, Homo sapiens
  siRNA target sequence for PSMD5 (NM_005047.2,549-567).
caaatgacattgttcgata

SEQ ID NO: 323463 - DNA, 19 bp, Homo sapiens
  siRNA target sequence for PSMD5 (NM_005047.2,568-586).
cagggtgtatgagctaatt

SEQ ID NO: 323464 - DNA, 19 bp, Homo sapiens
  siRNA target sequence for PSMD5 (NM_005047.2,600-618).
ccgtgtcaccagaatcttt

SEQ ID NO: 323465 - DNA, 19 bp, Homo sapiens
  siRNA target sequence for PSMD5 (NM_005047.2,601-619).
cgtgtcaccagaatcttta

SEQ ID NO: 323466 - DNA, 19 bp, Homo sapiens
  siRNA target sequence for PSMD5 (NM_005047.2,729-747).
ctcatcatgggcgacaata

SEQ ID NO: 323467 - DNA, 19 bp, Homo sapiens
  siRNA target sequence for PSMD5 (NM_005047.2,761-779).
ggagtaattgaccaaattt

SEQ ID NO: 323468 - DNA, 19 bp, Homo sapiens
  siRNA target sequence for PSMD5 (NM_005047.2,770-788).
gaccaaatttctaatataa

SEQ ID NO: 323469 - DNA, 19 bp, Homo sapiens
  siRNA target sequence for PSMD5 (NM_005047.2,808-826).
ccctttctctagcttctat

SEQ ID NO: 323470 - DNA, 19 bp, Homo sapiens
  siRNA target sequence for PSMD5 (NM_005047.2,883-901).
gatctgtgagcgttatcct

SEQ ID NO: 323471 - DNA, 19 bp, Homo sapiens
  siRNA target sequence for PSMD5 (NM_005047.2,936-954).
gtcaggaccccactatgat

SEQ ID NO: 323472 - DNA, 19 bp, Homo sapiens
  siRNA target sequence for PSMD5 (NM_005047.2,1031-1049).
cgctttgaacgcttgctta

SEQ ID NO: 323473 - DNA, 19 bp, Homo sapiens
  siRNA target sequence for PSMD5 (NM_005047.2,1037-1055).
gaacgcttgcttatgagaa

SEQ ID NO: 323474 - DNA, 19 bp, Homo sapiens
  siRNA target sequence for PSMD5 (NM_005047.2,1042-1060).
cttgcttatgagaatagga

SEQ ID NO: 323475 - DNA, 19 bp, Homo sapiens
  siRNA target sequence for PSMD5 (NM_005047.2,1053-1071).
gaataggacatcaatcaaa

SEQ ID NO: 323476 - DNA, 19 bp, Homo sapiens
  siRNA target sequence for PSMD5 (NM_005047.2,1079-1097).
ccagtggagctaaaaatta

SEQ ID NO: 323477 - DNA, 19 bp, Homo sapiens
  siRNA target sequence for PSMD5 (NM_005047.2,1105-1123).
ggatgcaatttcatctctt

SEQ ID NO: 323478 - DNA, 19 bp, Homo sapiens
  siRNA target sequence for PSMD5 (NM_005047.2,1210-1228).
gctcttccgtggcattagt

SEQ ID NO: 323479 - DNA, 19 bp, Homo sapiens
  siRNA target sequence for PSMD5 (NM_005047.2,1213-1231).
cttccgtggcattagtagt

SEQ ID NO: 323480 - DNA, 19 bp, Homo sapiens
  siRNA target sequence for PSMD5 (NM_005047.2,1254-1272).
gtgctgccttaaaagtgtt

SEQ ID NO: 323481 - DNA, 19 bp, Homo sapiens
  siRNA target sequence for PSMD5 (NM_005047.2,1268-1286).
gtgtttacggccattgcaa

SEQ ID NO: 323482 - DNA, 19 bp, Homo sapiens
  siRNA target sequence for PSMD5 (NM_005047.2,1292-1310).
ccctgggctcagaaactta

SEQ ID NO: 323483 - DNA, 19 bp, Homo sapiens
  siRNA target sequence for PSMD5 (NM_005047.2,1297-1315).
ggctcagaaacttatgttt

SEQ ID NO: 323484 - DNA, 19 bp, Homo sapiens
  siRNA target sequence for PSMD5 (NM_005047.2,1298-1316).
gctcagaaacttatgttta

SEQ ID NO: 323485 - DNA, 19 bp, Homo sapiens
  siRNA target sequence for PSMD5 (NM_005047.2,1312-1330).
gtttaacagtccaggtttt

SEQ ID NO: 323486 - DNA, 19 bp, Homo sapiens
  siRNA target sequence for PSMD5 (NM_005047.2,1320-1338).
gtccaggttttgtagaata

SEQ ID NO: 323487 - DNA, 19 bp, Homo sapiens
  siRNA target sequence for PSMD5 (NM_005047.2,1378-1396).
ggatgccaaatatgaacta

SEQ ID NO: 323488 - DNA, 19 bp, Homo sapiens
  siRNA target sequence for PSMD5 (NM_005047.2,1384-1402).
caaatatgaactagtgaaa

SEQ ID NO: 323489 - DNA, 19 bp, Homo sapiens
  siRNA target sequence for PSMD5 (NM_005047.2,1474-1492).
gagtgaagggccatactat

SEQ ID NO: 323490 - DNA, 19 bp, Homo sapiens
  siRNA target sequence for PSMD5 (NM_005047.2,1476-1494).
gtgaagggccatactatgt

SEQ ID NO: 323491 - DNA, 19 bp, Homo sapiens
  siRNA target sequence for PSMD5 (NM_005047.2,1478-1496).
gaagggccatactatgtga

SEQ ID NO: 323492 - DNA, 19 bp, Homo sapiens
  siRNA target sequence for SART1 (NM_005146.3,143-161).
cggcaccgggaacacaaaa

SEQ ID NO: 323493 - DNA, 19 bp, Homo sapiens
  siRNA target sequence for SART1 (NM_005146.3,408-426).
gcatcgaggagactaacaa

SEQ ID NO: 323494 - DNA, 19 bp, Homo sapiens
  siRNA target sequence for SART1 (NM_005146.3,448-466).
gaaacccttggaggttaat

SEQ ID NO: 323495 - DNA, 19 bp, Homo sapiens
  siRNA target sequence for SART1 (NM_005146.3,857-875).
ggggagacaatgattctta

SEQ ID NO: 323496 - DNA, 19 bp, Homo sapiens
  siRNA target sequence for SART1 (NM_005146.3,1021-1039).
cgacctggcgcagcaaaaa

SEQ ID NO: 323497 - DNA, 19 bp, Homo sapiens
  siRNA target sequence for SART1 (NM_005146.3,1940-1958).
gaggaaccgatcgtgaata

SEQ ID NO: 323498 - DNA, 19 bp, Homo sapiens
  siRNA target sequence for SART1 (NM_005146.3,2160-2178).
gctacaaacccgacgttaa

SEQ ID NO: 323499 - DNA, 19 bp, Homo sapiens
  siRNA target sequence for SART1 (NM_005146.3,2168-2186).
cccgacgttaagatcgaat

SEQ ID NO: 323500 - DNA, 19 bp, Homo sapiens
  siRNA target sequence for SART1 (NM_005146.3,2169-2187).
ccgacgttaagatcgaata

SEQ ID NO: 323501 - DNA, 19 bp, Homo sapiens
  siRNA target sequence for TGOLN2 (NM_006464.1,835-853).
cccggaaagaccattccaa

SEQ ID NO: 323502 - DNA, 19 bp, Homo sapiens
  siRNA target sequence for TGOLN2 (NM_006464.1,984-1002).
ccgcaggaggaagttaagt

SEQ ID NO: 323503 - DNA, 19 bp, Homo sapiens
  siRNA target sequence for TGOLN2 (NM_006464.1,986-1004).
gcaggaggaagttaagtct

SEQ ID NO: 323504 - DNA, 19 bp, Homo sapiens
  siRNA target sequence for TGOLN2 (NM_006464.1,1067-1085).
gggctcaccgcccaaagaa

SEQ ID NO: 323505 - DNA, 19 bp, Homo sapiens
  siRNA target sequence for TGOLN2 (NM_006464.1,1156-1174).
gcgagaaggatgaccttta

SEQ ID NO: 323506 - DNA, 19 bp, Homo sapiens
  siRNA target sequence for TGOLN2 (NM_006464.1,1207-1225).
gcagccacttctttgcata

SEQ ID NO: 323507 - DNA, 19 bp, Homo sapiens
  siRNA target sequence for TGOLN2 (NM_006464.1,1342-1360).
ccagtgactaccaacgttt

SEQ ID NO: 323508 - DNA, 19 bp, Homo sapiens
  siRNA target sequence for GOLPH4 (NM_014498.2,660-678).
gtcgtgttcggctttctct

SEQ ID NO: 323509 - DNA, 19 bp, Homo sapiens
  siRNA target sequence for GOLPH4 (NM_014498.2,763-781).
ccctctccgcccagttaca

SEQ ID NO: 323510 - DNA, 19 bp, Homo sapiens
  siRNA target sequence for GOLPH4 (NM_014498.2,767-785).
ctccgcccagttacaagtt

SEQ ID NO: 323511 - DNA, 19 bp, Homo sapiens
  siRNA target sequence for GOLPH4 (NM_014498.2,769-787).
ccgcccagttacaagttgt

SEQ ID NO: 323512 - DNA, 19 bp, Homo sapiens
  siRNA target sequence for GOLPH4 (NM_014498.2,818-836).
cttgcaaaaagaaagactt

SEQ ID NO: 323513 - DNA, 19 bp, Homo sapiens
  siRNA target sequence for GOLPH4 (NM_014498.2,942-960).
gtccaacatcagatgttga

SEQ ID NO: 323514 - DNA, 19 bp, Homo sapiens
  siRNA target sequence for GOLPH4 (NM_014498.2,964-982).
gccaacacgaggagctaaa

SEQ ID NO: 323515 - DNA, 19 bp, Homo sapiens
  siRNA target sequence for GOLPH4 (NM_014498.2,966-984).
caacacgaggagctaaaga

SEQ ID NO: 323516 - DNA, 19 bp, Homo sapiens
  siRNA target sequence for GOLPH4 (NM_014498.2,1020-1038).
caaggggaagacttcagta

SEQ ID NO: 323517 - DNA, 19 bp, Homo sapiens
  siRNA target sequence for GOLPH4 (NM_014498.2,1113-1131).
gagactgtatacaatttga

SEQ ID NO: 323518 - DNA, 19 bp, Homo sapiens
  siRNA target sequence for GOLPH4 (NM_014498.2,1158-1176).
gcacaccaagacatacata

SEQ ID NO: 323519 - DNA, 19 bp, Homo sapiens
  siRNA target sequence for GOLPH4 (NM_014498.2,1191-1209).
gtcaagcaacagcataaga

SEQ ID NO: 323520 - DNA, 19 bp, Homo sapiens
  siRNA target sequence for GOLPH4 (NM_014498.2,1196-1214).
gcaacagcataagaattta

SEQ ID NO: 323521 - DNA, 19 bp, Homo sapiens
  siRNA target sequence for GOLPH4 (NM_014498.2,1220-1238).
cgagcatgaacaacttgta

SEQ ID NO: 323522 - DNA, 19 bp, Homo sapiens
  siRNA target sequence for GOLPH4 (NM_014498.2,1324-1342).
ggattccaagccttcgaaa

SEQ ID NO: 323523 - DNA, 19 bp, Homo sapiens
  siRNA target sequence for GOLPH4 (NM_014498.2,1325-1343).
gattccaagccttcgaaaa

SEQ ID NO: 323524 - DNA, 19 bp, Homo sapiens
  siRNA target sequence for GOLPH4 (NM_014498.2,1433-1451).
gcaggaggtgtctcgaaat

SEQ ID NO: 323525 - DNA, 19 bp, Homo sapiens
  siRNA target sequence for GOLPH4 (NM_014498.2,1436-1454).
ggaggtgtctcgaaataat

SEQ ID NO: 323526 - DNA, 19 bp, Homo sapiens
  siRNA target sequence for GOLPH4 (NM_014498.2,1439-1457).
ggtgtctcgaaataatgat

SEQ ID NO: 323527 - DNA, 19 bp, Homo sapiens
  siRNA target sequence for GOLPH4 (NM_014498.2,1489-1507).
gagcagaagacacaaaact

SEQ ID NO: 323528 - DNA, 19 bp, Homo sapiens
  siRNA target sequence for GOLPH4 (NM_014498.2,1549-1567).
cagagccaatccaacaaga

SEQ ID NO: 323529 - DNA, 19 bp, Homo sapiens
  siRNA target sequence for GOLPH4 (NM_014498.2,1646-1664).
ggtcgggcaagcagaacat

SEQ ID NO: 323530 - DNA, 19 bp, Homo sapiens
  siRNA target sequence for GOLPH4 (NM_014498.2,1785-1803).
gccaagccaatgatcaaat

SEQ ID NO: 323531 - DNA, 19 bp, Homo sapiens
  siRNA target sequence for GOLPH4 (NM_014498.2,1790-1808).
gccaatgatcaaattccaa

SEQ ID NO: 323532 - DNA, 19 bp, Homo sapiens
  siRNA target sequence for GOLPH4 (NM_014498.2,1910-1928).
gctgcaggggcacttacta

SEQ ID NO: 323533 - DNA, 19 bp, Homo sapiens
  siRNA target sequence for GOLPH4 (NM_014498.2,2029-2047).
ggcagcaagctcattatga

SEQ ID NO: 323534 - DNA, 19 bp, Homo sapiens
  siRNA target sequence for GOLPH4 (NM_014498.2,2149-2167).
gagatccaggtaatagaca

SEQ ID NO: 323535 - DNA, 19 bp, Homo sapiens
  siRNA target sequence for GOLPH4 (NM_014498.2,2223-2241).
gcagctgtagaagatataa

SEQ ID NO: 323536 - DNA, 19 bp, Homo sapiens
  siRNA target sequence for GOLPH4 (NM_014498.2,2244-2262).
ccagcagatgaccctaata

SEQ ID NO: 323537 - DNA, 19 bp, Homo sapiens
  siRNA target sequence for GOLPH4 (NM_014498.2,2245-2263).
cagcagatgaccctaataa

SEQ ID NO: 323538 - DNA, 19 bp, Homo sapiens
  siRNA target sequence for GOLPH4 (NM_014498.2,2291-2309).
cgagcaagtgagagaagaa

SEQ ID NO: 323539 - DNA, 19 bp, Homo sapiens
  siRNA target sequence for GOLPH4 (NM_014498.2,2405-2423).
ccagcaggaggacaatgtt

SEQ ID NO: 323540 - DNA, 19 bp, Homo sapiens
  siRNA target sequence for GOLPH4 (NM_014498.2,2489-2507).
ggaactggagcataatgct

SEQ ID NO: 323541 - DNA, 19 bp, Homo sapiens
  siRNA target sequence for GOLPH4 (NM_014498.2,2665-2683).
cacatcgaagagctgaaat

SEQ ID NO: 323542 - DNA, 19 bp, Homo sapiens
  siRNA target sequence for D4S234E (NM_014392.2,179-197).
gtgaagttggggaacaatt

SEQ ID NO: 323543 - DNA, 19 bp, Homo sapiens
  siRNA target sequence for D4S234E (NM_014392.2,259-277).
gacgcccctcgatgtcaat

SEQ ID NO: 323544 - DNA, 19 bp, Homo sapiens
  siRNA target sequence for D4S234E (NM_014392.2,261-279).
cgcccctcgatgtcaatca

SEQ ID NO: 323545 - DNA, 19 bp, Homo sapiens
  siRNA target sequence for D4S234E (NM_014392.2,401-419).
ggtgtcaccgagaggttta

SEQ ID NO: 323546 - DNA, 19 bp, Homo sapiens
  siRNA target sequence for D4S234E (NM_014392.2,402-420).
gtgtcaccgagaggtttaa

SEQ ID NO: 323547 - DNA, 19 bp, Homo sapiens
  siRNA target sequence for D4S234E (NM_014392.2,481-499).
ctacaaggtgtacaagtat

SEQ ID NO: 323548 - DNA, 19 bp, Homo sapiens
  siRNA target sequence for D4S234E (NM_014392.2,518-536).
gggttcgtcctcaagaaca

SEQ ID NO: 323549 - DNA, 19 bp, Homo sapiens
  siRNA target sequence for D4S234E (NM_014392.2,609-627).
cagtcataaaccactacaa

SEQ ID NO: 323550 - DNA, 19 bp, Homo sapiens
  siRNA target sequence for GOLPH2 (NM_016548.2,217-235).
gggcgtcgcagcatgaagt

SEQ ID NO: 323551 - DNA, 19 bp, Homo sapiens
  siRNA target sequence for GOLPH2 (NM_016548.2,277-295).
gtcttgggcttcaactact

SEQ ID NO: 323552 - DNA, 19 bp, Homo sapiens
  siRNA target sequence for GOLPH2 (NM_016548.2,429-447).
gcgggagcagcttgacaaa

SEQ ID NO: 323553 - DNA, 19 bp, Homo sapiens
  siRNA target sequence for GOLPH2 (NM_016548.2,607-625).
gatgtcctccagtttcaga

SEQ ID NO: 323554 - DNA, 19 bp, Homo sapiens
  siRNA target sequence for GOLPH2 (NM_016548.2,663-681).
cctgagccagtgcatcaat

SEQ ID NO: 323555 - DNA, 19 bp, Homo sapiens
  siRNA target sequence for GOLPH2 (NM_016548.2,707-725).
gtgaggagcgaatagaaga

SEQ ID NO: 323556 - DNA, 19 bp, Homo sapiens
  siRNA target sequence for GOLPH2 (NM_016548.2,914-932).
gttccgaagtggttttgga

SEQ ID NO: 323557 - DNA, 19 bp, Homo sapiens
  siRNA target sequence for GOLPH2 (NM_016548.2,1237-1255).
ggagaagatgactacaaca

SEQ ID NO: 323558 - DNA, 19 bp, Homo sapiens
  siRNA target sequence for GOLPH2 (NM_016548.2,1356-1374).
caccataaatttacttgat

SEQ ID NO: 323559 - DNA, 19 bp, Homo sapiens
  siRNA target sequence for GOLPH2 (NM_016548.2,1377-1395).
gcgtgaaaagcggaatcat

SEQ ID NO: 323560 - DNA, 19 bp, Homo sapiens
  siRNA target sequence for GOLPH2 (NM_016548.2,1378-1396).
cgtgaaaagcggaatcata

SEQ ID NO: 323561 - DNA, 19 bp, Homo sapiens
  siRNA target sequence for HMP19 (NM_015980.3,229-247).
cactcccttggaggttaat

SEQ ID NO: 323562 - DNA, 19 bp, Homo sapiens
  siRNA target sequence for HMP19 (NM_015980.3,231-249).
ctcccttggaggttaatca

SEQ ID NO: 323563 - DNA, 19 bp, Homo sapiens
  siRNA target sequence for HMP19 (NM_015980.3,264-282).
ctccagaaaaggtgattgt

SEQ ID NO: 323564 - DNA, 19 bp, Homo sapiens
  siRNA target sequence for HMP19 (NM_015980.3,283-301).
gaagacaagaacggaatat

SEQ ID NO: 323565 - DNA, 19 bp, Homo sapiens
  siRNA target sequence for HMP19 (NM_015980.3,337-355).
gccgaaaatcgctgaattt

SEQ ID NO: 323566 - DNA, 19 bp, Homo sapiens
  siRNA target sequence for MAPBPIP (NM_014017.1,212-230).
gctgccatagccagtaaca

SEQ ID NO: 323567 - DNA, 19 bp, Homo sapiens
  siRNA target sequence for MAPBPIP (NM_014017.1,213-231).
ctgccatagccagtaacat

SEQ ID NO: 323568 - DNA, 19 bp, Homo sapiens
  siRNA target sequence for MAPBPIP (NM_014017.1,215-233).
gccatagccagtaacatct

SEQ ID NO: 323569 - DNA, 19 bp, Homo sapiens
  siRNA target sequence for MAPBPIP (NM_014017.1,253-271).
cgggaaccaagcgtttaat

SEQ ID NO: 323570 - DNA, 19 bp, Homo sapiens
  siRNA target sequence for MAPBPIP (NM_014017.1,255-273).
ggaaccaagcgtttaatga

SEQ ID NO: 323571 - DNA, 19 bp, Homo sapiens
  siRNA target sequence for ZDHHC3 (NM_016598.1,231-249).
cccaccacttccgaaacat

SEQ ID NO: 323572 - DNA, 19 bp, Homo sapiens
  siRNA target sequence for ZDHHC3 (NM_016598.1,232-250).
ccaccacttccgaaacatt

SEQ ID NO: 323573 - DNA, 19 bp, Homo sapiens
  siRNA target sequence for ZDHHC3 (NM_016598.1,441-459).
gcatcatcaacggaattgt

SEQ ID NO: 323574 - DNA, 19 bp, Homo sapiens
  siRNA target sequence for ZDHHC3 (NM_016598.1,724-742).
gtacttcgtcctgtttaca

SEQ ID NO: 323575 - DNA, 19 bp, Homo sapiens
  siRNA target sequence for ZDHHC3 (NM_016598.1,731-749).
gtcctgtttacaatgtaca

SEQ ID NO: 323576 - DNA, 19 bp, Homo sapiens
  siRNA target sequence for ZDHHC3 (NM_016598.1,800-818).
cattgctttgaagaagatt

SEQ ID NO: 323577 - DNA, 19 bp, Homo sapiens
  siRNA target sequence for ZDHHC3 (NM_016598.1,858-876).
ctggaatctctcttcatga

SEQ ID NO: 323578 - DNA, 19 bp, Homo sapiens
  siRNA target sequence for ZDHHC3 (NM_016598.1,933-951).
ccacagtgattctccttat

SEQ ID NO: 323579 - DNA, 19 bp, Homo sapiens
  siRNA target sequence for ZDHHC3 (NM_016598.1,1029-1047).
cagatgagacgggaataga

SEQ ID NO: 323580 - DNA, 19 bp, Homo sapiens
  siRNA target sequence for ZDHHC3 (NM_016598.1,1173-1191).
cagacccgtaccagtatgt

SEQ ID NO: 323581 - DNA, 19 bp, Homo sapiens
  siRNA target sequence for CD63 (NM_001780.3,313-331).
caaggagaactattgtctt

SEQ ID NO: 323582 - DNA, 19 bp, Homo sapiens
  siRNA target sequence for CD63 (NM_001780.3,317-335).
gagaactattgtcttatga

SEQ ID NO: 323583 - DNA, 19 bp, Homo sapiens
  siRNA target sequence for CD63 (NM_001780.3,395-413).
ggctatgtgtttagagata

SEQ ID NO: 323584 - DNA, 19 bp, Homo sapiens
  siRNA target sequence for CD63 (NM_001780.3,396-414).
gctatgtgtttagagataa

SEQ ID NO: 323585 - DNA, 19 bp, Homo sapiens
  siRNA target sequence for CD63 (NM_001780.3,455-473).
gagaattacccgaaaaaca

SEQ ID NO: 323586 - DNA, 19 bp, Homo sapiens
  siRNA target sequence for CD63 (NM_001780.3,519-537).
gctgtggggctgctaacta

SEQ ID NO: 323587 - DNA, 19 bp, Homo sapiens
  siRNA target sequence for CD63 (NM_001780.3,527-545).
gctgctaactacacagatt

SEQ ID NO: 323588 - DNA, 19 bp, Homo sapiens
  siRNA target sequence for CD63 (NM_001780.3,608-626).
gtgggctgtgggattaatt

SEQ ID NO: 323589 - DNA, 19 bp, Homo sapiens
  siRNA target sequence for CD63 (NM_001780.3,611-629).
ggctgtgggattaatttca

SEQ ID NO: 323590 - DNA, 19 bp, Homo sapiens
  siRNA target sequence for CD63 (NM_001780.3,675-693).
gctggctgaggaaaaatgt

SEQ ID NO: 323591 - DNA, 19 bp, Homo sapiens
  siRNA target sequence for CD63 (NM_001780.3,734-752).
gaggttttgggaattgtct

SEQ ID NO: 323592 - DNA, 19 bp, Homo sapiens
  siRNA target sequence for CD63 (NM_001780.3,736-754).
ggttttgggaattgtcttt

SEQ ID NO: 323593 - DNA, 19 bp, Homo sapiens
  siRNA target sequence for CD63 (NM_001780.3,764-782).
ctcgtgaagagtatcagaa

SEQ ID NO: 323594 - DNA, 19 bp, Homo sapiens
  siRNA target sequence for LAMP2 (NM_002294.1,209-227).
gcggtcttatgcattggaa

SEQ ID NO: 323595 - DNA, 19 bp, Homo sapiens
  siRNA target sequence for LAMP2 (NM_002294.1,214-232).
cttatgcattggaacttaa

SEQ ID NO: 323596 - DNA, 19 bp, Homo sapiens
  siRNA target sequence for LAMP2 (NM_002294.1,219-237).
gcattggaacttaatttga

SEQ ID NO: 323597 - DNA, 19 bp, Homo sapiens
  siRNA target sequence for LAMP2 (NM_002294.1,252-270).
gccacttgcctttatgcaa

SEQ ID NO: 323598 - DNA, 19 bp, Homo sapiens
  siRNA target sequence for LAMP2 (NM_002294.1,253-271).
ccacttgcctttatgcaaa

SEQ ID NO: 323599 - DNA, 19 bp, Homo sapiens
  siRNA target sequence for LAMP2 (NM_002294.1,287-305).
cacagtacgctatgaaact

SEQ ID NO: 323600 - DNA, 19 bp, Homo sapiens
  siRNA target sequence for LAMP2 (NM_002294.1,291-309).
gtacgctatgaaactacaa

SEQ ID NO: 323601 - DNA, 19 bp, Homo sapiens
  siRNA target sequence for LAMP2 (NM_002294.1,294-312).
cgctatgaaactacaaata

SEQ ID NO: 323602 - DNA, 19 bp, Homo sapiens
  siRNA target sequence for LAMP2 (NM_002294.1,342-360).
catggcactgtgacatata

SEQ ID NO: 323603 - DNA, 19 bp, Homo sapiens
  siRNA target sequence for LAMP2 (NM_002294.1,347-365).
cactgtgacatataatgga

SEQ ID NO: 323604 - DNA, 19 bp, Homo sapiens
  siRNA target sequence for LAMP2 (NM_002294.1,386-404).
gaatggtcccaaaatagca

SEQ ID NO: 323605 - DNA, 19 bp, Homo sapiens
  siRNA target sequence for LAMP2 (NM_002294.1,451-469).
cagcatctacttattcaat

SEQ ID NO: 323606 - DNA, 19 bp, Homo sapiens
  siRNA target sequence for LAMP2 (NM_002294.1,466-484).
caattgacagcgtctcatt

SEQ ID NO: 323607 - DNA, 19 bp, Homo sapiens
  siRNA target sequence for LAMP2 (NM_002294.1,487-505).
cctacaacactggtgataa

SEQ ID NO: 323608 - DNA, 19 bp, Homo sapiens
  siRNA target sequence for LAMP2 (NM_002294.1,491-509).
caacactggtgataacaca

SEQ ID NO: 323609 - DNA, 19 bp, Homo sapiens
  siRNA target sequence for LAMP2 (NM_002294.1,496-514).
ctggtgataacacaacatt

SEQ ID NO: 323610 - DNA, 19 bp, Homo sapiens
  siRNA target sequence for LAMP2 (NM_002294.1,562-580).
ccatcagaattccattgaa

SEQ ID NO: 323611 - DNA, 19 bp, Homo sapiens
  siRNA target sequence for LAMP2 (NM_002294.1,584-602).
cctttttagatgcaatagt

SEQ ID NO: 323612 - DNA, 19 bp, Homo sapiens
  siRNA target sequence for LAMP2 (NM_002294.1,641-659).
ctgggatgttcttgtacaa

SEQ ID NO: 323613 - DNA, 19 bp, Homo sapiens
  siRNA target sequence for LAMP2 (NM_002294.1,676-694).
gcacagtgagcacaaatga

SEQ ID NO: 323614 - DNA, 19 bp, Homo sapiens
  siRNA target sequence for LAMP2 (NM_002294.1,750-768).
gtgccatctcctactacaa

SEQ ID NO: 323615 - DNA, 19 bp, Homo sapiens
  siRNA target sequence for LAMP2 (NM_002294.1,795-813).
gctggaacctattcagtta

SEQ ID NO: 323616 - DNA, 19 bp, Homo sapiens
  siRNA target sequence for LAMP2 (NM_002294.1,796-814).
ctggaacctattcagttaa

SEQ ID NO: 323617 - DNA, 19 bp, Homo sapiens
  siRNA target sequence for LAMP2 (NM_002294.1,872-890).
ggataaggttgcttcagtt

SEQ ID NO: 323618 - DNA, 19 bp, Homo sapiens
  siRNA target sequence for LAMP2 (NM_002294.1,873-891).
gataaggttgcttcagtta

SEQ ID NO: 323619 - DNA, 19 bp, Homo sapiens
  siRNA target sequence for LAMP2 (NM_002294.1,879-897).
gttgcttcagttattaaca

SEQ ID NO: 323620 - DNA, 19 bp, Homo sapiens
  siRNA target sequence for LAMP2 (NM_002294.1,896-914).
catcaaccccaatacaact

SEQ ID NO: 323621 - DNA, 19 bp, Homo sapiens
  siRNA target sequence for LAMP2 (NM_002294.1,945-963).
gctctacttagactcaata

SEQ ID NO: 323622 - DNA, 19 bp, Homo sapiens
  siRNA target sequence for LAMP2 (NM_002294.1,948-966).
ctacttagactcaatagca

SEQ ID NO: 323623 - DNA, 19 bp, Homo sapiens
  siRNA target sequence for LAMP2 (NM_002294.1,965-983).
cagcaccattaagtatcta

SEQ ID NO: 323624 - DNA, 19 bp, Homo sapiens
  siRNA target sequence for LAMP2 (NM_002294.1,967-985).
gcaccattaagtatctaga

SEQ ID NO: 323625 - DNA, 19 bp, Homo sapiens
  siRNA target sequence for LAMP2 (NM_002294.1,970-988).
ccattaagtatctagactt

SEQ ID NO: 323626 - DNA, 19 bp, Homo sapiens
  siRNA target sequence for LAMP2 (NM_002294.1,971-989).
cattaagtatctagacttt

SEQ ID NO: 323627 - DNA, 19 bp, Homo sapiens
  siRNA target sequence for LAMP2 (NM_002294.1,1008-1026).
gaaaaccgattttatctga

SEQ ID NO: 323628 - DNA, 19 bp, Homo sapiens
  siRNA target sequence for LAMP2 (NM_002294.1,1053-1071).
gttaatggctccgttttca

SEQ ID NO: 323629 - DNA, 19 bp, Homo sapiens
  siRNA target sequence for LAMP2 (NM_002294.1,1064-1082).
cgttttcagcattgcaaat

SEQ ID NO: 323630 - DNA, 19 bp, Homo sapiens
  siRNA target sequence for LAMP2 (NM_002294.1,1107-1125).
cccctgggaagttcttata

SEQ ID NO: 323631 - DNA, 19 bp, Homo sapiens
  siRNA target sequence for LAMP2 (NM_002294.1,1108-1126).
ccctgggaagttcttatat

SEQ ID NO: 323632 - DNA, 19 bp, Homo sapiens
  siRNA target sequence for LAMP2 (NM_002294.1,1152-1170).
gtgtctggagcatttcaga

SEQ ID NO: 323633 - DNA, 19 bp, Homo sapiens
  siRNA target sequence for LAMP2 (NM_002294.1,1158-1176).
ggagcatttcagataaata

SEQ ID NO: 323634 - DNA, 19 bp, Homo sapiens
  siRNA target sequence for LAMP2 (NM_002294.1,1169-1187).
gataaatacctttgatcta

SEQ ID NO: 323635 - DNA, 19 bp, Homo sapiens
  siRNA target sequence for LAMP2 (NM_002294.1,1243-1261).
gtgcagatgacgacaactt

SEQ ID NO: 323636 - DNA, 19 bp, Homo sapiens
  siRNA target sequence for LAMP2 (NM_002294.1,1292-1310).
ggcaggagtacttattcta

SEQ ID NO: 323637 - DNA, 19 bp, Homo sapiens
  siRNA target sequence for LAMP2 (NM_013995.1,1287-1305).
ggtctttcaggcttgatta

SEQ ID NO: 323638 - DNA, 19 bp, Homo sapiens
  siRNA target sequence for LAMP2 (NM_013995.1,1294-1312).
caggcttgattatcgttat

SEQ ID NO: 323639 - DNA, 19 bp, Homo sapiens
  siRNA target sequence for LAMP2 (NM_013995.1,1297-1315).
gcttgattatcgttatagt

SEQ ID NO: 323640 - DNA, 19 bp, Homo sapiens
  siRNA target sequence for CD68 (NM_001251.1,78-96).
gaatgactgtcctcacaaa

SEQ ID NO: 323641 - DNA, 19 bp, Homo sapiens
  siRNA target sequence for CD68 (NM_001251.1,82-100).
gactgtcctcacaaaaaat

SEQ ID NO: 323642 - DNA, 19 bp, Homo sapiens
  siRNA target sequence for CD68 (NM_001251.1,351-369).
caccactagtcatggaaat

SEQ ID NO: 323643 - DNA, 19 bp, Homo sapiens
  siRNA target sequence for CD68 (NM_001251.1,531-549).
ccaagcccagattcagatt

SEQ ID NO: 323644 - DNA, 19 bp, Homo sapiens
  siRNA target sequence for CD68 (NM_001251.1,544-562).
cagattcgagtcatgtaca

SEQ ID NO: 323645 - DNA, 19 bp, Homo sapiens
  siRNA target sequence for CD68 (NM_001251.1,587-605).
ggggcatctctgtactgaa

SEQ ID NO: 323646 - DNA, 19 bp, Homo sapiens
  siRNA target sequence for CD68 (NM_001251.1,780-798).
gacattctcggctcagaat

SEQ ID NO: 323647 - DNA, 19 bp, Homo sapiens
  siRNA target sequence for CD68 (NM_001251.1,826-844).
ctggggcagagcttcagtt

SEQ ID NO: 323648 - DNA, 19 bp, Homo sapiens
  siRNA target sequence for CD68 (NM_001251.1,848-866).
gcaactcgagcatcattct

SEQ ID NO: 323649 - DNA, 19 bp, Homo sapiens
  siRNA target sequence for CD68 (NM_001251.1,849-867).
caactcgagcatcattctt

SEQ ID NO: 323650 - DNA, 19 bp, Homo sapiens
  siRNA target sequence for CD68 (NM_001251.1,931-949).
ggggtctttgggcaaagtt

SEQ ID NO: 323651 - DNA, 19 bp, Homo sapiens
  siRNA target sequence for CD68 (NM_001251.1,932-950).
gggtctttgggcaaagttt

SEQ ID NO: 323652 - DNA, 19 bp, Homo sapiens
  siRNA target sequence for CD68 (NM_001251.1,1017-1035).
cgccctggtgcttattgct

SEQ ID NO: 323653 - DNA, 19 bp, Homo sapiens
  siRNA target sequence for LAMP1 (NM_005561.2,262-280).
gtcgtcagcagccatgttt

SEQ ID NO: 323654 - DNA, 19 bp, Homo sapiens
  siRNA target sequence for LAMP1 (NM_005561.2,330-348).
ctgccttctcagtgaacta

SEQ ID NO: 323655 - DNA, 19 bp, Homo sapiens
  siRNA target sequence for LAMP1 (NM_005561.2,449-467).
cccagtctcgtgattgctt

SEQ ID NO: 323656 - DNA, 19 bp, Homo sapiens
  siRNA target sequence for LAMP1 (NM_005561.2,451-469).
cagtctcgtgattgctttt

SEQ ID NO: 323657 - DNA, 19 bp, Homo sapiens
  siRNA target sequence for LAMP1 (NM_005561.2,529-547).
gctcatgagttttgtttat

SEQ ID NO: 323658 - DNA, 19 bp, Homo sapiens
  siRNA target sequence for LAMP1 (NM_005561.2,574-592).
caatgcgagctccaaagaa

SEQ ID NO: 323659 - DNA, 19 bp, Homo sapiens
  siRNA target sequence for LAMP1 (NM_005561.2,578-596).
gcgagctccaaagaaatca

SEQ ID NO: 323660 - DNA, 19 bp, Homo sapiens
  siRNA target sequence for LAMP1 (NM_005561.2,615-633).
ctgacatcagggcagatat

SEQ ID NO: 323661 - DNA, 19 bp, Homo sapiens
  siRNA target sequence for LAMP1 (NM_005561.2,663-681).
cccaggtccacatgaacaa

SEQ ID NO: 323662 - DNA, 19 bp, Homo sapiens
  siRNA target sequence for LAMP1 (NM_005561.2,834-852).
gcccctctgtggacaagta

SEQ ID NO: 323663 - DNA, 19 bp, Homo sapiens
  siRNA target sequence for LAMP1 (NM_005561.2,836-854).
ccctctgtggacaagtaca

SEQ ID NO: 323664 - DNA, 19 bp, Homo sapiens
  siRNA target sequence for LAMP1 (NM_005561.2,939-957).
cggtgacaaggcttctcaa

SEQ ID NO: 323665 - DNA, 19 bp, Homo sapiens
  siRNA target sequence for LAMP1 (NM_005561.2,1052-1070).
cagttcgggatgaatgcaa

SEQ ID NO: 323666 - DNA, 19 bp, Homo sapiens
  siRNA target sequence for LAMP1 (NM_005561.2,1068-1086).
caagttctagccggttttt

SEQ ID NO: 323667 - DNA, 19 bp, Homo sapiens
  siRNA target sequence for LAMP1 (NM_005561.2,1071-1089).
gttctagccggtttttcct

SEQ ID NO: 323668 - DNA, 19 bp, Homo sapiens
  siRNA target sequence for LAMP1 (NM_005561.2,1099-1117).
ccagttgaatacaattctt

SEQ ID NO: 323669 - DNA, 19 bp, Homo sapiens
  siRNA target sequence for LAMP1 (NM_005561.2,1176-1194).
ccacagtcggcaattccta

SEQ ID NO: 323670 - DNA, 19 bp, Homo sapiens
  siRNA target sequence for LAMP1 (NM_005561.2,1181-1199).
gtcggcaattcctacaagt

SEQ ID NO: 323671 - DNA, 19 bp, Homo sapiens
  siRNA target sequence for LAMP1 (NM_005561.2,1228-1246).
gaaggcgttttcagtcaat

SEQ ID NO: 323672 - DNA, 19 bp, Homo sapiens
  siRNA target sequence for LAMP1 (NM_005561.2,1231-1249).
ggcgttttcagtcaatata

SEQ ID NO: 323673 - DNA, 19 bp, Homo sapiens
  siRNA target sequence for LAMP1 (NM_005561.2,1232-1250).
gcgttttcagtcaatatat

SEQ ID NO: 323674 - DNA, 19 bp, Homo sapiens
  siRNA target sequence for LAMP1 (NM_005561.2,1421-1439).
gcaggctaccagactatct

SEQ ID NO: 323675 - DNA, 19 bp, Homo sapiens
  siRNA target sequence for LAPTM5 (NM_006762.1,149-167).
ccatctaccatgtgatcat

SEQ ID NO: 323676 - DNA, 19 bp, Homo sapiens
  siRNA target sequence for LAPTM5 (NM_006762.1,544-562).
gaagtgcccacctatctca

SEQ ID NO: 323677 - DNA, 19 bp, Homo sapiens
  siRNA target sequence for LAPTM5 (NM_006762.1,613-631).
cctcataaccagttcatca

SEQ ID NO: 323678 - DNA, 19 bp, Homo sapiens
  siRNA target sequence for LAPTM5 (NM_006762.1,614-632).
ctcataaccagttcatcaa

SEQ ID NO: 323679 - DNA, 19 bp, Homo sapiens
  siRNA target sequence for LAPTM5 (NM_006762.1,700-718).
gtgtggcggtgctacagat

SEQ ID NO: 323680 - DNA, 19 bp, Homo sapiens
  siRNA target sequence for LAPTM5 (NM_006762.1,706-724).
cggtgctacagattgatca

SEQ ID NO: 323681 - DNA, 19 bp, Homo sapiens
  siRNA target sequence for PEX14 (NM_004565.1,95-113).
cacggcagtgaagtttcta

SEQ ID NO: 323682 - DNA, 19 bp, Homo sapiens
  siRNA target sequence for PEX14 (NM_004565.1,97-115).
cggcagtgaagtttctaca

SEQ ID NO: 323683 - DNA, 19 bp, Homo sapiens
  siRNA target sequence for PEX14 (NM_004565.1,102-120).
gtgaagtttctacagaatt

SEQ ID NO: 323684 - DNA, 19 bp, Homo sapiens
  siRNA target sequence for PEX14 (NM_004565.1,275-293).
gccccctcacctcatatct

SEQ ID NO: 323685 - DNA, 19 bp, Homo sapiens
  siRNA target sequence for PEX14 (NM_004565.1,313-331).
gctcccgatggcgagatta

SEQ ID NO: 323686 - DNA, 19 bp, Homo sapiens
  siRNA target sequence for PXMP4 (NM_007238.3,164-182).
ctgcgttggccgtgcttaa

SEQ ID NO: 323687 - DNA, 19 bp, Homo sapiens
  siRNA target sequence for PXMP4 (NM_007238.3,189-207).
ccggaacggggctgtctat

SEQ ID NO: 323688 - DNA, 19 bp, Homo sapiens
  siRNA target sequence for PXMP4 (NM_007238.3,359-377).
ccctgcagtcctacataca

SEQ ID NO: 323689 - DNA, 19 bp, Homo sapiens
  siRNA target sequence for PXMP4 (NM_183397.1,255-273).
ccggaatggcagatcaaca

SEQ ID NO: 323690 - DNA, 19 bp, Homo sapiens
  siRNA target sequence for PXMP4 (NM_183397.1,256-274).
cggaatggcagatcaacat

SEQ ID NO: 323691 - DNA, 19 bp, Homo sapiens
  siRNA target sequence for PXMP2 (NM_018663.1,180-198).
gccaccagtggcattttgt

SEQ ID NO: 323692 - DNA, 19 bp, Homo sapiens
  siRNA target sequence for PXMP2 (NM_018663.1,240-258).
cggaaaaaagaaaactcta

SEQ ID NO: 323693 - DNA, 19 bp, Homo sapiens
  siRNA target sequence for PXMP2 (NM_018663.1,272-290).
cggtgggcctctgagatat

SEQ ID NO: 323694 - DNA, 19 bp, Homo sapiens
  siRNA target sequence for PXMP2 (NM_018663.1,291-309).
gccgtttacgggttcttct

SEQ ID NO: 323695 - DNA, 19 bp, Homo sapiens
  siRNA target sequence for PXMP2 (NM_018663.1,292-310).
ccgtttacgggttcttctt

SEQ ID NO: 323696 - DNA, 19 bp, Homo sapiens
  siRNA target sequence for PXMP2 (NM_018663.1,294-312).
gtttacgggttcttcttca

SEQ ID NO: 323697 - DNA, 19 bp, Homo sapiens
  siRNA target sequence for PXMP2 (NM_018663.1,321-339).
ctgagtcacttcttctact

SEQ ID NO: 323698 - DNA, 19 bp, Homo sapiens
  siRNA target sequence for PXMP2 (NM_018663.1,418-436).
caccggccttcctcatgtt

SEQ ID NO: 323699 - DNA, 19 bp, Homo sapiens
  siRNA target sequence for PXMP2 (NM_018663.1,541-559).
ggacgccactacagttcat

SEQ ID NO: 323700 - DNA, 19 bp, Homo sapiens
  siRNA target sequence for PXMP2 (NM_018663.1,544-562).
cgccactacagttcatcaa

SEQ ID NO: 323701 - DNA, 19 bp, Homo sapiens
  siRNA target sequence for PXMP2 (NM_018663.1,547-565).
cactacagttcatcaacat

SEQ ID NO: 323702 - DNA, 19 bp, Homo sapiens
  siRNA target sequence for PXMP2 (NM_018663.1,552-570).
cagttcatcaacatcaact

SEQ ID NO: 323703 - DNA, 19 bp, Homo sapiens
  siRNA target sequence for SRP72 (NM_006947.2,108-126).
gaccgtcaataagatacta

SEQ ID NO: 323704 - DNA, 19 bp, Homo sapiens
  siRNA target sequence for SRP72 (NM_006947.2,110-128).
ccgtcaataagatactaca

SEQ ID NO: 323705 - DNA, 19 bp, Homo sapiens
  siRNA target sequence for SRP72 (NM_006947.2,145-163).
gtaactgccctgcattgta

SEQ ID NO: 323706 - DNA, 19 bp, Homo sapiens
  siRNA target sequence for SRP72 (NM_006947.2,202-220).
gctttgaatgtcatcaata

SEQ ID NO: 323707 - DNA, 19 bp, Homo sapiens
  siRNA target sequence for SRP72 (NM_006947.2,227-245).
ccaaagtgttagccaataa

SEQ ID NO: 323708 - DNA, 19 bp, Homo sapiens
  siRNA target sequence for SRP72 (NM_006947.2,281-299).
ggctgaacagaattgagaa

SEQ ID NO: 323709 - DNA, 19 bp, Homo sapiens
  siRNA target sequence for SRP72 (NM_006947.2,372-390).
ccgtttggaacgctatgat

SEQ ID NO: 323710 - DNA, 19 bp, Homo sapiens
  siRNA target sequence for SRP72 (NM_006947.2,555-573).
cactgcatgtgcactgata

SEQ ID NO: 323711 - DNA, 19 bp, Homo sapiens
  siRNA target sequence for SRP72 (NM_006947.2,591-609).
ccaggccatgaaaatccta

SEQ ID NO: 323712 - DNA, 19 bp, Homo sapiens
  siRNA target sequence for SRP72 (NM_006947.2,697-715).
catggtcagatggcttata

SEQ ID NO: 323713 - DNA, 19 bp, Homo sapiens
  siRNA target sequence for SRP72 (NM_006947.2,742-760).
gaggctttgcaactttaca

SEQ ID NO: 323714 - DNA, 19 bp, Homo sapiens
  siRNA target sequence for SRP72 (NM_006947.2,744-762).
ggctttgcaactttacaat

SEQ ID NO: 323715 - DNA, 19 bp, Homo sapiens
  siRNA target sequence for SRP72 (NM_006947.2,792-810).
gggattactagctgtaatt

SEQ ID NO: 323716 - DNA, 19 bp, Homo sapiens
  siRNA target sequence for SRP72 (NM_006947.2,799-817).
ctagctgtaattgcaaata

SEQ ID NO: 323717 - DNA, 19 bp, Homo sapiens
  siRNA target sequence for SRP72 (NM_006947.2,811-829).
gcaaataacatcattacca

SEQ ID NO: 323718 - DNA, 19 bp, Homo sapiens
  siRNA target sequence for SRP72 (NM_006947.2,828-846).
cattaacaaggaccaaaat

SEQ ID NO: 323719 - DNA, 19 bp, Homo sapiens
  siRNA target sequence for SRP72 (NM_006947.2,883-901).
gcggaaggagtagagttta

SEQ ID NO: 323720 - DNA, 19 bp, Homo sapiens
  siRNA target sequence for SRP72 (NM_006947.2,884-902).
cggaaggagtagagtttaa

SEQ ID NO: 323721 - DNA, 19 bp, Homo sapiens
  siRNA target sequence for SRP72 (NM_006947.2,889-907).
ggagtagagtttaagcttt

SEQ ID NO: 323722 - DNA, 19 bp, Homo sapiens
  siRNA target sequence for SRP72 (NM_006947.2,897-915).
gtttaagctttccaagaaa

SEQ ID NO: 323723 - DNA, 19 bp, Homo sapiens
  siRNA target sequence for SRP72 (NM_006947.2,916-934).
caactacaagctatagaat

SEQ ID NO: 323724 - DNA, 19 bp, Homo sapiens
  siRNA target sequence for SRP72 (NM_006947.2,943-961).
gctttacttgctatgtaca

SEQ ID NO: 323725 - DNA, 19 bp, Homo sapiens
  siRNA target sequence for SRP72 (NM_006947.2,960-978).
cacaaaccaggctgaacaa

SEQ ID NO: 323726 - DNA, 19 bp, Homo sapiens
  siRNA target sequence for SRP72 (NM_006947.2,973-991).
gaacaatgccgcaaaatat

SEQ ID NO: 323727 - DNA, 19 bp, Homo sapiens
  siRNA target sequence for SRP72 (NM_006947.2,984-1002).
caaaatatctgccagttta

SEQ ID NO: 323728 - DNA, 19 bp, Homo sapiens
  siRNA target sequence for SRP72 (NM_006947.2,1020-1038).
gcatctcttacctgtgtta

SEQ ID NO: 323729 - DNA, 19 bp, Homo sapiens
  siRNA target sequence for SRP72 (NM_006947.2,1026-1044).
cttacctgtgttaatccaa

SEQ ID NO: 323730 - DNA, 19 bp, Homo sapiens
  siRNA target sequence for SRP72 (NM_006947.2,1149-1167).
ggcacagttgaaaatttct

SEQ ID NO: 323731 - DNA, 19 bp, Homo sapiens
  siRNA target sequence for SRP72 (NM_006947.2,1205-1223).
gcatagaggagttaaagca

SEQ ID NO: 323732 - DNA, 19 bp, Homo sapiens
  siRNA target sequence for SRP72 (NM_006947.2,1212-1230).
ggagttaaagcataaacca

SEQ ID NO: 323733 - DNA, 19 bp, Homo sapiens
  siRNA target sequence for SRP72 (NM_006947.2,1222-1240).
cataaaccaggcatggtat

SEQ ID NO: 323734 - DNA, 19 bp, Homo sapiens
  siRNA target sequence for SRP72 (NM_006947.2,1232-1250).
gcatggtatctgcattagt

SEQ ID NO: 323735 - DNA, 19 bp, Homo sapiens
  siRNA target sequence for SRP72 (NM_006947.2,1233-1251).
catggtatctgcattagtt

SEQ ID NO: 323736 - DNA, 19 bp, Homo sapiens
  siRNA target sequence for SRP72 (NM_006947.2,1243-1261).
gcattagttaccatgtata

SEQ ID NO: 323737 - DNA, 19 bp, Homo sapiens
  siRNA target sequence for SRP72 (NM_006947.2,1253-1271).
ccatgtatagccatgaaga

SEQ ID NO: 323738 - DNA, 19 bp, Homo sapiens
  siRNA target sequence for SRP72 (NM_006947.2,1398-1416).
gaagaaggaggcaattagt

SEQ ID NO: 323739 - DNA, 19 bp, Homo sapiens
  siRNA target sequence for SRP72 (NM_006947.2,1470-1488).
gcttatttctgcttactca

SEQ ID NO: 323740 - DNA, 19 bp, Homo sapiens
  siRNA target sequence for SRP72 (NM_006947.2,1525-1543).
cacttgccatcgtcagata

SEQ ID NO: 323741 - DNA, 19 bp, Homo sapiens
  siRNA target sequence for SRP72 (NM_006947.2,1527-1545).
cttgccatcgtcagatagt

SEQ ID NO: 323742 - DNA, 19 bp, Homo sapiens
  siRNA target sequence for SRP72 (NM_006947.2,1531-1549).
ccatcgtcagatagtatgt

SEQ ID NO: 323743 - DNA, 19 bp, Homo sapiens
  siRNA target sequence for SRP72 (NM_006947.2,1583-1601).
ctgctggtgctacatacat

SEQ ID NO: 323744 - DNA, 19 bp, Homo sapiens
  siRNA target sequence for SRP72 (NM_006947.2,1691-1709).
gaaaattgcctaagaatta

SEQ ID NO: 323745 - DNA, 19 bp, Homo sapiens
  siRNA target sequence for SRP72 (NM_006947.2,1748-1766).
caatgcgagaacgttctta

SEQ ID NO: 323746 - DNA, 19 bp, Homo sapiens
  siRNA target sequence for SRP72 (NM_006947.2,1763-1781).
cttactaccggggaagaaa

SEQ ID NO: 323747 - DNA, 19 bp, Homo sapiens
  siRNA target sequence for SRP72 (NM_006947.2,1897-1915).
ggcagtgctgcaacagtat

SEQ ID NO: 323748 - DNA, 19 bp, Homo sapiens
  siRNA target sequence for SRP72 (NM_006947.2,1963-1981).
ggggctccagcaacaaaaa

SEQ ID NO: 323749 - DNA, 19 bp, Homo sapiens
  siRNA target sequence for MGC4293 (NM_031304.2,985-1003).
ggtggctctggacatgtat

SEQ ID NO: 323750 - DNA, 19 bp, Homo sapiens
  siRNA target sequence for BRD7 (NM_013263.1,44-62).
cctctacgaggagtatgta

SEQ ID NO: 323751 - DNA, 19 bp, Homo sapiens
  siRNA target sequence for BRD7 (NM_013263.1,143-161).
cagcctcttcgaagacaaa

SEQ ID NO: 323752 - DNA, 19 bp, Homo sapiens
  siRNA target sequence for BRD7 (NM_013263.1,325-343).
gtcacgcccctgtgagatt

SEQ ID NO: 323753 - DNA, 19 bp, Homo sapiens
  siRNA target sequence for BRD7 (NM_013263.1,330-348).
gcccctgtgagattagact

SEQ ID NO: 323754 - DNA, 19 bp, Homo sapiens
  siRNA target sequence for BRD7 (NM_013263.1,362-380).
gcctctcacaagctcttta

SEQ ID NO: 323755 - DNA, 19 bp, Homo sapiens
  siRNA target sequence for BRD7 (NM_013263.1,525-543).
cacccaatggattttagta

SEQ ID NO: 323756 - DNA, 19 bp, Homo sapiens
  siRNA target sequence for BRD7 (NM_013263.1,597-615).
gataacttcaaactaatgt

SEQ ID NO: 323757 - DNA, 19 bp, Homo sapiens
  siRNA target sequence for BRD7 (NM_013263.1,614-632).
gtgtactaatgccatgatt

SEQ ID NO: 323758 - DNA, 19 bp, Homo sapiens
  siRNA target sequence for BRD7 (NM_013263.1,616-634).
gtactaatgccatgattta

SEQ ID NO: 323759 - DNA, 19 bp, Homo sapiens
  siRNA target sequence for BRD7 (NM_013263.1,677-695).
gttgcactcaggaatgaaa

SEQ ID NO: 323760 - DNA, 19 bp, Homo sapiens
  siRNA target sequence for BRD7 (NM_013263.1,723-741).
ctgaagcagagcatagact

SEQ ID NO: 323761 - DNA, 19 bp, Homo sapiens
  siRNA target sequence for BRD7 (NM_013263.1,746-764).
ggctgacttgcagaaaact

SEQ ID NO: 323762 - DNA, 19 bp, Homo sapiens
  siRNA target sequence for BRD7 (NM_013263.1,852-870).
gaagcacacgccttcaaga

SEQ ID NO: 323763 - DNA, 19 bp, Homo sapiens
  siRNA target sequence for BRD7 (NM_013263.1,893-911).
gaaagacaaagatatgctt

SEQ ID NO: 323764 - DNA, 19 bp, Homo sapiens
  siRNA target sequence for BRD7 (NM_013263.1,1352-1370).
ggccacgtgccaagattat

SEQ ID NO: 323765 - DNA, 19 bp, Homo sapiens
  siRNA target sequence for BRD7 (NM_013263.1,1423-1441).
ccaggaccctacaagagat

SEQ ID NO: 323766 - DNA, 19 bp, Homo sapiens
  siRNA target sequence for BRD7 (NM_013263.1,1478-1496).
gacacttgacacagcaaaa

SEQ ID NO: 323767 - DNA, 19 bp, Homo sapiens
  siRNA target sequence for BRD7 (NM_013263.1,1480-1498).
cacttgacacagcaaaaga

SEQ ID NO: 323768 - DNA, 19 bp, Homo sapiens
  siRNA target sequence for BRD7 (NM_013263.1,1567-1585).
cgctgaaagcagtaacaaa

SEQ ID NO: 323769 - DNA, 19 bp, Homo sapiens
  siRNA target sequence for BRD7 (NM_013263.1,1590-1608).
ggcgttccagttgaagttt

SEQ ID NO: 323770 - DNA, 19 bp, Homo sapiens
  siRNA target sequence for BRD7 (NM_013263.1,1596-1614).
ccagttgaagtttttgact

SEQ ID NO: 323771 - DNA, 19 bp, Homo sapiens
  siRNA target sequence for BRD7 (NM_013263.1,1708-1726).
gaccccctccgaacatgat

SEQ ID NO: 323772 - DNA, 19 bp, Homo sapiens
  siRNA target sequence for BRD7 (NM_013263.1,1710-1728).
ccccctccgaacatgatct

SEQ ID NO: 323773 - DNA, 19 bp, Homo sapiens
  siRNA target sequence for ICA1 (NM_004968.1,198-216).
gggacttacaggatcgata

SEQ ID NO: 323774 - DNA, 19 bp, Homo sapiens
  siRNA target sequence for ICA1 (NM_004968.1,199-217).
ggacttacaggatcgatat

SEQ ID NO: 323775 - DNA, 19 bp, Homo sapiens
  siRNA target sequence for ICA1 (NM_004968.1,202-220).
cttacaggatcgatatgct

SEQ ID NO: 323776 - DNA, 19 bp, Homo sapiens
  siRNA target sequence for ICA1 (NM_004968.1,208-226).
ggatcgatatgctcaagat

SEQ ID NO: 323777 - DNA, 19 bp, Homo sapiens
  siRNA target sequence for ICA1 (NM_004968.1,209-227).
gatcgatatgctcaagata

SEQ ID NO: 323778 - DNA, 19 bp, Homo sapiens
  siRNA target sequence for ICA1 (NM_004968.1,212-230).
cgatatgctcaagataagt

SEQ ID NO: 323779 - DNA, 19 bp, Homo sapiens
  siRNA target sequence for ICA1 (NM_004968.1,224-242).
gataagtcagttgtaaata

SEQ ID NO: 323780 - DNA, 19 bp, Homo sapiens
  siRNA target sequence for ICA1 (NM_004968.1,265-283).
gacgaagcaggcctttatt

SEQ ID NO: 323781 - DNA, 19 bp, Homo sapiens
  siRNA target sequence for ICA1 (NM_004968.1,267-285).
cgaagcaggcctttattaa

SEQ ID NO: 323782 - DNA, 19 bp, Homo sapiens
  siRNA target sequence for ICA1 (NM_004968.1,342-360).
ccaagctagagctgtttca

SEQ ID NO: 323783 - DNA, 19 bp, Homo sapiens
  siRNA target sequence for ICA1 (NM_004968.1,375-393).
cctgtctggacttatcgaa

SEQ ID NO: 323784 - DNA, 19 bp, Homo sapiens
  siRNA target sequence for ICA1 (NM_004968.1,380-398).
ctggacttatcgaaagcaa

SEQ ID NO: 323785 - DNA, 19 bp, Homo sapiens
  siRNA target sequence for ICA1 (NM_004968.1,382-400).
ggacttatcgaaagcaatt

SEQ ID NO: 323786 - DNA, 19 bp, Homo sapiens
  siRNA target sequence for ICA1 (NM_004968.1,385-403).
cttatcgaaagcaattgta

SEQ ID NO: 323787 - DNA, 19 bp, Homo sapiens
  siRNA target sequence for ICA1 (NM_004968.1,390-408).
cgaaagcaattgtactcta

SEQ ID NO: 323788 - DNA, 19 bp, Homo sapiens
  siRNA target sequence for ICA1 (NM_004968.1,391-409).
gaaagcaattgtactctat

SEQ ID NO: 323789 - DNA, 19 bp, Homo sapiens
  siRNA target sequence for ICA1 (NM_004968.1,404-422).
ctctatcaaaagaggatat

SEQ ID NO: 323790 - DNA, 19 bp, Homo sapiens
  siRNA target sequence for ICA1 (NM_004968.1,406-424).
ctatcaaaagaggatatgt

SEQ ID NO: 323791 - DNA, 19 bp, Homo sapiens
  siRNA target sequence for ICA1 (NM_004968.1,550-568).
gttggccttacgaaatcct

SEQ ID NO: 323792 - DNA, 19 bp, Homo sapiens
  siRNA target sequence for ICA1 (NM_004968.1,605-623).
catcgggccatctcagata

SEQ ID NO: 323793 - DNA, 19 bp, Homo sapiens
  siRNA target sequence for ICA1 (NM_004968.1,608-626).
cgggccatctcagatactt

SEQ ID NO: 323794 - DNA, 19 bp, Homo sapiens
  siRNA target sequence for ICA1 (NM_004968.1,650-668).
cagtgcaggacggaatata

SEQ ID NO: 323795 - DNA, 19 bp, Homo sapiens
  siRNA target sequence for ICA1 (NM_004968.1,669-687).
gaggagcactattatggat

SEQ ID NO: 323796 - DNA, 19 bp, Homo sapiens
  siRNA target sequence for ICA1 (NM_004968.1,714-732).
cagacctctacaagcaaat

SEQ ID NO: 323797 - DNA, 19 bp, Homo sapiens
  siRNA target sequence for ICA1 (NM_004968.1,758-776).
caagtgcgccttgcaaaaa

SEQ ID NO: 323798 - DNA, 19 bp, Homo sapiens
  siRNA target sequence for ICA1 (NM_004968.1,830-848).
gcgagcagatgcaatctct

SEQ ID NO: 323799 - DNA, 19 bp, Homo sapiens
  siRNA target sequence for ICA1 (NM_004968.1,831-849).
cgagcagatgcaatctctt

SEQ ID NO: 323800 - DNA, 19 bp, Homo sapiens
  siRNA target sequence for ICA1 (NM_004968.1,852-870).
ctcacatgctagcaacata

SEQ ID NO: 323801 - DNA, 19 bp, Homo sapiens
  siRNA target sequence for ICA1 (NM_022307.1,829-847).
gagtttcaaaggttatcaa

SEQ ID NO: 323802 - DNA, 19 bp, Homo sapiens
  siRNA target sequence for ICA1 (NM_022307.1,839-857).
ggttatcaaccatatgaat

SEQ ID NO: 323803 - DNA, 19 bp, Homo sapiens
  siRNA target sequence for ICA1 (NM_022307.1,840-858).
gttatcaaccatatgaatt

SEQ ID NO: 323804 - DNA, 19 bp, Homo sapiens
  siRNA target sequence for ICA1 (NM_022307.1,848-866).
ccatatgaatttactactt

SEQ ID NO: 323805 - DNA, 19 bp, Homo sapiens
  siRNA target sequence for ICA1 (NM_022307.1,955-973).
gcaggagccgagccaatta

SEQ ID NO: 323806 - DNA, 19 bp, Homo sapiens
  siRNA target sequence for ICA1 (NM_022307.1,956-974).
caggagccgagccaattaa

SEQ ID NO: 323807 - DNA, 19 bp, Homo sapiens
  siRNA target sequence for ICA1 (NM_022307.1,961-979).
gccgagccaattaatttca

SEQ ID NO: 323808 - DNA, 19 bp, Homo sapiens
  siRNA target sequence for ICA1 (NM_022307.1,962-980).
ccgagccaattaatttcat

SEQ ID NO: 323809 - DNA, 19 bp, Homo sapiens
  siRNA target sequence for ICA1 (NM_022307.1,963-981).
cgagccaattaatttcatt

SEQ ID NO: 323810 - DNA, 19 bp, Homo sapiens
  siRNA target sequence for ICA1 (NM_022307.1,1004-1022).
gaatcctctagttttaaga

SEQ ID NO: 323811 - DNA, 19 bp, Homo sapiens
  siRNA target sequence for ICA1 (NM_022307.1,1057-1075).
caaaggctctacacatact

SEQ ID NO: 323812 - DNA, 19 bp, Homo sapiens
  siRNA target sequence for ICA1 (NM_022307.1,1080-1098).
gctcaggacccatagatga

SEQ ID NO: 323813 - DNA, 19 bp, Homo sapiens
  siRNA target sequence for ICA1 (NM_022307.1,1081-1099).
ctcaggacccatagatgaa

SEQ ID NO: 323814 - DNA, 19 bp, Homo sapiens
  siRNA target sequence for ICA1 (NM_022307.1,1085-1103).
ggacccatagatgaactat

SEQ ID NO: 323815 - DNA, 19 bp, Homo sapiens
  siRNA target sequence for ICA1 (NM_022307.1,1086-1104).
gacccatagatgaactatt

SEQ ID NO: 323816 - DNA, 19 bp, Homo sapiens
  siRNA target sequence for ICA1 (NM_022307.1,1089-1107).
ccatagatgaactattaga

SEQ ID NO: 323817 - DNA, 19 bp, Homo sapiens
  siRNA target sequence for ICA1 (NM_022307.1,1097-1115).
gaactattagacatgaaat

SEQ ID NO: 323818 - DNA, 19 bp, Homo sapiens
  siRNA target sequence for ICA1 (NM_022307.1,1453-1471).
cgacccactctcaaatcct

SEQ ID NO: 323819 - DNA, 19 bp, Homo sapiens
  siRNA target sequence for ICA1 (NM_022307.1,1499-1517).
cacgaattgctcaatgcat

SEQ ID NO: 323820 - DNA, 19 bp, Homo sapiens
  siRNA target sequence for MVP (NM_005115.3,117-135).
cccataccactatatccat

SEQ ID NO: 323821 - DNA, 19 bp, Homo sapiens
  siRNA target sequence for MVP (NM_005115.3,741-759).
catccttacggaaaagaca

SEQ ID NO: 323822 - DNA, 19 bp, Homo sapiens
  siRNA target sequence for MVP (NM_005115.3,948-966).
cggaccggatggcaagaat

SEQ ID NO: 323823 - DNA, 19 bp, Homo sapiens
  siRNA target sequence for MVP (NM_005115.3,950-968).
gaccggatggcaagaatca

SEQ ID NO: 323824 - DNA, 19 bp, Homo sapiens
  siRNA target sequence for MVP (NM_005115.3,1163-1181).
gcggacccctggagtatgt

SEQ ID NO: 323825 - DNA, 19 bp, Homo sapiens
  siRNA target sequence for MVP (NM_005115.3,1233-1251).
cgagaacgagggcatctat

SEQ ID NO: 323826 - DNA, 19 bp, Homo sapiens
  siRNA target sequence for MVP (NM_005115.3,1276-1294).
gtgcgcgctgtgattggaa

SEQ ID NO: 323827 - DNA, 19 bp, Homo sapiens
  siRNA target sequence for MVP (NM_005115.3,1709-1727).
cctacaactggcactttga

SEQ ID NO: 323828 - DNA, 19 bp, Homo sapiens
  siRNA target sequence for MVP (NM_005115.3,1718-1736).
ggcactttgaggtgaatga

SEQ ID NO: 323829 - DNA, 19 bp, Homo sapiens
  siRNA target sequence for MVP (NM_005115.3,1755-1773).
gacggccaagctcttttca

SEQ ID NO: 323830 - DNA, 19 bp, Homo sapiens
  siRNA target sequence for MVP (NM_005115.3,1757-1775).
cggccaagctcttttcagt

SEQ ID NO: 323831 - DNA, 19 bp, Homo sapiens
  siRNA target sequence for MVP (NM_005115.3,1844-1862).
ctttcgatgacttccataa

SEQ ID NO: 323832 - DNA, 19 bp, Homo sapiens
  siRNA target sequence for MVP (NM_005115.3,1863-1881).
gaactcagcccgcatcatt

SEQ ID NO: 323833 - DNA, 19 bp, Homo sapiens
  siRNA target sequence for MVP (NM_005115.3,1878-1896).
cattcgcactgctgtcttt

SEQ ID NO: 323834 - DNA, 19 bp, Homo sapiens
  siRNA target sequence for NFKBIE (NM_004556.1,232-250).
gttcggctgcccacagtaa

SEQ ID NO: 323835 - DNA, 19 bp, Homo sapiens
  siRNA target sequence for NFKBIE (NM_004556.1,778-796).
ctggaagcactcacttaca

SEQ ID NO: 323836 - DNA, 19 bp, Homo sapiens
  siRNA target sequence for NFKBIE (NM_004556.1,822-840).
ccacctggcagtgattcat

SEQ ID NO: 323837 - DNA, 19 bp, Homo sapiens
  siRNA target sequence for NFKBIE (NM_004556.1,888-906).
ggtcctggacattcaaaat

SEQ ID NO: 323838 - DNA, 19 bp, Homo sapiens
  siRNA target sequence for SNCG (NM_003087.1,177-195).
gaccaaggagaatgttgta

SEQ ID NO: 323839 - DNA, 19 bp, Homo sapiens
  siRNA target sequence for TUB (NM_003320.3,287-305).
gccgagacagggattttgt

SEQ ID NO: 323840 - DNA, 19 bp, Homo sapiens
  siRNA target sequence for TUB (NM_003320.3,288-306).
ccgagacagggattttgtt

SEQ ID NO: 323841 - DNA, 19 bp, Homo sapiens
  siRNA target sequence for TUB (NM_003320.3,386-404).
cgaagagatcggagaacaa

SEQ ID NO: 323842 - DNA, 19 bp, Homo sapiens
  siRNA target sequence for TUB (NM_003320.3,433-451).
ggagatcgctcgtgtctta

SEQ ID NO: 323843 - DNA, 19 bp, Homo sapiens
  siRNA target sequence for TUB (NM_003320.3,436-454).
gatcgctcgtgtcttagat

SEQ ID NO: 323844 - DNA, 19 bp, Homo sapiens
  siRNA target sequence for TUB (NM_003320.3,439-457).
cgctcgtgtcttagatgat

SEQ ID NO: 323845 - DNA, 19 bp, Homo sapiens
  siRNA target sequence for TUB (NM_003320.3,645-663).
gcaccagctaccaagttca

SEQ ID NO: 323846 - DNA, 19 bp, Homo sapiens
  siRNA target sequence for TUB (NM_003320.3,1321-1339).
gaagagtaaaacttccaat

SEQ ID NO: 323847 - DNA, 19 bp, Homo sapiens
  siRNA target sequence for TUB (NM_003320.3,1418-1436).
ggcaccaagttcactgttt

SEQ ID NO: 323848 - DNA, 19 bp, Homo sapiens
  siRNA target sequence for TUB (NM_003320.3,1465-1483).
ctcatcctccactttggaa

SEQ ID NO: 323849 - DNA, 19 bp, Homo sapiens
  siRNA target sequence for TUB (NM_003320.3,1512-1530).
ctgtgtgctacgagacaaa

SEQ ID NO: 323850 - DNA, 19 bp, Homo sapiens
  siRNA target sequence for TUB (NM_003320.3,1578-1596).
gcatgaacatggttcatga

SEQ ID NO: 323851 - DNA, 19 bp, Homo sapiens
  siRNA target sequence for TUB (NM_003320.3,1637-1655).
ctagcacgctggcagaata

SEQ ID NO: 323852 - DNA, 19 bp, Homo sapiens
  siRNA target sequence for TUB (NM_003320.3,1640-1658).
gcacgctggcagaataaga

SEQ ID NO: 323853 - DNA, 19 bp, Homo sapiens
  siRNA target sequence for TUB (NM_003320.3,1641-1659).
cacgctggcagaataagaa

SEQ ID NO: 323854 - DNA, 19 bp, Homo sapiens
  siRNA target sequence for TUB (NM_003320.3,1668-1686).
gtatcatcgagctgcaaaa

SEQ ID NO: 323855 - DNA, 19 bp, Homo sapiens
  siRNA target sequence for TUB (NM_177972.1,181-199).
cctacagtgtcttagatga

SEQ ID NO: 323856 - DNA, 19 bp, Homo sapiens
  siRNA target sequence for FLJ39369 (NM_152363.2,544-562).
ccatagcactccaaaagca

SEQ ID NO: 323857 - DNA, 19 bp, Homo sapiens
  siRNA target sequence for FLJ39369 (NM_152363.2,1010-1028).
gcaccagacatccattgat

SEQ ID NO: 323858 - DNA, 19 bp, Homo sapiens
  siRNA target sequence for FLJ39369 (NM_152363.2,1011-1029).
caccagacatccattgata

SEQ ID NO: 323859 - DNA, 19 bp, Homo sapiens
  siRNA target sequence for FLJ39369 (NM_152363.2,1208-1226).
gcggacgggctgtattcca

SEQ ID NO: 323860 - DNA, 19 bp, Homo sapiens
  siRNA target sequence for FLJ39369 (NM_152363.2,1249-1267).
cgctggcccagcagtttga

SEQ ID NO: 323861 - DNA, 19 bp, Homo sapiens
  siRNA target sequence for FLJ39369 (NM_152363.2,1389-1407).
gagcgccttcagactttca

SEQ ID NO: 323862 - DNA, 19 bp, Homo sapiens
  siRNA target sequence for FLJ39369 (NM_152363.2,1481-1499).
ccatgggcggtcaagaaaa

SEQ ID NO: 323863 - DNA, 19 bp, Homo sapiens
  siRNA target sequence for FLJ39369 (NM_152363.2,1519-1537).
ccaaggtgcgtcagatctt

SEQ ID NO: 323864 - DNA, 19 bp, Homo sapiens
  siRNA target sequence for FLJ39369 (NM_152363.2,1612-1630).
cacgggaggcgtgtattgt

SEQ ID NO: 323865 - DNA, 19 bp, Homo sapiens
  siRNA target sequence for LEMD2 (NM_181336.2,305-323).
ctggggcctacggtgatat

SEQ ID NO: 323866 - DNA, 19 bp, Homo sapiens
  siRNA target sequence for LEMD2 (NM_181336.2,728-746).
cggaggacaacatgaagtt

SEQ ID NO: 323867 - DNA, 19 bp, Homo sapiens
  siRNA target sequence for LEMD2 (NM_181336.2,729-747).
ggaggacaacatgaagtta

SEQ ID NO: 323868 - DNA, 19 bp, Homo sapiens
  siRNA target sequence for LEMD2 (NM_181336.2,844-862).
gccatccaagctggtaatt

SEQ ID NO: 323869 - DNA, 19 bp, Homo sapiens
  siRNA target sequence for LEMD2 (NM_181336.2,846-864).
catccaagctggtaatttt

SEQ ID NO: 323870 - DNA, 19 bp, Homo sapiens
  siRNA target sequence for LEMD2 (NM_181336.2,912-930).
ggaagcccaagaatatata

SEQ ID NO: 323871 - DNA, 19 bp, Homo sapiens
  siRNA target sequence for LEMD2 (NM_181336.2,945-963).
cagctcctccgccaagttt

SEQ ID NO: 323872 - DNA, 19 bp, Homo sapiens
  siRNA target sequence for LEMD2 (NM_181336.2,947-965).
gctcctccgccaagtttga

SEQ ID NO: 323873 - DNA, 19 bp, Homo sapiens
  siRNA target sequence for LEMD2 (NM_181336.2,948-966).
ctcctccgccaagtttgaa

SEQ ID NO: 323874 - DNA, 19 bp, Homo sapiens
  siRNA target sequence for LEMD2 (NM_181336.2,1002-1020).
cgtgggcatctggttgaaa

SEQ ID NO: 323875 - DNA, 19 bp, Homo sapiens
  siRNA target sequence for LEMD2 (NM_181336.2,1202-1220).
ggtggcgaaagttagaaga

SEQ ID NO: 323876 - DNA, 19 bp, Homo sapiens
  siRNA target sequence for LEMD2 (NM_181336.2,1297-1315).
gacatggagcgctatccat

SEQ ID NO: 323877 - DNA, 19 bp, Homo sapiens
  siRNA target sequence for LEMD2 (NM_181336.2,1302-1320).
ggagcgctatccatatgta

SEQ ID NO: 323878 - DNA, 19 bp, Homo sapiens
  siRNA target sequence for ACRC (NM_052957.2,250-268).
ggcgagttgcatccttaat

SEQ ID NO: 323879 - DNA, 19 bp, Homo sapiens
  siRNA target sequence for ACRC (NM_052957.2,252-270).
cgagttgcatccttaatgt

SEQ ID NO: 323880 - DNA, 19 bp, Homo sapiens
  siRNA target sequence for ACRC (NM_052957.2,333-351).
cgagctccgtggtagtgat

SEQ ID NO: 323881 - DNA, 19 bp, Homo sapiens
  siRNA target sequence for ACRC (NM_052957.2,334-352).
gagctccgtggtagtgatt

SEQ ID NO: 323882 - DNA, 19 bp, Homo sapiens
  siRNA target sequence for ACRC (NM_052957.2,336-354).
gctccgtggtagtgattga

SEQ ID NO: 323883 - DNA, 19 bp, Homo sapiens
  siRNA target sequence for ACRC (NM_052957.2,398-416).
gctaagttattggaaataa

SEQ ID NO: 323884 - DNA, 19 bp, Homo sapiens
  siRNA target sequence for ACRC (NM_052957.2,430-448).
gagtccggagtgttgtcat

SEQ ID NO: 323885 - DNA, 19 bp, Homo sapiens
  siRNA target sequence for ACRC (NM_052957.2,463-481).
ccaggaacctccaatagtt

SEQ ID NO: 323886 - DNA, 19 bp, Homo sapiens
  siRNA target sequence for ACRC (NM_052957.2,466-484).
ggaacctccaatagttatt

SEQ ID NO: 323887 - DNA, 19 bp, Homo sapiens
  siRNA target sequence for ACRC (NM_052957.2,467-485).
gaacctccaatagttatta

SEQ ID NO: 323888 - DNA, 19 bp, Homo sapiens
  siRNA target sequence for ACRC (NM_052957.2,471-489).
ctccaatagttattagtga

SEQ ID NO: 323889 - DNA, 19 bp, Homo sapiens
  siRNA target sequence for ACRC (NM_052957.2,502-520).
cgatgacaacggtaatgat

SEQ ID NO: 323890 - DNA, 19 bp, Homo sapiens
  siRNA target sequence for ACRC (NM_052957.2,503-521).
gatgacaacggtaatgatt

SEQ ID NO: 323891 - DNA, 19 bp, Homo sapiens
  siRNA target sequence for ACRC (NM_052957.2,508-526).
caacggtaatgatttggaa

SEQ ID NO: 323892 - DNA, 19 bp, Homo sapiens
  siRNA target sequence for ACRC (NM_052957.2,1121-1139).
gtgccagcagaagatttgt

SEQ ID NO: 323893 - DNA, 19 bp, Homo sapiens
  siRNA target sequence for ACRC (NM_052957.2,1138-1156).
gtgtaatgaaggccaaatt

SEQ ID NO: 323894 - DNA, 19 bp, Homo sapiens
  siRNA target sequence for ACRC (NM_052957.2,1150-1168).
ccaaattgcttcagatgaa

SEQ ID NO: 323895 - DNA, 19 bp, Homo sapiens
  siRNA target sequence for ACRC (NM_052957.2,1204-1222).
gcatgattcatctgatgat

SEQ ID NO: 323896 - DNA, 19 bp, Homo sapiens
  siRNA target sequence for ACRC (NM_052957.2,1252-1270).
cagcaaaccaccaagtgat

SEQ ID NO: 323897 - DNA, 19 bp, Homo sapiens
  siRNA target sequence for ACRC (NM_052957.2,1274-1292).
gaggctaaccctgaagttt

SEQ ID NO: 323898 - DNA, 19 bp, Homo sapiens
  siRNA target sequence for ACRC (NM_052957.2,1505-1523).
gtgacacctggacataaga

SEQ ID NO: 323899 - DNA, 19 bp, Homo sapiens
  siRNA target sequence for ACRC (NM_052957.2,1548-1566).
ccggtgcagcaaaagttga

SEQ ID NO: 323900 - DNA, 19 bp, Homo sapiens
  siRNA target sequence for ACRC (NM_052957.2,1549-1567).
cggtgcagcaaaagttgaa

SEQ ID NO: 323901 - DNA, 19 bp, Homo sapiens
  siRNA target sequence for ACRC (NM_052957.2,1562-1580).
gttgaaaaacgcaagacta

SEQ ID NO: 323902 - DNA, 19 bp, Homo sapiens
  siRNA target sequence for ACRC (NM_052957.2,1593-1611).
gcaaagtccctggatgttt

SEQ ID NO: 323903 - DNA, 19 bp, Homo sapiens
  siRNA target sequence for ACRC (NM_052957.2,1686-1704).
gaatctacgacctgtttaa

SEQ ID NO: 323904 - DNA, 19 bp, Homo sapiens
  siRNA target sequence for ACRC (NM_052957.2,1690-1708).
ctacgacctgtttaacaga

SEQ ID NO: 323905 - DNA, 19 bp, Homo sapiens
  siRNA target sequence for ACRC (NM_052957.2,1710-1728).
ccgtctgtgataaaaagct

SEQ ID NO: 323906 - DNA, 19 bp, Homo sapiens
  siRNA target sequence for ACRC (NM_052957.2,1739-1757).
ctacgcataggctggaata

SEQ ID NO: 323907 - DNA, 19 bp, Homo sapiens
  siRNA target sequence for ACRC (NM_052957.2,1742-1760).
cgcataggctggaataaca

SEQ ID NO: 323908 - DNA, 19 bp, Homo sapiens
  siRNA target sequence for ACRC (NM_052957.2,1743-1761).
gcataggctggaataacaa

SEQ ID NO: 323909 - DNA, 19 bp, Homo sapiens
  siRNA target sequence for ACRC (NM_052957.2,1877-1895).
gataccttgatccatgaaa

SEQ ID NO: 323910 - DNA, 19 bp, Homo sapiens
  siRNA target sequence for ACRC (NM_052957.2,1943-1961).
ggtgacgcatggaagtatt

SEQ ID NO: 323911 - DNA, 19 bp, Homo sapiens
  siRNA target sequence for ACRC (NM_052957.2,1944-1962).
gtgacgcatggaagtatta

SEQ ID NO: 323912 - DNA, 19 bp, Homo sapiens
  siRNA target sequence for ACRC (NM_052957.2,2003-2021).
gtcacccgttgccataact

SEQ ID NO: 323913 - DNA, 19 bp, Homo sapiens
  siRNA target sequence for ACRC (NM_052957.2,2005-2023).
cacccgttgccataactat

SEQ ID NO: 323914 - DNA, 19 bp, Homo sapiens
  siRNA target sequence for ACRC (NM_052957.2,2007-2025).
cccgttgccataactataa

SEQ ID NO: 323915 - DNA, 19 bp, Homo sapiens
  siRNA target sequence for ACRC (NM_052957.2,2009-2027).
cgttgccataactataaga

SEQ ID NO: 323916 - DNA, 19 bp, Homo sapiens
  siRNA target sequence for ACRC (NM_052957.2,2015-2033).
cataactataagattaact

SEQ ID NO: 323917 - DNA, 19 bp, Homo sapiens
  siRNA target sequence for ACRC (NM_052957.2,2038-2056).
ggtccattatgaatgtact

SEQ ID NO: 323918 - DNA, 19 bp, Homo sapiens
  siRNA target sequence for ACRC (NM_052957.2,2075-2093).
ggctgctacaccaaatcgt

SEQ ID NO: 323919 - DNA, 19 bp, Homo sapiens
  siRNA target sequence for ACRC (NM_052957.2,2076-2094).
gctgctacaccaaatcgtt

SEQ ID NO: 323920 - DNA, 19 bp, Homo sapiens
  siRNA target sequence for ACRC (NM_052957.2,2143-2161).
ggtgccattaactcagaaa

SEQ ID NO: 323921 - DNA, 19 bp, Homo sapiens
  siRNA target sequence for AKIP (NM_017900.1,438-456).
cgcggatgcgcctcaaatt

SEQ ID NO: 323922 - DNA, 19 bp, Homo sapiens
  siRNA target sequence for AKIP (NM_017900.1,440-458).
cggatgcgcctcaaattca

SEQ ID NO: 323923 - DNA, 19 bp, Homo sapiens
  siRNA target sequence for AKIP (NM_017900.1,461-479).
gcaaaaacgtgctgaagat

SEQ ID NO: 323924 - DNA, 19 bp, Homo sapiens
  siRNA target sequence for AKIP (NM_017900.1,569-587).
gacgcaagcagatcaagtt

SEQ ID NO: 323925 - DNA, 19 bp, Homo sapiens
  siRNA target sequence for BARD1 (NM_000465.1,217-235).
gcgctgctcgcgttgtact

SEQ ID NO: 323926 - DNA, 19 bp, Homo sapiens
  siRNA target sequence for BARD1 (NM_000465.1,218-236).
cgctgctcgcgttgtacta

SEQ ID NO: 323927 - DNA, 19 bp, Homo sapiens
  siRNA target sequence for BARD1 (NM_000465.1,219-237).
gctgctcgcgttgtactaa

SEQ ID NO: 323928 - DNA, 19 bp, Homo sapiens
  siRNA target sequence for BARD1 (NM_000465.1,222-240).
gctcgcgttgtactaacat

SEQ ID NO: 323929 - DNA, 19 bp, Homo sapiens
  siRNA target sequence for BARD1 (NM_000465.1,223-241).
ctcgcgttgtactaacatt

SEQ ID NO: 323930 - DNA, 19 bp, Homo sapiens
  siRNA target sequence for BARD1 (NM_000465.1,225-243).
cgcgttgtactaacattct

SEQ ID NO: 323931 - DNA, 19 bp, Homo sapiens
  siRNA target sequence for BARD1 (NM_000465.1,227-245).
cgttgtactaacattctga

SEQ ID NO: 323932 - DNA, 19 bp, Homo sapiens
  siRNA target sequence for BARD1 (NM_000465.1,264-282).
gaggatgtgagcacatctt

SEQ ID NO: 323933 - DNA, 19 bp, Homo sapiens
  siRNA target sequence for BARD1 (NM_000465.1,272-290).
gagcacatcttctgtagta

SEQ ID NO: 323934 - DNA, 19 bp, Homo sapiens
  siRNA target sequence for BARD1 (NM_000465.1,274-292).
gcacatcttctgtagtaat

SEQ ID NO: 323935 - DNA, 19 bp, Homo sapiens
  siRNA target sequence for BARD1 (NM_000465.1,275-293).
cacatcttctgtagtaatt

SEQ ID NO: 323936 - DNA, 19 bp, Homo sapiens
  siRNA target sequence for BARD1 (NM_000465.1,283-301).
ctgtagtaattgtgtaagt

SEQ ID NO: 323937 - DNA, 19 bp, Homo sapiens
  siRNA target sequence for BARD1 (NM_000465.1,296-314).
gtaagtgactgcattggaa

SEQ ID NO: 323938 - DNA, 19 bp, Homo sapiens
  siRNA target sequence for BARD1 (NM_000465.1,315-333).
ctggatgtccagtgtgtta

SEQ ID NO: 323939 - DNA, 19 bp, Homo sapiens
  siRNA target sequence for BARD1 (NM_000465.1,376-394).
ggacagcatgattcaactt

SEQ ID NO: 323940 - DNA, 19 bp, Homo sapiens
  siRNA target sequence for BARD1 (NM_000465.1,377-395).
gacagcatgattcaacttt

SEQ ID NO: 323941 - DNA, 19 bp, Homo sapiens
  siRNA target sequence for BARD1 (NM_000465.1,399-417).
gtaagcttcgaaatttgct

SEQ ID NO: 323942 - DNA, 19 bp, Homo sapiens
  siRNA target sequence for BARD1 (NM_000465.1,408-426).
gaaatttgctacatgacaa

SEQ ID NO: 323943 - DNA, 19 bp, Homo sapiens
  siRNA target sequence for BARD1 (NM_000465.1,510-528).
ggtttagccctcgaagtaa

SEQ ID NO: 323944 - DNA, 19 bp, Homo sapiens
  siRNA target sequence for BARD1 (NM_000465.1,516-534).
gccctcgaagtaagaaagt

SEQ ID NO: 323945 - DNA, 19 bp, Homo sapiens
  siRNA target sequence for BARD1 (NM_000465.1,594-612).
gtgctcagcaagactcata

SEQ ID NO: 323946 - DNA, 19 bp, Homo sapiens
  siRNA target sequence for BARD1 (NM_000465.1,599-617).
cagcaagactcatatgaat

SEQ ID NO: 323947 - DNA, 19 bp, Homo sapiens
  siRNA target sequence for BARD1 (NM_000465.1,715-733).
caaccaaaaatggaattta

SEQ ID NO: 323948 - DNA, 19 bp, Homo sapiens
  siRNA target sequence for BARD1 (NM_000465.1,801-819).
gtagccaaccatctgttat

SEQ ID NO: 323949 - DNA, 19 bp, Homo sapiens
  siRNA target sequence for BARD1 (NM_000465.1,823-841).
cagtcctcagataaatggt

SEQ ID NO: 323950 - DNA, 19 bp, Homo sapiens
  siRNA target sequence for BARD1 (NM_000465.1,885-903).
gttttggaagtttaactga

SEQ ID NO: 323951 - DNA, 19 bp, Homo sapiens
  siRNA target sequence for BARD1 (NM_000465.1,915-933).
cattggctgagcaaataga

SEQ ID NO: 323952 - DNA, 19 bp, Homo sapiens
  siRNA target sequence for BARD1 (NM_000465.1,980-998).
gtctgcaaaaattatctta

SEQ ID NO: 323953 - DNA, 19 bp, Homo sapiens
  siRNA target sequence for BARD1 (NM_000465.1,1032-1050).
gaaaacgtggccatcacaa

SEQ ID NO: 323954 - DNA, 19 bp, Homo sapiens
  siRNA target sequence for BARD1 (NM_000465.1,1038-1056).
gtggccatcacaatagact

SEQ ID NO: 323955 - DNA, 19 bp, Homo sapiens
  siRNA target sequence for BARD1 (NM_000465.1,1060-1078).
cagtcccatttctaagaga

SEQ ID NO: 323956 - DNA, 19 bp, Homo sapiens
  siRNA target sequence for BARD1 (NM_000465.1,1101-1119).
ccagtggagattttgttaa

SEQ ID NO: 323957 - DNA, 19 bp, Homo sapiens
  siRNA target sequence for BARD1 (NM_000465.1,1166-1184).
ccaccttcatgcaaacgta

SEQ ID NO: 323958 - DNA, 19 bp, Homo sapiens
  siRNA target sequence for BARD1 (NM_000465.1,1167-1185).
caccttcatgcaaacgtaa

SEQ ID NO: 323959 - DNA, 19 bp, Homo sapiens
  siRNA target sequence for BARD1 (NM_000465.1,1170-1188).
cttcatgcaaacgtaaagt

SEQ ID NO: 323960 - DNA, 19 bp, Homo sapiens
  siRNA target sequence for BARD1 (NM_000465.1,1215-1233).
gtaacatgtccgatgaatt

SEQ ID NO: 323961 - DNA, 19 bp, Homo sapiens
  siRNA target sequence for BARD1 (NM_000465.1,1219-1237).
catgtccgatgaattcatt

SEQ ID NO: 323962 - DNA, 19 bp, Homo sapiens
  siRNA target sequence for BARD1 (NM_000465.1,1222-1240).
gtccgatgaattcattagt

SEQ ID NO: 323963 - DNA, 19 bp, Homo sapiens
  siRNA target sequence for BARD1 (NM_000465.1,1224-1242).
ccgatgaattcattagtct

SEQ ID NO: 323964 - DNA, 19 bp, Homo sapiens
  siRNA target sequence for BARD1 (NM_000465.1,1225-1243).
cgatgaattcattagtctt

SEQ ID NO: 323965 - DNA, 19 bp, Homo sapiens
  siRNA target sequence for BARD1 (NM_000465.1,1259-1277).
ccttctacattaagtagtt

SEQ ID NO: 323966 - DNA, 19 bp, Homo sapiens
  siRNA target sequence for BARD1 (NM_000465.1,1299-1317).
ctagtccctcagcaatgaa

SEQ ID NO: 323967 - DNA, 19 bp, Homo sapiens
  siRNA target sequence for BARD1 (NM_000465.1,1356-1374).
gagagactttgctccatat

SEQ ID NO: 323968 - DNA, 19 bp, Homo sapiens
  siRNA target sequence for BARD1 (NM_000465.1,1387-1405).
gggcgacataccttctgtt

SEQ ID NO: 323969 - DNA, 19 bp, Homo sapiens
  siRNA target sequence for BARD1 (NM_000465.1,1390-1408).
cgacataccttctgttgaa

SEQ ID NO: 323970 - DNA, 19 bp, Homo sapiens
  siRNA target sequence for BARD1 (NM_000465.1,1391-1409).
gacataccttctgttgaat

SEQ ID NO: 323971 - DNA, 19 bp, Homo sapiens
  siRNA target sequence for BARD1 (NM_000465.1,1428-1446).
gtgatccaaatgttaaaga

SEQ ID NO: 323972 - DNA, 19 bp, Homo sapiens
  siRNA target sequence for BARD1 (NM_000465.1,1492-1510).
cctgaaggtagtggaatta

SEQ ID NO: 323973 - DNA, 19 bp, Homo sapiens
  siRNA target sequence for BARD1 (NM_000465.1,1493-1511).
ctgaaggtagtggaattat

SEQ ID NO: 323974 - DNA, 19 bp, Homo sapiens
  siRNA target sequence for BARD1 (NM_000465.1,1534-1552).
gaacaccaccgggtatcaa

SEQ ID NO: 323975 - DNA, 19 bp, Homo sapiens
  siRNA target sequence for BARD1 (NM_000465.1,1537-1555).
caccaccgggtatcaaaat

SEQ ID NO: 323976 - DNA, 19 bp, Homo sapiens
  siRNA target sequence for BARD1 (NM_000465.1,1539-1557).
ccaccgggtatcaaaatga

SEQ ID NO: 323977 - DNA, 19 bp, Homo sapiens
  siRNA target sequence for BARD1 (NM_000465.1,1653-1671).
gtctgcggcctgtcgatta

SEQ ID NO: 323978 - DNA, 19 bp, Homo sapiens
  siRNA target sequence for BARD1 (NM_000465.1,1655-1673).
ctgcggcctgtcgattata

SEQ ID NO: 323979 - DNA, 19 bp, Homo sapiens
  siRNA target sequence for BARD1 (NM_000465.1,1657-1675).
gcggcctgtcgattataca

SEQ ID NO: 323980 - DNA, 19 bp, Homo sapiens
  siRNA target sequence for BARD1 (NM_000465.1,1659-1677).
ggcctgtcgattatacaga

SEQ ID NO: 323981 - DNA, 19 bp, Homo sapiens
  siRNA target sequence for BARD1 (NM_000465.1,1660-1678).
gcctgtcgattatacagat

SEQ ID NO: 323982 - DNA, 19 bp, Homo sapiens
  siRNA target sequence for BARD1 (NM_000465.1,1686-1704).
gtatgaaatcgctattgct

SEQ ID NO: 323983 - DNA, 19 bp, Homo sapiens
  siRNA target sequence for BARD1 (NM_000465.1,1706-1724).
ctaccagagaagaatgaat

SEQ ID NO: 323984 - DNA, 19 bp, Homo sapiens
  siRNA target sequence for BARD1 (NM_000465.1,1733-1751).
gctagccactgctcagtaa

SEQ ID NO: 323985 - DNA, 19 bp, Homo sapiens
  siRNA target sequence for BARD1 (NM_000465.1,1739-1757).
cactgctcagtaatgaaca

SEQ ID NO: 323986 - DNA, 19 bp, Homo sapiens
  siRNA target sequence for BARD1 (NM_000465.1,1795-1813).
cagtgggctgtcttcagaa

SEQ ID NO: 323987 - DNA, 19 bp, Homo sapiens
  siRNA target sequence for BARD1 (NM_000465.1,1830-1848).
gtgagcttgcagtaattct

SEQ ID NO: 323988 - DNA, 19 bp, Homo sapiens
  siRNA target sequence for BARD1 (NM_000465.1,1878-1896).
gtacagtaactcatgttgt

SEQ ID NO: 323989 - DNA, 19 bp, Homo sapiens
  siRNA target sequence for BARD1 (NM_000465.1,1881-1899).
cagtaactcatgttgttgt

SEQ ID NO: 323990 - DNA, 19 bp, Homo sapiens
  siRNA target sequence for BARD1 (NM_000465.1,1904-1922).
ggtgatgcagttcaaagta

SEQ ID NO: 323991 - DNA, 19 bp, Homo sapiens
  siRNA target sequence for BARD1 (NM_000465.1,1916-1934).
caaagtaccttgaagtgta

SEQ ID NO: 323992 - DNA, 19 bp, Homo sapiens
  siRNA target sequence for BARD1 (NM_000465.1,1986-2004).
catgtctacgaagaaaagt

SEQ ID NO: 323993 - DNA, 19 bp, Homo sapiens
  siRNA target sequence for BARD1 (NM_000465.1,2090-2108).
gatggatgctacttctatt

SEQ ID NO: 323994 - DNA, 19 bp, Homo sapiens
  siRNA target sequence for BARD1 (NM_000465.1,2132-2150).
ccaaaggacaaccttatta

SEQ ID NO: 323995 - DNA, 19 bp, Homo sapiens
  siRNA target sequence for BARD1 (NM_000465.1,2171-2189).
ggccagatcctcagtagaa

SEQ ID NO: 323996 - DNA, 19 bp, Homo sapiens
  siRNA target sequence for BARD1 (NM_000465.1,2209-2227).
cgtgactcagaccatcaat

SEQ ID NO: 323997 - DNA, 19 bp, Homo sapiens
  siRNA target sequence for BARD1 (NM_000465.1,2210-2228).
gtgactcagaccatcaata

SEQ ID NO: 323998 - DNA, 19 bp, Homo sapiens
  siRNA target sequence for BARD1 (NM_000465.1,2264-2282).
cgcttctgcacacagtata

SEQ ID NO: 323999 - DNA, 19 bp, Homo sapiens
  siRNA target sequence for BARD1 (NM_000465.1,2265-2283).
gcttctgcacacagtatat

SEQ ID NO: 324000 - DNA, 19 bp, Homo sapiens
  siRNA target sequence for BARD1 (NM_000465.1,2271-2289).
gcacacagtatatcatcta

SEQ ID NO: 324001 - DNA, 19 bp, Homo sapiens
  siRNA target sequence for BARD1 (NM_000465.1,2321-2339).
gttcggcagggcaaagtct

SEQ ID NO: 324002 - DNA, 19 bp, Homo sapiens
  siRNA target sequence for BARD1 (NM_000465.1,2345-2363).
gctccttcgagctggttta

SEQ ID NO: 324003 - DNA, 19 bp, Homo sapiens
  siRNA target sequence for BARD1 (NM_000465.1,2349-2367).
cttcgagctggtttataga

SEQ ID NO: 324004 - DNA, 19 bp, Homo sapiens
  siRNA target sequence for BOP1 (NM_015201.3,531-549).
gatggcaggcgcatctaca

SEQ ID NO: 324005 - DNA, 19 bp, Homo sapiens
  siRNA target sequence for BOP1 (NM_015201.3,2138-2156).
ccatggcatggtgtacaat

SEQ ID NO: 324006 - DNA, 19 bp, Homo sapiens
  siRNA target sequence for BOP1 (NM_015201.3,2227-2245).
gagtgctggacgtcatctt

SEQ ID NO: 324007 - DNA, 19 bp, Homo sapiens
  siRNA target sequence for BRD4 (NM_014299.1,273-291).
gggggatggactagaaact

SEQ ID NO: 324008 - DNA, 19 bp, Homo sapiens
  siRNA target sequence for BRD4 (NM_014299.1,274-292).
ggggatggactagaaactt

SEQ ID NO: 324009 - DNA, 19 bp, Homo sapiens
  siRNA target sequence for BRD4 (NM_014299.1,427-445).
gtggtgctcaagacactat

SEQ ID NO: 324010 - DNA, 19 bp, Homo sapiens
  siRNA target sequence for BRD4 (NM_014299.1,432-450).
gctcaagacactatggaaa

SEQ ID NO: 324011 - DNA, 19 bp, Homo sapiens
  siRNA target sequence for BRD4 (NM_014299.1,498-516).
gaacctccctgattactat

SEQ ID NO: 324012 - DNA, 19 bp, Homo sapiens
  siRNA target sequence for BRD4 (NM_014299.1,522-540).
cattaaaacgcctatggat

SEQ ID NO: 324013 - DNA, 19 bp, Homo sapiens
  siRNA target sequence for BRD4 (NM_014299.1,533-551).
ctatggatatgggaacaat

SEQ ID NO: 324014 - DNA, 19 bp, Homo sapiens
  siRNA target sequence for BRD4 (NM_014299.1,558-576).
gcgcttggaaaacaactat

SEQ ID NO: 324015 - DNA, 19 bp, Homo sapiens
  siRNA target sequence for BRD4 (NM_014299.1,559-577).
cgcttggaaaacaactatt

SEQ ID NO: 324016 - DNA, 19 bp, Homo sapiens
  siRNA target sequence for BRD4 (NM_014299.1,560-578).
gcttggaaaacaactatta

SEQ ID NO: 324017 - DNA, 19 bp, Homo sapiens
  siRNA target sequence for BRD4 (NM_014299.1,797-815).
gcgtttccacggtaccaaa

SEQ ID NO: 324018 - DNA, 19 bp, Homo sapiens
  siRNA target sequence for BRD4 (NM_014299.1,807-825).
ggtaccaaacacaactcaa

SEQ ID NO: 324019 - DNA, 19 bp, Homo sapiens
  siRNA target sequence for BRD4 (NM_014299.1,1478-1496).
gtgctgacgtccgattgat

SEQ ID NO: 324020 - DNA, 19 bp, Homo sapiens
  siRNA target sequence for BRD4 (NM_014299.1,1480-1498).
gctgacgtccgattgatgt

SEQ ID NO: 324021 - DNA, 19 bp, Homo sapiens
  siRNA target sequence for BRD4 (NM_014299.1,1483-1501).
gacgtccgattgatgttct

SEQ ID NO: 324022 - DNA, 19 bp, Homo sapiens
  siRNA target sequence for BRD4 (NM_014299.1,2143-2161).
gagccctccctgaagaatt

SEQ ID NO: 324023 - DNA, 19 bp, Homo sapiens
  siRNA target sequence for BRD4 (NM_014299.1,2238-2256).
ctcctgtttgcggaagaaa

SEQ ID NO: 324024 - DNA, 19 bp, Homo sapiens
  siRNA target sequence for BRD4 (NM_014299.1,2259-2277).
gaaacctcaagctgagaaa

SEQ ID NO: 324025 - DNA, 19 bp, Homo sapiens
  siRNA target sequence for BRD4 (NM_014299.1,2291-2309).
ccggctcctccaagatgaa

SEQ ID NO: 324026 - DNA, 19 bp, Homo sapiens
  siRNA target sequence for BRD4 (NM_058243.1,2380-2398).
gagatggctccgaagtcaa

SEQ ID NO: 324027 - DNA, 19 bp, Homo sapiens
  siRNA target sequence for BRD4 (NM_058243.1,3220-3238).
cagcccatgcagttttcca

SEQ ID NO: 324028 - DNA, 19 bp, Homo sapiens
  siRNA target sequence for BRD4 (NM_058243.1,3408-3426).
cccctccccgcttatgata

SEQ ID NO: 324029 - DNA, 19 bp, Homo sapiens
  siRNA target sequence for BRD4 (NM_058243.1,3470-3488).
ctccaccccagcaaaacgt

SEQ ID NO: 324030 - DNA, 19 bp, Homo sapiens
  siRNA target sequence for BRD4 (NM_058243.1,3779-3797).
ctccagttgcgcccaaaaa

SEQ ID NO: 324031 - DNA, 19 bp, Homo sapiens
  siRNA target sequence for BRD4 (NM_058243.1,4247-4265).
cagctaccattgacatgaa

SEQ ID NO: 324032 - DNA, 19 bp, Homo sapiens
  siRNA target sequence for BRD4 (NM_058243.1,4249-4267).
gctaccattgacatgaatt

SEQ ID NO: 324033 - DNA, 19 bp, Homo sapiens
  siRNA target sequence for BRD4 (NM_058243.1,4272-4290).
gagtgatctattgtcaata

SEQ ID NO: 324034 - DNA, 19 bp, Homo sapiens
  siRNA target sequence for BRD4 (NM_058243.1,4274-4292).
gtgatctattgtcaatatt

SEQ ID NO: 324035 - DNA, 19 bp, Homo sapiens
  siRNA target sequence for BXDC1 (NM_032194.1,25-43).
cactctggatcgagtagta

SEQ ID NO: 324036 - DNA, 19 bp, Homo sapiens
  siRNA target sequence for BXDC1 (NM_032194.1,878-896).
cgacctgcagaaaggataa

SEQ ID NO: 324037 - DNA, 19 bp, Homo sapiens
  siRNA target sequence for BXDC1 (NM_032194.1,902-920).
gaccacgagaaaaagtcaa

SEQ ID NO: 324038 - DNA, 19 bp, Homo sapiens
  siRNA target sequence for C5orf6 (NM_016605.1,709-727).
cagtgcctcttctcaatgt

SEQ ID NO: 324039 - DNA, 19 bp, Homo sapiens
  siRNA target sequence for C5orf6 (NM_016605.1,1071-1089).
ggccttcgttggactttga

SEQ ID NO: 324040 - DNA, 19 bp, Homo sapiens
  siRNA target sequence for C5orf6 (NM_016605.1,1073-1091).
ccttcgttggactttgaca

SEQ ID NO: 324041 - DNA, 19 bp, Homo sapiens
  siRNA target sequence for C5orf6 (NM_016605.1,1077-1095).
cgttggactttgacaagat

SEQ ID NO: 324042 - DNA, 19 bp, Homo sapiens
  siRNA target sequence for C5orf6 (NM_016605.1,1325-1343).
ggggacctggacttgaatt

SEQ ID NO: 324043 - DNA, 19 bp, Homo sapiens
  siRNA target sequence for COIL (NM_004645.1,41-59).
gttaggctacggcttcaat

SEQ ID NO: 324044 - DNA, 19 bp, Homo sapiens
  siRNA target sequence for COIL (NM_004645.1,46-64).
gctacggcttcaatttgat

SEQ ID NO: 324045 - DNA, 19 bp, Homo sapiens
  siRNA target sequence for COIL (NM_004645.1,104-122).
cttctggtcgacttgaaca

SEQ ID NO: 324046 - DNA, 19 bp, Homo sapiens
  siRNA target sequence for COIL (NM_004645.1,129-147).
gagtcgtcacagatctcat

SEQ ID NO: 324047 - DNA, 19 bp, Homo sapiens
  siRNA target sequence for COIL (NM_004645.1,131-149).
gtcgtcacagatctcatta

SEQ ID NO: 324048 - DNA, 19 bp, Homo sapiens
  siRNA target sequence for COIL (NM_004645.1,133-151).
cgtcacagatctcattagt

SEQ ID NO: 324049 - DNA, 19 bp, Homo sapiens
  siRNA target sequence for COIL (NM_004645.1,256-274).
cgactgcctcagagttaaa

SEQ ID NO: 324050 - DNA, 19 bp, Homo sapiens
  siRNA target sequence for COIL (NM_004645.1,261-279).
gcctcagagttaaattaga

SEQ ID NO: 324051 - DNA, 19 bp, Homo sapiens
  siRNA target sequence for COIL (NM_004645.1,325-343).
cattaatttatctcttaga

SEQ ID NO: 324052 - DNA, 19 bp, Homo sapiens
  siRNA target sequence for COIL (NM_004645.1,426-444).
gtcgagagaacaataacaa

SEQ ID NO: 324053 - DNA, 19 bp, Homo sapiens
  siRNA target sequence for COIL (NM_004645.1,690-708).
ctagaaacagccttgttaa

SEQ ID NO: 324054 - DNA, 19 bp, Homo sapiens
  siRNA target sequence for COIL (NM_004645.1,701-719).
cttgttaaagccaaaagga

SEQ ID NO: 324055 - DNA, 19 bp, Homo sapiens
  siRNA target sequence for COIL (NM_004645.1,801-819).
gtcccagcaaagtcacttt

SEQ ID NO: 324056 - DNA, 19 bp, Homo sapiens
  siRNA target sequence for COIL (NM_004645.1,865-883).
ggaagaaccctctaccaaa

SEQ ID NO: 324057 - DNA, 19 bp, Homo sapiens
  siRNA target sequence for COIL (NM_004645.1,893-911).
gcagacaaactggctataa

SEQ ID NO: 324058 - DNA, 19 bp, Homo sapiens
  siRNA target sequence for COIL (NM_004645.1,1027-1045).
gtgtgctgcgggtttctta

SEQ ID NO: 324059 - DNA, 19 bp, Homo sapiens
  siRNA target sequence for COIL (NM_004645.1,1029-1047).
gtgctgcgggtttcttaaa

SEQ ID NO: 324060 - DNA, 19 bp, Homo sapiens
  siRNA target sequence for COIL (NM_004645.1,1031-1049).
gctgcgggtttcttaaaga

SEQ ID NO: 324061 - DNA, 19 bp, Homo sapiens
  siRNA target sequence for COIL (NM_004645.1,1048-1066).
gacagtaggcctttttgca

SEQ ID NO: 324062 - DNA, 19 bp, Homo sapiens
  siRNA target sequence for COIL (NM_004645.1,1123-1141).
gaggcgttctggctcaaat

SEQ ID NO: 324063 - DNA, 19 bp, Homo sapiens
  siRNA target sequence for COIL (NM_004645.1,1126-1144).
gcgttctggctcaaatggt

SEQ ID NO: 324064 - DNA, 19 bp, Homo sapiens
  siRNA target sequence for COIL (NM_004645.1,1181-1199).
ctccctgctagtttaggaa

SEQ ID NO: 324065 - DNA, 19 bp, Homo sapiens
  siRNA target sequence for COIL (NM_004645.1,1343-1361).
gacgtggtaaaaaattcat

SEQ ID NO: 324066 - DNA, 19 bp, Homo sapiens
  siRNA target sequence for COIL (NM_004645.1,1348-1366).
ggtaaaaaattcatctact

SEQ ID NO: 324067 - DNA, 19 bp, Homo sapiens
  siRNA target sequence for COIL (NM_004645.1,1396-1414).
gaaggactatagtctgtta

SEQ ID NO: 324068 - DNA, 19 bp, Homo sapiens
  siRNA target sequence for COIL (NM_004645.1,1538-1556).
gagacccagcaagtagata

SEQ ID NO: 324069 - DNA, 19 bp, Homo sapiens
  siRNA target sequence for COIL (NM_004645.1,1540-1558).
gacccagcaagtagatata

SEQ ID NO: 324070 - DNA, 19 bp, Homo sapiens
  siRNA target sequence for COIL (NM_004645.1,1693-1711).
gattgacccaagactgatt

SEQ ID NO: 324071 - DNA, 19 bp, Homo sapiens
  siRNA target sequence for COIL (NM_004645.1,1699-1717).
cccaagactgattattgaa

SEQ ID NO: 324072 - DNA, 19 bp, Homo sapiens
  siRNA target sequence for COIL (NM_004645.1,1700-1718).
ccaagactgattattgaat

SEQ ID NO: 324073 - DNA, 19 bp, Homo sapiens
  siRNA target sequence for COIL (NM_004645.1,1721-1739).
ccaagtaacacatcaagta

SEQ ID NO: 324074 - DNA, 19 bp, Homo sapiens
  siRNA target sequence for CTNNBL1 (NM_030877.3,121-139).
gcccaataggggcacaaaa

SEQ ID NO: 324075 - DNA, 19 bp, Homo sapiens
  siRNA target sequence for CTNNBL1 (NM_030877.3,124-142).
caataggggcacaaaacgt

SEQ ID NO: 324076 - DNA, 19 bp, Homo sapiens
  siRNA target sequence for CTNNBL1 (NM_030877.3,169-187).
gaagatgcgtcggaaacaa

SEQ ID NO: 324077 - DNA, 19 bp, Homo sapiens
  siRNA target sequence for CTNNBL1 (NM_030877.3,209-227).
cgctatcgggaagaagaaa

SEQ ID NO: 324078 - DNA, 19 bp, Homo sapiens
  siRNA target sequence for CTNNBL1 (NM_030877.3,534-552).
gcttgctcggacacgataa

SEQ ID NO: 324079 - DNA, 19 bp, Homo sapiens
  siRNA target sequence for CTNNBL1 (NM_030877.3,535-553).
cttgctcggacacgataat

SEQ ID NO: 324080 - DNA, 19 bp, Homo sapiens
  siRNA target sequence for CTNNBL1 (NM_030877.3,538-556).
gctcggacacgataataca

SEQ ID NO: 324081 - DNA, 19 bp, Homo sapiens
  siRNA target sequence for CTNNBL1 (NM_030877.3,541-559).
cggacacgataatacagat

SEQ ID NO: 324082 - DNA, 19 bp, Homo sapiens
  siRNA target sequence for CTNNBL1 (NM_030877.3,564-582).
ccatagctgtggtcgattt

SEQ ID NO: 324083 - DNA, 19 bp, Homo sapiens
  siRNA target sequence for CTNNBL1 (NM_030877.3,577-595).
cgatttgcttcaggaatta

SEQ ID NO: 324084 - DNA, 19 bp, Homo sapiens
  siRNA target sequence for CTNNBL1 (NM_030877.3,675-693).
cactgctggtacagaatct

SEQ ID NO: 324085 - DNA, 19 bp, Homo sapiens
  siRNA target sequence for CTNNBL1 (NM_030877.3,700-718).
cctggatgagtctgtgaaa

SEQ ID NO: 324086 - DNA, 19 bp, Homo sapiens
  siRNA target sequence for CTNNBL1 (NM_030877.3,860-878).
gccaacaaactgtattgca

SEQ ID NO: 324087 - DNA, 19 bp, Homo sapiens
  siRNA target sequence for CTNNBL1 (NM_030877.3,879-897).
gtgaagtgctggccatatt

SEQ ID NO: 324088 - DNA, 19 bp, Homo sapiens
  siRNA target sequence for CTNNBL1 (NM_030877.3,964-982).
gcagttatccgtgtttaaa

SEQ ID NO: 324089 - DNA, 19 bp, Homo sapiens
  siRNA target sequence for CTNNBL1 (NM_030877.3,1140-1158).
ggagcagtgccctgaaagt

SEQ ID NO: 324090 - DNA, 19 bp, Homo sapiens
  siRNA target sequence for CTNNBL1 (NM_030877.3,1159-1177).
gctggaccatgccatgatt

SEQ ID NO: 324091 - DNA, 19 bp, Homo sapiens
  siRNA target sequence for CTNNBL1 (NM_030877.3,1191-1209).
cagacaactgccataagtt

SEQ ID NO: 324092 - DNA, 19 bp, Homo sapiens
  siRNA target sequence for CTNNBL1 (NM_030877.3,1195-1213).
caactgccataagtttgtt

SEQ ID NO: 324093 - DNA, 19 bp, Homo sapiens
  siRNA target sequence for CTNNBL1 (NM_030877.3,1214-1232).
gacattcttggcttacgaa

SEQ ID NO: 324094 - DNA, 19 bp, Homo sapiens
  siRNA target sequence for CTNNBL1 (NM_030877.3,1357-1375).
gcggacccggcttctgaat

SEQ ID NO: 324095 - DNA, 19 bp, Homo sapiens
  siRNA target sequence for CTNNBL1 (NM_030877.3,1358-1376).
cggacccggcttctgaata

SEQ ID NO: 324096 - DNA, 19 bp, Homo sapiens
  siRNA target sequence for CTNNBL1 (NM_030877.3,1359-1377).
ggacccggcttctgaataa

SEQ ID NO: 324097 - DNA, 19 bp, Homo sapiens
  siRNA target sequence for CTNNBL1 (NM_030877.3,1360-1378).
gacccggcttctgaataaa

SEQ ID NO: 324098 - DNA, 19 bp, Homo sapiens
  siRNA target sequence for CTNNBL1 (NM_030877.3,1362-1380).
cccggcttctgaataaatt

SEQ ID NO: 324099 - DNA, 19 bp, Homo sapiens
  siRNA target sequence for CTNNBL1 (NM_030877.3,1364-1382).
cggcttctgaataaattca

SEQ ID NO: 324100 - DNA, 19 bp, Homo sapiens
  siRNA target sequence for CTNNBL1 (NM_030877.3,1500-1518).
gagagatcatcgacaatga

SEQ ID NO: 324101 - DNA, 19 bp, Homo sapiens
  siRNA target sequence for CTNNBL1 (NM_030877.3,1632-1650).
gggttcaccagatcctaaa

SEQ ID NO: 324102 - DNA, 19 bp, Homo sapiens
  siRNA target sequence for CTNNBL1 (NM_030877.3,1634-1652).
gttcaccagatcctaaaca

SEQ ID NO: 324103 - DNA, 19 bp, Homo sapiens
  siRNA target sequence for CTNNBL1 (NM_030877.3,1654-1672).
gcgaggaagctccatcaaa

SEQ ID NO: 324104 - DNA, 19 bp, Homo sapiens
  siRNA target sequence for CTNNBL1 (NM_030877.3,1656-1674).
gaggaagctccatcaaaat

SEQ ID NO: 324105 - DNA, 19 bp, Homo sapiens
  siRNA target sequence for D21S2056E (NM_003683.3,129-147).
ggaagctccggaaatacat

SEQ ID NO: 324106 - DNA, 19 bp, Homo sapiens
  siRNA target sequence for D21S2056E (NM_003683.3,260-278).
gaattaggaaggactattt

SEQ ID NO: 324107 - DNA, 19 bp, Homo sapiens
  siRNA target sequence for D21S2056E (NM_003683.3,279-297).
cccagctcgttcatgcttt

SEQ ID NO: 324108 - DNA, 19 bp, Homo sapiens
  siRNA target sequence for D21S2056E (NM_003683.3,280-298).
ccagctcgttcatgctttt

SEQ ID NO: 324109 - DNA, 19 bp, Homo sapiens
  siRNA target sequence for D21S2056E (NM_003683.3,375-393).
ggctgcgcctggataaatt

SEQ ID NO: 324110 - DNA, 19 bp, Homo sapiens
  siRNA target sequence for D21S2056E (NM_003683.3,540-558).
gccacttcatcgagatctt

SEQ ID NO: 324111 - DNA, 19 bp, Homo sapiens
  siRNA target sequence for D21S2056E (NM_003683.3,656-674).
gattccttggttttgaaca

SEQ ID NO: 324112 - DNA, 19 bp, Homo sapiens
  siRNA target sequence for D21S2056E (NM_003683.3,660-678).
ccttggttttgaacaacat

SEQ ID NO: 324113 - DNA, 19 bp, Homo sapiens
  siRNA target sequence for D21S2056E (NM_003683.3,940-958).
cgaggcagttgctaacaga

SEQ ID NO: 324114 - DNA, 19 bp, Homo sapiens
  siRNA target sequence for D21S2056E (NM_003683.3,950-968).
gctaacagactgtttgaaa

SEQ ID NO: 324115 - DNA, 19 bp, Homo sapiens
  siRNA target sequence for D21S2056E (NM_003683.3,1000-1018).
cagaaagcgtctctacaaa

SEQ ID NO: 324116 - DNA, 19 bp, Homo sapiens
  siRNA target sequence for D21S2056E (NM_003683.3,1002-1020).
gaaagcgtctctacaaagt

SEQ ID NO: 324117 - DNA, 19 bp, Homo sapiens
  siRNA target sequence for DKFZp761B128 (NM_152437.1,1845-1863).
ccccatgtgtagggaattt

SEQ ID NO: 324118 - DNA, 19 bp, Homo sapiens
  siRNA target sequence for DKFZp761B128 (NM_152437.1,1866-1884).
ctctgagagagcagatctt

SEQ ID NO: 324119 - DNA, 19 bp, Homo sapiens
  siRNA target sequence for DKFZp761B128 (NM_152437.1,1868-1886).
ctgagagagcagatctttt

SEQ ID NO: 324120 - DNA, 19 bp, Homo sapiens
  siRNA target sequence for DKFZp761B128 (NM_152437.1,1874-1892).
gagcagatctttttatgca

SEQ ID NO: 324121 - DNA, 19 bp, Homo sapiens
  siRNA target sequence for DKFZp761B128 (NM_152437.1,1944-1962).
gggtttctttcatatatca

SEQ ID NO: 324122 - DNA, 19 bp, Homo sapiens
  siRNA target sequence for DKFZp761B128 (NM_152437.1,2028-2046).
ggattttagcactacaaca

SEQ ID NO: 324123 - DNA, 19 bp, Homo sapiens
  siRNA target sequence for DNTTIP1 (NM_052951.2,157-175).
ggcagctggttcttacgaa

SEQ ID NO: 324124 - DNA, 19 bp, Homo sapiens
  siRNA target sequence for DNTTIP1 (NM_052951.2,172-190).
cgaacccttggaacataat

SEQ ID NO: 324125 - DNA, 19 bp, Homo sapiens
  siRNA target sequence for DNTTIP1 (NM_052951.2,176-194).
cccttggaacataatgata

SEQ ID NO: 324126 - DNA, 19 bp, Homo sapiens
  siRNA target sequence for DNTTIP1 (NM_052951.2,177-195).
ccttggaacataatgataa

SEQ ID NO: 324127 - DNA, 19 bp, Homo sapiens
  siRNA target sequence for DNTTIP1 (NM_052951.2,178-196).
cttggaacataatgataaa

SEQ ID NO: 324128 - DNA, 19 bp, Homo sapiens
  siRNA target sequence for DNTTIP1 (NM_052951.2,438-456).
caggctaaactgctctttt

SEQ ID NO: 324129 - DNA, 19 bp, Homo sapiens
  siRNA target sequence for DNTTIP1 (NM_052951.2,514-532).
gccgtcaggcagaagaaga

SEQ ID NO: 324130 - DNA, 19 bp, Homo sapiens
  siRNA target sequence for DNTTIP1 (NM_052951.2,516-534).
cgtcaggcagaagaagaat

SEQ ID NO: 324131 - DNA, 19 bp, Homo sapiens
  siRNA target sequence for DNTTIP1 (NM_052951.2,546-564).
ggaagcccccttcctaaaa

SEQ ID NO: 324132 - DNA, 19 bp, Homo sapiens
  siRNA target sequence for DNTTIP1 (NM_052951.2,618-636).
ggcatggtatggaaaccaa

SEQ ID NO: 324133 - DNA, 19 bp, Homo sapiens
  siRNA target sequence for DNTTIP1 (NM_052951.2,619-637).
gcatggtatggaaaccaaa

SEQ ID NO: 324134 - DNA, 19 bp, Homo sapiens
  siRNA target sequence for DNTTIP1 (NM_052951.2,677-695).
cccagctcgcctgaatgaa

SEQ ID NO: 324135 - DNA, 19 bp, Homo sapiens
  siRNA target sequence for DNTTIP1 (NM_052951.2,678-696).
ccagctcgcctgaatgaat

SEQ ID NO: 324136 - DNA, 19 bp, Homo sapiens
  siRNA target sequence for DNTTIP1 (NM_052951.2,693-711).
gaatctaccacctttgtgt

SEQ ID NO: 324137 - DNA, 19 bp, Homo sapiens
  siRNA target sequence for DNTTIP1 (NM_052951.2,754-772).
gaggaagaatctacatcaa

SEQ ID NO: 324138 - DNA, 19 bp, Homo sapiens
  siRNA target sequence for DXS9928E (NM_004699.1,181-199).
gcggaggagaacatcatga

SEQ ID NO: 324139 - DNA, 19 bp, Homo sapiens
  siRNA target sequence for DXS9928E (NM_004699.1,409-427).
gaagccaagcggaagatct

SEQ ID NO: 324140 - DNA, 19 bp, Homo sapiens
  siRNA target sequence for DXS9928E (NM_004699.1,712-730).
cggacagtcaagatgagaa

SEQ ID NO: 324141 - DNA, 19 bp, Homo sapiens
  siRNA target sequence for DXS9928E (NM_004699.1,769-787).
gagatccttcggaaagact

SEQ ID NO: 324142 - DNA, 19 bp, Homo sapiens
  siRNA target sequence for DXS9928E (NM_004699.1,902-920).
gtggaccactcttcaactt

SEQ ID NO: 324143 - DNA, 19 bp, Homo sapiens
  siRNA target sequence for DXS9928E (NM_004699.1,905-923).
gaccactcttcaactttga

SEQ ID NO: 324144 - DNA, 19 bp, Homo sapiens
  siRNA target sequence for FAM9A (NM_174951.2,1017-1035).
gccgctacttgagcaatta

SEQ ID NO: 324145 - DNA, 19 bp, Homo sapiens
  siRNA target sequence for FAM9A (NM_174951.2,1019-1037).
cgctacttgagcaattact

SEQ ID NO: 324146 - DNA, 19 bp, Homo sapiens
  siRNA target sequence for FAM9A (NM_174951.2,1020-1038).
gctacttgagcaattacta

SEQ ID NO: 324147 - DNA, 19 bp, Homo sapiens
  siRNA target sequence for FAM9A (NM_174951.2,1021-1039).
ctacttgagcaattactaa

SEQ ID NO: 324148 - DNA, 19 bp, Homo sapiens
  siRNA target sequence for FAM9A (NM_174951.2,1041-1059).
ggctgccaaggacactaaa

SEQ ID NO: 324149 - DNA, 19 bp, Homo sapiens
  siRNA target sequence for FAM9A (NM_174951.2,1045-1063).
gccaaggacactaaagaca

SEQ ID NO: 324150 - DNA, 19 bp, Homo sapiens
  siRNA target sequence for FAM9A (NM_174951.2,1047-1065).
caaggacactaaagacaat

SEQ ID NO: 324151 - DNA, 19 bp, Homo sapiens
  siRNA target sequence for FAM9A (NM_174951.2,1050-1068).
ggacactaaagacaattat

SEQ ID NO: 324152 - DNA, 19 bp, Homo sapiens
  siRNA target sequence for FAM9A (NM_174951.2,1051-1069).
gacactaaagacaattatt

SEQ ID NO: 324153 - DNA, 19 bp, Homo sapiens
  siRNA target sequence for FAM9C (NM_174901.2,575-593).
cgaatgtccttgaagagtt

SEQ ID NO: 324154 - DNA, 19 bp, Homo sapiens
  siRNA target sequence for FBXL4 (NM_012160.3,365-383).
ccggtctttcccatgttaa

SEQ ID NO: 324155 - DNA, 19 bp, Homo sapiens
  siRNA target sequence for FBXL4 (NM_012160.3,367-385).
ggtctttcccatgttaaca

SEQ ID NO: 324156 - DNA, 19 bp, Homo sapiens
  siRNA target sequence for FBXL4 (NM_012160.3,386-404).
gttctgaccatgttttatt

SEQ ID NO: 324157 - DNA, 19 bp, Homo sapiens
  siRNA target sequence for FBXL4 (NM_012160.3,389-407).
ctgaccatgttttattata

SEQ ID NO: 324158 - DNA, 19 bp, Homo sapiens
  siRNA target sequence for FBXL4 (NM_012160.3,432-450).
cagctacaagaggagaaat

SEQ ID NO: 324159 - DNA, 19 bp, Homo sapiens
  siRNA target sequence for FBXL4 (NM_012160.3,454-472).
gaacacccatagagctata

SEQ ID NO: 324160 - DNA, 19 bp, Homo sapiens
  siRNA target sequence for FBXL4 (NM_012160.3,484-502).
ccagacttcccctctcaat

SEQ ID NO: 324161 - DNA, 19 bp, Homo sapiens
  siRNA target sequence for FBXL4 (NM_012160.3,554-572).
ggaagtgagaatagtatgt

SEQ ID NO: 324162 - DNA, 19 bp, Homo sapiens
  siRNA target sequence for FBXL4 (NM_012160.3,592-610).
ggctggtgtaccaaatgta

SEQ ID NO: 324163 - DNA, 19 bp, Homo sapiens
  siRNA target sequence for FBXL4 (NM_012160.3,593-611).
gctggtgtaccaaatgtat

SEQ ID NO: 324164 - DNA, 19 bp, Homo sapiens
  siRNA target sequence for FBXL4 (NM_012160.3,594-612).
ctggtgtaccaaatgtatt

SEQ ID NO: 324165 - DNA, 19 bp, Homo sapiens
  siRNA target sequence for FBXL4 (NM_012160.3,618-636).
gttctggtgactttactca

SEQ ID NO: 324166 - DNA, 19 bp, Homo sapiens
  siRNA target sequence for FBXL4 (NM_012160.3,684-702).
gtgcttccttgccattcaa

SEQ ID NO: 324167 - DNA, 19 bp, Homo sapiens
  siRNA target sequence for FBXL4 (NM_012160.3,686-704).
gcttccttgccattcaaga

SEQ ID NO: 324168 - DNA, 19 bp, Homo sapiens
  siRNA target sequence for FBXL4 (NM_012160.3,700-718).
caagaggacgccacctaat

SEQ ID NO: 324169 - DNA, 19 bp, Homo sapiens
  siRNA target sequence for FBXL4 (NM_012160.3,703-721).
gaggacgccacctaatttt

SEQ ID NO: 324170 - DNA, 19 bp, Homo sapiens
  siRNA target sequence for FBXL4 (NM_012160.3,705-723).
ggacgccacctaattttca

SEQ ID NO: 324171 - DNA, 19 bp, Homo sapiens
  siRNA target sequence for FBXL4 (NM_012160.3,752-770).
gaacaacaggtgtatccta

SEQ ID NO: 324172 - DNA, 19 bp, Homo sapiens
  siRNA target sequence for FBXL4 (NM_012160.3,768-786).
ctacagctgtacatgttct

SEQ ID NO: 324173 - DNA, 19 bp, Homo sapiens
  siRNA target sequence for FBXL4 (NM_012160.3,773-791).
gctgtacatgttctagaaa

SEQ ID NO: 324174 - DNA, 19 bp, Homo sapiens
  siRNA target sequence for FBXL4 (NM_012160.3,800-818).
cccggagcagtcattagaa

SEQ ID NO: 324175 - DNA, 19 bp, Homo sapiens
  siRNA target sequence for FBXL4 (NM_012160.3,801-819).
ccggagcagtcattagaat

SEQ ID NO: 324176 - DNA, 19 bp, Homo sapiens
  siRNA target sequence for FBXL4 (NM_012160.3,802-820).
cggagcagtcattagaatt

SEQ ID NO: 324177 - DNA, 19 bp, Homo sapiens
  siRNA target sequence for FBXL4 (NM_012160.3,823-841).
cgcttgttctgcaaatcct

SEQ ID NO: 324178 - DNA, 19 bp, Homo sapiens
  siRNA target sequence for FBXL4 (NM_012160.3,854-872).
ccaccagctgaagtaagat

SEQ ID NO: 324179 - DNA, 19 bp, Homo sapiens
  siRNA target sequence for FBXL4 (NM_012160.3,866-884).
gtaagatgggagattcttt

SEQ ID NO: 324180 - DNA, 19 bp, Homo sapiens
  siRNA target sequence for FBXL4 (NM_012160.3,896-914).
cctacgaaggtgaatgctt

SEQ ID NO: 324181 - DNA, 19 bp, Homo sapiens
  siRNA target sequence for FBXL4 (NM_012160.3,916-934).
ccaagctcgccagtttaaa

SEQ ID NO: 324182 - DNA, 19 bp, Homo sapiens
  siRNA target sequence for FBXL4 (NM_012160.3,920-938).
gctcgccagtttaaacctt

SEQ ID NO: 324183 - DNA, 19 bp, Homo sapiens
  siRNA target sequence for FBXL4 (NM_012160.3,924-942).
gccagtttaaaccttgtat

SEQ ID NO: 324184 - DNA, 19 bp, Homo sapiens
  siRNA target sequence for FBXL4 (NM_012160.3,926-944).
cagtttaaaccttgtatta

SEQ ID NO: 324185 - DNA, 19 bp, Homo sapiens
  siRNA target sequence for FBXL4 (NM_012160.3,968-986).
cttatacgactggaagtaa

SEQ ID NO: 324186 - DNA, 19 bp, Homo sapiens
  siRNA target sequence for FBXL4 (NM_012160.3,998-1016).
ctggaatattacactgaat

SEQ ID NO: 324187 - DNA, 19 bp, Homo sapiens
  siRNA target sequence for FBXL4 (NM_012160.3,1055-1073).
gtgctttctctcaagactt

SEQ ID NO: 324188 - DNA, 19 bp, Homo sapiens
  siRNA target sequence for FBXL4 (NM_012160.3,1130-1148).
ggaatggacagtcttaaca

SEQ ID NO: 324189 - DNA, 19 bp, Homo sapiens
  siRNA target sequence for FBXL4 (NM_012160.3,1169-1187).
ctcggggaagggccaaata

SEQ ID NO: 324190 - DNA, 19 bp, Homo sapiens
  siRNA target sequence for FBXL4 (NM_012160.3,1171-1189).
cggggaagggccaaataat

SEQ ID NO: 324191 - DNA, 19 bp, Homo sapiens
  siRNA target sequence for FBXL4 (NM_012160.3,1225-1243).
gctgattctgaatcatctt

SEQ ID NO: 324192 - DNA, 19 bp, Homo sapiens
  siRNA target sequence for FBXL4 (NM_012160.3,1226-1244).
ctgattctgaatcatctta

SEQ ID NO: 324193 - DNA, 19 bp, Homo sapiens
  siRNA target sequence for FBXL4 (NM_012160.3,1228-1246).
gattctgaatcatcttaca

SEQ ID NO: 324194 - DNA, 19 bp, Homo sapiens
  siRNA target sequence for FBXL4 (NM_012160.3,1338-1356).
catactgggcaaaactaga

SEQ ID NO: 324195 - DNA, 19 bp, Homo sapiens
  siRNA target sequence for FBXL4 (NM_012160.3,1362-1380).
cttctctggaatttctaca

SEQ ID NO: 324196 - DNA, 19 bp, Homo sapiens
  siRNA target sequence for FBXL4 (NM_012160.3,1397-1415).
gtccagtggcttaatttat

SEQ ID NO: 324197 - DNA, 19 bp, Homo sapiens
  siRNA target sequence for FBXL4 (NM_012160.3,1424-1442).
ggcaatagaggcttcatct

SEQ ID NO: 324198 - DNA, 19 bp, Homo sapiens
  siRNA target sequence for FBXL4 (NM_012160.3,1452-1470).
gatttagcaggtttctgaa

SEQ ID NO: 324199 - DNA, 19 bp, Homo sapiens
  siRNA target sequence for FBXL4 (NM_012160.3,1471-1489).
ggtttgtggatccgaatta

SEQ ID NO: 324200 - DNA, 19 bp, Homo sapiens
  siRNA target sequence for FBXL4 (NM_012160.3,1484-1502).
gaattagtacgccttgaat

SEQ ID NO: 324201 - DNA, 19 bp, Homo sapiens
  siRNA target sequence for FBXL4 (NM_012160.3,1509-1527).
gcagccactttcttaatga

SEQ ID NO: 324202 - DNA, 19 bp, Homo sapiens
  siRNA target sequence for FBXL4 (NM_012160.3,1560-1578).
caaatctacaggccttaaa

SEQ ID NO: 324203 - DNA, 19 bp, Homo sapiens
  siRNA target sequence for FBXL4 (NM_012160.3,1565-1583).
ctacaggccttaaatctct

SEQ ID NO: 324204 - DNA, 19 bp, Homo sapiens
  siRNA target sequence for FBXL4 (NM_012160.3,1582-1600).
ctcctcctgtgataagcta

SEQ ID NO: 324205 - DNA, 19 bp, Homo sapiens
  siRNA target sequence for FBXL4 (NM_012160.3,1619-1637).
cacattgccaagttatgca

SEQ ID NO: 324206 - DNA, 19 bp, Homo sapiens
  siRNA target sequence for FBXL4 (NM_012160.3,1630-1648).
gttatgcagccttaaacga

SEQ ID NO: 324207 - DNA, 19 bp, Homo sapiens
  siRNA target sequence for FBXL4 (NM_012160.3,1636-1654).
cagccttaaacgacttgtt

SEQ ID NO: 324208 - DNA, 19 bp, Homo sapiens
  siRNA target sequence for FBXL4 (NM_012160.3,1638-1656).
gccttaaacgacttgttct

SEQ ID NO: 324209 - DNA, 19 bp, Homo sapiens
  siRNA target sequence for FBXL4 (NM_012160.3,1646-1664).
cgacttgttctctatcgaa

SEQ ID NO: 324210 - DNA, 19 bp, Homo sapiens
  siRNA target sequence for FBXL4 (NM_012160.3,1688-1706).
ctcagcattttgaacttct

SEQ ID NO: 324211 - DNA, 19 bp, Homo sapiens
  siRNA target sequence for FBXL4 (NM_012160.3,1714-1732).
gcttcagcacctcagttta

SEQ ID NO: 324212 - DNA, 19 bp, Homo sapiens
  siRNA target sequence for FBXL4 (NM_012160.3,1734-1752).
gcagttgtgtcatgattga

SEQ ID NO: 324213 - DNA, 19 bp, Homo sapiens
  siRNA target sequence for FBXL4 (NM_012160.3,1754-1772).
gactatgatgtgatagcta

SEQ ID NO: 324214 - DNA, 19 bp, Homo sapiens
  siRNA target sequence for FBXL4 (NM_012160.3,1777-1795).
gataggagccaagtgtaaa

SEQ ID NO: 324215 - DNA, 19 bp, Homo sapiens
  siRNA target sequence for FBXL4 (NM_012160.3,1808-1826).
ctggatctgtggagatgta

SEQ ID NO: 324216 - DNA, 19 bp, Homo sapiens
  siRNA target sequence for FBXL4 (NM_012160.3,1811-1829).
gatctgtggagatgtaaga

SEQ ID NO: 324217 - DNA, 19 bp, Homo sapiens
  siRNA target sequence for FBXL4 (NM_012160.3,1960-1978).
cttgcaaaaactctttctt

SEQ ID NO: 324218 - DNA, 19 bp, Homo sapiens
  siRNA target sequence for FBXL4 (NM_012160.3,1970-1988).
ctctttcttacagctaata

SEQ ID NO: 324219 - DNA, 19 bp, Homo sapiens
  siRNA target sequence for FBXL4 (NM_012160.3,1972-1990).
ctttcttacagctaataga

SEQ ID NO: 324220 - DNA, 19 bp, Homo sapiens
  siRNA target sequence for FBXL4 (NM_012160.3,2050-2068).
ggacatattaggaacaaga

SEQ ID NO: 324221 - DNA, 19 bp, Homo sapiens
  siRNA target sequence for FBXL4 (NM_012160.3,2051-2069).
gacatattaggaacaagaa

SEQ ID NO: 324222 - DNA, 19 bp, Homo sapiens
  siRNA target sequence for FBXL4 (NM_012160.3,2071-2089).
ggtaagtccggcatcctta

SEQ ID NO: 324223 - DNA, 19 bp, Homo sapiens
  siRNA target sequence for FBXL4 (NM_012160.3,2076-2094).
gtccggcatccttaagaaa

SEQ ID NO: 324224 - DNA, 19 bp, Homo sapiens
  siRNA target sequence for FBXL4 (NM_012160.3,2079-2097).
cggcatccttaagaaaact

SEQ ID NO: 324225 - DNA, 19 bp, Homo sapiens
  siRNA target sequence for FBXL4 (NM_012160.3,2126-2144).
cttgatgtgtccttctgtt

SEQ ID NO: 324226 - DNA, 19 bp, Homo sapiens
  siRNA target sequence for FBXL4 (NM_012160.3,2136-2154).
ccttctgttcgcagattga

SEQ ID NO: 324227 - DNA, 19 bp, Homo sapiens
  siRNA target sequence for FBXL4 (NM_012160.3,2137-2155).
cttctgttcgcagattgat

SEQ ID NO: 324228 - DNA, 19 bp, Homo sapiens
  siRNA target sequence for FBXL4 (NM_012160.3,2180-2198).
gcaagctttccaaaagtgt

SEQ ID NO: 324229 - DNA, 19 bp, Homo sapiens
  siRNA target sequence for FHL2 (NM_001450.2,727-745).
gactgcaaggacttgtctt

SEQ ID NO: 324230 - DNA, 19 bp, Homo sapiens
  siRNA target sequence for FHL2 (NM_001450.2,731-749).
gcaaggacttgtcttacaa

SEQ ID NO: 324231 - DNA, 19 bp, Homo sapiens
  siRNA target sequence for FHL2 (NM_001450.2,998-1016).
gtttcatccccaaagacaa

SEQ ID NO: 324232 - DNA, 19 bp, Homo sapiens
  siRNA target sequence for FHL2 (NM_001450.2,1032-1050).
gccctgctatgagaaacaa

SEQ ID NO: 324233 - DNA, 19 bp, Homo sapiens
  siRNA target sequence for FHL2 (NM_001450.2,1034-1052).
cctgctatgagaaacaaca

SEQ ID NO: 324234 - DNA, 19 bp, Homo sapiens
  siRNA target sequence for FHL2 (NM_001450.2,1179-1197).
cacagctcgcgatgacttt

SEQ ID NO: 324235 - DNA, 19 bp, Homo sapiens
  siRNA target sequence for FHL2 (NM_001450.2,1396-1414).
cccgactgtgggaaagaca

SEQ ID NO: 324236 - DNA, 19 bp, Homo sapiens
  siRNA target sequence for FHL2 (NM_001450.2,1397-1415).
ccgactgtgggaaagacat

SEQ ID NO: 324237 - DNA, 19 bp, Homo sapiens
  siRNA target sequence for FJX1 (NM_014344.2,698-716).
ggcgaggccctgtcttact

SEQ ID NO: 324238 - DNA, 19 bp, Homo sapiens
  siRNA target sequence for FJX1 (NM_014344.2,700-718).
cgaggccctgtcttactat

SEQ ID NO: 324239 - DNA, 19 bp, Homo sapiens
  siRNA target sequence for FJX1 (NM_014344.2,976-994).
gctggtggacctagtacaa

SEQ ID NO: 324240 - DNA, 19 bp, Homo sapiens
  siRNA target sequence for FJX1 (NM_014344.2,977-995).
ctggtggacctagtacaat

SEQ ID NO: 324241 - DNA, 19 bp, Homo sapiens
  siRNA target sequence for FJX1 (NM_014344.2,989-1007).
gtacaatggaccgacttaa

SEQ ID NO: 324242 - DNA, 19 bp, Homo sapiens
  siRNA target sequence for FJX1 (NM_014344.2,996-1014).
ggaccgacttaatcctttt

SEQ ID NO: 324243 - DNA, 19 bp, Homo sapiens
  siRNA target sequence for FJX1 (NM_014344.2,999-1017).
ccgacttaatccttttcga

SEQ ID NO: 324244 - DNA, 19 bp, Homo sapiens
  siRNA target sequence for FLJ13479 (NM_024706.3,622-640).
gtcctgtaccaagacattt

SEQ ID NO: 324245 - DNA, 19 bp, Homo sapiens
  siRNA target sequence for FLJ14011 (NM_022103.2,483-501).
ctgccagaaactagtttct

SEQ ID NO: 324246 - DNA, 19 bp, Homo sapiens
  siRNA target sequence for FLJ14011 (NM_022103.2,623-641).
gtcgaagcttctctcttaa

SEQ ID NO: 324247 - DNA, 19 bp, Homo sapiens
  siRNA target sequence for FLJ14011 (NM_022103.2,629-647).
gcttctctcttaaacttca

SEQ ID NO: 324248 - DNA, 19 bp, Homo sapiens
  siRNA target sequence for FLJ14011 (NM_022103.2,630-648).
cttctctcttaaacttcat

SEQ ID NO: 324249 - DNA, 19 bp, Homo sapiens
  siRNA target sequence for FLJ14011 (NM_022103.2,797-815).
gaacaacccttattctaca

SEQ ID NO: 324250 - DNA, 19 bp, Homo sapiens
  siRNA target sequence for FLJ14011 (NM_022103.2,866-884).
gtcaatgtcagtctttcaa

SEQ ID NO: 324251 - DNA, 19 bp, Homo sapiens
  siRNA target sequence for FLJ14011 (NM_022103.2,901-919).
catgttgttgggaatgtct

SEQ ID NO: 324252 - DNA, 19 bp, Homo sapiens
  siRNA target sequence for FLJ14011 (NM_022103.2,1122-1140).
gcaaagaagtcaccattta

SEQ ID NO: 324253 - DNA, 19 bp, Homo sapiens
  siRNA target sequence for FLJ14011 (NM_022103.2,1197-1215).
gatgcttcaccagagaatt

SEQ ID NO: 324254 - DNA, 19 bp, Homo sapiens
  siRNA target sequence for FLJ14011 (NM_022103.2,1268-1286).
ggctttcaacccttattct

SEQ ID NO: 324255 - DNA, 19 bp, Homo sapiens
  siRNA target sequence for FLJ14011 (NM_022103.2,1342-1360).
gtctgcaatcggcattcat

SEQ ID NO: 324256 - DNA, 19 bp, Homo sapiens
  siRNA target sequence for FLJ20079 (NM_017656.1,218-236).
cttcagaatgggaaataca

SEQ ID NO: 324257 - DNA, 19 bp, Homo sapiens
  siRNA target sequence for FLJ21628 (NM_030613.1,53-71).
gtaaaaaggccccataact

SEQ ID NO: 324258 - DNA, 19 bp, Homo sapiens
  siRNA target sequence for FLJ21628 (NM_030613.1,61-79).
gccccataactgtaattca

SEQ ID NO: 324259 - DNA, 19 bp, Homo sapiens
  siRNA target sequence for FLJ21628 (NM_030613.1,63-81).
cccataactgtaattcaca

SEQ ID NO: 324260 - DNA, 19 bp, Homo sapiens
  siRNA target sequence for FLJ21628 (NM_030613.1,64-82).
ccataactgtaattcacat

SEQ ID NO: 324261 - DNA, 19 bp, Homo sapiens
  siRNA target sequence for FLJ21628 (NM_030613.1,186-204).
gctcatcccttcttaagca

SEQ ID NO: 324262 - DNA, 19 bp, Homo sapiens
  siRNA target sequence for FLJ21628 (NM_030613.1,419-437).
ggcaaagccttccataaga

SEQ ID NO: 324263 - DNA, 19 bp, Homo sapiens
  siRNA target sequence for FLJ21628 (NM_030613.1,430-448).
ccataagaattcatctctt

SEQ ID NO: 324264 - DNA, 19 bp, Homo sapiens
  siRNA target sequence for FLJ21628 (NM_030613.1,600-618).
gtcaaagcatgcatcttat

SEQ ID NO: 324265 - DNA, 19 bp, Homo sapiens
  siRNA target sequence for FLJ21628 (NM_030613.1,606-624).
gcatgcatcttattgtaca

SEQ ID NO: 324266 - DNA, 19 bp, Homo sapiens
  siRNA target sequence for FLJ21628 (NM_030613.1,607-625).
catgcatcttattgtacat

SEQ ID NO: 324267 - DNA, 19 bp, Homo sapiens
  siRNA target sequence for FLJ21628 (NM_030613.1,774-792).
gtacatatcttatagaaca

SEQ ID NO: 324268 - DNA, 19 bp, Homo sapiens
  siRNA target sequence for FLJ22059 (NM_022752.2,149-167).
gtgcttatgcaccaaaact

SEQ ID NO: 324269 - DNA, 19 bp, Homo sapiens
  siRNA target sequence for FLJ22059 (NM_022752.2,243-261).
caggcacgggcctctatca

SEQ ID NO: 324270 - DNA, 19 bp, Homo sapiens
  siRNA target sequence for FLJ22059 (NM_022752.2,544-562).
ggggtccccagttgttcta

SEQ ID NO: 324271 - DNA, 19 bp, Homo sapiens
  siRNA target sequence for FLJ22059 (NM_022752.2,1501-1519).
gacccggcaccaacgtttt

SEQ ID NO: 324272 - DNA, 19 bp, Homo sapiens
  siRNA target sequence for FLJ22059 (NM_022752.2,1865-1883).
ggtgaatacccctacaagt

SEQ ID NO: 324273 - DNA, 19 bp, Homo sapiens
  siRNA target sequence for FLJ22059 (NM_022752.2,2045-2063).
gccccacggcgctttgagt

SEQ ID NO: 324274 - DNA, 19 bp, Homo sapiens
  siRNA target sequence for FLJ22059 (NM_022752.2,2067-2085).
gcacctgtggcaagaaagt

SEQ ID NO: 324275 - DNA, 19 bp, Homo sapiens
  siRNA target sequence for FLJ30726 (NM_153018.1,180-198).
gagccacatgggtcattat

SEQ ID NO: 324276 - DNA, 19 bp, Homo sapiens
  siRNA target sequence for FLJ30726 (NM_153018.1,182-200).
gccacatgggtcattatta

SEQ ID NO: 324277 - DNA, 19 bp, Homo sapiens
  siRNA target sequence for FLJ30726 (NM_153018.1,184-202).
cacatgggtcattattaga

SEQ ID NO: 324278 - DNA, 19 bp, Homo sapiens
  siRNA target sequence for FLJ30726 (NM_153018.1,186-204).
catgggtcattattagaaa

SEQ ID NO: 324279 - DNA, 19 bp, Homo sapiens
  siRNA target sequence for FLJ30726 (NM_153018.1,189-207).
gggtcattattagaaaaat

SEQ ID NO: 324280 - DNA, 19 bp, Homo sapiens
  siRNA target sequence for FLJ30726 (NM_153018.1,284-302).
gtccatggaagaggttata

SEQ ID NO: 324281 - DNA, 19 bp, Homo sapiens
  siRNA target sequence for FLJ30726 (NM_153018.1,333-351).
ccatcagggttgatgatct

SEQ ID NO: 324282 - DNA, 19 bp, Homo sapiens
  siRNA target sequence for FLJ30726 (NM_153018.1,334-352).
catcagggttgatgatctt

SEQ ID NO: 324283 - DNA, 19 bp, Homo sapiens
  siRNA target sequence for FLJ30726 (NM_153018.1,337-355).
cagggttgatgatctttaa

SEQ ID NO: 324284 - DNA, 19 bp, Homo sapiens
  siRNA target sequence for FLJ30726 (NM_153018.1,339-357).
gggttgatgatctttaaga

SEQ ID NO: 324285 - DNA, 19 bp, Homo sapiens
  siRNA target sequence for FLJ30726 (NM_153018.1,481-499).
gccaaaacttcctagagat

SEQ ID NO: 324286 - DNA, 19 bp, Homo sapiens
  siRNA target sequence for FLJ30726 (NM_153018.1,649-667).
gaaagacatttggaactaa

SEQ ID NO: 324287 - DNA, 19 bp, Homo sapiens
  siRNA target sequence for FLJ30726 (NM_153018.1,1164-1182).
ggccagaactcagagatta

SEQ ID NO: 324288 - DNA, 19 bp, Homo sapiens
  siRNA target sequence for FLJ30726 (NM_153018.1,1174-1192).
cagagattattagacatat

SEQ ID NO: 324289 - DNA, 19 bp, Homo sapiens
  siRNA target sequence for FLJ30726 (NM_153018.1,1176-1194).
gagattattagacatatta

SEQ ID NO: 324290 - DNA, 19 bp, Homo sapiens
  siRNA target sequence for FLJ30726 (NM_153018.1,1247-1265).
cagggggaactcagaactt

SEQ ID NO: 324291 - DNA, 19 bp, Homo sapiens
  siRNA target sequence for FLJ30726 (NM_153018.1,1251-1269).
gggaactcagaacttctta

SEQ ID NO: 324292 - DNA, 19 bp, Homo sapiens
  siRNA target sequence for FLJ30726 (NM_153018.1,1333-1351).
ggcggacctctcaccttat

SEQ ID NO: 324293 - DNA, 19 bp, Homo sapiens
  siRNA target sequence for FLJ30726 (NM_153018.1,1334-1352).
gcggacctctcaccttatt

SEQ ID NO: 324294 - DNA, 19 bp, Homo sapiens
  siRNA target sequence for FLJ30726 (NM_153018.1,1503-1521).
cagcattcccaacttatca

SEQ ID NO: 324295 - DNA, 19 bp, Homo sapiens
  siRNA target sequence for FLJ30726 (NM_153018.1,1601-1619).
cctccgacatcaaagtgtt

SEQ ID NO: 324296 - DNA, 19 bp, Homo sapiens
  siRNA target sequence for FLJ32053 (NM_152484.2,618-636).
ggagtggaagagattggat

SEQ ID NO: 324297 - DNA, 19 bp, Homo sapiens
  siRNA target sequence for FLJ32053 (NM_152484.2,809-827).
gagttgatgagcatcagaa

SEQ ID NO: 324298 - DNA, 19 bp, Homo sapiens
  siRNA target sequence for FLJ32053 (NM_152484.2,811-829).
gttgatgagcatcagaaaa

SEQ ID NO: 324299 - DNA, 19 bp, Homo sapiens
  siRNA target sequence for FLJ32053 (NM_152484.2,892-910).
ggcaatgaatgtcaaaaga

SEQ ID NO: 324300 - DNA, 19 bp, Homo sapiens
  siRNA target sequence for FLJ32053 (NM_152484.2,953-971).
ccagacacaatctctatga

SEQ ID NO: 324301 - DNA, 19 bp, Homo sapiens
  siRNA target sequence for FLJ32053 (NM_152484.2,956-974).
gacacaatctctatgagta

SEQ ID NO: 324302 - DNA, 19 bp, Homo sapiens
  siRNA target sequence for FLJ32053 (NM_152484.2,964-982).
ctctatgagtatgacttat

SEQ ID NO: 324303 - DNA, 19 bp, Homo sapiens
  siRNA target sequence for FLJ32053 (NM_152484.2,1040-1058).
gaaaggagcattgtgaata

SEQ ID NO: 324304 - DNA, 19 bp, Homo sapiens
  siRNA target sequence for FLJ32053 (NM_152484.2,1044-1062).
ggagcattgtgaatataat

SEQ ID NO: 324305 - DNA, 19 bp, Homo sapiens
  siRNA target sequence for FLJ32053 (NM_152484.2,1102-1120).
gtcattaccccctttaagt

SEQ ID NO: 324306 - DNA, 19 bp, Homo sapiens
  siRNA target sequence for FLJ32053 (NM_152484.2,1104-1122).
cattaccccctttaagtgt

SEQ ID NO: 324307 - DNA, 19 bp, Homo sapiens
  siRNA target sequence for FLJ32053 (NM_152484.2,1268-1286).
gtagggagcagtcttacaa

SEQ ID NO: 324308 - DNA, 19 bp, Homo sapiens
  siRNA target sequence for FLJ32053 (NM_152484.2,1573-1591).
gcatcccttgctcttcata

SEQ ID NO: 324309 - DNA, 19 bp, Homo sapiens
  siRNA target sequence for FLJ32053 (NM_152484.2,1658-1676).
ccatgcttattatacatgt

SEQ ID NO: 324310 - DNA, 19 bp, Homo sapiens
  siRNA target sequence for FLJ32053 (NM_152484.2,1744-1762).
gcccttactgtacatatga

SEQ ID NO: 324311 - DNA, 19 bp, Homo sapiens
  siRNA target sequence for FLJ32053 (NM_152484.2,2237-2255).
ctcagtgctcactgcttaa

SEQ ID NO: 324312 - DNA, 19 bp, Homo sapiens
  siRNA target sequence for FLJ32053 (NM_152484.2,2239-2257).
cagtgctcactgcttaatt

SEQ ID NO: 324313 - DNA, 19 bp, Homo sapiens
  siRNA target sequence for FLJ32053 (NM_152484.2,2241-2259).
gtgctcactgcttaattta

SEQ ID NO: 324314 - DNA, 19 bp, Homo sapiens
  siRNA target sequence for FLJ32053 (NM_152484.2,2243-2261).
gctcactgcttaatttaca

SEQ ID NO: 324315 - DNA, 19 bp, Homo sapiens
  siRNA target sequence for FLJ32053 (NM_152484.2,2244-2262).
ctcactgcttaatttacat

SEQ ID NO: 324316 - DNA, 19 bp, Homo sapiens
  siRNA target sequence for FLJ32053 (NM_152484.2,2248-2266).
ctgcttaatttacatatga

SEQ ID NO: 324317 - DNA, 19 bp, Homo sapiens
  siRNA target sequence for FLJ36870 (NM_173658.1,398-416).
ggagtgaccaagaatctga

SEQ ID NO: 324318 - DNA, 19 bp, Homo sapiens
  siRNA target sequence for FLJ36870 (NM_173658.1,435-453).
ctgtgaccctgcaacaaat

SEQ ID NO: 324319 - DNA, 19 bp, Homo sapiens
  siRNA target sequence for FLJ36870 (NM_173658.1,439-457).
gaccctgcaacaaatgaga

SEQ ID NO: 324320 - DNA, 19 bp, Homo sapiens
  siRNA target sequence for FLJ36870 (NM_173658.1,474-492).
gagacagtatgtatgtact

SEQ ID NO: 324321 - DNA, 19 bp, Homo sapiens
  siRNA target sequence for FLJ36870 (NM_173658.1,637-655).
ggactgaagccctatacat

SEQ ID NO: 324322 - DNA, 19 bp, Homo sapiens
  siRNA target sequence for FLJ36870 (NM_173658.1,678-696).
cagtggaaagtcacatctt

SEQ ID NO: 324323 - DNA, 19 bp, Homo sapiens
  siRNA target sequence for FLJ36870 (NM_173658.1,766-784).
cggagttcgggccttatat

SEQ ID NO: 324324 - DNA, 19 bp, Homo sapiens
  siRNA target sequence for FLJ36870 (NM_173658.1,768-786).
gagttcgggccttatatca

SEQ ID NO: 324325 - DNA, 19 bp, Homo sapiens
  siRNA target sequence for FLJ36870 (NM_173658.1,770-788).
gttcgggccttatatcaca

SEQ ID NO: 324326 - DNA, 19 bp, Homo sapiens
  siRNA target sequence for FLJ36870 (NM_173658.1,810-828).
gaagccctattcttgtatt

SEQ ID NO: 324327 - DNA, 19 bp, Homo sapiens
  siRNA target sequence for FLJ36870 (NM_173658.1,929-947).
gtggttctaatacaaagat

SEQ ID NO: 324328 - DNA, 19 bp, Homo sapiens
  siRNA target sequence for FLJ36870 (NM_173658.1,932-950).
gttctaatacaaagattat

SEQ ID NO: 324329 - DNA, 19 bp, Homo sapiens
  siRNA target sequence for FLJ36870 (NM_173658.1,935-953).
ctaatacaaagattatgga

SEQ ID NO: 324330 - DNA, 19 bp, Homo sapiens
  siRNA target sequence for FLJ36870 (NM_173658.1,1017-1035).
cttaaggaaaactcttaat

SEQ ID NO: 324331 - DNA, 19 bp, Homo sapiens
  siRNA target sequence for FLJ36870 (NM_173658.1,1092-1110).
ggcttttacttctaatcga

SEQ ID NO: 324332 - DNA, 19 bp, Homo sapiens
  siRNA target sequence for FLJ36870 (NM_173658.1,1093-1111).
gcttttacttctaatcgaa

SEQ ID NO: 324333 - DNA, 19 bp, Homo sapiens
  siRNA target sequence for FLJ36870 (NM_173658.1,1094-1112).
cttttacttctaatcgaaa

SEQ ID NO: 324334 - DNA, 19 bp, Homo sapiens
  siRNA target sequence for FLJ36870 (NM_173658.1,1193-1211).
ctcaagttattctacactt

SEQ ID NO: 324335 - DNA, 19 bp, Homo sapiens
  siRNA target sequence for FLJ36870 (NM_173658.1,1288-1306).
caacaccagaggaaacata

SEQ ID NO: 324336 - DNA, 19 bp, Homo sapiens
  siRNA target sequence for FLJ38002 (NM_152412.1,251-269).
gttcaccacaataattcta

SEQ ID NO: 324337 - DNA, 19 bp, Homo sapiens
  siRNA target sequence for FLJ38002 (NM_152412.1,314-332).
catagaccacaacattata

SEQ ID NO: 324338 - DNA, 19 bp, Homo sapiens
  siRNA target sequence for FLJ38002 (NM_152412.1,497-515).
gcctgtgtccagcagaatt

SEQ ID NO: 324339 - DNA, 19 bp, Homo sapiens
  siRNA target sequence for FLJ38002 (NM_152412.1,628-646).
ctctgagtgtgcaaaatgt

SEQ ID NO: 324340 - DNA, 19 bp, Homo sapiens
  siRNA target sequence for FLJ38002 (NM_152412.1,736-754).
caatacctcccatcttatt

SEQ ID NO: 324341 - DNA, 19 bp, Homo sapiens
  siRNA target sequence for FLJ38002 (NM_152412.1,903-921).
gtcacagctatgtcctaat

SEQ ID NO: 324342 - DNA, 19 bp, Homo sapiens
  siRNA target sequence for FLJ38002 (NM_152412.1,909-927).
gctatgtcctaatagaaca

SEQ ID NO: 324343 - DNA, 19 bp, Homo sapiens
  siRNA target sequence for FLJ38002 (NM_152412.1,910-928).
ctatgtcctaatagaacat

SEQ ID NO: 324344 - DNA, 19 bp, Homo sapiens
  siRNA target sequence for FLJ38002 (NM_152412.1,1070-1088).
ggttgtaattctactctaa

SEQ ID NO: 324345 - DNA, 19 bp, Homo sapiens
  siRNA target sequence for FLJ38002 (NM_152412.1,1071-1089).
gttgtaattctactctaat

SEQ ID NO: 324346 - DNA, 19 bp, Homo sapiens
  siRNA target sequence for FLJ38002 (NM_152412.1,1206-1224).
cctatgaaagttctgaata

SEQ ID NO: 324347 - DNA, 19 bp, Homo sapiens
  siRNA target sequence for FLJ38002 (NM_152412.1,1238-1256).
ggtcagaactgcaatgtga

SEQ ID NO: 324348 - DNA, 19 bp, Homo sapiens
  siRNA target sequence for FLJ38002 (NM_152412.1,1243-1261).
gaactgcaatgtgatagaa

SEQ ID NO: 324349 - DNA, 19 bp, Homo sapiens
  siRNA target sequence for FLJ38002 (NM_152412.1,1325-1343).
cttagctcccatctcatta

SEQ ID NO: 324350 - DNA, 19 bp, Homo sapiens
  siRNA target sequence for FLJ38002 (NM_152412.1,1493-1511).
cagagctttaaccttatca

SEQ ID NO: 324351 - DNA, 19 bp, Homo sapiens
  siRNA target sequence for FLJ38002 (NM_152412.1,1554-1572).
ccagctgtgagaaatgctt

SEQ ID NO: 324352 - DNA, 19 bp, Homo sapiens
  siRNA target sequence for FLJ38002 (NM_152412.1,1601-1619).
cggaaaattcacgtagaaa

SEQ ID NO: 324353 - DNA, 19 bp, Homo sapiens
  siRNA target sequence for FLJ38002 (NM_152412.1,1636-1654).
cgacgttggggattttcct

SEQ ID NO: 324354 - DNA, 19 bp, Homo sapiens
  siRNA target sequence for FLJ38002 (NM_152412.1,1682-1700).
ggggaaatgcccttcatct

SEQ ID NO: 324355 - DNA, 19 bp, Homo sapiens
  siRNA target sequence for FLJ38451 (NM_175872.3,52-70).
gcaggcctggctctgattt

SEQ ID NO: 324356 - DNA, 19 bp, Homo sapiens
  siRNA target sequence for FLJ38451 (NM_175872.3,195-213).
ggcctacgtttgaaagaca

SEQ ID NO: 324357 - DNA, 19 bp, Homo sapiens
  siRNA target sequence for FLJ38451 (NM_175872.3,196-214).
gcctacgtttgaaagacat

SEQ ID NO: 324358 - DNA, 19 bp, Homo sapiens
  siRNA target sequence for FLJ38451 (NM_175872.3,197-215).
cctacgtttgaaagacatt

SEQ ID NO: 324359 - DNA, 19 bp, Homo sapiens
  siRNA target sequence for FLJ38451 (NM_175872.3,198-216).
ctacgtttgaaagacattt

SEQ ID NO: 324360 - DNA, 19 bp, Homo sapiens
  siRNA target sequence for FLJ38451 (NM_175872.3,264-282).
gtgtgtgaggcatatgtga

SEQ ID NO: 324361 - DNA, 19 bp, Homo sapiens
  siRNA target sequence for FLJ38451 (NM_175872.3,266-284).
gtgtgaggcatatgtgaaa

SEQ ID NO: 324362 - DNA, 19 bp, Homo sapiens
  siRNA target sequence for FLJ38451 (NM_175872.3,332-350).
cgtacacaaccctatcaga

SEQ ID NO: 324363 - DNA, 19 bp, Homo sapiens
  siRNA target sequence for FLJ38451 (NM_175872.3,333-351).
gtacacaaccctatcagaa

SEQ ID NO: 324364 - DNA, 19 bp, Homo sapiens
  siRNA target sequence for FLJ38451 (NM_175872.3,361-379).
gccaggcttcccctgtaaa

SEQ ID NO: 324365 - DNA, 19 bp, Homo sapiens
  siRNA target sequence for FLJ38451 (NM_175872.3,505-523).
ccgaaggtgtggtggattt

SEQ ID NO: 324366 - DNA, 19 bp, Homo sapiens
  siRNA target sequence for FLJ38451 (NM_175872.3,506-524).
cgaaggtgtggtggatttt

SEQ ID NO: 324367 - DNA, 19 bp, Homo sapiens
  siRNA target sequence for FLJ38451 (NM_175872.3,511-529).
gtgtggtggattttcacat

SEQ ID NO: 324368 - DNA, 19 bp, Homo sapiens
  siRNA target sequence for FLJ38451 (NM_175872.3,531-549).
gcactaaggcataacaagt

SEQ ID NO: 324369 - DNA, 19 bp, Homo sapiens
  siRNA target sequence for FLJ38451 (NM_175872.3,561-579).
ggggatgccttcaataaca

SEQ ID NO: 324370 - DNA, 19 bp, Homo sapiens
  siRNA target sequence for FLJ38451 (NM_175872.3,562-580).
gggatgccttcaataacaa

SEQ ID NO: 324371 - DNA, 19 bp, Homo sapiens
  siRNA target sequence for FLJ38451 (NM_175872.3,563-581).
ggatgccttcaataacaaa

SEQ ID NO: 324372 - DNA, 19 bp, Homo sapiens
  siRNA target sequence for FLJ38451 (NM_175872.3,567-585).
gccttcaataacaaatcca

SEQ ID NO: 324373 - DNA, 19 bp, Homo sapiens
  siRNA target sequence for FLJ38451 (NM_175872.3,643-661).
gtggaatcttcttcactta

SEQ ID NO: 324374 - DNA, 19 bp, Homo sapiens
  siRNA target sequence for FLJ38451 (NM_175872.3,1165-1183).
gaagctctgacctcatgaa

SEQ ID NO: 324375 - DNA, 19 bp, Homo sapiens
  siRNA target sequence for FLJ38451 (NM_175872.3,1455-1473).
ccagacaggccttacgaat

SEQ ID NO: 324376 - DNA, 19 bp, Homo sapiens
  siRNA target sequence for FLJ38451 (NM_175872.3,1620-1638).
ggcgctgtcaactacaagt

SEQ ID NO: 324377 - DNA, 19 bp, Homo sapiens
  siRNA target sequence for FLJ38451 (NM_175872.3,1621-1639).
gcgctgtcaactacaagtt

SEQ ID NO: 324378 - DNA, 19 bp, Homo sapiens
  siRNA target sequence for FLJ38451 (NM_175872.3,1623-1641).
gctgtcaactacaagttga

SEQ ID NO: 324379 - DNA, 19 bp, Homo sapiens
  siRNA target sequence for FLJ38451 (NM_175872.3,1631-1649).
ctacaagttgaaacttgtt

SEQ ID NO: 324380 - DNA, 19 bp, Homo sapiens
  siRNA target sequence for FLJ38705 (NM_173832.2,368-386).
cctgcaggcagaaaaaaga

SEQ ID NO: 324381 - DNA, 19 bp, Homo sapiens
  siRNA target sequence for FLJ38705 (NM_173832.2,545-563).
gccttcgacgcttcattta

SEQ ID NO: 324382 - DNA, 19 bp, Homo sapiens
  siRNA target sequence for FLJ38705 (NM_173832.2,546-564).
ccttcgacgcttcatttaa

SEQ ID NO: 324383 - DNA, 19 bp, Homo sapiens
  siRNA target sequence for FLJ38705 (NM_173832.2,547-565).
cttcgacgcttcatttaaa

SEQ ID NO: 324384 - DNA, 19 bp, Homo sapiens
  siRNA target sequence for FLJ38705 (NM_173832.2,550-568).
cgacgcttcatttaaagat

SEQ ID NO: 324385 - DNA, 19 bp, Homo sapiens
  siRNA target sequence for FLJ38705 (NM_173832.2,581-599).
gttcccgtgttcattcctt

SEQ ID NO: 324386 - DNA, 19 bp, Homo sapiens
  siRNA target sequence for FLJ38705 (NM_173832.2,633-651).
gtgggcggatctttaagca

SEQ ID NO: 324387 - DNA, 19 bp, Homo sapiens
  siRNA target sequence for FLJ90764 (NM_173656.1,466-484).
ccccaaaccagatctgata

SEQ ID NO: 324388 - DNA, 19 bp, Homo sapiens
  siRNA target sequence for FLJ90764 (NM_173656.1,655-673).
gcacagctaaacatttcta

SEQ ID NO: 324389 - DNA, 19 bp, Homo sapiens
  siRNA target sequence for FLJ90764 (NM_173656.1,656-674).
cacagctaaacatttctaa

SEQ ID NO: 324390 - DNA, 19 bp, Homo sapiens
  siRNA target sequence for FLJ90764 (NM_173656.1,769-787).
catgatacagggaataaaa

SEQ ID NO: 324391 - DNA, 19 bp, Homo sapiens
  siRNA target sequence for FLJ90764 (NM_173656.1,850-868).
gaggagatagccaggaaat

SEQ ID NO: 324392 - DNA, 19 bp, Homo sapiens
  siRNA target sequence for FLJ90764 (NM_173656.1,963-981).
caacccacattcagacttt

SEQ ID NO: 324393 - DNA, 19 bp, Homo sapiens
  siRNA target sequence for FLJ90764 (NM_173656.1,1379-1397).
gtttgagttctaattcagt

SEQ ID NO: 324394 - DNA, 19 bp, Homo sapiens
  siRNA target sequence for FLJ90764 (NM_173656.1,1388-1406).
ctaattcagttctgattca

SEQ ID NO: 324395 - DNA, 19 bp, Homo sapiens
  siRNA target sequence for FLJ90764 (NM_173656.1,1467-1485).
ccaccgcagttcggtattt

SEQ ID NO: 324396 - DNA, 19 bp, Homo sapiens
  siRNA target sequence for FLJ90764 (NM_173656.1,1470-1488).
ccgcagttcggtatttctt

SEQ ID NO: 324397 - DNA, 19 bp, Homo sapiens
  siRNA target sequence for FLJ90764 (NM_173656.1,1556-1574).
gtagctcccgcttcatagt

SEQ ID NO: 324398 - DNA, 19 bp, Homo sapiens
  siRNA target sequence for FLJ90764 (NM_173656.1,1721-1739).
gatggaatgcaagtttcat

SEQ ID NO: 324399 - DNA, 19 bp, Homo sapiens
  siRNA target sequence for FLJ90764 (NM_173656.1,1784-1802).
cagggctatccgcagttaa

SEQ ID NO: 324400 - DNA, 19 bp, Homo sapiens
  siRNA target sequence for FLJ90764 (NM_173656.1,1831-1849).
cctctgcctccccaacata

SEQ ID NO: 324401 - DNA, 19 bp, Homo sapiens
  siRNA target sequence for FLJ90764 (NM_173656.1,2025-2043).
gagcccgaatcctttgtct

SEQ ID NO: 324402 - DNA, 19 bp, Homo sapiens
  siRNA target sequence for HIRIP3 (NM_003609.2,526-544).
gcacgcttacgcattccat

SEQ ID NO: 324403 - DNA, 19 bp, Homo sapiens
  siRNA target sequence for HIRIP3 (NM_003609.2,718-736).
gtagcgacccggagagaaa

SEQ ID NO: 324404 - DNA, 19 bp, Homo sapiens
  siRNA target sequence for HIRIP3 (NM_003609.2,723-741).
gacccggagagaaaaaggt

SEQ ID NO: 324405 - DNA, 19 bp, Homo sapiens
  siRNA target sequence for HIRIP3 (NM_003609.2,739-757).
ggttccgcttcaattcaga

SEQ ID NO: 324406 - DNA, 19 bp, Homo sapiens
  siRNA target sequence for HIRIP3 (NM_003609.2,1151-1169).
gatcctagcccagaagaaa

SEQ ID NO: 324407 - DNA, 19 bp, Homo sapiens
  siRNA target sequence for HIRIP3 (NM_003609.2,1250-1268).
caatggccggagaaagtca

SEQ ID NO: 324408 - DNA, 19 bp, Homo sapiens
  siRNA target sequence for HIRIP3 (NM_003609.2,1768-1786).
gtggtgcccatcgaaacta

SEQ ID NO: 324409 - DNA, 19 bp, Homo sapiens
  siRNA target sequence for HIRIP3 (NM_003609.2,1770-1788).
ggtgcccatcgaaactaca

SEQ ID NO: 324410 - DNA, 19 bp, Homo sapiens
  siRNA target sequence for HIRIP3 (NM_003609.2,1771-1789).
gtgcccatcgaaactacaa

SEQ ID NO: 324411 - DNA, 19 bp, Homo sapiens
  siRNA target sequence for HIRIP3 (NM_003609.2,1774-1792).
cccatcgaaactacaagaa

SEQ ID NO: 324412 - DNA, 19 bp, Homo sapiens
  siRNA target sequence for HIRIP3 (NM_003609.2,1941-1959).
gatgttgcgaacatcatca

SEQ ID NO: 324413 - DNA, 19 bp, Homo sapiens
  siRNA target sequence for HIRIP3 (NM_003609.2,2076-2094).
cccccagactggtcacata

SEQ ID NO: 324414 - DNA, 19 bp, Homo sapiens
  siRNA target sequence for HIRIP3 (NM_003609.2,2077-2095).
ccccagactggtcacatat

SEQ ID NO: 324415 - DNA, 19 bp, Homo sapiens
  siRNA target sequence for HIRIP3 (NM_003609.2,2110-2128).
gcagtgatggcgagagtaa

SEQ ID NO: 324416 - DNA, 19 bp, Homo sapiens
  siRNA target sequence for HSPC111 (NM_016391.2,580-598).
gcctgggaccacgctaaat

SEQ ID NO: 324417 - DNA, 19 bp, Homo sapiens
  siRNA target sequence for HSPC111 (NM_016391.2,651-669).
ggtgcccctccgtaagaga

SEQ ID NO: 324418 - DNA, 19 bp, Homo sapiens
  siRNA target sequence for HSPC111 (NM_016391.2,652-670).
gtgcccctccgtaagagaa

SEQ ID NO: 324419 - DNA, 19 bp, Homo sapiens
  siRNA target sequence for HSPC111 (NM_016391.2,794-812).
gggacctcattgactatgt

SEQ ID NO: 324420 - DNA, 19 bp, Homo sapiens
  siRNA target sequence for HSPC111 (NM_016391.2,795-813).
ggacctcattgactatgta

SEQ ID NO: 324421 - DNA, 19 bp, Homo sapiens
  siRNA target sequence for HSPC111 (NM_016391.2,905-923).
gtaagatcaacgtctataa

SEQ ID NO: 324422 - DNA, 19 bp, Homo sapiens
  siRNA target sequence for HSPC111 (NM_016391.2,946-964).
caagacttcctcgattctt

SEQ ID NO: 324423 - DNA, 19 bp, Homo sapiens
  siRNA target sequence for KIAA0103 (NM_014673.2,44-62).
cgaaggtctcagagcttta

SEQ ID NO: 324424 - DNA, 19 bp, Homo sapiens
  siRNA target sequence for KIAA0103 (NM_014673.2,176-194).
ctaagctgggagatgatat

SEQ ID NO: 324425 - DNA, 19 bp, Homo sapiens
  siRNA target sequence for KIAA0103 (NM_014673.2,219-237).
gattgcagcactagactat

SEQ ID NO: 324426 - DNA, 19 bp, Homo sapiens
  siRNA target sequence for KIAA0103 (NM_014673.2,243-261).
ggatgacttggcattgttt

SEQ ID NO: 324427 - DNA, 19 bp, Homo sapiens
  siRNA target sequence for KIAA0103 (NM_014673.2,311-329).
gattaacaggcatgagatt

SEQ ID NO: 324428 - DNA, 19 bp, Homo sapiens
  siRNA target sequence for KIAA0103 (NM_014673.2,361-379).
cagctatatgataggattt

SEQ ID NO: 324429 - DNA, 19 bp, Homo sapiens
  siRNA target sequence for KIAA0103 (NM_014673.2,363-381).
gctatatgataggatttta

SEQ ID NO: 324430 - DNA, 19 bp, Homo sapiens
  siRNA target sequence for KIAA0103 (NM_014673.2,415-433).
cgtaagattgccattcgaa

SEQ ID NO: 324431 - DNA, 19 bp, Homo sapiens
  siRNA target sequence for KIAA0103 (NM_014673.2,416-434).
gtaagattgccattcgaaa

SEQ ID NO: 324432 - DNA, 19 bp, Homo sapiens
  siRNA target sequence for KIAA0103 (NM_014673.2,569-587).
gtttagaggaactaatgat

SEQ ID NO: 324433 - DNA, 19 bp, Homo sapiens
  siRNA target sequence for KIAA0103 (NM_014673.2,574-592).
gaggaactaatgatgacta

SEQ ID NO: 324434 - DNA, 19 bp, Homo sapiens
  siRNA target sequence for KIAA0103 (NM_014673.2,576-594).
ggaactaatgatgactaat

SEQ ID NO: 324435 - DNA, 19 bp, Homo sapiens
  siRNA target sequence for KIAA0103 (NM_014673.2,595-613).
ccacacaaccacttatact

SEQ ID NO: 324436 - DNA, 19 bp, Homo sapiens
  siRNA target sequence for KIAA0103 (NM_014673.2,652-670).
cttgaaaacctcgaacttt

SEQ ID NO: 324437 - DNA, 19 bp, Homo sapiens
  siRNA target sequence for KIAA0103 (NM_014673.2,661-679).
ctcgaactttcaagaaagt

SEQ ID NO: 324438 - DNA, 19 bp, Homo sapiens
  siRNA target sequence for KIAA0103 (NM_014673.2,719-737).
gagctttgtttggacttta

SEQ ID NO: 324439 - DNA, 19 bp, Homo sapiens
  siRNA target sequence for KIAA0103 (NM_014673.2,741-759).
gtcggcaagtcatattgct

SEQ ID NO: 324440 - DNA, 19 bp, Homo sapiens
  siRNA target sequence for KIAA0103 (NM_014673.2,751-769).
catattgcttctaatccaa

SEQ ID NO: 324441 - DNA, 19 bp, Homo sapiens
  siRNA target sequence for KIAA0103 (NM_014673.2,812-830).
gttgggcagctagtcaaat

SEQ ID NO: 324442 - DNA, 19 bp, Homo sapiens
  siRNA target sequence for KIAA0103 (NM_014673.2,815-833).
gggcagctagtcaaataaa

SEQ ID NO: 324443 - DNA, 19 bp, Homo sapiens
  siRNA target sequence for KIAA0103 (NM_014673.2,817-835).
gcagctagtcaaataaaca

SEQ ID NO: 324444 - DNA, 19 bp, Homo sapiens
  siRNA target sequence for KIAA0103 (NM_014673.2,867-885).
ggaaaccaaatattctctt

SEQ ID NO: 324445 - DNA, 19 bp, Homo sapiens
  siRNA target sequence for KIAA0924 (NM_014897.1,346-364).
ggagctggttgaaaactgt

SEQ ID NO: 324446 - DNA, 19 bp, Homo sapiens
  siRNA target sequence for KIAA0924 (NM_014897.1,478-496).
ggaatcaggaagtccttat

SEQ ID NO: 324447 - DNA, 19 bp, Homo sapiens
  siRNA target sequence for KIAA0924 (NM_014897.1,582-600).
ctgacgtgcatgctgttaa

SEQ ID NO: 324448 - DNA, 19 bp, Homo sapiens
  siRNA target sequence for KIAA0924 (NM_014897.1,586-604).
cgtgcatgctgttaaggaa

SEQ ID NO: 324449 - DNA, 19 bp, Homo sapiens
  siRNA target sequence for KIAA0924 (NM_014897.1,641-659).
gaagaagtctcttacaaaa

SEQ ID NO: 324450 - DNA, 19 bp, Homo sapiens
  siRNA target sequence for KIAA0924 (NM_014897.1,674-692).
gtggaggtaaaccttaata

SEQ ID NO: 324451 - DNA, 19 bp, Homo sapiens
  siRNA target sequence for KIAA0924 (NM_014897.1,685-703).
ccttaataatcaaacatta

SEQ ID NO: 324452 - DNA, 19 bp, Homo sapiens
  siRNA target sequence for KIAA0924 (NM_014897.1,746-764).
gagactcctgttcttaaga

SEQ ID NO: 324453 - DNA, 19 bp, Homo sapiens
  siRNA target sequence for KIAA0924 (NM_014897.1,748-766).
gactcctgttcttaagaca

SEQ ID NO: 324454 - DNA, 19 bp, Homo sapiens
  siRNA target sequence for KIAA0924 (NM_014897.1,807-825).
cagatgacagcaatgacta

SEQ ID NO: 324455 - DNA, 19 bp, Homo sapiens
  siRNA target sequence for KIAA0924 (NM_014897.1,1069-1087).
ccccagggtatttaacact

SEQ ID NO: 324456 - DNA, 19 bp, Homo sapiens
  siRNA target sequence for KIAA0924 (NM_014897.1,1105-1123).
gcacatgaacgttactcat

SEQ ID NO: 324457 - DNA, 19 bp, Homo sapiens
  siRNA target sequence for KIAA0924 (NM_014897.1,1106-1124).
cacatgaacgttactcata

SEQ ID NO: 324458 - DNA, 19 bp, Homo sapiens
  siRNA target sequence for KIAA0924 (NM_014897.1,1121-1139).
cataggcgcatgcagattt

SEQ ID NO: 324459 - DNA, 19 bp, Homo sapiens
  siRNA target sequence for KIAA0924 (NM_014897.1,1125-1143).
ggcgcatgcagatttgtga

SEQ ID NO: 324460 - DNA, 19 bp, Homo sapiens
  siRNA target sequence for KIAA0924 (NM_014897.1,1126-1144).
gcgcatgcagatttgtgat

SEQ ID NO: 324461 - DNA, 19 bp, Homo sapiens
  siRNA target sequence for KIAA0924 (NM_014897.1,1127-1145).
cgcatgcagatttgtgata

SEQ ID NO: 324462 - DNA, 19 bp, Homo sapiens
  siRNA target sequence for KIAA0924 (NM_014897.1,1257-1275).
cccttcatgaacatatcaa

SEQ ID NO: 324463 - DNA, 19 bp, Homo sapiens
  siRNA target sequence for KIAA0924 (NM_014897.1,1344-1362).
ctcatgtgcggaaacacat

SEQ ID NO: 324464 - DNA, 19 bp, Homo sapiens
  siRNA target sequence for KIAA0924 (NM_014897.1,1396-1414).
cgaaacctgtggaaaatca

SEQ ID NO: 324465 - DNA, 19 bp, Homo sapiens
  siRNA target sequence for KIAA0924 (NM_014897.1,1397-1415).
gaaacctgtggaaaatcat

SEQ ID NO: 324466 - DNA, 19 bp, Homo sapiens
  siRNA target sequence for KIAA0924 (NM_014897.1,1483-1501).
gaactgtgacgaaaggttt

SEQ ID NO: 324467 - DNA, 19 bp, Homo sapiens
  siRNA target sequence for KIAA0924 (NM_014897.1,1493-1511).
gaaaggtttcagtacaagt

SEQ ID NO: 324468 - DNA, 19 bp, Homo sapiens
  siRNA target sequence for KIAA0924 (NM_014897.1,1525-1543).
ccacatgagcattcatatt

SEQ ID NO: 324469 - DNA, 19 bp, Homo sapiens
  siRNA target sequence for KIAA0924 (NM_014897.1,1538-1556).
catattgggcacaaacagt

SEQ ID NO: 324470 - DNA, 19 bp, Homo sapiens
  siRNA target sequence for KIAA0924 (NM_014897.1,1600-1618).
cttcgacgaacacatgaaa

SEQ ID NO: 324471 - DNA, 19 bp, Homo sapiens
  siRNA target sequence for KIAA0924 (NM_014897.1,1829-1847).
gtccagatcccacttacaa

SEQ ID NO: 324472 - DNA, 19 bp, Homo sapiens
  siRNA target sequence for KIAA0924 (NM_014897.1,1895-1913).
ccaacccctccaatcaata

SEQ ID NO: 324473 - DNA, 19 bp, Homo sapiens
  siRNA target sequence for KIAA0924 (NM_014897.1,1896-1914).
caacccctccaatcaatat

SEQ ID NO: 324474 - DNA, 19 bp, Homo sapiens
  siRNA target sequence for KIAA0924 (NM_014897.1,1899-1917).
cccctccaatcaatatgaa

SEQ ID NO: 324475 - DNA, 19 bp, Homo sapiens
  siRNA target sequence for KIAA0924 (NM_014897.1,1900-1918).
ccctccaatcaatatgaat

SEQ ID NO: 324476 - DNA, 19 bp, Homo sapiens
  siRNA target sequence for KIAA0924 (NM_014897.1,2102-2120).
cacctggcagagaagaaca

SEQ ID NO: 324477 - DNA, 19 bp, Homo sapiens
  siRNA target sequence for KIAA0924 (NM_014897.1,2105-2123).
ctggcagagaagaacagtt

SEQ ID NO: 324478 - DNA, 19 bp, Homo sapiens
  siRNA target sequence for KIAA1190 (NM_145166.2,482-500).
ggtccctccatgagcataa

SEQ ID NO: 324479 - DNA, 19 bp, Homo sapiens
  siRNA target sequence for KIAA1190 (NM_145166.2,485-503).
ccctccatgagcataacaa

SEQ ID NO: 324480 - DNA, 19 bp, Homo sapiens
  siRNA target sequence for KIAA1190 (NM_145166.2,514-532).
ggctacgcagagaagaagt

SEQ ID NO: 324481 - DNA, 19 bp, Homo sapiens
  siRNA target sequence for KIAA1190 (NM_145166.2,515-533).
gctacgcagagaagaagtt

SEQ ID NO: 324482 - DNA, 19 bp, Homo sapiens
  siRNA target sequence for KIAA1190 (NM_145166.2,721-739).
gagcgcttccagtacaagt

SEQ ID NO: 324483 - DNA, 19 bp, Homo sapiens
  siRNA target sequence for KIAA1615 (NM_020951.1,615-633).
ggaaagtagcaagttatgt

SEQ ID NO: 324484 - DNA, 19 bp, Homo sapiens
  siRNA target sequence for KIAA1615 (NM_020951.1,634-652).
ggccttgaaggttccattt

SEQ ID NO: 324485 - DNA, 19 bp, Homo sapiens
  siRNA target sequence for KIAA1615 (NM_020951.1,736-754).
gaaaatgtgcccagttaca

SEQ ID NO: 324486 - DNA, 19 bp, Homo sapiens
  siRNA target sequence for KIAA1615 (NM_020951.1,744-762).
gcccagttacaaaactcat

SEQ ID NO: 324487 - DNA, 19 bp, Homo sapiens
  siRNA target sequence for KIAA1615 (NM_020951.1,839-857).
gttgtgacttagagtttga

SEQ ID NO: 324488 - DNA, 19 bp, Homo sapiens
  siRNA target sequence for KIAA1615 (NM_020951.1,846-864).
cttagagtttgatgaatat

SEQ ID NO: 324489 - DNA, 19 bp, Homo sapiens
  siRNA target sequence for KIAA1615 (NM_020951.1,935-953).
ccagtatgttacaactgaa

SEQ ID NO: 324490 - DNA, 19 bp, Homo sapiens
  siRNA target sequence for KIAA1615 (NM_020951.1,936-954).
cagtatgttacaactgaat

SEQ ID NO: 324491 - DNA, 19 bp, Homo sapiens
  siRNA target sequence for KIAA1615 (NM_020951.1,938-956).
gtatgttacaactgaatat

SEQ ID NO: 324492 - DNA, 19 bp, Homo sapiens
  siRNA target sequence for KIAA1615 (NM_020951.1,965-983).
gtgtgaaaccttgtaaata

SEQ ID NO: 324493 - DNA, 19 bp, Homo sapiens
  siRNA target sequence for KIAA1615 (NM_020951.1,987-1005).
ggaatatgggaatacatgt

SEQ ID NO: 324494 - DNA, 19 bp, Homo sapiens
  siRNA target sequence for KIAA1615 (NM_020951.1,988-1006).
gaatatgggaatacatgta

SEQ ID NO: 324495 - DNA, 19 bp, Homo sapiens
  siRNA target sequence for KIAA1615 (NM_020951.1,1076-1094).
gaaggacctttgaaagagt

SEQ ID NO: 324496 - DNA, 19 bp, Homo sapiens
  siRNA target sequence for KIAA1615 (NM_020951.1,1329-1347).
gaaggtttttagaattagt

SEQ ID NO: 324497 - DNA, 19 bp, Homo sapiens
  siRNA target sequence for KIAA1615 (NM_020951.1,1591-1609).
ggagtaggtagtgaactta

SEQ ID NO: 324498 - DNA, 19 bp, Homo sapiens
  siRNA target sequence for KIAA1615 (NM_020951.1,1873-1891).
cgcattcatactgatgata

SEQ ID NO: 324499 - DNA, 19 bp, Homo sapiens
  siRNA target sequence for KIAA1615 (NM_020951.1,1930-1948).
gttgttgggcatcttactt

SEQ ID NO: 324500 - DNA, 19 bp, Homo sapiens
  siRNA target sequence for KIAA1615 (NM_020951.1,1946-1964).
cttgccaaccgaaaattta

SEQ ID NO: 324501 - DNA, 19 bp, Homo sapiens
  siRNA target sequence for KIAA1615 (NM_020951.1,1950-1968).
ccaaccgaaaatttacact

SEQ ID NO: 324502 - DNA, 19 bp, Homo sapiens
  siRNA target sequence for LOC148213 (NM_138286.1,423-441).
ggtaagacacaccagaaaa

SEQ ID NO: 324503 - DNA, 19 bp, Homo sapiens
  siRNA target sequence for LOC148213 (NM_138286.1,735-753).
gtcgtcacacattacaaca

SEQ ID NO: 324504 - DNA, 19 bp, Homo sapiens
  siRNA target sequence for LOC148213 (NM_138286.1,1485-1503).
ctatcgatcctcaaaactt

SEQ ID NO: 324505 - DNA, 19 bp, Homo sapiens
  siRNA target sequence for LOC51058 (NM_015911.2,206-224).
caagaaactcatccaaaaa

SEQ ID NO: 324506 - DNA, 19 bp, Homo sapiens
  siRNA target sequence for LOC51058 (NM_015911.2,326-344).
ggcaaaaccttcaataata

SEQ ID NO: 324507 - DNA, 19 bp, Homo sapiens
  siRNA target sequence for LOC51058 (NM_015911.2,525-543).
ccacgcaccagcaagatca

SEQ ID NO: 324508 - DNA, 19 bp, Homo sapiens
  siRNA target sequence for LOC51058 (NM_015911.2,749-767).
cggaccttcagcgatatct

SEQ ID NO: 324509 - DNA, 19 bp, Homo sapiens
  siRNA target sequence for LOC51058 (NM_015911.2,843-861).
cccggagctcgaatctcat

SEQ ID NO: 324510 - DNA, 19 bp, Homo sapiens
  siRNA target sequence for LOC84661 (NM_032574.1,273-291).
caacgttgagagaatagta

SEQ ID NO: 324511 - DNA, 19 bp, Homo sapiens
  siRNA target sequence for LOC84661 (NM_032574.1,276-294).
cgttgagagaatagtagaa

SEQ ID NO: 324512 - DNA, 19 bp, Homo sapiens
  siRNA target sequence for LOC84661 (NM_032574.1,375-393).
gacagttgtgcctatctta

SEQ ID NO: 324513 - DNA, 19 bp, Homo sapiens
  siRNA target sequence for LOC84661 (NM_032574.1,377-395).
cagttgtgcctatcttatt

SEQ ID NO: 324514 - DNA, 19 bp, Homo sapiens
  siRNA target sequence for LOC84661 (NM_032574.1,427-445).
ccaccaaatcccattgaat

SEQ ID NO: 324515 - DNA, 19 bp, Homo sapiens
  siRNA target sequence for LOC90589 (NM_145233.2,584-602).
cagtgatctcccctacttt

SEQ ID NO: 324516 - DNA, 19 bp, Homo sapiens
  siRNA target sequence for LOC90589 (NM_145233.2,588-606).
gatctcccctactttcgaa

SEQ ID NO: 324517 - DNA, 19 bp, Homo sapiens
  siRNA target sequence for LOC90589 (NM_145233.2,1009-1027).
ctttcaattccgttcgata

SEQ ID NO: 324518 - DNA, 19 bp, Homo sapiens
  siRNA target sequence for LOC90589 (NM_145233.2,1177-1195).
gtgcctcgagcgttaaaat

SEQ ID NO: 324519 - DNA, 19 bp, Homo sapiens
  siRNA target sequence for LOC90589 (NM_145233.2,1180-1198).
cctcgagcgttaaaatcca

SEQ ID NO: 324520 - DNA, 19 bp, Homo sapiens
  siRNA target sequence for LOC90589 (NM_145233.2,1181-1199).
ctcgagcgttaaaatccat

SEQ ID NO: 324521 - DNA, 19 bp, Homo sapiens
  siRNA target sequence for LPIN2 (NM_014646.2,365-383).
ctatcagtgttcacctttt

SEQ ID NO: 324522 - DNA, 19 bp, Homo sapiens
  siRNA target sequence for LPIN2 (NM_014646.2,457-475).
cagtggatcttcacatgaa

SEQ ID NO: 324523 - DNA, 19 bp, Homo sapiens
  siRNA target sequence for LPIN2 (NM_014646.2,545-563).
ccttgccacctcaccaatt

SEQ ID NO: 324524 - DNA, 19 bp, Homo sapiens
  siRNA target sequence for LPIN2 (NM_014646.2,573-591).
gatcagttctttaaagata

SEQ ID NO: 324525 - DNA, 19 bp, Homo sapiens
  siRNA target sequence for LPIN2 (NM_014646.2,652-670).
cacacgtcttggaaacaga

SEQ ID NO: 324526 - DNA, 19 bp, Homo sapiens
  siRNA target sequence for LPIN2 (NM_014646.2,790-808).
gcgtgagctccgatgatga

SEQ ID NO: 324527 - DNA, 19 bp, Homo sapiens
  siRNA target sequence for LPIN2 (NM_014646.2,893-911).
ggatcattaccccttatct

SEQ ID NO: 324528 - DNA, 19 bp, Homo sapiens
  siRNA target sequence for LPIN2 (NM_014646.2,916-934).
gagattggtcccctttaga

SEQ ID NO: 324529 - DNA, 19 bp, Homo sapiens
  siRNA target sequence for LPIN2 (NM_014646.2,950-968).
gacagcgtgtcctaagagt

SEQ ID NO: 324530 - DNA, 19 bp, Homo sapiens
  siRNA target sequence for LPIN2 (NM_014646.2,954-972).
gcgtgtcctaagagtgatt

SEQ ID NO: 324531 - DNA, 19 bp, Homo sapiens
  siRNA target sequence for LPIN2 (NM_014646.2,956-974).
gtgtcctaagagtgattca

SEQ ID NO: 324532 - DNA, 19 bp, Homo sapiens
  siRNA target sequence for LPIN2 (NM_014646.2,1057-1075).
ccaaggtcagcaaaagaga

SEQ ID NO: 324533 - DNA, 19 bp, Homo sapiens
  siRNA target sequence for LPIN2 (NM_014646.2,1092-1110).
cctaggacagctacaatta

SEQ ID NO: 324534 - DNA, 19 bp, Homo sapiens
  siRNA target sequence for LPIN2 (NM_014646.2,1244-1262).
gatgagcgacccaacatct

SEQ ID NO: 324535 - DNA, 19 bp, Homo sapiens
  siRNA target sequence for LPIN2 (NM_014646.2,1367-1385).
caaaccggcagctaaagta

SEQ ID NO: 324536 - DNA, 19 bp, Homo sapiens
  siRNA target sequence for LPIN2 (NM_014646.2,1383-1401).
gtagactcgccgtcaaaga

SEQ ID NO: 324537 - DNA, 19 bp, Homo sapiens
  siRNA target sequence for LPIN2 (NM_014646.2,1386-1404).
gactcgccgtcaaagaaga

SEQ ID NO: 324538 - DNA, 19 bp, Homo sapiens
  siRNA target sequence for LPIN2 (NM_014646.2,1466-1484).
gggtctagaacctgaagtt

SEQ ID NO: 324539 - DNA, 19 bp, Homo sapiens
  siRNA target sequence for LPIN2 (NM_014646.2,1703-1721).
catggagcatatcattact

SEQ ID NO: 324540 - DNA, 19 bp, Homo sapiens
  siRNA target sequence for LPIN2 (NM_014646.2,1706-1724).
ggagcatatcattacttat

SEQ ID NO: 324541 - DNA, 19 bp, Homo sapiens
  siRNA target sequence for LPIN2 (NM_014646.2,1746-1764).
ggacttatagacaatccta

SEQ ID NO: 324542 - DNA, 19 bp, Homo sapiens
  siRNA target sequence for LPIN2 (NM_014646.2,1747-1765).
gacttatagacaatcctaa

SEQ ID NO: 324543 - DNA, 19 bp, Homo sapiens
  siRNA target sequence for LPIN2 (NM_014646.2,1755-1773).
gacaatcctaaccttgtaa

SEQ ID NO: 324544 - DNA, 19 bp, Homo sapiens
  siRNA target sequence for LPIN2 (NM_014646.2,1757-1775).
caatcctaaccttgtaata

SEQ ID NO: 324545 - DNA, 19 bp, Homo sapiens
  siRNA target sequence for LPIN2 (NM_014646.2,1761-1779).
cctaaccttgtaataagga

SEQ ID NO: 324546 - DNA, 19 bp, Homo sapiens
  siRNA target sequence for LPIN2 (NM_014646.2,1777-1795).
ggatatataatcgttacta

SEQ ID NO: 324547 - DNA, 19 bp, Homo sapiens
  siRNA target sequence for LPIN2 (NM_014646.2,2123-2141).
ccacggcagcacaacttca

SEQ ID NO: 324548 - DNA, 19 bp, Homo sapiens
  siRNA target sequence for LPIN2 (NM_014646.2,2124-2142).
cacggcagcacaacttcat

SEQ ID NO: 324549 - DNA, 19 bp, Homo sapiens
  siRNA target sequence for LPIN2 (NM_014646.2,2126-2144).
cggcagcacaacttcatat

SEQ ID NO: 324550 - DNA, 19 bp, Homo sapiens
  siRNA target sequence for LPIN2 (NM_014646.2,2127-2145).
ggcagcacaacttcatata

SEQ ID NO: 324551 - DNA, 19 bp, Homo sapiens
  siRNA target sequence for LPIN2 (NM_014646.2,2195-2213).
cgatggcccaaatgatgtt

SEQ ID NO: 324552 - DNA, 19 bp, Homo sapiens
  siRNA target sequence for LPIN2 (NM_014646.2,2200-2218).
gcccaaatgatgttgtgtt

SEQ ID NO: 324553 - DNA, 19 bp, Homo sapiens
  siRNA target sequence for LPIN2 (NM_014646.2,2208-2226).
gatgttgtgtttagtatta

SEQ ID NO: 324554 - DNA, 19 bp, Homo sapiens
  siRNA target sequence for LPIN2 (NM_014646.2,2221-2239).
gtattacaacccagtatca

SEQ ID NO: 324555 - DNA, 19 bp, Homo sapiens
  siRNA target sequence for LPIN2 (NM_014646.2,2250-2268).
cgctgtgcagggaccattt

SEQ ID NO: 324556 - DNA, 19 bp, Homo sapiens
  siRNA target sequence for LPIN2 (NM_014646.2,2374-2392).
cccaccagggtatagcaaa

SEQ ID NO: 324557 - DNA, 19 bp, Homo sapiens
  siRNA target sequence for LPIN2 (NM_014646.2,2389-2407).
caaagctctaccattccat

SEQ ID NO: 324558 - DNA, 19 bp, Homo sapiens
  siRNA target sequence for LPIN2 (NM_014646.2,2608-2626).
gtctaaatgatatcaagaa

SEQ ID NO: 324559 - DNA, 19 bp, Homo sapiens
  siRNA target sequence for LPIN2 (NM_014646.2,2639-2657).
gtctaagcagcccttctat

SEQ ID NO: 324560 - DNA, 19 bp, Homo sapiens
  siRNA target sequence for LPIN2 (NM_014646.2,2672-2690).
ccgtccaaatgatgtctat

SEQ ID NO: 324561 - DNA, 19 bp, Homo sapiens
  siRNA target sequence for LPIN2 (NM_014646.2,2738-2756).
ccccaagggtgaattaata

SEQ ID NO: 324562 - DNA, 19 bp, Homo sapiens
  siRNA target sequence for LPIN2 (NM_014646.2,2829-2847).
ctcagtaaggagcagaatt

SEQ ID NO: 324563 - DNA, 19 bp, Homo sapiens
  siRNA target sequence for MDM1 (NM_017440.2,170-188).
cctccgtggggcgaaagta

SEQ ID NO: 324564 - DNA, 19 bp, Homo sapiens
  siRNA target sequence for MDM1 (NM_017440.2,199-217).
ggacttagatcagatcaat

SEQ ID NO: 324565 - DNA, 19 bp, Homo sapiens
  siRNA target sequence for MDM1 (NM_017440.2,509-527).
caaaccatacaccagttaa

SEQ ID NO: 324566 - DNA, 19 bp, Homo sapiens
  siRNA target sequence for MDM1 (NM_017440.2,513-531).
ccatacaccagttaatgaa

SEQ ID NO: 324567 - DNA, 19 bp, Homo sapiens
  siRNA target sequence for MDM1 (NM_017440.2,555-573).
caaggttctttcagaaaat

SEQ ID NO: 324568 - DNA, 19 bp, Homo sapiens
  siRNA target sequence for MDM1 (NM_017440.2,574-592).
gtagataatgggttggata

SEQ ID NO: 324569 - DNA, 19 bp, Homo sapiens
  siRNA target sequence for MDM1 (NM_017440.2,618-636).
gactgttgttccttcatat

SEQ ID NO: 324570 - DNA, 19 bp, Homo sapiens
  siRNA target sequence for MDM1 (NM_017440.2,640-658).
gccttgagaaattctgaat

SEQ ID NO: 324571 - DNA, 19 bp, Homo sapiens
  siRNA target sequence for MDM1 (NM_017440.2,641-659).
ccttgagaaattctgaata

SEQ ID NO: 324572 - DNA, 19 bp, Homo sapiens
  siRNA target sequence for MDM1 (NM_017440.2,741-759).
gtttgttccaccattcaaa

SEQ ID NO: 324573 - DNA, 19 bp, Homo sapiens
  siRNA target sequence for MDM1 (NM_017440.2,745-763).
gttccaccattcaaaggta

SEQ ID NO: 324574 - DNA, 19 bp, Homo sapiens
  siRNA target sequence for MDM1 (NM_017440.2,769-787).
gtcatccatgaaactgaat

SEQ ID NO: 324575 - DNA, 19 bp, Homo sapiens
  siRNA target sequence for MDM1 (NM_017440.2,949-967).
cagcctaaaaggaagctta

SEQ ID NO: 324576 - DNA, 19 bp, Homo sapiens
  siRNA target sequence for MDM1 (NM_017440.2,960-978).
gaagcttactccttggaaa

SEQ ID NO: 324577 - DNA, 19 bp, Homo sapiens
  siRNA target sequence for MDM1 (NM_017440.2,963-981).
gcttactccttggaaacat

SEQ ID NO: 324578 - DNA, 19 bp, Homo sapiens
  siRNA target sequence for MDM1 (NM_017440.2,993-1011).
gaaggtgaattccgaatat

SEQ ID NO: 324579 - DNA, 19 bp, Homo sapiens
  siRNA target sequence for MDM1 (NM_017440.2,1026-1044).
gagcccagctcagtattta

SEQ ID NO: 324580 - DNA, 19 bp, Homo sapiens
  siRNA target sequence for MDM1 (NM_017440.2,1054-1072).
ggggcttggacacatgtaa

SEQ ID NO: 324581 - DNA, 19 bp, Homo sapiens
  siRNA target sequence for MDM1 (NM_017440.2,1080-1098).
catgccaaatcaggttaaa

SEQ ID NO: 324582 - DNA, 19 bp, Homo sapiens
  siRNA target sequence for MDM1 (NM_017440.2,1104-1122).
ccgagaaaaggctgagttt

SEQ ID NO: 324583 - DNA, 19 bp, Homo sapiens
  siRNA target sequence for MDM1 (NM_017440.2,1105-1123).
cgagaaaaggctgagtttt

SEQ ID NO: 324584 - DNA, 19 bp, Homo sapiens
  siRNA target sequence for MDM1 (NM_017440.2,1135-1153).
gttcaggggacgcattttt

SEQ ID NO: 324585 - DNA, 19 bp, Homo sapiens
  siRNA target sequence for MDM1 (NM_017440.2,1159-1177).
gaccatctgaatcagattt

SEQ ID NO: 324586 - DNA, 19 bp, Homo sapiens
  siRNA target sequence for MDM1 (NM_017440.2,1167-1185).
gaatcagattttatctgat

SEQ ID NO: 324587 - DNA, 19 bp, Homo sapiens
  siRNA target sequence for MDM1 (NM_017440.2,1241-1259).
gcaacatcagagcattaga

SEQ ID NO: 324588 - DNA, 19 bp, Homo sapiens
  siRNA target sequence for MDM1 (NM_017440.2,1242-1260).
caacatcagagcattagat

SEQ ID NO: 324589 - DNA, 19 bp, Homo sapiens
  siRNA target sequence for MDM1 (NM_017440.2,1245-1263).
catcagagcattagatctt

SEQ ID NO: 324590 - DNA, 19 bp, Homo sapiens
  siRNA target sequence for MDM1 (NM_017440.2,1282-1300).
cataagactttgcagaaat

SEQ ID NO: 324591 - DNA, 19 bp, Homo sapiens
  siRNA target sequence for MDM1 (NM_017440.2,1328-1346).
gaaatatcgtggaagaaca

SEQ ID NO: 324592 - DNA, 19 bp, Homo sapiens
  siRNA target sequence for MDM1 (NM_017440.2,1387-1405).
cccaccatacccgttagaa

SEQ ID NO: 324593 - DNA, 19 bp, Homo sapiens
  siRNA target sequence for MDM1 (NM_017440.2,1508-1526).
cgggcaagcaggcttttat

SEQ ID NO: 324594 - DNA, 19 bp, Homo sapiens
  siRNA target sequence for MDM1 (NM_017440.2,1562-1580).
ctaaggcagataagatgaa

SEQ ID NO: 324595 - DNA, 19 bp, Homo sapiens
  siRNA target sequence for MDM1 (NM_017440.2,1578-1596).
gaaagaagggtcagattct

SEQ ID NO: 324596 - DNA, 19 bp, Homo sapiens
  siRNA target sequence for MDM1 (NM_017440.2,1585-1603).
gggtcagattcttctgtat

SEQ ID NO: 324597 - DNA, 19 bp, Homo sapiens
  siRNA target sequence for MDM1 (NM_017440.2,1711-1729).
gtgtctccatctaagatga

SEQ ID NO: 324598 - DNA, 19 bp, Homo sapiens
  siRNA target sequence for MDM1 (NM_017440.2,1764-1782).
ctctcaggattgtttagaa

SEQ ID NO: 324599 - DNA, 19 bp, Homo sapiens
  siRNA target sequence for MDM1 (NM_017440.2,1844-1862).
ctgctggtataaaaacagt

SEQ ID NO: 324600 - DNA, 19 bp, Homo sapiens
  siRNA target sequence for MDM1 (NM_017440.2,1870-1888).
ctgcctttgcgggaagatt

SEQ ID NO: 324601 - DNA, 19 bp, Homo sapiens
  siRNA target sequence for MDM1 (NM_017440.2,1917-1935).
ggcaactcttccagtttca

SEQ ID NO: 324602 - DNA, 19 bp, Homo sapiens
  siRNA target sequence for MDM1 (NM_017440.2,1918-1936).
gcaactcttccagtttcaa

SEQ ID NO: 324603 - DNA, 19 bp, Homo sapiens
  siRNA target sequence for MDM1 (NM_017440.2,2004-2022).
gcatccctctcgacgaatt

SEQ ID NO: 324604 - DNA, 19 bp, Homo sapiens
  siRNA target sequence for MDM1 (NM_017440.2,2017-2035).
cgaattcagggctctctta

SEQ ID NO: 324605 - DNA, 19 bp, Homo sapiens
  siRNA target sequence for MDM1 (NM_017440.2,2042-2060).
cagagtttcagcacaatgt

SEQ ID NO: 324606 - DNA, 19 bp, Homo sapiens
  siRNA target sequence for MDM1 (NM_017440.2,2085-2103).
gcagttacctcaacatgaa

SEQ ID NO: 324607 - DNA, 19 bp, Homo sapiens
  siRNA target sequence for MDM1 (NM_017440.2,2125-2143).
gacagattgtctgagattt

SEQ ID NO: 324608 - DNA, 19 bp, Homo sapiens
  siRNA target sequence for MDM1 (NM_017440.2,2162-2180).
ctagtctccgggcttttca

SEQ ID NO: 324609 - DNA, 19 bp, Homo sapiens
  siRNA target sequence for MDM1 (NM_017440.2,2183-2201).
ctctggcacgagctaagaa

SEQ ID NO: 324610 - DNA, 19 bp, Homo sapiens
  siRNA target sequence for MDM1 (NM_017440.2,2209-2227).
gagaatttctggggtaaaa

SEQ ID NO: 324611 - DNA, 19 bp, Homo sapiens
  siRNA target sequence for MDM1 (NM_017440.2,2211-2229).
gaatttctggggtaaaaca

SEQ ID NO: 324612 - DNA, 19 bp, Homo sapiens
  siRNA target sequence for MDM1 (NM_020128.1,358-376).
ggatgttactcaagaaaga

SEQ ID NO: 324613 - DNA, 19 bp, Homo sapiens
  siRNA target sequence for MGC13071 (NM_032689.2,475-493).
cttactgcacctcatacat

SEQ ID NO: 324614 - DNA, 19 bp, Homo sapiens
  siRNA target sequence for MGC13071 (NM_032689.2,479-497).
ctgcacctcatacatttga

SEQ ID NO: 324615 - DNA, 19 bp, Homo sapiens
  siRNA target sequence for MGC13071 (NM_032689.2,481-499).
gcacctcatacatttgaaa

SEQ ID NO: 324616 - DNA, 19 bp, Homo sapiens
  siRNA target sequence for MGC13071 (NM_032689.2,630-648).
gctcaattcatcccttaaa

SEQ ID NO: 324617 - DNA, 19 bp, Homo sapiens
  siRNA target sequence for MGC13071 (NM_032689.2,631-649).
ctcaattcatcccttaaaa

SEQ ID NO: 324618 - DNA, 19 bp, Homo sapiens
  siRNA target sequence for MGC13071 (NM_032689.2,633-651).
caattcatcccttaaaata

SEQ ID NO: 324619 - DNA, 19 bp, Homo sapiens
  siRNA target sequence for MGC13071 (NM_032689.2,721-739).
gcacaccttgcccatcata

SEQ ID NO: 324620 - DNA, 19 bp, Homo sapiens
  siRNA target sequence for MGC13071 (NM_032689.2,887-905).
gccataaactcactataca

SEQ ID NO: 324621 - DNA, 19 bp, Homo sapiens
  siRNA target sequence for MGC13071 (NM_032689.2,954-972).
gaaggcctttagtgtatct

SEQ ID NO: 324622 - DNA, 19 bp, Homo sapiens
  siRNA target sequence for MGC13071 (NM_032689.2,1135-1153).
catgccacaagcctcatat

SEQ ID NO: 324623 - DNA, 19 bp, Homo sapiens
  siRNA target sequence for MGC13071 (NM_032689.2,1139-1157).
ccacaagcctcatatatca

SEQ ID NO: 324624 - DNA, 19 bp, Homo sapiens
  siRNA target sequence for MGC13071 (NM_032689.2,1340-1358).
ctgatggaaatccctatat

SEQ ID NO: 324625 - DNA, 19 bp, Homo sapiens
  siRNA target sequence for MGC13071 (NM_032689.2,1342-1360).
gatggaaatccctatatgt

SEQ ID NO: 324626 - DNA, 19 bp, Homo sapiens
  siRNA target sequence for MGC13071 (NM_032689.2,1388-1406).
gtagccatgaacttagtat

SEQ ID NO: 324627 - DNA, 19 bp, Homo sapiens
  siRNA target sequence for MGC13071 (NM_032689.2,1391-1409).
gccatgaacttagtataca

SEQ ID NO: 324628 - DNA, 19 bp, Homo sapiens
  siRNA target sequence for MGC13071 (NM_032689.2,1475-1493).
gatccatccttgaagtaca

SEQ ID NO: 324629 - DNA, 19 bp, Homo sapiens
  siRNA target sequence for MGC27466 (NM_152373.2,333-351).
gctgagagaaccctgtatt

SEQ ID NO: 324630 - DNA, 19 bp, Homo sapiens
  siRNA target sequence for MGC27466 (NM_152373.2,390-408).
gtgggatgtccaattacca

SEQ ID NO: 324631 - DNA, 19 bp, Homo sapiens
  siRNA target sequence for MGC27466 (NM_152373.2,392-410).
gggatgtccaattaccaaa

SEQ ID NO: 324632 - DNA, 19 bp, Homo sapiens
  siRNA target sequence for MGC27466 (NM_152373.2,393-411).
ggatgtccaattaccaaaa

SEQ ID NO: 324633 - DNA, 19 bp, Homo sapiens
  siRNA target sequence for MGC27466 (NM_152373.2,397-415).
gtccaattaccaaaacaaa

SEQ ID NO: 324634 - DNA, 19 bp, Homo sapiens
  siRNA target sequence for MGC27466 (NM_152373.2,493-511).
ctgactacccacttgttga

SEQ ID NO: 324635 - DNA, 19 bp, Homo sapiens
  siRNA target sequence for MGC27466 (NM_152373.2,497-515).
ctacccacttgttgatgaa

SEQ ID NO: 324636 - DNA, 19 bp, Homo sapiens
  siRNA target sequence for MGC27466 (NM_152373.2,593-611).
gagaatccaccattataat

SEQ ID NO: 324637 - DNA, 19 bp, Homo sapiens
  siRNA target sequence for MGC27466 (NM_152373.2,614-632).
gagcacaagtcttaatcca

SEQ ID NO: 324638 - DNA, 19 bp, Homo sapiens
  siRNA target sequence for MGC27466 (NM_152373.2,616-634).
gcacaagtcttaatccaat

SEQ ID NO: 324639 - DNA, 19 bp, Homo sapiens
  siRNA target sequence for MGC27466 (NM_152373.2,622-640).
gtcttaatccaatgagaaa

SEQ ID NO: 324640 - DNA, 19 bp, Homo sapiens
  siRNA target sequence for MGC27466 (NM_152373.2,624-642).
cttaatccaatgagaaaaa

SEQ ID NO: 324641 - DNA, 19 bp, Homo sapiens
  siRNA target sequence for MGC27466 (NM_152373.2,667-685).
gtttgccacctaatttaga

SEQ ID NO: 324642 - DNA, 19 bp, Homo sapiens
  siRNA target sequence for MGC27466 (NM_152373.2,671-689).
gccacctaatttagactta

SEQ ID NO: 324643 - DNA, 19 bp, Homo sapiens
  siRNA target sequence for MGC27466 (NM_152373.2,686-704).
cttacttaaatataataga

SEQ ID NO: 324644 - DNA, 19 bp, Homo sapiens
  siRNA target sequence for MGC27466 (NM_152373.2,712-730).
ctgtagaaaacgcttatga

SEQ ID NO: 324645 - DNA, 19 bp, Homo sapiens
  siRNA target sequence for MGC27466 (NM_152373.2,714-732).
gtagaaaacgcttatgaat

SEQ ID NO: 324646 - DNA, 19 bp, Homo sapiens
  siRNA target sequence for MGC27466 (NM_152373.2,913-931).
ggaaggcgtttatgcataa

SEQ ID NO: 324647 - DNA, 19 bp, Homo sapiens
  siRNA target sequence for MGC27466 (NM_152373.2,914-932).
gaaggcgtttatgcataaa

SEQ ID NO: 324648 - DNA, 19 bp, Homo sapiens
  siRNA target sequence for MGC27466 (NM_152373.2,1009-1027).
cttggaactcctcatttaa

SEQ ID NO: 324649 - DNA, 19 bp, Homo sapiens
  siRNA target sequence for MGC27466 (NM_152373.2,1183-1201).
catccgtgcttgttacaca

SEQ ID NO: 324650 - DNA, 19 bp, Homo sapiens
  siRNA target sequence for MGC45408 (NM_152289.1,720-738).
ggaaaagtctttactctaa

SEQ ID NO: 324651 - DNA, 19 bp, Homo sapiens
  siRNA target sequence for MGC45408 (NM_152289.1,1081-1099).
gccttaatgatcacattca

SEQ ID NO: 324652 - DNA, 19 bp, Homo sapiens
  siRNA target sequence for MGC45408 (NM_152289.1,1119-1137).
ccacacaagtgtacttact

SEQ ID NO: 324653 - DNA, 19 bp, Homo sapiens
  siRNA target sequence for MGC45408 (NM_152289.1,1319-1337).
cactacatccacaagtctt

SEQ ID NO: 324654 - DNA, 19 bp, Homo sapiens
  siRNA target sequence for MGC45408 (NM_152289.1,1321-1339).
ctacatccacaagtcttat

SEQ ID NO: 324655 - DNA, 19 bp, Homo sapiens
  siRNA target sequence for MGC45408 (NM_152289.1,1324-1342).
catccacaagtcttattca

SEQ ID NO: 324656 - DNA, 19 bp, Homo sapiens
  siRNA target sequence for NPAT (NM_002519.1,60-78).
ggcttgtattgggttactt

SEQ ID NO: 324657 - DNA, 19 bp, Homo sapiens
  siRNA target sequence for NPAT (NM_002519.1,61-79).
gcttgtattgggttactta

SEQ ID NO: 324658 - DNA, 19 bp, Homo sapiens
  siRNA target sequence for NPAT (NM_002519.1,71-89).
ggttacttacagcaagaaa

SEQ ID NO: 324659 - DNA, 19 bp, Homo sapiens
  siRNA target sequence for NPAT (NM_002519.1,179-197).
gcctgcttactgtccttat

SEQ ID NO: 324660 - DNA, 19 bp, Homo sapiens
  siRNA target sequence for NPAT (NM_002519.1,180-198).
cctgcttactgtccttatt

SEQ ID NO: 324661 - DNA, 19 bp, Homo sapiens
  siRNA target sequence for NPAT (NM_002519.1,367-385).
ccgaacgagaactggaatt

SEQ ID NO: 324662 - DNA, 19 bp, Homo sapiens
  siRNA target sequence for NPAT (NM_002519.1,435-453).
gtgcagagttgctcacttt

SEQ ID NO: 324663 - DNA, 19 bp, Homo sapiens
  siRNA target sequence for NPAT (NM_002519.1,440-458).
gagttgctcactttacctt

SEQ ID NO: 324664 - DNA, 19 bp, Homo sapiens
  siRNA target sequence for NPAT (NM_002519.1,461-479).
ctttcaggacagtttacca

SEQ ID NO: 324665 - DNA, 19 bp, Homo sapiens
  siRNA target sequence for NPAT (NM_002519.1,509-527).
cgaccaagtggccaaattt

SEQ ID NO: 324666 - DNA, 19 bp, Homo sapiens
  siRNA target sequence for NPAT (NM_002519.1,530-548).
gatccatcgaggtcatatt

SEQ ID NO: 324667 - DNA, 19 bp, Homo sapiens
  siRNA target sequence for NPAT (NM_002519.1,534-552).
catcgaggtcatattttgt

SEQ ID NO: 324668 - DNA, 19 bp, Homo sapiens
  siRNA target sequence for NPAT (NM_002519.1,593-611).
ggagaagctttaaatgtca

SEQ ID NO: 324669 - DNA, 19 bp, Homo sapiens
  siRNA target sequence for NPAT (NM_002519.1,631-649).
gaaagcacatgccagttta

SEQ ID NO: 324670 - DNA, 19 bp, Homo sapiens
  siRNA target sequence for NPAT (NM_002519.1,657-675).
ccggtagacgcaaaagtga

SEQ ID NO: 324671 - DNA, 19 bp, Homo sapiens
  siRNA target sequence for NPAT (NM_002519.1,658-676).
cggtagacgcaaaagtgaa

SEQ ID NO: 324672 - DNA, 19 bp, Homo sapiens
  siRNA target sequence for NPAT (NM_002519.1,714-732).
caacaatacggaatttcca

SEQ ID NO: 324673 - DNA, 19 bp, Homo sapiens
  siRNA target sequence for NPAT (NM_002519.1,866-884).
gcccaagtacctaagcaaa

SEQ ID NO: 324674 - DNA, 19 bp, Homo sapiens
  siRNA target sequence for NPAT (NM_002519.1,872-890).
gtacctaagcaaacagata

SEQ ID NO: 324675 - DNA, 19 bp, Homo sapiens
  siRNA target sequence for NPAT (NM_002519.1,875-893).
cctaagcaaacagataaca

SEQ ID NO: 324676 - DNA, 19 bp, Homo sapiens
  siRNA target sequence for NPAT (NM_002519.1,876-894).
ctaagcaaacagataacaa

SEQ ID NO: 324677 - DNA, 19 bp, Homo sapiens
  siRNA target sequence for NPAT (NM_002519.1,933-951).
gacttccgagtgaaattca

SEQ ID NO: 324678 - DNA, 19 bp, Homo sapiens
  siRNA target sequence for NPAT (NM_002519.1,935-953).
cttccgagtgaaattcaca

SEQ ID NO: 324679 - DNA, 19 bp, Homo sapiens
  siRNA target sequence for NPAT (NM_002519.1,966-984).
ctatacaggacatattgga

SEQ ID NO: 324680 - DNA, 19 bp, Homo sapiens
  siRNA target sequence for NPAT (NM_002519.1,1027-1045).
ctttgactatggcaaaaca

SEQ ID NO: 324681 - DNA, 19 bp, Homo sapiens
  siRNA target sequence for NPAT (NM_002519.1,1080-1098).
gtcaacctatggaatccaa

SEQ ID NO: 324682 - DNA, 19 bp, Homo sapiens
  siRNA target sequence for NPAT (NM_002519.1,1090-1108).
ggaatccaatcccagtata

SEQ ID NO: 324683 - DNA, 19 bp, Homo sapiens
  siRNA target sequence for NPAT (NM_002519.1,1095-1113).
ccaatcccagtatagtctt

SEQ ID NO: 324684 - DNA, 19 bp, Homo sapiens
  siRNA target sequence for NPAT (NM_002519.1,1096-1114).
caatcccagtatagtctta

SEQ ID NO: 324685 - DNA, 19 bp, Homo sapiens
  siRNA target sequence for NPAT (NM_002519.1,1111-1129).
cttagcagatgaaactaat

SEQ ID NO: 324686 - DNA, 19 bp, Homo sapiens
  siRNA target sequence for NPAT (NM_002519.1,1178-1196).
ggtcagcccgctttttgta

SEQ ID NO: 324687 - DNA, 19 bp, Homo sapiens
  siRNA target sequence for NPAT (NM_002519.1,1181-1199).
cagcccgctttttgtacat

SEQ ID NO: 324688 - DNA, 19 bp, Homo sapiens
  siRNA target sequence for NPAT (NM_002519.1,1186-1204).
cgctttttgtacatcctat

SEQ ID NO: 324689 - DNA, 19 bp, Homo sapiens
  siRNA target sequence for NPAT (NM_002519.1,1205-1223).
cagaatgatgacccattaa

SEQ ID NO: 324690 - DNA, 19 bp, Homo sapiens
  siRNA target sequence for NPAT (NM_002519.1,1207-1225).
gaatgatgacccattaaat

SEQ ID NO: 324691 - DNA, 19 bp, Homo sapiens
  siRNA target sequence for NPAT (NM_002519.1,1347-1365).
gtgacattgacattacctt

SEQ ID NO: 324692 - DNA, 19 bp, Homo sapiens
  siRNA target sequence for NPAT (NM_002519.1,1367-1385).
gagtccgtgcctaatttga

SEQ ID NO: 324693 - DNA, 19 bp, Homo sapiens
  siRNA target sequence for NPAT (NM_002519.1,1369-1387).
gtccgtgcctaatttgaat

SEQ ID NO: 324694 - DNA, 19 bp, Homo sapiens
  siRNA target sequence for NPAT (NM_002519.1,1456-1474).
gatgtccactgaaactgaa

SEQ ID NO: 324695 - DNA, 19 bp, Homo sapiens
  siRNA target sequence for NPAT (NM_002519.1,1518-1536).
cgagtgaatctcagttaca

SEQ ID NO: 324696 - DNA, 19 bp, Homo sapiens
  siRNA target sequence for NPAT (NM_002519.1,1537-1555).
gcctgatcagcctgatata

SEQ ID NO: 324697 - DNA, 19 bp, Homo sapiens
  siRNA target sequence for NPAT (NM_002519.1,1547-1565).
cctgatataccaataactt

SEQ ID NO: 324698 - DNA, 19 bp, Homo sapiens
  siRNA target sequence for NPAT (NM_002519.1,1550-1568).
gatataccaataacttcat

SEQ ID NO: 324699 - DNA, 19 bp, Homo sapiens
  siRNA target sequence for NPAT (NM_002519.1,1589-1607).
gctaacaatgaaaacttaa

SEQ ID NO: 324700 - DNA, 19 bp, Homo sapiens
  siRNA target sequence for NPAT (NM_002519.1,1628-1646).
caacttttatcccaagata

SEQ ID NO: 324701 - DNA, 19 bp, Homo sapiens
  siRNA target sequence for NPAT (NM_002519.1,1639-1657).
ccaagatacttcattaact

SEQ ID NO: 324702 - DNA, 19 bp, Homo sapiens
  siRNA target sequence for NPAT (NM_002519.1,1663-1681).
gccatctaaaaaaagtcaa

SEQ ID NO: 324703 - DNA, 19 bp, Homo sapiens
  siRNA target sequence for NPAT (NM_002519.1,1695-1713).
ctaatgatacagtaaaact

SEQ ID NO: 324704 - DNA, 19 bp, Homo sapiens
  siRNA target sequence for NPAT (NM_002519.1,1786-1804).
gttagaaccagttatgtca

SEQ ID NO: 324705 - DNA, 19 bp, Homo sapiens
  siRNA target sequence for NPAT (NM_002519.1,1796-1814).
gttatgtcacagctatcaa

SEQ ID NO: 324706 - DNA, 19 bp, Homo sapiens
  siRNA target sequence for NPAT (NM_002519.1,1833-1851).
gtcttcaaagtgaaatact

SEQ ID NO: 324707 - DNA, 19 bp, Homo sapiens
  siRNA target sequence for NPAT (NM_002519.1,1850-1868).
ctacctgtgtctgttgaaa

SEQ ID NO: 324708 - DNA, 19 bp, Homo sapiens
  siRNA target sequence for NPAT (NM_002519.1,1858-1876).
gtctgttgaaagttcacat

SEQ ID NO: 324709 - DNA, 19 bp, Homo sapiens
  siRNA target sequence for NPAT (NM_002519.1,1917-1935).
cgctgtcttctactaaaca

SEQ ID NO: 324710 - DNA, 19 bp, Homo sapiens
  siRNA target sequence for NPAT (NM_002519.1,1929-1947).
ctaaacaaccatctaatga

SEQ ID NO: 324711 - DNA, 19 bp, Homo sapiens
  siRNA target sequence for NPAT (NM_002519.1,1950-1968).
cagcatctgttgagttaaa

SEQ ID NO: 324712 - DNA, 19 bp, Homo sapiens
  siRNA target sequence for NPAT (NM_002519.1,1991-2009).
gcatccaagtctgagaatt

SEQ ID NO: 324713 - DNA, 19 bp, Homo sapiens
  siRNA target sequence for NPAT (NM_002519.1,2015-2033).
gagccttcatcttctgtaa

SEQ ID NO: 324714 - DNA, 19 bp, Homo sapiens
  siRNA target sequence for NPAT (NM_002519.1,2157-2175).
cttcagtgggagattctca

SEQ ID NO: 324715 - DNA, 19 bp, Homo sapiens
  siRNA target sequence for NPAT (NM_002519.1,2174-2192).
caccctgagtcccaaaata

SEQ ID NO: 324716 - DNA, 19 bp, Homo sapiens
  siRNA target sequence for NPAT (NM_002519.1,2182-2200).
gtcccaaaatactgatgat

SEQ ID NO: 324717 - DNA, 19 bp, Homo sapiens
  siRNA target sequence for NPAT (NM_002519.1,2254-2272).
caaagttatcattagtgat

SEQ ID NO: 324718 - DNA, 19 bp, Homo sapiens
  siRNA target sequence for NPAT (NM_002519.1,2276-2294).
ccatttgtttcctcagata

SEQ ID NO: 324719 - DNA, 19 bp, Homo sapiens
  siRNA target sequence for NPAT (NM_002519.1,2304-2322).
ccagtgctgtttctagtat

SEQ ID NO: 324720 - DNA, 19 bp, Homo sapiens
  siRNA target sequence for NPAT (NM_002519.1,2307-2325).
gtgctgtttctagtattaa

SEQ ID NO: 324721 - DNA, 19 bp, Homo sapiens
  siRNA target sequence for NPAT (NM_002519.1,2319-2337).
gtattaatggagaaaacct

SEQ ID NO: 324722 - DNA, 19 bp, Homo sapiens
  siRNA target sequence for NPAT (NM_002519.1,2330-2348).
gaaaacctgccaactataa

SEQ ID NO: 324723 - DNA, 19 bp, Homo sapiens
  siRNA target sequence for NPAT (NM_002519.1,2336-2354).
ctgccaactataatcttgt

SEQ ID NO: 324724 - DNA, 19 bp, Homo sapiens
  siRNA target sequence for NPAT (NM_002519.1,2339-2357).
ccaactataatcttgtctt

SEQ ID NO: 324725 - DNA, 19 bp, Homo sapiens
  siRNA target sequence for NPAT (NM_002519.1,2470-2488).
gagtcttttaacattcaaa

SEQ ID NO: 324726 - DNA, 19 bp, Homo sapiens
  siRNA target sequence for NPAT (NM_002519.1,2566-2584).
caaggatggaggatatata

SEQ ID NO: 324727 - DNA, 19 bp, Homo sapiens
  siRNA target sequence for NPAT (NM_002519.1,2570-2588).
gatggaggatatatacagt

SEQ ID NO: 324728 - DNA, 19 bp, Homo sapiens
  siRNA target sequence for NPAT (NM_002519.1,2574-2592).
gaggatatatacagttgat

SEQ ID NO: 324729 - DNA, 19 bp, Homo sapiens
  siRNA target sequence for NPAT (NM_002519.1,2607-2625).
cagcttttggcaattcaaa

SEQ ID NO: 324730 - DNA, 19 bp, Homo sapiens
  siRNA target sequence for NPAT (NM_002519.1,2663-2681).
gcgttaggaacatctgtaa

SEQ ID NO: 324731 - DNA, 19 bp, Homo sapiens
  siRNA target sequence for NPAT (NM_002519.1,2673-2691).
catctgtaagtcagtctaa

SEQ ID NO: 324732 - DNA, 19 bp, Homo sapiens
  siRNA target sequence for NPAT (NM_002519.1,2676-2694).
ctgtaagtcagtctaatgt

SEQ ID NO: 324733 - DNA, 19 bp, Homo sapiens
  siRNA target sequence for NPAT (NM_002519.1,2696-2714).
gtggtgttgcctggaaatt

SEQ ID NO: 324734 - DNA, 19 bp, Homo sapiens
  siRNA target sequence for NPAT (NM_002519.1,2736-2754).
ctctaccacctcagttaca

SEQ ID NO: 324735 - DNA, 19 bp, Homo sapiens
  siRNA target sequence for NPAT (NM_002519.1,2738-2756).
ctaccacctcagttacaga

SEQ ID NO: 324736 - DNA, 19 bp, Homo sapiens
  siRNA target sequence for NPAT (NM_002519.1,2767-2785).
gtcaaacagtgtatttgct

SEQ ID NO: 324737 - DNA, 19 bp, Homo sapiens
  siRNA target sequence for NPAT (NM_002519.1,2795-2813).
gctgtgtcaccaaactttt

SEQ ID NO: 324738 - DNA, 19 bp, Homo sapiens
  siRNA target sequence for NPAT (NM_002519.1,2816-2834).
caaggatctgccataataa

SEQ ID NO: 324739 - DNA, 19 bp, Homo sapiens
  siRNA target sequence for NPAT (NM_002519.1,2953-2971).
gacagcacctgtatgcaat

SEQ ID NO: 324740 - DNA, 19 bp, Homo sapiens
  siRNA target sequence for NPAT (NM_002519.1,2957-2975).
gcacctgtatgcaatagaa

SEQ ID NO: 324741 - DNA, 19 bp, Homo sapiens
  siRNA target sequence for NPAT (NM_002519.1,2960-2978).
cctgtatgcaatagaagta

SEQ ID NO: 324742 - DNA, 19 bp, Homo sapiens
  siRNA target sequence for NPAT (NM_002519.1,2961-2979).
ctgtatgcaatagaagtat

SEQ ID NO: 324743 - DNA, 19 bp, Homo sapiens
  siRNA target sequence for NPAT (NM_002519.1,3010-3028).
gaaggctcagggactaaga

SEQ ID NO: 324744 - DNA, 19 bp, Homo sapiens
  siRNA target sequence for NPAT (NM_002519.1,3015-3033).
ctcagggactaagaaacaa

SEQ ID NO: 324745 - DNA, 19 bp, Homo sapiens
  siRNA target sequence for NPAT (NM_002519.1,3132-3150).
ccacagatcttgggaaaaa

SEQ ID NO: 324746 - DNA, 19 bp, Homo sapiens
  siRNA target sequence for NPAT (NM_002519.1,3171-3189).
ccttcccagaagagagtat

SEQ ID NO: 324747 - DNA, 19 bp, Homo sapiens
  siRNA target sequence for NPAT (NM_002519.1,3175-3193).
cccagaagagagtatagtt

SEQ ID NO: 324748 - DNA, 19 bp, Homo sapiens
  siRNA target sequence for NPAT (NM_002519.1,3191-3209).
gttccagctgctaaaccat

SEQ ID NO: 324749 - DNA, 19 bp, Homo sapiens
  siRNA target sequence for NPAT (NM_002519.1,3261-3279).
cgcaggggccaaaccataa

SEQ ID NO: 324750 - DNA, 19 bp, Homo sapiens
  siRNA target sequence for NPAT (NM_002519.1,3309-3327).
cagtctcttttcctaatct

SEQ ID NO: 324751 - DNA, 19 bp, Homo sapiens
  siRNA target sequence for NPAT (NM_002519.1,3352-3370).
cttaaaacccccttctaat

SEQ ID NO: 324752 - DNA, 19 bp, Homo sapiens
  siRNA target sequence for NPAT (NM_002519.1,3359-3377).
cccccttctaataatgcta

SEQ ID NO: 324753 - DNA, 19 bp, Homo sapiens
  siRNA target sequence for NPAT (NM_002519.1,3360-3378).
ccccttctaataatgctat

SEQ ID NO: 324754 - DNA, 19 bp, Homo sapiens
  siRNA target sequence for NPAT (NM_002519.1,3398-3416).
cctcctctgcctaagattt

SEQ ID NO: 324755 - DNA, 19 bp, Homo sapiens
  siRNA target sequence for NPAT (NM_002519.1,3399-3417).
ctcctctgcctaagatttt

SEQ ID NO: 324756 - DNA, 19 bp, Homo sapiens
  siRNA target sequence for NPAT (NM_002519.1,3401-3419).
cctctgcctaagattttat

SEQ ID NO: 324757 - DNA, 19 bp, Homo sapiens
  siRNA target sequence for NPAT (NM_002519.1,3406-3424).
gcctaagattttatctaaa

SEQ ID NO: 324758 - DNA, 19 bp, Homo sapiens
  siRNA target sequence for NPAT (NM_002519.1,3407-3425).
cctaagattttatctaaat

SEQ ID NO: 324759 - DNA, 19 bp, Homo sapiens
  siRNA target sequence for NPAT (NM_002519.1,3442-3460).
ccggcataccaccataaga

SEQ ID NO: 324760 - DNA, 19 bp, Homo sapiens
  siRNA target sequence for NPAT (NM_002519.1,3444-3462).
ggcataccaccataagaga

SEQ ID NO: 324761 - DNA, 19 bp, Homo sapiens
  siRNA target sequence for NPAT (NM_002519.1,3445-3463).
gcataccaccataagagaa

SEQ ID NO: 324762 - DNA, 19 bp, Homo sapiens
  siRNA target sequence for NPAT (NM_002519.1,3446-3464).
cataccaccataagagaaa

SEQ ID NO: 324763 - DNA, 19 bp, Homo sapiens
  siRNA target sequence for NPAT (NM_002519.1,3450-3468).
ccaccataagagaaactca

SEQ ID NO: 324764 - DNA, 19 bp, Homo sapiens
  siRNA target sequence for NPAT (NM_002519.1,3514-3532).
ccataaagcaacagctaat

SEQ ID NO: 324765 - DNA, 19 bp, Homo sapiens
  siRNA target sequence for NPAT (NM_002519.1,3549-3567).
gcagcgatgtagaaagaca

SEQ ID NO: 324766 - DNA, 19 bp, Homo sapiens
  siRNA target sequence for NPAT (NM_002519.1,3613-3631).
gggtttgcgaagtgagaaa

SEQ ID NO: 324767 - DNA, 19 bp, Homo sapiens
  siRNA target sequence for NPAT (NM_002519.1,3614-3632).
ggtttgcgaagtgagaaat

SEQ ID NO: 324768 - DNA, 19 bp, Homo sapiens
  siRNA target sequence for NPAT (NM_002519.1,3619-3637).
gcgaagtgagaaatctata

SEQ ID NO: 324769 - DNA, 19 bp, Homo sapiens
  siRNA target sequence for NPAT (NM_002519.1,3746-3764).
gccagttctttgattacca

SEQ ID NO: 324770 - DNA, 19 bp, Homo sapiens
  siRNA target sequence for NPAT (NM_002519.1,3809-3827).
cttgctgatagtagtgatt

SEQ ID NO: 324771 - DNA, 19 bp, Homo sapiens
  siRNA target sequence for NPAT (NM_002519.1,3875-3893).
gaagaacctatagatatta

SEQ ID NO: 324772 - DNA, 19 bp, Homo sapiens
  siRNA target sequence for NPAT (NM_002519.1,3904-3922).
ctctagtaggcgtttcagt

SEQ ID NO: 324773 - DNA, 19 bp, Homo sapiens
  siRNA target sequence for NPAT (NM_002519.1,3919-3937).
cagtgaagacagtagtaca

SEQ ID NO: 324774 - DNA, 19 bp, Homo sapiens
  siRNA target sequence for NPAT (NM_002519.1,3928-3946).
cagtagtacatcaaaagta

SEQ ID NO: 324775 - DNA, 19 bp, Homo sapiens
  siRNA target sequence for NPAT (NM_002519.1,3930-3948).
gtagtacatcaaaagtaat

SEQ ID NO: 324776 - DNA, 19 bp, Homo sapiens
  siRNA target sequence for NPAT (NM_002519.1,4001-4019).
ggaagtgaaaacagtgtaa

SEQ ID NO: 324777 - DNA, 19 bp, Homo sapiens
  siRNA target sequence for NPAT (NM_002519.1,4029-4047).
cccacacattaatgattct

SEQ ID NO: 324778 - DNA, 19 bp, Homo sapiens
  siRNA target sequence for NPAT (NM_002519.1,4031-4049).
cacacattaatgattctct

SEQ ID NO: 324779 - DNA, 19 bp, Homo sapiens
  siRNA target sequence for NPAT (NM_002519.1,4058-4076).
gccatttctaggactactt

SEQ ID NO: 324780 - DNA, 19 bp, Homo sapiens
  siRNA target sequence for NPAT (NM_002519.1,4060-4078).
catttctaggactacttca

SEQ ID NO: 324781 - DNA, 19 bp, Homo sapiens
  siRNA target sequence for NPAT (NM_002519.1,4094-4112).
gataacacacaacagttta

SEQ ID NO: 324782 - DNA, 19 bp, Homo sapiens
  siRNA target sequence for NPAT (NM_002519.1,4131-4149).
ccacaaaaaagcggaaaat

SEQ ID NO: 324783 - DNA, 19 bp, Homo sapiens
  siRNA target sequence for NPAT (NM_002519.1,4141-4159).
gcggaaaattgaggaatta

SEQ ID NO: 324784 - DNA, 19 bp, Homo sapiens
  siRNA target sequence for NPAT (NM_002519.1,4177-4195).
ctctcgtccttctagtaaa

SEQ ID NO: 324785 - DNA, 19 bp, Homo sapiens
  siRNA target sequence for NPAT (NM_002519.1,4179-4197).
ctcgtccttctagtaaaaa

SEQ ID NO: 324786 - DNA, 19 bp, Homo sapiens
  siRNA target sequence for NPAT (NM_002519.1,4182-4200).
gtccttctagtaaaaatct

SEQ ID NO: 324787 - DNA, 19 bp, Homo sapiens
  siRNA target sequence for NPAT (NM_002519.1,4272-4290).
gaatggatgtagacaaatt

SEQ ID NO: 324788 - DNA, 19 bp, Homo sapiens
  siRNA target sequence for NPAT (NM_002519.1,4294-4312).
gttatcattgcattatgat

SEQ ID NO: 324789 - DNA, 19 bp, Homo sapiens
  siRNA target sequence for NUCKS (NM_022731.1,74-92).
ggcctgtcagaaataggaa

SEQ ID NO: 324790 - DNA, 19 bp, Homo sapiens
  siRNA target sequence for NUCKS (NM_022731.1,90-108).
gaaggttgttgattactca

SEQ ID NO: 324791 - DNA, 19 bp, Homo sapiens
  siRNA target sequence for NUCKS (NM_022731.1,159-177).
ccctcccactaagaaaatt

SEQ ID NO: 324792 - DNA, 19 bp, Homo sapiens
  siRNA target sequence for NUCKS (NM_022731.1,182-200).
catctccccgagaagctaa

SEQ ID NO: 324793 - DNA, 19 bp, Homo sapiens
  siRNA target sequence for NUCKS (NM_022731.1,185-203).
ctccccgagaagctaaaaa

SEQ ID NO: 324794 - DNA, 19 bp, Homo sapiens
  siRNA target sequence for NUCKS (NM_022731.1,190-208).
cgagaagctaaaaataaga

SEQ ID NO: 324795 - DNA, 19 bp, Homo sapiens
  siRNA target sequence for NUCKS (NM_022731.1,207-225).
gaggcgatctggaaagaat

SEQ ID NO: 324796 - DNA, 19 bp, Homo sapiens
  siRNA target sequence for NUCKS (NM_022731.1,288-306).
ctcagcagaggatagtgaa

SEQ ID NO: 324797 - DNA, 19 bp, Homo sapiens
  siRNA target sequence for NUCKS (NM_022731.1,345-363).
gcaggcggcatctaaagca

SEQ ID NO: 324798 - DNA, 19 bp, Homo sapiens
  siRNA target sequence for NUCKS (NM_022731.1,434-452).
caccattccaggagaaaga

SEQ ID NO: 324799 - DNA, 19 bp, Homo sapiens
  siRNA target sequence for NUCKS (NM_022731.1,436-454).
ccattccaggagaaagatt

SEQ ID NO: 324800 - DNA, 19 bp, Homo sapiens
  siRNA target sequence for NUCKS (NM_022731.1,455-473).
ccggcagcgatgaagattt

SEQ ID NO: 324801 - DNA, 19 bp, Homo sapiens
  siRNA target sequence for NUCKS (NM_022731.1,461-479).
gcgatgaagatttcctaat

SEQ ID NO: 324802 - DNA, 19 bp, Homo sapiens
  siRNA target sequence for NUSAP1 (NM_016359.1,877-895).
caagcgctctgctatctct

SEQ ID NO: 324803 - DNA, 19 bp, Homo sapiens
  siRNA target sequence for NUSAP1 (NM_016359.1,1048-1066).
gaccatcacggggaattct

SEQ ID NO: 324804 - DNA, 19 bp, Homo sapiens
  siRNA target sequence for NUSAP1 (NM_016359.1,1109-1127).
cagactccagtctccaata

SEQ ID NO: 324805 - DNA, 19 bp, Homo sapiens
  siRNA target sequence for NUSAP1 (NM_016359.1,1113-1131).
ctccagtctccaataagaa

SEQ ID NO: 324806 - DNA, 19 bp, Homo sapiens
  siRNA target sequence for NUSAP1 (NM_016359.1,1136-1154).
gtgtttgatcttaaagcaa

SEQ ID NO: 324807 - DNA, 19 bp, Homo sapiens
  siRNA target sequence for NUSAP1 (NM_016359.1,1142-1160).
gatcttaaagcaagtttgt

SEQ ID NO: 324808 - DNA, 19 bp, Homo sapiens
  siRNA target sequence for NUSAP1 (NM_016359.1,1159-1177).
gtctcgtcccctcaactat

SEQ ID NO: 324809 - DNA, 19 bp, Homo sapiens
  siRNA target sequence for NUSAP1 (NM_016359.1,1161-1179).
ctcgtcccctcaactatga

SEQ ID NO: 324810 - DNA, 19 bp, Homo sapiens
  siRNA target sequence for NUSAP1 (NM_016359.1,1203-1221).
catgggggcaatctaaaga

SEQ ID NO: 324811 - DNA, 19 bp, Homo sapiens
  siRNA target sequence for NUSAP1 (NM_016359.1,1244-1262).
gtcaacagaattaacttct

SEQ ID NO: 324812 - DNA, 19 bp, Homo sapiens
  siRNA target sequence for NUSAP1 (NM_018454.4,93-111).
ggcaaccaagttgttaaaa

SEQ ID NO: 324813 - DNA, 19 bp, Homo sapiens
  siRNA target sequence for NUSAP1 (NM_018454.4,112-130).
gccttgaaaggctacatta

SEQ ID NO: 324814 - DNA, 19 bp, Homo sapiens
  siRNA target sequence for NUSAP1 (NM_018454.4,296-314).
ctgactcacagcagaatca

SEQ ID NO: 324815 - DNA, 19 bp, Homo sapiens
  siRNA target sequence for NUSAP1 (NM_018454.4,298-316).
gactcacagcagaatcatt

SEQ ID NO: 324816 - DNA, 19 bp, Homo sapiens
  siRNA target sequence for NUSAP1 (NM_018454.4,444-462).
ctcaggtaacagagattca

SEQ ID NO: 324817 - DNA, 19 bp, Homo sapiens
  siRNA target sequence for NUSAP1 (NM_018454.4,446-464).
caggtaacagagattcaaa

SEQ ID NO: 324818 - DNA, 19 bp, Homo sapiens
  siRNA target sequence for NUSAP1 (NM_018454.4,562-580).
cttcatgaagctcatttta

SEQ ID NO: 324819 - DNA, 19 bp, Homo sapiens
  siRNA target sequence for ORF1-FL49 (NM_032412.2,207-225).
cttatccaccacaaccaat

SEQ ID NO: 324820 - DNA, 19 bp, Homo sapiens
  siRNA target sequence for ORF1-FL49 (NM_032412.2,311-329).
cctcaggagcctcctaaaa

SEQ ID NO: 324821 - DNA, 19 bp, Homo sapiens
  siRNA target sequence for ORF1-FL49 (NM_032412.2,314-332).
caggagcctcctaaaacca

SEQ ID NO: 324822 - DNA, 19 bp, Homo sapiens
  siRNA target sequence for PCNP (NM_020357.1,168-186).
gaagcgatcagctgaagaa

SEQ ID NO: 324823 - DNA, 19 bp, Homo sapiens
  siRNA target sequence for PCNP (NM_020357.1,244-262).
ggtagtcagacgacaaaga

SEQ ID NO: 324824 - DNA, 19 bp, Homo sapiens
  siRNA target sequence for PCNP (NM_020357.1,245-263).
gtagtcagacgacaaagaa

SEQ ID NO: 324825 - DNA, 19 bp, Homo sapiens
  siRNA target sequence for PELP1 (NM_014389.1,269-287).
cattggtgagtctcagtaa

SEQ ID NO: 324826 - DNA, 19 bp, Homo sapiens
  siRNA target sequence for PELP1 (NM_014389.1,356-374).
gccccacagagctattcca

SEQ ID NO: 324827 - DNA, 19 bp, Homo sapiens
  siRNA target sequence for PELP1 (NM_014389.1,592-610).
ggaatgaaggcttgtatga

SEQ ID NO: 324828 - DNA, 19 bp, Homo sapiens
  siRNA target sequence for PELP1 (NM_014389.1,702-720).
gttggcctgtgagtgttat

SEQ ID NO: 324829 - DNA, 19 bp, Homo sapiens
  siRNA target sequence for PELP1 (NM_014389.1,1047-1065).
cagcgtcagtagcaagaat

SEQ ID NO: 324830 - DNA, 19 bp, Homo sapiens
  siRNA target sequence for PELP1 (NM_014389.1,1049-1067).
gcgtcagtagcaagaatat

SEQ ID NO: 324831 - DNA, 19 bp, Homo sapiens
  siRNA target sequence for PELP1 (NM_014389.1,1051-1069).
gtcagtagcaagaatatta

SEQ ID NO: 324832 - DNA, 19 bp, Homo sapiens
  siRNA target sequence for PELP1 (NM_014389.1,1224-1242).
ctggagcatcggtagagat

SEQ ID NO: 324833 - DNA, 19 bp, Homo sapiens
  siRNA target sequence for PELP1 (NM_014389.1,1287-1305).
caaggtgtatgcgatatta

SEQ ID NO: 324834 - DNA, 19 bp, Homo sapiens
  siRNA target sequence for PELP1 (NM_014389.1,1530-1548).
ccggaaaggggatagcaat

SEQ ID NO: 324835 - DNA, 19 bp, Homo sapiens
  siRNA target sequence for PELP1 (NM_014389.1,2187-2205).
ccaccgggcaggctcaaat

SEQ ID NO: 324836 - DNA, 19 bp, Homo sapiens
  siRNA target sequence for PELP1 (NM_014389.1,2288-2306).
cagcctttgtccactatga

SEQ ID NO: 324837 - DNA, 19 bp, Homo sapiens
  siRNA target sequence for PELP1 (NM_014389.1,2629-2647).
gatttgacagttattaata

SEQ ID NO: 324838 - DNA, 19 bp, Homo sapiens
  siRNA target sequence for PELP1 (NM_014389.1,3146-3164).
ctccccaggagcttgttga

SEQ ID NO: 324839 - DNA, 19 bp, Homo sapiens
  siRNA target sequence for PELP1 (NM_014389.1,3245-3263).
cacctgcagaagaagagat

SEQ ID NO: 324840 - DNA, 19 bp, Homo sapiens
  siRNA target sequence for PELP1 (NM_014389.1,3281-3299).
ccgaagctctccaggaaaa

SEQ ID NO: 324841 - DNA, 19 bp, Homo sapiens
  siRNA target sequence for PELP1 (NM_014389.1,3325-3343).
ctggccgacttcatcgatt

SEQ ID NO: 324842 - DNA, 19 bp, Homo sapiens
  siRNA target sequence for PELP1 (NM_014389.1,3339-3357).
cgattgtccccctgatgat

SEQ ID NO: 324843 - DNA, 19 bp, Homo sapiens
  siRNA target sequence for PHLDA1 (NM_007350.1,655-673).
ctctggaagaaaaagtgtt

SEQ ID NO: 324844 - DNA, 19 bp, Homo sapiens
  siRNA target sequence for PHLDA1 (NM_007350.1,1018-1036).
gccatcctggcggtcaaat

SEQ ID NO: 324845 - DNA, 19 bp, Homo sapiens
  siRNA target sequence for PHLDA1 (NM_007350.1,1269-1287).
cccgcatccgcaccaaata

SEQ ID NO: 324846 - DNA, 19 bp, Homo sapiens
  siRNA target sequence for PLINP-1 (NM_052850.2,231-249).
ggtggtccccggttcgtta

SEQ ID NO: 324847 - DNA, 19 bp, Homo sapiens
  siRNA target sequence for PLINP-1 (NM_052850.2,232-250).
gtggtccccggttcgttat

SEQ ID NO: 324848 - DNA, 19 bp, Homo sapiens
  siRNA target sequence for PLINP-1 (NM_052850.2,284-302).
ccgaagaacgcgaatggta

SEQ ID NO: 324849 - DNA, 19 bp, Homo sapiens
  siRNA target sequence for PRAC (NM_032391.2,131-149).
gttgtgcgcccatttctca

SEQ ID NO: 324850 - DNA, 19 bp, Homo sapiens
  siRNA target sequence for PRAC (NM_032391.2,137-155).
cgcccatttctcagatcaa

SEQ ID NO: 324851 - DNA, 19 bp, Homo sapiens
  siRNA target sequence for PRAC (NM_032391.2,182-200).
gagtgcttttctctctaat

SEQ ID NO: 324852 - DNA, 19 bp, Homo sapiens
  siRNA target sequence for PRAC (NM_032391.2,194-212).
ctctaataagaaaacatct

SEQ ID NO: 324853 - DNA, 19 bp, Homo sapiens
  siRNA target sequence for RBBP5 (NM_005057.1,136-154).
gtcctttgggcagaactat

SEQ ID NO: 324854 - DNA, 19 bp, Homo sapiens
  siRNA target sequence for RBBP5 (NM_005057.1,243-261).
gtaatgatggccgaattgt

SEQ ID NO: 324855 - DNA, 19 bp, Homo sapiens
  siRNA target sequence for RBBP5 (NM_005057.1,277-295).
gacaagaggcattgctaaa

SEQ ID NO: 324856 - DNA, 19 bp, Homo sapiens
  siRNA target sequence for RBBP5 (NM_005057.1,359-377).
gtgagtgcttccactgata

SEQ ID NO: 324857 - DNA, 19 bp, Homo sapiens
  siRNA target sequence for RBBP5 (NM_005057.1,366-384).
cttccactgataacatagt

SEQ ID NO: 324858 - DNA, 19 bp, Homo sapiens
  siRNA target sequence for RBBP5 (NM_005057.1,385-403).
gtcacagtgggatgttctt

SEQ ID NO: 324859 - DNA, 19 bp, Homo sapiens
  siRNA target sequence for RBBP5 (NM_005057.1,414-432).
gtgaccagaggtttcgatt

SEQ ID NO: 324860 - DNA, 19 bp, Homo sapiens
  siRNA target sequence for RBBP5 (NM_005057.1,441-459).
ccatcttaaaagtccaata

SEQ ID NO: 324861 - DNA, 19 bp, Homo sapiens
  siRNA target sequence for RBBP5 (NM_005057.1,528-546).
cagattccaaacatgttgt

SEQ ID NO: 324862 - DNA, 19 bp, Homo sapiens
  siRNA target sequence for RBBP5 (NM_005057.1,557-575).
gacgatgactccgatttga

SEQ ID NO: 324863 - DNA, 19 bp, Homo sapiens
  siRNA target sequence for RBBP5 (NM_005057.1,574-592).
gaacgttgtggcatctttt

SEQ ID NO: 324864 - DNA, 19 bp, Homo sapiens
  siRNA target sequence for RBBP5 (NM_005057.1,577-595).
cgttgtggcatcttttgat

SEQ ID NO: 324865 - DNA, 19 bp, Homo sapiens
  siRNA target sequence for RBBP5 (NM_005057.1,578-596).
gttgtggcatcttttgata

SEQ ID NO: 324866 - DNA, 19 bp, Homo sapiens
  siRNA target sequence for RBBP5 (NM_005057.1,593-611).
gataggcgaggggaatata

SEQ ID NO: 324867 - DNA, 19 bp, Homo sapiens
  siRNA target sequence for RBBP5 (NM_005057.1,597-615).
ggcgaggggaatatattta

SEQ ID NO: 324868 - DNA, 19 bp, Homo sapiens
  siRNA target sequence for RBBP5 (NM_005057.1,637-655).
gattttggtcctaaaaaca

SEQ ID NO: 324869 - DNA, 19 bp, Homo sapiens
  siRNA target sequence for RBBP5 (NM_005057.1,713-731).
gccattaagtcaattgagt

SEQ ID NO: 324870 - DNA, 19 bp, Homo sapiens
  siRNA target sequence for RBBP5 (NM_005057.1,714-732).
ccattaagtcaattgagtt

SEQ ID NO: 324871 - DNA, 19 bp, Homo sapiens
  siRNA target sequence for RBBP5 (NM_005057.1,766-784).
ggcagatcgaataatcaga

SEQ ID NO: 324872 - DNA, 19 bp, Homo sapiens
  siRNA target sequence for RBBP5 (NM_005057.1,770-788).
gatcgaataatcagagttt

SEQ ID NO: 324873 - DNA, 19 bp, Homo sapiens
  siRNA target sequence for RBBP5 (NM_005057.1,871-889).
cccatggaagaaatgttgt

SEQ ID NO: 324874 - DNA, 19 bp, Homo sapiens
  siRNA target sequence for RBBP5 (NM_005057.1,1031-1049).
gttcgacccatcatagcat

SEQ ID NO: 324875 - DNA, 19 bp, Homo sapiens
  siRNA target sequence for RBBP5 (NM_005057.1,1037-1055).
cccatcatagcatccattt

SEQ ID NO: 324876 - DNA, 19 bp, Homo sapiens
  siRNA target sequence for RBBP5 (NM_005057.1,1056-1074).
ccagtggagtggtatctat

SEQ ID NO: 324877 - DNA, 19 bp, Homo sapiens
  siRNA target sequence for RBBP5 (NM_005057.1,1071-1089).
ctatctgggcacagaatca

SEQ ID NO: 324878 - DNA, 19 bp, Homo sapiens
  siRNA target sequence for RBBP5 (NM_005057.1,1259-1277).
cctattgctgccttctgta

SEQ ID NO: 324879 - DNA, 19 bp, Homo sapiens
  siRNA target sequence for RBBP5 (NM_005057.1,1399-1417).
ggatgaaggggctagttca

SEQ ID NO: 324880 - DNA, 19 bp, Homo sapiens
  siRNA target sequence for RBBP5 (NM_005057.1,1470-1488).
ccaaaacaaccaatataga

SEQ ID NO: 324881 - DNA, 19 bp, Homo sapiens
  siRNA target sequence for RBBP5 (NM_005057.1,1574-1592).
cctaaaggatcaaaaggta

SEQ ID NO: 324882 - DNA, 19 bp, Homo sapiens
  siRNA target sequence for RBBP5 (NM_005057.1,1575-1593).
ctaaaggatcaaaaggtaa

SEQ ID NO: 324883 - DNA, 19 bp, Homo sapiens
  siRNA target sequence for RBBP5 (NM_005057.1,1607-1625).
ccatttaaaccgaaactct

SEQ ID NO: 324884 - DNA, 19 bp, Homo sapiens
  siRNA target sequence for RBBP5 (NM_005057.1,1608-1626).
catttaaaccgaaactcta

SEQ ID NO: 324885 - DNA, 19 bp, Homo sapiens
  siRNA target sequence for RBBP5 (NM_005057.1,1656-1674).
gatcagcgaagggtaaagt

SEQ ID NO: 324886 - DNA, 19 bp, Homo sapiens
  siRNA target sequence for RNF144 (NM_014746.2,671-689).
caggagaacgagattgagt

SEQ ID NO: 324887 - DNA, 19 bp, Homo sapiens
  siRNA target sequence for RNF144 (NM_014746.2,701-719).
gctgaaattatgcaaagat

SEQ ID NO: 324888 - DNA, 19 bp, Homo sapiens
  siRNA target sequence for RNF144 (NM_014746.2,847-865).
caaagcctgccgtatggaa

SEQ ID NO: 324889 - DNA, 19 bp, Homo sapiens
  siRNA target sequence for RNF144 (NM_014746.2,946-964).
gaccagtgctgctttcaaa

SEQ ID NO: 324890 - DNA, 19 bp, Homo sapiens
  siRNA target sequence for RNF144 (NM_014746.2,999-1017).
ccaagtgcaaagtctacat

SEQ ID NO: 324891 - DNA, 19 bp, Homo sapiens
  siRNA target sequence for RNF144 (NM_014746.2,1088-1106).
gagtctctggacgatgatt

SEQ ID NO: 324892 - DNA, 19 bp, Homo sapiens
  siRNA target sequence for RNF144 (NM_014746.2,1092-1110).
ctctggacgatgatttcct

SEQ ID NO: 324893 - DNA, 19 bp, Homo sapiens
  siRNA target sequence for RNF144 (NM_014746.2,1099-1117).
cgatgatttccttctgata

SEQ ID NO: 324894 - DNA, 19 bp, Homo sapiens
  siRNA target sequence for RNF144 (NM_014746.2,1109-1127).
cttctgatacactacgata

SEQ ID NO: 324895 - DNA, 19 bp, Homo sapiens
  siRNA target sequence for RNF144 (NM_014746.2,1189-1207).
ggttgtgggcatttttgca

SEQ ID NO: 324896 - DNA, 19 bp, Homo sapiens
  siRNA target sequence for SH3BGRL2 (NM_031469.1,211-229).
cgggcttcgtggcgataaa

SEQ ID NO: 324897 - DNA, 19 bp, Homo sapiens
  siRNA target sequence for SH3BGRL2 (NM_031469.1,213-231).
ggcttcgtggcgataaaga

SEQ ID NO: 324898 - DNA, 19 bp, Homo sapiens
  siRNA target sequence for SH3BGRL2 (NM_031469.1,287-305).
ggtggatatcacaatgtca

SEQ ID NO: 324899 - DNA, 19 bp, Homo sapiens
  siRNA target sequence for SH3BGRL2 (NM_031469.1,398-416).
ccgatactgtggagattat

SEQ ID NO: 324900 - DNA, 19 bp, Homo sapiens
  siRNA target sequence for SH3BGRL2 (NM_031469.1,400-418).
gatactgtggagattatga

SEQ ID NO: 324901 - DNA, 19 bp, Homo sapiens
  siRNA target sequence for SH3BGRL2 (NM_031469.1,406-424).
gtggagattatgacagttt

SEQ ID NO: 324902 - DNA, 19 bp, Homo sapiens
  siRNA target sequence for SH3BGRL3 (NM_031286.1,106-124).
ccggctcccgcgaaatcaa

SEQ ID NO: 324903 - DNA, 19 bp, Homo sapiens
  siRNA target sequence for SH3BGRL3 (NM_031286.1,108-126).
ggctcccgcgaaatcaagt

SEQ ID NO: 324904 - DNA, 19 bp, Homo sapiens
  siRNA target sequence for UBCE7IP5 (NM_014948.2,232-250).
ctgatggttacgaagtaga

SEQ ID NO: 324905 - DNA, 19 bp, Homo sapiens
  siRNA target sequence for UBCE7IP5 (NM_014948.2,289-307).
gtttcaggacagagtattt

SEQ ID NO: 324906 - DNA, 19 bp, Homo sapiens
  siRNA target sequence for UBCE7IP5 (NM_014948.2,321-339).
gtctatgtgacagtttcat

SEQ ID NO: 324907 - DNA, 19 bp, Homo sapiens
  siRNA target sequence for UBCE7IP5 (NM_014948.2,518-536).
cttggtaggcaaagtctta

SEQ ID NO: 324908 - DNA, 19 bp, Homo sapiens
  siRNA target sequence for UBCE7IP5 (NM_014948.2,675-693).
cacgtggcccacttaagga

SEQ ID NO: 324909 - DNA, 19 bp, Homo sapiens
  siRNA target sequence for UBCE7IP5 (NM_014948.2,718-736).
gcggtatcccttgtatcaa

SEQ ID NO: 324910 - DNA, 19 bp, Homo sapiens
  siRNA target sequence for UBCE7IP5 (NM_014948.2,772-790).
gctcccaggaagtgataga

SEQ ID NO: 324911 - DNA, 19 bp, Homo sapiens
  siRNA target sequence for UBCE7IP5 (NM_014948.2,850-868).
ccttgcccatggaaagtga

SEQ ID NO: 324912 - DNA, 19 bp, Homo sapiens
  siRNA target sequence for UBCE7IP5 (NM_014948.2,1091-1109).
cacgggggtagcttttact

SEQ ID NO: 324913 - DNA, 19 bp, Homo sapiens
  siRNA target sequence for UBCE7IP5 (NM_014948.2,1226-1244).
gatcccttcttccattgtt

SEQ ID NO: 324914 - DNA, 19 bp, Homo sapiens
  siRNA target sequence for UBCE7IP5 (NM_014948.2,1620-1638).
gcctcctgcaaaagagtat

SEQ ID NO: 324915 - DNA, 19 bp, Homo sapiens
  siRNA target sequence for UTX (NM_021140.1,369-387).
gcataccagaggtactaca

SEQ ID NO: 324916 - DNA, 19 bp, Homo sapiens
  siRNA target sequence for UTX (NM_021140.1,374-392).
ccagaggtactacagttta

SEQ ID NO: 324917 - DNA, 19 bp, Homo sapiens
  siRNA target sequence for UTX (NM_021140.1,488-506).
ggaggtgctttatgttgat

SEQ ID NO: 324918 - DNA, 19 bp, Homo sapiens
  siRNA target sequence for UTX (NM_021140.1,722-740).
gcagacagagaatctttct

SEQ ID NO: 324919 - DNA, 19 bp, Homo sapiens
  siRNA target sequence for UTX (NM_021140.1,877-895).
gccagtcctggtatttcct

SEQ ID NO: 324920 - DNA, 19 bp, Homo sapiens
  siRNA target sequence for UTX (NM_021140.1,893-911).
cctcggaaggtgctattca

SEQ ID NO: 324921 - DNA, 19 bp, Homo sapiens
  siRNA target sequence for UTX (NM_021140.1,1192-1210).
cacttgcagcacgaattaa

SEQ ID NO: 324922 - DNA, 19 bp, Homo sapiens
  siRNA target sequence for UTX (NM_021140.1,1194-1212).
cttgcagcacgaattaagt

SEQ ID NO: 324923 - DNA, 19 bp, Homo sapiens
  siRNA target sequence for UTX (NM_021140.1,1197-1215).
gcagcacgaattaagtatt

SEQ ID NO: 324924 - DNA, 19 bp, Homo sapiens
  siRNA target sequence for UTX (NM_021140.1,1198-1216).
cagcacgaattaagtattt

SEQ ID NO: 324925 - DNA, 19 bp, Homo sapiens
  siRNA target sequence for UTX (NM_021140.1,1235-1253).
ccttccacaaggtagtcta

SEQ ID NO: 324926 - DNA, 19 bp, Homo sapiens
  siRNA target sequence for UTX (NM_021140.1,1264-1282).
ctaaattacttcctagtat

SEQ ID NO: 324927 - DNA, 19 bp, Homo sapiens
  siRNA target sequence for UTX (NM_021140.1,1289-1307).
ggcgtggagcctaccaatt

SEQ ID NO: 324928 - DNA, 19 bp, Homo sapiens
  siRNA target sequence for UTX (NM_021140.1,1343-1361).
cacagcacagcagaatact

SEQ ID NO: 324929 - DNA, 19 bp, Homo sapiens
  siRNA target sequence for UTX (NM_021140.1,1458-1476).
gaacagctccgcgcaaata

SEQ ID NO: 324930 - DNA, 19 bp, Homo sapiens
  siRNA target sequence for UTX (NM_021140.1,1461-1479).
cagctccgcgcaaatagaa

SEQ ID NO: 324931 - DNA, 19 bp, Homo sapiens
  siRNA target sequence for UTX (NM_021140.1,1463-1481).
gctccgcgcaaatagaaat

SEQ ID NO: 324932 - DNA, 19 bp, Homo sapiens
  siRNA target sequence for UTX (NM_021140.1,1464-1482).
ctccgcgcaaatagaaata

SEQ ID NO: 324933 - DNA, 19 bp, Homo sapiens
  siRNA target sequence for UTX (NM_021140.1,1466-1484).
ccgcgcaaatagaaataat

SEQ ID NO: 324934 - DNA, 19 bp, Homo sapiens
  siRNA target sequence for UTX (NM_021140.1,1541-1559).
gcaacaacaccaaatgaga

SEQ ID NO: 324935 - DNA, 19 bp, Homo sapiens
  siRNA target sequence for UTX (NM_021140.1,1727-1745).
ggccaatggacccttttct

SEQ ID NO: 324936 - DNA, 19 bp, Homo sapiens
  siRNA target sequence for UTX (NM_021140.1,1755-1773).
gttccctgtagcacatcaa

SEQ ID NO: 324937 - DNA, 19 bp, Homo sapiens
  siRNA target sequence for UTX (NM_021140.1,1802-1820).
gataggcaataatcatata

SEQ ID NO: 324938 - DNA, 19 bp, Homo sapiens
  siRNA target sequence for UTX (NM_021140.1,1917-1935).
ccgtggaaaaaccaactat

SEQ ID NO: 324939 - DNA, 19 bp, Homo sapiens
  siRNA target sequence for UTX (NM_021140.1,1921-1939).
ggaaaaaccaactatctaa

SEQ ID NO: 324940 - DNA, 19 bp, Homo sapiens
  siRNA target sequence for UTX (NM_021140.1,2254-2272).
gtgtcgagggacttcctaa

SEQ ID NO: 324941 - DNA, 19 bp, Homo sapiens
  siRNA target sequence for UTX (NM_021140.1,2326-2344).
ctaagtcaccaggtttact

SEQ ID NO: 324942 - DNA, 19 bp, Homo sapiens
  siRNA target sequence for UTX (NM_021140.1,2572-2590).
gtgggctacacacaattaa

SEQ ID NO: 324943 - DNA, 19 bp, Homo sapiens
  siRNA target sequence for UTX (NM_021140.1,2576-2594).
gctacacacaattaatgga

SEQ ID NO: 324944 - DNA, 19 bp, Homo sapiens
  siRNA target sequence for UTX (NM_021140.1,2747-2765).
cttatctaacagtagcatt

SEQ ID NO: 324945 - DNA, 19 bp, Homo sapiens
  siRNA target sequence for UTX (NM_021140.1,2758-2776).
gtagcattttgttggataa

SEQ ID NO: 324946 - DNA, 19 bp, Homo sapiens
  siRNA target sequence for UTX (NM_021140.1,3216-3234).
gaatctacatcgtcagata

SEQ ID NO: 324947 - DNA, 19 bp, Homo sapiens
  siRNA target sequence for UTX (NM_021140.1,3387-3405).
catgttggtcataccatat

SEQ ID NO: 324948 - DNA, 19 bp, Homo sapiens
  siRNA target sequence for UTX (NM_021140.1,3410-3428).
catgaacacagttcaacta

SEQ ID NO: 324949 - DNA, 19 bp, Homo sapiens
  siRNA target sequence for UTX (NM_021140.1,3639-3657).
gttccagtgtataggttta

SEQ ID NO: 324950 - DNA, 19 bp, Homo sapiens
  siRNA target sequence for UTX (NM_021140.1,3919-3937).
gaactctgaagcaatgtca

SEQ ID NO: 324951 - DNA, 19 bp, Homo sapiens
  siRNA target sequence for UTX (NM_021140.1,4058-4076).
cactaatgagagtaattca

SEQ ID NO: 324952 - DNA, 19 bp, Homo sapiens
  siRNA target sequence for UTX (NM_021140.1,4075-4093).
cacgaaagacctacatagt

SEQ ID NO: 324953 - DNA, 19 bp, Homo sapiens
  siRNA target sequence for UTX (NM_021140.1,4114-4132).
gaaaaacaagcggaaactt

SEQ ID NO: 324954 - DNA, 19 bp, Homo sapiens
  siRNA target sequence for UTX (NM_021140.1,4169-4187).
ggacctgatgcaagtctat

SEQ ID NO: 324955 - DNA, 19 bp, Homo sapiens
  siRNA target sequence for UTX (NM_021140.1,4182-4200).
gtctatgaccaatttacat

SEQ ID NO: 324956 - DNA, 19 bp, Homo sapiens
  siRNA target sequence for UTY (NM_007125.3,1337-1355).
ctgcatatcagagatatta

SEQ ID NO: 324957 - DNA, 19 bp, Homo sapiens
  siRNA target sequence for UTY (NM_007125.3,1339-1357).
gcatatcagagatattaca

SEQ ID NO: 324958 - DNA, 19 bp, Homo sapiens
  siRNA target sequence for UTY (NM_007125.3,1410-1428).
ggtctacttctactacaat

SEQ ID NO: 324959 - DNA, 19 bp, Homo sapiens
  siRNA target sequence for UTY (NM_007125.3,1575-1593).
cttgattgactgtaatcca

SEQ ID NO: 324960 - DNA, 19 bp, Homo sapiens
  siRNA target sequence for UTY (NM_007125.3,1744-1762).
ggttggatgcatcataata

SEQ ID NO: 324961 - DNA, 19 bp, Homo sapiens
  siRNA target sequence for UTY (NM_007125.3,1745-1763).
gttggatgcatcataatat

SEQ ID NO: 324962 - DNA, 19 bp, Homo sapiens
  siRNA target sequence for UTY (NM_007125.3,1748-1766).
ggatgcatcataatatgga

SEQ ID NO: 324963 - DNA, 19 bp, Homo sapiens
  siRNA target sequence for UTY (NM_007125.3,1749-1767).
gatgcatcataatatggat

SEQ ID NO: 324964 - DNA, 19 bp, Homo sapiens
  siRNA target sequence for UTY (NM_007125.3,1847-1865).
gccaatcgtggtattttct

SEQ ID NO: 324965 - DNA, 19 bp, Homo sapiens
  siRNA target sequence for UTY (NM_007125.3,1848-1866).
ccaatcgtggtattttctt

SEQ ID NO: 324966 - DNA, 19 bp, Homo sapiens
  siRNA target sequence for UTY (NM_007125.3,2088-2106).
ctgcaatcaacctcaagat

SEQ ID NO: 324967 - DNA, 19 bp, Homo sapiens
  siRNA target sequence for UTY (NM_007125.3,2188-2206).
cagaatggttctgataact

SEQ ID NO: 324968 - DNA, 19 bp, Homo sapiens
  siRNA target sequence for UTY (NM_007125.3,2217-2235).
ccagagtctttcacatcat

SEQ ID NO: 324969 - DNA, 19 bp, Homo sapiens
  siRNA target sequence for UTY (NM_007125.3,2236-2254).
ccagtacagcaagtttatt

SEQ ID NO: 324970 - DNA, 19 bp, Homo sapiens
  siRNA target sequence for UTY (NM_007125.3,2248-2266).
gtttattcgttgtgtttga

SEQ ID NO: 324971 - DNA, 19 bp, Homo sapiens
  siRNA target sequence for UTY (NM_007125.3,2298-2316).
gcgagcaaatagagataat

SEQ ID NO: 324972 - DNA, 19 bp, Homo sapiens
  siRNA target sequence for UTY (NM_007125.3,2367-2385).
cttaatgcagcaaatgaga

SEQ ID NO: 324973 - DNA, 19 bp, Homo sapiens
  siRNA target sequence for UTY (NM_007125.3,2453-2471).
ctacaaactctgtctctaa

SEQ ID NO: 324974 - DNA, 19 bp, Homo sapiens
  siRNA target sequence for UTY (NM_007125.3,2529-2547).
ccctgcttgtgttgaaaaa

SEQ ID NO: 324975 - DNA, 19 bp, Homo sapiens
  siRNA target sequence for UTY (NM_007125.3,2584-2602).
ccttgtggcacatcaaaaa

SEQ ID NO: 324976 - DNA, 19 bp, Homo sapiens
  siRNA target sequence for UTY (NM_007125.3,2625-2643).
cttgctaggcagtaattgt

SEQ ID NO: 324977 - DNA, 19 bp, Homo sapiens
  siRNA target sequence for UTY (NM_007125.3,2628-2646).
gctaggcagtaattgtata

SEQ ID NO: 324978 - DNA, 19 bp, Homo sapiens
  siRNA target sequence for UTY (NM_007125.3,2674-2692).
ccttacctgcagcaaaata

SEQ ID NO: 324979 - DNA, 19 bp, Homo sapiens
  siRNA target sequence for UTY (NM_007125.3,2697-2715).
cactctacctcataatcat

SEQ ID NO: 324980 - DNA, 19 bp, Homo sapiens
  siRNA target sequence for UTY (NM_007125.3,2801-2819).
gtttgtcaggacctaatga

SEQ ID NO: 324981 - DNA, 19 bp, Homo sapiens
  siRNA target sequence for UTY (NM_007125.3,2862-2880).
ggcaactagcactggtatt

SEQ ID NO: 324982 - DNA, 19 bp, Homo sapiens
  siRNA target sequence for UTY (NM_007125.3,2863-2881).
gcaactagcactggtatta

SEQ ID NO: 324983 - DNA, 19 bp, Homo sapiens
  siRNA target sequence for UTY (NM_007125.3,2864-2882).
caactagcactggtattaa

SEQ ID NO: 324984 - DNA, 19 bp, Homo sapiens
  siRNA target sequence for UTY (NM_007125.3,2899-2917).
ctcactctgcctagtaatt

SEQ ID NO: 324985 - DNA, 19 bp, Homo sapiens
  siRNA target sequence for UTY (NM_007125.3,3079-3097).
gatgtcaagggactttcta

SEQ ID NO: 324986 - DNA, 19 bp, Homo sapiens
  siRNA target sequence for UTY (NM_007125.3,3142-3160).
catggagattcaccaaatt

SEQ ID NO: 324987 - DNA, 19 bp, Homo sapiens
  siRNA target sequence for UTY (NM_007125.3,3229-3247).
ggaacctgtgacaaagtga

SEQ ID NO: 324988 - DNA, 19 bp, Homo sapiens
  siRNA target sequence for UTY (NM_007125.3,3233-3251).
cctgtgacaaagtgaataa

SEQ ID NO: 324989 - DNA, 19 bp, Homo sapiens
  siRNA target sequence for UTY (NM_007125.3,3346-3364).
gagcagagaagcataaaca

SEQ ID NO: 324990 - DNA, 19 bp, Homo sapiens
  siRNA target sequence for UTY (NM_007125.3,3383-3401).
gtcctcacagtggattaca

SEQ ID NO: 324991 - DNA, 19 bp, Homo sapiens
  siRNA target sequence for UTY (NM_007125.3,3448-3466).
gtagacctgcctttagcta

SEQ ID NO: 324992 - DNA, 19 bp, Homo sapiens
  siRNA target sequence for UTY (NM_007125.3,3463-3481).
gctagccacagatctactt

SEQ ID NO: 324993 - DNA, 19 bp, Homo sapiens
  siRNA target sequence for UTY (NM_007125.3,3473-3491).
gatctacttctcagatctt

SEQ ID NO: 324994 - DNA, 19 bp, Homo sapiens
  siRNA target sequence for UTY (NM_007125.3,3572-3590).
ctaatagctgcattttgtt

SEQ ID NO: 324995 - DNA, 19 bp, Homo sapiens
  siRNA target sequence for UTY (NM_007125.3,4015-4033).
cacaaagatcattcagata

SEQ ID NO: 324996 - DNA, 19 bp, Homo sapiens
  siRNA target sequence for UTY (NM_007125.3,4021-4039).
gatcattcagataacgaat

SEQ ID NO: 324997 - DNA, 19 bp, Homo sapiens
  siRNA target sequence for UTY (NM_007125.3,4030-4048).
gataacgaatccacatctt

SEQ ID NO: 324998 - DNA, 19 bp, Homo sapiens
  siRNA target sequence for UTY (NM_007125.3,4233-4251).
gaatacagtacaactgtat

SEQ ID NO: 324999 - DNA, 19 bp, Homo sapiens
  siRNA target sequence for UTY (NM_007125.3,4348-4366).
gttgtacctgaagattatt

SEQ ID NO: 325000 - DNA, 19 bp, Homo sapiens
  siRNA target sequence for UTY (NM_007125.3,4880-4898).
ctaatgaaagcaatactca

SEQ ID NO: 325001 - DNA, 19 bp, Homo sapiens
  siRNA target sequence for UTY (NM_007125.3,4889-4907).
gcaatactcaaaaaaccta

SEQ ID NO: 325002 - DNA, 19 bp, Homo sapiens
  siRNA target sequence for UTY (NM_007125.3,4989-5007).
ggacctaatccaagtttat

SEQ ID NO: 325003 - DNA, 19 bp, Homo sapiens
  siRNA target sequence for WDR13 (NM_017883.3,535-553).
gtaccgcacaccaacgttt

SEQ ID NO: 325004 - DNA, 19 bp, Homo sapiens
  siRNA target sequence for WDR13 (NM_017883.3,557-575).
cagtttcggacgcagtata

SEQ ID NO: 325005 - DNA, 19 bp, Homo sapiens
  siRNA target sequence for WDR13 (NM_017883.3,736-754).
cagtagccgcactactctt

SEQ ID NO: 325006 - DNA, 19 bp, Homo sapiens
  siRNA target sequence for WDR13 (NM_017883.3,960-978).
cctttgcgggcatgtatca

SEQ ID NO: 325007 - DNA, 19 bp, Homo sapiens
  siRNA target sequence for WDR13 (NM_017883.3,961-979).
ctttgcgggcatgtatcat

SEQ ID NO: 325008 - DNA, 19 bp, Homo sapiens
  siRNA target sequence for WDR13 (NM_017883.3,966-984).
cgggcatgtatcatgtttt

SEQ ID NO: 325009 - DNA, 19 bp, Homo sapiens
  siRNA target sequence for WDR13 (NM_017883.3,1015-1033).
ggtgcgcttcgccaatgat

SEQ ID NO: 325010 - DNA, 19 bp, Homo sapiens
  siRNA target sequence for WDR13 (NM_017883.3,1284-1302).
ccttccagcctgtcaacaa

SEQ ID NO: 325011 - DNA, 19 bp, Homo sapiens
  siRNA target sequence for WDR3 (NM_006784.1,98-116).
cgttatcggcagccaaaaa

SEQ ID NO: 325012 - DNA, 19 bp, Homo sapiens
  siRNA target sequence for WDR3 (NM_006784.1,104-122).
cggcagccaaaaaggtaat

SEQ ID NO: 325013 - DNA, 19 bp, Homo sapiens
  siRNA target sequence for WDR3 (NM_006784.1,105-123).
ggcagccaaaaaggtaata

SEQ ID NO: 325014 - DNA, 19 bp, Homo sapiens
  siRNA target sequence for WDR3 (NM_006784.1,134-152).
gacacttcgtggtgagaaa

SEQ ID NO: 325015 - DNA, 19 bp, Homo sapiens
  siRNA target sequence for WDR3 (NM_006784.1,145-163).
gtgagaaaggacgttatgt

SEQ ID NO: 325016 - DNA, 19 bp, Homo sapiens
  siRNA target sequence for WDR3 (NM_006784.1,174-192).
gcttgtgaacacgttttca

SEQ ID NO: 325017 - DNA, 19 bp, Homo sapiens
  siRNA target sequence for WDR3 (NM_006784.1,205-223).
ggaaaggagagaagattct

SEQ ID NO: 325018 - DNA, 19 bp, Homo sapiens
  siRNA target sequence for WDR3 (NM_006784.1,233-251).
ggggcttaaacaagaagtt

SEQ ID NO: 325019 - DNA, 19 bp, Homo sapiens
  siRNA target sequence for WDR3 (NM_006784.1,234-252).
gggcttaaacaagaagtta

SEQ ID NO: 325020 - DNA, 19 bp, Homo sapiens
  siRNA target sequence for WDR3 (NM_006784.1,268-286).
ccccagatgggctacactt

SEQ ID NO: 325021 - DNA, 19 bp, Homo sapiens
  siRNA target sequence for WDR3 (NM_006784.1,269-287).
cccagatgggctacactta

SEQ ID NO: 325022 - DNA, 19 bp, Homo sapiens
  siRNA target sequence for WDR3 (NM_006784.1,306-324).
gggtcgatccgaatcttca

SEQ ID NO: 325023 - DNA, 19 bp, Homo sapiens
  siRNA target sequence for WDR3 (NM_006784.1,377-395).
cactaccttgaagtatgat

SEQ ID NO: 325024 - DNA, 19 bp, Homo sapiens
  siRNA target sequence for WDR3 (NM_006784.1,421-439).
ggtccaaggacacagatat

SEQ ID NO: 325025 - DNA, 19 bp, Homo sapiens
  siRNA target sequence for WDR3 (NM_006784.1,422-440).
gtccaaggacacagatatt

SEQ ID NO: 325026 - DNA, 19 bp, Homo sapiens
  siRNA target sequence for WDR3 (NM_006784.1,429-447).
gacacagatattattgtat

SEQ ID NO: 325027 - DNA, 19 bp, Homo sapiens
  siRNA target sequence for WDR3 (NM_006784.1,449-467).
ggatgtgatcaatgaaagt

SEQ ID NO: 325028 - DNA, 19 bp, Homo sapiens
  siRNA target sequence for WDR3 (NM_006784.1,503-521).
cacacaagcattgtttcta

SEQ ID NO: 325029 - DNA, 19 bp, Homo sapiens
  siRNA target sequence for WDR3 (NM_006784.1,530-548).
gaacctgctagttactagt

SEQ ID NO: 325030 - DNA, 19 bp, Homo sapiens
  siRNA target sequence for WDR3 (NM_006784.1,544-562).
ctagtgggaaagataccat

SEQ ID NO: 325031 - DNA, 19 bp, Homo sapiens
  siRNA target sequence for WDR3 (NM_006784.1,571-589).
ggtgggaccttgatactca

SEQ ID NO: 325032 - DNA, 19 bp, Homo sapiens
  siRNA target sequence for WDR3 (NM_006784.1,582-600).
gatactcagcactgcttta

SEQ ID NO: 325033 - DNA, 19 bp, Homo sapiens
  siRNA target sequence for WDR3 (NM_006784.1,694-712).
gggtatgggacatagctta

SEQ ID NO: 325034 - DNA, 19 bp, Homo sapiens
  siRNA target sequence for WDR3 (NM_006784.1,695-713).
ggtatgggacatagcttat

SEQ ID NO: 325035 - DNA, 19 bp, Homo sapiens
  siRNA target sequence for WDR3 (NM_006784.1,709-727).
cttatctgcaagagattga

SEQ ID NO: 325036 - DNA, 19 bp, Homo sapiens
  siRNA target sequence for WDR3 (NM_006784.1,763-781).
gatcttctcctggaataca

SEQ ID NO: 325037 - DNA, 19 bp, Homo sapiens
  siRNA target sequence for WDR3 (NM_006784.1,828-846).
cctgaggatcgaatccttt

SEQ ID NO: 325038 - DNA, 19 bp, Homo sapiens
  siRNA target sequence for WDR3 (NM_006784.1,831-849).
gaggatcgaatcctttcat

SEQ ID NO: 325039 - DNA, 19 bp, Homo sapiens
  siRNA target sequence for WDR3 (NM_006784.1,911-929).
caagacaggcaggattctt

SEQ ID NO: 325040 - DNA, 19 bp, Homo sapiens
  siRNA target sequence for WDR3 (NM_006784.1,1106-1124).
ccagcgggtgactaatata

SEQ ID NO: 325041 - DNA, 19 bp, Homo sapiens
  siRNA target sequence for WDR3 (NM_006784.1,1107-1125).
cagcgggtgactaatataa

SEQ ID NO: 325042 - DNA, 19 bp, Homo sapiens
  siRNA target sequence for WDR3 (NM_006784.1,1109-1127).
gcgggtgactaatataaaa

SEQ ID NO: 325043 - DNA, 19 bp, Homo sapiens
  siRNA target sequence for WDR3 (NM_006784.1,1110-1128).
cgggtgactaatataaaaa

SEQ ID NO: 325044 - DNA, 19 bp, Homo sapiens
  siRNA target sequence for WDR3 (NM_006784.1,1165-1183).
cacctcacggagagttaaa

SEQ ID NO: 325045 - DNA, 19 bp, Homo sapiens
  siRNA target sequence for WDR3 (NM_006784.1,1205-1223).
caacctggtggaattgtat

SEQ ID NO: 325046 - DNA, 19 bp, Homo sapiens
  siRNA target sequence for WDR3 (NM_006784.1,1296-1314).
gatgtgcggactttgtcat

SEQ ID NO: 325047 - DNA, 19 bp, Homo sapiens
  siRNA target sequence for WDR3 (NM_006784.1,1299-1317).
gtgcggactttgtcattca

SEQ ID NO: 325048 - DNA, 19 bp, Homo sapiens
  siRNA target sequence for WDR3 (NM_006784.1,1375-1393).
ggtctacactgcagtgtat

SEQ ID NO: 325049 - DNA, 19 bp, Homo sapiens
  siRNA target sequence for WDR3 (NM_006784.1,1441-1459).
gtgatagacaggtagtcat

SEQ ID NO: 325050 - DNA, 19 bp, Homo sapiens
  siRNA target sequence for WDR3 (NM_006784.1,1505-1523).
gaatctgctggagacaata

SEQ ID NO: 325051 - DNA, 19 bp, Homo sapiens
  siRNA target sequence for WDR3 (NM_006784.1,1517-1535).
gacaatagatgcacatgat

SEQ ID NO: 325052 - DNA, 19 bp, Homo sapiens
  siRNA target sequence for WDR3 (NM_006784.1,1583-1601).
gacaggtggtgcagataaa

SEQ ID NO: 325053 - DNA, 19 bp, Homo sapiens
  siRNA target sequence for WDR3 (NM_006784.1,1670-1688).
gcaaacccgaactttgcaa

SEQ ID NO: 325054 - DNA, 19 bp, Homo sapiens
  siRNA target sequence for WDR3 (NM_006784.1,1675-1693).
cccgaactttgcaactaga

SEQ ID NO: 325055 - DNA, 19 bp, Homo sapiens
  siRNA target sequence for WDR3 (NM_006784.1,1676-1694).
ccgaactttgcaactagat

SEQ ID NO: 325056 - DNA, 19 bp, Homo sapiens
  siRNA target sequence for WDR3 (NM_006784.1,1712-1730).
cagttactctcccaatcaa

SEQ ID NO: 325057 - DNA, 19 bp, Homo sapiens
  siRNA target sequence for WDR3 (NM_006784.1,1778-1796).
cgttgatactttaaagttt

SEQ ID NO: 325058 - DNA, 19 bp, Homo sapiens
  siRNA target sequence for WDR3 (NM_006784.1,1802-1820).
gtcactgtatggacacaaa

SEQ ID NO: 325059 - DNA, 19 bp, Homo sapiens
  siRNA target sequence for WDR3 (NM_006784.1,1813-1831).
gacacaaactgcctgttat

SEQ ID NO: 325060 - DNA, 19 bp, Homo sapiens
  siRNA target sequence for WDR3 (NM_006784.1,1951-1969).
gtgtgatgtacctacagtt

SEQ ID NO: 325061 - DNA, 19 bp, Homo sapiens
  siRNA target sequence for WDR3 (NM_006784.1,1955-1973).
gatgtacctacagtttgta

SEQ ID NO: 325062 - DNA, 19 bp, Homo sapiens
  siRNA target sequence for WDR3 (NM_006784.1,1991-2009).
cttcactgccggaaaagat

SEQ ID NO: 325063 - DNA, 19 bp, Homo sapiens
  siRNA target sequence for WDR3 (NM_006784.1,1996-2014).
ctgccggaaaagatcataa

SEQ ID NO: 325064 - DNA, 19 bp, Homo sapiens
  siRNA target sequence for WDR3 (NM_006784.1,1998-2016).
gccggaaaagatcataaga

SEQ ID NO: 325065 - DNA, 19 bp, Homo sapiens
  siRNA target sequence for WDR3 (NM_006784.1,2007-2025).
gatcataagattaaacagt

SEQ ID NO: 325066 - DNA, 19 bp, Homo sapiens
  siRNA target sequence for WDR3 (NM_006784.1,2026-2044).
gggatgcagacaaatttga

SEQ ID NO: 325067 - DNA, 19 bp, Homo sapiens
  siRNA target sequence for WDR3 (NM_006784.1,2064-2082).
ggtcatcaccaggaaatat

SEQ ID NO: 325068 - DNA, 19 bp, Homo sapiens
  siRNA target sequence for WDR3 (NM_006784.1,2067-2085).
catcaccaggaaatatggt

SEQ ID NO: 325069 - DNA, 19 bp, Homo sapiens
  siRNA target sequence for WDR3 (NM_006784.1,2101-2119).
ccagtggagactatgttgt

SEQ ID NO: 325070 - DNA, 19 bp, Homo sapiens
  siRNA target sequence for WDR3 (NM_006784.1,2102-2120).
cagtggagactatgttgta

SEQ ID NO: 325071 - DNA, 19 bp, Homo sapiens
  siRNA target sequence for WDR3 (NM_006784.1,2106-2124).
ggagactatgttgtatcat

SEQ ID NO: 325072 - DNA, 19 bp, Homo sapiens
  siRNA target sequence for WDR3 (NM_006784.1,2219-2237).
ggagagtgtggccaaagaa

SEQ ID NO: 325073 - DNA, 19 bp, Homo sapiens
  siRNA target sequence for WDR3 (NM_006784.1,2265-2283).
caaggtgacagttacttta

SEQ ID NO: 325074 - DNA, 19 bp, Homo sapiens
  siRNA target sequence for WDR3 (NM_006784.1,2275-2293).
gttactttactggaaagaa

SEQ ID NO: 325075 - DNA, 19 bp, Homo sapiens
  siRNA target sequence for WDR3 (NM_006784.1,2323-2341).
ggattatggaggctattga

SEQ ID NO: 325076 - DNA, 19 bp, Homo sapiens
  siRNA target sequence for WDR3 (NM_006784.1,2372-2390).
ggaacacaaagccatttgt

SEQ ID NO: 325077 - DNA, 19 bp, Homo sapiens
  siRNA target sequence for WDR3 (NM_006784.1,2378-2396).
caaagccatttgtaaagct

SEQ ID NO: 325078 - DNA, 19 bp, Homo sapiens
  siRNA target sequence for WDR3 (NM_006784.1,2419-2437).
ccagcaaccccatcctaat

SEQ ID NO: 325079 - DNA, 19 bp, Homo sapiens
  siRNA target sequence for WDR3 (NM_006784.1,2438-2456).
ggcttatggcagtatctca

SEQ ID NO: 325080 - DNA, 19 bp, Homo sapiens
  siRNA target sequence for WDR3 (NM_006784.1,2453-2471).
ctcaccttcagcttatgta

SEQ ID NO: 325081 - DNA, 19 bp, Homo sapiens
  siRNA target sequence for WDR3 (NM_006784.1,2455-2473).
caccttcagcttatgtatt

SEQ ID NO: 325082 - DNA, 19 bp, Homo sapiens
  siRNA target sequence for WDR3 (NM_006784.1,2545-2563).
cagacattcttaaactctt

SEQ ID NO: 325083 - DNA, 19 bp, Homo sapiens
  siRNA target sequence for WDR3 (NM_006784.1,2547-2565).
gacattcttaaactcttta

SEQ ID NO: 325084 - DNA, 19 bp, Homo sapiens
  siRNA target sequence for WDR3 (NM_006784.1,2553-2571).
cttaaactctttaacgaat

SEQ ID NO: 325085 - DNA, 19 bp, Homo sapiens
  siRNA target sequence for WDR3 (NM_006784.1,2579-2597).
gctgggctctgatgttgaa

SEQ ID NO: 325086 - DNA, 19 bp, Homo sapiens
  siRNA target sequence for WDR3 (NM_006784.1,2585-2603).
ctctgatgttgaacttata

SEQ ID NO: 325087 - DNA, 19 bp, Homo sapiens
  siRNA target sequence for WDR3 (NM_006784.1,2664-2682).
cttgtgccagtgatagaaa

SEQ ID NO: 325088 - DNA, 19 bp, Homo sapiens
  siRNA target sequence for WDR3 (NM_006784.1,2670-2688).
ccagtgatagaaaaattaa

SEQ ID NO: 325089 - DNA, 19 bp, Homo sapiens
  siRNA target sequence for WDR3 (NM_006784.1,2723-2741).
ggatgttatcggcttcaat

SEQ ID NO: 325090 - DNA, 19 bp, Homo sapiens
  siRNA target sequence for WDR3 (NM_006784.1,2738-2756).
caatatggctggtcttgat

SEQ ID NO: 325091 - DNA, 19 bp, Homo sapiens
  siRNA target sequence for WDR3 (NM_006784.1,2745-2763).
gctggtcttgattatctca

SEQ ID NO: 325092 - DNA, 19 bp, Homo sapiens
  siRNA target sequence for WDR3 (NM_006784.1,2774-2792).
cgaggcaaaaagtgaagtt

SEQ ID NO: 325093 - DNA, 19 bp, Homo sapiens
  siRNA target sequence for WRB (NM_004627.2,89-107).
cttcgtgtttggatgcaat

SEQ ID NO: 325094 - DNA, 19 bp, Homo sapiens
  siRNA target sequence for WRB (NM_004627.2,324-342).
gctcaattagccaagataa

SEQ ID NO: 325095 - DNA, 19 bp, Homo sapiens
  siRNA target sequence for WRB (NM_004627.2,325-343).
ctcaattagccaagataaa

SEQ ID NO: 325096 - DNA, 19 bp, Homo sapiens
  siRNA target sequence for WRB (NM_004627.2,327-345).
caattagccaagataaaat

SEQ ID NO: 325097 - DNA, 19 bp, Homo sapiens
  siRNA target sequence for WRB (NM_004627.2,355-373).
gtgtcgctttctacgtatt

SEQ ID NO: 325098 - DNA, 19 bp, Homo sapiens
  siRNA target sequence for WRB (NM_004627.2,384-402).
ctgatgatctcactcattt

SEQ ID NO: 325099 - DNA, 19 bp, Homo sapiens
  siRNA target sequence for WRB (NM_004627.2,392-410).
ctcactcatttggaagtat

SEQ ID NO: 325100 - DNA, 19 bp, Homo sapiens
  siRNA target sequence for WRB (NM_004627.2,425-443).
ggctgtcgtgccgagtaaa

SEQ ID NO: 325101 - DNA, 19 bp, Homo sapiens
  siRNA target sequence for WRB (NM_004627.2,426-444).
gctgtcgtgccgagtaaat

SEQ ID NO: 325102 - DNA, 19 bp, Homo sapiens
  siRNA target sequence for WRB (NM_004627.2,429-447).
gtcgtgccgagtaaatgga

SEQ ID NO: 325103 - DNA, 19 bp, Homo sapiens
  siRNA target sequence for WRB (NM_004627.2,431-449).
cgtgccgagtaaatggata

SEQ ID NO: 325104 - DNA, 19 bp, Homo sapiens
  siRNA target sequence for WRB (NM_004627.2,432-450).
gtgccgagtaaatggataa

SEQ ID NO: 325105 - DNA, 19 bp, Homo sapiens
  siRNA target sequence for WRB (NM_004627.2,489-507).
gcaggtggtgttggaatta

SEQ ID NO: 325106 - DNA, 19 bp, Homo sapiens
  siRNA target sequence for WRB (NM_004627.2,492-510).
ggtggtgttggaattacct

SEQ ID NO: 325107 - DNA, 19 bp, Homo sapiens
  siRNA target sequence for YT521 (NM_133370.1,494-512).
ggaatctactgataccaaa

SEQ ID NO: 325108 - DNA, 19 bp, Homo sapiens
  siRNA target sequence for YT521 (NM_133370.1,502-520).
ctgataccaaacgacaaaa

SEQ ID NO: 325109 - DNA, 19 bp, Homo sapiens
  siRNA target sequence for YT521 (NM_133370.1,675-693).
cggaaaattcgtctatcaa

SEQ ID NO: 325110 - DNA, 19 bp, Homo sapiens
  siRNA target sequence for YT521 (NM_133370.1,677-695).
gaaaattcgtctatcaagt

SEQ ID NO: 325111 - DNA, 19 bp, Homo sapiens
  siRNA target sequence for YT521 (NM_133370.1,699-717).
gcctccagagaaccttata

SEQ ID NO: 325112 - DNA, 19 bp, Homo sapiens
  siRNA target sequence for YT521 (NM_133370.1,836-854).
cagccagtcttctaaggaa

SEQ ID NO: 325113 - DNA, 19 bp, Homo sapiens
  siRNA target sequence for YT521 (NM_133370.1,922-940).
ggaacaacactgagaatga

SEQ ID NO: 325114 - DNA, 19 bp, Homo sapiens
  siRNA target sequence for YT521 (NM_133370.1,1244-1262).
gagagctagaggcatatct

SEQ ID NO: 325115 - DNA, 19 bp, Homo sapiens
  siRNA target sequence for YT521 (NM_133370.1,1252-1270).
gaggcatatctccaattgt

SEQ ID NO: 325116 - DNA, 19 bp, Homo sapiens
  siRNA target sequence for YT521 (NM_133370.1,1254-1272).
ggcatatctccaattgttt

SEQ ID NO: 325117 - DNA, 19 bp, Homo sapiens
  siRNA target sequence for YT521 (NM_133370.1,1255-1273).
gcatatctccaattgtttt

SEQ ID NO: 325118 - DNA, 19 bp, Homo sapiens
  siRNA target sequence for YT521 (NM_133370.1,1289-1307).
ctctgcatcagagtcatat

SEQ ID NO: 325119 - DNA, 19 bp, Homo sapiens
  siRNA target sequence for YT521 (NM_133370.1,1299-1317).
gagtcatatgcagatcaaa

SEQ ID NO: 325120 - DNA, 19 bp, Homo sapiens
  siRNA target sequence for YT521 (NM_133370.1,1369-1387).
gtaacaaccatgagaatgt

SEQ ID NO: 325121 - DNA, 19 bp, Homo sapiens
  siRNA target sequence for YT521 (NM_133370.1,1414-1432).
ggtccacgctccctgtaaa

SEQ ID NO: 325122 - DNA, 19 bp, Homo sapiens
  siRNA target sequence for YT521 (NM_133370.1,1415-1433).
gtccacgctccctgtaaat

SEQ ID NO: 325123 - DNA, 19 bp, Homo sapiens
  siRNA target sequence for YT521 (NM_133370.1,1417-1435).
ccacgctccctgtaaatga

SEQ ID NO: 325124 - DNA, 19 bp, Homo sapiens
  siRNA target sequence for YT521 (NM_133370.1,1420-1438).
cgctccctgtaaatgagaa

SEQ ID NO: 325125 - DNA, 19 bp, Homo sapiens
  siRNA target sequence for YT521 (NM_133370.1,1459-1477).
gatctgcaaggagtgttat

SEQ ID NO: 325126 - DNA, 19 bp, Homo sapiens
  siRNA target sequence for YT521 (NM_133370.1,1464-1482).
gcaaggagtgttatcttaa

SEQ ID NO: 325127 - DNA, 19 bp, Homo sapiens
  siRNA target sequence for YT521 (NM_133370.1,1465-1483).
caaggagtgttatcttaat

SEQ ID NO: 325128 - DNA, 19 bp, Homo sapiens
  siRNA target sequence for YT521 (NM_133370.1,1515-1533).
gggtttgcaagactttctt

SEQ ID NO: 325129 - DNA, 19 bp, Homo sapiens
  siRNA target sequence for YT521 (NM_133370.1,1525-1543).
gactttcttcagaatcaca

SEQ ID NO: 325130 - DNA, 19 bp, Homo sapiens
  siRNA target sequence for YT521 (NM_133370.1,1548-1566).
ggaggatctcctatacact

SEQ ID NO: 325131 - DNA, 19 bp, Homo sapiens
  siRNA target sequence for YT521 (NM_133370.1,1578-1596).
gcaggaatgagtgctaaaa

SEQ ID NO: 325132 - DNA, 19 bp, Homo sapiens
  siRNA target sequence for YT521 (NM_133370.1,1598-1616).
gctgggaggtgtctttaaa

SEQ ID NO: 325133 - DNA, 19 bp, Homo sapiens
  siRNA target sequence for YT521 (NM_133370.1,1624-1642).
ggatttgcaggcgtgaatt

SEQ ID NO: 325134 - DNA, 19 bp, Homo sapiens
  siRNA target sequence for YT521 (NM_133370.1,1625-1643).
gatttgcaggcgtgaatta

SEQ ID NO: 325135 - DNA, 19 bp, Homo sapiens
  siRNA target sequence for YT521 (NM_133370.1,1635-1653).
cgtgaattacccttcacta

SEQ ID NO: 325136 - DNA, 19 bp, Homo sapiens
  siRNA target sequence for YT521 (NM_133370.1,1659-1677).
gctcatctcaccaatcctt

SEQ ID NO: 325137 - DNA, 19 bp, Homo sapiens
  siRNA target sequence for YT521 (NM_133370.1,1669-1687).
ccaatccttggaatgaaca

SEQ ID NO: 325138 - DNA, 19 bp, Homo sapiens
  siRNA target sequence for YT521 (NM_133370.1,1705-1723).
gacgtgatggacaggaaat

SEQ ID NO: 325139 - DNA, 19 bp, Homo sapiens
  siRNA target sequence for YT521 (NM_133370.1,1765-1783).
ccgatgaaagtattgactt

SEQ ID NO: 325140 - DNA, 19 bp, Homo sapiens
  siRNA target sequence for YT521 (NM_133370.1,1784-1802).
gtatcaggtcattcataaa

SEQ ID NO: 325141 - DNA, 19 bp, Homo sapiens
  siRNA target sequence for YT521 (NM_133370.1,1885-1903).
ggcgtcgaccagaagatta

SEQ ID NO: 325142 - DNA, 19 bp, Homo sapiens
  siRNA target sequence for YT521 (NM_133370.1,1888-1906).
gtcgaccagaagattatga

SEQ ID NO: 325143 - DNA, 19 bp, Homo sapiens
  siRNA target sequence for YT521 (NM_133370.1,1890-1908).
cgaccagaagattatgata

SEQ ID NO: 325144 - DNA, 19 bp, Homo sapiens
  siRNA target sequence for YT521 (NM_133370.1,1899-1917).
gattatgatattcataaca

SEQ ID NO: 325145 - DNA, 19 bp, Homo sapiens
  siRNA target sequence for YT521 (NM_133370.1,1959-1977).
cagagaccagggtatttaa

SEQ ID NO: 325146 - DNA, 19 bp, Homo sapiens
  siRNA target sequence for YT521 (NM_133370.1,1963-1981).
gaccagggtatttaaagga

SEQ ID NO: 325147 - DNA, 19 bp, Homo sapiens
  siRNA target sequence for YT521 (NM_133370.1,2017-2035).
gagttcgccgagatgtgtt

SEQ ID NO: 325148 - DNA, 19 bp, Homo sapiens
  siRNA target sequence for YT521 (NM_133370.1,2019-2037).
gttcgccgagatgtgtttt

SEQ ID NO: 325149 - DNA, 19 bp, Homo sapiens
  siRNA target sequence for YT521 (NM_133370.1,2022-2040).
cgccgagatgtgtttttaa

SEQ ID NO: 325150 - DNA, 19 bp, Homo sapiens
  siRNA target sequence for YT521 (NM_133370.1,2044-2062).
ggtcctacaatgattatgt

SEQ ID NO: 325151 - DNA, 19 bp, Homo sapiens
  siRNA target sequence for YT521 (NM_133370.1,2089-2107).
caccaccttggcaaggaat

SEQ ID NO: 325152 - DNA, 19 bp, Homo sapiens
  siRNA target sequence for YT521 (NM_133370.1,2239-2257).
gagtacatgattatgatat

SEQ ID NO: 325153 - DNA, 19 bp, Homo sapiens
  siRNA target sequence for YT521 (NM_133370.1,2311-2329).
gtagaccccgtgaaagaga

SEQ ID NO: 325154 - DNA, 19 bp, Homo sapiens
  siRNA target sequence for YT521 (NM_133370.1,2346-2364).
gaccgccctagagataaca

SEQ ID NO: 325155 - DNA, 19 bp, Homo sapiens
  siRNA target sequence for YT521 (NM_133370.1,2348-2366).
ccgccctagagataacaga

SEQ ID NO: 325156 - DNA, 19 bp, Homo sapiens
  siRNA target sequence for YT521 (NM_133370.1,2447-2465).
gagaggtcgatatagaaga

SEQ ID NO: 325157 - DNA, 19 bp, Homo sapiens
  siRNA target sequence for ZFP1 (NM_153688.1,375-393).
cgagcaggcgaggcaattt

SEQ ID NO: 325158 - DNA, 19 bp, Homo sapiens
  siRNA target sequence for ZFP1 (NM_153688.1,376-394).
gagcaggcgaggcaatttt

SEQ ID NO: 325159 - DNA, 19 bp, Homo sapiens
  siRNA target sequence for ZFP1 (NM_153688.1,378-396).
gcaggcgaggcaattttta

SEQ ID NO: 325160 - DNA, 19 bp, Homo sapiens
  siRNA target sequence for ZFP1 (NM_153688.1,379-397).
caggcgaggcaatttttaa

SEQ ID NO: 325161 - DNA, 19 bp, Homo sapiens
  siRNA target sequence for ZFP1 (NM_153688.1,423-441).
ggaaagaggcgatctcttt

SEQ ID NO: 325162 - DNA, 19 bp, Homo sapiens
  siRNA target sequence for ZFP1 (NM_153688.1,428-446).
gaggcgatctctttggaaa

SEQ ID NO: 325163 - DNA, 19 bp, Homo sapiens
  siRNA target sequence for ZFP1 (NM_153688.1,533-551).
cagacttgcttaatagtaa

SEQ ID NO: 325164 - DNA, 19 bp, Homo sapiens
  siRNA target sequence for ZFP1 (NM_153688.1,629-647).
cccacagtggagtagaata

SEQ ID NO: 325165 - DNA, 19 bp, Homo sapiens
  siRNA target sequence for ZFP1 (NM_153688.1,637-655).
ggagtagaatattctgaat

SEQ ID NO: 325166 - DNA, 19 bp, Homo sapiens
  siRNA target sequence for ZFP1 (NM_153688.1,638-656).
gagtagaatattctgaata

SEQ ID NO: 325167 - DNA, 19 bp, Homo sapiens
  siRNA target sequence for ZFP1 (NM_153688.1,724-742).
gttcaacctttcatttgta

SEQ ID NO: 325168 - DNA, 19 bp, Homo sapiens
  siRNA target sequence for ZFP1 (NM_153688.1,775-793).
ctcctcattagtcataaga

SEQ ID NO: 325169 - DNA, 19 bp, Homo sapiens
  siRNA target sequence for ZFP1 (NM_153688.1,962-980).
gagcacatatggagaagaa

SEQ ID NO: 325170 - DNA, 19 bp, Homo sapiens
  siRNA target sequence for ZFP1 (NM_153688.1,1088-1106).
caaaaaccttctttaagaa

SEQ ID NO: 325171 - DNA, 19 bp, Homo sapiens
  siRNA target sequence for ZFP1 (NM_153688.1,1269-1287).
ccagaggtcaactcttaga

SEQ ID NO: 325172 - DNA, 19 bp, Homo sapiens
  siRNA target sequence for ZFP1 (NM_153688.1,1272-1290).
gaggtcaactcttagatta

SEQ ID NO: 325173 - DNA, 19 bp, Homo sapiens
  siRNA target sequence for ZFP1 (NM_153688.1,1277-1295).
caactcttagattacactt

SEQ ID NO: 325174 - DNA, 19 bp, Homo sapiens
  siRNA target sequence for ZNF285 (NM_152354.2,222-240).
cgggattaaaaacaacatt

SEQ ID NO: 325175 - DNA, 19 bp, Homo sapiens
  siRNA target sequence for ZNF285 (NM_152354.2,250-268).
caggcaaaggggttaagtt

SEQ ID NO: 325176 - DNA, 19 bp, Homo sapiens
  siRNA target sequence for ZNF285 (NM_152354.2,266-284).
gttacctttcgcaagaagt

SEQ ID NO: 325177 - DNA, 19 bp, Homo sapiens
  siRNA target sequence for ZNF285 (NM_152354.2,310-328).
caaaggatccgggatttaa

SEQ ID NO: 325178 - DNA, 19 bp, Homo sapiens
  siRNA target sequence for ZNF285 (NM_152354.2,366-384).
gtgttccccacatttagaa

SEQ ID NO: 325179 - DNA, 19 bp, Homo sapiens
  siRNA target sequence for ZNF285 (NM_152354.2,368-386).
gttccccacatttagaaga

SEQ ID NO: 325180 - DNA, 19 bp, Homo sapiens
  siRNA target sequence for ZNF285 (NM_152354.2,371-389).
ccccacatttagaagatgt

SEQ ID NO: 325181 - DNA, 19 bp, Homo sapiens
  siRNA target sequence for ZNF285 (NM_152354.2,725-743).
caacggttgaaaaacgtaa

SEQ ID NO: 325182 - DNA, 19 bp, Homo sapiens
  siRNA target sequence for ZNF285 (NM_152354.2,1641-1659).
ccggaattcagatcttaat

SEQ ID NO: 325183 - DNA, 19 bp, Homo sapiens
  siRNA target sequence for ZNF491 (NM_152356.2,399-417).
catgtggagaaatcttcat

SEQ ID NO: 325184 - DNA, 19 bp, Homo sapiens
  siRNA target sequence for ZNF491 (NM_152356.2,407-425).
gaaatcttcatgggatatt

SEQ ID NO: 325185 - DNA, 19 bp, Homo sapiens
  siRNA target sequence for ZNF491 (NM_152356.2,467-485).
ccacataagtgtcagaaat

SEQ ID NO: 325186 - DNA, 19 bp, Homo sapiens
  siRNA target sequence for ZNF491 (NM_152356.2,468-486).
cacataagtgtcagaaatt

SEQ ID NO: 325187 - DNA, 19 bp, Homo sapiens
  siRNA target sequence for ZNF491 (NM_152356.2,533-551).
catagccactgctttcgaa

SEQ ID NO: 325188 - DNA, 19 bp, Homo sapiens
  siRNA target sequence for ZNF491 (NM_152356.2,621-639).
ctgcaagcattcgaagata

SEQ ID NO: 325189 - DNA, 19 bp, Homo sapiens
  siRNA target sequence for ZNF491 (NM_152356.2,623-641).
gcaagcattcgaagatata

SEQ ID NO: 325190 - DNA, 19 bp, Homo sapiens
  siRNA target sequence for ZNF491 (NM_152356.2,786-804).
ggcacagttctgttcgaat

SEQ ID NO: 325191 - DNA, 19 bp, Homo sapiens
  siRNA target sequence for ZNF491 (NM_152356.2,1037-1055).
cgccttataagctttcgaa

SEQ ID NO: 325192 - DNA, 19 bp, Homo sapiens
  siRNA target sequence for ZNF491 (NM_152356.2,1453-1471).
cacttgttccatatatatt

SEQ ID NO: 325193 - DNA, 19 bp, Homo sapiens
  siRNA target sequence for ZNF491 (NM_152356.2,1461-1479).
ccatatatattagaataca

SEQ ID NO: 325194 - DNA, 19 bp, Homo sapiens
  siRNA target sequence for ZNF493 (NM_175910.4,693-711).
ggcacatctttctaccaat

SEQ ID NO: 325195 - DNA, 19 bp, Homo sapiens
  siRNA target sequence for ZNF493 (NM_175910.4,694-712).
gcacatctttctaccaatt

SEQ ID NO: 325196 - DNA, 19 bp, Homo sapiens
  siRNA target sequence for ZNF493 (NM_175910.4,1812-1830).
ctcgctgggcacaagcaaa

SEQ ID NO: 325197 - DNA, 19 bp, Homo sapiens
  siRNA target sequence for ZNF493 (NM_175910.4,1818-1836).
gggcacaagcaaattcata

SEQ ID NO: 325198 - DNA, 19 bp, Homo sapiens
  siRNA target sequence for ZNF493 (NM_175910.4,1823-1841).
caagcaaattcatagtgta

SEQ ID NO: 325199 - DNA, 19 bp, Homo sapiens
  siRNA target sequence for ZNF501 (NM_145044.1,575-593).
gtttccgtaaacagtcaaa

SEQ ID NO: 325200 - DNA, 19 bp, Homo sapiens
  siRNA target sequence for ZNF501 (NM_145044.1,579-597).
ccgtaaacagtcaaatctt

SEQ ID NO: 325201 - DNA, 19 bp, Homo sapiens
  siRNA target sequence for ZNF501 (NM_145044.1,658-676).
gcctttcaaacaaaagcaa

SEQ ID NO: 325202 - DNA, 19 bp, Homo sapiens
  siRNA target sequence for ZNF502 (NM_033210.3,309-327).
caggctgggtaaacaagaa

SEQ ID NO: 325203 - DNA, 19 bp, Homo sapiens
  siRNA target sequence for ZNF502 (NM_033210.3,387-405).
ggttccaagaggatgaata

SEQ ID NO: 325204 - DNA, 19 bp, Homo sapiens
  siRNA target sequence for ZNF502 (NM_033210.3,397-415).
ggatgaataccaagattct

SEQ ID NO: 325205 - DNA, 19 bp, Homo sapiens
  siRNA target sequence for ZNF502 (NM_033210.3,398-416).
gatgaataccaagattcta

SEQ ID NO: 325206 - DNA, 19 bp, Homo sapiens
  siRNA target sequence for ZNF502 (NM_033210.3,401-419).
gaataccaagattctacat

SEQ ID NO: 325207 - DNA, 19 bp, Homo sapiens
  siRNA target sequence for ZNF502 (NM_033210.3,442-460).
gggcatgaaggaaaactct

SEQ ID NO: 325208 - DNA, 19 bp, Homo sapiens
  siRNA target sequence for ZNF502 (NM_033210.3,497-515).
ggaggttttgggagaataa

SEQ ID NO: 325209 - DNA, 19 bp, Homo sapiens
  siRNA target sequence for ZNF502 (NM_033210.3,530-548).
gaagcaccccctgaaatta

SEQ ID NO: 325210 - DNA, 19 bp, Homo sapiens
  siRNA target sequence for ZNF502 (NM_033210.3,533-551).
gcaccccctgaaattatta

SEQ ID NO: 325211 - DNA, 19 bp, Homo sapiens
  siRNA target sequence for ZNF502 (NM_033210.3,538-556).
ccctgaaattattagtcaa

SEQ ID NO: 325212 - DNA, 19 bp, Homo sapiens
  siRNA target sequence for ZNF502 (NM_033210.3,632-650).
ctgcatcagtgggaaacaa

SEQ ID NO: 325213 - DNA, 19 bp, Homo sapiens
  siRNA target sequence for ZNF502 (NM_033210.3,634-652).
gcatcagtgggaaacaagt

SEQ ID NO: 325214 - DNA, 19 bp, Homo sapiens
  siRNA target sequence for ZNF502 (NM_033210.3,700-718).
ctgcacacagaaaaaatct

SEQ ID NO: 325215 - DNA, 19 bp, Homo sapiens
  siRNA target sequence for ZNF502 (NM_033210.3,828-846).
cctttagtcgtagttcatt

SEQ ID NO: 325216 - DNA, 19 bp, Homo sapiens
  siRNA target sequence for ZNF502 (NM_033210.3,917-935).
cgatgtcgatcatttctta

SEQ ID NO: 325217 - DNA, 19 bp, Homo sapiens
  siRNA target sequence for ZNF502 (NM_033210.3,921-939).
gtcgatcatttcttactca

SEQ ID NO: 325218 - DNA, 19 bp, Homo sapiens
  siRNA target sequence for ZNF502 (NM_033210.3,1090-1108).
gaatacacaccttattcat

SEQ ID NO: 325219 - DNA, 19 bp, Homo sapiens
  siRNA target sequence for ZNF502 (NM_033210.3,1158-1176).
gctcttcttttcgaaaaca

SEQ ID NO: 325220 - DNA, 19 bp, Homo sapiens
  siRNA target sequence for ZNF502 (NM_033210.3,1164-1182).
cttttcgaaaacactcaaa

SEQ ID NO: 325221 - DNA, 19 bp, Homo sapiens
  siRNA target sequence for ZNF502 (NM_033210.3,1426-1444).
gagcaccccactcactaaa

SEQ ID NO: 325222 - DNA, 19 bp, Homo sapiens
  siRNA target sequence for ZNF502 (NM_033210.3,1428-1446).
gcaccccactcactaaaca

SEQ ID NO: 325223 - DNA, 19 bp, Homo sapiens
  siRNA target sequence for ZNF502 (NM_033210.3,1429-1447).
caccccactcactaaacat

SEQ ID NO: 325224 - DNA, 19 bp, Homo sapiens
  siRNA target sequence for ZNF502 (NM_033210.3,1762-1780).
gtatgcacaccttagtgaa

SEQ ID NO: 325225 - DNA, 19 bp, Homo sapiens
  siRNA target sequence for ATF7IP (NM_018179.3,245-263).
gtacaaggtcaaagaagaa

SEQ ID NO: 325226 - DNA, 19 bp, Homo sapiens
  siRNA target sequence for ATF7IP (NM_018179.3,335-353).
ggaaaacatggattacatt

SEQ ID NO: 325227 - DNA, 19 bp, Homo sapiens
  siRNA target sequence for ATF7IP (NM_018179.3,425-443).
ggaaacaccctgtatccta

SEQ ID NO: 325228 - DNA, 19 bp, Homo sapiens
  siRNA target sequence for ATF7IP (NM_018179.3,430-448).
caccctgtatcctaagtgt

SEQ ID NO: 325229 - DNA, 19 bp, Homo sapiens
  siRNA target sequence for ATF7IP (NM_018179.3,432-450).
ccctgtatcctaagtgtta

SEQ ID NO: 325230 - DNA, 19 bp, Homo sapiens
  siRNA target sequence for ATF7IP (NM_018179.3,433-451).
cctgtatcctaagtgttaa

SEQ ID NO: 325231 - DNA, 19 bp, Homo sapiens
  siRNA target sequence for ATF7IP (NM_018179.3,434-452).
ctgtatcctaagtgttaat

SEQ ID NO: 325232 - DNA, 19 bp, Homo sapiens
  siRNA target sequence for ATF7IP (NM_018179.3,440-458).
cctaagtgttaatgtaaaa

SEQ ID NO: 325233 - DNA, 19 bp, Homo sapiens
  siRNA target sequence for ATF7IP (NM_018179.3,461-479).
caagcaggatgatgattta

SEQ ID NO: 325234 - DNA, 19 bp, Homo sapiens
  siRNA target sequence for ATF7IP (NM_018179.3,494-512).
gtctccccataatataact

SEQ ID NO: 325235 - DNA, 19 bp, Homo sapiens
  siRNA target sequence for ATF7IP (NM_018179.3,644-662).
cgagccctcctctagtgat

SEQ ID NO: 325236 - DNA, 19 bp, Homo sapiens
  siRNA target sequence for ATF7IP (NM_018179.3,840-858).
gatatagcctctagtgaaa

SEQ ID NO: 325237 - DNA, 19 bp, Homo sapiens
  siRNA target sequence for ATF7IP (NM_018179.3,846-864).
gcctctagtgaaataactt

SEQ ID NO: 325238 - DNA, 19 bp, Homo sapiens
  siRNA target sequence for ATF7IP (NM_018179.3,848-866).
ctctagtgaaataacttct

SEQ ID NO: 325239 - DNA, 19 bp, Homo sapiens
  siRNA target sequence for ATF7IP (NM_018179.3,995-1013).
gacttctgaatcaaccttt

SEQ ID NO: 325240 - DNA, 19 bp, Homo sapiens
  siRNA target sequence for ATF7IP (NM_018179.3,1148-1166).
gagtaaagactcattggat

SEQ ID NO: 325241 - DNA, 19 bp, Homo sapiens
  siRNA target sequence for ATF7IP (NM_018179.3,1215-1233).
gaaacagatgatacaacta

SEQ ID NO: 325242 - DNA, 19 bp, Homo sapiens
  siRNA target sequence for ATF7IP (NM_018179.3,1369-1387).
cagatcttgtagaaacgat

SEQ ID NO: 325243 - DNA, 19 bp, Homo sapiens
  siRNA target sequence for ATF7IP (NM_018179.3,1371-1389).
gatcttgtagaaacgatta

SEQ ID NO: 325244 - DNA, 19 bp, Homo sapiens
  siRNA target sequence for ATF7IP (NM_018179.3,1496-1514).
ggatgaacttacttgcttt

SEQ ID NO: 325245 - DNA, 19 bp, Homo sapiens
  siRNA target sequence for ATF7IP (NM_018179.3,1585-1603).
gttcaccatctaaacaaga

SEQ ID NO: 325246 - DNA, 19 bp, Homo sapiens
  siRNA target sequence for ATF7IP (NM_018179.3,1813-1831).
ctagacgaaaacgttctaa

SEQ ID NO: 325247 - DNA, 19 bp, Homo sapiens
  siRNA target sequence for ATF7IP (NM_018179.3,1834-1852).
cagaagacatggacaatgt

SEQ ID NO: 325248 - DNA, 19 bp, Homo sapiens
  siRNA target sequence for ATF7IP (NM_018179.3,1844-1862).
ggacaatgtacagtctaaa

SEQ ID NO: 325249 - DNA, 19 bp, Homo sapiens
  siRNA target sequence for ATF7IP (NM_018179.3,1856-1874).
gtctaaacgtcgtcgatat

SEQ ID NO: 325250 - DNA, 19 bp, Homo sapiens
  siRNA target sequence for ATF7IP (NM_018179.3,1915-1933).
cagccaaaggagacattaa

SEQ ID NO: 325251 - DNA, 19 bp, Homo sapiens
  siRNA target sequence for ATF7IP (NM_018179.3,1988-2006).
gcagtgtgctgtatttgat

SEQ ID NO: 325252 - DNA, 19 bp, Homo sapiens
  siRNA target sequence for ATF7IP (NM_018179.3,1995-2013).
gctgtatttgataagactt

SEQ ID NO: 325253 - DNA, 19 bp, Homo sapiens
  siRNA target sequence for ATF7IP (NM_018179.3,2031-2049).
cgagtggaaaagattgaat

SEQ ID NO: 325254 - DNA, 19 bp, Homo sapiens
  siRNA target sequence for ATF7IP (NM_018179.3,2068-2086).
cagttctcactgaactaca

SEQ ID NO: 325255 - DNA, 19 bp, Homo sapiens
  siRNA target sequence for ATF7IP (NM_018179.3,2088-2106).
gccaagatagccaggttaa

SEQ ID NO: 325256 - DNA, 19 bp, Homo sapiens
  siRNA target sequence for ATF7IP (NM_018179.3,2093-2111).
gatagccaggttaaccaaa

SEQ ID NO: 325257 - DNA, 19 bp, Homo sapiens
  siRNA target sequence for ATF7IP (NM_018179.3,2124-2142).
gccaaagaagatcttaaga

SEQ ID NO: 325258 - DNA, 19 bp, Homo sapiens
  siRNA target sequence for ATF7IP (NM_018179.3,2169-2187).
ccagtatcaccaggaaaaa

SEQ ID NO: 325259 - DNA, 19 bp, Homo sapiens
  siRNA target sequence for ATF7IP (NM_018179.3,2206-2224).
gcaataataacatgtctta

SEQ ID NO: 325260 - DNA, 19 bp, Homo sapiens
  siRNA target sequence for ATF7IP (NM_018179.3,2352-2370).
gtcagtagtcaacctaaat

SEQ ID NO: 325261 - DNA, 19 bp, Homo sapiens
  siRNA target sequence for ATF7IP (NM_018179.3,2356-2374).
gtagtcaacctaaattgca

SEQ ID NO: 325262 - DNA, 19 bp, Homo sapiens
  siRNA target sequence for ATF7IP (NM_018179.3,2467-2485).
gaaatccccagcctacaat

SEQ ID NO: 325263 - DNA, 19 bp, Homo sapiens
  siRNA target sequence for ATF7IP (NM_018179.3,2472-2490).
ccccagcctacaatctctt

SEQ ID NO: 325264 - DNA, 19 bp, Homo sapiens
  siRNA target sequence for ATF7IP (NM_018179.3,2474-2492).
ccagcctacaatctcttta

SEQ ID NO: 325265 - DNA, 19 bp, Homo sapiens
  siRNA target sequence for ATF7IP (NM_018179.3,2566-2584).
ggactttggtgactaatca

SEQ ID NO: 325266 - DNA, 19 bp, Homo sapiens
  siRNA target sequence for ATF7IP (NM_018179.3,2567-2585).
gactttggtgactaatcaa

SEQ ID NO: 325267 - DNA, 19 bp, Homo sapiens
  siRNA target sequence for ATF7IP (NM_018179.3,2594-2612).
caatgttgaattcatttct

SEQ ID NO: 325268 - DNA, 19 bp, Homo sapiens
  siRNA target sequence for ATF7IP (NM_018179.3,2631-2649).
gtgagtggtcttaccaaaa

SEQ ID NO: 325269 - DNA, 19 bp, Homo sapiens
  siRNA target sequence for ATF7IP (NM_018179.3,2633-2651).
gagtggtcttaccaaaaat

SEQ ID NO: 325270 - DNA, 19 bp, Homo sapiens
  siRNA target sequence for ATF7IP (NM_018179.3,2835-2853).
ggcccatcaggactctata

SEQ ID NO: 325271 - DNA, 19 bp, Homo sapiens
  siRNA target sequence for ATF7IP (NM_018179.3,2837-2855).
cccatcaggactctatagt

SEQ ID NO: 325272 - DNA, 19 bp, Homo sapiens
  siRNA target sequence for ATF7IP (NM_018179.3,2863-2881).
ctaatcgaggtcctataca

SEQ ID NO: 325273 - DNA, 19 bp, Homo sapiens
  siRNA target sequence for ATF7IP (NM_018179.3,2892-2910).
ccaatttctgcatttagta

SEQ ID NO: 325274 - DNA, 19 bp, Homo sapiens
  siRNA target sequence for ATF7IP (NM_018179.3,2935-2953).
gcaataccaccccaagaat

SEQ ID NO: 325275 - DNA, 19 bp, Homo sapiens
  siRNA target sequence for ATF7IP (NM_018179.3,2979-2997).
gatgcttctgtcagtaaga

SEQ ID NO: 325276 - DNA, 19 bp, Homo sapiens
  siRNA target sequence for ATF7IP (NM_018179.3,3030-3048).
gccactggcagtgattcaa

SEQ ID NO: 325277 - DNA, 19 bp, Homo sapiens
  siRNA target sequence for ATF7IP (NM_018179.3,3052-3070).
gtgtcattgatctcacaat

SEQ ID NO: 325278 - DNA, 19 bp, Homo sapiens
  siRNA target sequence for ATF7IP (NM_018179.3,3091-3109).
cttcacaagaccccaaaaa

SEQ ID NO: 325279 - DNA, 19 bp, Homo sapiens
  siRNA target sequence for ATF7IP (NM_018179.3,3258-3276).
ccaactaccgtgaatgtaa

SEQ ID NO: 325280 - DNA, 19 bp, Homo sapiens
  siRNA target sequence for ATF7IP (NM_018179.3,3277-3295).
cacatcgtccagtaactca

SEQ ID NO: 325281 - DNA, 19 bp, Homo sapiens
  siRNA target sequence for ATF7IP (NM_018179.3,3331-3349).
caaaccaccaggtggttta

SEQ ID NO: 325282 - DNA, 19 bp, Homo sapiens
  siRNA target sequence for ATF7IP (NM_018179.3,3335-3353).
ccaccaggtggtttataca

SEQ ID NO: 325283 - DNA, 19 bp, Homo sapiens
  siRNA target sequence for ATF7IP (NM_018179.3,3381-3399).
cccttgcgaggaactgtta

SEQ ID NO: 325284 - DNA, 19 bp, Homo sapiens
  siRNA target sequence for ATF7IP (NM_018179.3,3382-3400).
ccttgcgaggaactgttat

SEQ ID NO: 325285 - DNA, 19 bp, Homo sapiens
  siRNA target sequence for ATF7IP (NM_018179.3,3425-3443).
caatccccaaaatagtgtt

SEQ ID NO: 325286 - DNA, 19 bp, Homo sapiens
  siRNA target sequence for ATF7IP (NM_018179.3,3430-3448).
cccaaaatagtgttacagt

SEQ ID NO: 325287 - DNA, 19 bp, Homo sapiens
  siRNA target sequence for ATF7IP (NM_018179.3,3431-3449).
ccaaaatagtgttacagtt

SEQ ID NO: 325288 - DNA, 19 bp, Homo sapiens
  siRNA target sequence for ATF7IP (NM_018179.3,3463-3481).
caaccacatatgttgtaaa

SEQ ID NO: 325289 - DNA, 19 bp, Homo sapiens
  siRNA target sequence for ATF7IP (NM_018179.3,3640-3658).
ctcagaagccacacttgaa

SEQ ID NO: 325290 - DNA, 19 bp, Homo sapiens
  siRNA target sequence for ATF7IP (NM_018179.3,3644-3662).
gaagccacacttgaagtta

SEQ ID NO: 325291 - DNA, 19 bp, Homo sapiens
  siRNA target sequence for ATF7IP (NM_018179.3,3663-3681).
gcacgcgttcagagtcaaa

SEQ ID NO: 325292 - DNA, 19 bp, Homo sapiens
  siRNA target sequence for ATF7IP (NM_018179.3,3676-3694).
gtcaaaatggcatagtact

SEQ ID NO: 325293 - DNA, 19 bp, Homo sapiens
  siRNA target sequence for ATF7IP (NM_018179.3,3742-3760).
gctaccatctctatgctta

SEQ ID NO: 325294 - DNA, 19 bp, Homo sapiens
  siRNA target sequence for ATF7IP (NM_018179.3,3783-3801).
gtgccctcacaatggaaaa

SEQ ID NO: 325295 - DNA, 19 bp, Homo sapiens
  siRNA target sequence for ATF7IP (NM_018179.3,3841-3859).
gtactctcacccagtttgt

SEQ ID NO: 325296 - DNA, 19 bp, Homo sapiens
  siRNA target sequence for ATF7IP (NM_018179.3,3854-3872).
gtttgtatctggtagcaaa

SEQ ID NO: 325297 - DNA, 19 bp, Homo sapiens
  siRNA target sequence for ATF7IP (NM_018179.3,3858-3876).
gtatctggtagcaaatact

SEQ ID NO: 325298 - DNA, 19 bp, Homo sapiens
  siRNA target sequence for ATF7IP (NM_018179.3,3882-3900).
gcagtacgagccaaggata

SEQ ID NO: 325299 - DNA, 19 bp, Homo sapiens
  siRNA target sequence for ATF7IP (NM_018179.3,3885-3903).
gtacgagccaaggatattt

SEQ ID NO: 325300 - DNA, 19 bp, Homo sapiens
  siRNA target sequence for ATF7IP (NM_018179.3,3896-3914).
ggatatttatggacgtttt

SEQ ID NO: 325301 - DNA, 19 bp, Homo sapiens
  siRNA target sequence for C14orf18 (NM_021178.2,454-472).
ggagacctcactatcctat

SEQ ID NO: 325302 - DNA, 19 bp, Homo sapiens
  siRNA target sequence for C14orf18 (NM_021178.2,457-475).
gacctcactatcctattat

SEQ ID NO: 325303 - DNA, 19 bp, Homo sapiens
  siRNA target sequence for C14orf18 (NM_021178.2,459-477).
cctcactatcctattatgt

SEQ ID NO: 325304 - DNA, 19 bp, Homo sapiens
  siRNA target sequence for C14orf18 (NM_021178.2,462-480).
cactatcctattatgtctt

SEQ ID NO: 325305 - DNA, 19 bp, Homo sapiens
  siRNA target sequence for C14orf18 (NM_021178.2,494-512).
gctgctttgtaattatcga

SEQ ID NO: 325306 - DNA, 19 bp, Homo sapiens
  siRNA target sequence for C14orf18 (NM_021178.2,495-513).
ctgctttgtaattatcgaa

SEQ ID NO: 325307 - DNA, 19 bp, Homo sapiens
  siRNA target sequence for C14orf18 (NM_021178.2,511-529).
gaaagtgtcgcatcaaact

SEQ ID NO: 325308 - DNA, 19 bp, Homo sapiens
  siRNA target sequence for C14orf18 (NM_021178.2,579-597).
catggcagtggtgagttta

SEQ ID NO: 325309 - DNA, 19 bp, Homo sapiens
  siRNA target sequence for C14orf18 (NM_021178.2,640-658).
ctggaaagctagatattgt

SEQ ID NO: 325310 - DNA, 19 bp, Homo sapiens
  siRNA target sequence for C14orf18 (NM_021178.2,671-689).
cagtccatcagaggaatat

SEQ ID NO: 325311 - DNA, 19 bp, Homo sapiens
  siRNA target sequence for C14orf18 (NM_021178.2,673-691).
gtccatcagaggaatataa

SEQ ID NO: 325312 - DNA, 19 bp, Homo sapiens
  siRNA target sequence for C14orf18 (NM_021178.2,720-738).
gagatcgtgttggacatta

SEQ ID NO: 325313 - DNA, 19 bp, Homo sapiens
  siRNA target sequence for C14orf18 (NM_021178.2,749-767).
gctggccttctggacatat

SEQ ID NO: 325314 - DNA, 19 bp, Homo sapiens
  siRNA target sequence for C14orf18 (NM_021178.2,760-778).
ggacatatcaggtacatca

SEQ ID NO: 325315 - DNA, 19 bp, Homo sapiens
  siRNA target sequence for C14orf18 (NM_021178.2,786-804).
ctctatcaagaatacaatt

SEQ ID NO: 325316 - DNA, 19 bp, Homo sapiens
  siRNA target sequence for C14orf18 (NM_021178.2,873-891).
gtagaattgacctctatga

SEQ ID NO: 325317 - DNA, 19 bp, Homo sapiens
  siRNA target sequence for C14orf18 (NM_021178.2,968-986).
ggagcgcaatcgtcagtat

SEQ ID NO: 325318 - DNA, 19 bp, Homo sapiens
  siRNA target sequence for C14orf18 (NM_021178.2,971-989).
gcgcaatcgtcagtatcaa

SEQ ID NO: 325319 - DNA, 19 bp, Homo sapiens
  siRNA target sequence for C14orf18 (NM_021178.2,972-990).
cgcaatcgtcagtatcaaa

SEQ ID NO: 325320 - DNA, 19 bp, Homo sapiens
  siRNA target sequence for C14orf18 (NM_021178.2,973-991).
gcaatcgtcagtatcaaaa

SEQ ID NO: 325321 - DNA, 19 bp, Homo sapiens
  siRNA target sequence for C14orf18 (NM_021178.2,992-1010).
gctccaaggcctctatgat

SEQ ID NO: 325322 - DNA, 19 bp, Homo sapiens
  siRNA target sequence for C14orf18 (NM_021178.2,1014-1032).
cttaggctacgaaacatca

SEQ ID NO: 325323 - DNA, 19 bp, Homo sapiens
  siRNA target sequence for C14orf18 (NM_021178.2,1018-1036).
ggctacgaaacatcactat

SEQ ID NO: 325324 - DNA, 19 bp, Homo sapiens
  siRNA target sequence for C14orf18 (NM_021178.2,1019-1037).
gctacgaaacatcactatt

SEQ ID NO: 325325 - DNA, 19 bp, Homo sapiens
  siRNA target sequence for C14orf18 (NM_021178.2,1023-1041).
cgaaacatcactattgcta

SEQ ID NO: 325326 - DNA, 19 bp, Homo sapiens
  siRNA target sequence for C14orf18 (NM_021178.2,1028-1046).
catcactattgctaaccat

SEQ ID NO: 325327 - DNA, 19 bp, Homo sapiens
  siRNA target sequence for C14orf18 (NM_021178.2,1055-1073).
ccttgaaccatccatgatt

SEQ ID NO: 325328 - DNA, 19 bp, Homo sapiens
  siRNA target sequence for C14orf18 (NM_021178.2,1093-1111).
gcttcccattaggtaacaa

SEQ ID NO: 325329 - DNA, 19 bp, Homo sapiens
  siRNA target sequence for C14orf18 (NM_021178.2,1112-1130).
ctccaagtttcctttggat

SEQ ID NO: 325330 - DNA, 19 bp, Homo sapiens
  siRNA target sequence for C14orf18 (NM_021178.2,1115-1133).
caagtttcctttggataat

SEQ ID NO: 325331 - DNA, 19 bp, Homo sapiens
  siRNA target sequence for C14orf18 (NM_021178.2,1118-1136).
gtttcctttggataataca

SEQ ID NO: 325332 - DNA, 19 bp, Homo sapiens
  siRNA target sequence for C14orf18 (NM_021178.2,1153-1171).
gcgatggagatggagattt

SEQ ID NO: 325333 - DNA, 19 bp, Homo sapiens
  siRNA target sequence for C14orf18 (NM_021178.2,1217-1235).
cagcaacagcttttttagt

SEQ ID NO: 325334 - DNA, 19 bp, Homo sapiens
  siRNA target sequence for C14orf18 (NM_021178.2,1219-1237).
gcaacagcttttttagttt

SEQ ID NO: 325335 - DNA, 19 bp, Homo sapiens
  siRNA target sequence for C14orf18 (NM_021178.2,1241-1259).
ctctccaagtcgtgaatta

SEQ ID NO: 325336 - DNA, 19 bp, Homo sapiens
  siRNA target sequence for C14orf18 (NM_021178.2,1243-1261).
ctccaagtcgtgaattaga

SEQ ID NO: 325337 - DNA, 19 bp, Homo sapiens
  siRNA target sequence for C14orf18 (NM_021178.2,1276-1294).
ctagcagggccttcaaagt

SEQ ID NO: 325338 - DNA, 19 bp, Homo sapiens
  siRNA target sequence for LOC112840 (NM_080666.1,189-207).
gttaaatgttccttaggaa

SEQ ID NO: 325339 - DNA, 19 bp, Homo sapiens
  siRNA target sequence for LOC112840 (NM_080666.1,217-235).
ccacttaccttcttggtat

SEQ ID NO: 325340 - DNA, 19 bp, Homo sapiens
  siRNA target sequence for LOC112840 (NM_080666.1,231-249).
ggtatagacacatcaaaga

SEQ ID NO: 325341 - DNA, 19 bp, Homo sapiens
  siRNA target sequence for LOC112840 (NM_080666.1,275-293).
ggttgctgttttatgttct

SEQ ID NO: 325342 - DNA, 19 bp, Homo sapiens
  siRNA target sequence for LOC112840 (NM_080666.1,282-300).
gttttatgttctaatggat

SEQ ID NO: 325343 - DNA, 19 bp, Homo sapiens
  siRNA target sequence for LOC112840 (NM_080666.1,292-310).
ctaatggatcaatcagaat

SEQ ID NO: 325344 - DNA, 19 bp, Homo sapiens
  siRNA target sequence for LOC112840 (NM_080666.1,351-369).
ggatatcctggacttctta

SEQ ID NO: 325345 - DNA, 19 bp, Homo sapiens
  siRNA target sequence for LOC112840 (NM_080666.1,352-370).
gatatcctggacttcttaa

SEQ ID NO: 325346 - DNA, 19 bp, Homo sapiens
  siRNA target sequence for LOC112840 (NM_080666.1,445-463).
ctcgagtagccagagaaaa

SEQ ID NO: 325347 - DNA, 19 bp, Homo sapiens
  siRNA target sequence for LOC112840 (NM_080666.1,484-502).
gttacccttccaatatttt

SEQ ID NO: 325348 - DNA, 19 bp, Homo sapiens
  siRNA target sequence for LOC112840 (NM_080666.1,567-585).
gatgcattgttggtgtttt

SEQ ID NO: 325349 - DNA, 19 bp, Homo sapiens
  siRNA target sequence for LOC112840 (NM_080666.1,629-647).
ctcacttggtgcatattca

SEQ ID NO: 325350 - DNA, 19 bp, Homo sapiens
  siRNA target sequence for LOC112840 (NM_080666.1,718-736).
catctgatggcctggtaaa

SEQ ID NO: 325351 - DNA, 19 bp, Homo sapiens
  siRNA target sequence for LOC112840 (NM_080666.1,723-741).
gatggcctggtaaatgtat

SEQ ID NO: 325352 - DNA, 19 bp, Homo sapiens
  siRNA target sequence for LOC112840 (NM_080666.1,776-794).
ggttacaacctgtaactca

SEQ ID NO: 325353 - DNA, 19 bp, Homo sapiens
  siRNA target sequence for LOC112840 (NM_080666.1,777-795).
gttacaacctgtaactcaa

SEQ ID NO: 325354 - DNA, 19 bp, Homo sapiens
  siRNA target sequence for LOC112840 (NM_080666.1,821-839).
gtctgggaaaggttataaa

SEQ ID NO: 325355 - DNA, 19 bp, Homo sapiens
  siRNA target sequence for LOC112840 (NM_080666.1,877-895).
ggtgggatcttaatcatct

SEQ ID NO: 325356 - DNA, 19 bp, Homo sapiens
  siRNA target sequence for LOC112840 (NM_080666.1,932-950).
ggatgtcagagaagtagtt

SEQ ID NO: 325357 - DNA, 19 bp, Homo sapiens
  siRNA target sequence for LOC112840 (NM_080666.1,933-951).
gatgtcagagaagtagtta

SEQ ID NO: 325358 - DNA, 19 bp, Homo sapiens
  siRNA target sequence for LOC112840 (NM_080666.1,936-954).
gtcagagaagtagttaaca

SEQ ID NO: 325359 - DNA, 19 bp, Homo sapiens
  siRNA target sequence for LOC112840 (NM_080666.1,963-981).
gatgctttggactatttga

SEQ ID NO: 325360 - DNA, 19 bp, Homo sapiens
  siRNA target sequence for LOC112840 (NM_080666.1,1113-1131).
gctacagtccgttctttct

SEQ ID NO: 325361 - DNA, 19 bp, Homo sapiens
  siRNA target sequence for LOC112840 (NM_080666.1,1121-1139).
ccgttctttctgttggaat

SEQ ID NO: 325362 - DNA, 19 bp, Homo sapiens
  siRNA target sequence for LOC112840 (NM_080666.1,1173-1191).
gatgcacagttgttacttt

SEQ ID NO: 325363 - DNA, 19 bp, Homo sapiens
  siRNA target sequence for LOC112840 (NM_080666.1,1260-1278).
caacgagtacgagttcata

SEQ ID NO: 325364 - DNA, 19 bp, Homo sapiens
  siRNA target sequence for LOC112840 (NM_080666.1,1263-1281).
cgagtacgagttcatagta

SEQ ID NO: 325365 - DNA, 19 bp, Homo sapiens
  siRNA target sequence for LOC112840 (NM_080666.1,1264-1282).
gagtacgagttcatagtaa

SEQ ID NO: 325366 - DNA, 19 bp, Homo sapiens
  siRNA target sequence for LOC112840 (NM_080666.1,1269-1287).
cgagttcatagtaatgatt

SEQ ID NO: 325367 - DNA, 19 bp, Homo sapiens
  siRNA target sequence for LRP10 (NM_014045.2,520-538).
cccatccagaccggattat

SEQ ID NO: 325368 - DNA, 19 bp, Homo sapiens
  siRNA target sequence for LRP10 (NM_014045.2,521-539).
ccatccagaccggattatt

SEQ ID NO: 325369 - DNA, 19 bp, Homo sapiens
  siRNA target sequence for LRP10 (NM_014045.2,522-540).
catccagaccggattattt

SEQ ID NO: 325370 - DNA, 19 bp, Homo sapiens
  siRNA target sequence for LRP10 (NM_014045.2,530-548).
ccggattatttttccaaat

SEQ ID NO: 325371 - DNA, 19 bp, Homo sapiens
  siRNA target sequence for LRP10 (NM_014045.2,585-603).
gtgcagggcaccttacaga

SEQ ID NO: 325372 - DNA, 19 bp, Homo sapiens
  siRNA target sequence for LRP10 (NM_014045.2,864-882).
ctctcctacagccaagatt

SEQ ID NO: 325373 - DNA, 19 bp, Homo sapiens
  siRNA target sequence for LRP10 (NM_014045.2,915-933).
ctgaaccaccgctgtgtat

SEQ ID NO: 325374 - DNA, 19 bp, Homo sapiens
  siRNA target sequence for LRP10 (NM_014045.2,1204-1222).
gagatgcagtgcatgtgta

SEQ ID NO: 325375 - DNA, 19 bp, Homo sapiens
  siRNA target sequence for LRP10 (NM_014045.2,1352-1370).
caatggtcgtggcttcaat

SEQ ID NO: 325376 - DNA, 19 bp, Homo sapiens
  siRNA target sequence for LRP10 (NM_014045.2,1612-1630).
gctgcaactaccagacttt

SEQ ID NO: 325377 - DNA, 19 bp, Homo sapiens
  siRNA target sequence for LRP10 (NM_014045.2,1698-1716).
gagaagtgcgtgtatgaga

SEQ ID NO: 325378 - DNA, 19 bp, Homo sapiens
  siRNA target sequence for LRP10 (NM_014045.2,2013-2031).
gagaatcctaatgataact

SEQ ID NO: 325379 - DNA, 19 bp, Homo sapiens
  siRNA target sequence for LRP10 (NM_014045.2,2050-2068).
gttctctgctacagatctt

SEQ ID NO: 325380 - DNA, 19 bp, Homo sapiens
  siRNA target sequence for LRP10 (NM_014045.2,2066-2084).
cttacgccaggatatgact

SEQ ID NO: 325381 - DNA, 19 bp, Homo sapiens
  siRNA target sequence for WDR21 (NM_015604.2,368-386).
gagctacctgggttttact

SEQ ID NO: 325382 - DNA, 19 bp, Homo sapiens
  siRNA target sequence for WDR21 (NM_015604.2,370-388).
gctacctgggttttacttt

SEQ ID NO: 325383 - DNA, 19 bp, Homo sapiens
  siRNA target sequence for WDR21 (NM_015604.2,419-437).
ctccctggacataacaact

SEQ ID NO: 325384 - DNA, 19 bp, Homo sapiens
  siRNA target sequence for WDR21 (NM_015604.2,956-974).
gcatcactgttcgtcaata

SEQ ID NO: 325385 - DNA, 19 bp, Homo sapiens
  siRNA target sequence for WDR21 (NM_015604.2,960-978).
cactgttcgtcaatagtca

SEQ ID NO: 325386 - DNA, 19 bp, Homo sapiens
  siRNA target sequence for WDR21 (NM_015604.2,970-988).
caatagtcacccaggaata

SEQ ID NO: 325387 - DNA, 19 bp, Homo sapiens
  siRNA target sequence for WDR21 (NM_015604.2,1042-1060).
ctggtccctgaatatccaa

SEQ ID NO: 325388 - DNA, 19 bp, Homo sapiens
  siRNA target sequence for WDR21 (NM_015604.2,1047-1065).
ccctgaatatccaagcaaa

SEQ ID NO: 325389 - DNA, 19 bp, Homo sapiens
  siRNA target sequence for WDR21 (NM_015604.2,1048-1066).
cctgaatatccaagcaaat

SEQ ID NO: 325390 - DNA, 19 bp, Homo sapiens
  siRNA target sequence for WDR21 (NM_015604.2,1049-1067).
ctgaatatccaagcaaata

SEQ ID NO: 325391 - DNA, 19 bp, Homo sapiens
  siRNA target sequence for WDR21 (NM_015604.2,1061-1079).
gcaaataactgcttcagta

SEQ ID NO: 325392 - DNA, 19 bp, Homo sapiens
  siRNA target sequence for WDR21 (NM_015604.2,1267-1285).
cacccgcctgtttcatgat

SEQ ID NO: 325393 - DNA, 19 bp, Homo sapiens
  siRNA target sequence for WDR21 (NM_015604.2,1270-1288).
ccgcctgtttcatgattca

SEQ ID NO: 325394 - DNA, 19 bp, Homo sapiens
  siRNA target sequence for WDR23 (NM_025230.3,949-967).
gtcgtcttggggatcgata

SEQ ID NO: 325395 - DNA, 19 bp, Homo sapiens
  siRNA target sequence for WDR23 (NM_025230.3,952-970).
gtcttggggatcgatacaa

SEQ ID NO: 325396 - DNA, 19 bp, Homo sapiens
  siRNA target sequence for WDR23 (NM_025230.3,998-1016).
ccgggagctggaattcaat

SEQ ID NO: 325397 - DNA, 19 bp, Homo sapiens
  siRNA target sequence for WDR23 (NM_025230.3,1149-1167).
gaacagtctcgagtgatat

SEQ ID NO: 325398 - DNA, 19 bp, Homo sapiens
  siRNA target sequence for WDR23 (NM_025230.3,1185-1203).
gatctgggcttcactgata

SEQ ID NO: 325399 - DNA, 19 bp, Homo sapiens
  siRNA target sequence for WDR23 (NM_025230.3,1274-1292).
ccagacaatccgactctat

SEQ ID NO: 325400 - DNA, 19 bp, Homo sapiens
  siRNA target sequence for WDR23 (NM_025230.3,1305-1323).
ggccgtttccgtaaattca

SEQ ID NO: 325401 - DNA, 19 bp, Homo sapiens
  siRNA target sequence for WDR23 (NM_025230.3,1306-1324).
gccgtttccgtaaattcaa

SEQ ID NO: 325402 - DNA, 19 bp, Homo sapiens
  siRNA target sequence for WDR23 (NM_025230.3,1308-1326).
cgtttccgtaaattcaaga

SEQ ID NO: 325403 - DNA, 19 bp, Homo sapiens
  siRNA target sequence for WDR23 (NM_025230.3,1402-1420).
ctagctggtctgattacat

SEQ ID NO: 325404 - DNA, 19 bp, Homo sapiens
  siRNA target sequence for WDR23 (NM_025230.3,1405-1423).
gctggtctgattacattca

SEQ ID NO: 325405 - DNA, 19 bp, Homo sapiens
  siRNA target sequence for WDR23 (NM_025230.3,1408-1426).
ggtctgattacattcatat

SEQ ID NO: 325406 - DNA, 19 bp, Homo sapiens
  siRNA target sequence for WDR23 (NM_025230.3,1436-1454).
ctatggtgagggagataca

SEQ ID NO: 325407 - DNA, 19 bp, Homo sapiens
  siRNA target sequence for WDR23 (NM_025230.3,1590-1608).
cgcacccttcagattgagt

SEQ ID NO: 325408 - DNA, 19 bp, Homo sapiens
  siRNA target sequence for WDR23 (NM_025230.3,1788-1806).
ggtgatgcccggtatctga

SEQ ID NO: 325409 - DNA, 19 bp, Homo sapiens
  siRNA target sequence for WDR23 (NM_025230.3,1789-1807).
gtgatgcccggtatctgat

SEQ ID NO: 325410 - DNA, 19 bp, Homo sapiens
  siRNA target sequence for WDR23 (NM_025230.3,1842-1860).
gatatccgacgcttttcca

SEQ ID NO: 325411 - DNA, 19 bp, Homo sapiens
  siRNA target sequence for WDR23 (NM_025230.3,2025-2043).
cggttctcccccattcata

SEQ ID NO: 325412 - DNA, 19 bp, Homo sapiens
  siRNA target sequence for WDR23 (NM_025230.3,2044-2062).
gcactggccagcagttcat

SEQ ID NO: 325413 - DNA, 19 bp, Homo sapiens
  siRNA target sequence for WDR23 (NM_025230.3,2091-2109).
gttgtgtacgaccttctaa

SEQ ID NO: 325414 - DNA, 19 bp, Homo sapiens
  siRNA target sequence for WDR23 (NM_025230.3,2106-2124).
ctaagtggccacattgtga

SEQ ID NO: 325415 - DNA, 19 bp, Homo sapiens
  siRNA target sequence for WDR23 (NM_025230.3,2162-2180).
cagttggcacccctttgaa

SEQ ID NO: 325416 - DNA, 19 bp, Homo sapiens
  siRNA target sequence for WDR23 (NM_025230.3,2164-2182).
gttggcacccctttgaaga

SEQ ID NO: 325417 - DNA, 19 bp, Homo sapiens
  siRNA target sequence for FLJ12847 (NM_024596.1,10-28).
cacttatcaagcctaatta

SEQ ID NO: 325418 - DNA, 19 bp, Homo sapiens
  siRNA target sequence for FLJ12847 (NM_024596.1,48-66).
gcagcccaaagattttaat

SEQ ID NO: 325419 - DNA, 19 bp, Homo sapiens
  siRNA target sequence for FLJ12847 (NM_024596.1,49-67).
cagcccaaagattttaatt

SEQ ID NO: 325420 - DNA, 19 bp, Homo sapiens
  siRNA target sequence for FLJ12847 (NM_024596.1,135-153).
gcaaaaaacaaatctagat

SEQ ID NO: 325421 - DNA, 19 bp, Homo sapiens
  siRNA target sequence for FLJ12847 (NM_024596.1,143-161).
caaatctagatgatgatgt

SEQ ID NO: 325422 - DNA, 19 bp, Homo sapiens
  siRNA target sequence for FLJ12847 (NM_024596.1,182-200).
ctaatggttcattaatata

SEQ ID NO: 325423 - DNA, 19 bp, Homo sapiens
  siRNA target sequence for FLJ12847 (NM_024596.1,290-308).
ccacctcttcccaaatgat

SEQ ID NO: 325424 - DNA, 19 bp, Homo sapiens
  siRNA target sequence for FLJ12847 (NM_024596.1,291-309).
cacctcttcccaaatgatt

SEQ ID NO: 325425 - DNA, 19 bp, Homo sapiens
  siRNA target sequence for FLJ12847 (NM_024596.1,306-324).
gattcagcagtctcatgat

SEQ ID NO: 325426 - DNA, 19 bp, Homo sapiens
  siRNA target sequence for FLJ12847 (NM_024596.1,312-330).
gcagtctcatgataatcca

SEQ ID NO: 325427 - DNA, 19 bp, Homo sapiens
  siRNA target sequence for FLJ12847 (NM_024596.1,317-335).
ctcatgataatccaagtaa

SEQ ID NO: 325428 - DNA, 19 bp, Homo sapiens
  siRNA target sequence for FLJ12847 (NM_024596.1,319-337).
catgataatccaagtaact

SEQ ID NO: 325429 - DNA, 19 bp, Homo sapiens
  siRNA target sequence for FLJ12847 (NM_024596.1,357-375).
gaacatttcacgtgatact

SEQ ID NO: 325430 - DNA, 19 bp, Homo sapiens
  siRNA target sequence for FLJ12847 (NM_024596.1,404-422).
gcttacactcatcttttga

SEQ ID NO: 325431 - DNA, 19 bp, Homo sapiens
  siRNA target sequence for FLJ12847 (NM_024596.1,405-423).
cttacactcatcttttgat

SEQ ID NO: 325432 - DNA, 19 bp, Homo sapiens
  siRNA target sequence for FLJ12847 (NM_024596.1,465-483).
gttggaaggatccattaat

SEQ ID NO: 325433 - DNA, 19 bp, Homo sapiens
  siRNA target sequence for FLJ12847 (NM_024596.1,538-556).
cattcatcaccatctttca

SEQ ID NO: 325434 - DNA, 19 bp, Homo sapiens
  siRNA target sequence for FLJ12847 (NM_024596.1,551-569).
ctttcactcacctcgataa

SEQ ID NO: 325435 - DNA, 19 bp, Homo sapiens
  siRNA target sequence for FLJ12847 (NM_024596.1,678-696).
gtctcaggagacgtttgaa

SEQ ID NO: 325436 - DNA, 19 bp, Homo sapiens
  siRNA target sequence for FLJ12847 (NM_024596.1,687-705).
gacgtttgaagagaagtat

SEQ ID NO: 325437 - DNA, 19 bp, Homo sapiens
  siRNA target sequence for FLJ12847 (NM_024596.1,760-778).
cccaggagttcctcagtaa

SEQ ID NO: 325438 - DNA, 19 bp, Homo sapiens
  siRNA target sequence for FLJ12847 (NM_024596.1,842-860).
gcaccaggagatctatcat

SEQ ID NO: 325439 - DNA, 19 bp, Homo sapiens
  siRNA target sequence for FLJ12847 (NM_024596.1,935-953).
gtggggagtcttcatatga

SEQ ID NO: 325440 - DNA, 19 bp, Homo sapiens
  siRNA target sequence for FLJ12847 (NM_024596.1,942-960).
gtcttcatatgatgactat

SEQ ID NO: 325441 - DNA, 19 bp, Homo sapiens
  siRNA target sequence for FLJ12847 (NM_024596.1,967-985).
cctgataatcttaaggaaa

SEQ ID NO: 325442 - DNA, 19 bp, Homo sapiens
  siRNA target sequence for FLJ12847 (NM_024596.1,1121-1139).
gaacagttgacattaccaa

SEQ ID NO: 325443 - DNA, 19 bp, Homo sapiens
  siRNA target sequence for FLJ12847 (NM_024596.1,1158-1176).
ctccagtcctcggaaaact

SEQ ID NO: 325444 - DNA, 19 bp, Homo sapiens
  siRNA target sequence for FLJ12847 (NM_024596.1,1228-1246).
gaagccctaaggtgttgta

SEQ ID NO: 325445 - DNA, 19 bp, Homo sapiens
  siRNA target sequence for FLJ12847 (NM_024596.1,1375-1393).
gaagcggttggtctgaaaa

SEQ ID NO: 325446 - DNA, 19 bp, Homo sapiens
  siRNA target sequence for FLJ12847 (NM_024596.1,1378-1396).
gcggttggtctgaaaagca

SEQ ID NO: 325447 - DNA, 19 bp, Homo sapiens
  siRNA target sequence for FLJ12847 (NM_024596.1,1469-1487).
gttttatagttgactgtaa

SEQ ID NO: 325448 - DNA, 19 bp, Homo sapiens
  siRNA target sequence for FLJ12847 (NM_024596.1,1488-1506).
catggagacgtctacagaa

SEQ ID NO: 325449 - DNA, 19 bp, Homo sapiens
  siRNA target sequence for FLJ12847 (NM_024596.1,1533-1551).
cagtggaagtgttaaaaat

SEQ ID NO: 325450 - DNA, 19 bp, Homo sapiens
  siRNA target sequence for FLJ12847 (NM_024596.1,1583-1601).
catgtgacggctttaagga

SEQ ID NO: 325451 - DNA, 19 bp, Homo sapiens
  siRNA target sequence for FLJ12847 (NM_024596.1,1671-1689).
gacaagcatgccatctgaa

SEQ ID NO: 325452 - DNA, 19 bp, Homo sapiens
  siRNA target sequence for FLJ12847 (NM_024596.1,1682-1700).
catctgaaaagcagaatgt

SEQ ID NO: 325453 - DNA, 19 bp, Homo sapiens
  siRNA target sequence for FLJ12847 (NM_024596.1,1787-1805).
cacttcgcaccctgaatgt

SEQ ID NO: 325454 - DNA, 19 bp, Homo sapiens
  siRNA target sequence for FLJ12847 (NM_024596.1,1826-1844).
gctgctgggttctctctta

SEQ ID NO: 325455 - DNA, 19 bp, Homo sapiens
  siRNA target sequence for FLJ12847 (NM_024596.1,1829-1847).
gctgggttctctcttatga

SEQ ID NO: 325456 - DNA, 19 bp, Homo sapiens
  siRNA target sequence for FLJ12847 (NM_024596.1,1850-1868).
gggtgctatggtctttaga

SEQ ID NO: 325457 - DNA, 19 bp, Homo sapiens
  siRNA target sequence for FLJ12847 (NM_024596.1,2031-2049).
ggccaagctctgtgaacta

SEQ ID NO: 325458 - DNA, 19 bp, Homo sapiens
  siRNA target sequence for FLJ12847 (NM_024596.1,2033-2051).
ccaagctctgtgaactagt

SEQ ID NO: 325459 - DNA, 19 bp, Homo sapiens
  siRNA target sequence for FLJ12847 (NM_024596.1,2152-2170).
gagaaatgggtcttagatt

SEQ ID NO: 325460 - DNA, 19 bp, Homo sapiens
  siRNA target sequence for FLJ12847 (NM_024596.1,2194-2212).
gcccctgaaaactacctat

SEQ ID NO: 325461 - DNA, 19 bp, Homo sapiens
  siRNA target sequence for FLJ12847 (NM_024596.1,2195-2213).
cccctgaaaactacctatt

SEQ ID NO: 325462 - DNA, 19 bp, Homo sapiens
  siRNA target sequence for FLJ12847 (NM_024596.1,2197-2215).
cctgaaaactacctattgt

SEQ ID NO: 325463 - DNA, 19 bp, Homo sapiens
  siRNA target sequence for MDC1 (NM_014641.1,30-48).
ctattgactgggatgttga

SEQ ID NO: 325464 - DNA, 19 bp, Homo sapiens
  siRNA target sequence for MDC1 (NM_014641.1,233-251).
caacatgcagagattgaaa

SEQ ID NO: 325465 - DNA, 19 bp, Homo sapiens
  siRNA target sequence for MDC1 (NM_014641.1,292-310).
gagccttaatggtactcaa

SEQ ID NO: 325466 - DNA, 19 bp, Homo sapiens
  siRNA target sequence for MDC1 (NM_014641.1,294-312).
gccttaatggtactcaaat

SEQ ID NO: 325467 - DNA, 19 bp, Homo sapiens
  siRNA target sequence for MDC1 (NM_014641.1,313-331).
cctgagacctcctaaggtt

SEQ ID NO: 325468 - DNA, 19 bp, Homo sapiens
  siRNA target sequence for MDC1 (NM_014641.1,314-332).
ctgagacctcctaaggttt

SEQ ID NO: 325469 - DNA, 19 bp, Homo sapiens
  siRNA target sequence for MDC1 (NM_014641.1,358-376).
gagggaccaggaattgatt

SEQ ID NO: 325470 - DNA, 19 bp, Homo sapiens
  siRNA target sequence for MDC1 (NM_014641.1,540-558).
ctgaaaggcgtatggtaaa

SEQ ID NO: 325471 - DNA, 19 bp, Homo sapiens
  siRNA target sequence for MDC1 (NM_014641.1,542-560).
gaaaggcgtatggtaaaaa

SEQ ID NO: 325472 - DNA, 19 bp, Homo sapiens
  siRNA target sequence for MDC1 (NM_014641.1,548-566).
cgtatggtaaaaaaatcaa

SEQ ID NO: 325473 - DNA, 19 bp, Homo sapiens
  siRNA target sequence for MDC1 (NM_014641.1,573-591).
catcttcctctgtgatagt

SEQ ID NO: 325474 - DNA, 19 bp, Homo sapiens
  siRNA target sequence for MDC1 (NM_014641.1,642-660).
cgccttttgccttcaattt

SEQ ID NO: 325475 - DNA, 19 bp, Homo sapiens
  siRNA target sequence for MDC1 (NM_014641.1,812-830).
gagagggacaatgatacaa

SEQ ID NO: 325476 - DNA, 19 bp, Homo sapiens
  siRNA target sequence for MDC1 (NM_014641.1,816-834).
gggacaatgatacaaaagt

SEQ ID NO: 325477 - DNA, 19 bp, Homo sapiens
  siRNA target sequence for MDC1 (NM_014641.1,1043-1061).
gtcattcctatgaagaaga

SEQ ID NO: 325478 - DNA, 19 bp, Homo sapiens
  siRNA target sequence for MDC1 (NM_014641.1,1132-1150).
ggctggtagtgatacagat

SEQ ID NO: 325479 - DNA, 19 bp, Homo sapiens
  siRNA target sequence for MDC1 (NM_014641.1,1194-1212).
gccaagcttccatggttat

SEQ ID NO: 325480 - DNA, 19 bp, Homo sapiens
  siRNA target sequence for MDC1 (NM_014641.1,1196-1214).
caagcttccatggttatca

SEQ ID NO: 325481 - DNA, 19 bp, Homo sapiens
  siRNA target sequence for MDC1 (NM_014641.1,1199-1217).
gcttccatggttatcaaca

SEQ ID NO: 325482 - DNA, 19 bp, Homo sapiens
  siRNA target sequence for MDC1 (NM_014641.1,1274-1292).
gagagccagcctgctatat

SEQ ID NO: 325483 - DNA, 19 bp, Homo sapiens
  siRNA target sequence for MDC1 (NM_014641.1,1424-1442).
ctcaaggatcacacaaaga

SEQ ID NO: 325484 - DNA, 19 bp, Homo sapiens
  siRNA target sequence for MDC1 (NM_014641.1,1429-1447).
ggatcacacaaagattaga

SEQ ID NO: 325485 - DNA, 19 bp, Homo sapiens
  siRNA target sequence for MDC1 (NM_014641.1,1441-1459).
gattagagcccttgttaga

SEQ ID NO: 325486 - DNA, 19 bp, Homo sapiens
  siRNA target sequence for MDC1 (NM_014641.1,1450-1468).
ccttgttagagcacattca

SEQ ID NO: 325487 - DNA, 19 bp, Homo sapiens
  siRNA target sequence for MDC1 (NM_014641.1,1642-1660).
gtctgtggaggggacaaat

SEQ ID NO: 325488 - DNA, 19 bp, Homo sapiens
  siRNA target sequence for MDC1 (NM_014641.1,1644-1662).
ctgtggaggggacaaatca

SEQ ID NO: 325489 - DNA, 19 bp, Homo sapiens
  siRNA target sequence for MDC1 (NM_014641.1,1696-1714).
gctgcttgtggtatctcta

SEQ ID NO: 325490 - DNA, 19 bp, Homo sapiens
  siRNA target sequence for MDC1 (NM_014641.1,1732-1750).
gcatggggactgtgaaaca

SEQ ID NO: 325491 - DNA, 19 bp, Homo sapiens
  siRNA target sequence for MDC1 (NM_014641.1,1771-1789).
cctaacagcctcagtagtt

SEQ ID NO: 325492 - DNA, 19 bp, Homo sapiens
  siRNA target sequence for MDC1 (NM_014641.1,1845-1863).
ctgcagctgttcttaagca

SEQ ID NO: 325493 - DNA, 19 bp, Homo sapiens
  siRNA target sequence for MDC1 (NM_014641.1,2229-2247).
caacaggtaccctagatga

SEQ ID NO: 325494 - DNA, 19 bp, Homo sapiens
  siRNA target sequence for MDC1 (NM_014641.1,2555-2573).
ggagaggaagaattaacca

SEQ ID NO: 325495 - DNA, 19 bp, Homo sapiens
  siRNA target sequence for MDC1 (NM_014641.1,2594-2612).
caaaaacagttgttagcta

SEQ ID NO: 325496 - DNA, 19 bp, Homo sapiens
  siRNA target sequence for MDC1 (NM_014641.1,2679-2697).
gtttgaaggtagaaattga

SEQ ID NO: 325497 - DNA, 19 bp, Homo sapiens
  siRNA target sequence for MDC1 (NM_014641.1,2698-2716).
gacatctgaggaaatacaa

SEQ ID NO: 325498 - DNA, 19 bp, Homo sapiens
  siRNA target sequence for MDC1 (NM_014641.1,2734-2752).
gcagacccttccaagcaaa

SEQ ID NO: 325499 - DNA, 19 bp, Homo sapiens
  siRNA target sequence for MDC1 (NM_014641.1,2796-2814).
gcgatccagccgagttaga

SEQ ID NO: 325500 - DNA, 19 bp, Homo sapiens
  siRNA target sequence for MDC1 (NM_014641.1,2797-2815).
cgatccagccgagttagaa

SEQ ID NO: 325501 - DNA, 19 bp, Homo sapiens
  siRNA target sequence for MDC1 (NM_014641.1,3319-3337).
cccaaagcctaaaattaga

SEQ ID NO: 325502 - DNA, 19 bp, Homo sapiens
  siRNA target sequence for MDC1 (NM_014641.1,4957-4975).
gactcccaaaccagttgaa

SEQ ID NO: 325503 - DNA, 19 bp, Homo sapiens
  siRNA target sequence for MDC1 (NM_014641.1,5097-5115).
ctaccacccctgaattcca

SEQ ID NO: 325504 - DNA, 19 bp, Homo sapiens
  siRNA target sequence for MDC1 (NM_014641.1,5146-5164).
ccctgagcctattactcaa

SEQ ID NO: 325505 - DNA, 19 bp, Homo sapiens
  siRNA target sequence for MDC1 (NM_014641.1,5243-5261).
gcacccttggaacctaaat

SEQ ID NO: 325506 - DNA, 19 bp, Homo sapiens
  siRNA target sequence for MDC1 (NM_014641.1,5267-5285).
gcctcaaggaaccaaagat

SEQ ID NO: 325507 - DNA, 19 bp, Homo sapiens
  siRNA target sequence for MDC1 (NM_014641.1,5387-5405).
gaaccagcaggtagatcta

SEQ ID NO: 325508 - DNA, 19 bp, Homo sapiens
  siRNA target sequence for MDC1 (NM_014641.1,5423-5441).
cagcctaaggcctctcaaa

SEQ ID NO: 325509 - DNA, 19 bp, Homo sapiens
  siRNA target sequence for MDC1 (NM_014641.1,5443-5461).
ccgcaagaggtctttagct

SEQ ID NO: 325510 - DNA, 19 bp, Homo sapiens
  siRNA target sequence for MDC1 (NM_014641.1,5444-5462).
cgcaagaggtctttagcta

SEQ ID NO: 325511 - DNA, 19 bp, Homo sapiens
  siRNA target sequence for MDC1 (NM_014641.1,5575-5593).
ggatgtcgtgactccaaaa

SEQ ID NO: 325512 - DNA, 19 bp, Homo sapiens
  siRNA target sequence for MDC1 (NM_014641.1,5626-5644).
ggagcccaacagaatacca

SEQ ID NO: 325513 - DNA, 19 bp, Homo sapiens
  siRNA target sequence for MDC1 (NM_014641.1,5653-5671).
cctccgacggaccaaactt

SEQ ID NO: 325514 - DNA, 19 bp, Homo sapiens
  siRNA target sequence for MDC1 (NM_014641.1,5654-5672).
ctccgacggaccaaactta

SEQ ID NO: 325515 - DNA, 19 bp, Homo sapiens
  siRNA target sequence for MDC1 (NM_014641.1,5658-5676).
gacggaccaaacttaacca

SEQ ID NO: 325516 - DNA, 19 bp, Homo sapiens
  siRNA target sequence for MDC1 (NM_014641.1,5880-5898).
cccgcaaggctggtttctt

SEQ ID NO: 325517 - DNA, 19 bp, Homo sapiens
  siRNA target sequence for MDC1 (NM_014641.1,6005-6023).
ggctatgagatctatgtga

SEQ ID NO: 325518 - DNA, 19 bp, Homo sapiens
  siRNA target sequence for MDC1 (NM_014641.1,6096-6114).
gcatgcctcggtcctataa

SEQ ID NO: 325519 - DNA, 19 bp, Homo sapiens
  siRNA target sequence for PAXIP1L (NM_007349.2,457-475).
cttctgacccggtattgat

SEQ ID NO: 325520 - DNA, 19 bp, Homo sapiens
  siRNA target sequence for PAXIP1L (NM_007349.2,483-501).
gaggcctctgttgtaatgt

SEQ ID NO: 325521 - DNA, 19 bp, Homo sapiens
  siRNA target sequence for PAXIP1L (NM_007349.2,536-554).
ggctttggttacgttctat

SEQ ID NO: 325522 - DNA, 19 bp, Homo sapiens
  siRNA target sequence for PAXIP1L (NM_007349.2,565-583).
gccagctaaccctcaataa

SEQ ID NO: 325523 - DNA, 19 bp, Homo sapiens
  siRNA target sequence for PAXIP1L (NM_007349.2,569-587).
gctaaccctcaataagaaa

SEQ ID NO: 325524 - DNA, 19 bp, Homo sapiens
  siRNA target sequence for PAXIP1L (NM_007349.2,584-602).
gaaatgcacgcatttgatt

SEQ ID NO: 325525 - DNA, 19 bp, Homo sapiens
  siRNA target sequence for PAXIP1L (NM_007349.2,644-662).
gcgagcaagtattaaaatt

SEQ ID NO: 325526 - DNA, 19 bp, Homo sapiens
  siRNA target sequence for PAXIP1L (NM_007349.2,683-701).
ggattgcgtatcagagaaa

SEQ ID NO: 325527 - DNA, 19 bp, Homo sapiens
  siRNA target sequence for PAXIP1L (NM_007349.2,703-721).
ccaaaaaggacgaagcatt

SEQ ID NO: 325528 - DNA, 19 bp, Homo sapiens
  siRNA target sequence for PAXIP1L (NM_007349.2,726-744).
catcctcgtctgattattt

SEQ ID NO: 325529 - DNA, 19 bp, Homo sapiens
  siRNA target sequence for PAXIP1L (NM_007349.2,809-827).
gaatgagggtagtacagat

SEQ ID NO: 325530 - DNA, 19 bp, Homo sapiens
  siRNA target sequence for PAXIP1L (NM_007349.2,1038-1056).
gagcctgggttgattaact

SEQ ID NO: 325531 - DNA, 19 bp, Homo sapiens
  siRNA target sequence for PAXIP1L (NM_007349.2,1041-1059).
cctgggttgattaacttgt

SEQ ID NO: 325532 - DNA, 19 bp, Homo sapiens
  siRNA target sequence for PAXIP1L (NM_007349.2,1072-1090).
cacccgtcccaggtaacat

SEQ ID NO: 325533 - DNA, 19 bp, Homo sapiens
  siRNA target sequence for PAXIP1L (NM_007349.2,1075-1093).
ccgtcccaggtaacatttt

SEQ ID NO: 325534 - DNA, 19 bp, Homo sapiens
  siRNA target sequence for PAXIP1L (NM_007349.2,1098-1116).
cctgaggtccggggtaatt

SEQ ID NO: 325535 - DNA, 19 bp, Homo sapiens
  siRNA target sequence for PAXIP1L (NM_007349.2,1101-1119).
gaggtccggggtaatttaa

SEQ ID NO: 325536 - DNA, 19 bp, Homo sapiens
  siRNA target sequence for PAXIP1L (NM_007349.2,1229-1247).
gatgaaccggccatcaaat

SEQ ID NO: 325537 - DNA, 19 bp, Homo sapiens
  siRNA target sequence for PAXIP1L (NM_007349.2,1232-1250).
gaaccggccatcaaatgta

SEQ ID NO: 325538 - DNA, 19 bp, Homo sapiens
  siRNA target sequence for PAXIP1L (NM_007349.2,1243-1261).
caaatgtagcacatatctt

SEQ ID NO: 325539 - DNA, 19 bp, Homo sapiens
  siRNA target sequence for PAXIP1L (NM_007349.2,1248-1266).
gtagcacatatcttacaga

SEQ ID NO: 325540 - DNA, 19 bp, Homo sapiens
  siRNA target sequence for PAXIP1L (NM_007349.2,1254-1272).
catatcttacagactcttt

SEQ ID NO: 325541 - DNA, 19 bp, Homo sapiens
  siRNA target sequence for PAXIP1L (NM_007349.2,1269-1287).
ctttcagcacctacgaaaa

SEQ ID NO: 325542 - DNA, 19 bp, Homo sapiens
  siRNA target sequence for PAXIP1L (NM_007349.2,1273-1291).
cagcacctacgaaaaattt

SEQ ID NO: 325543 - DNA, 19 bp, Homo sapiens
  siRNA target sequence for PAXIP1L (NM_007349.2,1276-1294).
cacctacgaaaaatttaga

SEQ ID NO: 325544 - DNA, 19 bp, Homo sapiens
  siRNA target sequence for PAXIP1L (NM_007349.2,1293-1311).
gaacagcaggtgaatcaca

SEQ ID NO: 325545 - DNA, 19 bp, Homo sapiens
  siRNA target sequence for PAXIP1L (NM_007349.2,1313-1331).
ccagcagggacatacaaat

SEQ ID NO: 325546 - DNA, 19 bp, Homo sapiens
  siRNA target sequence for PAXIP1L (NM_007349.2,1332-1350).
gccaatgcagtgctgttta

SEQ ID NO: 325547 - DNA, 19 bp, Homo sapiens
  siRNA target sequence for PAXIP1L (NM_007349.2,1343-1361).
gctgtttagccaagtgaaa

SEQ ID NO: 325548 - DNA, 19 bp, Homo sapiens
  siRNA target sequence for PAXIP1L (NM_007349.2,1554-1572).
gcccatccgcatcagtttt

SEQ ID NO: 325549 - DNA, 19 bp, Homo sapiens
  siRNA target sequence for PAXIP1L (NM_007349.2,1556-1574).
ccatccgcatcagttttca

SEQ ID NO: 325550 - DNA, 19 bp, Homo sapiens
  siRNA target sequence for PAXIP1L (NM_007349.2,1983-2001).
ccagaagaaggcttcttat

SEQ ID NO: 325551 - DNA, 19 bp, Homo sapiens
  siRNA target sequence for PAXIP1L (NM_007349.2,2003-2021).
gggatgtgtgtttgcaatt

SEQ ID NO: 325552 - DNA, 19 bp, Homo sapiens
  siRNA target sequence for PAXIP1L (NM_007349.2,2012-2030).
gtttgcaattgcggattat

SEQ ID NO: 325553 - DNA, 19 bp, Homo sapiens
  siRNA target sequence for PAXIP1L (NM_007349.2,2036-2054).
gcagatgtctgataagcaa

SEQ ID NO: 325554 - DNA, 19 bp, Homo sapiens
  siRNA target sequence for PAXIP1L (NM_007349.2,2065-2083).
cctggaaaaggataatcca

SEQ ID NO: 325555 - DNA, 19 bp, Homo sapiens
  siRNA target sequence for PAXIP1L (NM_007349.2,2196-2214).
gttactgcacactggttaa

SEQ ID NO: 325556 - DNA, 19 bp, Homo sapiens
  siRNA target sequence for PAXIP1L (NM_007349.2,2248-2266).
cgcaccgagcccttcactt

SEQ ID NO: 325557 - DNA, 19 bp, Homo sapiens
  siRNA target sequence for PAXIP1L (NM_007349.2,2296-2314).
catgttcacagcatattat

SEQ ID NO: 325558 - DNA, 19 bp, Homo sapiens
  siRNA target sequence for PAXIP1L (NM_007349.2,2321-2339).
gactggatttgttgatagt

SEQ ID NO: 325559 - DNA, 19 bp, Homo sapiens
  siRNA target sequence for PAXIP1L (NM_007349.2,2381-2399).
caaatatacgggttatcta

SEQ ID NO: 325560 - DNA, 19 bp, Homo sapiens
  siRNA target sequence for PAXIP1L (NM_007349.2,2492-2510).
gtggcttggcgacattctt

SEQ ID NO: 325561 - DNA, 19 bp, Homo sapiens
  siRNA target sequence for PAXIP1L (NM_007349.2,2494-2512).
ggcttggcgacattcttct

SEQ ID NO: 325562 - DNA, 19 bp, Homo sapiens
  siRNA target sequence for PAXIP1L (NM_007349.2,2527-2545).
cactgaggcagattcagta

SEQ ID NO: 325563 - DNA, 19 bp, Homo sapiens
  siRNA target sequence for PAXIP1L (NM_007349.2,2531-2549).
gaggcagattcagtatagt

SEQ ID NO: 325564 - DNA, 19 bp, Homo sapiens
  siRNA target sequence for PAXIP1L (NM_007349.2,2584-2602).
cccctacccagcatttagt

SEQ ID NO: 325565 - DNA, 19 bp, Homo sapiens
  siRNA target sequence for PAXIP1L (NM_007349.2,2585-2603).
ccctacccagcatttagtt

SEQ ID NO: 325566 - DNA, 19 bp, Homo sapiens
  siRNA target sequence for PAXIP1L (NM_007349.2,2654-2672).
gttgatgagtataagacta

SEQ ID NO: 325567 - DNA, 19 bp, Homo sapiens
  siRNA target sequence for PAXIP1L (NM_007349.2,2719-2737).
ccaaaagagccagaattga

SEQ ID NO: 325568 - DNA, 19 bp, Homo sapiens
  siRNA target sequence for PAXIP1L (NM_007349.2,2741-2759).
cgtaccacctcccactaaa

SEQ ID NO: 325569 - DNA, 19 bp, Homo sapiens
  siRNA target sequence for PAXIP1L (NM_007349.2,2770-2788).
cagaattgaccccttttgt

SEQ ID NO: 325570 - DNA, 19 bp, Homo sapiens
  siRNA target sequence for PAXIP1L (NM_007349.2,2889-2907).
ctcattgccagcaaagtga

SEQ ID NO: 325571 - DNA, 19 bp, Homo sapiens
  siRNA target sequence for PAXIP1L (NM_007349.2,2921-2939).
gttcctgacggcgatttct

SEQ ID NO: 325572 - DNA, 19 bp, Homo sapiens
  siRNA target sequence for PAXIP1L (NM_007349.2,3033-3051).
gaggcagaagtacttttct

SEQ ID NO: 325573 - DNA, 19 bp, Homo sapiens
  siRNA target sequence for PAXIP1L (NM_007349.2,3035-3053).
ggcagaagtacttttctct

SEQ ID NO: 325574 - DNA, 19 bp, Homo sapiens
  siRNA target sequence for PAXIP1L (NM_007349.2,3058-3076).
gcttggaagaatccttaaa

SEQ ID NO: 325575 - DNA, 19 bp, Homo sapiens
  siRNA target sequence for PAXIP1L (NM_007349.2,3084-3102).
cacgtttctccactcttta

SEQ ID NO: 325576 - DNA, 19 bp, Homo sapiens
  siRNA target sequence for PAXIP1L (NM_007349.2,3129-3147).
ggaatctgcccaagtcttt

SEQ ID NO: 325577 - DNA, 19 bp, Homo sapiens
  siRNA target sequence for PAXIP1L (NM_007349.2,3149-3167).
cactatgaaggcaatcgta

SEQ ID NO: 325578 - DNA, 19 bp, Homo sapiens
  siRNA target sequence for PAXIP1L (NM_007349.2,3177-3195).
ggaggaaaggtgttatcca

SEQ ID NO: 325579 - DNA, 19 bp, Homo sapiens
  siRNA target sequence for PAXIP1L (NM_007349.2,3178-3196).
gaggaaaggtgttatccaa

SEQ ID NO: 325580 - DNA, 19 bp, Homo sapiens
  siRNA target sequence for PAXIP1L (NM_007349.2,3236-3254).
ctcgagtttgtcggaaata

SEQ ID NO: 325581 - DNA, 19 bp, Homo sapiens
  siRNA target sequence for PAXIP1L (NM_007349.2,3238-3256).
cgagtttgtcggaaataat

SEQ ID NO: 325582 - DNA, 19 bp, Homo sapiens
  siRNA target sequence for PAXIP1L (NM_007349.2,3239-3257).
gagtttgtcggaaataatt

SEQ ID NO: 325583 - DNA, 19 bp, Homo sapiens
  siRNA target sequence for PAXIP1L (NM_007349.2,3241-3259).
gtttgtcggaaataatttt

SEQ ID NO: 325584 - DNA, 19 bp, Homo sapiens
  siRNA target sequence for PAXIP1L (NM_007349.2,3245-3263).
gtcggaaataattttaata

SEQ ID NO: 325585 - DNA, 19 bp, Homo sapiens
  siRNA target sequence for PAXIP1L (NM_007349.2,3282-3300).
catttatgccgagaatatt

SEQ ID NO: 325586 - DNA, 19 bp, Homo sapiens
  siRNA target sequence for PAXIP1L (NM_007349.2,3307-3325).
gaggcatagatgttcacaa

SEQ ID NO: 325587 - DNA, 19 bp, Homo sapiens
  siRNA target sequence for PAXIP1L (NM_007349.2,3355-3373).
ctcaaacgctggactatga

SEQ ID NO: 325588 - DNA, 19 bp, Homo sapiens
  siRNA target sequence for PAXIP1L (NM_007349.2,3357-3375).
caaacgctggactatgaat

SEQ ID NO: 325589 - DNA, 19 bp, Homo sapiens
  siRNA target sequence for PAXIP1L (NM_007349.2,3363-3381).
ctggactatgaatcatata

SEQ ID NO: 325590 - DNA, 19 bp, Homo sapiens
  siRNA target sequence for PAXIP1L (NM_007349.2,3366-3384).
gactatgaatcatataagt

SEQ ID NO: 325591 - DNA, 19 bp, Homo sapiens
  siRNA target sequence for PAXIP1L (NM_007349.2,3372-3390).
gaatcatataagtttaact

SEQ ID NO: 325592 - DNA, 19 bp, Homo sapiens
  siRNA target sequence for CD9 (NM_001769.2,148-166).
ctgctgttcggatttaact

SEQ ID NO: 325593 - DNA, 19 bp, Homo sapiens
  siRNA target sequence for CD9 (NM_001769.2,151-169).
ctgttcggatttaacttca

SEQ ID NO: 325594 - DNA, 19 bp, Homo sapiens
  siRNA target sequence for CD9 (NM_001769.2,243-261).
cttcgagcaagaaactaat

SEQ ID NO: 325595 - DNA, 19 bp, Homo sapiens
  siRNA target sequence for CD9 (NM_001769.2,402-420).
ggtgatattcgccattgaa

SEQ ID NO: 325596 - DNA, 19 bp, Homo sapiens
  siRNA target sequence for CD9 (NM_001769.2,427-445).
gcggccatctggggatatt

SEQ ID NO: 325597 - DNA, 19 bp, Homo sapiens
  siRNA target sequence for CD9 (NM_001769.2,583-601).
ggcgtggaacagtttatct

SEQ ID NO: 325598 - DNA, 19 bp, Homo sapiens
  siRNA target sequence for CD9 (NM_001769.2,716-734).
gcattgccgtggtcatgat

SEQ ID NO: 325599 - DNA, 19 bp, Homo sapiens
  siRNA target sequence for CD9 (NM_001769.2,717-735).
cattgccgtggtcatgata

SEQ ID NO: 325600 - DNA, 19 bp, Homo sapiens
  siRNA target sequence for CDW52 (NM_001803.1,63-81).
cctggttatggtacagata

SEQ ID NO: 325601 - DNA, 19 bp, Homo sapiens
  siRNA target sequence for CDW52 (NM_001803.1,66-84).
ggttatggtacagatacaa

SEQ ID NO: 325602 - DNA, 19 bp, Homo sapiens
  siRNA target sequence for CDW52 (NM_001803.1,86-104).
ctggactctcaggacaaaa

SEQ ID NO: 325603 - DNA, 19 bp, Homo sapiens
  siRNA target sequence for CEACAM4 (NM_001817.1,192-210).
ccactgtccagttcactat

SEQ ID NO: 325604 - DNA, 19 bp, Homo sapiens
  siRNA target sequence for CEACAM4 (NM_001817.1,193-211).
cactgtccagttcactatt

SEQ ID NO: 325605 - DNA, 19 bp, Homo sapiens
  siRNA target sequence for CEACAM4 (NM_001817.1,195-213).
ctgtccagttcactattga

SEQ ID NO: 325606 - DNA, 19 bp, Homo sapiens
  siRNA target sequence for CEACAM4 (NM_001817.1,254-272).
ctactggcctgcaatattt

SEQ ID NO: 325607 - DNA, 19 bp, Homo sapiens
  siRNA target sequence for CEACAM4 (NM_001817.1,329-347).
ctcattgctggttatataa

SEQ ID NO: 325608 - DNA, 19 bp, Homo sapiens
  siRNA target sequence for CEACAM4 (NM_001817.1,331-349).
cattgctggttatataaca

SEQ ID NO: 325609 - DNA, 19 bp, Homo sapiens
  siRNA target sequence for CEACAM4 (NM_001817.1,454-472).
ctacaccctacgaaccata

SEQ ID NO: 325610 - DNA, 19 bp, Homo sapiens
  siRNA target sequence for CEACAM4 (NM_001817.1,457-475).
caccctacgaaccataaat

SEQ ID NO: 325611 - DNA, 19 bp, Homo sapiens
  siRNA target sequence for DSCR2 (NM_003720.1,208-226).
ctccttcgaagacaaacaa

SEQ ID NO: 325612 - DNA, 19 bp, Homo sapiens
  siRNA target sequence for DSCR2 (NM_003720.1,218-236).
gacaaacaaaaacatcttt

SEQ ID NO: 325613 - DNA, 19 bp, Homo sapiens
  siRNA target sequence for DSCR2 (NM_003720.1,262-280).
ccgtgctccaagtttataa

SEQ ID NO: 325614 - DNA, 19 bp, Homo sapiens
  siRNA target sequence for DSCR2 (NM_003720.1,263-281).
cgtgctccaagtttataat

SEQ ID NO: 325615 - DNA, 19 bp, Homo sapiens
  siRNA target sequence for DSCR2 (NM_003720.1,264-282).
gtgctccaagtttataatt

SEQ ID NO: 325616 - DNA, 19 bp, Homo sapiens
  siRNA target sequence for DSCR2 (NM_003720.1,267-285).
ctccaagtttataattgct

SEQ ID NO: 325617 - DNA, 19 bp, Homo sapiens
  siRNA target sequence for DSCR2 (NM_003720.1,269-287).
ccaagtttataattgctat

SEQ ID NO: 325618 - DNA, 19 bp, Homo sapiens
  siRNA target sequence for DSCR2 (NM_003720.1,270-288).
caagtttataattgctata

SEQ ID NO: 325619 - DNA, 19 bp, Homo sapiens
  siRNA target sequence for DSCR2 (NM_003720.1,273-291).
gtttataattgctatagga

SEQ ID NO: 325620 - DNA, 19 bp, Homo sapiens
  siRNA target sequence for DSCR2 (NM_003720.1,312-330).
gtcatcatttgttatgaat

SEQ ID NO: 325621 - DNA, 19 bp, Homo sapiens
  siRNA target sequence for DSCR2 (NM_003720.1,369-387).
gaatgaatggtgtagaaca

SEQ ID NO: 325622 - DNA, 19 bp, Homo sapiens
  siRNA target sequence for DSCR2 (NM_003720.1,479-497).
gctatgttgcagaagatca

SEQ ID NO: 325623 - DNA, 19 bp, Homo sapiens
  siRNA target sequence for DSCR2 (NM_003720.1,562-580).
ctcacatgtcgacatgtta

SEQ ID NO: 325624 - DNA, 19 bp, Homo sapiens
  siRNA target sequence for DSCR2 (NM_003720.1,571-589).
cgacatgttaccgattata

SEQ ID NO: 325625 - DNA, 19 bp, Homo sapiens
  siRNA target sequence for DSCR2 (NM_003720.1,577-595).
gttaccgattataaaacct

SEQ ID NO: 325626 - DNA, 19 bp, Homo sapiens
  siRNA target sequence for DSCR2 (NM_003720.1,634-652).
gccctaaaaacacagaatt

SEQ ID NO: 325627 - DNA, 19 bp, Homo sapiens
  siRNA target sequence for DSCR2 (NM_003720.1,663-681).
ggcgtgttgtccattgcta

SEQ ID NO: 325628 - DNA, 19 bp, Homo sapiens
  siRNA target sequence for DSCR2 (NM_003720.1,668-686).
gttgtccattgctagaaca

SEQ ID NO: 325629 - DNA, 19 bp, Homo sapiens
  siRNA target sequence for DSCR2 (NM_003720.1,678-696).
gctagaacaaccgaatata

SEQ ID NO: 325630 - DNA, 19 bp, Homo sapiens
  siRNA target sequence for DSCR2 (NM_003720.1,721-739).
ctaagctactgtcaagtat

SEQ ID NO: 325631 - DNA, 19 bp, Homo sapiens
  siRNA target sequence for DSCR2 (NM_003720.1,767-785).
gttatactgatgtgatgaa

SEQ ID NO: 325632 - DNA, 19 bp, Homo sapiens
  siRNA target sequence for DSCR2 (NM_003720.1,783-801).
gaaattagacctaatcaca

SEQ ID NO: 325633 - DNA, 19 bp, Homo sapiens
  siRNA target sequence for DSCR2 (NM_003720.1,865-883).
caaagcactgagatactaa

SEQ ID NO: 325634 - DNA, 19 bp, Homo sapiens
  siRNA target sequence for DSCR2 (NM_003720.1,906-924).
gattcagagtaacatttat

SEQ ID NO: 325635 - DNA, 19 bp, Homo sapiens
  siRNA target sequence for GARP (NM_005512.1,244-262).
cactgagacccttgatcta

SEQ ID NO: 325636 - DNA, 19 bp, Homo sapiens
  siRNA target sequence for GARP (NM_005512.1,882-900).
cgctcccgagactcatcta

SEQ ID NO: 325637 - DNA, 19 bp, Homo sapiens
  siRNA target sequence for GARP (NM_005512.1,1440-1458).
gcctggtggataatgagat

SEQ ID NO: 325638 - DNA, 19 bp, Homo sapiens
  siRNA target sequence for GARP (NM_005512.1,1441-1459).
cctggtggataatgagata

SEQ ID NO: 325639 - DNA, 19 bp, Homo sapiens
  siRNA target sequence for GARP (NM_005512.1,1638-1656).
gcctcaagcggctcaatct

SEQ ID NO: 325640 - DNA, 19 bp, Homo sapiens
  siRNA target sequence for GARP (NM_005512.1,1639-1657).
cctcaagcggctcaatctt

SEQ ID NO: 325641 - DNA, 19 bp, Homo sapiens
  siRNA target sequence for GARP (NM_005512.1,1956-1974).
ggggactgaagaacatcaa

SEQ ID NO: 325642 - DNA, 19 bp, Homo sapiens
  siRNA target sequence for GPM6A (NM_005277.2,202-220).
ctggaactgtcaacattct

SEQ ID NO: 325643 - DNA, 19 bp, Homo sapiens
  siRNA target sequence for GPM6A (NM_005277.2,252-270).
ggagacacactggatgttt

SEQ ID NO: 325644 - DNA, 19 bp, Homo sapiens
  siRNA target sequence for GPM6A (NM_005277.2,259-277).
cactggatgtttttaccat

SEQ ID NO: 325645 - DNA, 19 bp, Homo sapiens
  siRNA target sequence for GPM6A (NM_005277.2,308-326).
catcgcagctgcgttcttt

SEQ ID NO: 325646 - DNA, 19 bp, Homo sapiens
  siRNA target sequence for GPM6A (NM_005277.2,312-330).
gcagctgcgttctttgtgt

SEQ ID NO: 325647 - DNA, 19 bp, Homo sapiens
  siRNA target sequence for GPM6A (NM_005277.2,434-452).
gttcattatgctgacatat

SEQ ID NO: 325648 - DNA, 19 bp, Homo sapiens
  siRNA target sequence for GPM6A (NM_005277.2,493-511).
cactgccagtttacatgta

SEQ ID NO: 325649 - DNA, 19 bp, Homo sapiens
  siRNA target sequence for GPM6A (NM_005277.2,498-516).
ccagtttacatgtacttca

SEQ ID NO: 325650 - DNA, 19 bp, Homo sapiens
  siRNA target sequence for GPM6A (NM_005277.2,499-517).
cagtttacatgtacttcaa

SEQ ID NO: 325651 - DNA, 19 bp, Homo sapiens
  siRNA target sequence for GPM6A (NM_005277.2,530-548).
ctgccggaacaccacatta

SEQ ID NO: 325652 - DNA, 19 bp, Homo sapiens
  siRNA target sequence for GPM6A (NM_005277.2,532-550).
gccggaacaccacattagt

SEQ ID NO: 325653 - DNA, 19 bp, Homo sapiens
  siRNA target sequence for GPM6A (NM_005277.2,549-567).
gtggagggagcaaatctct

SEQ ID NO: 325654 - DNA, 19 bp, Homo sapiens
  siRNA target sequence for GPM6A (NM_005277.2,575-593).
ccttcgtcagtttggaatt

SEQ ID NO: 325655 - DNA, 19 bp, Homo sapiens
  siRNA target sequence for GPM6A (NM_005277.2,579-597).
cgtcagtttggaattgtga

SEQ ID NO: 325656 - DNA, 19 bp, Homo sapiens
  siRNA target sequence for GPM6A (NM_005277.2,584-602).
gtttggaattgtgacaatt

SEQ ID NO: 325657 - DNA, 19 bp, Homo sapiens
  siRNA target sequence for GPM6A (NM_005277.2,644-662).
gaggatgtgcgaatctact

SEQ ID NO: 325658 - DNA, 19 bp, Homo sapiens
  siRNA target sequence for GPM6A (NM_005277.2,726-744).
gctatggttcactacctta

SEQ ID NO: 325659 - DNA, 19 bp, Homo sapiens
  siRNA target sequence for GPM6A (NM_005277.2,731-749).
ggttcactaccttatggtt

SEQ ID NO: 325660 - DNA, 19 bp, Homo sapiens
  siRNA target sequence for GPM6A (NM_005277.2,756-774).
gccaactgggcctatgtga

SEQ ID NO: 325661 - DNA, 19 bp, Homo sapiens
  siRNA target sequence for GPM6A (NM_005277.2,781-799).
cctgccggatgcagaagta

SEQ ID NO: 325662 - DNA, 19 bp, Homo sapiens
  siRNA target sequence for GPM6A (NM_005277.2,782-800).
ctgccggatgcagaagtat

SEQ ID NO: 325663 - DNA, 19 bp, Homo sapiens
  siRNA target sequence for GPM6A (NM_005277.2,784-802).
gccggatgcagaagtatga

SEQ ID NO: 325664 - DNA, 19 bp, Homo sapiens
  siRNA target sequence for GPM6A (NM_005277.2,785-803).
ccggatgcagaagtatgaa

SEQ ID NO: 325665 - DNA, 19 bp, Homo sapiens
  siRNA target sequence for GPM6A (NM_005277.2,863-881).
gcggctcaatgcatacaca

SEQ ID NO: 325666 - DNA, 19 bp, Homo sapiens
  siRNA target sequence for GPM6A (NM_005277.2,864-882).
cggctcaatgcatacacat

SEQ ID NO: 325667 - DNA, 19 bp, Homo sapiens
  siRNA target sequence for GYPE (NM_002102.2,216-234).
gcgatggctcgtgttattt

SEQ ID NO: 325668 - DNA, 19 bp, Homo sapiens
  siRNA target sequence for GYPE (NM_002102.2,217-235).
cgatggctcgtgttatttt

SEQ ID NO: 325669 - DNA, 19 bp, Homo sapiens
  siRNA target sequence for GYPE (NM_002102.2,218-236).
gatggctcgtgttattttt

SEQ ID NO: 325670 - DNA, 19 bp, Homo sapiens
  siRNA target sequence for GYPE (NM_002102.2,239-257).
ggtgatgcttgttgttgtt

SEQ ID NO: 325671 - DNA, 19 bp, Homo sapiens
  siRNA target sequence for GYPE (NM_002102.2,249-267).
gttgttgttggaatgatca

SEQ ID NO: 325672 - DNA, 19 bp, Homo sapiens
  siRNA target sequence for HEM1 (NM_005337.2,75-93).
ctgcttaccagcataaatt

SEQ ID NO: 325673 - DNA, 19 bp, Homo sapiens
  siRNA target sequence for HEM1 (NM_005337.2,103-121).
gctcactatcctgaatgat

SEQ ID NO: 325674 - DNA, 19 bp, Homo sapiens
  siRNA target sequence for HEM1 (NM_005337.2,123-141).
gcggtcagggggttctcat

SEQ ID NO: 325675 - DNA, 19 bp, Homo sapiens
  siRNA target sequence for HEM1 (NM_005337.2,132-150).
gggttctcatccgtatgta

SEQ ID NO: 325676 - DNA, 19 bp, Homo sapiens
  siRNA target sequence for HEM1 (NM_005337.2,137-155).
ctcatccgtatgtataaca

SEQ ID NO: 325677 - DNA, 19 bp, Homo sapiens
  siRNA target sequence for HEM1 (NM_005337.2,143-161).
cgtatgtataacatcaaga

SEQ ID NO: 325678 - DNA, 19 bp, Homo sapiens
  siRNA target sequence for HEM1 (NM_005337.2,218-236).
ccatctctcaagtatatca

SEQ ID NO: 325679 - DNA, 19 bp, Homo sapiens
  siRNA target sequence for HEM1 (NM_005337.2,263-281).
cgaaacagcacgcaacatt

SEQ ID NO: 325680 - DNA, 19 bp, Homo sapiens
  siRNA target sequence for HEM1 (NM_005337.2,264-282).
gaaacagcacgcaacattt

SEQ ID NO: 325681 - DNA, 19 bp, Homo sapiens
  siRNA target sequence for HEM1 (NM_005337.2,296-314).
cgtgaaaaagccgagataa

SEQ ID NO: 325682 - DNA, 19 bp, Homo sapiens
  siRNA target sequence for HEM1 (NM_005337.2,297-315).
gtgaaaaagccgagataat

SEQ ID NO: 325683 - DNA, 19 bp, Homo sapiens
  siRNA target sequence for HEM1 (NM_005337.2,318-336).
gattcctcaccaactacta

SEQ ID NO: 325684 - DNA, 19 bp, Homo sapiens
  siRNA target sequence for HEM1 (NM_005337.2,405-423).
gccagtgccattttgatat

SEQ ID NO: 325685 - DNA, 19 bp, Homo sapiens
  siRNA target sequence for HEM1 (NM_005337.2,411-429).
gccattttgatatcaatct

SEQ ID NO: 325686 - DNA, 19 bp, Homo sapiens
  siRNA target sequence for HEM1 (NM_005337.2,447-465).
ggagttacctggacttgat

SEQ ID NO: 325687 - DNA, 19 bp, Homo sapiens
  siRNA target sequence for HEM1 (NM_005337.2,458-476).
gacttgattgtaacttaca

SEQ ID NO: 325688 - DNA, 19 bp, Homo sapiens
  siRNA target sequence for HEM1 (NM_005337.2,471-489).
cttacacctcagtcatttt

SEQ ID NO: 325689 - DNA, 19 bp, Homo sapiens
  siRNA target sequence for HEM1 (NM_005337.2,506-524).
gaagatcggcggatactca

SEQ ID NO: 325690 - DNA, 19 bp, Homo sapiens
  siRNA target sequence for HEM1 (NM_005337.2,521-539).
ctcattggcatgtacaatt

SEQ ID NO: 325691 - DNA, 19 bp, Homo sapiens
  siRNA target sequence for HEM1 (NM_005337.2,562-580).
gcatggtgaccccagtttt

SEQ ID NO: 325692 - DNA, 19 bp, Homo sapiens
  siRNA target sequence for HEM1 (NM_005337.2,671-689).
gccctcctctctttgcatt

SEQ ID NO: 325693 - DNA, 19 bp, Homo sapiens
  siRNA target sequence for HEM1 (NM_005337.2,672-690).
ccctcctctctttgcattt

SEQ ID NO: 325694 - DNA, 19 bp, Homo sapiens
  siRNA target sequence for HEM1 (NM_005337.2,757-775).
caaccccccagccatgatt

SEQ ID NO: 325695 - DNA, 19 bp, Homo sapiens
  siRNA target sequence for HEM1 (NM_005337.2,769-787).
catgattaaccctgctaat

SEQ ID NO: 325696 - DNA, 19 bp, Homo sapiens
  siRNA target sequence for HEM1 (NM_005337.2,772-790).
gattaaccctgctaattca

SEQ ID NO: 325697 - DNA, 19 bp, Homo sapiens
  siRNA target sequence for HEM1 (NM_005337.2,779-797).
cctgctaattcagatacaa

SEQ ID NO: 325698 - DNA, 19 bp, Homo sapiens
  siRNA target sequence for HEM1 (NM_005337.2,795-813).
caatggcctgtgagtatct

SEQ ID NO: 325699 - DNA, 19 bp, Homo sapiens
  siRNA target sequence for HEM1 (NM_005337.2,824-842).
gtaatggagcgctggatta

SEQ ID NO: 325700 - DNA, 19 bp, Homo sapiens
  siRNA target sequence for HEM1 (NM_005337.2,829-847).
ggagcgctggattatcatt

SEQ ID NO: 325701 - DNA, 19 bp, Homo sapiens
  siRNA target sequence for HEM1 (NM_005337.2,838-856).
gattatcattgggtttctt

SEQ ID NO: 325702 - DNA, 19 bp, Homo sapiens
  siRNA target sequence for HEM1 (NM_005337.2,866-884).
gggtgcctcaactccaata

SEQ ID NO: 325703 - DNA, 19 bp, Homo sapiens
  siRNA target sequence for HEM1 (NM_005337.2,971-989).
gtcaccgaggacctgttta

SEQ ID NO: 325704 - DNA, 19 bp, Homo sapiens
  siRNA target sequence for HEM1 (NM_005337.2,1014-1032).
gagtggcagacataaagga

SEQ ID NO: 325705 - DNA, 19 bp, Homo sapiens
  siRNA target sequence for HEM1 (NM_005337.2,1030-1048).
ggagagcaaggaacatgta

SEQ ID NO: 325706 - DNA, 19 bp, Homo sapiens
  siRNA target sequence for HEM1 (NM_005337.2,1036-1054).
caaggaacatgtaattgca

SEQ ID NO: 325707 - DNA, 19 bp, Homo sapiens
  siRNA target sequence for HEM1 (NM_005337.2,1210-1228).
ggttcgccacacagagaat

SEQ ID NO: 325708 - DNA, 19 bp, Homo sapiens
  siRNA target sequence for HEM1 (NM_005337.2,1214-1232).
cgccacacagagaatgtca

SEQ ID NO: 325709 - DNA, 19 bp, Homo sapiens
  siRNA target sequence for HEM1 (NM_005337.2,1312-1330).
ggtccgaagacacatcaaa

SEQ ID NO: 325710 - DNA, 19 bp, Homo sapiens
  siRNA target sequence for HEM1 (NM_005337.2,1316-1334).
cgaagacacatcaaagtga

SEQ ID NO: 325711 - DNA, 19 bp, Homo sapiens
  siRNA target sequence for HEM1 (NM_005337.2,1462-1480).
ctctctgaatctcaaacaa

SEQ ID NO: 325712 - DNA, 19 bp, Homo sapiens
  siRNA target sequence for HEM1 (NM_005337.2,1531-1549).
ccgcctacaggcatacact

SEQ ID NO: 325713 - DNA, 19 bp, Homo sapiens
  siRNA target sequence for HEM1 (NM_005337.2,1532-1550).
cgcctacaggcatacacta

SEQ ID NO: 325714 - DNA, 19 bp, Homo sapiens
  siRNA target sequence for HEM1 (NM_005337.2,1633-1651).
gctggactccgtagaaaaa

SEQ ID NO: 325715 - DNA, 19 bp, Homo sapiens
  siRNA target sequence for HEM1 (NM_005337.2,1634-1652).
ctggactccgtagaaaaat

SEQ ID NO: 325716 - DNA, 19 bp, Homo sapiens
  siRNA target sequence for HEM1 (NM_005337.2,1654-1672).
gctggtggaaacttctgat

SEQ ID NO: 325717 - DNA, 19 bp, Homo sapiens
  siRNA target sequence for HEM1 (NM_005337.2,1686-1704).
gctttcatcttcgtatctt

SEQ ID NO: 325718 - DNA, 19 bp, Homo sapiens
  siRNA target sequence for HEM1 (NM_005337.2,1697-1715).
cgtatctttgagaagatgt

SEQ ID NO: 325719 - DNA, 19 bp, Homo sapiens
  siRNA target sequence for HEM1 (NM_005337.2,1877-1895).
gccaagcagaccagcaatt

SEQ ID NO: 325720 - DNA, 19 bp, Homo sapiens
  siRNA target sequence for HEM1 (NM_005337.2,1932-1950).
gcgagcagcttctacctaa

SEQ ID NO: 325721 - DNA, 19 bp, Homo sapiens
  siRNA target sequence for HEM1 (NM_005337.2,1952-1970).
cactgtgccactacaatca

SEQ ID NO: 325722 - DNA, 19 bp, Homo sapiens
  siRNA target sequence for HEM1 (NM_005337.2,2090-2108).
gacaagctacacctaaact

SEQ ID NO: 325723 - DNA, 19 bp, Homo sapiens
  siRNA target sequence for HEM1 (NM_005337.2,2123-2141).
ctgacaatgaatcatgtat

SEQ ID NO: 325724 - DNA, 19 bp, Homo sapiens
  siRNA target sequence for HEM1 (NM_005337.2,2149-2167).
ctccgtgtttgaacatact

SEQ ID NO: 325725 - DNA, 19 bp, Homo sapiens
  siRNA target sequence for HEM1 (NM_005337.2,2153-2171).
gtgtttgaacatactatct

SEQ ID NO: 325726 - DNA, 19 bp, Homo sapiens
  siRNA target sequence for HEM1 (NM_005337.2,2210-2228).
ctcaacagagccattgtgt

SEQ ID NO: 325727 - DNA, 19 bp, Homo sapiens
  siRNA target sequence for HEM1 (NM_005337.2,2291-2309).
gtcaaagcatacattggtt

SEQ ID NO: 325728 - DNA, 19 bp, Homo sapiens
  siRNA target sequence for HEM1 (NM_005337.2,2699-2717).
cagatcagatccaacttta

SEQ ID NO: 325729 - DNA, 19 bp, Homo sapiens
  siRNA target sequence for HEM1 (NM_005337.2,2787-2805).
ccatcattggggttatcct

SEQ ID NO: 325730 - DNA, 19 bp, Homo sapiens
  siRNA target sequence for HEM1 (NM_005337.2,2795-2813).
ggggttatcctcagtttca

SEQ ID NO: 325731 - DNA, 19 bp, Homo sapiens
  siRNA target sequence for HEM1 (NM_005337.2,2961-2979).
gtgtgggctgtgacattga

SEQ ID NO: 325732 - DNA, 19 bp, Homo sapiens
  siRNA target sequence for HEM1 (NM_005337.2,3054-3072).
gcctgctcttgatctttct

SEQ ID NO: 325733 - DNA, 19 bp, Homo sapiens
  siRNA target sequence for HEM1 (NM_005337.2,3099-3117).
ctgacccttcttcctttta

SEQ ID NO: 325734 - DNA, 19 bp, Homo sapiens
  siRNA target sequence for HEM1 (NM_005337.2,3131-3149).
gatggttacaacaacaata

SEQ ID NO: 325735 - DNA, 19 bp, Homo sapiens
  siRNA target sequence for HEM1 (NM_005337.2,3189-3207).
ccctcttcacgctctacaa

SEQ ID NO: 325736 - DNA, 19 bp, Homo sapiens
  siRNA target sequence for HEM1 (NM_005337.2,3191-3209).
ctcttcacgctctacaaca

SEQ ID NO: 325737 - DNA, 19 bp, Homo sapiens
  siRNA target sequence for HEM1 (NM_005337.2,3198-3216).
cgctctacaacaagaacat

SEQ ID NO: 325738 - DNA, 19 bp, Homo sapiens
  siRNA target sequence for HEM1 (NM_005337.2,3199-3217).
gctctacaacaagaacatt

SEQ ID NO: 325739 - DNA, 19 bp, Homo sapiens
  siRNA target sequence for HEM1 (NM_005337.2,3278-3296).
gagactgacaagcttaaaa

SEQ ID NO: 325740 - DNA, 19 bp, Homo sapiens
  siRNA target sequence for HEM1 (NM_005337.2,3289-3307).
gcttaaaaccagaaatcga

SEQ ID NO: 325741 - DNA, 19 bp, Homo sapiens
  siRNA target sequence for HEM1 (NM_005337.2,3387-3405).
cttatgtcctgcttcgaaa

SEQ ID NO: 325742 - DNA, 19 bp, Homo sapiens
  siRNA target sequence for HEM1 (NM_005337.2,3423-3441).
ctcgggccttccacctaaa

SEQ ID NO: 325743 - DNA, 19 bp, Homo sapiens
  siRNA target sequence for JTB (NM_006694.2,866-884).
gctggctggtggaagagtt

SEQ ID NO: 325744 - DNA, 19 bp, Homo sapiens
  siRNA target sequence for JTB (NM_006694.2,900-918).
gtgctctccatgctctaat

SEQ ID NO: 325745 - DNA, 19 bp, Homo sapiens
  siRNA target sequence for JTB (NM_006694.2,950-968).
ccacaggatatgtagagaa

SEQ ID NO: 325746 - DNA, 19 bp, Homo sapiens
  siRNA target sequence for JTB (NM_006694.2,1023-1041).
gatggaacaacgcttattt

SEQ ID NO: 325747 - DNA, 19 bp, Homo sapiens
  siRNA target sequence for JTB (NM_006694.2,1027-1045).
gaacaacgcttattttgga

SEQ ID NO: 325748 - DNA, 19 bp, Homo sapiens
  siRNA target sequence for JTB (NM_006694.2,1074-1092).
cctgatcttcgcttgtctt

SEQ ID NO: 325749 - DNA, 19 bp, Homo sapiens
  siRNA target sequence for JTB (NM_006694.2,1083-1101).
cgcttgtcttgtcatcatt

SEQ ID NO: 325750 - DNA, 19 bp, Homo sapiens
  siRNA target sequence for KAI1 (NM_002231.2,186-204).
gctcagcctgtatcaaagt

SEQ ID NO: 325751 - DNA, 19 bp, Homo sapiens
  siRNA target sequence for KAI1 (NM_002231.2,363-381).
gcgtgggggcagtcactat

SEQ ID NO: 325752 - DNA, 19 bp, Homo sapiens
  siRNA target sequence for KAI1 (NM_002231.2,491-509).
gccctcttctacttcaaca

SEQ ID NO: 325753 - DNA, 19 bp, Homo sapiens
  siRNA target sequence for KAI1 (NM_002231.2,633-651).
gctgggtcagcttctacaa

SEQ ID NO: 325754 - DNA, 19 bp, Homo sapiens
  siRNA target sequence for KAI1 (NM_002231.2,699-717).
cctgttcctgcgaagtcaa

SEQ ID NO: 325755 - DNA, 19 bp, Homo sapiens
  siRNA target sequence for M11S1 (NM_005898.2,363-381).
cggggtgatcgacaagaaa

SEQ ID NO: 325756 - DNA, 19 bp, Homo sapiens
  siRNA target sequence for M11S1 (NM_005898.2,365-383).
gggtgatcgacaagaaact

SEQ ID NO: 325757 - DNA, 19 bp, Homo sapiens
  siRNA target sequence for M11S1 (NM_005898.2,366-384).
ggtgatcgacaagaaactt

SEQ ID NO: 325758 - DNA, 19 bp, Homo sapiens
  siRNA target sequence for M11S1 (NM_005898.2,444-462).
ggaaaggcttaatcaagat

SEQ ID NO: 325759 - DNA, 19 bp, Homo sapiens
  siRNA target sequence for M11S1 (NM_005898.2,466-484).
ctggatgccgtttctaagt

SEQ ID NO: 325760 - DNA, 19 bp, Homo sapiens
  siRNA target sequence for M11S1 (NM_005898.2,507-525).
ggagtttgcaaaagaatta

SEQ ID NO: 325761 - DNA, 19 bp, Homo sapiens
  siRNA target sequence for M11S1 (NM_005898.2,533-551).
gtttcatggcactaagtca

SEQ ID NO: 325762 - DNA, 19 bp, Homo sapiens
  siRNA target sequence for M11S1 (NM_005898.2,540-558).
ggcactaagtcaagatatt

SEQ ID NO: 325763 - DNA, 19 bp, Homo sapiens
  siRNA target sequence for M11S1 (NM_005898.2,581-599).
cacgtcgggagcagcttat

SEQ ID NO: 325764 - DNA, 19 bp, Homo sapiens
  siRNA target sequence for M11S1 (NM_005898.2,583-601).
cgtcgggagcagcttatga

SEQ ID NO: 325765 - DNA, 19 bp, Homo sapiens
  siRNA target sequence for M11S1 (NM_005898.2,623-641).
gtttaaaaactgtacttga

SEQ ID NO: 325766 - DNA, 19 bp, Homo sapiens
  siRNA target sequence for M11S1 (NM_005898.2,637-655).
cttgagctacagtatgttt

SEQ ID NO: 325767 - DNA, 19 bp, Homo sapiens
  siRNA target sequence for M11S1 (NM_005898.2,646-664).
cagtatgttttggacaaat

SEQ ID NO: 325768 - DNA, 19 bp, Homo sapiens
  siRNA target sequence for M11S1 (NM_005898.2,681-699).
gcggactgacctgaaacaa

SEQ ID NO: 325769 - DNA, 19 bp, Homo sapiens
  siRNA target sequence for M11S1 (NM_005898.2,725-743).
ccgaagaggagttgtcatt

SEQ ID NO: 325770 - DNA, 19 bp, Homo sapiens
  siRNA target sequence for M11S1 (NM_005898.2,747-765).
ggatgaattctataagcta

SEQ ID NO: 325771 - DNA, 19 bp, Homo sapiens
  siRNA target sequence for M11S1 (NM_005898.2,869-887).
gaaccacctataaagttct

SEQ ID NO: 325772 - DNA, 19 bp, Homo sapiens
  siRNA target sequence for M11S1 (NM_005898.2,1038-1056).
cactgagcaaagtgaagtt

SEQ ID NO: 325773 - DNA, 19 bp, Homo sapiens
  siRNA target sequence for M11S1 (NM_005898.2,1042-1060).
gagcaaagtgaagttgaat

SEQ ID NO: 325774 - DNA, 19 bp, Homo sapiens
  siRNA target sequence for M11S1 (NM_005898.2,1044-1062).
gcaaagtgaagttgaatca

SEQ ID NO: 325775 - DNA, 19 bp, Homo sapiens
  siRNA target sequence for M11S1 (NM_005898.2,1045-1063).
caaagtgaagttgaatcaa

SEQ ID NO: 325776 - DNA, 19 bp, Homo sapiens
  siRNA target sequence for M11S1 (NM_005898.2,1251-1269).
gagaagacagcgagtacaa

SEQ ID NO: 325777 - DNA, 19 bp, Homo sapiens
  siRNA target sequence for M11S1 (NM_005898.2,1288-1306).
cagggtccctataatttca

SEQ ID NO: 325778 - DNA, 19 bp, Homo sapiens
  siRNA target sequence for M11S1 (NM_005898.2,1292-1310).
gtccctataatttcataca

SEQ ID NO: 325779 - DNA, 19 bp, Homo sapiens
  siRNA target sequence for M11S1 (NM_005898.2,1342-1360).
cttgatcctgccattgtat

SEQ ID NO: 325780 - DNA, 19 bp, Homo sapiens
  siRNA target sequence for M11S1 (NM_005898.2,1363-1381).
gcacagcctatgaatccaa

SEQ ID NO: 325781 - DNA, 19 bp, Homo sapiens
  siRNA target sequence for M11S1 (NM_005898.2,1417-1435).
ccagttcattctgaatcta

SEQ ID NO: 325782 - DNA, 19 bp, Homo sapiens
  siRNA target sequence for M11S1 (NM_005898.2,1436-1454).
gacttgctcagcctaatca

SEQ ID NO: 325783 - DNA, 19 bp, Homo sapiens
  siRNA target sequence for M11S1 (NM_005898.2,1509-1527).
ggggtacacagcatctcaa

SEQ ID NO: 325784 - DNA, 19 bp, Homo sapiens
  siRNA target sequence for M11S1 (NM_005898.2,1530-1548).
cttgtaccagccttctcat

SEQ ID NO: 325785 - DNA, 19 bp, Homo sapiens
  siRNA target sequence for M11S1 (NM_005898.2,1585-1603).
cagattcaggcaacaatct

SEQ ID NO: 325786 - DNA, 19 bp, Homo sapiens
  siRNA target sequence for M11S1 (NM_005898.2,1587-1605).
gattcaggcaacaatctct

SEQ ID NO: 325787 - DNA, 19 bp, Homo sapiens
  siRNA target sequence for M11S1 (NM_005898.2,1648-1666).
gcgtctcagcctcaagtat

SEQ ID NO: 325788 - DNA, 19 bp, Homo sapiens
  siRNA target sequence for M11S1 (NM_005898.2,1649-1667).
cgtctcagcctcaagtatt

SEQ ID NO: 325789 - DNA, 19 bp, Homo sapiens
  siRNA target sequence for M11S1 (NM_005898.2,1672-1690).
gctgggacaagcaaacctt

SEQ ID NO: 325790 - DNA, 19 bp, Homo sapiens
  siRNA target sequence for M11S1 (NM_005898.2,1718-1736).
cagctccattccaatccat

SEQ ID NO: 325791 - DNA, 19 bp, Homo sapiens
  siRNA target sequence for M11S1 (NM_005898.2,1733-1751).
ccatgcaaacggtgttcaa

SEQ ID NO: 325792 - DNA, 19 bp, Homo sapiens
  siRNA target sequence for M11S1 (NM_005898.2,1734-1752).
catgcaaacggtgttcaat

SEQ ID NO: 325793 - DNA, 19 bp, Homo sapiens
  siRNA target sequence for M11S1 (NM_005898.2,1738-1756).
caaacggtgttcaatatga

SEQ ID NO: 325794 - DNA, 19 bp, Homo sapiens
  siRNA target sequence for M11S1 (NM_005898.2,1763-1781).
cagttcctcctgttaatga

SEQ ID NO: 325795 - DNA, 19 bp, Homo sapiens
  siRNA target sequence for M11S1 (NM_005898.2,1807-1825).
cagtaccaggccagttata

SEQ ID NO: 325796 - DNA, 19 bp, Homo sapiens
  siRNA target sequence for M11S1 (NM_005898.2,1919-1937).
cagaccagtcccatcaagt

SEQ ID NO: 325797 - DNA, 19 bp, Homo sapiens
  siRNA target sequence for M11S1 (NM_005898.2,1985-2003).
gtagcaatcagccctatta

SEQ ID NO: 325798 - DNA, 19 bp, Homo sapiens
  siRNA target sequence for M11S1 (NM_005898.2,1988-2006).
gcaatcagccctattacaa

SEQ ID NO: 325799 - DNA, 19 bp, Homo sapiens
  siRNA target sequence for M11S1 (NM_005898.2,1989-2007).
caatcagccctattacaat

SEQ ID NO: 325800 - DNA, 19 bp, Homo sapiens
  siRNA target sequence for M11S1 (NM_005898.2,2101-2119).
ggttaccgcccttcattct

SEQ ID NO: 325801 - DNA, 19 bp, Homo sapiens
  siRNA target sequence for M11S1 (NM_005898.2,2107-2125).
cgcccttcattctctaaca

SEQ ID NO: 325802 - DNA, 19 bp, Homo sapiens
  siRNA target sequence for M11S1 (NM_005898.2,2109-2127).
cccttcattctctaacact

SEQ ID NO: 325803 - DNA, 19 bp, Homo sapiens
  siRNA target sequence for M11S1 (NM_005898.2,2169-2187).
ggattactctggctatcaa

SEQ ID NO: 325804 - DNA, 19 bp, Homo sapiens
  siRNA target sequence for M11S1 (NM_005898.2,2180-2198).
gctatcaacgggatggata

SEQ ID NO: 325805 - DNA, 19 bp, Homo sapiens
  siRNA target sequence for M11S1 (NM_005898.2,2181-2199).
ctatcaacgggatggatat

SEQ ID NO: 325806 - DNA, 19 bp, Homo sapiens
  siRNA target sequence for M11S1 (NM_005898.2,2194-2212).
ggatatcagcagaatttca

SEQ ID NO: 325807 - DNA, 19 bp, Homo sapiens
  siRNA target sequence for M11S1 (NM_005898.2,2282-2300).
gagggatgccgcaaatgaa

SEQ ID NO: 325808 - DNA, 19 bp, Homo sapiens
  siRNA target sequence for M11S1 (NM_005898.2,2284-2302).
gggatgccgcaaatgaaca

SEQ ID NO: 325809 - DNA, 19 bp, Homo sapiens
  siRNA target sequence for M11S1 (NM_005898.2,2298-2316).
gaacactcagcaagtgaat

SEQ ID NO: 325810 - DNA, 19 bp, Homo sapiens
  siRNA target sequence for MLANA (NM_005511.1,176-194).
gctcatcggctgttggtat

SEQ ID NO: 325811 - DNA, 19 bp, Homo sapiens
  siRNA target sequence for MLANA (NM_005511.1,177-195).
ctcatcggctgttggtatt

SEQ ID NO: 325812 - DNA, 19 bp, Homo sapiens
  siRNA target sequence for MLANA (NM_005511.1,179-197).
catcggctgttggtattgt

SEQ ID NO: 325813 - DNA, 19 bp, Homo sapiens
  siRNA target sequence for MLANA (NM_005511.1,182-200).
cggctgttggtattgtaga

SEQ ID NO: 325814 - DNA, 19 bp, Homo sapiens
  siRNA target sequence for MLANA (NM_005511.1,183-201).
ggctgttggtattgtagaa

SEQ ID NO: 325815 - DNA, 19 bp, Homo sapiens
  siRNA target sequence for MLANA (NM_005511.1,215-233).
cagagccttgatggataaa

SEQ ID NO: 325816 - DNA, 19 bp, Homo sapiens
  siRNA target sequence for MLANA (NM_005511.1,237-255).
cttcatgttggcactcaat

SEQ ID NO: 325817 - DNA, 19 bp, Homo sapiens
  siRNA target sequence for MLANA (NM_005511.1,248-266).
cactcaatgtgccttaaca

SEQ ID NO: 325818 - DNA, 19 bp, Homo sapiens
  siRNA target sequence for MLANA (NM_005511.1,294-312).
catcgggacagcaaagtgt

SEQ ID NO: 325819 - DNA, 19 bp, Homo sapiens
  siRNA target sequence for MLANA (NM_005511.1,304-322).
gcaaagtgtctcttcaaga

SEQ ID NO: 325820 - DNA, 19 bp, Homo sapiens
  siRNA target sequence for MOX2 (NM_005944.3,193-211).
cctgcttccttaaaatgct

SEQ ID NO: 325821 - DNA, 19 bp, Homo sapiens
  siRNA target sequence for MOX2 (NM_005944.3,323-341).
cctataaggacaagataaa

SEQ ID NO: 325822 - DNA, 19 bp, Homo sapiens
  siRNA target sequence for MOX2 (NM_005944.3,352-370).
ctgggactccaaaactcaa

SEQ ID NO: 325823 - DNA, 19 bp, Homo sapiens
  siRNA target sequence for MOX2 (NM_005944.3,462-480).
ctgcctcaccgtctatgta

SEQ ID NO: 325824 - DNA, 19 bp, Homo sapiens
  siRNA target sequence for MOX2 (NM_005944.3,464-482).
gcctcaccgtctatgtaca

SEQ ID NO: 325825 - DNA, 19 bp, Homo sapiens
  siRNA target sequence for MOX2 (NM_005944.3,485-503).
ccatagtatcccttcacta

SEQ ID NO: 325826 - DNA, 19 bp, Homo sapiens
  siRNA target sequence for MOX2 (NM_005944.3,512-530).
ctgaagaccacctaaatat

SEQ ID NO: 325827 - DNA, 19 bp, Homo sapiens
  siRNA target sequence for MOX2 (NM_005944.3,585-603).
gtcagggattgaaaatagt

SEQ ID NO: 325828 - DNA, 19 bp, Homo sapiens
  siRNA target sequence for MOX2 (NM_005944.3,716-734).
ggactgtgaccgactttaa

SEQ ID NO: 325829 - DNA, 19 bp, Homo sapiens
  siRNA target sequence for MOX2 (NM_005944.3,721-739).
gtgaccgactttaagcaaa

SEQ ID NO: 325830 - DNA, 19 bp, Homo sapiens
  siRNA target sequence for MOX2 (NM_005944.3,782-800).
gcattgtttccctggtaat

SEQ ID NO: 325831 - DNA, 19 bp, Homo sapiens
  siRNA target sequence for MOX2 (NM_005944.3,805-823).
ctcgtcctaatctcaatct

SEQ ID NO: 325832 - DNA, 19 bp, Homo sapiens
  siRNA target sequence for NET-5 (NM_006675.2,301-319).
gccataggcaccattgtca

SEQ ID NO: 325833 - DNA, 19 bp, Homo sapiens
  siRNA target sequence for NET-5 (NM_006675.2,302-320).
ccataggcaccattgtcat

SEQ ID NO: 325834 - DNA, 19 bp, Homo sapiens
  siRNA target sequence for NET-5 (NM_006675.2,408-426).
cctagcagagctgatctta

SEQ ID NO: 325835 - DNA, 19 bp, Homo sapiens
  siRNA target sequence for NET-5 (NM_006675.2,686-704).
gaacgggctgctatgaaaa

SEQ ID NO: 325836 - DNA, 19 bp, Homo sapiens
  siRNA target sequence for NET-5 (NM_006675.2,689-707).
cgggctgctatgaaaaggt

SEQ ID NO: 325837 - DNA, 19 bp, Homo sapiens
  siRNA target sequence for NET-5 (NM_006675.2,711-729).
gatgtggttcgatgacaat

SEQ ID NO: 325838 - DNA, 19 bp, Homo sapiens
  siRNA target sequence for NET-5 (NM_006675.2,817-835).
caccggactggtaagaagt

SEQ ID NO: 325839 - DNA, 19 bp, Homo sapiens
  siRNA target sequence for NET-7 (NM_012339.2,235-253).
cctgtctgtgggcatctat

SEQ ID NO: 325840 - DNA, 19 bp, Homo sapiens
  siRNA target sequence for NET-7 (NM_012339.2,259-277).
ggttgagcggcagaaatat

SEQ ID NO: 325841 - DNA, 19 bp, Homo sapiens
  siRNA target sequence for NET-7 (NM_012339.2,260-278).
gttgagcggcagaaatata

SEQ ID NO: 325842 - DNA, 19 bp, Homo sapiens
  siRNA target sequence for NET-7 (NM_012339.2,340-358).
gttcatggtctccttcatt

SEQ ID NO: 325843 - DNA, 19 bp, Homo sapiens
  siRNA target sequence for NET-7 (NM_012339.2,682-700).
caggaacacgacagaagtt

SEQ ID NO: 325844 - DNA, 19 bp, Homo sapiens
  siRNA target sequence for NET-7 (NM_012339.2,684-702).
ggaacacgacagaagttgt

SEQ ID NO: 325845 - DNA, 19 bp, Homo sapiens
  siRNA target sequence for NET-7 (NM_012339.2,709-727).
catgtgtggctacaaaact

SEQ ID NO: 325846 - DNA, 19 bp, Homo sapiens
  siRNA target sequence for NET-7 (NM_012339.2,730-748).
cgacaaggagcgtttcagt

SEQ ID NO: 325847 - DNA, 19 bp, Homo sapiens
  siRNA target sequence for NET-7 (NM_012339.2,747-765).
gtgtgcaggatgtcatcta

SEQ ID NO: 325848 - DNA, 19 bp, Homo sapiens
  siRNA target sequence for NET-7 (NM_012339.2,872-890).
ctgacgctgctgtacatca

SEQ ID NO: 325849 - DNA, 19 bp, Homo sapiens
  siRNA target sequence for NKG7 (NM_005601.2,164-182).
gctttgagcaccgatttct

SEQ ID NO: 325850 - DNA, 19 bp, Homo sapiens
  siRNA target sequence for NKG7 (NM_005601.2,273-291).
cgcagaccttcagcattat

SEQ ID NO: 325851 - DNA, 19 bp, Homo sapiens
  siRNA target sequence for PODXL (NM_005397.2,360-378).
ctactacggactcatctaa

SEQ ID NO: 325852 - DNA, 19 bp, Homo sapiens
  siRNA target sequence for PODXL (NM_005397.2,409-427).
caccatcatggctacagat

SEQ ID NO: 325853 - DNA, 19 bp, Homo sapiens
  siRNA target sequence for PODXL (NM_005397.2,616-634).
ccccaagagcacaaaaagt

SEQ ID NO: 325854 - DNA, 19 bp, Homo sapiens
  siRNA target sequence for PODXL (NM_005397.2,863-881).
ggacatgaccatcttatga

SEQ ID NO: 325855 - DNA, 19 bp, Homo sapiens
  siRNA target sequence for PODXL (NM_005397.2,953-971).
ctaccgtcatcggttatct

SEQ ID NO: 325856 - DNA, 19 bp, Homo sapiens
  siRNA target sequence for PODXL (NM_005397.2,1106-1124).
cccacagcagcatcaacta

SEQ ID NO: 325857 - DNA, 19 bp, Homo sapiens
  siRNA target sequence for PODXL (NM_005397.2,1155-1173).
ctgtggctcatgagagtaa

SEQ ID NO: 325858 - DNA, 19 bp, Homo sapiens
  siRNA target sequence for PODXL (NM_005397.2,1266-1284).
cttcggatgagaaattgat

SEQ ID NO: 325859 - DNA, 19 bp, Homo sapiens
  siRNA target sequence for PODXL (NM_005397.2,1291-1309).
gatatgccgagcagtcaaa

SEQ ID NO: 325860 - DNA, 19 bp, Homo sapiens
  siRNA target sequence for PODXL (NM_005397.2,1372-1390).
gaccgtggtcgtcaaagaa

SEQ ID NO: 325861 - DNA, 19 bp, Homo sapiens
  siRNA target sequence for PODXL (NM_005397.2,1378-1396).
ggtcgtcaaagaaatcact

SEQ ID NO: 325862 - DNA, 19 bp, Homo sapiens
  siRNA target sequence for PODXL (NM_005397.2,1379-1397).
gtcgtcaaagaaatcacta

SEQ ID NO: 325863 - DNA, 19 bp, Homo sapiens
  siRNA target sequence for PODXL (NM_005397.2,1381-1399).
cgtcaaagaaatcactatt

SEQ ID NO: 325864 - DNA, 19 bp, Homo sapiens
  siRNA target sequence for PODXL (NM_005397.2,1430-1448).
gagcggctgaaggacaaat

SEQ ID NO: 325865 - DNA, 19 bp, Homo sapiens
  siRNA target sequence for PTPRCAP (NM_005608.1,351-369).
gctggggtccacagacaat

SEQ ID NO: 325866 - DNA, 19 bp, Homo sapiens
  siRNA target sequence for SYNGR1 (NM_004711.3,353-371).
cgtcaaggaccgcaagaaa

SEQ ID NO: 325867 - DNA, 19 bp, Homo sapiens
  siRNA target sequence for SYNGR3 (NM_004209.4,404-422).
gtgcgcttccagcaaatca

SEQ ID NO: 325868 - DNA, 19 bp, Homo sapiens
  siRNA target sequence for T1A-2 (NM_006474.3,59-77).
ccgctcggaaagttctcaa

SEQ ID NO: 325869 - DNA, 19 bp, Homo sapiens
  siRNA target sequence for T1A-2 (NM_006474.3,70-88).
gttctcaactgcaaagttt

SEQ ID NO: 325870 - DNA, 19 bp, Homo sapiens
  siRNA target sequence for T1A-2 (NM_006474.3,349-367).
cacaggccagccagaagat

SEQ ID NO: 325871 - DNA, 19 bp, Homo sapiens
  siRNA target sequence for T1A-2 (NM_006474.3,441-459).
ccagcgaagaccgctataa

SEQ ID NO: 325872 - DNA, 19 bp, Homo sapiens
  siRNA target sequence for T1A-2 (NM_006474.3,445-463).
cgaagaccgctataagtct

SEQ ID NO: 325873 - DNA, 19 bp, Homo sapiens
  siRNA target sequence for T1A-2 (NM_006474.3,517-535).
cgaggatctgccaacttca

SEQ ID NO: 325874 - DNA, 19 bp, Homo sapiens
  siRNA target sequence for T1A-2 (NM_006474.3,545-563).
gtccacgcgcaagaacaaa

SEQ ID NO: 325875 - DNA, 19 bp, Homo sapiens
  siRNA target sequence for T1A-2 (NM_006474.3,547-565).
ccacgcgcaagaacaaagt

SEQ ID NO: 325876 - DNA, 19 bp, Homo sapiens
  siRNA target sequence for T1A-2 (NM_006474.3,597-615).
gtcactccacggagaaagt

SEQ ID NO: 325877 - DNA, 19 bp, Homo sapiens
  siRNA target sequence for T1A-2 (NM_006474.3,631-649).
gacaacagttgagaaagat

SEQ ID NO: 325878 - DNA, 19 bp, Homo sapiens
  siRNA target sequence for T1A-2 (NM_006474.3,664-682).
gaccctggttggaatcata

SEQ ID NO: 325879 - DNA, 19 bp, Homo sapiens
  siRNA target sequence for TM4SF13 (NM_014399.2,249-267).
gccctcaacctgctttaca

SEQ ID NO: 325880 - DNA, 19 bp, Homo sapiens
  siRNA target sequence for TM4SF13 (NM_014399.2,394-412).
gtctgattggagctgtaaa

SEQ ID NO: 325881 - DNA, 19 bp, Homo sapiens
  siRNA target sequence for TM4SF13 (NM_014399.2,398-416).
gattggagctgtaaaacat

SEQ ID NO: 325882 - DNA, 19 bp, Homo sapiens
  siRNA target sequence for TM4SF13 (NM_014399.2,403-421).
gagctgtaaaacatcatca

SEQ ID NO: 325883 - DNA, 19 bp, Homo sapiens
  siRNA target sequence for TM4SF13 (NM_014399.2,478-496).
ctgtatcttgcgcttgttt

SEQ ID NO: 325884 - DNA, 19 bp, Homo sapiens
  siRNA target sequence for TM4SF13 (NM_014399.2,530-548).
ggaggttggttggaacaat

SEQ ID NO: 325885 - DNA, 19 bp, Homo sapiens
  siRNA target sequence for TM4SF13 (NM_014399.2,531-549).
gaggttggttggaacaata

SEQ ID NO: 325886 - DNA, 19 bp, Homo sapiens
  siRNA target sequence for TM4SF13 (NM_014399.2,550-568).
cggcaagtgctcgaaatga

SEQ ID NO: 325887 - DNA, 19 bp, Homo sapiens
  siRNA target sequence for TM4SF13 (NM_014399.2,552-570).
gcaagtgctcgaaatgaca

SEQ ID NO: 325888 - DNA, 19 bp, Homo sapiens
  siRNA target sequence for TM4SF13 (NM_014399.2,553-571).
caagtgctcgaaatgacat

SEQ ID NO: 325889 - DNA, 19 bp, Homo sapiens
  siRNA target sequence for TM4SF13 (NM_014399.2,592-610).
gtgggttccgaagtgttaa

SEQ ID NO: 325890 - DNA, 19 bp, Homo sapiens
  siRNA target sequence for TM4SF13 (NM_014399.2,661-679).
cgccatgtgctccaatcat

SEQ ID NO: 325891 - DNA, 19 bp, Homo sapiens
  siRNA target sequence for TM4SF13 (NM_014399.2,725-743).
cctgttcttcagttttaca

SEQ ID NO: 325892 - DNA, 19 bp, Homo sapiens
  siRNA target sequence for TM7SF1 (NM_003272.1,459-477).
cacgcaggtgattttcaaa

SEQ ID NO: 325893 - DNA, 19 bp, Homo sapiens
  siRNA target sequence for TM7SF1 (NM_003272.1,559-577).
ctgttggtgaatttaacct

SEQ ID NO: 325894 - DNA, 19 bp, Homo sapiens
  siRNA target sequence for TM7SF1 (NM_003272.1,705-723).
gatgtccttagccaacatt

SEQ ID NO: 325895 - DNA, 19 bp, Homo sapiens
  siRNA target sequence for TM7SF1 (NM_003272.1,840-858).
caagagcgtccattccttt

SEQ ID NO: 325896 - DNA, 19 bp, Homo sapiens
  siRNA target sequence for TM7SF1 (NM_003272.1,843-861).
gagcgtccattcctttgat

SEQ ID NO: 325897 - DNA, 19 bp, Homo sapiens
  siRNA target sequence for TM7SF1 (NM_003272.1,845-863).
gcgtccattcctttgatta

SEQ ID NO: 325898 - DNA, 19 bp, Homo sapiens
  siRNA target sequence for TM7SF1 (NM_003272.1,909-927).
gggagatgctggatacgta

SEQ ID NO: 325899 - DNA, 19 bp, Homo sapiens
  siRNA target sequence for TM7SF1 (NM_003272.1,910-928).
ggagatgctggatacgtat

SEQ ID NO: 325900 - DNA, 19 bp, Homo sapiens
  siRNA target sequence for TM7SF1 (NM_003272.1,911-929).
gagatgctggatacgtatt

SEQ ID NO: 325901 - DNA, 19 bp, Homo sapiens
  siRNA target sequence for TM7SF1 (NM_003272.1,913-931).
gatgctggatacgtattat

SEQ ID NO: 325902 - DNA, 19 bp, Homo sapiens
  siRNA target sequence for TM7SF1 (NM_003272.1,949-967).
gtttgggaactcttaccta

SEQ ID NO: 325903 - DNA, 19 bp, Homo sapiens
  siRNA target sequence for TM7SF1 (NM_003272.1,965-983).
ctaccaccttagtcgttta

SEQ ID NO: 325904 - DNA, 19 bp, Homo sapiens
  siRNA target sequence for TM7SF1 (NM_003272.1,968-986).
ccaccttagtcgtttattt

SEQ ID NO: 325905 - DNA, 19 bp, Homo sapiens
  siRNA target sequence for TM7SF1 (NM_003272.1,971-989).
ccttagtcgtttatttctt

SEQ ID NO: 325906 - DNA, 19 bp, Homo sapiens
  siRNA target sequence for TM7SF1 (NM_003272.1,1004-1022).
ctacaaaggaccttaccaa

SEQ ID NO: 325907 - DNA, 19 bp, Homo sapiens
  siRNA target sequence for TM7SF1 (NM_003272.1,1052-1070).
gtcccagatcttatttctt

SEQ ID NO: 325908 - DNA, 19 bp, Homo sapiens
  siRNA target sequence for TM7SF1 (NM_003272.1,1139-1157).
gaggttttgctccagatta

SEQ ID NO: 325909 - DNA, 19 bp, Homo sapiens
  siRNA target sequence for TM7SF1 (NM_003272.1,1158-1176).
ctatgattggggacaacaa

SEQ ID NO: 325910 - DNA, 19 bp, Homo sapiens
  siRNA target sequence for TM7SF1 (NM_003272.1,1162-1180).
gattggggacaacaaacta

SEQ ID NO: 325911 - DNA, 19 bp, Homo sapiens
  siRNA target sequence for TM7SF1 (NM_003272.1,1205-1223).
ctttgcaagactcaacttt

SEQ ID NO: 325912 - DNA, 19 bp, Homo sapiens
  siRNA target sequence for TM7SF1 (NM_003272.1,1209-1227).
gcaagactcaactttggat

SEQ ID NO: 325913 - DNA, 19 bp, Homo sapiens
  siRNA target sequence for TMEM4 (NM_014255.2,516-534).
ctctggtggatgaactaga

SEQ ID NO: 325914 - DNA, 19 bp, Homo sapiens
  siRNA target sequence for TMEM4 (NM_014255.2,577-595).
gggatctttccggatcaat

SEQ ID NO: 325915 - DNA, 19 bp, Homo sapiens
  siRNA target sequence for TMEM4 (NM_014255.2,691-709).
gtatggggaacagattgat

SEQ ID NO: 325916 - DNA, 19 bp, Homo sapiens
  siRNA target sequence for TMEM4 (NM_014255.2,787-805).
ccgaatcgactcagatatt

SEQ ID NO: 325917 - DNA, 19 bp, Homo sapiens
  siRNA target sequence for TMEM4 (NM_014255.2,834-852).
gcattgtggaggaatacga

SEQ ID NO: 325918 - DNA, 19 bp, Homo sapiens
  siRNA target sequence for TMEM4 (NM_014255.2,850-868).
cgaggatgaactcattgaa

SEQ ID NO: 325919 - DNA, 19 bp, Homo sapiens
  siRNA target sequence for TMEM4 (NM_014255.2,877-895).
ccgagaggctgacaatgtt

SEQ ID NO: 325920 - DNA, 19 bp, Homo sapiens
  siRNA target sequence for TMEM4 (NM_014255.2,878-896).
cgagaggctgacaatgtta

SEQ ID NO: 325921 - DNA, 19 bp, Homo sapiens
  siRNA target sequence for TMEM4 (NM_014255.2,910-928).
cagtaagcgaacagatctt

SEQ ID NO: 325922 - DNA, 19 bp, Homo sapiens
  siRNA target sequence for TMEM5 (NM_014254.1,122-140).
gcggctctgctcgtttctt

SEQ ID NO: 325923 - DNA, 19 bp, Homo sapiens
  siRNA target sequence for TMEM5 (NM_014254.1,144-162).
gccctgtactgcctattct

SEQ ID NO: 325924 - DNA, 19 bp, Homo sapiens
  siRNA target sequence for TMEM5 (NM_014254.1,172-190).
ctgcctaccacgtcttctt

SEQ ID NO: 325925 - DNA, 19 bp, Homo sapiens
  siRNA target sequence for TMEM5 (NM_014254.1,332-350).
gcaacaacacagatttaaa

SEQ ID NO: 325926 - DNA, 19 bp, Homo sapiens
  siRNA target sequence for TMEM5 (NM_014254.1,352-370).
ctagccttcaaatattaga

SEQ ID NO: 325927 - DNA, 19 bp, Homo sapiens
  siRNA target sequence for TMEM5 (NM_014254.1,369-387).
gataaatccacgaaaggaa

SEQ ID NO: 325928 - DNA, 19 bp, Homo sapiens
  siRNA target sequence for TMEM5 (NM_014254.1,434-452).
gtatctctgggagcatatt

SEQ ID NO: 325929 - DNA, 19 bp, Homo sapiens
  siRNA target sequence for TMEM5 (NM_014254.1,440-458).
ctgggagcatatttttgaa

SEQ ID NO: 325930 - DNA, 19 bp, Homo sapiens
  siRNA target sequence for TMEM5 (NM_014254.1,506-524).
gtcaatcgtaggaagaaca

SEQ ID NO: 325931 - DNA, 19 bp, Homo sapiens
  siRNA target sequence for TMEM5 (NM_014254.1,552-570).
gtaataccagggtacttct

SEQ ID NO: 325932 - DNA, 19 bp, Homo sapiens
  siRNA target sequence for TMEM5 (NM_014254.1,562-580).
ggtacttctccgttgatgt

SEQ ID NO: 325933 - DNA, 19 bp, Homo sapiens
  siRNA target sequence for TMEM5 (NM_014254.1,566-584).
cttctccgttgatgtgaat

SEQ ID NO: 325934 - DNA, 19 bp, Homo sapiens
  siRNA target sequence for TMEM5 (NM_014254.1,569-587).
ctccgttgatgtgaataat

SEQ ID NO: 325935 - DNA, 19 bp, Homo sapiens
  siRNA target sequence for TMEM5 (NM_014254.1,581-599).
gaataatgtggtactcatt

SEQ ID NO: 325936 - DNA, 19 bp, Homo sapiens
  siRNA target sequence for TMEM5 (NM_014254.1,590-608).
ggtactcattttaaatgga

SEQ ID NO: 325937 - DNA, 19 bp, Homo sapiens
  siRNA target sequence for TMEM5 (NM_014254.1,635-653).
cacccagtggttactttat

SEQ ID NO: 325938 - DNA, 19 bp, Homo sapiens
  siRNA target sequence for TMEM5 (NM_014254.1,704-722).
gctcggaaatgaacattgt

SEQ ID NO: 325939 - DNA, 19 bp, Homo sapiens
  siRNA target sequence for TMEM5 (NM_014254.1,707-725).
cggaaatgaacattgtgat

SEQ ID NO: 325940 - DNA, 19 bp, Homo sapiens
  siRNA target sequence for TMEM5 (NM_014254.1,770-788).
ggagctgcttttcataata

SEQ ID NO: 325941 - DNA, 19 bp, Homo sapiens
  siRNA target sequence for TMEM5 (NM_014254.1,771-789).
gagctgcttttcataatat

SEQ ID NO: 325942 - DNA, 19 bp, Homo sapiens
  siRNA target sequence for TMEM5 (NM_014254.1,920-938).
cttaggaacgatttatgaa

SEQ ID NO: 325943 - DNA, 19 bp, Homo sapiens
  siRNA target sequence for TMEM5 (NM_014254.1,943-961).
catccagacaggcactaat

SEQ ID NO: 325944 - DNA, 19 bp, Homo sapiens
  siRNA target sequence for TMEM5 (NM_014254.1,978-996).
gatgggaacgataagcttt

SEQ ID NO: 325945 - DNA, 19 bp, Homo sapiens
  siRNA target sequence for TMEM5 (NM_014254.1,981-999).
gggaacgataagctttgtt

SEQ ID NO: 325946 - DNA, 19 bp, Homo sapiens
  siRNA target sequence for TMEM5 (NM_014254.1,1094-1112).
cccggtcggagtaaacaca

SEQ ID NO: 325947 - DNA, 19 bp, Homo sapiens
  siRNA target sequence for TMEM5 (NM_014254.1,1111-1129).
cagaatgctatcgaatcta

SEQ ID NO: 325948 - DNA, 19 bp, Homo sapiens
  siRNA target sequence for TMEM5 (NM_014254.1,1237-1255).
ccatgggtgctccctttat

SEQ ID NO: 325949 - DNA, 19 bp, Homo sapiens
  siRNA target sequence for TMEM5 (NM_014254.1,1241-1259).
gggtgctccctttatcttt

SEQ ID NO: 325950 - DNA, 19 bp, Homo sapiens
  siRNA target sequence for TMEM5 (NM_014254.1,1243-1261).
gtgctccctttatctttat

SEQ ID NO: 325951 - DNA, 19 bp, Homo sapiens
  siRNA target sequence for ADIPOR1 (NM_015999.2,468-486).
ggagggtcatcccatatga

SEQ ID NO: 325952 - DNA, 19 bp, Homo sapiens
  siRNA target sequence for ADIPOR1 (NM_015999.2,471-489).
gggtcatcccatatgatgt

SEQ ID NO: 325953 - DNA, 19 bp, Homo sapiens
  siRNA target sequence for ADIPOR1 (NM_015999.2,574-592).
catcttccgcattcataca

SEQ ID NO: 325954 - DNA, 19 bp, Homo sapiens
  siRNA target sequence for ADIPOR1 (NM_015999.2,577-595).
cttccgcattcatacagaa

SEQ ID NO: 325955 - DNA, 19 bp, Homo sapiens
  siRNA target sequence for ADIPOR1 (NM_015999.2,623-641).
ggtttcgtgctgtttctct

SEQ ID NO: 325956 - DNA, 19 bp, Homo sapiens
  siRNA target sequence for ADIPOR1 (NM_015999.2,624-642).
gtttcgtgctgtttctctt

SEQ ID NO: 325957 - DNA, 19 bp, Homo sapiens
  siRNA target sequence for ADIPOR1 (NM_015999.2,655-673).
gaccatgctcagaccaaat

SEQ ID NO: 325958 - DNA, 19 bp, Homo sapiens
  siRNA target sequence for ADIPOR1 (NM_015999.2,662-680).
ctcagaccaaatatgtact

SEQ ID NO: 325959 - DNA, 19 bp, Homo sapiens
  siRNA target sequence for ADIPOR1 (NM_015999.2,758-776).
ctctttcacaccgtctatt

SEQ ID NO: 325960 - DNA, 19 bp, Homo sapiens
  siRNA target sequence for ADIPOR1 (NM_015999.2,760-778).
ctttcacaccgtctattgt

SEQ ID NO: 325961 - DNA, 19 bp, Homo sapiens
  siRNA target sequence for ADIPOR1 (NM_015999.2,768-786).
ccgtctattgtcattcaga

SEQ ID NO: 325962 - DNA, 19 bp, Homo sapiens
  siRNA target sequence for ADIPOR1 (NM_015999.2,791-809).
gtctctcggactttttcca

SEQ ID NO: 325963 - DNA, 19 bp, Homo sapiens
  siRNA target sequence for ADIPOR1 (NM_015999.2,793-811).
ctctcggactttttccaaa

SEQ ID NO: 325964 - DNA, 19 bp, Homo sapiens
  siRNA target sequence for ADIPOR1 (NM_015999.2,854-872).
gtcccctggctctattatt

SEQ ID NO: 325965 - DNA, 19 bp, Homo sapiens
  siRNA target sequence for ADIPOR1 (NM_015999.2,888-906).
cacagccacggctcatcta

SEQ ID NO: 325966 - DNA, 19 bp, Homo sapiens
  siRNA target sequence for ADIPOR1 (NM_015999.2,1031-1049).
gtgcccaccatgcacttta

SEQ ID NO: 325967 - DNA, 19 bp, Homo sapiens
  siRNA target sequence for ADIPOR1 (NM_015999.2,1033-1051).
gcccaccatgcactttact

SEQ ID NO: 325968 - DNA, 19 bp, Homo sapiens
  siRNA target sequence for ADIPOR1 (NM_015999.2,1035-1053).
ccaccatgcactttactat

SEQ ID NO: 325969 - DNA, 19 bp, Homo sapiens
  siRNA target sequence for ADIPOR1 (NM_015999.2,1162-1180).
gcgcttctttcctggaaaa

SEQ ID NO: 325970 - DNA, 19 bp, Homo sapiens
  siRNA target sequence for ADIPOR1 (NM_015999.2,1191-1209).
ggttccagtctcatcagat

SEQ ID NO: 325971 - DNA, 19 bp, Homo sapiens
  siRNA target sequence for ADIPOR1 (NM_015999.2,1192-1210).
gttccagtctcatcagatt

SEQ ID NO: 325972 - DNA, 19 bp, Homo sapiens
  siRNA target sequence for ADIPOR2 (NM_024551.2,283-301).
gtacacgaagaggtgataa

SEQ ID NO: 325973 - DNA, 19 bp, Homo sapiens
  siRNA target sequence for ADIPOR2 (NM_024551.2,286-304).
cacgaagaggtgataatga

SEQ ID NO: 325974 - DNA, 19 bp, Homo sapiens
  siRNA target sequence for ADIPOR2 (NM_024551.2,288-306).
cgaagaggtgataatgaca

SEQ ID NO: 325975 - DNA, 19 bp, Homo sapiens
  siRNA target sequence for ADIPOR2 (NM_024551.2,428-446).
catgtcccctctcttacaa

SEQ ID NO: 325976 - DNA, 19 bp, Homo sapiens
  siRNA target sequence for ADIPOR2 (NM_024551.2,506-524).
gcgagtgatccctcatgat

SEQ ID NO: 325977 - DNA, 19 bp, Homo sapiens
  siRNA target sequence for ADIPOR2 (NM_024551.2,508-526).
gagtgatccctcatgatgt

SEQ ID NO: 325978 - DNA, 19 bp, Homo sapiens
  siRNA target sequence for ADIPOR2 (NM_024551.2,532-550).
cagactggctcaaggataa

SEQ ID NO: 325979 - DNA, 19 bp, Homo sapiens
  siRNA target sequence for ADIPOR2 (NM_024551.2,651-669).
catctcttaggttgtgtat

SEQ ID NO: 325980 - DNA, 19 bp, Homo sapiens
  siRNA target sequence for ADIPOR2 (NM_024551.2,674-692).
cctgtgcctggggatcttt

SEQ ID NO: 325981 - DNA, 19 bp, Homo sapiens
  siRNA target sequence for ADIPOR2 (NM_024551.2,675-693).
ctgtgcctggggatctttt

SEQ ID NO: 325982 - DNA, 19 bp, Homo sapiens
  siRNA target sequence for ADIPOR2 (NM_024551.2,677-695).
gtgcctggggatcttttat

SEQ ID NO: 325983 - DNA, 19 bp, Homo sapiens
  siRNA target sequence for ADIPOR2 (NM_024551.2,737-755).
gaaggtggtctttggatta

SEQ ID NO: 325984 - DNA, 19 bp, Homo sapiens
  siRNA target sequence for ADIPOR2 (NM_024551.2,828-846).
gtctctcggctcttctcta

SEQ ID NO: 325985 - DNA, 19 bp, Homo sapiens
  siRNA target sequence for ADIPOR2 (NM_024551.2,832-850).
ctcggctcttctctaaact

SEQ ID NO: 325986 - DNA, 19 bp, Homo sapiens
  siRNA target sequence for ADIPOR2 (NM_024551.2,851-869).
ggattactctggtattgct

SEQ ID NO: 325987 - DNA, 19 bp, Homo sapiens
  siRNA target sequence for ADIPOR2 (NM_024551.2,930-948).
ccttgcttcatctacttga

SEQ ID NO: 325988 - DNA, 19 bp, Homo sapiens
  siRNA target sequence for ADIPOR2 (NM_024551.2,931-949).
cttgcttcatctacttgat

SEQ ID NO: 325989 - DNA, 19 bp, Homo sapiens
  siRNA target sequence for ADIPOR2 (NM_024551.2,965-983).
gggcattgcagccattata

SEQ ID NO: 325990 - DNA, 19 bp, Homo sapiens
  siRNA target sequence for ADIPOR2 (NM_024551.2,967-985).
gcattgcagccattatagt

SEQ ID NO: 325991 - DNA, 19 bp, Homo sapiens
  siRNA target sequence for ADIPOR2 (NM_024551.2,986-1004).
ctcccagtgggacatgttt

SEQ ID NO: 325992 - DNA, 19 bp, Homo sapiens
  siRNA target sequence for ADIPOR2 (NM_024551.2,1071-1089).
cctaccttgcactatgtca

SEQ ID NO: 325993 - DNA, 19 bp, Homo sapiens
  siRNA target sequence for ADIPOR2 (NM_024551.2,1189-1207).
ggatccccgaacgcttttt

SEQ ID NO: 325994 - DNA, 19 bp, Homo sapiens
  siRNA target sequence for ADIPOR2 (NM_024551.2,1237-1255).
ctcatcagctgtttcatat

SEQ ID NO: 325995 - DNA, 19 bp, Homo sapiens
  siRNA target sequence for ADIPOR2 (NM_024551.2,1267-1285).
ctggagcttttgttcactt

SEQ ID NO: 325996 - DNA, 19 bp, Homo sapiens
  siRNA target sequence for ADIPOR2 (NM_024551.2,1305-1323).
caggagtttcgtttcatga

SEQ ID NO: 325997 - DNA, 19 bp, Homo sapiens
  siRNA target sequence for AMIGO2 (NM_181847.2,621-639).
cgtcagctgcaccaacaaa

SEQ ID NO: 325998 - DNA, 19 bp, Homo sapiens
  siRNA target sequence for AMIGO2 (NM_181847.2,622-640).
gtcagctgcaccaacaaaa

SEQ ID NO: 325999 - DNA, 19 bp, Homo sapiens
  siRNA target sequence for AMIGO2 (NM_181847.2,660-678).
gaaccttttcagactgatt

SEQ ID NO: 326000 - DNA, 19 bp, Homo sapiens
  siRNA target sequence for AMIGO2 (NM_181847.2,681-699).
gagactggacctgagttat

SEQ ID NO: 326001 - DNA, 19 bp, Homo sapiens
  siRNA target sequence for AMIGO2 (NM_181847.2,687-705).
ggacctgagttataacaga

SEQ ID NO: 326002 - DNA, 19 bp, Homo sapiens
  siRNA target sequence for AMIGO2 (NM_181847.2,726-744).
gtggattccagtatcgttt

SEQ ID NO: 326003 - DNA, 19 bp, Homo sapiens
  siRNA target sequence for AMIGO2 (NM_181847.2,760-778).
ctaattcttcgtcataaca

SEQ ID NO: 326004 - DNA, 19 bp, Homo sapiens
  siRNA target sequence for AMIGO2 (NM_181847.2,789-807).
catttccacgggcagtttt

SEQ ID NO: 326005 - DNA, 19 bp, Homo sapiens
  siRNA target sequence for AMIGO2 (NM_181847.2,872-890).
ctgtattccaagagttgaa

SEQ ID NO: 326006 - DNA, 19 bp, Homo sapiens
  siRNA target sequence for AMIGO2 (NM_181847.2,907-925).
ctgctttacaacaatcaca

SEQ ID NO: 326007 - DNA, 19 bp, Homo sapiens
  siRNA target sequence for AMIGO2 (NM_181847.2,909-927).
gctttacaacaatcacata

SEQ ID NO: 326008 - DNA, 19 bp, Homo sapiens
  siRNA target sequence for AMIGO2 (NM_181847.2,1001-1019).
cacagtttccgatggattt

SEQ ID NO: 326009 - DNA, 19 bp, Homo sapiens
  siRNA target sequence for AMIGO2 (NM_181847.2,1003-1021).
cagtttccgatggatttgt

SEQ ID NO: 326010 - DNA, 19 bp, Homo sapiens
  siRNA target sequence for AMIGO2 (NM_181847.2,1005-1023).
gtttccgatggatttgtat

SEQ ID NO: 326011 - DNA, 19 bp, Homo sapiens
  siRNA target sequence for AMIGO2 (NM_181847.2,1089-1107).
gccaatgcaccacataaat

SEQ ID NO: 326012 - DNA, 19 bp, Homo sapiens
  siRNA target sequence for AMIGO2 (NM_181847.2,1090-1108).
ccaatgcaccacataaatt

SEQ ID NO: 326013 - DNA, 19 bp, Homo sapiens
  siRNA target sequence for AMIGO2 (NM_181847.2,1091-1109).
caatgcaccacataaattt

SEQ ID NO: 326014 - DNA, 19 bp, Homo sapiens
  siRNA target sequence for AMIGO2 (NM_181847.2,1133-1151).
gcatctaccttcatggaaa

SEQ ID NO: 326015 - DNA, 19 bp, Homo sapiens
  siRNA target sequence for AMIGO2 (NM_181847.2,1182-1200).
cttgctggtcttttggtat

SEQ ID NO: 326016 - DNA, 19 bp, Homo sapiens
  siRNA target sequence for AMIGO2 (NM_181847.2,1186-1204).
ctggtcttttggtatcgta

SEQ ID NO: 326017 - DNA, 19 bp, Homo sapiens
  siRNA target sequence for AMIGO2 (NM_181847.2,1288-1306).
ctgctccaggatagcttta

SEQ ID NO: 326018 - DNA, 19 bp, Homo sapiens
  siRNA target sequence for AMIGO2 (NM_181847.2,1294-1312).
caggatagctttatgaatt

SEQ ID NO: 326019 - DNA, 19 bp, Homo sapiens
  siRNA target sequence for AMIGO2 (NM_181847.2,1297-1315).
gatagctttatgaattgct

SEQ ID NO: 326020 - DNA, 19 bp, Homo sapiens
  siRNA target sequence for AMIGO2 (NM_181847.2,1343-1361).
gtgcgcttggctttattca

SEQ ID NO: 326021 - DNA, 19 bp, Homo sapiens
  siRNA target sequence for AMIGO2 (NM_181847.2,1346-1364).
cgcttggctttattcatga

SEQ ID NO: 326022 - DNA, 19 bp, Homo sapiens
  siRNA target sequence for AMIGO2 (NM_181847.2,1572-1590).
gcaacgcctgttaaatgaa

SEQ ID NO: 326023 - DNA, 19 bp, Homo sapiens
  siRNA target sequence for AMIGO2 (NM_181847.2,1592-1610).
ctgtggacgtcacaataaa

SEQ ID NO: 326024 - DNA, 19 bp, Homo sapiens
  siRNA target sequence for AMIGO2 (NM_181847.2,1597-1615).
gacgtcacaataaatgtga

SEQ ID NO: 326025 - DNA, 19 bp, Homo sapiens
  siRNA target sequence for AMIGO2 (NM_181847.2,1639-1657).
catgctcatgaggcattta

SEQ ID NO: 326026 - DNA, 19 bp, Homo sapiens
  siRNA target sequence for AMIGO2 (NM_181847.2,1651-1669).
gcatttaacacagctttta

SEQ ID NO: 326027 - DNA, 19 bp, Homo sapiens
  siRNA target sequence for AMIGO2 (NM_181847.2,1685-1703).
gcgtggccagtatcgtttt

SEQ ID NO: 326028 - DNA, 19 bp, Homo sapiens
  siRNA target sequence for AMIGO2 (NM_181847.2,1689-1707).
ggccagtatcgttttggta

SEQ ID NO: 326029 - DNA, 19 bp, Homo sapiens
  siRNA target sequence for AMIGO2 (NM_181847.2,1708-1726).
cttttgtacctctatctga

SEQ ID NO: 326030 - DNA, 19 bp, Homo sapiens
  siRNA target sequence for AMIGO2 (NM_181847.2,1755-1773).
gagacagaaaaatatgcta

SEQ ID NO: 326031 - DNA, 19 bp, Homo sapiens
  siRNA target sequence for AMIGO2 (NM_181847.2,1786-1804).
gcccattcatcgattctca

SEQ ID NO: 326032 - DNA, 19 bp, Homo sapiens
  siRNA target sequence for AMIGO2 (NM_181847.2,1842-1860).
gaaggcaggtgcaggtaaa

SEQ ID NO: 326033 - DNA, 19 bp, Homo sapiens
  siRNA target sequence for AMIGO2 (NM_181847.2,1974-1992).
gaaatctgactcagattca

SEQ ID NO: 326034 - DNA, 19 bp, Homo sapiens
  siRNA target sequence for AMIGO2 (NM_181847.2,1981-1999).
gactcagattcagtcaatt

SEQ ID NO: 326035 - DNA, 19 bp, Homo sapiens
  siRNA target sequence for AMIGO2 (NM_181847.2,1983-2001).
ctcagattcagtcaattca

SEQ ID NO: 326036 - DNA, 19 bp, Homo sapiens
  siRNA target sequence for AMIGO2 (NM_181847.2,1985-2003).
cagattcagtcaattcagt

SEQ ID NO: 326037 - DNA, 19 bp, Homo sapiens
  siRNA target sequence for ANTXR2 (NM_058172.1,106-124).
gacagaggcaaaatcagta

SEQ ID NO: 326038 - DNA, 19 bp, Homo sapiens
  siRNA target sequence for ANTXR2 (NM_058172.1,135-153).
ggatttaaaacgtgttagt

SEQ ID NO: 326039 - DNA, 19 bp, Homo sapiens
  siRNA target sequence for ANTXR2 (NM_058172.1,174-192).
ccatgaaggactaaagcta

SEQ ID NO: 326040 - DNA, 19 bp, Homo sapiens
  siRNA target sequence for ANTXR2 (NM_058172.1,189-207).
gctagcgaatgaacaaatt

SEQ ID NO: 326041 - DNA, 19 bp, Homo sapiens
  siRNA target sequence for ANTXR2 (NM_058172.1,225-243).
gaaaacctccagtatcata

SEQ ID NO: 326042 - DNA, 19 bp, Homo sapiens
  siRNA target sequence for ANTXR2 (NM_058172.1,231-249).
ctccagtatcataattgct

SEQ ID NO: 326043 - DNA, 19 bp, Homo sapiens
  siRNA target sequence for ANTXR2 (NM_058172.1,270-288).
cggtctggtgccatcatat

SEQ ID NO: 326044 - DNA, 19 bp, Homo sapiens
  siRNA target sequence for ANTXR2 (NM_058172.1,319-337).
cttggggctagtgtttatt

SEQ ID NO: 326045 - DNA, 19 bp, Homo sapiens
  siRNA target sequence for ANTXR2 (NM_058172.1,323-341).
gggctagtgtttattgtgt

SEQ ID NO: 326046 - DNA, 19 bp, Homo sapiens
  siRNA target sequence for ANTXR2 (NM_058172.1,324-342).
ggctagtgtttattgtgtt

SEQ ID NO: 326047 - DNA, 19 bp, Homo sapiens
  siRNA target sequence for ANTXR2 (NM_058172.1,338-356).
gtgttggtgtccttgattt

SEQ ID NO: 326048 - DNA, 19 bp, Homo sapiens
  siRNA target sequence for ANTXR2 (NM_058172.1,396-414).
gcaagttttccctgtcaaa

SEQ ID NO: 326049 - DNA, 19 bp, Homo sapiens
  siRNA target sequence for ANTXR2 (NM_058172.1,405-423).
ccctgtcaaaggtggattt

SEQ ID NO: 326050 - DNA, 19 bp, Homo sapiens
  siRNA target sequence for ANTXR2 (NM_058172.1,407-425).
ctgtcaaaggtggatttca

SEQ ID NO: 326051 - DNA, 19 bp, Homo sapiens
  siRNA target sequence for ANTXR2 (NM_058172.1,416-434).
gtggatttcaggctcttaa

SEQ ID NO: 326052 - DNA, 19 bp, Homo sapiens
  siRNA target sequence for ANTXR2 (NM_058172.1,427-445).
gctcttaaaggaataatta

SEQ ID NO: 326053 - DNA, 19 bp, Homo sapiens
  siRNA target sequence for ANTXR2 (NM_058172.1,428-446).
ctcttaaaggaataattaa

SEQ ID NO: 326054 - DNA, 19 bp, Homo sapiens
  siRNA target sequence for ANTXR2 (NM_058172.1,457-475).
gctcagtcatgtactgaaa

SEQ ID NO: 326055 - DNA, 19 bp, Homo sapiens
  siRNA target sequence for ANTXR2 (NM_058172.1,507-525).
gggggaggaatttcagatt

SEQ ID NO: 326056 - DNA, 19 bp, Homo sapiens
  siRNA target sequence for ANTXR2 (NM_058172.1,585-603).
cactgtaaatgaaacatat

SEQ ID NO: 326057 - DNA, 19 bp, Homo sapiens
  siRNA target sequence for ANTXR2 (NM_058172.1,599-617).
catatacaacgagtgtaaa

SEQ ID NO: 326058 - DNA, 19 bp, Homo sapiens
  siRNA target sequence for ANTXR2 (NM_058172.1,609-627).
gagtgtaaaaccagtaagt

SEQ ID NO: 326059 - DNA, 19 bp, Homo sapiens
  siRNA target sequence for ANTXR2 (NM_058172.1,611-629).
gtgtaaaaccagtaagtgt

SEQ ID NO: 326060 - DNA, 19 bp, Homo sapiens
  siRNA target sequence for ANTXR2 (NM_058172.1,620-638).
cagtaagtgtacagcttaa

SEQ ID NO: 326061 - DNA, 19 bp, Homo sapiens
  siRNA target sequence for ARL6IP (NM_015161.1,156-174).
gatgctgatggctgataaa

SEQ ID NO: 326062 - DNA, 19 bp, Homo sapiens
  siRNA target sequence for ARL6IP (NM_015161.1,240-258).
gattatctactatctagat

SEQ ID NO: 326063 - DNA, 19 bp, Homo sapiens
  siRNA target sequence for ARL6IP (NM_015161.1,249-267).
ctatctagatccatctgtt

SEQ ID NO: 326064 - DNA, 19 bp, Homo sapiens
  siRNA target sequence for ARL6IP (NM_015161.1,323-341).
ccattctagcgcctagaat

SEQ ID NO: 326065 - DNA, 19 bp, Homo sapiens
  siRNA target sequence for ARL6IP (NM_015161.1,324-342).
cattctagcgcctagaatt

SEQ ID NO: 326066 - DNA, 19 bp, Homo sapiens
  siRNA target sequence for ARL6IP (NM_015161.1,375-393).
gcaaagattccatgaaatt

SEQ ID NO: 326067 - DNA, 19 bp, Homo sapiens
  siRNA target sequence for ARL6IP (NM_015161.1,463-481).
gaaaaacctaagatgtact

SEQ ID NO: 326068 - DNA, 19 bp, Homo sapiens
  siRNA target sequence for ARL6IP (NM_015161.1,515-533).
cttgggtgggacaacaagt

SEQ ID NO: 326069 - DNA, 19 bp, Homo sapiens
  siRNA target sequence for ARL6IP (NM_015161.1,555-573).
cctgatagtgacttcctta

SEQ ID NO: 326070 - DNA, 19 bp, Homo sapiens
  siRNA target sequence for ARL6IP (NM_015161.1,558-576).
gatagtgacttccttacta

SEQ ID NO: 326071 - DNA, 19 bp, Homo sapiens
  siRNA target sequence for ARL6IP (NM_015161.1,564-582).
gacttccttactattgctt

SEQ ID NO: 326072 - DNA, 19 bp, Homo sapiens
  siRNA target sequence for ARL6IP (NM_015161.1,598-616).
catggaatcattttgaagt

SEQ ID NO: 326073 - DNA, 19 bp, Homo sapiens
  siRNA target sequence for BM88 (NM_016564.2,526-544).
ggtcctgtgagaacttcaa

SEQ ID NO: 326074 - DNA, 19 bp, Homo sapiens
  siRNA target sequence for BM88 (NM_016564.2,577-595).
cagccatagccctgattct

SEQ ID NO: 326075 - DNA, 19 bp, Homo sapiens
  siRNA target sequence for C11orf15 (NM_020644.1,240-258).
cgaggatgtcagatgtaaa

SEQ ID NO: 326076 - DNA, 19 bp, Homo sapiens
  siRNA target sequence for C11orf15 (NM_020644.1,247-265).
gtcagatgtaaatgtatct

SEQ ID NO: 326077 - DNA, 19 bp, Homo sapiens
  siRNA target sequence for C11orf15 (NM_020644.1,260-278).
gtatctgccctccctataa

SEQ ID NO: 326078 - DNA, 19 bp, Homo sapiens
  siRNA target sequence for C11orf15 (NM_020644.1,287-305).
ctgggcatatttataataa

SEQ ID NO: 326079 - DNA, 19 bp, Homo sapiens
  siRNA target sequence for C11orf15 (NM_020644.1,289-307).
gggcatatttataataaga

SEQ ID NO: 326080 - DNA, 19 bp, Homo sapiens
  siRNA target sequence for C11orf15 (NM_020644.1,386-404).
gtctacgctgtgaatgcaa

SEQ ID NO: 326081 - DNA, 19 bp, Homo sapiens
  siRNA target sequence for C11orf15 (NM_020644.1,388-406).
ctacgctgtgaatgcaaat

SEQ ID NO: 326082 - DNA, 19 bp, Homo sapiens
  siRNA target sequence for C11orf15 (NM_020644.1,426-444).
cacaatcaaggttaccatt

SEQ ID NO: 326083 - DNA, 19 bp, Homo sapiens
  siRNA target sequence for C11orf15 (NM_020644.1,428-446).
caatcaaggttaccattat

SEQ ID NO: 326084 - DNA, 19 bp, Homo sapiens
  siRNA target sequence for C11orf15 (NM_020644.1,472-490).
ctacttctgtacatggtat

SEQ ID NO: 326085 - DNA, 19 bp, Homo sapiens
  siRNA target sequence for C11orf15 (NM_020644.1,480-498).
gtacatggtatatcttact

SEQ ID NO: 326086 - DNA, 19 bp, Homo sapiens
  siRNA target sequence for C11orf15 (NM_020644.1,535-553).
catgcacagttgatacaga

SEQ ID NO: 326087 - DNA, 19 bp, Homo sapiens
  siRNA target sequence for C11orf15 (NM_020644.1,576-594).
ccagccttttgcaaatgca

SEQ ID NO: 326088 - DNA, 19 bp, Homo sapiens
  siRNA target sequence for C11orf15 (NM_020644.1,678-696).
ccaagagcagcgaaagtct

SEQ ID NO: 326089 - DNA, 19 bp, Homo sapiens
  siRNA target sequence for C19orf4 (NM_012109.1,377-395).
gcgtggaagcctatgtgaa

SEQ ID NO: 326090 - DNA, 19 bp, Homo sapiens
  siRNA target sequence for C19orf4 (NM_012109.1,566-584).
ccacctggacatactactt

SEQ ID NO: 326091 - DNA, 19 bp, Homo sapiens
  siRNA target sequence for C1orf8 (NM_004872.3,345-363).
ccgcttcggctgaagcatt

SEQ ID NO: 326092 - DNA, 19 bp, Homo sapiens
  siRNA target sequence for C1orf8 (NM_004872.3,346-364).
cgcttcggctgaagcattt

SEQ ID NO: 326093 - DNA, 19 bp, Homo sapiens
  siRNA target sequence for C1orf8 (NM_004872.3,348-366).
cttcggctgaagcatttga

SEQ ID NO: 326094 - DNA, 19 bp, Homo sapiens
  siRNA target sequence for C1orf8 (NM_004872.3,435-453).
ctaaggaagaggagttgta

SEQ ID NO: 326095 - DNA, 19 bp, Homo sapiens
  siRNA target sequence for C1orf8 (NM_004872.3,499-517).
ggatgatggaattgactta

SEQ ID NO: 326096 - DNA, 19 bp, Homo sapiens
  siRNA target sequence for C1orf8 (NM_004872.3,500-518).
gatgatggaattgacttaa

SEQ ID NO: 326097 - DNA, 19 bp, Homo sapiens
  siRNA target sequence for C1orf8 (NM_004872.3,512-530).
gacttaaatcgaactaaat

SEQ ID NO: 326098 - DNA, 19 bp, Homo sapiens
  siRNA target sequence for C1orf8 (NM_004872.3,522-540).
gaactaaattggaatgtga

SEQ ID NO: 326099 - DNA, 19 bp, Homo sapiens
  siRNA target sequence for C1orf8 (NM_004872.3,543-561).
ctgcatgtacagaagcata

SEQ ID NO: 326100 - DNA, 19 bp, Homo sapiens
  siRNA target sequence for C1orf8 (NM_004872.3,667-685).
cctactctttcctctaact

SEQ ID NO: 326101 - DNA, 19 bp, Homo sapiens
  siRNA target sequence for C1orf8 (NM_004872.3,696-714).
cattctggagtgacatgat

SEQ ID NO: 326102 - DNA, 19 bp, Homo sapiens
  siRNA target sequence for C1orf8 (NM_004872.3,718-736).
ctccgcacagagcttcata

SEQ ID NO: 326103 - DNA, 19 bp, Homo sapiens
  siRNA target sequence for C1orf8 (NM_004872.3,765-783).
ccgatgacggaaaaatagt

SEQ ID NO: 326104 - DNA, 19 bp, Homo sapiens
  siRNA target sequence for C1orf8 (NM_004872.3,766-784).
cgatgacggaaaaatagtt

SEQ ID NO: 326105 - DNA, 19 bp, Homo sapiens
  siRNA target sequence for C1orf8 (NM_004872.3,827-845).
gagcaggagcctacaaatt

SEQ ID NO: 326106 - DNA, 19 bp, Homo sapiens
  siRNA target sequence for C1orf8 (NM_004872.3,830-848).
caggagcctacaaatttga

SEQ ID NO: 326107 - DNA, 19 bp, Homo sapiens
  siRNA target sequence for C1orf8 (NM_004872.3,894-912).
cacaagcgcacaggaattt

SEQ ID NO: 326108 - DNA, 19 bp, Homo sapiens
  siRNA target sequence for C1orf8 (NM_004872.3,965-983).
gggtggattttaactacaa

SEQ ID NO: 326109 - DNA, 19 bp, Homo sapiens
  siRNA target sequence for C1orf8 (NM_004872.3,967-985).
gtggattttaactacaact

SEQ ID NO: 326110 - DNA, 19 bp, Homo sapiens
  siRNA target sequence for C1orf8 (NM_004872.3,989-1007).
gtcctctcggtgatggtat

SEQ ID NO: 326111 - DNA, 19 bp, Homo sapiens
  siRNA target sequence for C1orf8 (NM_004872.3,1136-1154).
cttgtggttgttagatcta

SEQ ID NO: 326112 - DNA, 19 bp, Homo sapiens
  siRNA target sequence for C1orf8 (NM_004872.3,1141-1159).
ggttgttagatctaaaact

SEQ ID NO: 326113 - DNA, 19 bp, Homo sapiens
  siRNA target sequence for C1orf8 (NM_004872.3,1176-1194).
cagggcctctacctacaaa

SEQ ID NO: 326114 - DNA, 19 bp, Homo sapiens
  siRNA target sequence for C1orf8 (NM_004872.3,1182-1200).
ctctacctacaaaagtgaa

SEQ ID NO: 326115 - DNA, 19 bp, Homo sapiens
  siRNA target sequence for C1orf8 (NM_004872.3,1198-1216).
gaatcttgctcattctgaa

SEQ ID NO: 326116 - DNA, 19 bp, Homo sapiens
  siRNA target sequence for C20orf103 (NM_012261.2,272-290).
cgagttctcctgatgttgt

SEQ ID NO: 326117 - DNA, 19 bp, Homo sapiens
  siRNA target sequence for C20orf103 (NM_012261.2,293-311).
catacaatggctcaaatca

SEQ ID NO: 326118 - DNA, 19 bp, Homo sapiens
  siRNA target sequence for C20orf103 (NM_012261.2,408-426).
cagagtttgcagccaaatt

SEQ ID NO: 326119 - DNA, 19 bp, Homo sapiens
  siRNA target sequence for C20orf103 (NM_012261.2,412-430).
gtttgcagccaaatttatt

SEQ ID NO: 326120 - DNA, 19 bp, Homo sapiens
  siRNA target sequence for C20orf103 (NM_012261.2,559-577).
ggtggatcgcgcatatgca

SEQ ID NO: 326121 - DNA, 19 bp, Homo sapiens
  siRNA target sequence for C20orf103 (NM_012261.2,566-584).
cgcgcatatgcactcaaaa

SEQ ID NO: 326122 - DNA, 19 bp, Homo sapiens
  siRNA target sequence for C20orf103 (NM_012261.2,567-585).
gcgcatatgcactcaaaat

SEQ ID NO: 326123 - DNA, 19 bp, Homo sapiens
  siRNA target sequence for C20orf103 (NM_012261.2,770-788).
gagtgtcaagctcaacaaa

SEQ ID NO: 326124 - DNA, 19 bp, Homo sapiens
  siRNA target sequence for C20orf103 (NM_012261.2,843-861).
cggtccacatccaaccttt

SEQ ID NO: 326125 - DNA, 19 bp, Homo sapiens
  siRNA target sequence for C20orf103 (NM_012261.2,844-862).
ggtccacatccaacctttt

SEQ ID NO: 326126 - DNA, 19 bp, Homo sapiens
  siRNA target sequence for C20orf103 (NM_012261.2,848-866).
cacatccaaccttttgaca

SEQ ID NO: 326127 - DNA, 19 bp, Homo sapiens
  siRNA target sequence for C20orf103 (NM_012261.2,998-1016).
cacgtccaccacaaaatga

SEQ ID NO: 326128 - DNA, 19 bp, Homo sapiens
  siRNA target sequence for C20orf103 (NM_012261.2,1000-1018).
cgtccaccacaaaatgact

SEQ ID NO: 326129 - DNA, 19 bp, Homo sapiens
  siRNA target sequence for C20orf165 (NM_080608.3,247-265).
gagacactacggaaggaat

SEQ ID NO: 326130 - DNA, 19 bp, Homo sapiens
  siRNA target sequence for C20orf165 (NM_080608.3,269-287).
gccgaaactgccacaaatt

SEQ ID NO: 326131 - DNA, 19 bp, Homo sapiens
  siRNA target sequence for C20orf165 (NM_080608.3,548-566).
ccgctcaagctttcatgat

SEQ ID NO: 326132 - DNA, 19 bp, Homo sapiens
  siRNA target sequence for C20orf165 (NM_080608.3,645-663).
gcccctagtgagatctaaa

SEQ ID NO: 326133 - DNA, 19 bp, Homo sapiens
  siRNA target sequence for C20orf39 (NM_024893.1,693-711).
caagaggaatggtttaatt

SEQ ID NO: 326134 - DNA, 19 bp, Homo sapiens
  siRNA target sequence for C20orf39 (NM_024893.1,988-1006).
cggtcgcccaccaaagaca

SEQ ID NO: 326135 - DNA, 19 bp, Homo sapiens
  siRNA target sequence for C20orf39 (NM_024893.1,1019-1037).
cggatgggaagttcattga

SEQ ID NO: 326136 - DNA, 19 bp, Homo sapiens
  siRNA target sequence for C20orf39 (NM_024893.1,1041-1059).
ctcagctgatgacataaaa

SEQ ID NO: 326137 - DNA, 19 bp, Homo sapiens
  siRNA target sequence for C20orf39 (NM_024893.1,1133-1151).
cagagagtgaggacaattt

SEQ ID NO: 326138 - DNA, 19 bp, Homo sapiens
  siRNA target sequence for C20orf46 (NM_018354.1,959-977).
gatcccagcgggatgatct

SEQ ID NO: 326139 - DNA, 19 bp, Homo sapiens
  siRNA target sequence for C20orf46 (NM_018354.1,1059-1077).
cctggtgagtgggattctt

SEQ ID NO: 326140 - DNA, 19 bp, Homo sapiens
  siRNA target sequence for C20orf46 (NM_018354.1,1104-1122).
ccgtgaggctcgagtcaat

SEQ ID NO: 326141 - DNA, 19 bp, Homo sapiens
  siRNA target sequence for C20orf46 (NM_018354.1,1150-1168).
gaacgactggagatgtact

SEQ ID NO: 326142 - DNA, 19 bp, Homo sapiens
  siRNA target sequence for C20orf46 (NM_018354.1,1328-1346).
cctacggctccattaacct

SEQ ID NO: 326143 - DNA, 19 bp, Homo sapiens
  siRNA target sequence for C20orf52 (NM_080748.1,205-223).
ctgcttcgaccgtgtcaaa

SEQ ID NO: 326144 - DNA, 19 bp, Homo sapiens
  siRNA target sequence for C20orf52 (NM_080748.1,207-225).
gcttcgaccgtgtcaaaat

SEQ ID NO: 326145 - DNA, 19 bp, Homo sapiens
  siRNA target sequence for C20orf52 (NM_080748.1,266-284).
gcgctcttcggcacctttt

SEQ ID NO: 326146 - DNA, 19 bp, Homo sapiens
  siRNA target sequence for C20orf52 (NM_080748.1,356-374).
ggcacctttggcacattca

SEQ ID NO: 326147 - DNA, 19 bp, Homo sapiens
  siRNA target sequence for C20orf52 (NM_080748.1,357-375).
gcacctttggcacattcat

SEQ ID NO: 326148 - DNA, 19 bp, Homo sapiens
  siRNA target sequence for C20orf54 (NM_033409.2,451-469).
ccgaagtgcccatcatctt

SEQ ID NO: 326149 - DNA, 19 bp, Homo sapiens
  siRNA target sequence for C20orf54 (NM_033409.2,740-758).
cgtcaatgtcactgagata

SEQ ID NO: 326150 - DNA, 19 bp, Homo sapiens
  siRNA target sequence for C20orf54 (NM_033409.2,743-761).
caatgtcactgagatatca

SEQ ID NO: 326151 - DNA, 19 bp, Homo sapiens
  siRNA target sequence for C20orf54 (NM_033409.2,833-851).
cgccctccccggaatggaa

SEQ ID NO: 326152 - DNA, 19 bp, Homo sapiens
  siRNA target sequence for C20orf54 (NM_033409.2,941-959).
ctgcctcgtggcgttcttt

SEQ ID NO: 326153 - DNA, 19 bp, Homo sapiens
  siRNA target sequence for C20orf54 (NM_033409.2,943-961).
gcctcgtggcgttctttgt

SEQ ID NO: 326154 - DNA, 19 bp, Homo sapiens
  siRNA target sequence for C20orf54 (NM_033409.2,1357-1375).
gctttgggggctacaacat

SEQ ID NO: 326155 - DNA, 19 bp, Homo sapiens
  siRNA target sequence for C20orf75 (NM_152611.2,1009-1027).
ctgtcgccacacacatctt

SEQ ID NO: 326156 - DNA, 19 bp, Homo sapiens
  siRNA target sequence for C20orf75 (NM_152611.2,1013-1031).
cgccacacacatctttcaa

SEQ ID NO: 326157 - DNA, 19 bp, Homo sapiens
  siRNA target sequence for C20orf75 (NM_152611.2,1062-1080).
cagaactgcaacttgagtt

SEQ ID NO: 326158 - DNA, 19 bp, Homo sapiens
  siRNA target sequence for C20orf75 (NM_152611.2,1168-1186).
ggctcctcacggatgcaaa

SEQ ID NO: 326159 - DNA, 19 bp, Homo sapiens
  siRNA target sequence for C20orf75 (NM_152611.2,1172-1190).
cctcacggatgcaaagaga

SEQ ID NO: 326160 - DNA, 19 bp, Homo sapiens
  siRNA target sequence for C20orf75 (NM_152611.2,1201-1219).
gcagggcagcagacactat

SEQ ID NO: 326161 - DNA, 19 bp, Homo sapiens
  siRNA target sequence for C20orf75 (NM_152611.2,1602-1620).
gtccttgagcctgatatct

SEQ ID NO: 326162 - DNA, 19 bp, Homo sapiens
  siRNA target sequence for C20orf75 (NM_152611.2,1731-1749).
gcccccaacccgagtcttt

SEQ ID NO: 326163 - DNA, 19 bp, Homo sapiens
  siRNA target sequence for C20orf75 (NM_152611.2,2077-2095).
cggtggtgggggtcatcta

SEQ ID NO: 326164 - DNA, 19 bp, Homo sapiens
  siRNA target sequence for C21orf61 (NM_178817.2,206-224).
gcctctgccccatactaca

SEQ ID NO: 326165 - DNA, 19 bp, Homo sapiens
  siRNA target sequence for C21orf61 (NM_178817.2,277-295).
gctgaaagcccacaaacat

SEQ ID NO: 326166 - DNA, 19 bp, Homo sapiens
  siRNA target sequence for C21orf61 (NM_178817.2,278-296).
ctgaaagcccacaaacatt

SEQ ID NO: 326167 - DNA, 19 bp, Homo sapiens
  siRNA target sequence for C21orf61 (NM_178817.2,678-696).
gagacaggacctctcaatt

SEQ ID NO: 326168 - DNA, 19 bp, Homo sapiens
  siRNA target sequence for C22orf20 (NM_025225.2,371-389).
gcaggtcctctcagatctt

SEQ ID NO: 326169 - DNA, 19 bp, Homo sapiens
  siRNA target sequence for C22orf20 (NM_025225.2,497-515).
gctcatctccggcaaaata

SEQ ID NO: 326170 - DNA, 19 bp, Homo sapiens
  siRNA target sequence for C22orf20 (NM_025225.2,551-569).
cgttctggtgtctgacttt

SEQ ID NO: 326171 - DNA, 19 bp, Homo sapiens
  siRNA target sequence for C22orf20 (NM_025225.2,585-603).
gtcgtggatgccttggtat

SEQ ID NO: 326172 - DNA, 19 bp, Homo sapiens
  siRNA target sequence for C22orf20 (NM_025225.2,686-704).
caacgtacccttcattgat

SEQ ID NO: 326173 - DNA, 19 bp, Homo sapiens
  siRNA target sequence for C22orf20 (NM_025225.2,764-782).
caagtccacgaactttctt

SEQ ID NO: 326174 - DNA, 19 bp, Homo sapiens
  siRNA target sequence for C22orf20 (NM_025225.2,833-851).
ccttctctcgagagctttt

SEQ ID NO: 326175 - DNA, 19 bp, Homo sapiens
  siRNA target sequence for C22orf20 (NM_025225.2,881-899).
gatatgccttcgaggatat

SEQ ID NO: 326176 - DNA, 19 bp, Homo sapiens
  siRNA target sequence for C22orf20 (NM_025225.2,886-904).
gccttcgaggatatttgga

SEQ ID NO: 326177 - DNA, 19 bp, Homo sapiens
  siRNA target sequence for C22orf20 (NM_025225.2,887-905).
ccttcgaggatatttggat

SEQ ID NO: 326178 - DNA, 19 bp, Homo sapiens
  siRNA target sequence for C22orf20 (NM_025225.2,1182-1200).
ggatacatgagcaagattt

SEQ ID NO: 326179 - DNA, 19 bp, Homo sapiens
  siRNA target sequence for C22orf20 (NM_025225.2,1205-1223).
cttgctacccattaggata

SEQ ID NO: 326180 - DNA, 19 bp, Homo sapiens
  siRNA target sequence for C22orf20 (NM_025225.2,1209-1227).
ctacccattaggataatgt

SEQ ID NO: 326181 - DNA, 19 bp, Homo sapiens
  siRNA target sequence for C22orf20 (NM_025225.2,1525-1543).
ggtccagcctgaacttctt

SEQ ID NO: 326182 - DNA, 19 bp, Homo sapiens
  siRNA target sequence for C22orf20 (NM_025225.2,1591-1609).
ccagtttttcactagagaa

SEQ ID NO: 326183 - DNA, 19 bp, Homo sapiens
  siRNA target sequence for C22orf5 (NM_012264.2,347-365).
catgccaccagatctacat

SEQ ID NO: 326184 - DNA, 19 bp, Homo sapiens
  siRNA target sequence for C22orf5 (NM_012264.2,544-562).
ctgagcctgtgctatgagt

SEQ ID NO: 326185 - DNA, 19 bp, Homo sapiens
  siRNA target sequence for C22orf5 (NM_012264.2,588-606).
gtcggagatcagaggaaaa

SEQ ID NO: 326186 - DNA, 19 bp, Homo sapiens
  siRNA target sequence for C22orf5 (NM_012264.2,641-659).
gcctctggggaaagactta

SEQ ID NO: 326187 - DNA, 19 bp, Homo sapiens
  siRNA target sequence for C22orf5 (NM_012264.2,642-660).
cctctggggaaagacttat

SEQ ID NO: 326188 - DNA, 19 bp, Homo sapiens
  siRNA target sequence for C22orf5 (NM_012264.2,643-661).
ctctggggaaagacttatt

SEQ ID NO: 326189 - DNA, 19 bp, Homo sapiens
  siRNA target sequence for C22orf5 (NM_012264.2,647-665).
ggggaaagacttattccat

SEQ ID NO: 326190 - DNA, 19 bp, Homo sapiens
  siRNA target sequence for C22orf5 (NM_012264.2,656-674).
cttattccatcggatttct

SEQ ID NO: 326191 - DNA, 19 bp, Homo sapiens
  siRNA target sequence for C22orf5 (NM_012264.2,980-998).
gtggggccatccccaaaat

SEQ ID NO: 326192 - DNA, 19 bp, Homo sapiens
  siRNA target sequence for C22orf5 (NM_012264.2,1150-1168).
cgctgtgcccccatgaaga

SEQ ID NO: 326193 - DNA, 19 bp, Homo sapiens
  siRNA target sequence for C3orf4 (NM_019895.1,889-907).
ccgttttgctacagcattt

SEQ ID NO: 326194 - DNA, 19 bp, Homo sapiens
  siRNA target sequence for C3orf4 (NM_019895.1,966-984).
cagacttctggtatgaata

SEQ ID NO: 326195 - DNA, 19 bp, Homo sapiens
  siRNA target sequence for C3orf4 (NM_019895.1,970-988).
cttctggtatgaatatcga

SEQ ID NO: 326196 - DNA, 19 bp, Homo sapiens
  siRNA target sequence for C3orf4 (NM_019895.1,986-1004).
cgaagtccagttcaagaaa

SEQ ID NO: 326197 - DNA, 19 bp, Homo sapiens
  siRNA target sequence for C3orf4 (NM_019895.1,1001-1019).
gaaaattccagtgatttga

SEQ ID NO: 326198 - DNA, 19 bp, Homo sapiens
  siRNA target sequence for C3orf4 (NM_019895.1,1030-1048).
ctgggatgaattcattagt

SEQ ID NO: 326199 - DNA, 19 bp, Homo sapiens
  siRNA target sequence for C3orf4 (NM_019895.1,1032-1050).
gggatgaattcattagtga

SEQ ID NO: 326200 - DNA, 19 bp, Homo sapiens
  siRNA target sequence for C3orf4 (NM_019895.1,1122-1140).
gtatcaccatacccaaaaa

SEQ ID NO: 326201 - DNA, 19 bp, Homo sapiens
  siRNA target sequence for C3orf4 (NM_019895.1,1135-1153).
caaaaacatgcattggtat

SEQ ID NO: 326202 - DNA, 19 bp, Homo sapiens
  siRNA target sequence for C3orf4 (NM_019895.1,1167-1185).
ggacagagtcatttgatgt

SEQ ID NO: 326203 - DNA, 19 bp, Homo sapiens
  siRNA target sequence for C3orf4 (NM_019895.1,1176-1194).
catttgatgtggtcacaaa

SEQ ID NO: 326204 - DNA, 19 bp, Homo sapiens
  siRNA target sequence for C3orf4 (NM_019895.1,1209-1227).
cactaactgagcagttcat

SEQ ID NO: 326205 - DNA, 19 bp, Homo sapiens
  siRNA target sequence for C3orf4 (NM_019895.1,1252-1270).
ccacaatagcgggattgat

SEQ ID NO: 326206 - DNA, 19 bp, Homo sapiens
  siRNA target sequence for C3orf4 (NM_019895.1,1291-1309).
gcgttgccagttcctttta

SEQ ID NO: 326207 - DNA, 19 bp, Homo sapiens
  siRNA target sequence for C3orf4 (NM_019895.1,1296-1314).
gccagttccttttaccttt

SEQ ID NO: 326208 - DNA, 19 bp, Homo sapiens
  siRNA target sequence for C3orf4 (NM_019895.1,1366-1384).
catttgccgaagcttatat

SEQ ID NO: 326209 - DNA, 19 bp, Homo sapiens
  siRNA target sequence for C3orf4 (NM_019895.1,1438-1456).
ctcagtaagttgttatgtt

SEQ ID NO: 326210 - DNA, 19 bp, Homo sapiens
  siRNA target sequence for C3orf4 (NM_019895.1,1449-1467).
gttatgttgctggaattga

SEQ ID NO: 326211 - DNA, 19 bp, Homo sapiens
  siRNA target sequence for C3orf4 (NM_019895.1,1502-1520).
gtatccggtgaatttggat

SEQ ID NO: 326212 - DNA, 19 bp, Homo sapiens
  siRNA target sequence for C3orf4 (NM_019895.1,1545-1563).
ctgctcccttacagttcat

SEQ ID NO: 326213 - DNA, 19 bp, Homo sapiens
  siRNA target sequence for C3orf4 (NM_019895.1,1592-1610).
cacaccaaccggaaagagt

SEQ ID NO: 326214 - DNA, 19 bp, Homo sapiens
  siRNA target sequence for C3orf4 (NM_019895.1,1601-1619).
cggaaagagtacaccttaa

SEQ ID NO: 326215 - DNA, 19 bp, Homo sapiens
  siRNA target sequence for C3orf4 (NM_019895.1,1602-1620).
ggaaagagtacaccttaat

SEQ ID NO: 326216 - DNA, 19 bp, Homo sapiens
  siRNA target sequence for C3orf4 (NM_019895.1,1615-1633).
cttaatgaaggcatatcgt

SEQ ID NO: 326217 - DNA, 19 bp, Homo sapiens
  siRNA target sequence for C6orf31 (NM_030651.2,665-683).
ggtgggcacgccatatgca

SEQ ID NO: 326218 - DNA, 19 bp, Homo sapiens
  siRNA target sequence for C6orf31 (NM_030651.2,976-994).
ccatcctcaccgtagtcat

SEQ ID NO: 326219 - DNA, 19 bp, Homo sapiens
  siRNA target sequence for C6orf31 (NM_030651.2,981-999).
ctcaccgtagtcatcatca

SEQ ID NO: 326220 - DNA, 19 bp, Homo sapiens
  siRNA target sequence for C6orf31 (NM_030651.2,1006-1024).
cgcagcaccacgagaacta

SEQ ID NO: 326221 - DNA, 19 bp, Homo sapiens
  siRNA target sequence for C6orf31 (NM_030651.2,1008-1026).
cagcaccacgagaactact

SEQ ID NO: 326222 - DNA, 19 bp, Homo sapiens
  siRNA target sequence for CAV2 (NM_001233.3,415-433).
cggacgtacagctcttcat

SEQ ID NO: 326223 - DNA, 19 bp, Homo sapiens
  siRNA target sequence for CAV2 (NM_001233.3,523-541).
ggctcaactcgcatctcaa

SEQ ID NO: 326224 - DNA, 19 bp, Homo sapiens
  siRNA target sequence for CAV2 (NM_001233.3,577-595).
ctacgcactcctttgacaa

SEQ ID NO: 326225 - DNA, 19 bp, Homo sapiens
  siRNA target sequence for CAV2 (NM_001233.3,610-628).
gccatgccctctttgaaat

SEQ ID NO: 326226 - DNA, 19 bp, Homo sapiens
  siRNA target sequence for CAV2 (NM_001233.3,631-649).
gcaaatacgtaatgtacaa

SEQ ID NO: 326227 - DNA, 19 bp, Homo sapiens
  siRNA target sequence for CAV2 (NM_001233.3,834-852).
gtaggacgatgcttctctt

SEQ ID NO: 326228 - DNA, 19 bp, Homo sapiens
  siRNA target sequence for CAV2 (NM_198212.1,711-729).
ctggagattgggatactgt

SEQ ID NO: 326229 - DNA, 19 bp, Homo sapiens
  siRNA target sequence for CDC91L1 (NM_080476.3,66-84).
cagtctggccgagttcatt

SEQ ID NO: 326230 - DNA, 19 bp, Homo sapiens
  siRNA target sequence for CDC91L1 (NM_080476.3,159-177).
gggagtatctccgtattct

SEQ ID NO: 326231 - DNA, 19 bp, Homo sapiens
  siRNA target sequence for CDC91L1 (NM_080476.3,292-310).
gcaatccaggacttcaata

SEQ ID NO: 326232 - DNA, 19 bp, Homo sapiens
  siRNA target sequence for CDC91L1 (NM_080476.3,362-380).
cagatgtggccgaactcat

SEQ ID NO: 326233 - DNA, 19 bp, Homo sapiens
  siRNA target sequence for CDC91L1 (NM_080476.3,389-407).
ctatggaaatgcgttacat

SEQ ID NO: 326234 - DNA, 19 bp, Homo sapiens
  siRNA target sequence for CDC91L1 (NM_080476.3,399-417).
gcgttacatccctttgaaa

SEQ ID NO: 326235 - DNA, 19 bp, Homo sapiens
  siRNA target sequence for CDC91L1 (NM_080476.3,401-419).
gttacatccctttgaaagt

SEQ ID NO: 326236 - DNA, 19 bp, Homo sapiens
  siRNA target sequence for CDC91L1 (NM_080476.3,423-441).
cctgttctatctcttaaat

SEQ ID NO: 326237 - DNA, 19 bp, Homo sapiens
  siRNA target sequence for CDC91L1 (NM_080476.3,442-460).
ccttacacgattttgtctt

SEQ ID NO: 326238 - DNA, 19 bp, Homo sapiens
  siRNA target sequence for CDC91L1 (NM_080476.3,447-465).
cacgattttgtcttgtgtt

SEQ ID NO: 326239 - DNA, 19 bp, Homo sapiens
  siRNA target sequence for CDC91L1 (NM_080476.3,507-525).
cttcattttgactacgata

SEQ ID NO: 326240 - DNA, 19 bp, Homo sapiens
  siRNA target sequence for CDC91L1 (NM_080476.3,510-528).
cattttgactacgataaaa

SEQ ID NO: 326241 - DNA, 19 bp, Homo sapiens
  siRNA target sequence for CDC91L1 (NM_080476.3,582-600).
gtacccactcaccttgttt

SEQ ID NO: 326242 - DNA, 19 bp, Homo sapiens
  siRNA target sequence for CDC91L1 (NM_080476.3,621-639).
cctccagcggcagtacata

SEQ ID NO: 326243 - DNA, 19 bp, Homo sapiens
  siRNA target sequence for CDC91L1 (NM_080476.3,630-648).
gcagtacatacctgtgaaa

SEQ ID NO: 326244 - DNA, 19 bp, Homo sapiens
  siRNA target sequence for CDC91L1 (NM_080476.3,631-649).
cagtacatacctgtgaaaa

SEQ ID NO: 326245 - DNA, 19 bp, Homo sapiens
  siRNA target sequence for CDC91L1 (NM_080476.3,681-699).
ggagtatgccatgatgtat

SEQ ID NO: 326246 - DNA, 19 bp, Homo sapiens
  siRNA target sequence for CDC91L1 (NM_080476.3,703-721).
ggaagcctagtggtaatca

SEQ ID NO: 326247 - DNA, 19 bp, Homo sapiens
  siRNA target sequence for CDC91L1 (NM_080476.3,704-722).
gaagcctagtggtaatcat

SEQ ID NO: 326248 - DNA, 19 bp, Homo sapiens
  siRNA target sequence for CDC91L1 (NM_080476.3,764-782).
ccgcagtctatggctttat

SEQ ID NO: 326249 - DNA, 19 bp, Homo sapiens
  siRNA target sequence for CDC91L1 (NM_080476.3,765-783).
cgcagtctatggctttata

SEQ ID NO: 326250 - DNA, 19 bp, Homo sapiens
  siRNA target sequence for CDC91L1 (NM_080476.3,767-785).
cagtctatggctttatact

SEQ ID NO: 326251 - DNA, 19 bp, Homo sapiens
  siRNA target sequence for CDC91L1 (NM_080476.3,803-821).
ctccaaacattggtctttt

SEQ ID NO: 326252 - DNA, 19 bp, Homo sapiens
  siRNA target sequence for CDC91L1 (NM_080476.3,902-920).
ccatccccttagccataaa

SEQ ID NO: 326253 - DNA, 19 bp, Homo sapiens
  siRNA target sequence for CDC91L1 (NM_080476.3,960-978).
cgctgtcatcgccatcttt

SEQ ID NO: 326254 - DNA, 19 bp, Homo sapiens
  siRNA target sequence for CDC91L1 (NM_080476.3,961-979).
gctgtcatcgccatcttta

SEQ ID NO: 326255 - DNA, 19 bp, Homo sapiens
  siRNA target sequence for CDC91L1 (NM_080476.3,962-980).
ctgtcatcgccatctttaa

SEQ ID NO: 326256 - DNA, 19 bp, Homo sapiens
  siRNA target sequence for CDC91L1 (NM_080476.3,998-1016).
gggacgtggcgctctacat

SEQ ID NO: 326257 - DNA, 19 bp, Homo sapiens
  siRNA target sequence for CDC91L1 (NM_080476.3,1049-1067).
gattcctgagaaacatctt

SEQ ID NO: 326258 - DNA, 19 bp, Homo sapiens
  siRNA target sequence for CDC91L1 (NM_080476.3,1142-1160).
gtgccaactctaatttctt

SEQ ID NO: 326259 - DNA, 19 bp, Homo sapiens
  siRNA target sequence for CEACAM7 (NM_006890.1,100-118).
gtgcccagaccaatattga

SEQ ID NO: 326260 - DNA, 19 bp, Homo sapiens
  siRNA target sequence for CEACAM7 (NM_006890.1,103-121).
cccagaccaatattgatgt

SEQ ID NO: 326261 - DNA, 19 bp, Homo sapiens
  siRNA target sequence for CEACAM7 (NM_006890.1,155-173).
ccttctagtagtccataat

SEQ ID NO: 326262 - DNA, 19 bp, Homo sapiens
  siRNA target sequence for CEACAM7 (NM_006890.1,219-237).
gtgcatgccaactatcgaa

SEQ ID NO: 326263 - DNA, 19 bp, Homo sapiens
  siRNA target sequence for CEACAM7 (NM_006890.1,221-239).
gcatgccaactatcgaatt

SEQ ID NO: 326264 - DNA, 19 bp, Homo sapiens
  siRNA target sequence for CEACAM7 (NM_006890.1,222-240).
catgccaactatcgaatta

SEQ ID NO: 326265 - DNA, 19 bp, Homo sapiens
  siRNA target sequence for CEACAM7 (NM_006890.1,367-385).
ccctacacgttataaaaga

SEQ ID NO: 326266 - DNA, 19 bp, Homo sapiens
  siRNA target sequence for CEACAM7 (NM_006890.1,368-386).
cctacacgttataaaagaa

SEQ ID NO: 326267 - DNA, 19 bp, Homo sapiens
  siRNA target sequence for CEACAM7 (NM_006890.1,369-387).
ctacacgttataaaagaaa

SEQ ID NO: 326268 - DNA, 19 bp, Homo sapiens
  siRNA target sequence for CEACAM7 (NM_006890.1,409-427).
ccagacaattctacgtatt

SEQ ID NO: 326269 - DNA, 19 bp, Homo sapiens
  siRNA target sequence for CEACAM7 (NM_006890.1,467-485).
caatccggtggagaacaaa

SEQ ID NO: 326270 - DNA, 19 bp, Homo sapiens
  siRNA target sequence for CEACAM7 (NM_006890.1,471-489).
ccggtggagaacaaagata

SEQ ID NO: 326271 - DNA, 19 bp, Homo sapiens
  siRNA target sequence for CEACAM7 (NM_006890.1,473-491).
ggtggagaacaaagatatt

SEQ ID NO: 326272 - DNA, 19 bp, Homo sapiens
  siRNA target sequence for CEACAM7 (NM_006890.1,616-634).
gcgccacaaagaatgacat

SEQ ID NO: 326273 - DNA, 19 bp, Homo sapiens
  siRNA target sequence for CEACAM7 (NM_006890.1,617-635).
cgccacaaagaatgacata

SEQ ID NO: 326274 - DNA, 19 bp, Homo sapiens
  siRNA target sequence for CEACAM7 (NM_006890.1,704-722).
ccgctatgagtcagtacaa

SEQ ID NO: 326275 - DNA, 19 bp, Homo sapiens
  siRNA target sequence for CEACAM7 (NM_006890.1,713-731).
gtcagtacaagcaagttca

SEQ ID NO: 326276 - DNA, 19 bp, Homo sapiens
  siRNA target sequence for CGI-119 (NM_016056.1,95-113).
cgatcgaggacgacttcaa

SEQ ID NO: 326277 - DNA, 19 bp, Homo sapiens
  siRNA target sequence for CGI-119 (NM_016056.1,240-258).
gtctgtacggacatttgta

SEQ ID NO: 326278 - DNA, 19 bp, Homo sapiens
  siRNA target sequence for CGI-119 (NM_016056.1,242-260).
ctgtacggacatttgtaca

SEQ ID NO: 326279 - DNA, 19 bp, Homo sapiens
  siRNA target sequence for CGI-119 (NM_016056.1,262-280).
gagagtcctgccttaattt

SEQ ID NO: 326280 - DNA, 19 bp, Homo sapiens
  siRNA target sequence for CGI-119 (NM_016056.1,294-312).
cggatctctgggtttgatt

SEQ ID NO: 326281 - DNA, 19 bp, Homo sapiens
  siRNA target sequence for CGI-119 (NM_016056.1,398-416).
cagttgttgttactttcta

SEQ ID NO: 326282 - DNA, 19 bp, Homo sapiens
  siRNA target sequence for CGI-119 (NM_016056.1,433-451).
ctgcaagctttcatactga

SEQ ID NO: 326283 - DNA, 19 bp, Homo sapiens
  siRNA target sequence for CGI-119 (NM_016056.1,439-457).
gctttcatactgactacta

SEQ ID NO: 326284 - DNA, 19 bp, Homo sapiens
  siRNA target sequence for CGI-119 (NM_016056.1,478-496).
gtgtatactctacaatcta

SEQ ID NO: 326285 - DNA, 19 bp, Homo sapiens
  siRNA target sequence for CGI-119 (NM_016056.1,498-516).
gaaggatttcagcaaattt

SEQ ID NO: 326286 - DNA, 19 bp, Homo sapiens
  siRNA target sequence for CGI-119 (NM_016056.1,707-725).
gcctctacttggatatcat

SEQ ID NO: 326287 - DNA, 19 bp, Homo sapiens
  siRNA target sequence for CGI-119 (NM_016056.1,711-729).
ctacttggatatcatcaat

SEQ ID NO: 326288 - DNA, 19 bp, Homo sapiens
  siRNA target sequence for CGI-147 (NM_016077.1,131-149).
ccctccaaatccttggtta

SEQ ID NO: 326289 - DNA, 19 bp, Homo sapiens
  siRNA target sequence for CGI-147 (NM_016077.1,132-150).
cctccaaatccttggttat

SEQ ID NO: 326290 - DNA, 19 bp, Homo sapiens
  siRNA target sequence for CGI-147 (NM_016077.1,219-237).
ggagccttcgagtatgctt

SEQ ID NO: 326291 - DNA, 19 bp, Homo sapiens
  siRNA target sequence for CGI-147 (NM_016077.1,220-238).
gagccttcgagtatgcttt

SEQ ID NO: 326292 - DNA, 19 bp, Homo sapiens
  siRNA target sequence for CGI-147 (NM_016077.1,239-257).
gggatgctccccaaaagca

SEQ ID NO: 326293 - DNA, 19 bp, Homo sapiens
  siRNA target sequence for CGI-147 (NM_016077.1,240-258).
ggatgctccccaaaagcaa

SEQ ID NO: 326294 - DNA, 19 bp, Homo sapiens
  siRNA target sequence for CGI-147 (NM_016077.1,312-330).
gcggggagtacaagatgat

SEQ ID NO: 326295 - DNA, 19 bp, Homo sapiens
  siRNA target sequence for CGI-147 (NM_016077.1,313-331).
cggggagtacaagatgatt

SEQ ID NO: 326296 - DNA, 19 bp, Homo sapiens
  siRNA target sequence for CGI-147 (NM_016077.1,315-333).
gggagtacaagatgattct

SEQ ID NO: 326297 - DNA, 19 bp, Homo sapiens
  siRNA target sequence for CGI-147 (NM_016077.1,328-346).
gattcttgtggttcgaaat

SEQ ID NO: 326298 - DNA, 19 bp, Homo sapiens
  siRNA target sequence for CGI-147 (NM_016077.1,332-350).
cttgtggttcgaaatgact

SEQ ID NO: 326299 - DNA, 19 bp, Homo sapiens
  siRNA target sequence for CGI-147 (NM_016077.1,335-353).
gtggttcgaaatgacttaa

SEQ ID NO: 326300 - DNA, 19 bp, Homo sapiens
  siRNA target sequence for CGI-147 (NM_016077.1,338-356).
gttcgaaatgacttaaaga

SEQ ID NO: 326301 - DNA, 19 bp, Homo sapiens
  siRNA target sequence for CGI-147 (NM_016077.1,385-403).
ctctcatgctgctgtttca

SEQ ID NO: 326302 - DNA, 19 bp, Homo sapiens
  siRNA target sequence for CGI-147 (NM_016077.1,415-433).
gattcaaagaagaaatcct

SEQ ID NO: 326303 - DNA, 19 bp, Homo sapiens
  siRNA target sequence for CGI-147 (NM_016077.1,440-458).
ctcaaacaatgggaatact

SEQ ID NO: 326304 - DNA, 19 bp, Homo sapiens
  siRNA target sequence for CGI-147 (NM_016077.1,497-515).
gaaaccctgattgcattat

SEQ ID NO: 326305 - DNA, 19 bp, Homo sapiens
  siRNA target sequence for CGI-147 (NM_016077.1,532-550).
gctgggactgactgtaagt

SEQ ID NO: 326306 - DNA, 19 bp, Homo sapiens
  siRNA target sequence for CGI-147 (NM_016077.1,533-551).
ctgggactgactgtaagtt

SEQ ID NO: 326307 - DNA, 19 bp, Homo sapiens
  siRNA target sequence for CGI-147 (NM_016077.1,615-633).
caggaccagcagacctaat

SEQ ID NO: 326308 - DNA, 19 bp, Homo sapiens
  siRNA target sequence for CGI-147 (NM_016077.1,621-639).
cagcagacctaattgacaa

SEQ ID NO: 326309 - DNA, 19 bp, Homo sapiens
  siRNA target sequence for CGI-147 (NM_016077.1,624-642).
cagacctaattgacaaagt

SEQ ID NO: 326310 - DNA, 19 bp, Homo sapiens
  siRNA target sequence for CGI-147 (NM_016077.1,645-663).
ctggtcacctaaaacttta

SEQ ID NO: 326311 - DNA, 19 bp, Homo sapiens
  siRNA target sequence for CGI-147 (NM_016077.1,647-665).
ggtcacctaaaactttact

SEQ ID NO: 326312 - DNA, 19 bp, Homo sapiens
  siRNA target sequence for CKAP4 (NM_006825.2,398-416).
gcagggcgctcaactttct

SEQ ID NO: 326313 - DNA, 19 bp, Homo sapiens
  siRNA target sequence for CKAP4 (NM_006825.2,401-419).
gggcgctcaactttctctt

SEQ ID NO: 326314 - DNA, 19 bp, Homo sapiens
  siRNA target sequence for CKAP4 (NM_006825.2,617-635).
gctcccaacataaacaaga

SEQ ID NO: 326315 - DNA, 19 bp, Homo sapiens
  siRNA target sequence for CKAP4 (NM_006825.2,703-721).
ctccagaatgagattctca

SEQ ID NO: 326316 - DNA, 19 bp, Homo sapiens
  siRNA target sequence for CKAP4 (NM_006825.2,805-823).
ctgacggagctcaccaaat

SEQ ID NO: 326317 - DNA, 19 bp, Homo sapiens
  siRNA target sequence for CKAP4 (NM_006825.2,1016-1034).
gaagtacccttcagactat

SEQ ID NO: 326318 - DNA, 19 bp, Homo sapiens
  siRNA target sequence for CKAP4 (NM_006825.2,1765-1783).
gttgcatactcggtcaaaa

SEQ ID NO: 326319 - DNA, 19 bp, Homo sapiens
  siRNA target sequence for CKAP4 (NM_006825.2,1769-1787).
catactcggtcaaaataga

SEQ ID NO: 326320 - DNA, 19 bp, Homo sapiens
  siRNA target sequence for CKAP4 (NM_006825.2,1775-1793).
cggtcaaaatagaaaccaa

SEQ ID NO: 326321 - DNA, 19 bp, Homo sapiens
  siRNA target sequence for CKAP4 (NM_006825.2,1811-1829).
cagccaagggtttactaga

SEQ ID NO: 326322 - DNA, 19 bp, Homo sapiens
  siRNA target sequence for CLN6 (NM_017882.1,339-357).
ccagtgttggggactactt

SEQ ID NO: 326323 - DNA, 19 bp, Homo sapiens
  siRNA target sequence for CLN6 (NM_017882.1,551-569).
gagaaccccatcatcaaga

SEQ ID NO: 326324 - DNA, 19 bp, Homo sapiens
  siRNA target sequence for CLN6 (NM_017882.1,558-576).
ccatcatcaagaatctcaa

SEQ ID NO: 326325 - DNA, 19 bp, Homo sapiens
  siRNA target sequence for CUZD1 (NM_022034.3,1013-1031).
gtttggcggagctgacaat

SEQ ID NO: 326326 - DNA, 19 bp, Homo sapiens
  siRNA target sequence for CUZD1 (NM_022034.3,1067-1085).
gtctagggggtgccaatat

SEQ ID NO: 326327 - DNA, 19 bp, Homo sapiens
  siRNA target sequence for CUZD1 (NM_022034.3,1104-1122).
catgatcctgcaactcaat

SEQ ID NO: 326328 - DNA, 19 bp, Homo sapiens
  siRNA target sequence for CUZD1 (NM_022034.3,1137-1155).
cacctggacaatagaaaga

SEQ ID NO: 326329 - DNA, 19 bp, Homo sapiens
  siRNA target sequence for CUZD1 (NM_022034.3,1154-1172).
gaccagaaaacaaaagcat

SEQ ID NO: 326330 - DNA, 19 bp, Homo sapiens
  siRNA target sequence for CUZD1 (NM_022034.3,1283-1301).
gcagtaaaaacgactatgt

SEQ ID NO: 326331 - DNA, 19 bp, Homo sapiens
  siRNA target sequence for CUZD1 (NM_022034.3,1293-1311).
cgactatgttcctgtattt

SEQ ID NO: 326332 - DNA, 19 bp, Homo sapiens
  siRNA target sequence for CUZD1 (NM_022034.3,1325-1343).
gtacattgacgtttcaaat

SEQ ID NO: 326333 - DNA, 19 bp, Homo sapiens
  siRNA target sequence for CUZD1 (NM_022034.3,1332-1350).
gacgtttcaaatagttact

SEQ ID NO: 326334 - DNA, 19 bp, Homo sapiens
  siRNA target sequence for CUZD1 (NM_022034.3,1349-1367).
ctgactcagcaagaattca

SEQ ID NO: 326335 - DNA, 19 bp, Homo sapiens
  siRNA target sequence for CUZD1 (NM_022034.3,1402-1420).
cctaacatctctattccaa

SEQ ID NO: 326336 - DNA, 19 bp, Homo sapiens
  siRNA target sequence for CUZD1 (NM_022034.3,1403-1421).
ctaacatctctattccaaa

SEQ ID NO: 326337 - DNA, 19 bp, Homo sapiens
  siRNA target sequence for CUZD1 (NM_022034.3,1427-1445).
gcggttacctggatacctt

SEQ ID NO: 326338 - DNA, 19 bp, Homo sapiens
  siRNA target sequence for CUZD1 (NM_022034.3,1483-1501).
catcctgagctggcttatt

SEQ ID NO: 326339 - DNA, 19 bp, Homo sapiens
  siRNA target sequence for CUZD1 (NM_022034.3,1516-1534).
caagtggagaaagattaca

SEQ ID NO: 326340 - DNA, 19 bp, Homo sapiens
  siRNA target sequence for CUZD1 (NM_022034.3,1564-1582).
ctagaaatagacaaacagt

SEQ ID NO: 326341 - DNA, 19 bp, Homo sapiens
  siRNA target sequence for CUZD1 (NM_022034.3,1667-1685).
ccttcgaatcgtcatcaaa

SEQ ID NO: 326342 - DNA, 19 bp, Homo sapiens
  siRNA target sequence for CUZD1 (NM_022034.3,1671-1689).
cgaatcgtcatcaaactct

SEQ ID NO: 326343 - DNA, 19 bp, Homo sapiens
  siRNA target sequence for CUZD1 (NM_022034.3,1690-1708).
ctgactgtcgtgttgtcta

SEQ ID NO: 326344 - DNA, 19 bp, Homo sapiens
  siRNA target sequence for CUZD1 (NM_022034.3,1696-1714).
gtcgtgttgtctacagatt

SEQ ID NO: 326345 - DNA, 19 bp, Homo sapiens
  siRNA target sequence for CUZD1 (NM_022034.3,1698-1716).
cgtgttgtctacagattat

SEQ ID NO: 326346 - DNA, 19 bp, Homo sapiens
  siRNA target sequence for CUZD1 (NM_022034.3,1709-1727).
cagattatgccaattctta

SEQ ID NO: 326347 - DNA, 19 bp, Homo sapiens
  siRNA target sequence for CUZD1 (NM_022034.3,1746-1764).
ctacacctcaatttatgca

SEQ ID NO: 326348 - DNA, 19 bp, Homo sapiens
  siRNA target sequence for CUZD1 (NM_022034.3,1765-1783).
gaaaacatcaacactacat

SEQ ID NO: 326349 - DNA, 19 bp, Homo sapiens
  siRNA target sequence for CUZD1 (NM_022034.3,1773-1791).
caacactacatctttaact

SEQ ID NO: 326350 - DNA, 19 bp, Homo sapiens
  siRNA target sequence for CUZD1 (NM_022034.3,1833-1851).
cctagaggcttttaactct

SEQ ID NO: 326351 - DNA, 19 bp, Homo sapiens
  siRNA target sequence for CUZD1 (NM_022034.3,1879-1897).
ccaacttgcagaccaaaat

SEQ ID NO: 326352 - DNA, 19 bp, Homo sapiens
  siRNA target sequence for CUZD1 (NM_022034.3,1953-1971).
ggtagaagatcagtcaatt

SEQ ID NO: 326353 - DNA, 19 bp, Homo sapiens
  siRNA target sequence for CUZD1 (NM_022034.3,1954-1972).
gtagaagatcagtcaatta

SEQ ID NO: 326354 - DNA, 19 bp, Homo sapiens
  siRNA target sequence for CUZD1 (NM_022034.3,1967-1985).
caattacttacaccaatat

SEQ ID NO: 326355 - DNA, 19 bp, Homo sapiens
  siRNA target sequence for CUZD1 (NM_022034.3,2019-2037).
gatcacccgtcagaaacaa

SEQ ID NO: 326356 - DNA, 19 bp, Homo sapiens
  siRNA target sequence for CUZD1 (NM_022034.3,2031-2049).
gaaacaactccagattatt

SEQ ID NO: 326357 - DNA, 19 bp, Homo sapiens
  siRNA target sequence for CUZD1 (NM_022034.3,2055-2073).
gtgtgaaatgggacataat

SEQ ID NO: 326358 - DNA, 19 bp, Homo sapiens
  siRNA target sequence for CUZD1 (NM_022034.3,2075-2093).
ctacagtggagataatata

SEQ ID NO: 326359 - DNA, 19 bp, Homo sapiens
  siRNA target sequence for CUZD1 (NM_022034.3,2078-2096).
cagtggagataatatacat

SEQ ID NO: 326360 - DNA, 19 bp, Homo sapiens
  siRNA target sequence for CUZD1 (NM_022034.3,2080-2098).
gtggagataatatacataa

SEQ ID NO: 326361 - DNA, 19 bp, Homo sapiens
  siRNA target sequence for CUZD1 (NM_022034.3,2101-2119).
gaagatgatgtaatacaaa

SEQ ID NO: 326362 - DNA, 19 bp, Homo sapiens
  siRNA target sequence for CUZD1 (NM_022034.3,2158-2176).
ctttttgaatccaattcat

SEQ ID NO: 326363 - DNA, 19 bp, Homo sapiens
  siRNA target sequence for CUZD1 (NM_022034.3,2179-2197).
gaaaagactatacttgaat

SEQ ID NO: 326364 - DNA, 19 bp, Homo sapiens
  siRNA target sequence for CUZD1 (NM_022034.3,2198-2216).
caccatattatgtggattt

SEQ ID NO: 326365 - DNA, 19 bp, Homo sapiens
  siRNA target sequence for CUZD1 (NM_022034.3,2200-2218).
ccatattatgtggatttga

SEQ ID NO: 326366 - DNA, 19 bp, Homo sapiens
  siRNA target sequence for CUZD1 (NM_022034.3,2247-2265).
gcacacctcagatccaaat

SEQ ID NO: 326367 - DNA, 19 bp, Homo sapiens
  siRNA target sequence for CUZD1 (NM_022034.3,2248-2266).
cacacctcagatccaaatt

SEQ ID NO: 326368 - DNA, 19 bp, Homo sapiens
  siRNA target sequence for CUZD1 (NM_022034.3,2252-2270).
cctcagatccaaatttggt

SEQ ID NO: 326369 - DNA, 19 bp, Homo sapiens
  siRNA target sequence for CUZD1 (NM_022034.3,2318-2336).
ctccaacctacgacctaat

SEQ ID NO: 326370 - DNA, 19 bp, Homo sapiens
  siRNA target sequence for CUZD1 (NM_022034.3,2320-2338).
ccaacctacgacctaatca

SEQ ID NO: 326371 - DNA, 19 bp, Homo sapiens
  siRNA target sequence for CUZD1 (NM_022034.3,2321-2339).
caacctacgacctaatcaa

SEQ ID NO: 326372 - DNA, 19 bp, Homo sapiens
  siRNA target sequence for CUZD1 (NM_022034.3,2351-2369).
gtcgagatgaaacttgtaa

SEQ ID NO: 326373 - DNA, 19 bp, Homo sapiens
  siRNA target sequence for CUZD1 (NM_022034.3,2366-2384).
gtaaggtgtatcccttatt

SEQ ID NO: 326374 - DNA, 19 bp, Homo sapiens
  siRNA target sequence for CUZD1 (NM_022034.3,2445-2463).
gtatctgcagtgtaaagtt

SEQ ID NO: 326375 - DNA, 19 bp, Homo sapiens
  siRNA target sequence for CUZD1 (NM_022034.3,2487-2505).
ccagtctcgctgcaatcaa

SEQ ID NO: 326376 - DNA, 19 bp, Homo sapiens
  siRNA target sequence for CUZD1 (NM_022034.3,2527-2545).
cgagacatttcttcatata

SEQ ID NO: 326377 - DNA, 19 bp, Homo sapiens
  siRNA target sequence for CUZD1 (NM_022034.3,2569-2587).
ggacccattcgtctgaaaa

SEQ ID NO: 326378 - DNA, 19 bp, Homo sapiens
  siRNA target sequence for CUZD1 (NM_022034.3,2661-2679).
caacagtgtgcatctgttt

SEQ ID NO: 326379 - DNA, 19 bp, Homo sapiens
  siRNA target sequence for CUZD1 (NM_022034.3,2666-2684).
gtgtgcatctgttttcctt

SEQ ID NO: 326380 - DNA, 19 bp, Homo sapiens
  siRNA target sequence for CUZD1 (NM_022034.3,2685-2703).
catggttctagctctgaat

SEQ ID NO: 326381 - DNA, 19 bp, Homo sapiens
  siRNA target sequence for CUZD1 (NM_022034.3,2707-2725).
gtgactgtagcgacaatca

SEQ ID NO: 326382 - DNA, 19 bp, Homo sapiens
  siRNA target sequence for CUZD1 (NM_022034.3,2709-2727).
gactgtagcgacaatcaca

SEQ ID NO: 326383 - DNA, 19 bp, Homo sapiens
  siRNA target sequence for DC-TM4F2 (NM_030927.1,133-151).
cttttcagctacaacatca

SEQ ID NO: 326384 - DNA, 19 bp, Homo sapiens
  siRNA target sequence for DC-TM4F2 (NM_030927.1,280-298).
gtgggcgtggtgatgttca

SEQ ID NO: 326385 - DNA, 19 bp, Homo sapiens
  siRNA target sequence for DC-TM4F2 (NM_030927.1,477-495).
ctaccgggacgatatcgat

SEQ ID NO: 326386 - DNA, 19 bp, Homo sapiens
  siRNA target sequence for DC-TM4F2 (NM_030927.1,563-581).
gggacctcaacgtctactt

SEQ ID NO: 326387 - DNA, 19 bp, Homo sapiens
  siRNA target sequence for DC-TM4F2 (NM_030927.1,565-583).
gacctcaacgtctacttca

SEQ ID NO: 326388 - DNA, 19 bp, Homo sapiens
  siRNA target sequence for DC-TM4F2 (NM_030927.1,567-585).
cctcaacgtctacttcaat

SEQ ID NO: 326389 - DNA, 19 bp, Homo sapiens
  siRNA target sequence for DC-TM4F2 (NM_030927.1,568-586).
ctcaacgtctacttcaatt

SEQ ID NO: 326390 - DNA, 19 bp, Homo sapiens
  siRNA target sequence for DC-TM4F2 (NM_030927.1,807-825).
ctcgctgttgcagatattt

SEQ ID NO: 326391 - DNA, 19 bp, Homo sapiens
  siRNA target sequence for DCAL1 (NM_172004.2,15-33).
cttccatgtcatacaagta

SEQ ID NO: 326392 - DNA, 19 bp, Homo sapiens
  siRNA target sequence for DCAL1 (NM_172004.2,67-85).
gaacacattggttttgtca

SEQ ID NO: 326393 - DNA, 19 bp, Homo sapiens
  siRNA target sequence for DCAL1 (NM_172004.2,70-88).
cacattggttttgtcattt

SEQ ID NO: 326394 - DNA, 19 bp, Homo sapiens
  siRNA target sequence for DCAL1 (NM_172004.2,138-156).
catctcaatttacttatca

SEQ ID NO: 326395 - DNA, 19 bp, Homo sapiens
  siRNA target sequence for DCAL1 (NM_172004.2,184-202).
cccttcagtgggacatcat

SEQ ID NO: 326396 - DNA, 19 bp, Homo sapiens
  siRNA target sequence for DCAL1 (NM_172004.2,185-203).
ccttcagtgggacatcatt

SEQ ID NO: 326397 - DNA, 19 bp, Homo sapiens
  siRNA target sequence for DCAL1 (NM_172004.2,250-268).
gtctacgctgacatcaaaa

SEQ ID NO: 326398 - DNA, 19 bp, Homo sapiens
  siRNA target sequence for DCAL1 (NM_172004.2,252-270).
ctacgctgacatcaaaact

SEQ ID NO: 326399 - DNA, 19 bp, Homo sapiens
  siRNA target sequence for DCAL1 (NM_172004.2,255-273).
cgctgacatcaaaactgtt

SEQ ID NO: 326400 - DNA, 19 bp, Homo sapiens
  siRNA target sequence for DCAL1 (NM_172004.2,275-293).
ggacttccccgttagaact

SEQ ID NO: 326401 - DNA, 19 bp, Homo sapiens
  siRNA target sequence for DCAL1 (NM_172004.2,311-329).
gatctgtttctttcaactt

SEQ ID NO: 326402 - DNA, 19 bp, Homo sapiens
  siRNA target sequence for DCAL1 (NM_172004.2,437-455).
gtgccataaacaattcata

SEQ ID NO: 326403 - DNA, 19 bp, Homo sapiens
  siRNA target sequence for DCAL1 (NM_172004.2,481-499).
gctatggtgagatttaaca

SEQ ID NO: 326404 - DNA, 19 bp, Homo sapiens
  siRNA target sequence for ELOVL5 (NM_021814.2,364-382).
cacttagtacctatttcaa

SEQ ID NO: 326405 - DNA, 19 bp, Homo sapiens
  siRNA target sequence for ELOVL5 (NM_021814.2,374-392).
ctatttcaaggcattgcta

SEQ ID NO: 326406 - DNA, 19 bp, Homo sapiens
  siRNA target sequence for ELOVL5 (NM_021814.2,389-407).
gctaggccctcgagatact

SEQ ID NO: 326407 - DNA, 19 bp, Homo sapiens
  siRNA target sequence for ELOVL5 (NM_021814.2,390-408).
ctaggccctcgagatacta

SEQ ID NO: 326408 - DNA, 19 bp, Homo sapiens
  siRNA target sequence for ELOVL5 (NM_021814.2,395-413).
ccctcgagatactagagta

SEQ ID NO: 326409 - DNA, 19 bp, Homo sapiens
  siRNA target sequence for ELOVL5 (NM_021814.2,421-439).
ggtttcttctggacaatta

SEQ ID NO: 326410 - DNA, 19 bp, Homo sapiens
  siRNA target sequence for ELOVL5 (NM_021814.2,422-440).
gtttcttctggacaattat

SEQ ID NO: 326411 - DNA, 19 bp, Homo sapiens
  siRNA target sequence for ELOVL5 (NM_021814.2,434-452).
caattatatacccacattt

SEQ ID NO: 326412 - DNA, 19 bp, Homo sapiens
  siRNA target sequence for ELOVL5 (NM_021814.2,457-475).
gctctgtcatatatttact

SEQ ID NO: 326413 - DNA, 19 bp, Homo sapiens
  siRNA target sequence for ELOVL5 (NM_021814.2,506-524).
gaataaacagccattctct

SEQ ID NO: 326414 - DNA, 19 bp, Homo sapiens
  siRNA target sequence for ELOVL5 (NM_021814.2,532-550).
ggattttagtggtgtataa

SEQ ID NO: 326415 - DNA, 19 bp, Homo sapiens
  siRNA target sequence for ELOVL5 (NM_021814.2,601-619).
gagtatgggaaggcaaata

SEQ ID NO: 326416 - DNA, 19 bp, Homo sapiens
  siRNA target sequence for ELOVL5 (NM_021814.2,603-621).
gtatgggaaggcaaataca

SEQ ID NO: 326417 - DNA, 19 bp, Homo sapiens
  siRNA target sequence for ELOVL5 (NM_021814.2,644-662).
caccgcaggagaatcagat

SEQ ID NO: 326418 - DNA, 19 bp, Homo sapiens
  siRNA target sequence for ELOVL5 (NM_021814.2,646-664).
ccgcaggagaatcagatat

SEQ ID NO: 326419 - DNA, 19 bp, Homo sapiens
  siRNA target sequence for ELOVL5 (NM_021814.2,711-729).
gaatttatggacactttct

SEQ ID NO: 326420 - DNA, 19 bp, Homo sapiens
  siRNA target sequence for ELOVL5 (NM_021814.2,786-804).
gcctcgatgctgaacatct

SEQ ID NO: 326421 - DNA, 19 bp, Homo sapiens
  siRNA target sequence for ELOVL5 (NM_021814.2,827-845).
cccctgcggccactcttat

SEQ ID NO: 326422 - DNA, 19 bp, Homo sapiens
  siRNA target sequence for ELOVL5 (NM_021814.2,828-846).
ccctgcggccactcttatt

SEQ ID NO: 326423 - DNA, 19 bp, Homo sapiens
  siRNA target sequence for ELOVL5 (NM_021814.2,829-847).
cctgcggccactcttattt

SEQ ID NO: 326424 - DNA, 19 bp, Homo sapiens
  siRNA target sequence for ELOVL5 (NM_021814.2,833-851).
cggccactcttattttggt

SEQ ID NO: 326425 - DNA, 19 bp, Homo sapiens
  siRNA target sequence for ELOVL5 (NM_021814.2,873-891).
cacgtcctcatgtactctt

SEQ ID NO: 326426 - DNA, 19 bp, Homo sapiens
  siRNA target sequence for ELOVL5 (NM_021814.2,876-894).
gtcctcatgtactcttact

SEQ ID NO: 326427 - DNA, 19 bp, Homo sapiens
  siRNA target sequence for ELOVL6 (NM_024090.1,393-411).
ctctgtatgctgcctttat

SEQ ID NO: 326428 - DNA, 19 bp, Homo sapiens
  siRNA target sequence for ELOVL6 (NM_024090.1,395-413).
ctgtatgctgcctttatat

SEQ ID NO: 326429 - DNA, 19 bp, Homo sapiens
  siRNA target sequence for ELOVL6 (NM_024090.1,417-435).
gtggtcggcacctaatgaa

SEQ ID NO: 326430 - DNA, 19 bp, Homo sapiens
  siRNA target sequence for ELOVL6 (NM_024090.1,419-437).
ggtcggcacctaatgaata

SEQ ID NO: 326431 - DNA, 19 bp, Homo sapiens
  siRNA target sequence for ELOVL6 (NM_024090.1,420-438).
gtcggcacctaatgaataa

SEQ ID NO: 326432 - DNA, 19 bp, Homo sapiens
  siRNA target sequence for ELOVL6 (NM_024090.1,424-442).
gcacctaatgaataaacga

SEQ ID NO: 326433 - DNA, 19 bp, Homo sapiens
  siRNA target sequence for ELOVL6 (NM_024090.1,433-451).
gaataaacgagcaaagttt

SEQ ID NO: 326434 - DNA, 19 bp, Homo sapiens
  siRNA target sequence for ELOVL6 (NM_024090.1,488-506).
cttgcagtcttcagtatat

SEQ ID NO: 326435 - DNA, 19 bp, Homo sapiens
  siRNA target sequence for ELOVL6 (NM_024090.1,515-533).
cttcgaactggtgcttata

SEQ ID NO: 326436 - DNA, 19 bp, Homo sapiens
  siRNA target sequence for ELOVL6 (NM_024090.1,519-537).
gaactggtgcttatatggt

SEQ ID NO: 326437 - DNA, 19 bp, Homo sapiens
  siRNA target sequence for ELOVL6 (NM_024090.1,527-545).
gcttatatggtgtacattt

SEQ ID NO: 326438 - DNA, 19 bp, Homo sapiens
  siRNA target sequence for ELOVL6 (NM_024090.1,557-575).
ggcctgaagcagtcagttt

SEQ ID NO: 326439 - DNA, 19 bp, Homo sapiens
  siRNA target sequence for ELOVL6 (NM_024090.1,596-614).
ggacctgtcagcaaattct

SEQ ID NO: 326440 - DNA, 19 bp, Homo sapiens
  siRNA target sequence for ELOVL6 (NM_024090.1,644-662).
cccgaactaggagatacaa

SEQ ID NO: 326441 - DNA, 19 bp, Homo sapiens
  siRNA target sequence for ELOVL6 (NM_024090.1,645-663).
ccgaactaggagatacaat

SEQ ID NO: 326442 - DNA, 19 bp, Homo sapiens
  siRNA target sequence for ELOVL6 (NM_024090.1,646-664).
cgaactaggagatacaata

SEQ ID NO: 326443 - DNA, 19 bp, Homo sapiens
  siRNA target sequence for ELOVL6 (NM_024090.1,767-785).
ggaggttggttcatgacta

SEQ ID NO: 326444 - DNA, 19 bp, Homo sapiens
  siRNA target sequence for ELOVL6 (NM_024090.1,775-793).
gttcatgactatgaactat

SEQ ID NO: 326445 - DNA, 19 bp, Homo sapiens
  siRNA target sequence for ELOVL6 (NM_024090.1,795-813).
gcgtgcacgccgtgatgta

SEQ ID NO: 326446 - DNA, 19 bp, Homo sapiens
  siRNA target sequence for ELOVL6 (NM_024090.1,797-815).
gtgcacgccgtgatgtact

SEQ ID NO: 326447 - DNA, 19 bp, Homo sapiens
  siRNA target sequence for ELOVL6 (NM_024090.1,800-818).
cacgccgtgatgtactctt

SEQ ID NO: 326448 - DNA, 19 bp, Homo sapiens
  siRNA target sequence for ELOVL6 (NM_024090.1,844-862).
ccgagtctcccggaagttt

SEQ ID NO: 326449 - DNA, 19 bp, Homo sapiens
  siRNA target sequence for ELOVL6 (NM_024090.1,854-872).
cggaagtttgccatgttca

SEQ ID NO: 326450 - DNA, 19 bp, Homo sapiens
  siRNA target sequence for ELOVL6 (NM_024090.1,1037-1055).
gcctacatcggcaaaatga

SEQ ID NO: 326451 - DNA, 19 bp, Homo sapiens
  siRNA target sequence for F-LANa (NM_016041.2,105-123).
gccgtgcagttggaattga

SEQ ID NO: 326452 - DNA, 19 bp, Homo sapiens
  siRNA target sequence for F-LANa (NM_016041.2,106-124).
ccgtgcagttggaattgat

SEQ ID NO: 326453 - DNA, 19 bp, Homo sapiens
  siRNA target sequence for F-LANa (NM_016041.2,127-145).
caccttttcagttgtactt

SEQ ID NO: 326454 - DNA, 19 bp, Homo sapiens
  siRNA target sequence for F-LANa (NM_016041.2,140-158).
gtacttcaatcctgaatta

SEQ ID NO: 326455 - DNA, 19 bp, Homo sapiens
  siRNA target sequence for F-LANa (NM_016041.2,210-228).
gggccagttggattcaatt

SEQ ID NO: 326456 - DNA, 19 bp, Homo sapiens
  siRNA target sequence for F-LANa (NM_016041.2,211-229).
ggccagttggattcaattt

SEQ ID NO: 326457 - DNA, 19 bp, Homo sapiens
  siRNA target sequence for F-LANa (NM_016041.2,212-230).
gccagttggattcaatttt

SEQ ID NO: 326458 - DNA, 19 bp, Homo sapiens
  siRNA target sequence for F-LANa (NM_016041.2,377-395).
gggccaggcctttacaata

SEQ ID NO: 326459 - DNA, 19 bp, Homo sapiens
  siRNA target sequence for F-LANa (NM_016041.2,391-409).
caataatgctcgtctatgt

SEQ ID NO: 326460 - DNA, 19 bp, Homo sapiens
  siRNA target sequence for F-LANa (NM_016041.2,520-538).
caatcattgtggacctttt

SEQ ID NO: 326461 - DNA, 19 bp, Homo sapiens
  siRNA target sequence for F-LANa (NM_016041.2,546-564).
gcagttggacacatatatt

SEQ ID NO: 326462 - DNA, 19 bp, Homo sapiens
  siRNA target sequence for F-LANa (NM_016041.2,591-609).
caacctggtggaataagaa

SEQ ID NO: 326463 - DNA, 19 bp, Homo sapiens
  siRNA target sequence for F-LANa (NM_016041.2,632-650).
gaaagctatttttgataca

SEQ ID NO: 326464 - DNA, 19 bp, Homo sapiens
  siRNA target sequence for F-LANa (NM_016041.2,651-669).
ccagatgaggatccaaatt

SEQ ID NO: 326465 - DNA, 19 bp, Homo sapiens
  siRNA target sequence for FAM14A (NM_032036.1,283-301).
ggcctgcttggggaattca

SEQ ID NO: 326466 - DNA, 19 bp, Homo sapiens
  siRNA target sequence for FAM14A (NM_032036.1,292-310).
ggggaattcaccttcttct

SEQ ID NO: 326467 - DNA, 19 bp, Homo sapiens
  siRNA target sequence for FAM14A (NM_032036.1,293-311).
gggaattcaccttcttctt

SEQ ID NO: 326468 - DNA, 19 bp, Homo sapiens
  siRNA target sequence for FAM14A (NM_032036.1,385-403).
cccactcaagtcagagaaa

SEQ ID NO: 326469 - DNA, 19 bp, Homo sapiens
  siRNA target sequence for FAM14B (NM_145249.1,412-430).
gcagtctggtggctattct

SEQ ID NO: 326470 - DNA, 19 bp, Homo sapiens
  siRNA target sequence for FAM14B (NM_145249.1,450-468).
ggactctctgtgacatcta

SEQ ID NO: 326471 - DNA, 19 bp, Homo sapiens
  siRNA target sequence for FAM14B (NM_145249.1,451-469).
gactctctgtgacatctaa

SEQ ID NO: 326472 - DNA, 19 bp, Homo sapiens
  siRNA target sequence for FLJ10134 (NM_018004.1,365-383).
ggtctttggtggtgtacaa

SEQ ID NO: 326473 - DNA, 19 bp, Homo sapiens
  siRNA target sequence for FLJ10134 (NM_018004.1,368-386).
ctttggtggtgtacaaaga

SEQ ID NO: 326474 - DNA, 19 bp, Homo sapiens
  siRNA target sequence for FLJ10134 (NM_018004.1,373-391).
gtggtgtacaaagagtatt

SEQ ID NO: 326475 - DNA, 19 bp, Homo sapiens
  siRNA target sequence for FLJ10134 (NM_018004.1,375-393).
ggtgtacaaagagtattct

SEQ ID NO: 326476 - DNA, 19 bp, Homo sapiens
  siRNA target sequence for FLJ10134 (NM_018004.1,381-399).
caaagagtattctgaagta

SEQ ID NO: 326477 - DNA, 19 bp, Homo sapiens
  siRNA target sequence for FLJ10134 (NM_018004.1,424-442).
ctgctatcttggttccaaa

SEQ ID NO: 326478 - DNA, 19 bp, Homo sapiens
  siRNA target sequence for FLJ10134 (NM_018004.1,427-445).
ctatcttggttccaaaaca

SEQ ID NO: 326479 - DNA, 19 bp, Homo sapiens
  siRNA target sequence for FLJ10134 (NM_018004.1,469-487).
ggagggaattacaatagtt

SEQ ID NO: 326480 - DNA, 19 bp, Homo sapiens
  siRNA target sequence for FLJ10134 (NM_018004.1,537-555).
cccatctgatgttatatga

SEQ ID NO: 326481 - DNA, 19 bp, Homo sapiens
  siRNA target sequence for FLJ10134 (NM_018004.1,539-557).
catctgatgttatatgact

SEQ ID NO: 326482 - DNA, 19 bp, Homo sapiens
  siRNA target sequence for FLJ10134 (NM_018004.1,542-560).
ctgatgttatatgactata

SEQ ID NO: 326483 - DNA, 19 bp, Homo sapiens
  siRNA target sequence for FLJ10134 (NM_018004.1,544-562).
gatgttatatgactataaa

SEQ ID NO: 326484 - DNA, 19 bp, Homo sapiens
  siRNA target sequence for FLJ10134 (NM_018004.1,628-646).
gggtgtggcagatatctta

SEQ ID NO: 326485 - DNA, 19 bp, Homo sapiens
  siRNA target sequence for FLJ10134 (NM_018004.1,629-647).
ggtgtggcagatatcttat

SEQ ID NO: 326486 - DNA, 19 bp, Homo sapiens
  siRNA target sequence for FLJ10134 (NM_018004.1,632-650).
gtggcagatatcttatgtt

SEQ ID NO: 326487 - DNA, 19 bp, Homo sapiens
  siRNA target sequence for FLJ10134 (NM_018004.1,635-653).
gcagatatcttatgtttca

SEQ ID NO: 326488 - DNA, 19 bp, Homo sapiens
  siRNA target sequence for FLJ10134 (NM_018004.1,710-728).
gtggaggcctttatcttct

SEQ ID NO: 326489 - DNA, 19 bp, Homo sapiens
  siRNA target sequence for FLJ10134 (NM_018004.1,782-800).
gttttggtcgtctttctga

SEQ ID NO: 326490 - DNA, 19 bp, Homo sapiens
  siRNA target sequence for FLJ10134 (NM_018004.1,823-841).
gttccttgttcggaacaat

SEQ ID NO: 326491 - DNA, 19 bp, Homo sapiens
  siRNA target sequence for FLJ10134 (NM_018004.1,886-904).
gagctggttctttcagatt

SEQ ID NO: 326492 - DNA, 19 bp, Homo sapiens
  siRNA target sequence for FLJ10134 (NM_018004.1,933-951).
gtcctgcatgggatctgat

SEQ ID NO: 326493 - DNA, 19 bp, Homo sapiens
  siRNA target sequence for FLJ10134 (NM_018004.1,993-1011).
ggcattatgcagtaaccat

SEQ ID NO: 326494 - DNA, 19 bp, Homo sapiens
  siRNA target sequence for FLJ10134 (NM_018004.1,994-1012).
gcattatgcagtaaccatt

SEQ ID NO: 326495 - DNA, 19 bp, Homo sapiens
  siRNA target sequence for FLJ10134 (NM_018004.1,1008-1026).
ccattgtcatcgttggaat

SEQ ID NO: 326496 - DNA, 19 bp, Homo sapiens
  siRNA target sequence for FLJ10134 (NM_018004.1,1018-1036).
cgttggaatgaattatgct

SEQ ID NO: 326497 - DNA, 19 bp, Homo sapiens
  siRNA target sequence for FLJ10134 (NM_018004.1,1019-1037).
gttggaatgaattatgctt

SEQ ID NO: 326498 - DNA, 19 bp, Homo sapiens
  siRNA target sequence for FLJ10134 (NM_018004.1,1039-1057).
cattacctggttggttaaa

SEQ ID NO: 326499 - DNA, 19 bp, Homo sapiens
  siRNA target sequence for FLJ10134 (NM_018004.1,1048-1066).
gttggttaaatctagactt

SEQ ID NO: 326500 - DNA, 19 bp, Homo sapiens
  siRNA target sequence for FLJ22233 (NM_024959.2,582-600).
caacttgtcggccatttct

SEQ ID NO: 326501 - DNA, 19 bp, Homo sapiens
  siRNA target sequence for FLJ22233 (NM_024959.2,658-676).
ggtgcacctgacatcttca

SEQ ID NO: 326502 - DNA, 19 bp, Homo sapiens
  siRNA target sequence for FLJ22233 (NM_024959.2,903-921).
gggttacctgggcttgtat

SEQ ID NO: 326503 - DNA, 19 bp, Homo sapiens
  siRNA target sequence for FLJ22233 (NM_024959.2,912-930).
gggcttgtatgtgttctat

SEQ ID NO: 326504 - DNA, 19 bp, Homo sapiens
  siRNA target sequence for FLJ22233 (NM_024959.2,914-932).
gcttgtatgtgttctatgt

SEQ ID NO: 326505 - DNA, 19 bp, Homo sapiens
  siRNA target sequence for FLJ22233 (NM_024959.2,1030-1048).
gaggaggaccgggtatctt

SEQ ID NO: 326506 - DNA, 19 bp, Homo sapiens
  siRNA target sequence for FLJ22233 (NM_024959.2,1032-1050).
ggaggaccgggtatcttct

SEQ ID NO: 326507 - DNA, 19 bp, Homo sapiens
  siRNA target sequence for FLJ22233 (NM_024959.2,1033-1051).
gaggaccgggtatcttcta

SEQ ID NO: 326508 - DNA, 19 bp, Homo sapiens
  siRNA target sequence for FLJ22233 (NM_024959.2,1035-1053).
ggaccgggtatcttctaat

SEQ ID NO: 326509 - DNA, 19 bp, Homo sapiens
  siRNA target sequence for FLJ22233 (NM_024959.2,1036-1054).
gaccgggtatcttctaata

SEQ ID NO: 326510 - DNA, 19 bp, Homo sapiens
  siRNA target sequence for FLJ22233 (NM_024959.2,1039-1057).
cgggtatcttctaatacca

SEQ ID NO: 326511 - DNA, 19 bp, Homo sapiens
  siRNA target sequence for FLJ22233 (NM_024959.2,1141-1159).
cccctggattacatgaagt

SEQ ID NO: 326512 - DNA, 19 bp, Homo sapiens
  siRNA target sequence for FLJ22233 (NM_024959.2,1338-1356).
ggggacctatggtgtctat

SEQ ID NO: 326513 - DNA, 19 bp, Homo sapiens
  siRNA target sequence for FLJ22233 (NM_024959.2,1343-1361).
cctatggtgtctatgagat

SEQ ID NO: 326514 - DNA, 19 bp, Homo sapiens
  siRNA target sequence for FLJ22233 (NM_024959.2,1344-1362).
ctatggtgtctatgagata

SEQ ID NO: 326515 - DNA, 19 bp, Homo sapiens
  siRNA target sequence for FLJ22233 (NM_024959.2,1523-1541).
cagaggtggtgaacatctt

SEQ ID NO: 326516 - DNA, 19 bp, Homo sapiens
  siRNA target sequence for FLJ22233 (NM_024959.2,1918-1936).
gtggccctcctcactgaat

SEQ ID NO: 326517 - DNA, 19 bp, Homo sapiens
  siRNA target sequence for FLJ22233 (NM_024959.2,1939-1957).
ggagtgattcacctgaaaa

SEQ ID NO: 326518 - DNA, 19 bp, Homo sapiens
  siRNA target sequence for FLJ22800 (NM_024795.1,57-75).
ggacatcctgcaatggatt

SEQ ID NO: 326519 - DNA, 19 bp, Homo sapiens
  siRNA target sequence for FLJ22800 (NM_024795.1,220-238).
ggccattccagcaacaaca

SEQ ID NO: 326520 - DNA, 19 bp, Homo sapiens
  siRNA target sequence for FLJ22800 (NM_024795.1,352-370).
catccaggctctcttaaaa

SEQ ID NO: 326521 - DNA, 19 bp, Homo sapiens
  siRNA target sequence for FLJ22800 (NM_024795.1,397-415).
caacagtaatgccaattgt

SEQ ID NO: 326522 - DNA, 19 bp, Homo sapiens
  siRNA target sequence for FLJ22800 (NM_024795.1,463-481).
cttgcagtggtttttcaat

SEQ ID NO: 326523 - DNA, 19 bp, Homo sapiens
  siRNA target sequence for FLJ22800 (NM_024795.1,492-510).
cacctcctactggtttcaa

SEQ ID NO: 326524 - DNA, 19 bp, Homo sapiens
  siRNA target sequence for FLJ22800 (NM_024795.1,542-560).
ggctggagagcatctagtt

SEQ ID NO: 326525 - DNA, 19 bp, Homo sapiens
  siRNA target sequence for FLJ22800 (NM_024795.1,558-576).
gtttccacttcgattctga

SEQ ID NO: 326526 - DNA, 19 bp, Homo sapiens
  siRNA target sequence for FLJ22800 (NM_024795.1,562-580).
ccacttcgattctgaagaa

SEQ ID NO: 326527 - DNA, 19 bp, Homo sapiens
  siRNA target sequence for FLJ22800 (NM_024795.1,606-624).
cagtatttttaggtctatt

SEQ ID NO: 326528 - DNA, 19 bp, Homo sapiens
  siRNA target sequence for FLJ22800 (NM_024795.1,618-636).
gtctattgcttgttggaat

SEQ ID NO: 326529 - DNA, 19 bp, Homo sapiens
  siRNA target sequence for FLJ22800 (NM_024795.1,664-682).
gatagtcatcggtttcctt

SEQ ID NO: 326530 - DNA, 19 bp, Homo sapiens
  siRNA target sequence for FLJ22800 (NM_024795.1,700-718).
ctctaagcgaagaagtcaa

SEQ ID NO: 326531 - DNA, 19 bp, Homo sapiens
  siRNA target sequence for FLJ22800 (NM_024795.1,702-720).
ctaagcgaagaagtcaaat

SEQ ID NO: 326532 - DNA, 19 bp, Homo sapiens
  siRNA target sequence for FLJ30002 (NM_152341.2,138-156).
cgcacctgcagttcaataa

SEQ ID NO: 326533 - DNA, 19 bp, Homo sapiens
  siRNA target sequence for FLJ30002 (NM_152341.2,201-219).
gcctgcgcagcctcttcta

SEQ ID NO: 326534 - DNA, 19 bp, Homo sapiens
  siRNA target sequence for FLJ30002 (NM_152341.2,369-387).
caggctccgtgctctatca

SEQ ID NO: 326535 - DNA, 19 bp, Homo sapiens
  siRNA target sequence for FLJ30002 (NM_152341.2,377-395).
gtgctctatcacctcttta

SEQ ID NO: 326536 - DNA, 19 bp, Homo sapiens
  siRNA target sequence for FLJ30002 (NM_152341.2,450-468).
gtggggtctgccttgtcaa

SEQ ID NO: 326537 - DNA, 19 bp, Homo sapiens
  siRNA target sequence for FLJ30002 (NM_152341.2,730-748).
gcttgggggactggtaaat

SEQ ID NO: 326538 - DNA, 19 bp, Homo sapiens
  siRNA target sequence for FLJ30002 (NM_152341.2,774-792).
gacctggccgctttgacta

SEQ ID NO: 326539 - DNA, 19 bp, Homo sapiens
  siRNA target sequence for FLJ30002 (NM_152341.2,798-816).
gcaactcccaccagatcat

SEQ ID NO: 326540 - DNA, 19 bp, Homo sapiens
  siRNA target sequence for FLOT1 (NM_005803.2,361-379).
ctggcattgcccaggtaaa

SEQ ID NO: 326541 - DNA, 19 bp, Homo sapiens
  siRNA target sequence for FLOT1 (NM_005803.2,592-610).
gcatcagtgtggttagcta

SEQ ID NO: 326542 - DNA, 19 bp, Homo sapiens
  siRNA target sequence for FLOT1 (NM_005803.2,627-645).
cacgatgaccaggactatt

SEQ ID NO: 326543 - DNA, 19 bp, Homo sapiens
  siRNA target sequence for FLOT1 (NM_005803.2,670-688).
cagctcaagtccaaaaaga

SEQ ID NO: 326544 - DNA, 19 bp, Homo sapiens
  siRNA target sequence for FLOT1 (NM_005803.2,805-823).
gagattacgaactgaagaa

SEQ ID NO: 326545 - DNA, 19 bp, Homo sapiens
  siRNA target sequence for FLOT1 (NM_005803.2,1062-1080).
gcagagaagtcccaactaa

SEQ ID NO: 326546 - DNA, 19 bp, Homo sapiens
  siRNA target sequence for FLOT1 (NM_005803.2,1063-1081).
cagagaagtcccaactaat

SEQ ID NO: 326547 - DNA, 19 bp, Homo sapiens
  siRNA target sequence for FLOT1 (NM_005803.2,1350-1368).
gaagtactggacattctaa

SEQ ID NO: 326548 - DNA, 19 bp, Homo sapiens
  siRNA target sequence for FLOT1 (NM_005803.2,1408-1426).
gcatctcccaggtgaatca

SEQ ID NO: 326549 - DNA, 19 bp, Homo sapiens
  siRNA target sequence for GHITM (NM_014394.1,200-218).
cctcccctgttgtgaagaa

SEQ ID NO: 326550 - DNA, 19 bp, Homo sapiens
  siRNA target sequence for GHITM (NM_014394.1,231-249).
gaatcaatggctgttaaca

SEQ ID NO: 326551 - DNA, 19 bp, Homo sapiens
  siRNA target sequence for GHITM (NM_014394.1,334-352).
ccatcgatggaaaaaatat

SEQ ID NO: 326552 - DNA, 19 bp, Homo sapiens
  siRNA target sequence for GHITM (NM_014394.1,428-446).
gcttgggactgtctaatga

SEQ ID NO: 326553 - DNA, 19 bp, Homo sapiens
  siRNA target sequence for GHITM (NM_014394.1,432-450).
gggactgtctaatgagatt

SEQ ID NO: 326554 - DNA, 19 bp, Homo sapiens
  siRNA target sequence for GHITM (NM_014394.1,455-473).
ctattgaaaaggctgtaat

SEQ ID NO: 326555 - DNA, 19 bp, Homo sapiens
  siRNA target sequence for GHITM (NM_014394.1,483-501).
gtatgtcaaggatagaatt

SEQ ID NO: 326556 - DNA, 19 bp, Homo sapiens
  siRNA target sequence for GHITM (NM_014394.1,523-541).
gcagggagtattggtttaa

SEQ ID NO: 326557 - DNA, 19 bp, Homo sapiens
  siRNA target sequence for GHITM (NM_014394.1,566-584).
gcagaacgcctgttctcat

SEQ ID NO: 326558 - DNA, 19 bp, Homo sapiens
  siRNA target sequence for GHITM (NM_014394.1,569-587).
gaacgcctgttctcatgaa

SEQ ID NO: 326559 - DNA, 19 bp, Homo sapiens
  siRNA target sequence for GHITM (NM_014394.1,575-593).
ctgttctcatgaacttcat

SEQ ID NO: 326560 - DNA, 19 bp, Homo sapiens
  siRNA target sequence for GHITM (NM_014394.1,577-595).
gttctcatgaacttcatga

SEQ ID NO: 326561 - DNA, 19 bp, Homo sapiens
  siRNA target sequence for GHITM (NM_014394.1,650-668).
gaatgctggtacgatcaat

SEQ ID NO: 326562 - DNA, 19 bp, Homo sapiens
  siRNA target sequence for GHITM (NM_014394.1,654-672).
gctggtacgatcaatacca

SEQ ID NO: 326563 - DNA, 19 bp, Homo sapiens
  siRNA target sequence for GHITM (NM_014394.1,655-673).
ctggtacgatcaataccat

SEQ ID NO: 326564 - DNA, 19 bp, Homo sapiens
  siRNA target sequence for GHITM (NM_014394.1,657-675).
ggtacgatcaataccatat

SEQ ID NO: 326565 - DNA, 19 bp, Homo sapiens
  siRNA target sequence for GHITM (NM_014394.1,833-851).
gtgcgcccagtgaaaagtt

SEQ ID NO: 326566 - DNA, 19 bp, Homo sapiens
  siRNA target sequence for GHITM (NM_014394.1,836-854).
cgcccagtgaaaagtttct

SEQ ID NO: 326567 - DNA, 19 bp, Homo sapiens
  siRNA target sequence for GHITM (NM_014394.1,838-856).
cccagtgaaaagtttctga

SEQ ID NO: 326568 - DNA, 19 bp, Homo sapiens
  siRNA target sequence for GHITM (NM_014394.1,839-857).
ccagtgaaaagtttctgaa

SEQ ID NO: 326569 - DNA, 19 bp, Homo sapiens
  siRNA target sequence for GHITM (NM_014394.1,881-899).
gcctgggtctcgtctttgt

SEQ ID NO: 326570 - DNA, 19 bp, Homo sapiens
  siRNA target sequence for GHITM (NM_014394.1,902-920).
cctcattgggatctatgtt

SEQ ID NO: 326571 - DNA, 19 bp, Homo sapiens
  siRNA target sequence for GHITM (NM_014394.1,905-923).
cattgggatctatgtttct

SEQ ID NO: 326572 - DNA, 19 bp, Homo sapiens
  siRNA target sequence for GHITM (NM_014394.1,963-981).
ggcaatgtacggtggatta

SEQ ID NO: 326573 - DNA, 19 bp, Homo sapiens
  siRNA target sequence for GHITM (NM_014394.1,965-983).
caatgtacggtggattagt

SEQ ID NO: 326574 - DNA, 19 bp, Homo sapiens
  siRNA target sequence for GHITM (NM_014394.1,969-987).
gtacggtggattagttctt

SEQ ID NO: 326575 - DNA, 19 bp, Homo sapiens
  siRNA target sequence for GHITM (NM_014394.1,1005-1023).
gtatgatacccagaaagta

SEQ ID NO: 326576 - DNA, 19 bp, Homo sapiens
  siRNA target sequence for GHITM (NM_014394.1,1025-1043).
caagcgtgcagaagtatca

SEQ ID NO: 326577 - DNA, 19 bp, Homo sapiens
  siRNA target sequence for GHITM (NM_014394.1,1044-1062).
ccaatgtatggagttcaaa

SEQ ID NO: 326578 - DNA, 19 bp, Homo sapiens
  siRNA target sequence for GPSN2 (NM_004868.1,76-94).
gcgtggatggcctattaca

SEQ ID NO: 326579 - DNA, 19 bp, Homo sapiens
  siRNA target sequence for GPSN2 (NM_004868.1,80-98).
ggatggcctattacatcaa

SEQ ID NO: 326580 - DNA, 19 bp, Homo sapiens
  siRNA target sequence for GPSN2 (NM_004868.1,148-166).
gcgctcgccatctttgtga

SEQ ID NO: 326581 - DNA, 19 bp, Homo sapiens
  siRNA target sequence for GPSN2 (NM_004868.1,149-167).
cgctcgccatctttgtgat

SEQ ID NO: 326582 - DNA, 19 bp, Homo sapiens
  siRNA target sequence for GPSN2 (NM_138501.3,401-419).
ccgagtgcccttcatctat

SEQ ID NO: 326583 - DNA, 19 bp, Homo sapiens
  siRNA target sequence for GPSN2 (NM_138501.3,423-441).
cacaaatatgactttacgt

SEQ ID NO: 326584 - DNA, 19 bp, Homo sapiens
  siRNA target sequence for GPSN2 (NM_138501.3,439-457).
cgtccagtcggcatacagt

SEQ ID NO: 326585 - DNA, 19 bp, Homo sapiens
  siRNA target sequence for GPSN2 (NM_138501.3,478-496).
gtcactcattccactacat

SEQ ID NO: 326586 - DNA, 19 bp, Homo sapiens
  siRNA target sequence for GPSN2 (NM_138501.3,480-498).
cactcattccactacatca

SEQ ID NO: 326587 - DNA, 19 bp, Homo sapiens
  siRNA target sequence for GPSN2 (NM_138501.3,549-567).
cctttgcgcaacatcttca

SEQ ID NO: 326588 - DNA, 19 bp, Homo sapiens
  siRNA target sequence for GPSN2 (NM_138501.3,550-568).
ctttgcgcaacatcttcaa

SEQ ID NO: 326589 - DNA, 19 bp, Homo sapiens
  siRNA target sequence for GPSN2 (NM_138501.3,555-573).
cgcaacatcttcaagaact

SEQ ID NO: 326590 - DNA, 19 bp, Homo sapiens
  siRNA target sequence for GYPA (NM_002099.2,195-213).
cgcacaaacgggacacata

SEQ ID NO: 326591 - DNA, 19 bp, Homo sapiens
  siRNA target sequence for GYPA (NM_002099.2,196-214).
gcacaaacgggacacatat

SEQ ID NO: 326592 - DNA, 19 bp, Homo sapiens
  siRNA target sequence for GYPA (NM_002099.2,199-217).
caaacgggacacatatgca

SEQ ID NO: 326593 - DNA, 19 bp, Homo sapiens
  siRNA target sequence for GYPA (NM_002099.2,220-238).
cactcctagagctcatgaa

SEQ ID NO: 326594 - DNA, 19 bp, Homo sapiens
  siRNA target sequence for GYPA (NM_002099.2,224-242).
cctagagctcatgaagttt

SEQ ID NO: 326595 - DNA, 19 bp, Homo sapiens
  siRNA target sequence for GYPA (NM_002099.2,228-246).
gagctcatgaagtttcaga

SEQ ID NO: 326596 - DNA, 19 bp, Homo sapiens
  siRNA target sequence for GYPA (NM_002099.2,318-336).
ctgaaccagagataacact

SEQ ID NO: 326597 - DNA, 19 bp, Homo sapiens
  siRNA target sequence for GYPA (NM_002099.2,398-416).
cgccgactgataaagaaaa

SEQ ID NO: 326598 - DNA, 19 bp, Homo sapiens
  siRNA target sequence for GYPA (NM_002099.2,449-467).
gacacagacgtgcctttaa

SEQ ID NO: 326599 - DNA, 19 bp, Homo sapiens
  siRNA target sequence for GYPA (NM_002099.2,451-469).
cacagacgtgcctttaagt

SEQ ID NO: 326600 - DNA, 19 bp, Homo sapiens
  siRNA target sequence for GYPA (NM_002099.2,461-479).
cctttaagttctgttgaaa

SEQ ID NO: 326601 - DNA, 19 bp, Homo sapiens
  siRNA target sequence for HCST (NM_014266.3,191-209).
catcactccctgcctttta

SEQ ID NO: 326602 - DNA, 19 bp, Homo sapiens
  siRNA target sequence for HCST (NM_014266.3,214-232).
ggcacttcaggctcttgtt

SEQ ID NO: 326603 - DNA, 19 bp, Homo sapiens
  siRNA target sequence for HCST (NM_014266.3,358-376).
gatggcaaagtctacatca

SEQ ID NO: 326604 - DNA, 19 bp, Homo sapiens
  siRNA target sequence for HCST (NM_014266.3,361-379).
ggcaaagtctacatcaaca

SEQ ID NO: 326605 - DNA, 19 bp, Homo sapiens
  siRNA target sequence for HSPC039 (NM_016097.2,139-157).
gagcgattcctcaagaaca

SEQ ID NO: 326606 - DNA, 19 bp, Homo sapiens
  siRNA target sequence for HSPC039 (NM_016097.2,193-211).
ggagaagagccgggaatta

SEQ ID NO: 326607 - DNA, 19 bp, Homo sapiens
  siRNA target sequence for HSPC039 (NM_016097.2,219-237).
gctaatgaaccttattcga

SEQ ID NO: 326608 - DNA, 19 bp, Homo sapiens
  siRNA target sequence for HSPC039 (NM_016097.2,225-243).
gaaccttattcgatctgta

SEQ ID NO: 326609 - DNA, 19 bp, Homo sapiens
  siRNA target sequence for HSPC039 (NM_016097.2,228-246).
ccttattcgatctgtaaga

SEQ ID NO: 326610 - DNA, 19 bp, Homo sapiens
  siRNA target sequence for HSPC039 (NM_016097.2,229-247).
cttattcgatctgtaagaa

SEQ ID NO: 326611 - DNA, 19 bp, Homo sapiens
  siRNA target sequence for HSPC039 (NM_016097.2,255-273).
gagagtgccattgataata

SEQ ID NO: 326612 - DNA, 19 bp, Homo sapiens
  siRNA target sequence for HSPC039 (NM_016097.2,257-275).
gagtgccattgataatagt

SEQ ID NO: 326613 - DNA, 19 bp, Homo sapiens
  siRNA target sequence for HSPC039 (NM_016097.2,279-297).
ctcaattgcaattgtgtta

SEQ ID NO: 326614 - DNA, 19 bp, Homo sapiens
  siRNA target sequence for HTGN29 (NM_020199.1,331-349).
gctctatccagtgttgtat

SEQ ID NO: 326615 - DNA, 19 bp, Homo sapiens
  siRNA target sequence for HTGN29 (NM_020199.1,343-361).
gttgtatcacggactgatt

SEQ ID NO: 326616 - DNA, 19 bp, Homo sapiens
  siRNA target sequence for HTGN29 (NM_020199.1,365-383).
cgagcccaaccgtactcaa

SEQ ID NO: 326617 - DNA, 19 bp, Homo sapiens
  siRNA target sequence for HTGN29 (NM_020199.1,374-392).
ccgtactcaactcacatat

SEQ ID NO: 326618 - DNA, 19 bp, Homo sapiens
  siRNA target sequence for HTGN29 (NM_020199.1,375-393).
cgtactcaactcacatatt

SEQ ID NO: 326619 - DNA, 19 bp, Homo sapiens
  siRNA target sequence for HTGN29 (NM_020199.1,408-426).
gaatgctttaacacatgaa

SEQ ID NO: 326620 - DNA, 19 bp, Homo sapiens
  siRNA target sequence for HTGN29 (NM_020199.1,477-495).
gacgagtaccaagaaaagt

SEQ ID NO: 326621 - DNA, 19 bp, Homo sapiens
  siRNA target sequence for HTGN29 (NM_020199.1,589-607).
cttctcatgctgaacagtt

SEQ ID NO: 326622 - DNA, 19 bp, Homo sapiens
  siRNA target sequence for HTGN29 (NM_020199.1,621-639).
caaagacactctagacaat

SEQ ID NO: 326623 - DNA, 19 bp, Homo sapiens
  siRNA target sequence for HTGN29 (NM_020199.1,720-738).
caggggttacatggaaatt

SEQ ID NO: 326624 - DNA, 19 bp, Homo sapiens
  siRNA target sequence for HTGN29 (NM_020199.1,767-785).
catcctcaaatatagaaga

SEQ ID NO: 326625 - DNA, 19 bp, Homo sapiens
  siRNA target sequence for HTGN29 (NM_020199.1,836-854).
ctgttgtttacattacata

SEQ ID NO: 326626 - DNA, 19 bp, Homo sapiens
  siRNA target sequence for HTGN29 (NM_020199.1,841-859).
gtttacattacatatcaca

SEQ ID NO: 326627 - DNA, 19 bp, Homo sapiens
  siRNA target sequence for HTGN29 (NM_020199.1,846-864).
cattacatatcacaacaaa

SEQ ID NO: 326628 - DNA, 19 bp, Homo sapiens
  siRNA target sequence for HTGN29 (NM_020199.1,933-951).
ccatcgcctagatcagaat

SEQ ID NO: 326629 - DNA, 19 bp, Homo sapiens
  siRNA target sequence for HTGN29 (NM_020199.1,937-955).
cgcctagatcagaatgtta

SEQ ID NO: 326630 - DNA, 19 bp, Homo sapiens
  siRNA target sequence for HTGN29 (NM_020199.1,939-957).
cctagatcagaatgttaat

SEQ ID NO: 326631 - DNA, 19 bp, Homo sapiens
  siRNA target sequence for HTGN29 (NM_020199.1,978-996).
gattaccaatgattatatt

SEQ ID NO: 326632 - DNA, 19 bp, Homo sapiens
  siRNA target sequence for HUCEP11 (NM_014858.1,10-28).
gttgttcagcccttaatga

SEQ ID NO: 326633 - DNA, 19 bp, Homo sapiens
  siRNA target sequence for HUCEP11 (NM_014858.1,258-276).
cgacaatgtggcagagtat

SEQ ID NO: 326634 - DNA, 19 bp, Homo sapiens
  siRNA target sequence for HUCEP11 (NM_014858.1,614-632).
gcctcatccgcaacaagtt

SEQ ID NO: 326635 - DNA, 19 bp, Homo sapiens
  siRNA target sequence for HUCEP11 (NM_014858.1,615-633).
cctcatccgcaacaagttt

SEQ ID NO: 326636 - DNA, 19 bp, Homo sapiens
  siRNA target sequence for HUCEP11 (NM_014858.1,1247-1265).
cgctgctgggcaagttcat

SEQ ID NO: 326637 - DNA, 19 bp, Homo sapiens
  siRNA target sequence for IFRG28 (NM_022147.1,170-188).
ctcaagggtggaagcaata

SEQ ID NO: 326638 - DNA, 19 bp, Homo sapiens
  siRNA target sequence for IFRG28 (NM_022147.1,339-357).
gtgctcctggtcccaatat

SEQ ID NO: 326639 - DNA, 19 bp, Homo sapiens
  siRNA target sequence for IFRG28 (NM_022147.1,341-359).
gctcctggtcccaatatga

SEQ ID NO: 326640 - DNA, 19 bp, Homo sapiens
  siRNA target sequence for IFRG28 (NM_022147.1,401-419).
gcaacctggtgcagcatat

SEQ ID NO: 326641 - DNA, 19 bp, Homo sapiens
  siRNA target sequence for IFRG28 (NM_022147.1,402-420).
caacctggtgcagcatata

SEQ ID NO: 326642 - DNA, 19 bp, Homo sapiens
  siRNA target sequence for IFRG28 (NM_022147.1,498-516).
ccatgacacagccaattgt

SEQ ID NO: 326643 - DNA, 19 bp, Homo sapiens
  siRNA target sequence for IFRG28 (NM_022147.1,581-599).
ccctactcccccacctaaa

SEQ ID NO: 326644 - DNA, 19 bp, Homo sapiens
  siRNA target sequence for IFRG28 (NM_022147.1,583-601).
ctactcccccacctaaaga

SEQ ID NO: 326645 - DNA, 19 bp, Homo sapiens
  siRNA target sequence for IFRG28 (NM_022147.1,606-624).
gaattcctcacctggaatt

SEQ ID NO: 326646 - DNA, 19 bp, Homo sapiens
  siRNA target sequence for IFRG28 (NM_022147.1,686-704).
ggagtgggtatgagaaatt

SEQ ID NO: 326647 - DNA, 19 bp, Homo sapiens
  siRNA target sequence for IFRG28 (NM_022147.1,687-705).
gagtgggtatgagaaatta

SEQ ID NO: 326648 - DNA, 19 bp, Homo sapiens
  siRNA target sequence for IGSF8 (NM_052868.1,513-531).
cccaggatgccggcattta

SEQ ID NO: 326649 - DNA, 19 bp, Homo sapiens
  siRNA target sequence for IGSF8 (NM_052868.1,1276-1294).
ctatgagggccgacacatt

SEQ ID NO: 326650 - DNA, 19 bp, Homo sapiens
  siRNA target sequence for IGSF8 (NM_052868.1,1846-1864).
ccgctcagggcctgttaca

SEQ ID NO: 326651 - DNA, 19 bp, Homo sapiens
  siRNA target sequence for IGSF8 (NM_052868.1,1848-1866).
gctcagggcctgttacagt

SEQ ID NO: 326652 - DNA, 19 bp, Homo sapiens
  siRNA target sequence for IGSF8 (NM_052868.1,1949-1967).
gtccttggtaccatcactt

SEQ ID NO: 326653 - DNA, 19 bp, Homo sapiens
  siRNA target sequence for ITM2A (NM_004867.2,96-114).
gtgaaaatcgccttcaata

SEQ ID NO: 326654 - DNA, 19 bp, Homo sapiens
  siRNA target sequence for ITM2A (NM_004867.2,115-133).
cccctaccgccgtgcaaaa

SEQ ID NO: 326655 - DNA, 19 bp, Homo sapiens
  siRNA target sequence for ITM2A (NM_004867.2,118-136).
ctaccgccgtgcaaaagga

SEQ ID NO: 326656 - DNA, 19 bp, Homo sapiens
  siRNA target sequence for ITM2A (NM_004867.2,175-193).
cggtcagaactcagatact

SEQ ID NO: 326657 - DNA, 19 bp, Homo sapiens
  siRNA target sequence for ITM2A (NM_004867.2,281-299).
cttggcaggacttattgtt

SEQ ID NO: 326658 - DNA, 19 bp, Homo sapiens
  siRNA target sequence for ITM2A (NM_004867.2,303-321).
ggagcctgcatttacaagt

SEQ ID NO: 326659 - DNA, 19 bp, Homo sapiens
  siRNA target sequence for ITM2A (NM_004867.2,354-372).
gagatgtgcttttttgatt

SEQ ID NO: 326660 - DNA, 19 bp, Homo sapiens
  siRNA target sequence for ITM2A (NM_004867.2,455-473).
caacattgcaatcattgat

SEQ ID NO: 326661 - DNA, 19 bp, Homo sapiens
  siRNA target sequence for ITM2A (NM_004867.2,508-526).
cagcaattattcatgactt

SEQ ID NO: 326662 - DNA, 19 bp, Homo sapiens
  siRNA target sequence for ITM2A (NM_004867.2,578-596).
gatgcccctcaatacttct

SEQ ID NO: 326663 - DNA, 19 bp, Homo sapiens
  siRNA target sequence for ITM2A (NM_004867.2,581-599).
gcccctcaatacttctatt

SEQ ID NO: 326664 - DNA, 19 bp, Homo sapiens
  siRNA target sequence for ITM2A (NM_004867.2,583-601).
ccctcaatacttctattgt

SEQ ID NO: 326665 - DNA, 19 bp, Homo sapiens
  siRNA target sequence for ITM2A (NM_004867.2,584-602).
cctcaatacttctattgtt

SEQ ID NO: 326666 - DNA, 19 bp, Homo sapiens
  siRNA target sequence for ITM2A (NM_004867.2,650-668).
cagatatctgcctcaaact

SEQ ID NO: 326667 - DNA, 19 bp, Homo sapiens
  siRNA target sequence for ITM2A (NM_004867.2,652-670).
gatatctgcctcaaactta

SEQ ID NO: 326668 - DNA, 19 bp, Homo sapiens
  siRNA target sequence for ITM2A (NM_004867.2,699-717).
gaggaaattcgtgatgtta

SEQ ID NO: 326669 - DNA, 19 bp, Homo sapiens
  siRNA target sequence for ITM2A (NM_004867.2,701-719).
ggaaattcgtgatgttagt

SEQ ID NO: 326670 - DNA, 19 bp, Homo sapiens
  siRNA target sequence for ITM2A (NM_004867.2,800-818).
caacaaacgtgccattgat

SEQ ID NO: 326671 - DNA, 19 bp, Homo sapiens
  siRNA target sequence for ITM2A (NM_004867.2,803-821).
caaacgtgccattgataaa

SEQ ID NO: 326672 - DNA, 19 bp, Homo sapiens
  siRNA target sequence for ITM2A (NM_004867.2,807-825).
cgtgccattgataaatgct

SEQ ID NO: 326673 - DNA, 19 bp, Homo sapiens
  siRNA target sequence for ITM2A (NM_004867.2,835-853).
gacacttccccaacgaatt

SEQ ID NO: 326674 - DNA, 19 bp, Homo sapiens
  siRNA target sequence for ITM2A (NM_004867.2,839-857).
cttccccaacgaatttatt

SEQ ID NO: 326675 - DNA, 19 bp, Homo sapiens
  siRNA target sequence for ITM2C (NM_030926.3,345-363).
gtctacatctacagatact

SEQ ID NO: 326676 - DNA, 19 bp, Homo sapiens
  siRNA target sequence for ITM2C (NM_030926.3,373-391).
cgcagctggcccgagataa

SEQ ID NO: 326677 - DNA, 19 bp, Homo sapiens
  siRNA target sequence for ITM2C (NM_030926.3,375-393).
cagctggcccgagataact

SEQ ID NO: 326678 - DNA, 19 bp, Homo sapiens
  siRNA target sequence for ITM2C (NM_030926.3,532-550).
gtgaccctgcagacatcat

SEQ ID NO: 326679 - DNA, 19 bp, Homo sapiens
  siRNA target sequence for ITM2C (NM_030926.3,570-588).
ctgactgcgtaccatgata

SEQ ID NO: 326680 - DNA, 19 bp, Homo sapiens
  siRNA target sequence for ITM2C (NM_030926.3,690-708).
ctgccgcagacgtacatca

SEQ ID NO: 326681 - DNA, 19 bp, Homo sapiens
  siRNA target sequence for ITM2C (NM_030926.3,820-838).
cgcggaggcggatcaacaa

SEQ ID NO: 326682 - DNA, 19 bp, Homo sapiens
  siRNA target sequence for KIAA0133 (NM_014777.1,153-171).
ctggcatttcccttaagct

SEQ ID NO: 326683 - DNA, 19 bp, Homo sapiens
  siRNA target sequence for KIAA0133 (NM_014777.1,155-173).
ggcatttcccttaagctta

SEQ ID NO: 326684 - DNA, 19 bp, Homo sapiens
  siRNA target sequence for KIAA0133 (NM_014777.1,156-174).
gcatttcccttaagcttaa

SEQ ID NO: 326685 - DNA, 19 bp, Homo sapiens
  siRNA target sequence for KIAA0133 (NM_014777.1,183-201).
caacttcctgggaagataa

SEQ ID NO: 326686 - DNA, 19 bp, Homo sapiens
  siRNA target sequence for KIAA0133 (NM_014777.1,269-287).
cttgattgggcaagacaat

SEQ ID NO: 326687 - DNA, 19 bp, Homo sapiens
  siRNA target sequence for KIAA0133 (NM_014777.1,272-290).
gattgggcaagacaatcat

SEQ ID NO: 326688 - DNA, 19 bp, Homo sapiens
  siRNA target sequence for KIAA0133 (NM_014777.1,343-361).
gctttggatctatatagat

SEQ ID NO: 326689 - DNA, 19 bp, Homo sapiens
  siRNA target sequence for KIAA0133 (NM_014777.1,344-362).
ctttggatctatatagata

SEQ ID NO: 326690 - DNA, 19 bp, Homo sapiens
  siRNA target sequence for KIAA0133 (NM_014777.1,348-366).
ggatctatatagataacat

SEQ ID NO: 326691 - DNA, 19 bp, Homo sapiens
  siRNA target sequence for KIAA0133 (NM_014777.1,405-423).
gaaagaccattaatcttca

SEQ ID NO: 326692 - DNA, 19 bp, Homo sapiens
  siRNA target sequence for KIAA0133 (NM_014777.1,430-448).
cctagtcaagatcatcaat

SEQ ID NO: 326693 - DNA, 19 bp, Homo sapiens
  siRNA target sequence for KIAA0133 (NM_014777.1,627-645).
ctgtggtagcccagttgtt

SEQ ID NO: 326694 - DNA, 19 bp, Homo sapiens
  siRNA target sequence for KIAA0133 (NM_014777.1,658-676).
cctggcccttggccattat

SEQ ID NO: 326695 - DNA, 19 bp, Homo sapiens
  siRNA target sequence for KIAA0133 (NM_014777.1,966-984).
ccatggacaccgtgcttaa

SEQ ID NO: 326696 - DNA, 19 bp, Homo sapiens
  siRNA target sequence for KIAA0133 (NM_014777.1,1057-1075).
gtataagctctttctagat

SEQ ID NO: 326697 - DNA, 19 bp, Homo sapiens
  siRNA target sequence for KIAA0133 (NM_014777.1,1064-1082).
ctctttctagattcttact

SEQ ID NO: 326698 - DNA, 19 bp, Homo sapiens
  siRNA target sequence for KIAA0133 (NM_014777.1,1129-1147).
gtttggctgcttgaagatt

SEQ ID NO: 326699 - DNA, 19 bp, Homo sapiens
  siRNA target sequence for KIAA0133 (NM_014777.1,1211-1229).
gttgtggaacagctactaa

SEQ ID NO: 326700 - DNA, 19 bp, Homo sapiens
  siRNA target sequence for KIAA0133 (NM_014777.1,1214-1232).
gtggaacagctactaaact

SEQ ID NO: 326701 - DNA, 19 bp, Homo sapiens
  siRNA target sequence for KIAA0133 (NM_014777.1,1216-1234).
ggaacagctactaaactca

SEQ ID NO: 326702 - DNA, 19 bp, Homo sapiens
  siRNA target sequence for KIAA0133 (NM_014777.1,1258-1276).
catcgctgccgacagaatt

SEQ ID NO: 326703 - DNA, 19 bp, Homo sapiens
  siRNA target sequence for KIAA0133 (NM_014777.1,1317-1335).
ctgagctgctgataaacca

SEQ ID NO: 326704 - DNA, 19 bp, Homo sapiens
  siRNA target sequence for KIAA0133 (NM_014777.1,1451-1469).
gaggtaacagagtttcgaa

SEQ ID NO: 326705 - DNA, 19 bp, Homo sapiens
  siRNA target sequence for KIAA0133 (NM_014777.1,1480-1498).
ccaggaggcgcttattcgt

SEQ ID NO: 326706 - DNA, 19 bp, Homo sapiens
  siRNA target sequence for KIAA0133 (NM_014777.1,1481-1499).
caggaggcgcttattcgta

SEQ ID NO: 326707 - DNA, 19 bp, Homo sapiens
  siRNA target sequence for KIAA0133 (NM_014777.1,1497-1515).
gtactgtcttccagactta

SEQ ID NO: 326708 - DNA, 19 bp, Homo sapiens
  siRNA target sequence for KIAA0133 (NM_014777.1,1704-1722).
ctttagtcttgccctattt

SEQ ID NO: 326709 - DNA, 19 bp, Homo sapiens
  siRNA target sequence for KIAA0133 (NM_014777.1,1733-1751).
gccgacatggccctgaaat

SEQ ID NO: 326710 - DNA, 19 bp, Homo sapiens
  siRNA target sequence for KIAA0133 (NM_014777.1,1775-1793).
cactgcatcatgttcaaca

SEQ ID NO: 326711 - DNA, 19 bp, Homo sapiens
  siRNA target sequence for KIAA0133 (NM_014777.1,1977-1995).
cccaggtggacgctatgtt

SEQ ID NO: 326712 - DNA, 19 bp, Homo sapiens
  siRNA target sequence for KIAA0133 (NM_014777.1,1982-2000).
gtggacgctatgttcagtt

SEQ ID NO: 326713 - DNA, 19 bp, Homo sapiens
  siRNA target sequence for KIAA0133 (NM_014777.1,1985-2003).
gacgctatgttcagtttga

SEQ ID NO: 326714 - DNA, 19 bp, Homo sapiens
  siRNA target sequence for KIAA0133 (NM_014777.1,1988-2006).
gctatgttcagtttgaact

SEQ ID NO: 326715 - DNA, 19 bp, Homo sapiens
  siRNA target sequence for KIAA0133 (NM_014777.1,2007-2025).
gtagccagtatcactctat

SEQ ID NO: 326716 - DNA, 19 bp, Homo sapiens
  siRNA target sequence for KIAA0133 (NM_014777.1,2077-2095).
gctcccaggtgtaaaaaca

SEQ ID NO: 326717 - DNA, 19 bp, Homo sapiens
  siRNA target sequence for KIAA0133 (NM_014777.1,2094-2112).
cacagcattggaagaagat

SEQ ID NO: 326718 - DNA, 19 bp, Homo sapiens
  siRNA target sequence for KIAA0133 (NM_014777.1,2139-2157).
ctcttggtacatattgctt

SEQ ID NO: 326719 - DNA, 19 bp, Homo sapiens
  siRNA target sequence for KIAA0133 (NM_014777.1,2190-2208).
ctttaatgcaaactagttt

SEQ ID NO: 326720 - DNA, 19 bp, Homo sapiens
  siRNA target sequence for KIAA0133 (NM_014777.1,2238-2256).
ggtgcgatgctgcctttat

SEQ ID NO: 326721 - DNA, 19 bp, Homo sapiens
  siRNA target sequence for KIAA0133 (NM_014777.1,2242-2260).
cgatgctgcctttattatt

SEQ ID NO: 326722 - DNA, 19 bp, Homo sapiens
  siRNA target sequence for KIAA0133 (NM_014777.1,2355-2373).
ggcacttgattgtgtcaaa

SEQ ID NO: 326723 - DNA, 19 bp, Homo sapiens
  siRNA target sequence for KIAA0133 (NM_014777.1,2392-2410).
ctatctgtgtccagatgat

SEQ ID NO: 326724 - DNA, 19 bp, Homo sapiens
  siRNA target sequence for KIAA0133 (NM_014777.1,2521-2539).
ccttcatagccctctcttt

SEQ ID NO: 326725 - DNA, 19 bp, Homo sapiens
  siRNA target sequence for KIAA0133 (NM_014777.1,2681-2699).
gtgggtcattgggaaaaca

SEQ ID NO: 326726 - DNA, 19 bp, Homo sapiens
  siRNA target sequence for KIAA0133 (NM_014777.1,2683-2701).
gggtcattgggaaaacaga

SEQ ID NO: 326727 - DNA, 19 bp, Homo sapiens
  siRNA target sequence for KIAA0133 (NM_014777.1,2684-2702).
ggtcattgggaaaacagat

SEQ ID NO: 326728 - DNA, 19 bp, Homo sapiens
  siRNA target sequence for KIAA0133 (NM_014777.1,2712-2730).
ctggacccgaaggtataga

SEQ ID NO: 326729 - DNA, 19 bp, Homo sapiens
  siRNA target sequence for KIAA0133 (NM_014777.1,2868-2886).
caccctatcatgtgcatta

SEQ ID NO: 326730 - DNA, 19 bp, Homo sapiens
  siRNA target sequence for KIAA0133 (NM_014777.1,2870-2888).
ccctatcatgtgcattatt

SEQ ID NO: 326731 - DNA, 19 bp, Homo sapiens
  siRNA target sequence for KIAA0133 (NM_014777.1,2905-2923).
catggccgtcaccaaacta

SEQ ID NO: 326732 - DNA, 19 bp, Homo sapiens
  siRNA target sequence for KIAA0133 (NM_014777.1,2964-2982).
cgacttgctaccaacttct

SEQ ID NO: 326733 - DNA, 19 bp, Homo sapiens
  siRNA target sequence for KIAA0133 (NM_014777.1,2970-2988).
gctaccaacttcttggtta

SEQ ID NO: 326734 - DNA, 19 bp, Homo sapiens
  siRNA target sequence for KIAA0133 (NM_014777.1,2978-2996).
cttcttggttacttgcaaa

SEQ ID NO: 326735 - DNA, 19 bp, Homo sapiens
  siRNA target sequence for KIAA0133 (NM_014777.1,3009-3027).
ctcgctctgtgttcaagat

SEQ ID NO: 326736 - DNA, 19 bp, Homo sapiens
  siRNA target sequence for KIAA0133 (NM_014777.1,3025-3043).
gatcatgtatggtagtgat

SEQ ID NO: 326737 - DNA, 19 bp, Homo sapiens
  siRNA target sequence for KIAA0133 (NM_014777.1,3056-3074).
gtactgacctcattgttca

SEQ ID NO: 326738 - DNA, 19 bp, Homo sapiens
  siRNA target sequence for KIAA0133 (NM_014777.1,3077-3095).
gctagtagtaggttcctta

SEQ ID NO: 326739 - DNA, 19 bp, Homo sapiens
  siRNA target sequence for KIAA0133 (NM_014777.1,3078-3096).
ctagtagtaggttccttat

SEQ ID NO: 326740 - DNA, 19 bp, Homo sapiens
  siRNA target sequence for KIAA0133 (NM_014777.1,3144-3162).
cgttcttagaggagctaat

SEQ ID NO: 326741 - DNA, 19 bp, Homo sapiens
  siRNA target sequence for KIAA0133 (NM_014777.1,3185-3203).
ctgagcttggtgctcaatt

SEQ ID NO: 326742 - DNA, 19 bp, Homo sapiens
  siRNA target sequence for KIAA0133 (NM_014777.1,3187-3205).
gagcttggtgctcaatttt

SEQ ID NO: 326743 - DNA, 19 bp, Homo sapiens
  siRNA target sequence for KIAA0133 (NM_014777.1,3193-3211).
ggtgctcaattttagaaaa

SEQ ID NO: 326744 - DNA, 19 bp, Homo sapiens
  siRNA target sequence for KIAA0133 (NM_014777.1,3302-3320).
cttctggtgtctttaacca

SEQ ID NO: 326745 - DNA, 19 bp, Homo sapiens
  siRNA target sequence for KIAA0133 (NM_014777.1,3591-3609).
ccctctaccagggtgttta

SEQ ID NO: 326746 - DNA, 19 bp, Homo sapiens
  siRNA target sequence for KIAA0133 (NM_014777.1,3593-3611).
ctctaccagggtgtttact

SEQ ID NO: 326747 - DNA, 19 bp, Homo sapiens
  siRNA target sequence for KIAA0133 (NM_014777.1,3601-3619).
gggtgtttactctcagata

SEQ ID NO: 326748 - DNA, 19 bp, Homo sapiens
  siRNA target sequence for KIAA0133 (NM_014777.1,3603-3621).
gtgtttactctcagatact

SEQ ID NO: 326749 - DNA, 19 bp, Homo sapiens
  siRNA target sequence for KIAA0133 (NM_014777.1,3605-3623).
gtttactctcagatactgt

SEQ ID NO: 326750 - DNA, 19 bp, Homo sapiens
  siRNA target sequence for KIAA0133 (NM_014777.1,3636-3654).
ctctcgcgggacatgatca

SEQ ID NO: 326751 - DNA, 19 bp, Homo sapiens
  siRNA target sequence for KIAA0133 (NM_014777.1,3642-3660).
cgggacatgatcagtcttt

SEQ ID NO: 326752 - DNA, 19 bp, Homo sapiens
  siRNA target sequence for KIAA0133 (NM_014777.1,3645-3663).
gacatgatcagtcttttca

SEQ ID NO: 326753 - DNA, 19 bp, Homo sapiens
  siRNA target sequence for KIAA0133 (NM_014777.1,3727-3745).
cgtgtttacctccatgttt

SEQ ID NO: 326754 - DNA, 19 bp, Homo sapiens
  siRNA target sequence for KIAA0133 (NM_014777.1,3821-3839).
gccttgttcacccaaatgt

SEQ ID NO: 326755 - DNA, 19 bp, Homo sapiens
  siRNA target sequence for KIAA0133 (NM_014777.1,3822-3840).
ccttgttcacccaaatgtt

SEQ ID NO: 326756 - DNA, 19 bp, Homo sapiens
  siRNA target sequence for KIAA0133 (NM_014777.1,3823-3841).
cttgttcacccaaatgtta

SEQ ID NO: 326757 - DNA, 19 bp, Homo sapiens
  siRNA target sequence for KIAA0133 (NM_014777.1,4011-4029).
gtgcgtgtccccagatagt

SEQ ID NO: 326758 - DNA, 19 bp, Homo sapiens
  siRNA target sequence for KIAA0133 (NM_014777.1,4013-4031).
gcgtgtccccagatagtca

SEQ ID NO: 326759 - DNA, 19 bp, Homo sapiens
  siRNA target sequence for KIAA0133 (NM_014777.1,4021-4039).
ccagatagtcacagcttta

SEQ ID NO: 326760 - DNA, 19 bp, Homo sapiens
  siRNA target sequence for KIAA0133 (NM_014777.1,4032-4050).
cagctttaacactcttaaa

SEQ ID NO: 326761 - DNA, 19 bp, Homo sapiens
  siRNA target sequence for KIAA0133 (NM_014777.1,4090-4108).
ggtcgggcctgtcttagat

SEQ ID NO: 326762 - DNA, 19 bp, Homo sapiens
  siRNA target sequence for KIAA0133 (NM_014777.1,4270-4288).
gcagtgtcaccctaaggta

SEQ ID NO: 326763 - DNA, 19 bp, Homo sapiens
  siRNA target sequence for KIAA0133 (NM_014777.1,4271-4289).
cagtgtcaccctaaggtaa

SEQ ID NO: 326764 - DNA, 19 bp, Homo sapiens
  siRNA target sequence for KIAA0133 (NM_014777.1,4388-4406).
ctgcctacggtcctaaagt

SEQ ID NO: 326765 - DNA, 19 bp, Homo sapiens
  siRNA target sequence for KIAA0133 (NM_014777.1,4390-4408).
gcctacggtcctaaagtgt

SEQ ID NO: 326766 - DNA, 19 bp, Homo sapiens
  siRNA target sequence for KIAA0133 (NM_014777.1,4409-4427).
gcacgcctggttgaaagaa

SEQ ID NO: 326767 - DNA, 19 bp, Homo sapiens
  siRNA target sequence for KIAA0133 (NM_014777.1,4410-4428).
cacgcctggttgaaagaat

SEQ ID NO: 326768 - DNA, 19 bp, Homo sapiens
  siRNA target sequence for KIAA0133 (NM_014777.1,4412-4430).
cgcctggttgaaagaatgt

SEQ ID NO: 326769 - DNA, 19 bp, Homo sapiens
  siRNA target sequence for KIAA0133 (NM_014777.1,4415-4433).
ctggttgaaagaatgtaca

SEQ ID NO: 326770 - DNA, 19 bp, Homo sapiens
  siRNA target sequence for KIAA0133 (NM_014777.1,4519-4537).
cttatatccagctgtgaaa

SEQ ID NO: 326771 - DNA, 19 bp, Homo sapiens
  siRNA target sequence for KIAA0133 (NM_014777.1,4620-4638).
cgggaatgagagacatctt

SEQ ID NO: 326772 - DNA, 19 bp, Homo sapiens
  siRNA target sequence for KIAA0133 (NM_014777.1,4622-4640).
ggaatgagagacatcttta

SEQ ID NO: 326773 - DNA, 19 bp, Homo sapiens
  siRNA target sequence for KIAA0133 (NM_014777.1,4623-4641).
gaatgagagacatctttaa

SEQ ID NO: 326774 - DNA, 19 bp, Homo sapiens
  siRNA target sequence for KIAA0133 (NM_014777.1,4642-4660).
ggagctctataatgactat

SEQ ID NO: 326775 - DNA, 19 bp, Homo sapiens
  siRNA target sequence for KIAA0133 (NM_014777.1,4666-4684).
gtaccacaaggccaaacat

SEQ ID NO: 326776 - DNA, 19 bp, Homo sapiens
  siRNA target sequence for KIAA0133 (NM_014777.1,4669-4687).
ccacaaggccaaacatgaa

SEQ ID NO: 326777 - DNA, 19 bp, Homo sapiens
  siRNA target sequence for KIAA0152 (NM_014730.1,258-276).
ctgcccgagagcgtcattt

SEQ ID NO: 326778 - DNA, 19 bp, Homo sapiens
  siRNA target sequence for KIAA0152 (NM_014730.1,367-385).
cagactatggcatgaaact

SEQ ID NO: 326779 - DNA, 19 bp, Homo sapiens
  siRNA target sequence for KIAA0152 (NM_014730.1,413-431).
ccagatcctgtatcaaact

SEQ ID NO: 326780 - DNA, 19 bp, Homo sapiens
  siRNA target sequence for KIAA0152 (NM_014730.1,458-476).
ctacgaagtgcccatcaaa

SEQ ID NO: 326781 - DNA, 19 bp, Homo sapiens
  siRNA target sequence for KIAA0152 (NM_014730.1,488-506).
ctacgtgctggtcttgaaa

SEQ ID NO: 326782 - DNA, 19 bp, Homo sapiens
  siRNA target sequence for KIAA0152 (NM_014730.1,528-546).
cagtcccagcaaaaggtat

SEQ ID NO: 326783 - DNA, 19 bp, Homo sapiens
  siRNA target sequence for KIAA0152 (NM_014730.1,530-548).
gtcccagcaaaaggtattt

SEQ ID NO: 326784 - DNA, 19 bp, Homo sapiens
  siRNA target sequence for KIAA0152 (NM_014730.1,616-634).
cagctcacgatgaaattat

SEQ ID NO: 326785 - DNA, 19 bp, Homo sapiens
  siRNA target sequence for KIAA0152 (NM_014730.1,621-639).
cacgatgaaattataccta

SEQ ID NO: 326786 - DNA, 19 bp, Homo sapiens
  siRNA target sequence for KIAA0152 (NM_014730.1,691-709).
cagggaaactctacattga

SEQ ID NO: 326787 - DNA, 19 bp, Homo sapiens
  siRNA target sequence for KIAA0152 (NM_014730.1,694-712).
ggaaactctacattgagtt

SEQ ID NO: 326788 - DNA, 19 bp, Homo sapiens
  siRNA target sequence for KIAA0152 (NM_014730.1,710-728).
gtttgtcaaggggtactat

SEQ ID NO: 326789 - DNA, 19 bp, Homo sapiens
  siRNA target sequence for KIAA0152 (NM_014730.1,716-734).
caaggggtactatgacaat

SEQ ID NO: 326790 - DNA, 19 bp, Homo sapiens
  siRNA target sequence for KIAA0152 (NM_014730.1,802-820).
cgggattggagaagaaaga

SEQ ID NO: 326791 - DNA, 19 bp, Homo sapiens
  siRNA target sequence for KIAA0152 (NM_014730.1,846-864).
gatgaagggtctaatctca

SEQ ID NO: 326792 - DNA, 19 bp, Homo sapiens
  siRNA target sequence for KIAA0152 (NM_014730.1,959-977).
ggccttcggagtcttcatt

SEQ ID NO: 326793 - DNA, 19 bp, Homo sapiens
  siRNA target sequence for KIAA0247 (NM_014734.1,341-359).
cttccgctagtgatccttt

SEQ ID NO: 326794 - DNA, 19 bp, Homo sapiens
  siRNA target sequence for KIAA0247 (NM_014734.1,468-486).
gcagtgtcatcgaatacct

SEQ ID NO: 326795 - DNA, 19 bp, Homo sapiens
  siRNA target sequence for KIAA0247 (NM_014734.1,489-507).
gtgctgaaggctacatgtt

SEQ ID NO: 326796 - DNA, 19 bp, Homo sapiens
  siRNA target sequence for KIAA0247 (NM_014734.1,505-523).
gttgaagggcgattacaaa

SEQ ID NO: 326797 - DNA, 19 bp, Homo sapiens
  siRNA target sequence for KIAA0247 (NM_014734.1,578-596).
ctcaacgaggataaagaca

SEQ ID NO: 326798 - DNA, 19 bp, Homo sapiens
  siRNA target sequence for KIAA0247 (NM_014734.1,612-630).
gggtccccacgctgtctat

SEQ ID NO: 326799 - DNA, 19 bp, Homo sapiens
  siRNA target sequence for KIAA0247 (NM_014734.1,613-631).
ggtccccacgctgtctata

SEQ ID NO: 326800 - DNA, 19 bp, Homo sapiens
  siRNA target sequence for KIAA0247 (NM_014734.1,625-643).
gtctatagtggcttctact

SEQ ID NO: 326801 - DNA, 19 bp, Homo sapiens
  siRNA target sequence for KIAA0247 (NM_014734.1,648-666).
gctccgtggcgctcattct

SEQ ID NO: 326802 - DNA, 19 bp, Homo sapiens
  siRNA target sequence for KIAA0247 (NM_014734.1,795-813).
catacgaggaggctgtata

SEQ ID NO: 326803 - DNA, 19 bp, Homo sapiens
  siRNA target sequence for KIAA0247 (NM_014734.1,969-987).
gccagtctggactatgtga

SEQ ID NO: 326804 - DNA, 19 bp, Homo sapiens
  siRNA target sequence for KIAA0247 (NM_014734.1,970-988).
ccagtctggactatgtgaa

SEQ ID NO: 326805 - DNA, 19 bp, Homo sapiens
  siRNA target sequence for KIAA0247 (NM_014734.1,1066-1084).
ccgccaactggcacacaaa

SEQ ID NO: 326806 - DNA, 19 bp, Homo sapiens
  siRNA target sequence for KIAA0247 (NM_014734.1,1100-1118).
gagaacagtgacatacaaa

SEQ ID NO: 326807 - DNA, 19 bp, Homo sapiens
  siRNA target sequence for KIAA0247 (NM_014734.1,1141-1159).
ggagtacacagatgatatt

SEQ ID NO: 326808 - DNA, 19 bp, Homo sapiens
  siRNA target sequence for KIAA0779 (NM_015008.1,527-545).
gtcaaaggtgggttttcca

SEQ ID NO: 326809 - DNA, 19 bp, Homo sapiens
  siRNA target sequence for KIAA0779 (NM_015008.1,573-591).
caggcgctgtagtctcaaa

SEQ ID NO: 326810 - DNA, 19 bp, Homo sapiens
  siRNA target sequence for KIAA0779 (NM_015008.1,586-604).
ctcaaagcccagagagatt

SEQ ID NO: 326811 - DNA, 19 bp, Homo sapiens
  siRNA target sequence for KIAA0779 (NM_015008.1,607-625).
ctcactcattcggaacaaa

SEQ ID NO: 326812 - DNA, 19 bp, Homo sapiens
  siRNA target sequence for KIAA0779 (NM_015008.1,694-712).
gaaggctttgggagtgatt

SEQ ID NO: 326813 - DNA, 19 bp, Homo sapiens
  siRNA target sequence for KIAA0779 (NM_015008.1,698-716).
gctttgggagtgatttcaa

SEQ ID NO: 326814 - DNA, 19 bp, Homo sapiens
  siRNA target sequence for KIAA0779 (NM_015008.1,703-721).
gggagtgatttcaaacttt

SEQ ID NO: 326815 - DNA, 19 bp, Homo sapiens
  siRNA target sequence for KIAA0779 (NM_015008.1,707-725).
gtgatttcaaactttcagt

SEQ ID NO: 326816 - DNA, 19 bp, Homo sapiens
  siRNA target sequence for KIAA0779 (NM_015008.1,724-742).
gtctagcccaaaatatggt

SEQ ID NO: 326817 - DNA, 19 bp, Homo sapiens
  siRNA target sequence for KIAA0779 (NM_015008.1,740-758).
ggtagtgaagaagattgtt

SEQ ID NO: 326818 - DNA, 19 bp, Homo sapiens
  siRNA target sequence for KIAA0779 (NM_015008.1,850-868).
gcagagctcaggatttgat

SEQ ID NO: 326819 - DNA, 19 bp, Homo sapiens
  siRNA target sequence for KIAA0779 (NM_015008.1,861-879).
gatttgatgcactactaca

SEQ ID NO: 326820 - DNA, 19 bp, Homo sapiens
  siRNA target sequence for KIAA0779 (NM_015008.1,933-951).
ctctcaaggaacattatca

SEQ ID NO: 326821 - DNA, 19 bp, Homo sapiens
  siRNA target sequence for KIAA0779 (NM_015008.1,944-962).
cattatcagagggactatt

SEQ ID NO: 326822 - DNA, 19 bp, Homo sapiens
  siRNA target sequence for KIAA0779 (NM_015008.1,952-970).
gagggactattccttaata

SEQ ID NO: 326823 - DNA, 19 bp, Homo sapiens
  siRNA target sequence for KIAA0779 (NM_015008.1,985-1003).
ggaggagcgatatagatgt

SEQ ID NO: 326824 - DNA, 19 bp, Homo sapiens
  siRNA target sequence for KIAA0779 (NM_015008.1,993-1011).
gatatagatgtgaacgatt

SEQ ID NO: 326825 - DNA, 19 bp, Homo sapiens
  siRNA target sequence for KIAA0779 (NM_015008.1,1035-1053).
cagagctccaccagaatga

SEQ ID NO: 326826 - DNA, 19 bp, Homo sapiens
  siRNA target sequence for KIAA0779 (NM_015008.1,1046-1064).
cagaatgaaatcttgaact

SEQ ID NO: 326827 - DNA, 19 bp, Homo sapiens
  siRNA target sequence for KIAA0779 (NM_015008.1,1099-1117).
cgcgtatcagtcctatgaa

SEQ ID NO: 326828 - DNA, 19 bp, Homo sapiens
  siRNA target sequence for KIAA0779 (NM_015008.1,1345-1363).
caggacgttcagcacttta

SEQ ID NO: 326829 - DNA, 19 bp, Homo sapiens
  siRNA target sequence for KIAA0779 (NM_015008.1,1347-1365).
ggacgttcagcactttatt

SEQ ID NO: 326830 - DNA, 19 bp, Homo sapiens
  siRNA target sequence for KIAA0779 (NM_015008.1,1417-1435).
ctatgtggaacggttcttt

SEQ ID NO: 326831 - DNA, 19 bp, Homo sapiens
  siRNA target sequence for KIAA0779 (NM_015008.1,1421-1439).
gtggaacggttcttttcat

SEQ ID NO: 326832 - DNA, 19 bp, Homo sapiens
  siRNA target sequence for KIAA1145 (NM_020698.1,195-213).
gggtagaacgtcatgacat

SEQ ID NO: 326833 - DNA, 19 bp, Homo sapiens
  siRNA target sequence for KIAA1145 (NM_020698.1,200-218).
gaacgtcatgacatgaata

SEQ ID NO: 326834 - DNA, 19 bp, Homo sapiens
  siRNA target sequence for KIAA1145 (NM_020698.1,203-221).
cgtcatgacatgaatacct

SEQ ID NO: 326835 - DNA, 19 bp, Homo sapiens
  siRNA target sequence for KIAA1145 (NM_020698.1,204-222).
gtcatgacatgaatacctt

SEQ ID NO: 326836 - DNA, 19 bp, Homo sapiens
  siRNA target sequence for KIAA1145 (NM_020698.1,259-277).
caccaacctcaactttgat

SEQ ID NO: 326837 - DNA, 19 bp, Homo sapiens
  siRNA target sequence for KIAA1145 (NM_020698.1,261-279).
ccaacctcaactttgatgt

SEQ ID NO: 326838 - DNA, 19 bp, Homo sapiens
  siRNA target sequence for KIAA1145 (NM_020698.1,390-408).
ggaatgttgcggagtatct

SEQ ID NO: 326839 - DNA, 19 bp, Homo sapiens
  siRNA target sequence for KIAA1145 (NM_020698.1,444-462).
gacgtatcaagcaagtctt

SEQ ID NO: 326840 - DNA, 19 bp, Homo sapiens
  siRNA target sequence for KIAA1145 (NM_020698.1,592-610).
ccacctgaaggatatacat

SEQ ID NO: 326841 - DNA, 19 bp, Homo sapiens
  siRNA target sequence for KIAA1145 (NM_020698.1,602-620).
gatatacatcgctctttga

SEQ ID NO: 326842 - DNA, 19 bp, Homo sapiens
  siRNA target sequence for KIAA1145 (NM_020698.1,701-719).
ccacctgtgttcgttttca

SEQ ID NO: 326843 - DNA, 19 bp, Homo sapiens
  siRNA target sequence for KIAA1145 (NM_020698.1,707-725).
gtgttcgttttcaataagt

SEQ ID NO: 326844 - DNA, 19 bp, Homo sapiens
  siRNA target sequence for KIAA1145 (NM_020698.1,738-756).
ccaacctgatccggaataa

SEQ ID NO: 326845 - DNA, 19 bp, Homo sapiens
  siRNA target sequence for KIAA1145 (NM_020698.1,742-760).
cctgatccggaataagttt

SEQ ID NO: 326846 - DNA, 19 bp, Homo sapiens
  siRNA target sequence for KIAA1145 (NM_020698.1,780-798).
ctcacttgaaaaattcctt

SEQ ID NO: 326847 - DNA, 19 bp, Homo sapiens
  siRNA target sequence for KIAA1145 (NM_020698.1,843-861).
gcgctaccatcgtgaacaa

SEQ ID NO: 326848 - DNA, 19 bp, Homo sapiens
  siRNA target sequence for KIAA1145 (NM_020698.1,844-862).
cgctaccatcgtgaacaaa

SEQ ID NO: 326849 - DNA, 19 bp, Homo sapiens
  siRNA target sequence for KIAA1145 (NM_020698.1,903-921).
caggctcggccgacagtaa

SEQ ID NO: 326850 - DNA, 19 bp, Homo sapiens
  siRNA target sequence for KIAA1145 (NM_020698.1,998-1016).
ctgagggagatcaaggata

SEQ ID NO: 326851 - DNA, 19 bp, Homo sapiens
  siRNA target sequence for KIAA1145 (NM_020698.1,1046-1064).
gcactgaaggtgcagttta

SEQ ID NO: 326852 - DNA, 19 bp, Homo sapiens
  siRNA target sequence for KIAA1145 (NM_020698.1,1323-1341).
cagacaccgtgaatgctaa

SEQ ID NO: 326853 - DNA, 19 bp, Homo sapiens
  siRNA target sequence for KIAA1145 (NM_020698.1,1441-1459).
gagtcgctgccacattctt

SEQ ID NO: 326854 - DNA, 19 bp, Homo sapiens
  siRNA target sequence for KIAA1145 (NM_020698.1,1523-1541).
gccatagaaaggatgataa

SEQ ID NO: 326855 - DNA, 19 bp, Homo sapiens
  siRNA target sequence for LAPTM4B (NM_018407.3,376-394).
cggtcgacgctcctgaaaa

SEQ ID NO: 326856 - DNA, 19 bp, Homo sapiens
  siRNA target sequence for LAPTM4B (NM_018407.3,378-396).
gtcgacgctcctgaaaact

SEQ ID NO: 326857 - DNA, 19 bp, Homo sapiens
  siRNA target sequence for LAPTM4B (NM_018407.3,445-463).
ccctggacgcggttctact

SEQ ID NO: 326858 - DNA, 19 bp, Homo sapiens
  siRNA target sequence for LAPTM4B (NM_018407.3,511-529).
ctcggcgtctggtatctga

SEQ ID NO: 326859 - DNA, 19 bp, Homo sapiens
  siRNA target sequence for LAPTM4B (NM_018407.3,515-533).
gcgtctggtatctgatcat

SEQ ID NO: 326860 - DNA, 19 bp, Homo sapiens
  siRNA target sequence for LAPTM4B (NM_018407.3,517-535).
gtctggtatctgatcatca

SEQ ID NO: 326861 - DNA, 19 bp, Homo sapiens
  siRNA target sequence for LAPTM4B (NM_018407.3,519-537).
ctggtatctgatcatcaat

SEQ ID NO: 326862 - DNA, 19 bp, Homo sapiens
  siRNA target sequence for LAPTM4B (NM_018407.3,538-556).
gctgtggtactgttgattt

SEQ ID NO: 326863 - DNA, 19 bp, Homo sapiens
  siRNA target sequence for LAPTM4B (NM_018407.3,570-588).
ggctgatccggatcagtat

SEQ ID NO: 326864 - DNA, 19 bp, Homo sapiens
  siRNA target sequence for LAPTM4B (NM_018407.3,571-589).
gctgatccggatcagtata

SEQ ID NO: 326865 - DNA, 19 bp, Homo sapiens
  siRNA target sequence for LAPTM4B (NM_018407.3,572-590).
ctgatccggatcagtataa

SEQ ID NO: 326866 - DNA, 19 bp, Homo sapiens
  siRNA target sequence for LAPTM4B (NM_018407.3,574-592).
gatccggatcagtataact

SEQ ID NO: 326867 - DNA, 19 bp, Homo sapiens
  siRNA target sequence for LAPTM4B (NM_018407.3,579-597).
ggatcagtataacttttca

SEQ ID NO: 326868 - DNA, 19 bp, Homo sapiens
  siRNA target sequence for LAPTM4B (NM_018407.3,583-601).
cagtataacttttcaagtt

SEQ ID NO: 326869 - DNA, 19 bp, Homo sapiens
  siRNA target sequence for LAPTM4B (NM_018407.3,585-603).
gtataacttttcaagttct

SEQ ID NO: 326870 - DNA, 19 bp, Homo sapiens
  siRNA target sequence for LAPTM4B (NM_018407.3,774-792).
catgttggttgcaatcact

SEQ ID NO: 326871 - DNA, 19 bp, Homo sapiens
  siRNA target sequence for LAPTM4B (NM_018407.3,806-824).
caaactccattcaggaata

SEQ ID NO: 326872 - DNA, 19 bp, Homo sapiens
  siRNA target sequence for LAPTM4B (NM_018407.3,829-847).
cggcaactgcctcctaatt

SEQ ID NO: 326873 - DNA, 19 bp, Homo sapiens
  siRNA target sequence for LAPTM4B (NM_018407.3,830-848).
ggcaactgcctcctaattt

SEQ ID NO: 326874 - DNA, 19 bp, Homo sapiens
  siRNA target sequence for LAPTM4B (NM_018407.3,865-883).
gtcatgtcagtgaatccta

SEQ ID NO: 326875 - DNA, 19 bp, Homo sapiens
  siRNA target sequence for LAPTM4B (NM_018407.3,959-977).
ggaactgctaccgatacat

SEQ ID NO: 326876 - DNA, 19 bp, Homo sapiens
  siRNA target sequence for LAPTM4B (NM_018407.3,963-981).
ctgctaccgatacatcaat

SEQ ID NO: 326877 - DNA, 19 bp, Homo sapiens
  siRNA target sequence for LAPTM4B (NM_018407.3,997-1015).
gatgtcctggtttatgtta

SEQ ID NO: 326878 - DNA, 19 bp, Homo sapiens
  siRNA target sequence for LAPTM4B (NM_018407.3,1035-1053).
gctgctacccccgtatgat

SEQ ID NO: 326879 - DNA, 19 bp, Homo sapiens
  siRNA target sequence for LAPTM4B (NM_018407.3,1038-1056).
gctacccccgtatgatgat

SEQ ID NO: 326880 - DNA, 19 bp, Homo sapiens
  siRNA target sequence for LEPROTL1 (NM_015344.1,89-107).
caggcatcaaagctttgat

SEQ ID NO: 326881 - DNA, 19 bp, Homo sapiens
  siRNA target sequence for LEPROTL1 (NM_015344.1,91-109).
ggcatcaaagctttgatta

SEQ ID NO: 326882 - DNA, 19 bp, Homo sapiens
  siRNA target sequence for LEPROTL1 (NM_015344.1,125-143).
gagcaatcggactgatgtt

SEQ ID NO: 326883 - DNA, 19 bp, Homo sapiens
  siRNA target sequence for LEPROTL1 (NM_015344.1,127-145).
gcaatcggactgatgtttt

SEQ ID NO: 326884 - DNA, 19 bp, Homo sapiens
  siRNA target sequence for LEPROTL1 (NM_015344.1,128-146).
caatcggactgatgttttt

SEQ ID NO: 326885 - DNA, 19 bp, Homo sapiens
  siRNA target sequence for LEPROTL1 (NM_015344.1,154-172).
ggatgtgcccttccaatat

SEQ ID NO: 326886 - DNA, 19 bp, Homo sapiens
  siRNA target sequence for LEPROTL1 (NM_015344.1,155-173).
gatgtgcccttccaatata

SEQ ID NO: 326887 - DNA, 19 bp, Homo sapiens
  siRNA target sequence for LEPROTL1 (NM_015344.1,160-178).
gcccttccaatatacaaca

SEQ ID NO: 326888 - DNA, 19 bp, Homo sapiens
  siRNA target sequence for LEPROTL1 (NM_015344.1,161-179).
cccttccaatatacaacaa

SEQ ID NO: 326889 - DNA, 19 bp, Homo sapiens
  siRNA target sequence for LEPROTL1 (NM_015344.1,162-180).
ccttccaatatacaacaaa

SEQ ID NO: 326890 - DNA, 19 bp, Homo sapiens
  siRNA target sequence for LEPROTL1 (NM_015344.1,163-181).
cttccaatatacaacaaat

SEQ ID NO: 326891 - DNA, 19 bp, Homo sapiens
  siRNA target sequence for LEPROTL1 (NM_015344.1,183-201).
ctggcccctctttgttcta

SEQ ID NO: 326892 - DNA, 19 bp, Homo sapiens
  siRNA target sequence for LEPROTL1 (NM_015344.1,231-249).
ctgcatagcaagaagatta

SEQ ID NO: 326893 - DNA, 19 bp, Homo sapiens
  siRNA target sequence for LEPROTL1 (NM_015344.1,256-274).
gatacagatgctatgagta

SEQ ID NO: 326894 - DNA, 19 bp, Homo sapiens
  siRNA target sequence for LEPROTL1 (NM_015344.1,266-284).
ctatgagtaacgcttgtaa

SEQ ID NO: 326895 - DNA, 19 bp, Homo sapiens
  siRNA target sequence for LEPROTL1 (NM_015344.1,270-288).
gagtaacgcttgtaaggaa

SEQ ID NO: 326896 - DNA, 19 bp, Homo sapiens
  siRNA target sequence for LEPROTL1 (NM_015344.1,285-303).
ggaacttgccatctttctt

SEQ ID NO: 326897 - DNA, 19 bp, Homo sapiens
  siRNA target sequence for LEPROTL1 (NM_015344.1,286-304).
gaacttgccatctttctta

SEQ ID NO: 326898 - DNA, 19 bp, Homo sapiens
  siRNA target sequence for LEPROTL1 (NM_015344.1,326-344).
cttttggactccctattgt

SEQ ID NO: 326899 - DNA, 19 bp, Homo sapiens
  siRNA target sequence for LEPROTL1 (NM_015344.1,372-390).
gggagcttgtgcacttgtt

SEQ ID NO: 326900 - DNA, 19 bp, Homo sapiens
  siRNA target sequence for LEPROTL1 (NM_015344.1,408-426).
catctttgcaactatacta

SEQ ID NO: 326901 - DNA, 19 bp, Homo sapiens
  siRNA target sequence for LEPROTL1 (NM_015344.1,416-434).
caactatactaggcttttt

SEQ ID NO: 326902 - DNA, 19 bp, Homo sapiens
  siRNA target sequence for LOC116211 (NM_138461.1,353-371).
gatacggctgcttcagtaa

SEQ ID NO: 326903 - DNA, 19 bp, Homo sapiens
  siRNA target sequence for LOC116211 (NM_138461.1,433-451).
gccctgatttgctttgtca

SEQ ID NO: 326904 - DNA, 19 bp, Homo sapiens
  siRNA target sequence for LOC116211 (NM_138461.1,496-514).
gtttcatccttcaatcaga

SEQ ID NO: 326905 - DNA, 19 bp, Homo sapiens
  siRNA target sequence for LOC116211 (NM_138461.1,549-567).
cctgcatagtaggaattat

SEQ ID NO: 326906 - DNA, 19 bp, Homo sapiens
  siRNA target sequence for LOC116211 (NM_138461.1,553-571).
catagtaggaattatctgt

SEQ ID NO: 326907 - DNA, 19 bp, Homo sapiens
  siRNA target sequence for LOC116211 (NM_138461.1,685-703).
gtcgttcatgtcatcaaca

SEQ ID NO: 326908 - DNA, 19 bp, Homo sapiens
  siRNA target sequence for LOC116441 (NM_138786.1,161-179).
ggaggctgcctaagttgtt

SEQ ID NO: 326909 - DNA, 19 bp, Homo sapiens
  siRNA target sequence for LOC116441 (NM_138786.1,190-208).
gcttgcactttggagtata

SEQ ID NO: 326910 - DNA, 19 bp, Homo sapiens
  siRNA target sequence for LOC116441 (NM_138786.1,191-209).
cttgcactttggagtataa

SEQ ID NO: 326911 - DNA, 19 bp, Homo sapiens
  siRNA target sequence for LOC116441 (NM_138786.1,201-219).
ggagtataatcgtgaacat

SEQ ID NO: 326912 - DNA, 19 bp, Homo sapiens
  siRNA target sequence for LOC116441 (NM_138786.1,202-220).
gagtataatcgtgaacata

SEQ ID NO: 326913 - DNA, 19 bp, Homo sapiens
  siRNA target sequence for LOC116441 (NM_138786.1,211-229).
cgtgaacatattattgtat

SEQ ID NO: 326914 - DNA, 19 bp, Homo sapiens
  siRNA target sequence for LOC116441 (NM_138786.1,235-253).
gaatgggcaaacttcctat

SEQ ID NO: 326915 - DNA, 19 bp, Homo sapiens
  siRNA target sequence for LOC116441 (NM_138786.1,249-267).
cctatgcatccagcaataa

SEQ ID NO: 326916 - DNA, 19 bp, Homo sapiens
  siRNA target sequence for LOC116441 (NM_138786.1,254-272).
gcatccagcaataaactca

SEQ ID NO: 326917 - DNA, 19 bp, Homo sapiens
  siRNA target sequence for LOC116441 (NM_138786.1,309-327).
caggcatcatgatgcttat

SEQ ID NO: 326918 - DNA, 19 bp, Homo sapiens
  siRNA target sequence for LOC116441 (NM_138786.1,312-330).
gcatcatgatgcttatagt

SEQ ID NO: 326919 - DNA, 19 bp, Homo sapiens
  siRNA target sequence for LOC116441 (NM_138786.1,313-331).
catcatgatgcttatagta

SEQ ID NO: 326920 - DNA, 19 bp, Homo sapiens
  siRNA target sequence for LOC116441 (NM_138786.1,316-334).
catgatgcttatagtaaca

SEQ ID NO: 326921 - DNA, 19 bp, Homo sapiens
  siRNA target sequence for LOC116441 (NM_138786.1,322-340).
gcttatagtaacaacagtt

SEQ ID NO: 326922 - DNA, 19 bp, Homo sapiens
  siRNA target sequence for LOC116441 (NM_138786.1,352-370).
ggagaataataacaactat

SEQ ID NO: 326923 - DNA, 19 bp, Homo sapiens
  siRNA target sequence for LOC116441 (NM_138786.1,407-425).
gtgacactgctgtcaatta

SEQ ID NO: 326924 - DNA, 19 bp, Homo sapiens
  siRNA target sequence for LOC116441 (NM_138786.1,411-429).
cactgctgtcaattatctt

SEQ ID NO: 326925 - DNA, 19 bp, Homo sapiens
  siRNA target sequence for LOC116441 (NM_138786.1,541-559).
cactgctggacgtttcctt

SEQ ID NO: 326926 - DNA, 19 bp, Homo sapiens
  siRNA target sequence for LOC116441 (NM_138786.1,546-564).
ctggacgtttccttacaga

SEQ ID NO: 326927 - DNA, 19 bp, Homo sapiens
  siRNA target sequence for LOC116441 (NM_138786.1,556-574).
ccttacagattctagcata

SEQ ID NO: 326928 - DNA, 19 bp, Homo sapiens
  siRNA target sequence for LOC116441 (NM_138786.1,557-575).
cttacagattctagcatat

SEQ ID NO: 326929 - DNA, 19 bp, Homo sapiens
  siRNA target sequence for LOC116441 (NM_138786.1,586-604).
cctggaacctgcacatgtt

SEQ ID NO: 326930 - DNA, 19 bp, Homo sapiens
  siRNA target sequence for LOC116441 (NM_138786.1,648-666).
gtgggcttcaagtgatcat

SEQ ID NO: 326931 - DNA, 19 bp, Homo sapiens
  siRNA target sequence for LOC116441 (NM_138786.1,669-687).
gcctcatcagagtagtcat

SEQ ID NO: 326932 - DNA, 19 bp, Homo sapiens
  siRNA target sequence for LOC116441 (NM_138786.1,700-718).
gatactgtgtggaagctat

SEQ ID NO: 326933 - DNA, 19 bp, Homo sapiens
  siRNA target sequence for LOC116441 (NM_138786.1,727-745).
cttccagcctggaatcatt

SEQ ID NO: 326934 - DNA, 19 bp, Homo sapiens
  siRNA target sequence for LOC91663 (NM_138373.2,962-980).
cggcgctcgagagatgtaa

SEQ ID NO: 326935 - DNA, 19 bp, Homo sapiens
  siRNA target sequence for LRRTM1 (NM_178839.3,735-753).
ctcggtctctgtctatact

SEQ ID NO: 326936 - DNA, 19 bp, Homo sapiens
  siRNA target sequence for LRRTM1 (NM_178839.3,967-985).
gccagttcacggggttaat

SEQ ID NO: 326937 - DNA, 19 bp, Homo sapiens
  siRNA target sequence for LRRTM1 (NM_178839.3,997-1015).
ggctctatctggatcacaa

SEQ ID NO: 326938 - DNA, 19 bp, Homo sapiens
  siRNA target sequence for LRRTM1 (NM_178839.3,998-1016).
gctctatctggatcacaat

SEQ ID NO: 326939 - DNA, 19 bp, Homo sapiens
  siRNA target sequence for LRRTM1 (NM_178839.3,1471-1489).
cgctggactgggtttggaa

SEQ ID NO: 326940 - DNA, 19 bp, Homo sapiens
  siRNA target sequence for LRRTM2 (NM_015564.1,444-462).
ctatgctggcagcaatata

SEQ ID NO: 326941 - DNA, 19 bp, Homo sapiens
  siRNA target sequence for LRRTM2 (NM_015564.1,455-473).
gcaatatatgcaatgagta

SEQ ID NO: 326942 - DNA, 19 bp, Homo sapiens
  siRNA target sequence for LRRTM2 (NM_015564.1,464-482).
gcaatgagtatggttttaa

SEQ ID NO: 326943 - DNA, 19 bp, Homo sapiens
  siRNA target sequence for LRRTM2 (NM_015564.1,528-546).
gcgagaagctgctcttcta

SEQ ID NO: 326944 - DNA, 19 bp, Homo sapiens
  siRNA target sequence for LRRTM2 (NM_015564.1,609-627).
ccctgaggcacaatcacat

SEQ ID NO: 326945 - DNA, 19 bp, Homo sapiens
  siRNA target sequence for LRRTM2 (NM_015564.1,653-671).
gccagcttcagtcaactta

SEQ ID NO: 326946 - DNA, 19 bp, Homo sapiens
  siRNA target sequence for LRRTM2 (NM_015564.1,655-673).
cagcttcagtcaacttact

SEQ ID NO: 326947 - DNA, 19 bp, Homo sapiens
  siRNA target sequence for LRRTM2 (NM_015564.1,675-693).
ggctccacttagatcacaa

SEQ ID NO: 326948 - DNA, 19 bp, Homo sapiens
  siRNA target sequence for LRRTM2 (NM_015564.1,676-694).
gctccacttagatcacaat

SEQ ID NO: 326949 - DNA, 19 bp, Homo sapiens
  siRNA target sequence for LRRTM2 (NM_015564.1,682-700).
cttagatcacaatcaaatt

SEQ ID NO: 326950 - DNA, 19 bp, Homo sapiens
  siRNA target sequence for LRRTM2 (NM_015564.1,719-737).
gcttttcaaggactatata

SEQ ID NO: 326951 - DNA, 19 bp, Homo sapiens
  siRNA target sequence for LRRTM2 (NM_015564.1,720-738).
cttttcaaggactatataa

SEQ ID NO: 326952 - DNA, 19 bp, Homo sapiens
  siRNA target sequence for LRRTM2 (NM_015564.1,725-743).
caaggactatataaactta

SEQ ID NO: 326953 - DNA, 19 bp, Homo sapiens
  siRNA target sequence for LRRTM2 (NM_015564.1,778-796).
cttgccaaacacaactttt

SEQ ID NO: 326954 - DNA, 19 bp, Homo sapiens
  siRNA target sequence for LRRTM2 (NM_015564.1,883-901).
gctgcagaccttgcattta

SEQ ID NO: 326955 - DNA, 19 bp, Homo sapiens
  siRNA target sequence for LRRTM2 (NM_015564.1,887-905).
cagaccttgcatttacgtt

SEQ ID NO: 326956 - DNA, 19 bp, Homo sapiens
  siRNA target sequence for LRRTM2 (NM_015564.1,948-966).
gtcgtagtctggagtttct

SEQ ID NO: 326957 - DNA, 19 bp, Homo sapiens
  siRNA target sequence for LRRTM2 (NM_015564.1,967-985).
ggatttgagcacaaatcgt

SEQ ID NO: 326958 - DNA, 19 bp, Homo sapiens
  siRNA target sequence for LRRTM2 (NM_015564.1,968-986).
gatttgagcacaaatcgtt

SEQ ID NO: 326959 - DNA, 19 bp, Homo sapiens
  siRNA target sequence for LRRTM2 (NM_015564.1,993-1011).
gtttggctcgcaatggatt

SEQ ID NO: 326960 - DNA, 19 bp, Homo sapiens
  siRNA target sequence for LRRTM2 (NM_015564.1,997-1015).
ggctcgcaatggatttgca

SEQ ID NO: 326961 - DNA, 19 bp, Homo sapiens
  siRNA target sequence for LRRTM2 (NM_015564.1,1003-1021).
caatggatttgcaggatta

SEQ ID NO: 326962 - DNA, 19 bp, Homo sapiens
  siRNA target sequence for LRRTM2 (NM_015564.1,1055-1073).
cagctgacgaagattaatt

SEQ ID NO: 326963 - DNA, 19 bp, Homo sapiens
  siRNA target sequence for LRRTM2 (NM_015564.1,1057-1075).
gctgacgaagattaatttt

SEQ ID NO: 326964 - DNA, 19 bp, Homo sapiens
  siRNA target sequence for LRRTM2 (NM_015564.1,1060-1078).
gacgaagattaattttgct

SEQ ID NO: 326965 - DNA, 19 bp, Homo sapiens
  siRNA target sequence for LRRTM2 (NM_015564.1,1102-1120).
gcacacgctcttcttacaa

SEQ ID NO: 326966 - DNA, 19 bp, Homo sapiens
  siRNA target sequence for LRRTM2 (NM_015564.1,1103-1121).
cacacgctcttcttacaat

SEQ ID NO: 326967 - DNA, 19 bp, Homo sapiens
  siRNA target sequence for LRRTM2 (NM_015564.1,1111-1129).
cttcttacaatggaacaaa

SEQ ID NO: 326968 - DNA, 19 bp, Homo sapiens
  siRNA target sequence for LRRTM2 (NM_015564.1,1164-1182).
ggggcactttagaaaagct

SEQ ID NO: 326969 - DNA, 19 bp, Homo sapiens
  siRNA target sequence for LRRTM2 (NM_015564.1,1165-1183).
gggcactttagaaaagcta

SEQ ID NO: 326970 - DNA, 19 bp, Homo sapiens
  siRNA target sequence for LRRTM2 (NM_015564.1,1210-1228).
catcgacttgacagtgttt

SEQ ID NO: 326971 - DNA, 19 bp, Homo sapiens
  siRNA target sequence for LRRTM2 (NM_015564.1,1213-1231).
cgacttgacagtgtttgaa

SEQ ID NO: 326972 - DNA, 19 bp, Homo sapiens
  siRNA target sequence for LRRTM2 (NM_015564.1,1229-1247).
gaaacgatgcccaatctta

SEQ ID NO: 326973 - DNA, 19 bp, Homo sapiens
  siRNA target sequence for LRRTM2 (NM_015564.1,1262-1280).
gataacaacaagttaaaca

SEQ ID NO: 326974 - DNA, 19 bp, Homo sapiens
  siRNA target sequence for LRRTM2 (NM_015564.1,1286-1304).
gattccaagatcttaaact

SEQ ID NO: 326975 - DNA, 19 bp, Homo sapiens
  siRNA target sequence for LRRTM2 (NM_015564.1,1510-1528).
cactgtcatggctacaact

SEQ ID NO: 326976 - DNA, 19 bp, Homo sapiens
  siRNA target sequence for LRRTM2 (NM_015564.1,1512-1530).
ctgtcatggctacaactta

SEQ ID NO: 326977 - DNA, 19 bp, Homo sapiens
  siRNA target sequence for LRRTM2 (NM_015564.1,1514-1532).
gtcatggctacaacttata

SEQ ID NO: 326978 - DNA, 19 bp, Homo sapiens
  siRNA target sequence for LRRTM2 (NM_015564.1,1519-1537).
ggctacaacttatagagat

SEQ ID NO: 326979 - DNA, 19 bp, Homo sapiens
  siRNA target sequence for LRRTM2 (NM_015564.1,1538-1556).
ccaaccactgaatatacaa

SEQ ID NO: 326980 - DNA, 19 bp, Homo sapiens
  siRNA target sequence for LRRTM2 (NM_015564.1,1539-1557).
caaccactgaatatacaaa

SEQ ID NO: 326981 - DNA, 19 bp, Homo sapiens
  siRNA target sequence for LRRTM2 (NM_015564.1,1560-1578).
gaataagctcatcaagtta

SEQ ID NO: 326982 - DNA, 19 bp, Homo sapiens
  siRNA target sequence for LRRTM2 (NM_015564.1,1610-1628).
gcaggcatagcagttacta

SEQ ID NO: 326983 - DNA, 19 bp, Homo sapiens
  siRNA target sequence for LRRTM2 (NM_015564.1,1663-1681).
cttcactcagcgggtaatt

SEQ ID NO: 326984 - DNA, 19 bp, Homo sapiens
  siRNA target sequence for LRRTM2 (NM_015564.1,1674-1692).
gggtaattacgggaacaat

SEQ ID NO: 326985 - DNA, 19 bp, Homo sapiens
  siRNA target sequence for LRRTM2 (NM_015564.1,1683-1701).
cgggaacaatggctttatt

SEQ ID NO: 326986 - DNA, 19 bp, Homo sapiens
  siRNA target sequence for LRRTM2 (NM_015564.1,1685-1703).
ggaacaatggctttattgt

SEQ ID NO: 326987 - DNA, 19 bp, Homo sapiens
  siRNA target sequence for LRRTM2 (NM_015564.1,1750-1768).
ctgccctcccactttaaga

SEQ ID NO: 326988 - DNA, 19 bp, Homo sapiens
  siRNA target sequence for LRRTM2 (NM_015564.1,1757-1775).
cccactttaagaagaatta

SEQ ID NO: 326989 - DNA, 19 bp, Homo sapiens
  siRNA target sequence for LRRTM2 (NM_015564.1,1815-1833).
cccaaacacgactccatat

SEQ ID NO: 326990 - DNA, 19 bp, Homo sapiens
  siRNA target sequence for LRRTM2 (NM_015564.1,1823-1841).
cgactccatatgtcaaaca

SEQ ID NO: 326991 - DNA, 19 bp, Homo sapiens
  siRNA target sequence for LRRTM2 (NM_015564.1,1826-1844).
ctccatatgtcaaacatgt

SEQ ID NO: 326992 - DNA, 19 bp, Homo sapiens
  siRNA target sequence for LRRTM2 (NM_015564.1,1854-1872).
gaccgtataatgaatatga

SEQ ID NO: 326993 - DNA, 19 bp, Homo sapiens
  siRNA target sequence for LRRTM2 (NM_015564.1,1880-1898).
catgaaggacccttcatca

SEQ ID NO: 326994 - DNA, 19 bp, Homo sapiens
  siRNA target sequence for LRRTM2 (NM_015564.1,1897-1915).
catcattaatggttatgga

SEQ ID NO: 326995 - DNA, 19 bp, Homo sapiens
  siRNA target sequence for LRRTM2 (NM_015564.1,1926-1944).
gtcagcagctgccatacaa

SEQ ID NO: 326996 - DNA, 19 bp, Homo sapiens
  siRNA target sequence for MAL2 (NM_052886.1,238-256).
ggttgcctcctccaatgtt

SEQ ID NO: 326997 - DNA, 19 bp, Homo sapiens
  siRNA target sequence for MAL2 (NM_052886.1,294-312).
ccgtgacagcgtttttctt

SEQ ID NO: 326998 - DNA, 19 bp, Homo sapiens
  siRNA target sequence for MAL2 (NM_052886.1,295-313).
cgtgacagcgtttttcttt

SEQ ID NO: 326999 - DNA, 19 bp, Homo sapiens
  siRNA target sequence for MAL2 (NM_052886.1,345-363).
gcatggtggctcaaattga

SEQ ID NO: 327000 - DNA, 19 bp, Homo sapiens
  siRNA target sequence for MAL2 (NM_052886.1,382-400).
ggattttgcctaccatttt

SEQ ID NO: 327001 - DNA, 19 bp, Homo sapiens
  siRNA target sequence for MAL2 (NM_052886.1,447-465).
ccacatccctgcatgattt

SEQ ID NO: 327002 - DNA, 19 bp, Homo sapiens
  siRNA target sequence for MAL2 (NM_052886.1,467-485).
cattgcaatacaaccataa

SEQ ID NO: 327003 - DNA, 19 bp, Homo sapiens
  siRNA target sequence for MAL2 (NM_052886.1,491-509).
cagccactcctgagtgata

SEQ ID NO: 327004 - DNA, 19 bp, Homo sapiens
  siRNA target sequence for MAL2 (NM_052886.1,511-529).
ccagtataacataaacgta

SEQ ID NO: 327005 - DNA, 19 bp, Homo sapiens
  siRNA target sequence for MAL2 (NM_052886.1,526-544).
cgtagcagcctcaattttt

SEQ ID NO: 327006 - DNA, 19 bp, Homo sapiens
  siRNA target sequence for MAL2 (NM_052886.1,553-571).
gacgacagcttgttatggt

SEQ ID NO: 327007 - DNA, 19 bp, Homo sapiens
  siRNA target sequence for MGC35450 (NM_153708.1,235-253).
ggaagcagtacctggaatt

SEQ ID NO: 327008 - DNA, 19 bp, Homo sapiens
  siRNA target sequence for MPDU1 (NM_004870.1,28-46).
ggcggacggaccgcttaaa

SEQ ID NO: 327009 - DNA, 19 bp, Homo sapiens
  siRNA target sequence for MPDU1 (NM_004870.1,49-67).
gctgctcgtgccgattctt

SEQ ID NO: 327010 - DNA, 19 bp, Homo sapiens
  siRNA target sequence for MPDU1 (NM_004870.1,50-68).
ctgctcgtgccgattcttt

SEQ ID NO: 327011 - DNA, 19 bp, Homo sapiens
  siRNA target sequence for MPDU1 (NM_004870.1,82-100).
ctacgaccaacttttcgtt

SEQ ID NO: 327012 - DNA, 19 bp, Homo sapiens
  siRNA target sequence for MPDU1 (NM_004870.1,170-188).
gctggctcacttctagtaa

SEQ ID NO: 327013 - DNA, 19 bp, Homo sapiens
  siRNA target sequence for MPDU1 (NM_004870.1,171-189).
ctggctcacttctagtaaa

SEQ ID NO: 327014 - DNA, 19 bp, Homo sapiens
  siRNA target sequence for MPDU1 (NM_004870.1,174-192).
gctcacttctagtaaagct

SEQ ID NO: 327015 - DNA, 19 bp, Homo sapiens
  siRNA target sequence for MPDU1 (NM_004870.1,287-305).
gtctacagcatcactaaca

SEQ ID NO: 327016 - DNA, 19 bp, Homo sapiens
  siRNA target sequence for MPRG (NM_017705.2,394-412).
ctccccaggctgtttagca

SEQ ID NO: 327017 - DNA, 19 bp, Homo sapiens
  siRNA target sequence for MPRG (NM_017705.2,516-534).
caatgagactctcaacatt

SEQ ID NO: 327018 - DNA, 19 bp, Homo sapiens
  siRNA target sequence for MPRG (NM_017705.2,520-538).
gagactctcaacatttgga

SEQ ID NO: 327019 - DNA, 19 bp, Homo sapiens
  siRNA target sequence for MPRG (NM_017705.2,620-638).
cctggcccatgcttgtgta

SEQ ID NO: 327020 - DNA, 19 bp, Homo sapiens
  siRNA target sequence for MPRG (NM_017705.2,812-830).
gcaccactttccatgacta

SEQ ID NO: 327021 - DNA, 19 bp, Homo sapiens
  siRNA target sequence for MPRG (NM_017705.2,932-950).
gtgtcctcgcctttgctta

SEQ ID NO: 327022 - DNA, 19 bp, Homo sapiens
  siRNA target sequence for MPRG (NM_017705.2,1036-1054).
caccagaagcacatgatca

SEQ ID NO: 327023 - DNA, 19 bp, Homo sapiens
  siRNA target sequence for MPRG (NM_017705.2,1063-1081).
ctggcctctttcttgtact

SEQ ID NO: 327024 - DNA, 19 bp, Homo sapiens
  siRNA target sequence for MPRG (NM_017705.2,1105-1123).
gcccctggacgctttgact

SEQ ID NO: 327025 - DNA, 19 bp, Homo sapiens
  siRNA target sequence for MPRG (NM_017705.2,1260-1278).
gatagctggagccatactt

SEQ ID NO: 327026 - DNA, 19 bp, Homo sapiens
  siRNA target sequence for MPRG (NM_017705.2,1295-1313).
gcctcagcaacataattta

SEQ ID NO: 327027 - DNA, 19 bp, Homo sapiens
  siRNA target sequence for MPRG (NM_017705.2,1335-1353).
gattcccaagccagaatta

SEQ ID NO: 327028 - DNA, 19 bp, Homo sapiens
  siRNA target sequence for MPRG (NM_017705.2,1339-1357).
cccaagccagaattacata

SEQ ID NO: 327029 - DNA, 19 bp, Homo sapiens
  siRNA target sequence for MPRG (NM_017705.2,1340-1358).
ccaagccagaattacataa

SEQ ID NO: 327030 - DNA, 19 bp, Homo sapiens
  siRNA target sequence for NIFIE14 (NM_032635.2,213-231).
gagtcacctacctctttgt

SEQ ID NO: 327031 - DNA, 19 bp, Homo sapiens
  siRNA target sequence for NIFIE14 (NM_032635.2,274-292).
ctgggaaggcggcatctat

SEQ ID NO: 327032 - DNA, 19 bp, Homo sapiens
  siRNA target sequence for NIFIE14 (NM_032635.2,337-355).
cctgataggtctaaacctt

SEQ ID NO: 327033 - DNA, 19 bp, Homo sapiens
  siRNA target sequence for NIFIE14 (NM_032635.2,372-390).
ccggcaagggagagtacaa

SEQ ID NO: 327034 - DNA, 19 bp, Homo sapiens
  siRNA target sequence for NIFIE14 (NM_032635.2,415-433).
ggccactgctgagcttatt

SEQ ID NO: 327035 - DNA, 19 bp, Homo sapiens
  siRNA target sequence for NIFIE14 (NM_032635.2,548-566).
gctcaggtctggatgataa

SEQ ID NO: 327036 - DNA, 19 bp, Homo sapiens
  siRNA target sequence for NIFIE14 (NM_032635.2,559-577).
gatgataacacgctatgat

SEQ ID NO: 327037 - DNA, 19 bp, Homo sapiens
  siRNA target sequence for NIFIE14 (NM_032635.2,626-644).
gtctacaaggcctttgtta

SEQ ID NO: 327038 - DNA, 19 bp, Homo sapiens
  siRNA target sequence for NIFIE14 (NM_032635.2,742-760).
gtatgtcgccgttgtcaat

SEQ ID NO: 327039 - DNA, 19 bp, Homo sapiens
  siRNA target sequence for NMA (NM_012342.1,379-397).
cgccactccagctacatct

SEQ ID NO: 327040 - DNA, 19 bp, Homo sapiens
  siRNA target sequence for NMA (NM_012342.1,441-459).
caccaaaggtgaaattcga

SEQ ID NO: 327041 - DNA, 19 bp, Homo sapiens
  siRNA target sequence for NMA (NM_012342.1,487-505).
gccactggttatatgtgta

SEQ ID NO: 327042 - DNA, 19 bp, Homo sapiens
  siRNA target sequence for NMA (NM_012342.1,488-506).
ccactggttatatgtgtaa

SEQ ID NO: 327043 - DNA, 19 bp, Homo sapiens
  siRNA target sequence for NMA (NM_012342.1,489-507).
cactggttatatgtgtaaa

SEQ ID NO: 327044 - DNA, 19 bp, Homo sapiens
  siRNA target sequence for NMA (NM_012342.1,673-691).
gaagacatgtgcaattaca

SEQ ID NO: 327045 - DNA, 19 bp, Homo sapiens
  siRNA target sequence for NMA (NM_012342.1,894-912).
gatgcttcgaagtgaaaat

SEQ ID NO: 327046 - DNA, 19 bp, Homo sapiens
  siRNA target sequence for NMA (NM_012342.1,967-985).
cacggacaccattccaaaa

SEQ ID NO: 327047 - DNA, 19 bp, Homo sapiens
  siRNA target sequence for NMA (NM_012342.1,989-1007).
ggcaggttgcaaagttaga

SEQ ID NO: 327048 - DNA, 19 bp, Homo sapiens
  siRNA target sequence for NMA (NM_012342.1,991-1009).
caggttgcaaagttagact

SEQ ID NO: 327049 - DNA, 19 bp, Homo sapiens
  siRNA target sequence for NMA (NM_012342.1,1078-1096).
gacctcagcaacgataaga

SEQ ID NO: 327050 - DNA, 19 bp, Homo sapiens
  siRNA target sequence for NPDC1 (NM_015392.2,991-1009).
gtgcctggagcggcataaa

SEQ ID NO: 327051 - DNA, 19 bp, Homo sapiens
  siRNA target sequence for PANX1 (NM_015368.3,444-462).
ccacggagcccaagttcaa

SEQ ID NO: 327052 - DNA, 19 bp, Homo sapiens
  siRNA target sequence for PANX1 (NM_015368.3,551-569).
caggagatctcgattggta

SEQ ID NO: 327053 - DNA, 19 bp, Homo sapiens
  siRNA target sequence for PANX1 (NM_015368.3,559-577).
ctcgattggtacacagata

SEQ ID NO: 327054 - DNA, 19 bp, Homo sapiens
  siRNA target sequence for PANX1 (NM_015368.3,689-707).
ccactgtggctgcataagt

SEQ ID NO: 327055 - DNA, 19 bp, Homo sapiens
  siRNA target sequence for PANX1 (NM_015368.3,690-708).
cactgtggctgcataagtt

SEQ ID NO: 327056 - DNA, 19 bp, Homo sapiens
  siRNA target sequence for PANX1 (NM_015368.3,805-823).
gtttatcatggaagaactt

SEQ ID NO: 327057 - DNA, 19 bp, Homo sapiens
  siRNA target sequence for PANX1 (NM_015368.3,830-848).
gtttacaaccgtgcaatta

SEQ ID NO: 327058 - DNA, 19 bp, Homo sapiens
  siRNA target sequence for PANX1 (NM_015368.3,861-879).
gtgcgcgtgaccttgacat

SEQ ID NO: 327059 - DNA, 19 bp, Homo sapiens
  siRNA target sequence for PANX1 (NM_015368.3,945-963).
ctgaaagccacttcaagta

SEQ ID NO: 327060 - DNA, 19 bp, Homo sapiens
  siRNA target sequence for PANX1 (NM_015368.3,974-992).
gagcagtacttgaagacaa

SEQ ID NO: 327061 - DNA, 19 bp, Homo sapiens
  siRNA target sequence for PANX1 (NM_015368.3,1035-1053).
gcctgctgacactcatcat

SEQ ID NO: 327062 - DNA, 19 bp, Homo sapiens
  siRNA target sequence for PANX1 (NM_015368.3,1036-1054).
cctgctgacactcatcatt

SEQ ID NO: 327063 - DNA, 19 bp, Homo sapiens
  siRNA target sequence for PANX1 (NM_015368.3,1037-1055).
ctgctgacactcatcatta

SEQ ID NO: 327064 - DNA, 19 bp, Homo sapiens
  siRNA target sequence for PANX1 (NM_015368.3,1044-1062).
cactcatcattatactgtt

SEQ ID NO: 327065 - DNA, 19 bp, Homo sapiens
  siRNA target sequence for PANX1 (NM_015368.3,1068-1086).
gtatctacctgggctatta

SEQ ID NO: 327066 - DNA, 19 bp, Homo sapiens
  siRNA target sequence for PANX1 (NM_015368.3,1155-1173).
gcaccgtgcccgatcagtt

SEQ ID NO: 327067 - DNA, 19 bp, Homo sapiens
  siRNA target sequence for PANX1 (NM_015368.3,1158-1176).
ccgtgcccgatcagtttca

SEQ ID NO: 327068 - DNA, 19 bp, Homo sapiens
  siRNA target sequence for PANX1 (NM_015368.3,1160-1178).
gtgcccgatcagtttcagt

SEQ ID NO: 327069 - DNA, 19 bp, Homo sapiens
  siRNA target sequence for PANX1 (NM_015368.3,1210-1228).
gctcagtgtcattaacctt

SEQ ID NO: 327070 - DNA, 19 bp, Homo sapiens
  siRNA target sequence for PANX1 (NM_015368.3,1282-1300).
ccgacagaagacagatgtt

SEQ ID NO: 327071 - DNA, 19 bp, Homo sapiens
  siRNA target sequence for PANX1 (NM_015368.3,1298-1316).
gttctcaaagtgtacgaaa

SEQ ID NO: 327072 - DNA, 19 bp, Homo sapiens
  siRNA target sequence for PANX1 (NM_015368.3,1363-1381).
cgatttgagcctctacaat

SEQ ID NO: 327073 - DNA, 19 bp, Homo sapiens
  siRNA target sequence for PANX1 (NM_015368.3,1404-1422).
gtgaggtcaagtcatacaa

SEQ ID NO: 327074 - DNA, 19 bp, Homo sapiens
  siRNA target sequence for PANX1 (NM_015368.3,1406-1424).
gaggtcaagtcatacaagt

SEQ ID NO: 327075 - DNA, 19 bp, Homo sapiens
  siRNA target sequence for PANX1 (NM_015368.3,1416-1434).
catacaagtgtcttaaggt

SEQ ID NO: 327076 - DNA, 19 bp, Homo sapiens
  siRNA target sequence for PANX1 (NM_015368.3,1462-1480).
ggggatcgacccaatgcta

SEQ ID NO: 327077 - DNA, 19 bp, Homo sapiens
  siRNA target sequence for PANX1 (NM_015368.3,1501-1519).
gatcaagatggatgttgtt

SEQ ID NO: 327078 - DNA, 19 bp, Homo sapiens
  siRNA target sequence for PANX1 (NM_015368.3,1572-1590).
cggcagagctccaaggtat

SEQ ID NO: 327079 - DNA, 19 bp, Homo sapiens
  siRNA target sequence for PANX1 (NM_015368.3,1577-1595).
gagctccaaggtatgaaca

SEQ ID NO: 327080 - DNA, 19 bp, Homo sapiens
  siRNA target sequence for PANX1 (NM_015368.3,1600-1618).
cagtgaaactaaagcaaat

SEQ ID NO: 327081 - DNA, 19 bp, Homo sapiens
  siRNA target sequence for PANX2 (NM_052839.2,199-217).
gaacccatttactgttaca

SEQ ID NO: 327082 - DNA, 19 bp, Homo sapiens
  siRNA target sequence for PANX2 (NM_052839.2,445-463).
caggagatcgacaactgtt

SEQ ID NO: 327083 - DNA, 19 bp, Homo sapiens
  siRNA target sequence for PANX2 (NM_052839.2,916-934).
cgcaagagcaacttcatct

SEQ ID NO: 327084 - DNA, 19 bp, Homo sapiens
  siRNA target sequence for PANX2 (NM_052839.2,1406-1424).
gctccgcccaccactacaa

SEQ ID NO: 327085 - DNA, 19 bp, Homo sapiens
  siRNA target sequence for PANX3 (NM_052959.2,97-115).
cccctggaccggatagtca

SEQ ID NO: 327086 - DNA, 19 bp, Homo sapiens
  siRNA target sequence for PANX3 (NM_052959.2,98-116).
ccctggaccggatagtcaa

SEQ ID NO: 327087 - DNA, 19 bp, Homo sapiens
  siRNA target sequence for PANX3 (NM_052959.2,286-304).
cctggccaggacaaaatga

SEQ ID NO: 327088 - DNA, 19 bp, Homo sapiens
  siRNA target sequence for PANX3 (NM_052959.2,415-433).
gatctgctgttcatcatca

SEQ ID NO: 327089 - DNA, 19 bp, Homo sapiens
  siRNA target sequence for PANX3 (NM_052959.2,432-450).
cagcgaactggacaaatct

SEQ ID NO: 327090 - DNA, 19 bp, Homo sapiens
  siRNA target sequence for PANX3 (NM_052959.2,434-452).
gcgaactggacaaatctta

SEQ ID NO: 327091 - DNA, 19 bp, Homo sapiens
  siRNA target sequence for PANX3 (NM_052959.2,435-453).
cgaactggacaaatcttat

SEQ ID NO: 327092 - DNA, 19 bp, Homo sapiens
  siRNA target sequence for PANX3 (NM_052959.2,503-521).
gttccgacccctatgtgtt

SEQ ID NO: 327093 - DNA, 19 bp, Homo sapiens
  siRNA target sequence for PANX3 (NM_052959.2,542-560).
ctcggaaagaacgatactt

SEQ ID NO: 327094 - DNA, 19 bp, Homo sapiens
  siRNA target sequence for PANX3 (NM_052959.2,659-677).
cctccgccacttacctata

SEQ ID NO: 327095 - DNA, 19 bp, Homo sapiens
  siRNA target sequence for PANX3 (NM_052959.2,662-680).
ccgccacttacctatacct

SEQ ID NO: 327096 - DNA, 19 bp, Homo sapiens
  siRNA target sequence for PANX3 (NM_052959.2,663-681).
cgccacttacctatacctt

SEQ ID NO: 327097 - DNA, 19 bp, Homo sapiens
  siRNA target sequence for PANX3 (NM_052959.2,735-753).
gacagggctgctaagtgat

SEQ ID NO: 327098 - DNA, 19 bp, Homo sapiens
  siRNA target sequence for PANX3 (NM_052959.2,763-781).
gtccccaatctgatcacat

SEQ ID NO: 327099 - DNA, 19 bp, Homo sapiens
  siRNA target sequence for PANX3 (NM_052959.2,818-836).
gcctctccagtgtagcaat

SEQ ID NO: 327100 - DNA, 19 bp, Homo sapiens
  siRNA target sequence for PANX3 (NM_052959.2,819-837).
cctctccagtgtagcaata

SEQ ID NO: 327101 - DNA, 19 bp, Homo sapiens
  siRNA target sequence for PANX3 (NM_052959.2,820-838).
ctctccagtgtagcaatat

SEQ ID NO: 327102 - DNA, 19 bp, Homo sapiens
  siRNA target sequence for PANX3 (NM_052959.2,829-847).
gtagcaatatacaccatat

SEQ ID NO: 327103 - DNA, 19 bp, Homo sapiens
  siRNA target sequence for PANX3 (NM_052959.2,833-851).
caatatacaccatattggt

SEQ ID NO: 327104 - DNA, 19 bp, Homo sapiens
  siRNA target sequence for PANX3 (NM_052959.2,850-868).
gttccagtgataatataca

SEQ ID NO: 327105 - DNA, 19 bp, Homo sapiens
  siRNA target sequence for PANX3 (NM_052959.2,887-905).
ggtgggacaaacgactttt

SEQ ID NO: 327106 - DNA, 19 bp, Homo sapiens
  siRNA target sequence for PANX3 (NM_052959.2,888-906).
gtgggacaaacgactttta

SEQ ID NO: 327107 - DNA, 19 bp, Homo sapiens
  siRNA target sequence for PANX3 (NM_052959.2,891-909).
ggacaaacgacttttatct

SEQ ID NO: 327108 - DNA, 19 bp, Homo sapiens
  siRNA target sequence for PANX3 (NM_052959.2,954-972).
gctaggatgtcccatcaat

SEQ ID NO: 327109 - DNA, 19 bp, Homo sapiens
  siRNA target sequence for PANX3 (NM_052959.2,1067-1085).
ccacccagaagcacaatat

SEQ ID NO: 327110 - DNA, 19 bp, Homo sapiens
  siRNA target sequence for PANX3 (NM_052959.2,1087-1105).
gacacagtagttgatttta

SEQ ID NO: 327111 - DNA, 19 bp, Homo sapiens
  siRNA target sequence for PANX3 (NM_052959.2,1149-1167).
caccaactcggcatgtgat

SEQ ID NO: 327112 - DNA, 19 bp, Homo sapiens
  siRNA target sequence for PANX3 (NM_052959.2,1152-1170).
caactcggcatgtgatgaa

SEQ ID NO: 327113 - DNA, 19 bp, Homo sapiens
  siRNA target sequence for PAQR3 (NM_177453.2,195-213).
ctgaagagcgcgcattaca

SEQ ID NO: 327114 - DNA, 19 bp, Homo sapiens
  siRNA target sequence for PAQR3 (NM_177453.2,343-361).
cgtccaggctgtgtatcaa

SEQ ID NO: 327115 - DNA, 19 bp, Homo sapiens
  siRNA target sequence for PAQR3 (NM_177453.2,344-362).
gtccaggctgtgtatcaaa

SEQ ID NO: 327116 - DNA, 19 bp, Homo sapiens
  siRNA target sequence for PAQR3 (NM_177453.2,390-408).
gtaaacatctggagtcatt

SEQ ID NO: 327117 - DNA, 19 bp, Homo sapiens
  siRNA target sequence for PAQR3 (NM_177453.2,428-446).
cttcaccctgggaatatat

SEQ ID NO: 327118 - DNA, 19 bp, Homo sapiens
  siRNA target sequence for PAQR3 (NM_177453.2,438-456).
ggaatatatgacatgacat

SEQ ID NO: 327119 - DNA, 19 bp, Homo sapiens
  siRNA target sequence for PAQR3 (NM_177453.2,544-562).
ctgtgggctatcatctttt

SEQ ID NO: 327120 - DNA, 19 bp, Homo sapiens
  siRNA target sequence for PAQR3 (NM_177453.2,546-564).
gtgggctatcatctttttt

SEQ ID NO: 327121 - DNA, 19 bp, Homo sapiens
  siRNA target sequence for PAQR3 (NM_177453.2,565-583).
cctgccatcggtcagaaaa

SEQ ID NO: 327122 - DNA, 19 bp, Homo sapiens
  siRNA target sequence for PAQR3 (NM_177453.2,566-584).
ctgccatcggtcagaaaaa

SEQ ID NO: 327123 - DNA, 19 bp, Homo sapiens
  siRNA target sequence for PAQR3 (NM_177453.2,643-661).
gctatgtctcaggagtatt

SEQ ID NO: 327124 - DNA, 19 bp, Homo sapiens
  siRNA target sequence for PAQR3 (NM_177453.2,654-672).
ggagtattttacgcatttt

SEQ ID NO: 327125 - DNA, 19 bp, Homo sapiens
  siRNA target sequence for PAQR3 (NM_177453.2,655-673).
gagtattttacgcatttta

SEQ ID NO: 327126 - DNA, 19 bp, Homo sapiens
  siRNA target sequence for PAQR3 (NM_177453.2,667-685).
cattttattgtaataacta

SEQ ID NO: 327127 - DNA, 19 bp, Homo sapiens
  siRNA target sequence for PAQR3 (NM_177453.2,688-706).
ggcgtcaggtgtacttgat

SEQ ID NO: 327128 - DNA, 19 bp, Homo sapiens
  siRNA target sequence for PAQR3 (NM_177453.2,734-752).
gttctttgcgcagattcat

SEQ ID NO: 327129 - DNA, 19 bp, Homo sapiens
  siRNA target sequence for PAQR3 (NM_177453.2,742-760).
cgcagattcatcccaatta

SEQ ID NO: 327130 - DNA, 19 bp, Homo sapiens
  siRNA target sequence for PAQR3 (NM_177453.2,781-799).
ggctccgttctatcatctt

SEQ ID NO: 327131 - DNA, 19 bp, Homo sapiens
  siRNA target sequence for PAQR3 (NM_177453.2,782-800).
gctccgttctatcatcttt

SEQ ID NO: 327132 - DNA, 19 bp, Homo sapiens
  siRNA target sequence for PAQR3 (NM_177453.2,785-803).
ccgttctatcatcttttgt

SEQ ID NO: 327133 - DNA, 19 bp, Homo sapiens
  siRNA target sequence for PAQR3 (NM_177453.2,786-804).
cgttctatcatcttttgtt

SEQ ID NO: 327134 - DNA, 19 bp, Homo sapiens
  siRNA target sequence for PAQR3 (NM_177453.2,889-907).
caccccgtgtaattgtgat

SEQ ID NO: 327135 - DNA, 19 bp, Homo sapiens
  siRNA target sequence for PAQR3 (NM_177453.2,893-911).
ccgtgtaattgtgatgtat

SEQ ID NO: 327136 - DNA, 19 bp, Homo sapiens
  siRNA target sequence for PAQR6 (NM_024897.2,857-875).
ggagccttcgcctatccat

SEQ ID NO: 327137 - DNA, 19 bp, Homo sapiens
  siRNA target sequence for PAQR6 (NM_024897.2,858-876).
gagccttcgcctatccatt

SEQ ID NO: 327138 - DNA, 19 bp, Homo sapiens
  siRNA target sequence for PAQR6 (NM_024897.2,883-901).
cgacaacctcccactcttt

SEQ ID NO: 327139 - DNA, 19 bp, Homo sapiens
  siRNA target sequence for PAQR6 (NM_024897.2,1033-1051).
ggcaccaggacgctttgat

SEQ ID NO: 327140 - DNA, 19 bp, Homo sapiens
  siRNA target sequence for PAQR6 (NM_024897.2,1034-1052).
gcaccaggacgctttgatt

SEQ ID NO: 327141 - DNA, 19 bp, Homo sapiens
  siRNA target sequence for PAQR6 (NM_024897.2,1035-1053).
caccaggacgctttgatta

SEQ ID NO: 327142 - DNA, 19 bp, Homo sapiens
  siRNA target sequence for PAQR6 (NM_024897.2,1293-1311).
gaacctactcattattgct

SEQ ID NO: 327143 - DNA, 19 bp, Homo sapiens
  siRNA target sequence for PAQR6 (NM_024897.2,1380-1398).
gggtacccaggccaaacaa

SEQ ID NO: 327144 - DNA, 19 bp, Homo sapiens
  siRNA target sequence for PAQR6 (NM_024897.2,1467-1485).
ccagatttgggcctaatca

SEQ ID NO: 327145 - DNA, 19 bp, Homo sapiens
  siRNA target sequence for PAQR6 (NM_024897.2,1597-1615).
ccgtgagggggctcttgat

SEQ ID NO: 327146 - DNA, 19 bp, Homo sapiens
  siRNA target sequence for PKD1L1 (NM_138295.2,155-173).
gggtcgaggtctatgctaa

SEQ ID NO: 327147 - DNA, 19 bp, Homo sapiens
  siRNA target sequence for PKD1L1 (NM_138295.2,156-174).
ggtcgaggtctatgctaat

SEQ ID NO: 327148 - DNA, 19 bp, Homo sapiens
  siRNA target sequence for PKD1L1 (NM_138295.2,236-254).
cagaagaccgggaatcaca

SEQ ID NO: 327149 - DNA, 19 bp, Homo sapiens
  siRNA target sequence for PKD1L1 (NM_138295.2,305-323).
gtgaagcagcgttaagtgt

SEQ ID NO: 327150 - DNA, 19 bp, Homo sapiens
  siRNA target sequence for PKD1L1 (NM_138295.2,310-328).
gcagcgttaagtgttgtta

SEQ ID NO: 327151 - DNA, 19 bp, Homo sapiens
  siRNA target sequence for PKD1L1 (NM_138295.2,338-356).
cacaggctgttgttaatga

SEQ ID NO: 327152 - DNA, 19 bp, Homo sapiens
  siRNA target sequence for PKD1L1 (NM_138295.2,340-358).
caggctgttgttaatgaaa

SEQ ID NO: 327153 - DNA, 19 bp, Homo sapiens
  siRNA target sequence for PKD1L1 (NM_138295.2,368-386).
cgcctctggattgtgataa

SEQ ID NO: 327154 - DNA, 19 bp, Homo sapiens
  siRNA target sequence for PKD1L1 (NM_138295.2,382-400).
gataacagtgctgatagaa

SEQ ID NO: 327155 - DNA, 19 bp, Homo sapiens
  siRNA target sequence for PKD1L1 (NM_138295.2,404-422).
cccacaaacctttcattat

SEQ ID NO: 327156 - DNA, 19 bp, Homo sapiens
  siRNA target sequence for PKD1L1 (NM_138295.2,405-423).
ccacaaacctttcattata

SEQ ID NO: 327157 - DNA, 19 bp, Homo sapiens
  siRNA target sequence for PKD1L1 (NM_138295.2,406-424).
cacaaacctttcattataa

SEQ ID NO: 327158 - DNA, 19 bp, Homo sapiens
  siRNA target sequence for PKD1L1 (NM_138295.2,696-714).
gcccctgtggccgatttca

SEQ ID NO: 327159 - DNA, 19 bp, Homo sapiens
  siRNA target sequence for PKD1L1 (NM_138295.2,698-716).
ccctgtggccgatttcaca

SEQ ID NO: 327160 - DNA, 19 bp, Homo sapiens
  siRNA target sequence for PKD1L1 (NM_138295.2,699-717).
cctgtggccgatttcacat

SEQ ID NO: 327161 - DNA, 19 bp, Homo sapiens
  siRNA target sequence for PKD1L1 (NM_138295.2,700-718).
ctgtggccgatttcacatt

SEQ ID NO: 327162 - DNA, 19 bp, Homo sapiens
  siRNA target sequence for PKD1L1 (NM_138295.2,702-720).
gtggccgatttcacatttt

SEQ ID NO: 327163 - DNA, 19 bp, Homo sapiens
  siRNA target sequence for PKD1L1 (NM_138295.2,837-855).
ggccatcctagctcgaaat

SEQ ID NO: 327164 - DNA, 19 bp, Homo sapiens
  siRNA target sequence for PKD1L1 (NM_138295.2,838-856).
gccatcctagctcgaaatt

SEQ ID NO: 327165 - DNA, 19 bp, Homo sapiens
  siRNA target sequence for PKD1L1 (NM_138295.2,840-858).
catcctagctcgaaattct

SEQ ID NO: 327166 - DNA, 19 bp, Homo sapiens
  siRNA target sequence for PKD1L1 (NM_138295.2,843-861).
cctagctcgaaattctgat

SEQ ID NO: 327167 - DNA, 19 bp, Homo sapiens
  siRNA target sequence for PKD1L1 (NM_138295.2,850-868).
cgaaattctgataacttca

SEQ ID NO: 327168 - DNA, 19 bp, Homo sapiens
  siRNA target sequence for PKD1L1 (NM_138295.2,867-885).
catgaaccctgttcttaat

SEQ ID NO: 327169 - DNA, 19 bp, Homo sapiens
  siRNA target sequence for PKD1L1 (NM_138295.2,1039-1057).
gcctaccaccagtactcaa

SEQ ID NO: 327170 - DNA, 19 bp, Homo sapiens
  siRNA target sequence for PKD1L1 (NM_138295.2,1044-1062).
ccaccagtactcaaaaggt

SEQ ID NO: 327171 - DNA, 19 bp, Homo sapiens
  siRNA target sequence for PKD1L1 (NM_138295.2,1045-1063).
caccagtactcaaaaggta

SEQ ID NO: 327172 - DNA, 19 bp, Homo sapiens
  siRNA target sequence for PKD1L1 (NM_138295.2,1047-1065).
ccagtactcaaaaggtatt

SEQ ID NO: 327173 - DNA, 19 bp, Homo sapiens
  siRNA target sequence for PKD1L1 (NM_138295.2,1092-1110).
ggatatgtccacctacaaa

SEQ ID NO: 327174 - DNA, 19 bp, Homo sapiens
  siRNA target sequence for PKD1L1 (NM_138295.2,1187-1205).
ccagtaaccttggatatga

SEQ ID NO: 327175 - DNA, 19 bp, Homo sapiens
  siRNA target sequence for PKD1L1 (NM_138295.2,1222-1240).
gtcaccaaaggagtctata

SEQ ID NO: 327176 - DNA, 19 bp, Homo sapiens
  siRNA target sequence for PKD1L1 (NM_138295.2,1226-1244).
ccaaaggagtctatatgct

SEQ ID NO: 327177 - DNA, 19 bp, Homo sapiens
  siRNA target sequence for PKD1L1 (NM_138295.2,1242-1260).
gctcaaggctgttatttat

SEQ ID NO: 327178 - DNA, 19 bp, Homo sapiens
  siRNA target sequence for PKD1L1 (NM_138295.2,1243-1261).
ctcaaggctgttatttata

SEQ ID NO: 327179 - DNA, 19 bp, Homo sapiens
  siRNA target sequence for PKD1L1 (NM_138295.2,1284-1302).
ggagcttgggccttattat

SEQ ID NO: 327180 - DNA, 19 bp, Homo sapiens
  siRNA target sequence for PKD1L1 (NM_138295.2,1344-1362).
cagcagtgtccatgaagat

SEQ ID NO: 327181 - DNA, 19 bp, Homo sapiens
  siRNA target sequence for PKD1L1 (NM_138295.2,1411-1429).
gttatacatcactttccat

SEQ ID NO: 327182 - DNA, 19 bp, Homo sapiens
  siRNA target sequence for PKD1L1 (NM_138295.2,1427-1445).
catctattccttcatataa

SEQ ID NO: 327183 - DNA, 19 bp, Homo sapiens
  siRNA target sequence for PKD1L1 (NM_138295.2,1430-1448).
ctattccttcatataacgt

SEQ ID NO: 327184 - DNA, 19 bp, Homo sapiens
  siRNA target sequence for PKD1L1 (NM_138295.2,1504-1522).
gtctggtataagatgcaat

SEQ ID NO: 327185 - DNA, 19 bp, Homo sapiens
  siRNA target sequence for PKD1L1 (NM_138295.2,1559-1577).
cagacacagacattacatt

SEQ ID NO: 327186 - DNA, 19 bp, Homo sapiens
  siRNA target sequence for PKD1L1 (NM_138295.2,1563-1581).
cacagacattacatttaca

SEQ ID NO: 327187 - DNA, 19 bp, Homo sapiens
  siRNA target sequence for PKD1L1 (NM_138295.2,1598-1616).
caatacccctggaatttga

SEQ ID NO: 327188 - DNA, 19 bp, Homo sapiens
  siRNA target sequence for PKD1L1 (NM_138295.2,1642-1660).
gtgaggacaacttcaagaa

SEQ ID NO: 327189 - DNA, 19 bp, Homo sapiens
  siRNA target sequence for PKD1L1 (NM_138295.2,1677-1695).
cagcatcccccaatggtat

SEQ ID NO: 327190 - DNA, 19 bp, Homo sapiens
  siRNA target sequence for PKD1L1 (NM_138295.2,1842-1860).
caacttcggcacagatgtt

SEQ ID NO: 327191 - DNA, 19 bp, Homo sapiens
  siRNA target sequence for PKD1L1 (NM_138295.2,1951-1969).
gaggtccttgccttcaata

SEQ ID NO: 327192 - DNA, 19 bp, Homo sapiens
  siRNA target sequence for PKD1L1 (NM_138295.2,1953-1971).
ggtccttgccttcaataat

SEQ ID NO: 327193 - DNA, 19 bp, Homo sapiens
  siRNA target sequence for PKD1L1 (NM_138295.2,1957-1975).
cttgccttcaataatgtca

SEQ ID NO: 327194 - DNA, 19 bp, Homo sapiens
  siRNA target sequence for PKD1L1 (NM_138295.2,2088-2106).
gctgggagtgacgtttgaa

SEQ ID NO: 327195 - DNA, 19 bp, Homo sapiens
  siRNA target sequence for PKD1L1 (NM_138295.2,2108-2126).
ctgcagtcttctgtgatat

SEQ ID NO: 327196 - DNA, 19 bp, Homo sapiens
  siRNA target sequence for PKD1L1 (NM_138295.2,2290-2308).
gtggtgtacagcaactact

SEQ ID NO: 327197 - DNA, 19 bp, Homo sapiens
  siRNA target sequence for PKD1L1 (NM_138295.2,2354-2372).
ccgagggcacacacctatt

SEQ ID NO: 327198 - DNA, 19 bp, Homo sapiens
  siRNA target sequence for PKD1L1 (NM_138295.2,2356-2374).
gagggcacacacctattct

SEQ ID NO: 327199 - DNA, 19 bp, Homo sapiens
  siRNA target sequence for PKD1L1 (NM_138295.2,2359-2377).
ggcacacacctattcttct

SEQ ID NO: 327200 - DNA, 19 bp, Homo sapiens
  siRNA target sequence for PKD1L1 (NM_138295.2,2443-2461).
gcgactctcaggtatcact

SEQ ID NO: 327201 - DNA, 19 bp, Homo sapiens
  siRNA target sequence for PKD1L1 (NM_138295.2,2660-2678).
ctgactcggcgttcagatt

SEQ ID NO: 327202 - DNA, 19 bp, Homo sapiens
  siRNA target sequence for PKD1L1 (NM_138295.2,2792-2810).
gggatctctttttagtcaa

SEQ ID NO: 327203 - DNA, 19 bp, Homo sapiens
  siRNA target sequence for PKD1L1 (NM_138295.2,2793-2811).
ggatctctttttagtcaat

SEQ ID NO: 327204 - DNA, 19 bp, Homo sapiens
  siRNA target sequence for PKD1L1 (NM_138295.2,2874-2892).
gggactcggtgccatttca

SEQ ID NO: 327205 - DNA, 19 bp, Homo sapiens
  siRNA target sequence for PKD1L1 (NM_138295.2,3190-3208).
gaccctcacctctctgatt

SEQ ID NO: 327206 - DNA, 19 bp, Homo sapiens
  siRNA target sequence for PKD1L1 (NM_138295.2,3320-3338).
ctggagatggggataacct

SEQ ID NO: 327207 - DNA, 19 bp, Homo sapiens
  siRNA target sequence for PKD1L1 (NM_138295.2,3368-3386).
ccgagcctgtcctcatgat

SEQ ID NO: 327208 - DNA, 19 bp, Homo sapiens
  siRNA target sequence for PKD1L1 (NM_138295.2,3369-3387).
cgagcctgtcctcatgatt

SEQ ID NO: 327209 - DNA, 19 bp, Homo sapiens
  siRNA target sequence for PKD1L1 (NM_138295.2,3408-3426).
gggtcgagcagttttccaa

SEQ ID NO: 327210 - DNA, 19 bp, Homo sapiens
  siRNA target sequence for PKD1L1 (NM_138295.2,3434-3452).
catcctcaggtattacaga

SEQ ID NO: 327211 - DNA, 19 bp, Homo sapiens
  siRNA target sequence for PKD1L1 (NM_138295.2,3542-3560).
gtaaagctcagctgtactt

SEQ ID NO: 327212 - DNA, 19 bp, Homo sapiens
  siRNA target sequence for PKD1L1 (NM_138295.2,3655-3673).
ggaaaaccggacttccatt

SEQ ID NO: 327213 - DNA, 19 bp, Homo sapiens
  siRNA target sequence for PKD1L1 (NM_138295.2,3656-3674).
gaaaaccggacttccatta

SEQ ID NO: 327214 - DNA, 19 bp, Homo sapiens
  siRNA target sequence for PKD1L1 (NM_138295.2,3661-3679).
ccggacttccattatgaat

SEQ ID NO: 327215 - DNA, 19 bp, Homo sapiens
  siRNA target sequence for PKD1L1 (NM_138295.2,3662-3680).
cggacttccattatgaatt

SEQ ID NO: 327216 - DNA, 19 bp, Homo sapiens
  siRNA target sequence for PKD1L1 (NM_138295.2,3725-3743).
ggagagacacccagtatta

SEQ ID NO: 327217 - DNA, 19 bp, Homo sapiens
  siRNA target sequence for PKD1L1 (NM_138295.2,3726-3744).
gagagacacccagtattat

SEQ ID NO: 327218 - DNA, 19 bp, Homo sapiens
  siRNA target sequence for PKD1L1 (NM_138295.2,3728-3746).
gagacacccagtattattt

SEQ ID NO: 327219 - DNA, 19 bp, Homo sapiens
  siRNA target sequence for PKD1L1 (NM_138295.2,3734-3752).
cccagtattattttgtgtt

SEQ ID NO: 327220 - DNA, 19 bp, Homo sapiens
  siRNA target sequence for PKD1L1 (NM_138295.2,3760-3778).
ggtgagcacttggacaatt

SEQ ID NO: 327221 - DNA, 19 bp, Homo sapiens
  siRNA target sequence for PKD1L1 (NM_138295.2,3761-3779).
gtgagcacttggacaatta

SEQ ID NO: 327222 - DNA, 19 bp, Homo sapiens
  siRNA target sequence for PKD1L1 (NM_138295.2,3763-3781).
gagcacttggacaattaca

SEQ ID NO: 327223 - DNA, 19 bp, Homo sapiens
  siRNA target sequence for PKD1L1 (NM_138295.2,3784-3802).
gtcatggtttccactgaaa

SEQ ID NO: 327224 - DNA, 19 bp, Homo sapiens
  siRNA target sequence for PKD1L1 (NM_138295.2,3885-3903).
gggcgaggacctgtataat

SEQ ID NO: 327225 - DNA, 19 bp, Homo sapiens
  siRNA target sequence for PKD1L1 (NM_138295.2,3886-3904).
ggcgaggacctgtataatt

SEQ ID NO: 327226 - DNA, 19 bp, Homo sapiens
  siRNA target sequence for PKD1L1 (NM_138295.2,3889-3907).
gaggacctgtataattcca

SEQ ID NO: 327227 - DNA, 19 bp, Homo sapiens
  siRNA target sequence for PKD1L1 (NM_138295.2,3999-4017).
gtctaaggaggacaaaact

SEQ ID NO: 327228 - DNA, 19 bp, Homo sapiens
  siRNA target sequence for PKD1L1 (NM_138295.2,4040-4058).
gaatacaggatgcattaat

SEQ ID NO: 327229 - DNA, 19 bp, Homo sapiens
  siRNA target sequence for PKD1L1 (NM_138295.2,4045-4063).
caggatgcattaatttctt

SEQ ID NO: 327230 - DNA, 19 bp, Homo sapiens
  siRNA target sequence for PKD1L1 (NM_138295.2,4070-4088).
gcagattggcttttgtaga

SEQ ID NO: 327231 - DNA, 19 bp, Homo sapiens
  siRNA target sequence for PKD1L1 (NM_138295.2,4071-4089).
cagattggcttttgtagat

SEQ ID NO: 327232 - DNA, 19 bp, Homo sapiens
  siRNA target sequence for PKD1L1 (NM_138295.2,4105-4123).
ggttctgttcttatgttga

SEQ ID NO: 327233 - DNA, 19 bp, Homo sapiens
  siRNA target sequence for PKD1L1 (NM_138295.2,4126-4144).
gacctcgtgagcttctcta

SEQ ID NO: 327234 - DNA, 19 bp, Homo sapiens
  siRNA target sequence for PKD1L1 (NM_138295.2,4129-4147).
ctcgtgagcttctctaata

SEQ ID NO: 327235 - DNA, 19 bp, Homo sapiens
  siRNA target sequence for PKD1L1 (NM_138295.2,4142-4160).
ctaataagctaggctttat

SEQ ID NO: 327236 - DNA, 19 bp, Homo sapiens
  siRNA target sequence for PKD1L1 (NM_138295.2,4166-4184).
cggttctcatcctcaagta

SEQ ID NO: 327237 - DNA, 19 bp, Homo sapiens
  siRNA target sequence for PKD1L1 (NM_138295.2,4252-4270).
gagctcatcggtctcatat

SEQ ID NO: 327238 - DNA, 19 bp, Homo sapiens
  siRNA target sequence for PKD1L1 (NM_138295.2,4255-4273).
ctcatcggtctcatatcca

SEQ ID NO: 327239 - DNA, 19 bp, Homo sapiens
  siRNA target sequence for PKD1L1 (NM_138295.2,4285-4303).
gtctctgagcaagaaaact

SEQ ID NO: 327240 - DNA, 19 bp, Homo sapiens
  siRNA target sequence for PKD1L1 (NM_138295.2,4302-4320).
ctcgaaggaggaagtctat

SEQ ID NO: 327241 - DNA, 19 bp, Homo sapiens
  siRNA target sequence for PKD1L1 (NM_138295.2,4408-4426).
cggacccttcttcattaca

SEQ ID NO: 327242 - DNA, 19 bp, Homo sapiens
  siRNA target sequence for PKD1L1 (NM_138295.2,4409-4427).
ggacccttcttcattacaa

SEQ ID NO: 327243 - DNA, 19 bp, Homo sapiens
  siRNA target sequence for PKD1L1 (NM_138295.2,4516-4534).
cagagcccatgctacatta

SEQ ID NO: 327244 - DNA, 19 bp, Homo sapiens
  siRNA target sequence for PKD1L1 (NM_138295.2,4540-4558).
ctcatactcttcaagaaga

SEQ ID NO: 327245 - DNA, 19 bp, Homo sapiens
  siRNA target sequence for PKD1L1 (NM_138295.2,4647-4665).
caggcaatggctaaggaaa

SEQ ID NO: 327246 - DNA, 19 bp, Homo sapiens
  siRNA target sequence for PKD1L1 (NM_138295.2,4689-4707).
ggaggatggcctggataat

SEQ ID NO: 327247 - DNA, 19 bp, Homo sapiens
  siRNA target sequence for PKD1L1 (NM_138295.2,4690-4708).
gaggatggcctggataata

SEQ ID NO: 327248 - DNA, 19 bp, Homo sapiens
  siRNA target sequence for PKD1L1 (NM_138295.2,4698-4716).
cctggataataggagaaat

SEQ ID NO: 327249 - DNA, 19 bp, Homo sapiens
  siRNA target sequence for PKD1L1 (NM_138295.2,4832-4850).
gggcatttcccgtcatgtt

SEQ ID NO: 327250 - DNA, 19 bp, Homo sapiens
  siRNA target sequence for PKD1L1 (NM_138295.2,4840-4858).
cccgtcatgttgctagtaa

SEQ ID NO: 327251 - DNA, 19 bp, Homo sapiens
  siRNA target sequence for PKD1L1 (NM_138295.2,4842-4860).
cgtcatgttgctagtaaga

SEQ ID NO: 327252 - DNA, 19 bp, Homo sapiens
  siRNA target sequence for PKD1L1 (NM_138295.2,4843-4861).
gtcatgttgctagtaagat

SEQ ID NO: 327253 - DNA, 19 bp, Homo sapiens
  siRNA target sequence for PKD1L1 (NM_138295.2,4967-4985).
gtgtaggctatttatcctt

SEQ ID NO: 327254 - DNA, 19 bp, Homo sapiens
  siRNA target sequence for PKD1L1 (NM_138295.2,4973-4991).
gctatttatccttattgga

SEQ ID NO: 327255 - DNA, 19 bp, Homo sapiens
  siRNA target sequence for PKD1L1 (NM_138295.2,4974-4992).
ctatttatccttattggat

SEQ ID NO: 327256 - DNA, 19 bp, Homo sapiens
  siRNA target sequence for PKD1L1 (NM_138295.2,5034-5052).
ggcagtgaactatacagta

SEQ ID NO: 327257 - DNA, 19 bp, Homo sapiens
  siRNA target sequence for PKD1L1 (NM_138295.2,5088-5106).
gagagagtggaaatctgaa

SEQ ID NO: 327258 - DNA, 19 bp, Homo sapiens
  siRNA target sequence for PKD1L1 (NM_138295.2,5097-5115).
gaaatctgaacgtttctct

SEQ ID NO: 327259 - DNA, 19 bp, Homo sapiens
  siRNA target sequence for PKD1L1 (NM_138295.2,5293-5311).
ggatttttggtcgctaaaa

SEQ ID NO: 327260 - DNA, 19 bp, Homo sapiens
  siRNA target sequence for PKD1L1 (NM_138295.2,5301-5319).
ggtcgctaaaagtagacaa

SEQ ID NO: 327261 - DNA, 19 bp, Homo sapiens
  siRNA target sequence for PKD1L1 (NM_138295.2,5304-5322).
cgctaaaagtagacaagta

SEQ ID NO: 327262 - DNA, 19 bp, Homo sapiens
  siRNA target sequence for PKD1L1 (NM_138295.2,5312-5330).
gtagacaagtagatcatca

SEQ ID NO: 327263 - DNA, 19 bp, Homo sapiens
  siRNA target sequence for PKD1L1 (NM_138295.2,5441-5459).
caaaggtgtacattgtttt

SEQ ID NO: 327264 - DNA, 19 bp, Homo sapiens
  siRNA target sequence for PKD1L1 (NM_138295.2,5755-5773).
ctcggcttccggaagcttt

SEQ ID NO: 327265 - DNA, 19 bp, Homo sapiens
  siRNA target sequence for PKD1L1 (NM_138295.2,5764-5782).
cggaagcttttctattgca

SEQ ID NO: 327266 - DNA, 19 bp, Homo sapiens
  siRNA target sequence for PKD1L1 (NM_138295.2,6117-6135).
ggcaccccatggtcctaat

SEQ ID NO: 327267 - DNA, 19 bp, Homo sapiens
  siRNA target sequence for PKD1L1 (NM_138295.2,6118-6136).
gcaccccatggtcctaatt

SEQ ID NO: 327268 - DNA, 19 bp, Homo sapiens
  siRNA target sequence for PKD1L1 (NM_138295.2,6178-6196).
cctgcatcagccattctct

SEQ ID NO: 327269 - DNA, 19 bp, Homo sapiens
  siRNA target sequence for PKD1L1 (NM_138295.2,6219-6237).
gaaggcggcaagtgacaat

SEQ ID NO: 327270 - DNA, 19 bp, Homo sapiens
  siRNA target sequence for PKD1L1 (NM_138295.2,6347-6365).
gtggtttggagggactaat

SEQ ID NO: 327271 - DNA, 19 bp, Homo sapiens
  siRNA target sequence for PKD1L1 (NM_138295.2,6519-6537).
ctccgtggtctgctgtatt

SEQ ID NO: 327272 - DNA, 19 bp, Homo sapiens
  siRNA target sequence for PKD1L1 (NM_138295.2,6641-6659).
gggatctggactctgaatt

SEQ ID NO: 327273 - DNA, 19 bp, Homo sapiens
  siRNA target sequence for PKD1L1 (NM_138295.2,6719-6737).
caggcgaggttgaaaaagt

SEQ ID NO: 327274 - DNA, 19 bp, Homo sapiens
  siRNA target sequence for PKD1L1 (NM_138295.2,6721-6739).
ggcgaggttgaaaaagtct

SEQ ID NO: 327275 - DNA, 19 bp, Homo sapiens
  siRNA target sequence for PKD1L1 (NM_138295.2,6722-6740).
gcgaggttgaaaaagtctt

SEQ ID NO: 327276 - DNA, 19 bp, Homo sapiens
  siRNA target sequence for PKD1L1 (NM_138295.2,6844-6862).
gctgccctgagagacattt

SEQ ID NO: 327277 - DNA, 19 bp, Homo sapiens
  siRNA target sequence for PKD1L1 (NM_138295.2,6911-6929).
gattttcccaagatgaata

SEQ ID NO: 327278 - DNA, 19 bp, Homo sapiens
  siRNA target sequence for PKD1L1 (NM_138295.2,6940-6958).
caagctatccggaaagaat

SEQ ID NO: 327279 - DNA, 19 bp, Homo sapiens
  siRNA target sequence for PKD1L1 (NM_138295.2,7130-7148).
ccgtaattaggcagctaaa

SEQ ID NO: 327280 - DNA, 19 bp, Homo sapiens
  siRNA target sequence for PKD1L1 (NM_138295.2,7131-7149).
cgtaattaggcagctaaaa

SEQ ID NO: 327281 - DNA, 19 bp, Homo sapiens
  siRNA target sequence for PKD1L1 (NM_138295.2,7140-7158).
gcagctaaaagtttttcct

SEQ ID NO: 327282 - DNA, 19 bp, Homo sapiens
  siRNA target sequence for PKD1L1 (NM_138295.2,7141-7159).
cagctaaaagtttttccta

SEQ ID NO: 327283 - DNA, 19 bp, Homo sapiens
  siRNA target sequence for PKD1L1 (NM_138295.2,7193-7211).
cactcatcgaagactctat

SEQ ID NO: 327284 - DNA, 19 bp, Homo sapiens
  siRNA target sequence for PKD1L1 (NM_138295.2,7197-7215).
catcgaagactctattcct

SEQ ID NO: 327285 - DNA, 19 bp, Homo sapiens
  siRNA target sequence for PKD1L1 (NM_138295.2,7420-7438).
gtgcacttcactctctata

SEQ ID NO: 327286 - DNA, 19 bp, Homo sapiens
  siRNA target sequence for PKD1L1 (NM_138295.2,7605-7623).
gatccacctctgtgttcaa

SEQ ID NO: 327287 - DNA, 19 bp, Homo sapiens
  siRNA target sequence for PKD1L1 (NM_138295.2,7723-7741).
gtttccggccaccttgtta

SEQ ID NO: 327288 - DNA, 19 bp, Homo sapiens
  siRNA target sequence for PKD1L1 (NM_138295.2,7777-7795).
ggactttgccgagcattta

SEQ ID NO: 327289 - DNA, 19 bp, Homo sapiens
  siRNA target sequence for PKD1L1 (NM_138295.2,7778-7796).
gactttgccgagcatttat

SEQ ID NO: 327290 - DNA, 19 bp, Homo sapiens
  siRNA target sequence for PKD1L1 (NM_138295.2,7806-7824).
ccttatggcatcatggaat

SEQ ID NO: 327291 - DNA, 19 bp, Homo sapiens
  siRNA target sequence for PKD1L1 (NM_138295.2,7881-7899).
ctatcttcctggcattcaa

SEQ ID NO: 327292 - DNA, 19 bp, Homo sapiens
  siRNA target sequence for PKD1L1 (NM_138295.2,8133-8151).
ggccatggcttgttacttt

SEQ ID NO: 327293 - DNA, 19 bp, Homo sapiens
  siRNA target sequence for PKD1L1 (NM_138295.2,8144-8162).
gttactttgggatcctttt

SEQ ID NO: 327294 - DNA, 19 bp, Homo sapiens
  siRNA target sequence for PKD1L1 (NM_138295.2,8173-8191).
gccacactgtgttttggaa

SEQ ID NO: 327295 - DNA, 19 bp, Homo sapiens
  siRNA target sequence for PKD1L1 (NM_138295.2,8174-8192).
ccacactgtgttttggaat

SEQ ID NO: 327296 - DNA, 19 bp, Homo sapiens
  siRNA target sequence for PKD1L1 (NM_138295.2,8309-8327).
gactggaaacaccaaagtt

SEQ ID NO: 327297 - DNA, 19 bp, Homo sapiens
  siRNA target sequence for PKD1L1 (NM_138295.2,8334-8352).
ggctgagatggttgagaat

SEQ ID NO: 327298 - DNA, 19 bp, Homo sapiens
  siRNA target sequence for PKD1L1 (NM_138295.2,8389-8407).
gacgaacttctgatgaaga

SEQ ID NO: 327299 - DNA, 19 bp, Homo sapiens
  siRNA target sequence for PKD1L1 (NM_138295.2,8391-8409).
cgaacttctgatgaagatt

SEQ ID NO: 327300 - DNA, 19 bp, Homo sapiens
  siRNA target sequence for PKD1L1 (NM_138295.2,8493-8511).
cttagtggacatttctagt

SEQ ID NO: 327301 - DNA, 19 bp, Homo sapiens
  siRNA target sequence for PKD1L1 (NM_138295.2,8499-8517).
ggacatttctagttaccaa

SEQ ID NO: 327302 - DNA, 19 bp, Homo sapiens
  siRNA target sequence for PKD1L1 (NM_138295.2,8522-8540).
ctgagccagcagacatcaa

SEQ ID NO: 327303 - DNA, 19 bp, Homo sapiens
  siRNA target sequence for RFT1 (NM_052859.2,120-138).
cggttgatcacctttgtct

SEQ ID NO: 327304 - DNA, 19 bp, Homo sapiens
  siRNA target sequence for RFT1 (NM_052859.2,121-139).
ggttgatcacctttgtctt

SEQ ID NO: 327305 - DNA, 19 bp, Homo sapiens
  siRNA target sequence for RFT1 (NM_052859.2,156-174).
cgcttcctgtcaaaggaaa

SEQ ID NO: 327306 - DNA, 19 bp, Homo sapiens
  siRNA target sequence for RFT1 (NM_052859.2,161-179).
cctgtcaaaggaaatcgtt

SEQ ID NO: 327307 - DNA, 19 bp, Homo sapiens
  siRNA target sequence for RFT1 (NM_052859.2,171-189).
gaaatcgttggcgtagtaa

SEQ ID NO: 327308 - DNA, 19 bp, Homo sapiens
  siRNA target sequence for RFT1 (NM_052859.2,176-194).
cgttggcgtagtaaatgta

SEQ ID NO: 327309 - DNA, 19 bp, Homo sapiens
  siRNA target sequence for RFT1 (NM_052859.2,198-216).
ctaacgctgctttactcaa

SEQ ID NO: 327310 - DNA, 19 bp, Homo sapiens
  siRNA target sequence for RFT1 (NM_052859.2,324-342).
ggtgtgttttggtccttat

SEQ ID NO: 327311 - DNA, 19 bp, Homo sapiens
  siRNA target sequence for RFT1 (NM_052859.2,390-408).
gttgtccctcactatgcaa

SEQ ID NO: 327312 - DNA, 19 bp, Homo sapiens
  siRNA target sequence for RFT1 (NM_052859.2,515-533).
gagcctgtcggtaattctt

SEQ ID NO: 327313 - DNA, 19 bp, Homo sapiens
  siRNA target sequence for RFT1 (NM_052859.2,660-678).
ctgggttccccagaatcaa

SEQ ID NO: 327314 - DNA, 19 bp, Homo sapiens
  siRNA target sequence for RFT1 (NM_052859.2,672-690).
gaatcaaccaagcttcaaa

SEQ ID NO: 327315 - DNA, 19 bp, Homo sapiens
  siRNA target sequence for RFT1 (NM_052859.2,703-721).
ccagaataacagatctgtt

SEQ ID NO: 327316 - DNA, 19 bp, Homo sapiens
  siRNA target sequence for RFT1 (NM_052859.2,714-732).
gatctgttacccaatatta

SEQ ID NO: 327317 - DNA, 19 bp, Homo sapiens
  siRNA target sequence for RFT1 (NM_052859.2,733-751).
caagaaatggagcgtttat

SEQ ID NO: 327318 - DNA, 19 bp, Homo sapiens
  siRNA target sequence for RFT1 (NM_052859.2,794-812).
gtctttcttgaaacagatt

SEQ ID NO: 327319 - DNA, 19 bp, Homo sapiens
  siRNA target sequence for RFT1 (NM_052859.2,819-837).
gaaggcgagcgatatgtga

SEQ ID NO: 327320 - DNA, 19 bp, Homo sapiens
  siRNA target sequence for RFT1 (NM_052859.2,825-843).
gagcgatatgtgatgacat

SEQ ID NO: 327321 - DNA, 19 bp, Homo sapiens
  siRNA target sequence for RFT1 (NM_052859.2,827-845).
gcgatatgtgatgacattt

SEQ ID NO: 327322 - DNA, 19 bp, Homo sapiens
  siRNA target sequence for RFT1 (NM_052859.2,828-846).
cgatatgtgatgacatttt

SEQ ID NO: 327323 - DNA, 19 bp, Homo sapiens
  siRNA target sequence for RFT1 (NM_052859.2,865-883).
gtgatcagggtgtgtatga

SEQ ID NO: 327324 - DNA, 19 bp, Homo sapiens
  siRNA target sequence for RFT1 (NM_052859.2,867-885).
gatcagggtgtgtatgata

SEQ ID NO: 327325 - DNA, 19 bp, Homo sapiens
  siRNA target sequence for RFT1 (NM_052859.2,902-920).
ctcccttgtggccagatta

SEQ ID NO: 327326 - DNA, 19 bp, Homo sapiens
  siRNA target sequence for RFT1 (NM_052859.2,905-923).
ccttgtggccagattaatt

SEQ ID NO: 327327 - DNA, 19 bp, Homo sapiens
  siRNA target sequence for RFT1 (NM_052859.2,927-945).
cagccaatagaggaaagtt

SEQ ID NO: 327328 - DNA, 19 bp, Homo sapiens
  siRNA target sequence for RFT1 (NM_052859.2,1144-1162).
gatccggtcctgttttgct

SEQ ID NO: 327329 - DNA, 19 bp, Homo sapiens
  siRNA target sequence for RFT1 (NM_052859.2,1163-1181).
gcgttcctactgtctctat

SEQ ID NO: 327330 - DNA, 19 bp, Homo sapiens
  siRNA target sequence for RFT1 (NM_052859.2,1168-1186).
cctactgtctctatgttct

SEQ ID NO: 327331 - DNA, 19 bp, Homo sapiens
  siRNA target sequence for RFT1 (NM_052859.2,1206-1224).
gtgacagagtgtttcacat

SEQ ID NO: 327332 - DNA, 19 bp, Homo sapiens
  siRNA target sequence for RFT1 (NM_052859.2,1244-1262).
ggaggtcgacaggtacaat

SEQ ID NO: 327333 - DNA, 19 bp, Homo sapiens
  siRNA target sequence for RFT1 (NM_052859.2,1247-1265).
ggtcgacaggtacaatttt

SEQ ID NO: 327334 - DNA, 19 bp, Homo sapiens
  siRNA target sequence for RFT1 (NM_052859.2,1495-1513).
ctgtttcggaggtattcct

SEQ ID NO: 327335 - DNA, 19 bp, Homo sapiens
  siRNA target sequence for RFT1 (NM_052859.2,1609-1627).
ccaagctgatccatttcct

SEQ ID NO: 327336 - DNA, 19 bp, Homo sapiens
  siRNA target sequence for RFT1 (NM_052859.2,1646-1664).
gcccagacgcactgacaaa

SEQ ID NO: 327337 - DNA, 19 bp, Homo sapiens
  siRNA target sequence for RFT1 (NM_052859.2,1648-1666).
ccagacgcactgacaaaat

SEQ ID NO: 327338 - DNA, 19 bp, Homo sapiens
  siRNA target sequence for RFT1 (NM_052859.2,1653-1671).
cgcactgacaaaatgacat

SEQ ID NO: 327339 - DNA, 19 bp, Homo sapiens
  siRNA target sequence for SECTM1 (NM_003004.1,359-377).
gtggctccaggctacttct

SEQ ID NO: 327340 - DNA, 19 bp, Homo sapiens
  siRNA target sequence for SECTM1 (NM_003004.1,449-467).
catgctgggctgtacatgt

SEQ ID NO: 327341 - DNA, 19 bp, Homo sapiens
  siRNA target sequence for SECTM1 (NM_003004.1,475-493).
cgtgggacaccagagaaat

SEQ ID NO: 327342 - DNA, 19 bp, Homo sapiens
  siRNA target sequence for SECTM1 (NM_003004.1,476-494).
gtgggacaccagagaaata

SEQ ID NO: 327343 - DNA, 19 bp, Homo sapiens
  siRNA target sequence for SECTM1 (NM_003004.1,479-497).
ggacaccagagaaataaca

SEQ ID NO: 327344 - DNA, 19 bp, Homo sapiens
  siRNA target sequence for SECTM1 (NM_003004.1,777-795).
cgctggcactggtgttcaa

SEQ ID NO: 327345 - DNA, 19 bp, Homo sapiens
  siRNA target sequence for SECTM1 (NM_003004.1,778-796).
gctggcactggtgttcaaa

SEQ ID NO: 327346 - DNA, 19 bp, Homo sapiens
  siRNA target sequence for SELS (NM_018445.2,160-178).
ctctacgtggtctttcaga

SEQ ID NO: 327347 - DNA, 19 bp, Homo sapiens
  siRNA target sequence for SELS (NM_018445.2,166-184).
gtggtctttcagaagcttt

SEQ ID NO: 327348 - DNA, 19 bp, Homo sapiens
  siRNA target sequence for SELS (NM_018445.2,241-259).
gaacctgatgttgttgtta

SEQ ID NO: 327349 - DNA, 19 bp, Homo sapiens
  siRNA target sequence for SELS (NM_018445.2,313-331).
gcgcaagttgaaaagcata

SEQ ID NO: 327350 - DNA, 19 bp, Homo sapiens
  siRNA target sequence for SELS (NM_018445.2,314-332).
cgcaagttgaaaagcataa

SEQ ID NO: 327351 - DNA, 19 bp, Homo sapiens
  siRNA target sequence for SEZ6L (NM_021115.2,570-588).
gagtgcggtccctacaaca

SEQ ID NO: 327352 - DNA, 19 bp, Homo sapiens
  siRNA target sequence for SEZ6L (NM_021115.2,589-607).
cccgcacccctgcaaatct

SEQ ID NO: 327353 - DNA, 19 bp, Homo sapiens
  siRNA target sequence for SEZ6L (NM_021115.2,1139-1157).
ggaccttccagcttcacta

SEQ ID NO: 327354 - DNA, 19 bp, Homo sapiens
  siRNA target sequence for SEZ6L (NM_021115.2,1235-1253).
gtggggtggcccactttca

SEQ ID NO: 327355 - DNA, 19 bp, Homo sapiens
  siRNA target sequence for SEZ6L (NM_021115.2,1287-1305).
gatgctgacatgcatcaat

SEQ ID NO: 327356 - DNA, 19 bp, Homo sapiens
  siRNA target sequence for SEZ6L (NM_021115.2,1574-1592).
ccgagagtgtcccttttga

SEQ ID NO: 327357 - DNA, 19 bp, Homo sapiens
  siRNA target sequence for SEZ6L (NM_021115.2,1661-1679).
ccttcaacatccgatttga

SEQ ID NO: 327358 - DNA, 19 bp, Homo sapiens
  siRNA target sequence for SEZ6L (NM_021115.2,1717-1735).
cagaatgggaacttcacta

SEQ ID NO: 327359 - DNA, 19 bp, Homo sapiens
  siRNA target sequence for SEZ6L (NM_021115.2,1736-1754).
catccgacccgacctataa

SEQ ID NO: 327360 - DNA, 19 bp, Homo sapiens
  siRNA target sequence for SEZ6L (NM_021115.2,1739-1757).
ccgacccgacctataacat

SEQ ID NO: 327361 - DNA, 19 bp, Homo sapiens
  siRNA target sequence for SEZ6L (NM_021115.2,1740-1758).
cgacccgacctataacatt

SEQ ID NO: 327362 - DNA, 19 bp, Homo sapiens
  siRNA target sequence for SEZ6L (NM_021115.2,1840-1858).
gacccatactggaatgaca

SEQ ID NO: 327363 - DNA, 19 bp, Homo sapiens
  siRNA target sequence for SEZ6L (NM_021115.2,1941-1959).
ctacgtggaaggtgaagat

SEQ ID NO: 327364 - DNA, 19 bp, Homo sapiens
  siRNA target sequence for SEZ6L (NM_021115.2,1989-2007).
gaaacggatcttcttagat

SEQ ID NO: 327365 - DNA, 19 bp, Homo sapiens
  siRNA target sequence for SEZ6L (NM_021115.2,2126-2144).
ccacgccagacttaaccat

SEQ ID NO: 327366 - DNA, 19 bp, Homo sapiens
  siRNA target sequence for SEZ6L (NM_021115.2,2179-2197).
ggaaagggccagggattta

SEQ ID NO: 327367 - DNA, 19 bp, Homo sapiens
  siRNA target sequence for SEZ6L (NM_021115.2,2180-2198).
gaaagggccagggatttat

SEQ ID NO: 327368 - DNA, 19 bp, Homo sapiens
  siRNA target sequence for SEZ6L (NM_021115.2,2185-2203).
ggccagggatttatcatga

SEQ ID NO: 327369 - DNA, 19 bp, Homo sapiens
  siRNA target sequence for SEZ6L (NM_021115.2,2186-2204).
gccagggatttatcatgaa

SEQ ID NO: 327370 - DNA, 19 bp, Homo sapiens
  siRNA target sequence for SEZ6L (NM_021115.2,2192-2210).
gatttatcatgaactacat

SEQ ID NO: 327371 - DNA, 19 bp, Homo sapiens
  siRNA target sequence for SEZ6L (NM_021115.2,2212-2230).
gaggtatcaaggaatgact

SEQ ID NO: 327372 - DNA, 19 bp, Homo sapiens
  siRNA target sequence for SEZ6L (NM_021115.2,2440-2458).
cactcgacccgcttaattt

SEQ ID NO: 327373 - DNA, 19 bp, Homo sapiens
  siRNA target sequence for SEZ6L (NM_021115.2,2476-2494).
gtggggaccaccatccaat

SEQ ID NO: 327374 - DNA, 19 bp, Homo sapiens
  siRNA target sequence for SEZ6L (NM_021115.2,2498-2516).
cctgcaaccccggttttgt

SEQ ID NO: 327375 - DNA, 19 bp, Homo sapiens
  siRNA target sequence for SEZ6L (NM_021115.2,2625-2643).
cccagggctgcctgaaaat

SEQ ID NO: 327376 - DNA, 19 bp, Homo sapiens
  siRNA target sequence for SEZ6L (NM_021115.2,2629-2647).
gggctgcctgaaaatggat

SEQ ID NO: 327377 - DNA, 19 bp, Homo sapiens
  siRNA target sequence for SEZ6L (NM_021115.2,2630-2648).
ggctgcctgaaaatggata

SEQ ID NO: 327378 - DNA, 19 bp, Homo sapiens
  siRNA target sequence for SEZ6L (NM_021115.2,2645-2663).
gataccaaatcctgtacaa

SEQ ID NO: 327379 - DNA, 19 bp, Homo sapiens
  siRNA target sequence for SEZ6L (NM_021115.2,2779-2797).
ctgcccgtgtgtaaagtta

SEQ ID NO: 327380 - DNA, 19 bp, Homo sapiens
  siRNA target sequence for SEZ6L (NM_021115.2,2781-2799).
gcccgtgtgtaaagttaat

SEQ ID NO: 327381 - DNA, 19 bp, Homo sapiens
  siRNA target sequence for SEZ6L (NM_021115.2,2783-2801).
ccgtgtgtaaagttaatca

SEQ ID NO: 327382 - DNA, 19 bp, Homo sapiens
  siRNA target sequence for SEZ6L (NM_021115.2,2784-2802).
cgtgtgtaaagttaatcaa

SEQ ID NO: 327383 - DNA, 19 bp, Homo sapiens
  siRNA target sequence for SEZ6L (NM_021115.2,2920-2938).
ggagcctacatttacatca

SEQ ID NO: 327384 - DNA, 19 bp, Homo sapiens
  siRNA target sequence for SEZ6L (NM_021115.2,2942-2960).
gatgtcgctactattccaa

SEQ ID NO: 327385 - DNA, 19 bp, Homo sapiens
  siRNA target sequence for SEZ6L (NM_021115.2,2965-2983).
cgcctgcctctgatgtact

SEQ ID NO: 327386 - DNA, 19 bp, Homo sapiens
  siRNA target sequence for SEZ6L (NM_021115.2,3007-3025).
gtggaaaccgagtttgaca

SEQ ID NO: 327387 - DNA, 19 bp, Homo sapiens
  siRNA target sequence for SEZ6L (NM_021115.2,3053-3071).
gagagtatgaggtttctat

SEQ ID NO: 327388 - DNA, 19 bp, Homo sapiens
  siRNA target sequence for SLC24A4 (NM_153646.1,94-112).
ggcagcttggggcacaaaa

SEQ ID NO: 327389 - DNA, 19 bp, Homo sapiens
  siRNA target sequence for SLC24A4 (NM_153646.1,162-180).
gttgatggccccagtgaat

SEQ ID NO: 327390 - DNA, 19 bp, Homo sapiens
  siRNA target sequence for SLC24A4 (NM_153646.1,282-300).
catccttggtgctctgtat

SEQ ID NO: 327391 - DNA, 19 bp, Homo sapiens
  siRNA target sequence for SLC24A4 (NM_153646.1,343-361).
ccgtctctagagaagatct

SEQ ID NO: 327392 - DNA, 19 bp, Homo sapiens
  siRNA target sequence for SLC24A4 (NM_153646.1,430-448).
gagctgtttgcgtctgtta

SEQ ID NO: 327393 - DNA, 19 bp, Homo sapiens
  siRNA target sequence for SLC24A4 (NM_153646.1,584-602).
gccgagactccgtgtacta

SEQ ID NO: 327394 - DNA, 19 bp, Homo sapiens
  siRNA target sequence for SLC24A4 (NM_153646.1,586-604).
cgagactccgtgtactaca

SEQ ID NO: 327395 - DNA, 19 bp, Homo sapiens
  siRNA target sequence for SLC24A4 (NM_153646.1,618-636).
cgtgctcatcgtgttcata

SEQ ID NO: 327396 - DNA, 19 bp, Homo sapiens
  siRNA target sequence for SLC24A4 (NM_153646.1,669-687).
ggtgctcatcatcttgtat

SEQ ID NO: 327397 - DNA, 19 bp, Homo sapiens
  siRNA target sequence for SLC24A4 (NM_153646.1,675-693).
catcatcttgtatgtgttt

SEQ ID NO: 327398 - DNA, 19 bp, Homo sapiens
  siRNA target sequence for SLC24A4 (NM_153646.1,731-749).
cctttttcacagtcaaaca

SEQ ID NO: 327399 - DNA, 19 bp, Homo sapiens
  siRNA target sequence for SLC24A4 (NM_153646.1,732-750).
ctttttcacagtcaaacaa

SEQ ID NO: 327400 - DNA, 19 bp, Homo sapiens
  siRNA target sequence for SLC24A4 (NM_153646.1,790-808).
gaggctggtaatgatttct

SEQ ID NO: 327401 - DNA, 19 bp, Homo sapiens
  siRNA target sequence for SLC24A4 (NM_153646.1,792-810).
ggctggtaatgatttctat

SEQ ID NO: 327402 - DNA, 19 bp, Homo sapiens
  siRNA target sequence for SLC24A4 (NM_153646.1,839-857).
cattgctggggcaagtgaa

SEQ ID NO: 327403 - DNA, 19 bp, Homo sapiens
  siRNA target sequence for SLC24A4 (NM_153646.1,937-955).
cctgaagcaggcttacgaa

SEQ ID NO: 327404 - DNA, 19 bp, Homo sapiens
  siRNA target sequence for SLC24A4 (NM_153646.1,943-961).
gcaggcttacgaatcatga

SEQ ID NO: 327405 - DNA, 19 bp, Homo sapiens
  siRNA target sequence for SLC24A4 (NM_153646.1,944-962).
caggcttacgaatcatgat

SEQ ID NO: 327406 - DNA, 19 bp, Homo sapiens
  siRNA target sequence for SLC24A4 (NM_153646.1,946-964).
ggcttacgaatcatgatca

SEQ ID NO: 327407 - DNA, 19 bp, Homo sapiens
  siRNA target sequence for SLC24A4 (NM_153646.1,952-970).
cgaatcatgatcaccaata

SEQ ID NO: 327408 - DNA, 19 bp, Homo sapiens
  siRNA target sequence for SLC24A4 (NM_153646.1,953-971).
gaatcatgatcaccaataa

SEQ ID NO: 327409 - DNA, 19 bp, Homo sapiens
  siRNA target sequence for SLC24A4 (NM_153646.1,1058-1076).
gcagtaagccgcttcaaaa

SEQ ID NO: 327410 - DNA, 19 bp, Homo sapiens
  siRNA target sequence for SLC24A4 (NM_153646.1,1079-1097).
ggaggcacgagaacattga

SEQ ID NO: 327411 - DNA, 19 bp, Homo sapiens
  siRNA target sequence for SLC24A4 (NM_153646.1,1092-1110).
cattgagaacgggaatgtt

SEQ ID NO: 327412 - DNA, 19 bp, Homo sapiens
  siRNA target sequence for SLC24A4 (NM_153646.1,1366-1384).
gctgtgttctcctacatca

SEQ ID NO: 327413 - DNA, 19 bp, Homo sapiens
  siRNA target sequence for SLC24A4 (NM_153646.1,1398-1416).
gactattatcggatacaca

SEQ ID NO: 327414 - DNA, 19 bp, Homo sapiens
  siRNA target sequence for SLC24A4 (NM_153646.1,1432-1450).
gtcatcatgggcattactt

SEQ ID NO: 327415 - DNA, 19 bp, Homo sapiens
  siRNA target sequence for SLC24A4 (NM_153646.1,1528-1546).
gtctccaacaccataggaa

SEQ ID NO: 327416 - DNA, 19 bp, Homo sapiens
  siRNA target sequence for SLC24A4 (NM_153646.1,1596-1614).
gaccatggttgttaattat

SEQ ID NO: 327417 - DNA, 19 bp, Homo sapiens
  siRNA target sequence for SLC24A4 (NM_153646.1,1599-1617).
catggttgttaattatgga

SEQ ID NO: 327418 - DNA, 19 bp, Homo sapiens
  siRNA target sequence for SLC24A4 (NM_153646.1,1615-1633).
ggatcaacagtgaagatca

SEQ ID NO: 327419 - DNA, 19 bp, Homo sapiens
  siRNA target sequence for SLC24A4 (NM_153646.1,1776-1794).
ctccataatgatagagttt

SEQ ID NO: 327420 - DNA, 19 bp, Homo sapiens
  siRNA target sequence for SLC24A4 (NM_153646.1,1789-1807).
gagtttaacgtctttacct

SEQ ID NO: 327421 - DNA, 19 bp, Homo sapiens
  siRNA target sequence for SMP1 (NM_014313.2,198-216).
gggggaaaagcgcaatact

SEQ ID NO: 327422 - DNA, 19 bp, Homo sapiens
  siRNA target sequence for SMP1 (NM_014313.2,199-217).
ggggaaaagcgcaatacta

SEQ ID NO: 327423 - DNA, 19 bp, Homo sapiens
  siRNA target sequence for SMP1 (NM_014313.2,200-218).
gggaaaagcgcaatactat

SEQ ID NO: 327424 - DNA, 19 bp, Homo sapiens
  siRNA target sequence for SMP1 (NM_014313.2,201-219).
ggaaaagcgcaatactatt

SEQ ID NO: 327425 - DNA, 19 bp, Homo sapiens
  siRNA target sequence for SMP1 (NM_014313.2,225-243).
cattgctgctggtgtacta

SEQ ID NO: 327426 - DNA, 19 bp, Homo sapiens
  siRNA target sequence for SMP1 (NM_014313.2,337-355).
gcaaccatagccttcctaa

SEQ ID NO: 327427 - DNA, 19 bp, Homo sapiens
  siRNA target sequence for SMP1 (NM_014313.2,338-356).
caaccatagccttcctaat

SEQ ID NO: 327428 - DNA, 19 bp, Homo sapiens
  siRNA target sequence for SMP1 (NM_014313.2,348-366).
cttcctaatgattaatgca

SEQ ID NO: 327429 - DNA, 19 bp, Homo sapiens
  siRNA target sequence for SMP1 (NM_014313.2,357-375).
gattaatgcagtatcgaat

SEQ ID NO: 327430 - DNA, 19 bp, Homo sapiens
  siRNA target sequence for SMP1 (NM_014313.2,379-397).
caagtccgaggtgatagtt

SEQ ID NO: 327431 - DNA, 19 bp, Homo sapiens
  siRNA target sequence for SMP1 (NM_014313.2,382-400).
gtccgaggtgatagttaca

SEQ ID NO: 327432 - DNA, 19 bp, Homo sapiens
  siRNA target sequence for SMP1 (NM_014313.2,384-402).
ccgaggtgatagttacagt

SEQ ID NO: 327433 - DNA, 19 bp, Homo sapiens
  siRNA target sequence for SMP1 (NM_014313.2,467-485).
gatctctgattgcatctat

SEQ ID NO: 327434 - DNA, 19 bp, Homo sapiens
  siRNA target sequence for SMP1 (NM_014313.2,502-520).
ggttatgttgctaaagaaa

SEQ ID NO: 327435 - DNA, 19 bp, Homo sapiens
  siRNA target sequence for SMP1 (NM_014313.2,525-543).
catagtataccctggaatt

SEQ ID NO: 327436 - DNA, 19 bp, Homo sapiens
  siRNA target sequence for SORCS1 (NM_052918.2,562-580).
gcagcgtgattctcatttt

SEQ ID NO: 327437 - DNA, 19 bp, Homo sapiens
  siRNA target sequence for SORCS1 (NM_052918.2,566-584).
cgtgattctcattttgaca

SEQ ID NO: 327438 - DNA, 19 bp, Homo sapiens
  siRNA target sequence for SORCS1 (NM_052918.2,581-599).
gacaaagctctatgactat

SEQ ID NO: 327439 - DNA, 19 bp, Homo sapiens
  siRNA target sequence for SORCS1 (NM_052918.2,583-601).
caaagctctatgactataa

SEQ ID NO: 327440 - DNA, 19 bp, Homo sapiens
  siRNA target sequence for SORCS1 (NM_052918.2,632-650).
gaggtcaaccgattatgga

SEQ ID NO: 327441 - DNA, 19 bp, Homo sapiens
  siRNA target sequence for SORCS1 (NM_052918.2,641-659).
cgattatggaacaacctat

SEQ ID NO: 327442 - DNA, 19 bp, Homo sapiens
  siRNA target sequence for SORCS1 (NM_052918.2,718-736).
ctaccaacaagcgtaagat

SEQ ID NO: 327443 - DNA, 19 bp, Homo sapiens
  siRNA target sequence for SORCS1 (NM_052918.2,725-743).
caagcgtaagataatgtta

SEQ ID NO: 327444 - DNA, 19 bp, Homo sapiens
  siRNA target sequence for SORCS1 (NM_052918.2,729-747).
cgtaagataatgttactca

SEQ ID NO: 327445 - DNA, 19 bp, Homo sapiens
  siRNA target sequence for SORCS1 (NM_052918.2,756-774).
gagattgagagcagtttat

SEQ ID NO: 327446 - DNA, 19 bp, Homo sapiens
  siRNA target sequence for SORCS1 (NM_052918.2,792-810).
ggggcaacttatcaaaagt

SEQ ID NO: 327447 - DNA, 19 bp, Homo sapiens
  siRNA target sequence for SORCS1 (NM_052918.2,793-811).
gggcaacttatcaaaagta

SEQ ID NO: 327448 - DNA, 19 bp, Homo sapiens
  siRNA target sequence for SORCS1 (NM_052918.2,812-830).
ccggctgaacttctacatt

SEQ ID NO: 327449 - DNA, 19 bp, Homo sapiens
  siRNA target sequence for SORCS1 (NM_052918.2,814-832).
ggctgaacttctacattca

SEQ ID NO: 327450 - DNA, 19 bp, Homo sapiens
  siRNA target sequence for SORCS1 (NM_052918.2,919-937).
gaagatggcagcttatcca

SEQ ID NO: 327451 - DNA, 19 bp, Homo sapiens
  siRNA target sequence for SORCS1 (NM_052918.2,970-988).
ctgtgatggggtcaaataa

SEQ ID NO: 327452 - DNA, 19 bp, Homo sapiens
  siRNA target sequence for SORCS1 (NM_052918.2,974-992).
gatggggtcaaataaagaa

SEQ ID NO: 327453 - DNA, 19 bp, Homo sapiens
  siRNA target sequence for SORCS1 (NM_052918.2,1025-1043).
ggatggtcattcacattat

SEQ ID NO: 327454 - DNA, 19 bp, Homo sapiens
  siRNA target sequence for SORCS1 (NM_052918.2,1029-1047).
ggtcattcacattatctaa

SEQ ID NO: 327455 - DNA, 19 bp, Homo sapiens
  siRNA target sequence for SORCS1 (NM_052918.2,1111-1129).
cagactctttgattgttca

SEQ ID NO: 327456 - DNA, 19 bp, Homo sapiens
  siRNA target sequence for SORCS1 (NM_052918.2,1130-1148).
ggatcattatgtgtttgtt

SEQ ID NO: 327457 - DNA, 19 bp, Homo sapiens
  siRNA target sequence for SORCS1 (NM_052918.2,1181-1199).
cgtgtcctaccgaaggaat

SEQ ID NO: 327458 - DNA, 19 bp, Homo sapiens
  siRNA target sequence for SORCS1 (NM_052918.2,1186-1204).
cctaccgaaggaatgcatt

SEQ ID NO: 327459 - DNA, 19 bp, Homo sapiens
  siRNA target sequence for SORCS1 (NM_052918.2,1187-1205).
ctaccgaaggaatgcattt

SEQ ID NO: 327460 - DNA, 19 bp, Homo sapiens
  siRNA target sequence for SORCS1 (NM_052918.2,1214-1232).
gaagcttccgaaatatgct

SEQ ID NO: 327461 - DNA, 19 bp, Homo sapiens
  siRNA target sequence for SORCS1 (NM_052918.2,1236-1254).
cccaaggacatgcatgtta

SEQ ID NO: 327462 - DNA, 19 bp, Homo sapiens
  siRNA target sequence for SORCS1 (NM_052918.2,1237-1255).
ccaaggacatgcatgttat

SEQ ID NO: 327463 - DNA, 19 bp, Homo sapiens
  siRNA target sequence for SORCS1 (NM_052918.2,1426-1444).
cagggataaagggaatgtt

SEQ ID NO: 327464 - DNA, 19 bp, Homo sapiens
  siRNA target sequence for SORCS1 (NM_052918.2,1438-1456).
gaatgttcttggctaacaa

SEQ ID NO: 327465 - DNA, 19 bp, Homo sapiens
  siRNA target sequence for SORCS1 (NM_052918.2,1449-1467).
gctaacaagaagattgaca

SEQ ID NO: 327466 - DNA, 19 bp, Homo sapiens
  siRNA target sequence for SORCS1 (NM_052918.2,1464-1482).
gacaaccaagtgaagactt

SEQ ID NO: 327467 - DNA, 19 bp, Homo sapiens
  siRNA target sequence for SORCS1 (NM_052918.2,1473-1491).
gtgaagactttcatcacat

SEQ ID NO: 327468 - DNA, 19 bp, Homo sapiens
  siRNA target sequence for SORCS1 (NM_052918.2,1475-1493).
gaagactttcatcacatat

SEQ ID NO: 327469 - DNA, 19 bp, Homo sapiens
  siRNA target sequence for SORCS1 (NM_052918.2,1664-1682).
ggcatcaggtaatataggt

SEQ ID NO: 327470 - DNA, 19 bp, Homo sapiens
  siRNA target sequence for SORCS1 (NM_052918.2,1671-1689).
ggtaatataggttctgaat

SEQ ID NO: 327471 - DNA, 19 bp, Homo sapiens
  siRNA target sequence for SORCS1 (NM_052918.2,1672-1690).
gtaatataggttctgaatt

SEQ ID NO: 327472 - DNA, 19 bp, Homo sapiens
  siRNA target sequence for SORCS1 (NM_052918.2,1709-1727).
catgtttgtctcttcagat

SEQ ID NO: 327473 - DNA, 19 bp, Homo sapiens
  siRNA target sequence for SORCS1 (NM_052918.2,1830-1848).
cgacatctttggttgagtt

SEQ ID NO: 327474 - DNA, 19 bp, Homo sapiens
  siRNA target sequence for SORCS1 (NM_052918.2,1831-1849).
gacatctttggttgagttt

SEQ ID NO: 327475 - DNA, 19 bp, Homo sapiens
  siRNA target sequence for SORCS1 (NM_052918.2,1864-1882).
cttggagcaaatacagttt

SEQ ID NO: 327476 - DNA, 19 bp, Homo sapiens
  siRNA target sequence for SORCS1 (NM_052918.2,1877-1895).
cagtttcacatctattcca

SEQ ID NO: 327477 - DNA, 19 bp, Homo sapiens
  siRNA target sequence for SORCS1 (NM_052918.2,1885-1903).
catctattccactttttgt

SEQ ID NO: 327478 - DNA, 19 bp, Homo sapiens
  siRNA target sequence for SORCS1 (NM_052918.2,1929-1947).
gaagagactctcatcatga

SEQ ID NO: 327479 - DNA, 19 bp, Homo sapiens
  siRNA target sequence for SORCS1 (NM_052918.2,1981-1999).
ggcagctggtcaaagtaga

SEQ ID NO: 327480 - DNA, 19 bp, Homo sapiens
  siRNA target sequence for SORCS1 (NM_052918.2,1982-2000).
gcagctggtcaaagtagat

SEQ ID NO: 327481 - DNA, 19 bp, Homo sapiens
  siRNA target sequence for SORCS1 (NM_052918.2,1983-2001).
cagctggtcaaagtagatt

SEQ ID NO: 327482 - DNA, 19 bp, Homo sapiens
  siRNA target sequence for SORCS1 (NM_052918.2,1986-2004).
ctggtcaaagtagattaca

SEQ ID NO: 327483 - DNA, 19 bp, Homo sapiens
  siRNA target sequence for SORCS1 (NM_052918.2,2064-2082).
cagggggaagcatgtatca

SEQ ID NO: 327484 - DNA, 19 bp, Homo sapiens
  siRNA target sequence for SORCS1 (NM_052918.2,2081-2099).
catgggagcaaaaaggata

SEQ ID NO: 327485 - DNA, 19 bp, Homo sapiens
  siRNA target sequence for SORCS1 (NM_052918.2,2146-2164).
caggagctatggaatctga

SEQ ID NO: 327486 - DNA, 19 bp, Homo sapiens
  siRNA target sequence for SORCS1 (NM_052918.2,2229-2247).
cagtgcctgccggcatttt

SEQ ID NO: 327487 - DNA, 19 bp, Homo sapiens
  siRNA target sequence for SORCS1 (NM_052918.2,2233-2251).
gcctgccggcattttggtt

SEQ ID NO: 327488 - DNA, 19 bp, Homo sapiens
  siRNA target sequence for SORCS1 (NM_052918.2,2237-2255).
gccggcattttggttcaat

SEQ ID NO: 327489 - DNA, 19 bp, Homo sapiens
  siRNA target sequence for SORCS1 (NM_052918.2,2289-2307).
cagagttacctcaatagta

SEQ ID NO: 327490 - DNA, 19 bp, Homo sapiens
  siRNA target sequence for SORCS1 (NM_052918.2,2318-2336).
gaaggtggtttccaataat

SEQ ID NO: 327491 - DNA, 19 bp, Homo sapiens
  siRNA target sequence for SORCS1 (NM_052918.2,2322-2340).
gtggtttccaataattgca

SEQ ID NO: 327492 - DNA, 19 bp, Homo sapiens
  siRNA target sequence for SORCS1 (NM_052918.2,2459-2477).
cactctcatggtgcaatta

SEQ ID NO: 327493 - DNA, 19 bp, Homo sapiens
  siRNA target sequence for SORCS1 (NM_052918.2,2533-2551).
cggtgtcttacgtcaatct

SEQ ID NO: 327494 - DNA, 19 bp, Homo sapiens
  siRNA target sequence for SORCS1 (NM_052918.2,2535-2553).
gtgtcttacgtcaatctca

SEQ ID NO: 327495 - DNA, 19 bp, Homo sapiens
  siRNA target sequence for SORCS1 (NM_052918.2,2569-2587).
ggatcaaacacgtctatca

SEQ ID NO: 327496 - DNA, 19 bp, Homo sapiens
  siRNA target sequence for SORCS1 (NM_052918.2,2642-2660).
cagcgccgtcctgtactta

SEQ ID NO: 327497 - DNA, 19 bp, Homo sapiens
  siRNA target sequence for SORCS1 (NM_052918.2,2644-2662).
gcgccgtcctgtacttaca

SEQ ID NO: 327498 - DNA, 19 bp, Homo sapiens
  siRNA target sequence for SORCS1 (NM_052918.2,2648-2666).
cgtcctgtacttacatgta

SEQ ID NO: 327499 - DNA, 19 bp, Homo sapiens
  siRNA target sequence for SORCS1 (NM_052918.2,2649-2667).
gtcctgtacttacatgtaa

SEQ ID NO: 327500 - DNA, 19 bp, Homo sapiens
  siRNA target sequence for SORCS1 (NM_052918.2,2823-2841).
ggaagcatatccttcagat

SEQ ID NO: 327501 - DNA, 19 bp, Homo sapiens
  siRNA target sequence for SORCS1 (NM_052918.2,2908-2926).
caaagaccatcgcagtata

SEQ ID NO: 327502 - DNA, 19 bp, Homo sapiens
  siRNA target sequence for SORCS1 (NM_052918.2,2962-2980).
caaacctggatgactacaa

SEQ ID NO: 327503 - DNA, 19 bp, Homo sapiens
  siRNA target sequence for SORCS1 (NM_052918.2,3008-3026).
catcggtcgagtcatcaaa

SEQ ID NO: 327504 - DNA, 19 bp, Homo sapiens
  siRNA target sequence for SORCS1 (NM_052918.2,3011-3029).
cggtcgagtcatcaaaaaa

SEQ ID NO: 327505 - DNA, 19 bp, Homo sapiens
  siRNA target sequence for SORCS1 (NM_052918.2,3012-3030).
ggtcgagtcatcaaaaaat

SEQ ID NO: 327506 - DNA, 19 bp, Homo sapiens
  siRNA target sequence for SORCS1 (NM_052918.2,3095-3113).
caccactgctgaactcttt

SEQ ID NO: 327507 - DNA, 19 bp, Homo sapiens
  siRNA target sequence for SORCS1 (NM_052918.2,3097-3115).
ccactgctgaactctttgt

SEQ ID NO: 327508 - DNA, 19 bp, Homo sapiens
  siRNA target sequence for SORCS1 (NM_052918.2,3192-3210).
cacacgctcaaccaaaact

SEQ ID NO: 327509 - DNA, 19 bp, Homo sapiens
  siRNA target sequence for SORCS1 (NM_052918.2,3194-3212).
cacgctcaaccaaaactca

SEQ ID NO: 327510 - DNA, 19 bp, Homo sapiens
  siRNA target sequence for SORCS1 (NM_052918.2,3249-3267).
gtccatgctgctcacttaa

SEQ ID NO: 327511 - DNA, 19 bp, Homo sapiens
  siRNA target sequence for SORCS1 (NM_052918.2,3351-3369).
gcagtgttcgtcatctaca

SEQ ID NO: 327512 - DNA, 19 bp, Homo sapiens
  siRNA target sequence for SORCS1 (NM_052918.2,3354-3372).
gtgttcgtcatctacaagt

SEQ ID NO: 327513 - DNA, 19 bp, Homo sapiens
  siRNA target sequence for SORCS1 (NM_052918.2,3356-3374).
gttcgtcatctacaagttt

SEQ ID NO: 327514 - DNA, 19 bp, Homo sapiens
  siRNA target sequence for SORCS1 (NM_052918.2,3428-3446).
ctcatctctccgattgcaa

SEQ ID NO: 327515 - DNA, 19 bp, Homo sapiens
  siRNA target sequence for SORCS1 (NM_052918.2,3495-3513).
ggggcacagtatgcaattt

SEQ ID NO: 327516 - DNA, 19 bp, Homo sapiens
  siRNA target sequence for STARD3NL (NM_032016.2,327-345).
cctttgacctcttattcgt

SEQ ID NO: 327517 - DNA, 19 bp, Homo sapiens
  siRNA target sequence for STARD3NL (NM_032016.2,328-346).
ctttgacctcttattcgta

SEQ ID NO: 327518 - DNA, 19 bp, Homo sapiens
  siRNA target sequence for STARD3NL (NM_032016.2,332-350).
gacctcttattcgtaacat

SEQ ID NO: 327519 - DNA, 19 bp, Homo sapiens
  siRNA target sequence for STARD3NL (NM_032016.2,344-362).
gtaacattactgtggataa

SEQ ID NO: 327520 - DNA, 19 bp, Homo sapiens
  siRNA target sequence for STARD3NL (NM_032016.2,355-373).
gtggataatagagttaaat

SEQ ID NO: 327521 - DNA, 19 bp, Homo sapiens
  siRNA target sequence for STARD3NL (NM_032016.2,384-402).
gcattgagaacacattaga

SEQ ID NO: 327522 - DNA, 19 bp, Homo sapiens
  siRNA target sequence for STARD3NL (NM_032016.2,407-425).
gaggtgatgcagtatgact

SEQ ID NO: 327523 - DNA, 19 bp, Homo sapiens
  siRNA target sequence for STARD3NL (NM_032016.2,415-433).
gcagtatgactactattct

SEQ ID NO: 327524 - DNA, 19 bp, Homo sapiens
  siRNA target sequence for STARD3NL (NM_032016.2,452-470).
cttctggcagtttttcgat

SEQ ID NO: 327525 - DNA, 19 bp, Homo sapiens
  siRNA target sequence for STARD3NL (NM_032016.2,455-473).
ctggcagtttttcgattta

SEQ ID NO: 327526 - DNA, 19 bp, Homo sapiens
  siRNA target sequence for STARD3NL (NM_032016.2,549-567).
gtgcctttttactagcaaa

SEQ ID NO: 327527 - DNA, 19 bp, Homo sapiens
  siRNA target sequence for STARD3NL (NM_032016.2,560-578).
ctagcaaaagtgatccttt

SEQ ID NO: 327528 - DNA, 19 bp, Homo sapiens
  siRNA target sequence for STARD3NL (NM_032016.2,564-582).
caaaagtgatcctttcgaa

SEQ ID NO: 327529 - DNA, 19 bp, Homo sapiens
  siRNA target sequence for STARD3NL (NM_032016.2,569-587).
gtgatcctttcgaagcttt

SEQ ID NO: 327530 - DNA, 19 bp, Homo sapiens
  siRNA target sequence for STARD3NL (NM_032016.2,651-669).
cgtggttcctggatttcaa

SEQ ID NO: 327531 - DNA, 19 bp, Homo sapiens
  siRNA target sequence for STARD3NL (NM_032016.2,658-676).
cctggatttcaaagtgtta

SEQ ID NO: 327532 - DNA, 19 bp, Homo sapiens
  siRNA target sequence for SYNGR4 (NM_012451.2,283-301).
gcgaagccgtgcagtttct

SEQ ID NO: 327533 - DNA, 19 bp, Homo sapiens
  siRNA target sequence for SYNGR4 (NM_012451.2,525-543).
gccggcacccgcttcaaga

SEQ ID NO: 327534 - DNA, 19 bp, Homo sapiens
  siRNA target sequence for SYNGR4 (NM_012451.2,740-758).
ccaggacctccgaaatgat

SEQ ID NO: 327535 - DNA, 19 bp, Homo sapiens
  siRNA target sequence for SYNGR4 (NM_012451.2,829-847).
ccaacagccctgtgaacat

SEQ ID NO: 327536 - DNA, 19 bp, Homo sapiens
  siRNA target sequence for SYNGR4 (NM_012451.2,860-878).
ccccaacagcctgagttat

SEQ ID NO: 327537 - DNA, 19 bp, Homo sapiens
  siRNA target sequence for TACSTD1 (NM_002354.1,239-257).
gccgcagctcaggaagaat

SEQ ID NO: 327538 - DNA, 19 bp, Homo sapiens
  siRNA target sequence for TACSTD1 (NM_002354.1,241-259).
cgcagctcaggaagaatgt

SEQ ID NO: 327539 - DNA, 19 bp, Homo sapiens
  siRNA target sequence for TACSTD1 (NM_002354.1,289-307).
ctgctttgtgaataataat

SEQ ID NO: 327540 - DNA, 19 bp, Homo sapiens
  siRNA target sequence for TACSTD1 (NM_002354.1,292-310).
ctttgtgaataataatcgt

SEQ ID NO: 327541 - DNA, 19 bp, Homo sapiens
  siRNA target sequence for TACSTD1 (NM_002354.1,308-326).
cgtcaatgccagtgtactt

SEQ ID NO: 327542 - DNA, 19 bp, Homo sapiens
  siRNA target sequence for TACSTD1 (NM_002354.1,335-353).
gcacaaaatactgtcattt

SEQ ID NO: 327543 - DNA, 19 bp, Homo sapiens
  siRNA target sequence for TACSTD1 (NM_002354.1,476-494).
gatgagagcgggctcttta

SEQ ID NO: 327544 - DNA, 19 bp, Homo sapiens
  siRNA target sequence for TACSTD1 (NM_002354.1,597-615).
gaacctactggatcatcat

SEQ ID NO: 327545 - DNA, 19 bp, Homo sapiens
  siRNA target sequence for TACSTD1 (NM_002354.1,601-619).
ctactggatcatcattgaa

SEQ ID NO: 327546 - DNA, 19 bp, Homo sapiens
  siRNA target sequence for TACSTD1 (NM_002354.1,606-624).
ggatcatcattgaactaaa

SEQ ID NO: 327547 - DNA, 19 bp, Homo sapiens
  siRNA target sequence for TACSTD1 (NM_002354.1,607-625).
gatcatcattgaactaaaa

SEQ ID NO: 327548 - DNA, 19 bp, Homo sapiens
  siRNA target sequence for TACSTD1 (NM_002354.1,723-741).
cgagtattttgtatgagaa

SEQ ID NO: 327549 - DNA, 19 bp, Homo sapiens
  siRNA target sequence for TACSTD1 (NM_002354.1,724-742).
gagtattttgtatgagaat

SEQ ID NO: 327550 - DNA, 19 bp, Homo sapiens
  siRNA target sequence for TACSTD1 (NM_002354.1,902-920).
ctggatcctggtcaaactt

SEQ ID NO: 327551 - DNA, 19 bp, Homo sapiens
  siRNA target sequence for TACSTD1 (NM_002354.1,904-922).
ggatcctggtcaaacttta

SEQ ID NO: 327552 - DNA, 19 bp, Homo sapiens
  siRNA target sequence for TACSTD1 (NM_002354.1,905-923).
gatcctggtcaaactttaa

SEQ ID NO: 327553 - DNA, 19 bp, Homo sapiens
  siRNA target sequence for TACSTD1 (NM_002354.1,908-926).
cctggtcaaactttaattt

SEQ ID NO: 327554 - DNA, 19 bp, Homo sapiens
  siRNA target sequence for TACSTD1 (NM_002354.1,909-927).
ctggtcaaactttaattta

SEQ ID NO: 327555 - DNA, 19 bp, Homo sapiens
  siRNA target sequence for TACSTD1 (NM_002354.1,966-984).
gtctaaaagctggtgttat

SEQ ID NO: 327556 - DNA, 19 bp, Homo sapiens
  siRNA target sequence for TACSTD1 (NM_002354.1,1023-1041).
gaattgttgtgctggttat

SEQ ID NO: 327557 - DNA, 19 bp, Homo sapiens
  siRNA target sequence for TACSTD1 (NM_002354.1,1028-1046).
gttgtgctggttatttcca

SEQ ID NO: 327558 - DNA, 19 bp, Homo sapiens
  siRNA target sequence for TACSTD1 (NM_002354.1,1056-1074).
gaatggcaaagtatgagaa

SEQ ID NO: 327559 - DNA, 19 bp, Homo sapiens
  siRNA target sequence for TACSTD1 (NM_002354.1,1099-1117).
gatgcatagggaactcaat

SEQ ID NO: 327560 - DNA, 19 bp, Homo sapiens
  siRNA target sequence for TACSTD1 (NM_002354.1,1103-1121).
catagggaactcaatgcat

SEQ ID NO: 327561 - DNA, 19 bp, Homo sapiens
  siRNA target sequence for TDE1 (NM_006811.2,187-205).
gcagcggtgcctcatgttt

SEQ ID NO: 327562 - DNA, 19 bp, Homo sapiens
  siRNA target sequence for TDE1 (NM_006811.2,217-235).
gctgtcctaacagtaagaa

SEQ ID NO: 327563 - DNA, 19 bp, Homo sapiens
  siRNA target sequence for TDE1 (NM_006811.2,218-236).
ctgtcctaacagtaagaat

SEQ ID NO: 327564 - DNA, 19 bp, Homo sapiens
  siRNA target sequence for TDE1 (NM_006811.2,241-259).
cggtgactcgcctcattta

SEQ ID NO: 327565 - DNA, 19 bp, Homo sapiens
  siRNA target sequence for TDE1 (NM_006811.2,242-260).
ggtgactcgcctcatttat

SEQ ID NO: 327566 - DNA, 19 bp, Homo sapiens
  siRNA target sequence for TDE1 (NM_006811.2,245-263).
gactcgcctcatttatgct

SEQ ID NO: 327567 - DNA, 19 bp, Homo sapiens
  siRNA target sequence for TDE1 (NM_006811.2,280-298).
gcactgtcgtatcctatat

SEQ ID NO: 327568 - DNA, 19 bp, Homo sapiens
  siRNA target sequence for TDE1 (NM_006811.2,283-301).
ctgtcgtatcctatatcat

SEQ ID NO: 327569 - DNA, 19 bp, Homo sapiens
  siRNA target sequence for TDE1 (NM_006811.2,292-310).
cctatatcatgcagagaaa

SEQ ID NO: 327570 - DNA, 19 bp, Homo sapiens
  siRNA target sequence for TDE1 (NM_006811.2,312-330).
gagatggaaacttacttga

SEQ ID NO: 327571 - DNA, 19 bp, Homo sapiens
  siRNA target sequence for TDE1 (NM_006811.2,368-386).
ccatgaggctgatataaat

SEQ ID NO: 327572 - DNA, 19 bp, Homo sapiens
  siRNA target sequence for TDE1 (NM_006811.2,400-418).
gtgatgtgctggttggtta

SEQ ID NO: 327573 - DNA, 19 bp, Homo sapiens
  siRNA target sequence for TDE1 (NM_006811.2,407-425).
gctggttggttataaagct

SEQ ID NO: 327574 - DNA, 19 bp, Homo sapiens
  siRNA target sequence for TDE1 (NM_006811.2,509-527).
ccgagcggcagtacacaat

SEQ ID NO: 327575 - DNA, 19 bp, Homo sapiens
  siRNA target sequence for TDE1 (NM_006811.2,528-546).
gggttttggttcttcaaaa

SEQ ID NO: 327576 - DNA, 19 bp, Homo sapiens
  siRNA target sequence for TDE1 (NM_006811.2,529-547).
ggttttggttcttcaaaat

SEQ ID NO: 327577 - DNA, 19 bp, Homo sapiens
  siRNA target sequence for TDE1 (NM_006811.2,530-548).
gttttggttcttcaaaatt

SEQ ID NO: 327578 - DNA, 19 bp, Homo sapiens
  siRNA target sequence for TDE1 (NM_006811.2,604-622).
gctcagtctggtttgttgt

SEQ ID NO: 327579 - DNA, 19 bp, Homo sapiens
  siRNA target sequence for TDE1 (NM_006811.2,605-623).
ctcagtctggtttgttgtt

SEQ ID NO: 327580 - DNA, 19 bp, Homo sapiens
  siRNA target sequence for TDE1 (NM_006811.2,665-683).
gctgctggtagattttgct

SEQ ID NO: 327581 - DNA, 19 bp, Homo sapiens
  siRNA target sequence for TDE1 (NM_006811.2,696-714).
gaatcatgggtaaatcgaa

SEQ ID NO: 327582 - DNA, 19 bp, Homo sapiens
  siRNA target sequence for TDE1 (NM_006811.2,797-815).
cgggctgctctatacatat

SEQ ID NO: 327583 - DNA, 19 bp, Homo sapiens
  siRNA target sequence for TDE1 (NM_006811.2,877-895).
gcgttgtggcttctattat

SEQ ID NO: 327584 - DNA, 19 bp, Homo sapiens
  siRNA target sequence for TDE1 (NM_006811.2,878-896).
cgttgtggcttctattata

SEQ ID NO: 327585 - DNA, 19 bp, Homo sapiens
  siRNA target sequence for TDE1 (NM_006811.2,879-897).
gttgtggcttctattatat

SEQ ID NO: 327586 - DNA, 19 bp, Homo sapiens
  siRNA target sequence for TDE1 (NM_006811.2,898-916).
cgatccacccaaaaattca

SEQ ID NO: 327587 - DNA, 19 bp, Homo sapiens
  siRNA target sequence for TDE1 (NM_006811.2,1024-1042).
ccaacctgatgagctttat

SEQ ID NO: 327588 - DNA, 19 bp, Homo sapiens
  siRNA target sequence for TDE1 (NM_006811.2,1028-1046).
cctgatgagctttattaca

SEQ ID NO: 327589 - DNA, 19 bp, Homo sapiens
  siRNA target sequence for TDE1 (NM_006811.2,1114-1132).
caaagagtgggtctttact

SEQ ID NO: 327590 - DNA, 19 bp, Homo sapiens
  siRNA target sequence for TDE1 (NM_006811.2,1124-1142).
gtctttactggattcagat

SEQ ID NO: 327591 - DNA, 19 bp, Homo sapiens
  siRNA target sequence for TDE1 (NM_006811.2,1247-1265).
cgtcatccttggtgataca

SEQ ID NO: 327592 - DNA, 19 bp, Homo sapiens
  siRNA target sequence for TDE1 (NM_006811.2,1372-1390).
gcttggcttccttgtacat

SEQ ID NO: 327593 - DNA, 19 bp, Homo sapiens
  siRNA target sequence for TDE1 (NM_006811.2,1377-1395).
gcttccttgtacatcatga

SEQ ID NO: 327594 - DNA, 19 bp, Homo sapiens
  siRNA target sequence for TDE1 (NM_006811.2,1378-1396).
cttccttgtacatcatgat

SEQ ID NO: 327595 - DNA, 19 bp, Homo sapiens
  siRNA target sequence for TDE1 (NM_006811.2,1411-1429).
ggtacagccctgatgcaaa

SEQ ID NO: 327596 - DNA, 19 bp, Homo sapiens
  siRNA target sequence for TDE1 (NM_006811.2,1458-1476).
gctgtgtgggtcaagatca

SEQ ID NO: 327597 - DNA, 19 bp, Homo sapiens
  siRNA target sequence for TDE2 (NM_020755.2,102-120).
cgagctggataccatgttt

SEQ ID NO: 327598 - DNA, 19 bp, Homo sapiens
  siRNA target sequence for TDE2 (NM_020755.2,106-124).
ctggataccatgtttgtgt

SEQ ID NO: 327599 - DNA, 19 bp, Homo sapiens
  siRNA target sequence for TDE2 (NM_020755.2,153-171).
gctgtcctagtggaaacaa

SEQ ID NO: 327600 - DNA, 19 bp, Homo sapiens
  siRNA target sequence for TDE2 (NM_020755.2,169-187).
caactccactgtaactaga

SEQ ID NO: 327601 - DNA, 19 bp, Homo sapiens
  siRNA target sequence for TDE2 (NM_020755.2,174-192).
ccactgtaactagattgat

SEQ ID NO: 327602 - DNA, 19 bp, Homo sapiens
  siRNA target sequence for TDE2 (NM_020755.2,205-223).
cttgcttgttggagtatgt

SEQ ID NO: 327603 - DNA, 19 bp, Homo sapiens
  siRNA target sequence for TDE2 (NM_020755.2,208-226).
gcttgttggagtatgtgta

SEQ ID NO: 327604 - DNA, 19 bp, Homo sapiens
  siRNA target sequence for TDE2 (NM_020755.2,246-264).
caggaatggaagaacaact

SEQ ID NO: 327605 - DNA, 19 bp, Homo sapiens
  siRNA target sequence for TDE2 (NM_020755.2,299-317).
ggtgttgtcccttgtaaca

SEQ ID NO: 327606 - DNA, 19 bp, Homo sapiens
  siRNA target sequence for TDE2 (NM_020755.2,307-325).
cccttgtaacattttggtt

SEQ ID NO: 327607 - DNA, 19 bp, Homo sapiens
  siRNA target sequence for TDE2 (NM_020755.2,328-346).
ctataaagctgtatatcgt

SEQ ID NO: 327608 - DNA, 19 bp, Homo sapiens
  siRNA target sequence for TDE2 (NM_020755.2,357-375).
gtttggctatgttctatct

SEQ ID NO: 327609 - DNA, 19 bp, Homo sapiens
  siRNA target sequence for TDE2 (NM_020755.2,363-381).
ctatgttctatcttcttct

SEQ ID NO: 327610 - DNA, 19 bp, Homo sapiens
  siRNA target sequence for TDE2 (NM_020755.2,380-398).
ctctctttactaatgatca

SEQ ID NO: 327611 - DNA, 19 bp, Homo sapiens
  siRNA target sequence for TDE2 (NM_020755.2,465-483).
cagcaattgcaattattat

SEQ ID NO: 327612 - DNA, 19 bp, Homo sapiens
  siRNA target sequence for TDE2 (NM_020755.2,516-534).
caactgtgtggttttatgt

SEQ ID NO: 327613 - DNA, 19 bp, Homo sapiens
  siRNA target sequence for TDE2 (NM_020755.2,555-573).
gtttcatcctcatacaact

SEQ ID NO: 327614 - DNA, 19 bp, Homo sapiens
  siRNA target sequence for TDE2 (NM_020755.2,562-580).
cctcatacaactagtctta

SEQ ID NO: 327615 - DNA, 19 bp, Homo sapiens
  siRNA target sequence for TDE2 (NM_020755.2,572-590).
ctagtcttacttattgatt

SEQ ID NO: 327616 - DNA, 19 bp, Homo sapiens
  siRNA target sequence for TDE2 (NM_020755.2,577-595).
cttacttattgattttgca

SEQ ID NO: 327617 - DNA, 19 bp, Homo sapiens
  siRNA target sequence for TDE2 (NM_020755.2,652-670).
gtatgcagccttgttatca

SEQ ID NO: 327618 - DNA, 19 bp, Homo sapiens
  siRNA target sequence for TDE2 (NM_020755.2,705-723).
ctatcgtcctgttctttgt

SEQ ID NO: 327619 - DNA, 19 bp, Homo sapiens
  siRNA target sequence for TDE2 (NM_020755.2,787-805).
ctgcgttggtgcttctgta

SEQ ID NO: 327620 - DNA, 19 bp, Homo sapiens
  siRNA target sequence for TDE2 (NM_020755.2,791-809).
gttggtgcttctgtaatgt

SEQ ID NO: 327621 - DNA, 19 bp, Homo sapiens
  siRNA target sequence for TDE2 (NM_020755.2,794-812).
ggtgcttctgtaatgtcta

SEQ ID NO: 327622 - DNA, 19 bp, Homo sapiens
  siRNA target sequence for TDE2 (NM_020755.2,795-813).
gtgcttctgtaatgtctat

SEQ ID NO: 327623 - DNA, 19 bp, Homo sapiens
  siRNA target sequence for TDE2 (NM_020755.2,853-871).
gttacagtcttcagtaatt

SEQ ID NO: 327624 - DNA, 19 bp, Homo sapiens
  siRNA target sequence for TDE2 (NM_020755.2,934-952).
cccaagtctactaagcata

SEQ ID NO: 327625 - DNA, 19 bp, Homo sapiens
  siRNA target sequence for TDE2 (NM_020755.2,1069-1087).
ccgtacttcaaacaatagt

SEQ ID NO: 327626 - DNA, 19 bp, Homo sapiens
  siRNA target sequence for TDE2 (NM_020755.2,1071-1089).
gtacttcaaacaatagtca

SEQ ID NO: 327627 - DNA, 19 bp, Homo sapiens
  siRNA target sequence for TDE2 (NM_020755.2,1077-1095).
caaacaatagtcaggttaa

SEQ ID NO: 327628 - DNA, 19 bp, Homo sapiens
  siRNA target sequence for TDE2 (NM_020755.2,1081-1099).
caatagtcaggttaataaa

SEQ ID NO: 327629 - DNA, 19 bp, Homo sapiens
  siRNA target sequence for TDE2 (NM_020755.2,1102-1120).
gactctaacaagtgatgaa

SEQ ID NO: 327630 - DNA, 19 bp, Homo sapiens
  siRNA target sequence for TDE2 (NM_020755.2,1106-1124).
ctaacaagtgatgaatcta

SEQ ID NO: 327631 - DNA, 19 bp, Homo sapiens
  siRNA target sequence for TDE2 (NM_020755.2,1181-1199).
gttcaccgagctgtagata

SEQ ID NO: 327632 - DNA, 19 bp, Homo sapiens
  siRNA target sequence for TDE2 (NM_020755.2,1207-1225).
ggatggtgtcacttacagt

SEQ ID NO: 327633 - DNA, 19 bp, Homo sapiens
  siRNA target sequence for TDE2 (NM_020755.2,1211-1229).
ggtgtcacttacagttatt

SEQ ID NO: 327634 - DNA, 19 bp, Homo sapiens
  siRNA target sequence for TDE2 (NM_020755.2,1256-1274).
gcttcactttatatcatga

SEQ ID NO: 327635 - DNA, 19 bp, Homo sapiens
  siRNA target sequence for TDE2 (NM_020755.2,1257-1275).
cttcactttatatcatgat

SEQ ID NO: 327636 - DNA, 19 bp, Homo sapiens
  siRNA target sequence for TDE2 (NM_020755.2,1285-1303).
caactggtacaggtatgaa

SEQ ID NO: 327637 - DNA, 19 bp, Homo sapiens
  siRNA target sequence for TDE2 (NM_020755.2,1306-1324).
ctctcgtgagatgaaaagt

SEQ ID NO: 327638 - DNA, 19 bp, Homo sapiens
  siRNA target sequence for TDE2 (NM_020755.2,1308-1326).
ctcgtgagatgaaaagtca

SEQ ID NO: 327639 - DNA, 19 bp, Homo sapiens
  siRNA target sequence for TDE2 (NM_020755.2,1393-1411).
cgtggcaccacttgttctt

SEQ ID NO: 327640 - DNA, 19 bp, Homo sapiens
  siRNA target sequence for TED (NM_015686.1,477-495).
gacgcagcttgcaccaaat

SEQ ID NO: 327641 - DNA, 19 bp, Homo sapiens
  siRNA target sequence for TED (NM_015686.1,481-499).
cagcttgcaccaaattgca

SEQ ID NO: 327642 - DNA, 19 bp, Homo sapiens
  siRNA target sequence for TED (NM_015686.1,483-501).
gcttgcaccaaattgcaat

SEQ ID NO: 327643 - DNA, 19 bp, Homo sapiens
  siRNA target sequence for TED (NM_015686.1,487-505).
gcaccaaattgcaatcttt

SEQ ID NO: 327644 - DNA, 19 bp, Homo sapiens
  siRNA target sequence for TED (NM_015686.1,768-786).
gaggcgtgtagcaactgta

SEQ ID NO: 327645 - DNA, 19 bp, Homo sapiens
  siRNA target sequence for TED (NM_015686.1,809-827).
ccgacacgctcaggaaaaa

SEQ ID NO: 327646 - DNA, 19 bp, Homo sapiens
  siRNA target sequence for TED (NM_015686.1,839-857).
cgacctcgtgctgcataaa

SEQ ID NO: 327647 - DNA, 19 bp, Homo sapiens
  siRNA target sequence for TED (NM_015686.1,840-858).
gacctcgtgctgcataaat

SEQ ID NO: 327648 - DNA, 19 bp, Homo sapiens
  siRNA target sequence for TED (NM_015686.1,864-882).
caggcggaagagtactcaa

SEQ ID NO: 327649 - DNA, 19 bp, Homo sapiens
  siRNA target sequence for TED (NM_015686.1,922-940).
cctggctgtgctcagaata

SEQ ID NO: 327650 - DNA, 19 bp, Homo sapiens
  siRNA target sequence for TED (NM_015686.1,925-943).
ggctgtgctcagaatactt

SEQ ID NO: 327651 - DNA, 19 bp, Homo sapiens
  siRNA target sequence for TED (NM_015686.1,973-991).
gggtgccctgcaagcaata

SEQ ID NO: 327652 - DNA, 19 bp, Homo sapiens
  siRNA target sequence for TED (NM_015686.1,975-993).
gtgccctgcaagcaatact

SEQ ID NO: 327653 - DNA, 19 bp, Homo sapiens
  siRNA target sequence for TED (NM_015686.1,1007-1025).
gacccggtgcccctttata

SEQ ID NO: 327654 - DNA, 19 bp, Homo sapiens
  siRNA target sequence for TED (NM_015686.1,1009-1027).
cccggtgcccctttatact

SEQ ID NO: 327655 - DNA, 19 bp, Homo sapiens
  siRNA target sequence for TED (NM_015686.1,1059-1077).
ctccctggctttatctgta

SEQ ID NO: 327656 - DNA, 19 bp, Homo sapiens
  siRNA target sequence for TM4-B (NM_012466.2,170-188).
cgtattcttccttgaagaa

SEQ ID NO: 327657 - DNA, 19 bp, Homo sapiens
  siRNA target sequence for TM4-B (NM_012466.2,244-262).
ctgggcattggtggtaaat

SEQ ID NO: 327658 - DNA, 19 bp, Homo sapiens
  siRNA target sequence for TM4-B (NM_012466.2,246-264).
gggcattggtggtaaatgt

SEQ ID NO: 327659 - DNA, 19 bp, Homo sapiens
  siRNA target sequence for TM4-B (NM_012466.2,375-393).
gtggtatggagcgactaaa

SEQ ID NO: 327660 - DNA, 19 bp, Homo sapiens
  siRNA target sequence for TM4-B (NM_012466.2,377-395).
ggtatggagcgactaaaga

SEQ ID NO: 327661 - DNA, 19 bp, Homo sapiens
  siRNA target sequence for TM4-B (NM_012466.2,398-416).
gcagaggcacgctcttgtt

SEQ ID NO: 327662 - DNA, 19 bp, Homo sapiens
  siRNA target sequence for TM4-B (NM_012466.2,399-417).
cagaggcacgctcttgttt

SEQ ID NO: 327663 - DNA, 19 bp, Homo sapiens
  siRNA target sequence for TM4-B (NM_012466.2,419-437).
gcatcctgtcaatggttat

SEQ ID NO: 327664 - DNA, 19 bp, Homo sapiens
  siRNA target sequence for TM4-B (NM_012466.2,420-438).
catcctgtcaatggttatt

SEQ ID NO: 327665 - DNA, 19 bp, Homo sapiens
  siRNA target sequence for TM4-B (NM_012466.2,555-573).
cgagccagacgactattct

SEQ ID NO: 327666 - DNA, 19 bp, Homo sapiens
  siRNA target sequence for TM4-B (NM_012466.2,556-574).
gagccagacgactattcta

SEQ ID NO: 327667 - DNA, 19 bp, Homo sapiens
  siRNA target sequence for TM4-B (NM_012466.2,589-607).
gtcatggagaagctaaagt

SEQ ID NO: 327668 - DNA, 19 bp, Homo sapiens
  siRNA target sequence for TM4-B (NM_012466.2,608-626).
gctgtggggtgaataacta

SEQ ID NO: 327669 - DNA, 19 bp, Homo sapiens
  siRNA target sequence for TM4-B (NM_012466.2,676-694).
cccaggagttgctgtaaat

SEQ ID NO: 327670 - DNA, 19 bp, Homo sapiens
  siRNA target sequence for TM4-B (NM_012466.2,680-698).
ggagttgctgtaaatccat

SEQ ID NO: 327671 - DNA, 19 bp, Homo sapiens
  siRNA target sequence for TM4SF12 (NM_012338.2,173-191).
ggactacctaaataatgtt

SEQ ID NO: 327672 - DNA, 19 bp, Homo sapiens
  siRNA target sequence for TM4SF12 (NM_012338.2,215-233).
ggtagaggaagcagtcatt

SEQ ID NO: 327673 - DNA, 19 bp, Homo sapiens
  siRNA target sequence for TM4SF12 (NM_012338.2,226-244).
cagtcattttgacttactt

SEQ ID NO: 327674 - DNA, 19 bp, Homo sapiens
  siRNA target sequence for TM4SF12 (NM_012338.2,251-269).
ggttcatccggtcatgatt

SEQ ID NO: 327675 - DNA, 19 bp, Homo sapiens
  siRNA target sequence for TM4SF12 (NM_012338.2,294-312).
gtggggatgttaggatatt

SEQ ID NO: 327676 - DNA, 19 bp, Homo sapiens
  siRNA target sequence for TM4SF12 (NM_012338.2,319-337).
cggtgaaaagaaatctgtt

SEQ ID NO: 327677 - DNA, 19 bp, Homo sapiens
  siRNA target sequence for TM4SF12 (NM_012338.2,338-356).
gcttcttgcatggtacttt

SEQ ID NO: 327678 - DNA, 19 bp, Homo sapiens
  siRNA target sequence for TM4SF12 (NM_012338.2,394-412).
gtggcgtttggacatatga

SEQ ID NO: 327679 - DNA, 19 bp, Homo sapiens
  siRNA target sequence for TM4SF12 (NM_012338.2,420-438).
cttatggttccagtacaat

SEQ ID NO: 327680 - DNA, 19 bp, Homo sapiens
  siRNA target sequence for TM4SF12 (NM_012338.2,429-447).
ccagtacaatggtcagata

SEQ ID NO: 327681 - DNA, 19 bp, Homo sapiens
  siRNA target sequence for TM4SF12 (NM_012338.2,430-448).
cagtacaatggtcagatat

SEQ ID NO: 327682 - DNA, 19 bp, Homo sapiens
  siRNA target sequence for TM4SF12 (NM_012338.2,466-484).
ggatgacaaattatggatt

SEQ ID NO: 327683 - DNA, 19 bp, Homo sapiens
  siRNA target sequence for TM4SF12 (NM_012338.2,470-488).
gacaaattatggattacct

SEQ ID NO: 327684 - DNA, 19 bp, Homo sapiens
  siRNA target sequence for TM4SF12 (NM_012338.2,490-508).
gatatcggtggcttactca

SEQ ID NO: 327685 - DNA, 19 bp, Homo sapiens
  siRNA target sequence for TM4SF12 (NM_012338.2,541-559).
gctgtggagtagtatattt

SEQ ID NO: 327686 - DNA, 19 bp, Homo sapiens
  siRNA target sequence for TM4SF12 (NM_012338.2,701-719).
ctttttgagaggaaccaaa

SEQ ID NO: 327687 - DNA, 19 bp, Homo sapiens
  siRNA target sequence for TM4SF12 (NM_012338.2,774-792).
gccatgattctcaccatta

SEQ ID NO: 327688 - DNA, 19 bp, Homo sapiens
  siRNA target sequence for TM4SF12 (NM_012338.2,797-815).
gctctgggctctgtattat

SEQ ID NO: 327689 - DNA, 19 bp, Homo sapiens
  siRNA target sequence for TM4SF12 (NM_012338.2,800-818).
ctgggctctgtattatgat

SEQ ID NO: 327690 - DNA, 19 bp, Homo sapiens
  siRNA target sequence for TM4SF12 (NM_012338.2,803-821).
ggctctgtattatgataga

SEQ ID NO: 327691 - DNA, 19 bp, Homo sapiens
  siRNA target sequence for TM4SF12 (NM_012338.2,804-822).
gctctgtattatgatagaa

SEQ ID NO: 327692 - DNA, 19 bp, Homo sapiens
  siRNA target sequence for TM4SF12 (NM_012338.2,831-849).
gggacagaccaaatgatgt

SEQ ID NO: 327693 - DNA, 19 bp, Homo sapiens
  siRNA target sequence for TM4SF12 (NM_012338.2,878-896).
gtcatgtccctcagtagaa

SEQ ID NO: 327694 - DNA, 19 bp, Homo sapiens
  siRNA target sequence for TM4SF12 (NM_012338.2,883-901).
gtccctcagtagaactgtt

SEQ ID NO: 327695 - DNA, 19 bp, Homo sapiens
  siRNA target sequence for TM4SF12 (NM_012338.2,886-904).
cctcagtagaactgttgaa

SEQ ID NO: 327696 - DNA, 19 bp, Homo sapiens
  siRNA target sequence for TM4SF12 (NM_012338.2,910-928).
gcctgtcaagaatctttga

SEQ ID NO: 327697 - DNA, 19 bp, Homo sapiens
  siRNA target sequence for TM4SF12 (NM_012338.2,947-965).
cagctttaatacacacttt

SEQ ID NO: 327698 - DNA, 19 bp, Homo sapiens
  siRNA target sequence for TM4SF12 (NM_012338.2,949-967).
gctttaatacacactttga

SEQ ID NO: 327699 - DNA, 19 bp, Homo sapiens
  siRNA target sequence for TM7SF3 (NM_016551.1,120-138).
ccagcgagggtcttattga

SEQ ID NO: 327700 - DNA, 19 bp, Homo sapiens
  siRNA target sequence for TM7SF3 (NM_016551.1,121-139).
cagcgagggtcttattgaa

SEQ ID NO: 327701 - DNA, 19 bp, Homo sapiens
  siRNA target sequence for TM7SF3 (NM_016551.1,123-141).
gcgagggtcttattgaatt

SEQ ID NO: 327702 - DNA, 19 bp, Homo sapiens
  siRNA target sequence for TM7SF3 (NM_016551.1,124-142).
cgagggtcttattgaattt

SEQ ID NO: 327703 - DNA, 19 bp, Homo sapiens
  siRNA target sequence for TM7SF3 (NM_016551.1,238-256).
ccaaatacactcacagtat

SEQ ID NO: 327704 - DNA, 19 bp, Homo sapiens
  siRNA target sequence for TM7SF3 (NM_016551.1,253-271).
gtatcagaatacaactgtt

SEQ ID NO: 327705 - DNA, 19 bp, Homo sapiens
  siRNA target sequence for TM7SF3 (NM_016551.1,279-297).
ctccgactctcctttccaa

SEQ ID NO: 327706 - DNA, 19 bp, Homo sapiens
  siRNA target sequence for TM7SF3 (NM_016551.1,281-299).
ccgactctcctttccaatt

SEQ ID NO: 327707 - DNA, 19 bp, Homo sapiens
  siRNA target sequence for TM7SF3 (NM_016551.1,315-333).
ctgccagtggactggtttt

SEQ ID NO: 327708 - DNA, 19 bp, Homo sapiens
  siRNA target sequence for TM7SF3 (NM_016551.1,323-341).
ggactggttttcatcctta

SEQ ID NO: 327709 - DNA, 19 bp, Homo sapiens
  siRNA target sequence for TM7SF3 (NM_016551.1,413-431).
ctactctcctactcagaaa

SEQ ID NO: 327710 - DNA, 19 bp, Homo sapiens
  siRNA target sequence for TM7SF3 (NM_016551.1,418-436).
ctcctactcagaaagagat

SEQ ID NO: 327711 - DNA, 19 bp, Homo sapiens
  siRNA target sequence for TM7SF3 (NM_016551.1,473-491).
gatattgatcccaacattt

SEQ ID NO: 327712 - DNA, 19 bp, Homo sapiens
  siRNA target sequence for TM7SF3 (NM_016551.1,487-505).
catttacttggagtataat

SEQ ID NO: 327713 - DNA, 19 bp, Homo sapiens
  siRNA target sequence for TM7SF3 (NM_016551.1,610-628).
gttgcagtatgatgtctat

SEQ ID NO: 327714 - DNA, 19 bp, Homo sapiens
  siRNA target sequence for TM7SF3 (NM_016551.1,614-632).
cagtatgatgtctatcagt

SEQ ID NO: 327715 - DNA, 19 bp, Homo sapiens
  siRNA target sequence for TM7SF3 (NM_016551.1,616-634).
gtatgatgtctatcagtat

SEQ ID NO: 327716 - DNA, 19 bp, Homo sapiens
  siRNA target sequence for TM7SF3 (NM_016551.1,730-748).
ggttaccctaacagctaat

SEQ ID NO: 327717 - DNA, 19 bp, Homo sapiens
  siRNA target sequence for TM7SF3 (NM_016551.1,1050-1068).
gactgacacctatcaagta

SEQ ID NO: 327718 - DNA, 19 bp, Homo sapiens
  siRNA target sequence for TM7SF3 (NM_016551.1,1054-1072).
gacacctatcaagtatgat

SEQ ID NO: 327719 - DNA, 19 bp, Homo sapiens
  siRNA target sequence for TM7SF3 (NM_016551.1,1056-1074).
cacctatcaagtatgatgt

SEQ ID NO: 327720 - DNA, 19 bp, Homo sapiens
  siRNA target sequence for TM7SF3 (NM_016551.1,1059-1077).
ctatcaagtatgatgtgaa

SEQ ID NO: 327721 - DNA, 19 bp, Homo sapiens
  siRNA target sequence for TM7SF3 (NM_016551.1,1066-1084).
gtatgatgtgaatctgatt

SEQ ID NO: 327722 - DNA, 19 bp, Homo sapiens
  siRNA target sequence for TM7SF3 (NM_016551.1,1101-1119).
gaagcgtcggtggaatgtt

SEQ ID NO: 327723 - DNA, 19 bp, Homo sapiens
  siRNA target sequence for TM7SF3 (NM_016551.1,1104-1122).
gcgtcggtggaatgttctt

SEQ ID NO: 327724 - DNA, 19 bp, Homo sapiens
  siRNA target sequence for TM7SF3 (NM_016551.1,1254-1272).
gtgtattctgggtcacttt

SEQ ID NO: 327725 - DNA, 19 bp, Homo sapiens
  siRNA target sequence for TM7SF3 (NM_016551.1,1306-1324).
catgggctgcctaagaata

SEQ ID NO: 327726 - DNA, 19 bp, Homo sapiens
  siRNA target sequence for TM7SF3 (NM_016551.1,1314-1332).
gcctaagaatactgaacat

SEQ ID NO: 327727 - DNA, 19 bp, Homo sapiens
  siRNA target sequence for TM7SF3 (NM_016551.1,1343-1361).
ggagtcattggctcctatt

SEQ ID NO: 327728 - DNA, 19 bp, Homo sapiens
  siRNA target sequence for TM7SF3 (NM_016551.1,1354-1372).
ctcctattcggtggtttta

SEQ ID NO: 327729 - DNA, 19 bp, Homo sapiens
  siRNA target sequence for TM7SF3 (NM_016551.1,1431-1449).
gagcgctcaacaaggattt

SEQ ID NO: 327730 - DNA, 19 bp, Homo sapiens
  siRNA target sequence for TM7SF3 (NM_016551.1,1516-1534).
gctggctgtaagtggaatt

SEQ ID NO: 327731 - DNA, 19 bp, Homo sapiens
  siRNA target sequence for TM7SF3 (NM_016551.1,1517-1535).
ctggctgtaagtggaatta

SEQ ID NO: 327732 - DNA, 19 bp, Homo sapiens
  siRNA target sequence for TM7SF3 (NM_016551.1,1520-1538).
gctgtaagtggaattacgt

SEQ ID NO: 327733 - DNA, 19 bp, Homo sapiens
  siRNA target sequence for TM7SF3 (NM_016551.1,1521-1539).
ctgtaagtggaattacgtt

SEQ ID NO: 327734 - DNA, 19 bp, Homo sapiens
  siRNA target sequence for TM7SF3 (NM_016551.1,1527-1545).
gtggaattacgttacagat

SEQ ID NO: 327735 - DNA, 19 bp, Homo sapiens
  siRNA target sequence for TM7SF3 (NM_016551.1,1580-1598).
cacccatacaagttatgga

SEQ ID NO: 327736 - DNA, 19 bp, Homo sapiens
  siRNA target sequence for TM7SF3 (NM_016551.1,1608-1626).
gagagcgccgagtgacaaa

SEQ ID NO: 327737 - DNA, 19 bp, Homo sapiens
  siRNA target sequence for TM7SF3 (NM_016551.1,1610-1628).
gagcgccgagtgacaaaca

SEQ ID NO: 327738 - DNA, 19 bp, Homo sapiens
  siRNA target sequence for TM7SF3 (NM_016551.1,1612-1630).
gcgccgagtgacaaacatt

SEQ ID NO: 327739 - DNA, 19 bp, Homo sapiens
  siRNA target sequence for TM7SF3 (NM_016551.1,1614-1632).
gccgagtgacaaacattct

SEQ ID NO: 327740 - DNA, 19 bp, Homo sapiens
  siRNA target sequence for TM7SF3 (NM_016551.1,1677-1695).
gccgattaacccagattaa

SEQ ID NO: 327741 - DNA, 19 bp, Homo sapiens
  siRNA target sequence for TM7SF3 (NM_016551.1,1678-1696).
ccgattaacccagattaaa

SEQ ID NO: 327742 - DNA, 19 bp, Homo sapiens
  siRNA target sequence for TMC2 (NM_080751.1,569-587).
ggaaaggcaagcaactata

SEQ ID NO: 327743 - DNA, 19 bp, Homo sapiens
  siRNA target sequence for TMC2 (NM_080751.1,580-598).
caactatatgcctacaaga

SEQ ID NO: 327744 - DNA, 19 bp, Homo sapiens
  siRNA target sequence for TMC2 (NM_080751.1,621-639).
caaatttaagagagacttt

SEQ ID NO: 327745 - DNA, 19 bp, Homo sapiens
  siRNA target sequence for TMC2 (NM_080751.1,640-658).
gataatttcaagactcaat

SEQ ID NO: 327746 - DNA, 19 bp, Homo sapiens
  siRNA target sequence for TMC2 (NM_080751.1,710-728).
cagtggcatcgtatttcat

SEQ ID NO: 327747 - DNA, 19 bp, Homo sapiens
  siRNA target sequence for TMC2 (NM_080751.1,712-730).
gtggcatcgtatttcatct

SEQ ID NO: 327748 - DNA, 19 bp, Homo sapiens
  siRNA target sequence for TMC2 (NM_080751.1,729-747).
ctttctccgatggatgtat

SEQ ID NO: 327749 - DNA, 19 bp, Homo sapiens
  siRNA target sequence for TMC2 (NM_080751.1,740-758).
ggatgtatggagttaacct

SEQ ID NO: 327750 - DNA, 19 bp, Homo sapiens
  siRNA target sequence for TMC2 (NM_080751.1,741-759).
gatgtatggagttaacctt

SEQ ID NO: 327751 - DNA, 19 bp, Homo sapiens
  siRNA target sequence for TMC2 (NM_080751.1,825-843).
gagtattcccagaaagaca

SEQ ID NO: 327752 - DNA, 19 bp, Homo sapiens
  siRNA target sequence for TMC2 (NM_080751.1,898-916).
gagggctatatcaagtact

SEQ ID NO: 327753 - DNA, 19 bp, Homo sapiens
  siRNA target sequence for TMC2 (NM_080751.1,974-992).
ggctgcctatggcttactt

SEQ ID NO: 327754 - DNA, 19 bp, Homo sapiens
  siRNA target sequence for TMC2 (NM_080751.1,975-993).
gctgcctatggcttacttt

SEQ ID NO: 327755 - DNA, 19 bp, Homo sapiens
  siRNA target sequence for TMC2 (NM_080751.1,976-994).
ctgcctatggcttacttta

SEQ ID NO: 327756 - DNA, 19 bp, Homo sapiens
  siRNA target sequence for TMC2 (NM_080751.1,1024-1042).
ctgattattgtcattcgat

SEQ ID NO: 327757 - DNA, 19 bp, Homo sapiens
  siRNA target sequence for TMC2 (NM_080751.1,1039-1057).
cgatcgatggccagcaata

SEQ ID NO: 327758 - DNA, 19 bp, Homo sapiens
  siRNA target sequence for TMC2 (NM_080751.1,1128-1146).
ctacctgatcgggaattca

SEQ ID NO: 327759 - DNA, 19 bp, Homo sapiens
  siRNA target sequence for TMC2 (NM_080751.1,1153-1171).
gctgataacaaatatgcat

SEQ ID NO: 327760 - DNA, 19 bp, Homo sapiens
  siRNA target sequence for TMC2 (NM_080751.1,1294-1312).
ggaagtgggtacctcattt

SEQ ID NO: 327761 - DNA, 19 bp, Homo sapiens
  siRNA target sequence for TMC2 (NM_080751.1,1295-1313).
gaagtgggtacctcattta

SEQ ID NO: 327762 - DNA, 19 bp, Homo sapiens
  siRNA target sequence for TMC2 (NM_080751.1,1298-1316).
gtgggtacctcatttactt

SEQ ID NO: 327763 - DNA, 19 bp, Homo sapiens
  siRNA target sequence for TMC2 (NM_080751.1,1301-1319).
ggtacctcatttactttgt

SEQ ID NO: 327764 - DNA, 19 bp, Homo sapiens
  siRNA target sequence for TMC2 (NM_080751.1,1353-1371).
gaatgtcagctggtatgaa

SEQ ID NO: 327765 - DNA, 19 bp, Homo sapiens
  siRNA target sequence for TMC2 (NM_080751.1,1395-1413).
gtccctgcttggaatgttt

SEQ ID NO: 327766 - DNA, 19 bp, Homo sapiens
  siRNA target sequence for TMC2 (NM_080751.1,1398-1416).
cctgcttggaatgttttgt

SEQ ID NO: 327767 - DNA, 19 bp, Homo sapiens
  siRNA target sequence for TMC2 (NM_080751.1,1439-1457).
ctgccctggagaattacca

SEQ ID NO: 327768 - DNA, 19 bp, Homo sapiens
  siRNA target sequence for TMC2 (NM_080751.1,1479-1497).
gcagctgggacgcatcttt

SEQ ID NO: 327769 - DNA, 19 bp, Homo sapiens
  siRNA target sequence for TMC2 (NM_080751.1,1507-1525).
ctggggaacctctacacat

SEQ ID NO: 327770 - DNA, 19 bp, Homo sapiens
  siRNA target sequence for TMC2 (NM_080751.1,1551-1569).
ccacctcaagcttgctaat

SEQ ID NO: 327771 - DNA, 19 bp, Homo sapiens
  siRNA target sequence for TMC2 (NM_080751.1,1554-1572).
cctcaagcttgctaatgaa

SEQ ID NO: 327772 - DNA, 19 bp, Homo sapiens
  siRNA target sequence for TMC2 (NM_080751.1,1594-1612).
cactggactctgtttaact

SEQ ID NO: 327773 - DNA, 19 bp, Homo sapiens
  siRNA target sequence for TMC2 (NM_080751.1,1601-1619).
ctctgtttaactattacaa

SEQ ID NO: 327774 - DNA, 19 bp, Homo sapiens
  siRNA target sequence for TMC2 (NM_080751.1,1603-1621).
ctgtttaactattacaact

SEQ ID NO: 327775 - DNA, 19 bp, Homo sapiens
  siRNA target sequence for TMC2 (NM_080751.1,1733-1751).
ctgacatgctggtaacgta

SEQ ID NO: 327776 - DNA, 19 bp, Homo sapiens
  siRNA target sequence for TMC2 (NM_080751.1,1787-1805).
gttttgtgcggttcatgaa

SEQ ID NO: 327777 - DNA, 19 bp, Homo sapiens
  siRNA target sequence for TMC2 (NM_080751.1,1792-1810).
gtgcggttcatgaactact

SEQ ID NO: 327778 - DNA, 19 bp, Homo sapiens
  siRNA target sequence for TMC2 (NM_080751.1,1841-1859).
cttcatatgctgagtttga

SEQ ID NO: 327779 - DNA, 19 bp, Homo sapiens
  siRNA target sequence for TMC2 (NM_080751.1,1868-1886).
gaaatgtgctgggtttgat

SEQ ID NO: 327780 - DNA, 19 bp, Homo sapiens
  siRNA target sequence for TMC2 (NM_080751.1,1928-1946).
caggcctggtgggcattaa

SEQ ID NO: 327781 - DNA, 19 bp, Homo sapiens
  siRNA target sequence for TMC2 (NM_080751.1,2009-2027).
cccatgaacgcgtgttcaa

SEQ ID NO: 327782 - DNA, 19 bp, Homo sapiens
  siRNA target sequence for TMC2 (NM_080751.1,2010-2028).
ccatgaacgcgtgttcaaa

SEQ ID NO: 327783 - DNA, 19 bp, Homo sapiens
  siRNA target sequence for TMC2 (NM_080751.1,2029-2047).
gcctcccgatccaacaact

SEQ ID NO: 327784 - DNA, 19 bp, Homo sapiens
  siRNA target sequence for TMC2 (NM_080751.1,2140-2158).
ccgttcagtgggaaaaaca

SEQ ID NO: 327785 - DNA, 19 bp, Homo sapiens
  siRNA target sequence for TMC2 (NM_080751.1,2179-2197).
gagaccattgaaaacgatt

SEQ ID NO: 327786 - DNA, 19 bp, Homo sapiens
  siRNA target sequence for TMC2 (NM_080751.1,2567-2585).
cctctggacaccttcctat

SEQ ID NO: 327787 - DNA, 19 bp, Homo sapiens
  siRNA target sequence for TMEFF1 (NM_003692.2,291-309).
gcatcaactgctcagaatt

SEQ ID NO: 327788 - DNA, 19 bp, Homo sapiens
  siRNA target sequence for TMEFF1 (NM_003692.2,292-310).
catcaactgctcagaatta

SEQ ID NO: 327789 - DNA, 19 bp, Homo sapiens
  siRNA target sequence for TMEFF1 (NM_003692.2,295-313).
caactgctcagaattaaat

SEQ ID NO: 327790 - DNA, 19 bp, Homo sapiens
  siRNA target sequence for TMEFF1 (NM_003692.2,318-336).
gggagtctgacgtaagagt

SEQ ID NO: 327791 - DNA, 19 bp, Homo sapiens
  siRNA target sequence for TMEFF1 (NM_003692.2,319-337).
ggagtctgacgtaagagtt

SEQ ID NO: 327792 - DNA, 19 bp, Homo sapiens
  siRNA target sequence for TMEFF1 (NM_003692.2,320-338).
gagtctgacgtaagagttt

SEQ ID NO: 327793 - DNA, 19 bp, Homo sapiens
  siRNA target sequence for TMEFF1 (NM_003692.2,322-340).
gtctgacgtaagagtttgt

SEQ ID NO: 327794 - DNA, 19 bp, Homo sapiens
  siRNA target sequence for TMEFF1 (NM_003692.2,324-342).
ctgacgtaagagtttgtga

SEQ ID NO: 327795 - DNA, 19 bp, Homo sapiens
  siRNA target sequence for TMEFF1 (NM_003692.2,341-359).
gatgagtcatcatgtaaat

SEQ ID NO: 327796 - DNA, 19 bp, Homo sapiens
  siRNA target sequence for TMEFF1 (NM_003692.2,346-364).
gtcatcatgtaaatatgga

SEQ ID NO: 327797 - DNA, 19 bp, Homo sapiens
  siRNA target sequence for TMEFF1 (NM_003692.2,444-462).
gatcaaatggggacactta

SEQ ID NO: 327798 - DNA, 19 bp, Homo sapiens
  siRNA target sequence for TMEFF1 (NM_003692.2,455-473).
gacacttatcaaaatgaat

SEQ ID NO: 327799 - DNA, 19 bp, Homo sapiens
  siRNA target sequence for TMEFF1 (NM_003692.2,495-513).
gtaagcaccagaaagagat

SEQ ID NO: 327800 - DNA, 19 bp, Homo sapiens
  siRNA target sequence for TMEFF1 (NM_003692.2,530-548).
ggaccatgctactctgata

SEQ ID NO: 327801 - DNA, 19 bp, Homo sapiens
  siRNA target sequence for TMEFF1 (NM_003692.2,531-549).
gaccatgctactctgataa

SEQ ID NO: 327802 - DNA, 19 bp, Homo sapiens
  siRNA target sequence for TMEFF1 (NM_003692.2,616-634).
gtgtggaccctgcaaatat

SEQ ID NO: 327803 - DNA, 19 bp, Homo sapiens
  siRNA target sequence for TMEFF1 (NM_003692.2,618-636).
gtggaccctgcaaatataa

SEQ ID NO: 327804 - DNA, 19 bp, Homo sapiens
  siRNA target sequence for TMEFF1 (NM_003692.2,659-677).
gaaaatgttgggtgtgtat

SEQ ID NO: 327805 - DNA, 19 bp, Homo sapiens
  siRNA target sequence for TMEFF1 (NM_003692.2,690-708).
gcagtggatacagttttaa

SEQ ID NO: 327806 - DNA, 19 bp, Homo sapiens
  siRNA target sequence for TMEFF1 (NM_003692.2,723-741).
ctgatgggagttcctataa

SEQ ID NO: 327807 - DNA, 19 bp, Homo sapiens
  siRNA target sequence for TMEFF1 (NM_003692.2,755-773).
gttcgagaagcatcttgta

SEQ ID NO: 327808 - DNA, 19 bp, Homo sapiens
  siRNA target sequence for TMEFF1 (NM_003692.2,935-953).
cctgaaaacctcaatggtt

SEQ ID NO: 327809 - DNA, 19 bp, Homo sapiens
  siRNA target sequence for TMEFF1 (NM_003692.2,992-1010).
cagaaggcttcttgtagat

SEQ ID NO: 327810 - DNA, 19 bp, Homo sapiens
  siRNA target sequence for TMEFF1 (NM_003692.2,994-1012).
gaaggcttcttgtagatgt

SEQ ID NO: 327811 - DNA, 19 bp, Homo sapiens
  siRNA target sequence for TMEFF1 (NM_003692.2,997-1015).
ggcttcttgtagatgtgaa

SEQ ID NO: 327812 - DNA, 19 bp, Homo sapiens
  siRNA target sequence for TMEFF1 (NM_003692.2,1087-1105).
gctcactcatgttcttatt

SEQ ID NO: 327813 - DNA, 19 bp, Homo sapiens
  siRNA target sequence for TMEFF1 (NM_003692.2,1190-1208).
ggacgtcgacagaagcaaa

SEQ ID NO: 327814 - DNA, 19 bp, Homo sapiens
  siRNA target sequence for TMEFF1 (NM_003692.2,1191-1209).
gacgtcgacagaagcaaaa

SEQ ID NO: 327815 - DNA, 19 bp, Homo sapiens
  siRNA target sequence for TMEFF1 (NM_003692.2,1194-1212).
gtcgacagaagcaaaacct

SEQ ID NO: 327816 - DNA, 19 bp, Homo sapiens
  siRNA target sequence for TMEFF1 (NM_003692.2,1214-1232).
ggtcattttacttcagata

SEQ ID NO: 327817 - DNA, 19 bp, Homo sapiens
  siRNA target sequence for TMEM10 (NM_033207.2,486-504).
gtgggccctctcttggatt

SEQ ID NO: 327818 - DNA, 19 bp, Homo sapiens
  siRNA target sequence for TMEM10 (NM_033207.2,542-560).
ctggtggctttactattta

SEQ ID NO: 327819 - DNA, 19 bp, Homo sapiens
  siRNA target sequence for TMEM10 (NM_033207.2,544-562).
ggtggctttactatttact

SEQ ID NO: 327820 - DNA, 19 bp, Homo sapiens
  siRNA target sequence for TMEM10 (NM_033207.2,545-563).
gtggctttactatttactt

SEQ ID NO: 327821 - DNA, 19 bp, Homo sapiens
  siRNA target sequence for TMEM10 (NM_033207.2,548-566).
gctttactatttactttga

SEQ ID NO: 327822 - DNA, 19 bp, Homo sapiens
  siRNA target sequence for TMEM10 (NM_033207.2,608-626).
gacagaccatgtgaaattt

SEQ ID NO: 327823 - DNA, 19 bp, Homo sapiens
  siRNA target sequence for TMEM10 (NM_033207.2,702-720).
cacaagaggcccacatata

SEQ ID NO: 327824 - DNA, 19 bp, Homo sapiens
  siRNA target sequence for TMEM10 (NM_033207.2,707-725).
gaggcccacatatatgtga

SEQ ID NO: 327825 - DNA, 19 bp, Homo sapiens
  siRNA target sequence for TMEM10 (NM_033207.2,760-778).
ccgttaccgtcctactata

SEQ ID NO: 327826 - DNA, 19 bp, Homo sapiens
  siRNA target sequence for TMEM10 (NM_033207.2,762-780).
gttaccgtcctactataga

SEQ ID NO: 327827 - DNA, 19 bp, Homo sapiens
  siRNA target sequence for TMEM10 (NM_033207.2,768-786).
gtcctactatagaaatgga

SEQ ID NO: 327828 - DNA, 19 bp, Homo sapiens
  siRNA target sequence for TMEM15 (NM_014908.1,381-399).
cagaggcggcagtagtgtt

SEQ ID NO: 327829 - DNA, 19 bp, Homo sapiens
  siRNA target sequence for TMEM15 (NM_014908.1,535-553).
ccgaatgtccgcaaacagt

SEQ ID NO: 327830 - DNA, 19 bp, Homo sapiens
  siRNA target sequence for TMEM15 (NM_014908.1,674-692).
gcagtggccctcttctcat

SEQ ID NO: 327831 - DNA, 19 bp, Homo sapiens
  siRNA target sequence for TMEM15 (NM_014908.1,729-747).
ccaacacttgtgtcatctt

SEQ ID NO: 327832 - DNA, 19 bp, Homo sapiens
  siRNA target sequence for TMEM15 (NM_014908.1,750-768).
gcttggctggaggtgttat

SEQ ID NO: 327833 - DNA, 19 bp, Homo sapiens
  siRNA target sequence for TMEM15 (NM_014908.1,754-772).
ggctggaggtgttatcatt

SEQ ID NO: 327834 - DNA, 19 bp, Homo sapiens
  siRNA target sequence for TMEM15 (NM_014908.1,755-773).
gctggaggtgttatcattt

SEQ ID NO: 327835 - DNA, 19 bp, Homo sapiens
  siRNA target sequence for TMEM15 (NM_014908.1,756-774).
ctggaggtgttatcattta

SEQ ID NO: 327836 - DNA, 19 bp, Homo sapiens
  siRNA target sequence for TMEM15 (NM_014908.1,761-779).
ggtgttatcatttatatca

SEQ ID NO: 327837 - DNA, 19 bp, Homo sapiens
  siRNA target sequence for TMEM15 (NM_014908.1,824-842).
gtccttctgatcttcgttt

SEQ ID NO: 327838 - DNA, 19 bp, Homo sapiens
  siRNA target sequence for TMEM15 (NM_014908.1,826-844).
ccttctgatcttcgtttat

SEQ ID NO: 327839 - DNA, 19 bp, Homo sapiens
  siRNA target sequence for TMEM15 (NM_014908.1,975-993).
gggacccagtggacttctt

SEQ ID NO: 327840 - DNA, 19 bp, Homo sapiens
  siRNA target sequence for TMEM15 (NM_014908.1,1315-1333).
caccatcgcccgaaagtat

SEQ ID NO: 327841 - DNA, 19 bp, Homo sapiens
  siRNA target sequence for TMEM15 (NM_014908.1,1356-1374).
cctacatcccaggtatcat

SEQ ID NO: 327842 - DNA, 19 bp, Homo sapiens
  siRNA target sequence for TMEM15 (NM_014908.1,1381-1399).
ccggccactgctctatgta

SEQ ID NO: 327843 - DNA, 19 bp, Homo sapiens
  siRNA target sequence for TMEM15 (NM_014908.1,1709-1727).
cgctggcctggaaccaaaa

SEQ ID NO: 327844 - DNA, 19 bp, Homo sapiens
  siRNA target sequence for TMEM15 (NM_014908.1,1736-1754).
gaggggaccatgacatcta

SEQ ID NO: 327845 - DNA, 19 bp, Homo sapiens
  siRNA target sequence for TMEM15 (NM_014908.1,1740-1758).
ggaccatgacatctatatt

SEQ ID NO: 327846 - DNA, 19 bp, Homo sapiens
  siRNA target sequence for TMEM15 (NM_014908.1,1741-1759).
gaccatgacatctatattt

SEQ ID NO: 327847 - DNA, 19 bp, Homo sapiens
  siRNA target sequence for TMEM15 (NM_014908.1,1752-1770).
ctatatttgcgcagatcat

SEQ ID NO: 327848 - DNA, 19 bp, Homo sapiens
  siRNA target sequence for TMEM15 (NM_014908.1,1775-1793).
gtagctctgatcttaatct

SEQ ID NO: 327849 - DNA, 19 bp, Homo sapiens
  siRNA target sequence for TMEM15 (NM_014908.1,1802-1820).
ggagtggacctaaactaca

SEQ ID NO: 327850 - DNA, 19 bp, Homo sapiens
  siRNA target sequence for TMEM15 (NM_014908.1,1805-1823).
gtggacctaaactacagtt

SEQ ID NO: 327851 - DNA, 19 bp, Homo sapiens
  siRNA target sequence for TMEM15 (NM_014908.1,1810-1828).
cctaaactacagttatgct

SEQ ID NO: 327852 - DNA, 19 bp, Homo sapiens
  siRNA target sequence for TMEM15 (NM_014908.1,1859-1877).
ctcctggaagcatacacta

SEQ ID NO: 327853 - DNA, 19 bp, Homo sapiens
  siRNA target sequence for TMEM15 (NM_014908.1,1875-1893).
ctacacagatagacaatct

SEQ ID NO: 327854 - DNA, 19 bp, Homo sapiens
  siRNA target sequence for TMEM15 (NM_014908.1,1902-1920).
ctctctacctcctgatatt

SEQ ID NO: 327855 - DNA, 19 bp, Homo sapiens
  siRNA target sequence for TMEM2 (NM_013390.1,281-299).
gcttcagccaaatttacct

SEQ ID NO: 327856 - DNA, 19 bp, Homo sapiens
  siRNA target sequence for TMEM2 (NM_013390.1,319-337).
ggcaaccttcgcattctca

SEQ ID NO: 327857 - DNA, 19 bp, Homo sapiens
  siRNA target sequence for TMEM2 (NM_013390.1,328-346).
cgcattctcacctgaagaa

SEQ ID NO: 327858 - DNA, 19 bp, Homo sapiens
  siRNA target sequence for TMEM2 (NM_013390.1,536-554).
gcaaagcaagttgttatca

SEQ ID NO: 327859 - DNA, 19 bp, Homo sapiens
  siRNA target sequence for TMEM2 (NM_013390.1,584-602).
gacgccaccgtgcattcta

SEQ ID NO: 327860 - DNA, 19 bp, Homo sapiens
  siRNA target sequence for TMEM2 (NM_013390.1,586-604).
cgccaccgtgcattctata

SEQ ID NO: 327861 - DNA, 19 bp, Homo sapiens
  siRNA target sequence for TMEM2 (NM_013390.1,588-606).
ccaccgtgcattctatagt

SEQ ID NO: 327862 - DNA, 19 bp, Homo sapiens
  siRNA target sequence for TMEM2 (NM_013390.1,666-684).
ctttgaggactcattacat

SEQ ID NO: 327863 - DNA, 19 bp, Homo sapiens
  siRNA target sequence for TMEM2 (NM_013390.1,769-787).
gtcagatgaaggtgaaagt

SEQ ID NO: 327864 - DNA, 19 bp, Homo sapiens
  siRNA target sequence for TMEM2 (NM_013390.1,771-789).
cagatgaaggtgaaagtat

SEQ ID NO: 327865 - DNA, 19 bp, Homo sapiens
  siRNA target sequence for TMEM2 (NM_013390.1,780-798).
gtgaaagtatgccaacatt

SEQ ID NO: 327866 - DNA, 19 bp, Homo sapiens
  siRNA target sequence for TMEM2 (NM_013390.1,911-929).
gggtcctatacctttgaaa

SEQ ID NO: 327867 - DNA, 19 bp, Homo sapiens
  siRNA target sequence for TMEM2 (NM_013390.1,912-930).
ggtcctatacctttgaaaa

SEQ ID NO: 327868 - DNA, 19 bp, Homo sapiens
  siRNA target sequence for TMEM2 (NM_013390.1,1032-1050).
ggcggcttcaggagtttct

SEQ ID NO: 327869 - DNA, 19 bp, Homo sapiens
  siRNA target sequence for TMEM2 (NM_013390.1,1093-1111).
ggattcagccgctaaaagt

SEQ ID NO: 327870 - DNA, 19 bp, Homo sapiens
  siRNA target sequence for TMEM2 (NM_013390.1,1101-1119).
ccgctaaaagtctcttaca

SEQ ID NO: 327871 - DNA, 19 bp, Homo sapiens
  siRNA target sequence for TMEM2 (NM_013390.1,1102-1120).
cgctaaaagtctcttacaa

SEQ ID NO: 327872 - DNA, 19 bp, Homo sapiens
  siRNA target sequence for TMEM2 (NM_013390.1,1141-1159).
ggaacggttgggaagtgaa

SEQ ID NO: 327873 - DNA, 19 bp, Homo sapiens
  siRNA target sequence for TMEM2 (NM_013390.1,1146-1164).
ggttgggaagtgaactgat

SEQ ID NO: 327874 - DNA, 19 bp, Homo sapiens
  siRNA target sequence for TMEM2 (NM_013390.1,1182-1200).
ggcaagcttgggctttagt

SEQ ID NO: 327875 - DNA, 19 bp, Homo sapiens
  siRNA target sequence for TMEM2 (NM_013390.1,1183-1201).
gcaagcttgggctttagtt

SEQ ID NO: 327876 - DNA, 19 bp, Homo sapiens
  siRNA target sequence for TMEM2 (NM_013390.1,1192-1210).
ggctttagttggtgtcatt

SEQ ID NO: 327877 - DNA, 19 bp, Homo sapiens
  siRNA target sequence for TMEM2 (NM_013390.1,1285-1303).
ccaaagagaattttatact

SEQ ID NO: 327878 - DNA, 19 bp, Homo sapiens
  siRNA target sequence for TMEM2 (NM_013390.1,1321-1339).
ctctgtgacagcttatagt

SEQ ID NO: 327879 - DNA, 19 bp, Homo sapiens
  siRNA target sequence for TMEM2 (NM_013390.1,1323-1341).
ctgtgacagcttatagtga

SEQ ID NO: 327880 - DNA, 19 bp, Homo sapiens
  siRNA target sequence for TMEM2 (NM_013390.1,1325-1343).
gtgacagcttatagtgaat

SEQ ID NO: 327881 - DNA, 19 bp, Homo sapiens
  siRNA target sequence for TMEM2 (NM_013390.1,1329-1347).
cagcttatagtgaatggat

SEQ ID NO: 327882 - DNA, 19 bp, Homo sapiens
  siRNA target sequence for TMEM2 (NM_013390.1,1344-1362).
ggattgaaggcgtttctct

SEQ ID NO: 327883 - DNA, 19 bp, Homo sapiens
  siRNA target sequence for TMEM2 (NM_013390.1,1385-1403).
gtagatggagtgaagctaa

SEQ ID NO: 327884 - DNA, 19 bp, Homo sapiens
  siRNA target sequence for TMEM2 (NM_013390.1,1388-1406).
gatggagtgaagctaaatt

SEQ ID NO: 327885 - DNA, 19 bp, Homo sapiens
  siRNA target sequence for TMEM2 (NM_013390.1,1392-1410).
gagtgaagctaaatttgct

SEQ ID NO: 327886 - DNA, 19 bp, Homo sapiens
  siRNA target sequence for TMEM2 (NM_013390.1,1408-1426).
gctagatgatgttagtagt

SEQ ID NO: 327887 - DNA, 19 bp, Homo sapiens
  siRNA target sequence for TMEM2 (NM_013390.1,1450-1468).
ggtcgcaagcacagactat

SEQ ID NO: 327888 - DNA, 19 bp, Homo sapiens
  siRNA target sequence for TMEM2 (NM_013390.1,1451-1469).
gtcgcaagcacagactatt

SEQ ID NO: 327889 - DNA, 19 bp, Homo sapiens
  siRNA target sequence for TMEM2 (NM_013390.1,1509-1527).
ctgaatgcagccattttca

SEQ ID NO: 327890 - DNA, 19 bp, Homo sapiens
  siRNA target sequence for TMEM2 (NM_013390.1,1518-1536).
gccattttcaggtcaaagt

SEQ ID NO: 327891 - DNA, 19 bp, Homo sapiens
  siRNA target sequence for TMEM2 (NM_013390.1,1520-1538).
cattttcaggtcaaagtca

SEQ ID NO: 327892 - DNA, 19 bp, Homo sapiens
  siRNA target sequence for TMEM2 (NM_013390.1,1558-1576).
gcacatgggtgagatcata

SEQ ID NO: 327893 - DNA, 19 bp, Homo sapiens
  siRNA target sequence for TMEM2 (NM_013390.1,1610-1628).
cttacccggaatattgtga

SEQ ID NO: 327894 - DNA, 19 bp, Homo sapiens
  siRNA target sequence for TMEM2 (NM_013390.1,1648-1666).
ctcatgctacgcagaaaat

SEQ ID NO: 327895 - DNA, 19 bp, Homo sapiens
  siRNA target sequence for TMEM2 (NM_013390.1,1650-1668).
catgctacgcagaaaatca

SEQ ID NO: 327896 - DNA, 19 bp, Homo sapiens
  siRNA target sequence for TMEM2 (NM_013390.1,1661-1679).
gaaaatcagtgccaatttt

SEQ ID NO: 327897 - DNA, 19 bp, Homo sapiens
  siRNA target sequence for TMEM2 (NM_013390.1,1697-1715).
gggggacacattatgataa

SEQ ID NO: 327898 - DNA, 19 bp, Homo sapiens
  siRNA target sequence for TMEM2 (NM_013390.1,1698-1716).
ggggacacattatgataat

SEQ ID NO: 327899 - DNA, 19 bp, Homo sapiens
  siRNA target sequence for TMEM2 (NM_013390.1,1731-1749).
cagtccatctttcttatgt

SEQ ID NO: 327900 - DNA, 19 bp, Homo sapiens
  siRNA target sequence for TMEM2 (NM_013390.1,1780-1798).
ggggcgataccctgttcat

SEQ ID NO: 327901 - DNA, 19 bp, Homo sapiens
  siRNA target sequence for TMEM2 (NM_013390.1,1781-1799).
gggcgataccctgttcatt

SEQ ID NO: 327902 - DNA, 19 bp, Homo sapiens
  siRNA target sequence for TMEM2 (NM_013390.1,1782-1800).
ggcgataccctgttcattt

SEQ ID NO: 327903 - DNA, 19 bp, Homo sapiens
  siRNA target sequence for TMEM2 (NM_013390.1,1783-1801).
gcgataccctgttcatttt

SEQ ID NO: 327904 - DNA, 19 bp, Homo sapiens
  siRNA target sequence for TMEM2 (NM_013390.1,1807-1825).
gtgtggtgacgtggattat

SEQ ID NO: 327905 - DNA, 19 bp, Homo sapiens
  siRNA target sequence for TMEM2 (NM_013390.1,1809-1827).
gtggtgacgtggattataa

SEQ ID NO: 327906 - DNA, 19 bp, Homo sapiens
  siRNA target sequence for TMEM2 (NM_013390.1,1855-1873).
ggacggcctgtctattcat

SEQ ID NO: 327907 - DNA, 19 bp, Homo sapiens
  siRNA target sequence for TMEM2 (NM_013390.1,1906-1924).
gacaaatggcttgctaata

SEQ ID NO: 327908 - DNA, 19 bp, Homo sapiens
  siRNA target sequence for TMEM2 (NM_013390.1,1976-1994).
ggtattgaacagaggaata

SEQ ID NO: 327909 - DNA, 19 bp, Homo sapiens
  siRNA target sequence for TMEM2 (NM_013390.1,2042-2060).
cccaccgataggaacaact

SEQ ID NO: 327910 - DNA, 19 bp, Homo sapiens
  siRNA target sequence for TMEM2 (NM_013390.1,2067-2085).
gtaccaccatgcgagataa

SEQ ID NO: 327911 - DNA, 19 bp, Homo sapiens
  siRNA target sequence for TMEM2 (NM_013390.1,2070-2088).
ccaccatgcgagataaagt

SEQ ID NO: 327912 - DNA, 19 bp, Homo sapiens
  siRNA target sequence for TMEM2 (NM_013390.1,2073-2091).
ccatgcgagataaagtgtt

SEQ ID NO: 327913 - DNA, 19 bp, Homo sapiens
  siRNA target sequence for TMEM2 (NM_013390.1,2120-2138).
gactgtatggctgtttcaa

SEQ ID NO: 327914 - DNA, 19 bp, Homo sapiens
  siRNA target sequence for TMEM2 (NM_013390.1,2153-2171).
catcccaacaataatctga

SEQ ID NO: 327915 - DNA, 19 bp, Homo sapiens
  siRNA target sequence for TMEM2 (NM_013390.1,2156-2174).
cccaacaataatctgatta

SEQ ID NO: 327916 - DNA, 19 bp, Homo sapiens
  siRNA target sequence for TMEM2 (NM_013390.1,2198-2216).
gatgctggaatatggtatt

SEQ ID NO: 327917 - DNA, 19 bp, Homo sapiens
  siRNA target sequence for TMEM2 (NM_013390.1,2254-2272).
gcagctcttggcaaaacca

SEQ ID NO: 327918 - DNA, 19 bp, Homo sapiens
  siRNA target sequence for TMEM2 (NM_013390.1,2351-2369).
gtcaaaacaaccaactcta

SEQ ID NO: 327919 - DNA, 19 bp, Homo sapiens
  siRNA target sequence for TMEM2 (NM_013390.1,2431-2449).
ggatgcaaaccccgaaaaa

SEQ ID NO: 327920 - DNA, 19 bp, Homo sapiens
  siRNA target sequence for TMEM2 (NM_013390.1,2517-2535).
gaggaggagatattatcgt

SEQ ID NO: 327921 - DNA, 19 bp, Homo sapiens
  siRNA target sequence for TMEM2 (NM_013390.1,2671-2689).
gggtggtcagaacaagtat

SEQ ID NO: 327922 - DNA, 19 bp, Homo sapiens
  siRNA target sequence for TMEM2 (NM_013390.1,2673-2691).
gtggtcagaacaagtatgt

SEQ ID NO: 327923 - DNA, 19 bp, Homo sapiens
  siRNA target sequence for TMEM2 (NM_013390.1,2710-2728).
ccagaagcctcgaacatta

SEQ ID NO: 327924 - DNA, 19 bp, Homo sapiens
  siRNA target sequence for TMEM2 (NM_013390.1,2737-2755).
caggacgttcccaattaga

SEQ ID NO: 327925 - DNA, 19 bp, Homo sapiens
  siRNA target sequence for TMEM2 (NM_013390.1,2748-2766).
caattagaggctttcagat

SEQ ID NO: 327926 - DNA, 19 bp, Homo sapiens
  siRNA target sequence for TMEM2 (NM_013390.1,2754-2772).
gaggctttcagatttatga

SEQ ID NO: 327927 - DNA, 19 bp, Homo sapiens
  siRNA target sequence for TMEM2 (NM_013390.1,2841-2859).
caattggcttcctcatgaa

SEQ ID NO: 327928 - DNA, 19 bp, Homo sapiens
  siRNA target sequence for TMEM2 (NM_013390.1,2872-2890).
gataacccccaggaataat

SEQ ID NO: 327929 - DNA, 19 bp, Homo sapiens
  siRNA target sequence for TMEM2 (NM_013390.1,2967-2985).
gtgagatggatggtgataa

SEQ ID NO: 327930 - DNA, 19 bp, Homo sapiens
  siRNA target sequence for TMEM2 (NM_013390.1,2978-2996).
ggtgataagaactccatat

SEQ ID NO: 327931 - DNA, 19 bp, Homo sapiens
  siRNA target sequence for TMEM2 (NM_013390.1,3012-3030).
gctctgtgacaggatacaa

SEQ ID NO: 327932 - DNA, 19 bp, Homo sapiens
  siRNA target sequence for TMEM2 (NM_013390.1,3068-3086).
cgccatccaagctgtgtaa

SEQ ID NO: 327933 - DNA, 19 bp, Homo sapiens
  siRNA target sequence for TMEM2 (NM_013390.1,3070-3088).
ccatccaagctgtgtaaat

SEQ ID NO: 327934 - DNA, 19 bp, Homo sapiens
  siRNA target sequence for TMEM2 (NM_013390.1,3123-3141).
cctatgcacaggtctatgt

SEQ ID NO: 327935 - DNA, 19 bp, Homo sapiens
  siRNA target sequence for TMEM2 (NM_013390.1,3124-3142).
ctatgcacaggtctatgta

SEQ ID NO: 327936 - DNA, 19 bp, Homo sapiens
  siRNA target sequence for TMEM2 (NM_013390.1,3147-3165).
catggagcactcagaatct

SEQ ID NO: 327937 - DNA, 19 bp, Homo sapiens
  siRNA target sequence for TMEM2 (NM_013390.1,3153-3171).
gcactcagaatctttctat

SEQ ID NO: 327938 - DNA, 19 bp, Homo sapiens
  siRNA target sequence for TMEM2 (NM_013390.1,3174-3192).
ccattacacgagatgagta

SEQ ID NO: 327939 - DNA, 19 bp, Homo sapiens
  siRNA target sequence for TMEM2 (NM_013390.1,3175-3193).
cattacacgagatgagtat

SEQ ID NO: 327940 - DNA, 19 bp, Homo sapiens
  siRNA target sequence for TMEM2 (NM_013390.1,3208-3226).
ggtgctccgaggtattaat

SEQ ID NO: 327941 - DNA, 19 bp, Homo sapiens
  siRNA target sequence for TMEM2 (NM_013390.1,3212-3230).
ctccgaggtattaatcaga

SEQ ID NO: 327942 - DNA, 19 bp, Homo sapiens
  siRNA target sequence for TMEM2 (NM_013390.1,3300-3318).
cggcaccacggactacatt

SEQ ID NO: 327943 - DNA, 19 bp, Homo sapiens
  siRNA target sequence for TMEM2 (NM_013390.1,3301-3319).
ggcaccacggactacattt

SEQ ID NO: 327944 - DNA, 19 bp, Homo sapiens
  siRNA target sequence for TMEM2 (NM_013390.1,3303-3321).
caccacggactacatttct

SEQ ID NO: 327945 - DNA, 19 bp, Homo sapiens
  siRNA target sequence for TMEM2 (NM_013390.1,3320-3338).
ctatacctcgtcaacttca

SEQ ID NO: 327946 - DNA, 19 bp, Homo sapiens
  siRNA target sequence for TMEM2 (NM_013390.1,3359-3377).
gttggcctttgctatccat

SEQ ID NO: 327947 - DNA, 19 bp, Homo sapiens
  siRNA target sequence for TMEM2 (NM_013390.1,3363-3381).
gcctttgctatccatcaaa

SEQ ID NO: 327948 - DNA, 19 bp, Homo sapiens
  siRNA target sequence for TMEM2 (NM_013390.1,3365-3383).
ctttgctatccatcaaaca

SEQ ID NO: 327949 - DNA, 19 bp, Homo sapiens
  siRNA target sequence for TMEM2 (NM_013390.1,3378-3396).
caaacacaagttttcaagt

SEQ ID NO: 327950 - DNA, 19 bp, Homo sapiens
  siRNA target sequence for TMEM2 (NM_013390.1,3419-3437).
cagaatggctcattatcca

SEQ ID NO: 327951 - DNA, 19 bp, Homo sapiens
  siRNA target sequence for TMEM2 (NM_013390.1,3426-3444).
gctcattatccaaaatcga

SEQ ID NO: 327952 - DNA, 19 bp, Homo sapiens
  siRNA target sequence for TMEM2 (NM_013390.1,3493-3511).
cgagaggaaattctatttt

SEQ ID NO: 327953 - DNA, 19 bp, Homo sapiens
  siRNA target sequence for TMEM2 (NM_013390.1,3516-3534).
ccagcacggggttactgtt

SEQ ID NO: 327954 - DNA, 19 bp, Homo sapiens
  siRNA target sequence for TMEM2 (NM_013390.1,3517-3535).
cagcacggggttactgttt

SEQ ID NO: 327955 - DNA, 19 bp, Homo sapiens
  siRNA target sequence for TMEM2 (NM_013390.1,3519-3537).
gcacggggttactgttttt

SEQ ID NO: 327956 - DNA, 19 bp, Homo sapiens
  siRNA target sequence for TMEM2 (NM_013390.1,3522-3540).
cggggttactgtttttgta

SEQ ID NO: 327957 - DNA, 19 bp, Homo sapiens
  siRNA target sequence for TMEM2 (NM_013390.1,3585-3603).
ctcagggatgtgaaagagt

SEQ ID NO: 327958 - DNA, 19 bp, Homo sapiens
  siRNA target sequence for TMEM2 (NM_013390.1,3623-3641).
gactcaaaggacatcagta

SEQ ID NO: 327959 - DNA, 19 bp, Homo sapiens
  siRNA target sequence for TMEM2 (NM_013390.1,3656-3674).
gcatacccacagtactaca

SEQ ID NO: 327960 - DNA, 19 bp, Homo sapiens
  siRNA target sequence for TMEM2 (NM_013390.1,3740-3758).
cggcaggtggtgtttacta

SEQ ID NO: 327961 - DNA, 19 bp, Homo sapiens
  siRNA target sequence for TMEM2 (NM_013390.1,3742-3760).
gcaggtggtgtttactagt

SEQ ID NO: 327962 - DNA, 19 bp, Homo sapiens
  siRNA target sequence for TMEM2 (NM_013390.1,3774-3792).
gttacctccctgtgcaatt

SEQ ID NO: 327963 - DNA, 19 bp, Homo sapiens
  siRNA target sequence for TMEM2 (NM_013390.1,3821-3839).
cgtggagacccgtctgtta

SEQ ID NO: 327964 - DNA, 19 bp, Homo sapiens
  siRNA target sequence for TMEM2 (NM_013390.1,3822-3840).
gtggagacccgtctgttat

SEQ ID NO: 327965 - DNA, 19 bp, Homo sapiens
  siRNA target sequence for TMEM2 (NM_013390.1,3845-3863).
gtcaatggcactgacttta

SEQ ID NO: 327966 - DNA, 19 bp, Homo sapiens
  siRNA target sequence for TMEM2 (NM_013390.1,3925-3943).
gacggaaaaaacggttttt

SEQ ID NO: 327967 - DNA, 19 bp, Homo sapiens
  siRNA target sequence for TMEM2 (NM_013390.1,3928-3946).
ggaaaaaacggtttttcct

SEQ ID NO: 327968 - DNA, 19 bp, Homo sapiens
  siRNA target sequence for TMEM2 (NM_013390.1,3958-3976).
cagtcgcattgaagagtat

SEQ ID NO: 327969 - DNA, 19 bp, Homo sapiens
  siRNA target sequence for TMEM2 (NM_013390.1,3960-3978).
gtcgcattgaagagtattt

SEQ ID NO: 327970 - DNA, 19 bp, Homo sapiens
  siRNA target sequence for TMEM2 (NM_013390.1,3991-4009).
ccctccaaggtccattgtt

SEQ ID NO: 327971 - DNA, 19 bp, Homo sapiens
  siRNA target sequence for TMEM2 (NM_013390.1,3996-4014).
caaggtccattgttctgtt

SEQ ID NO: 327972 - DNA, 19 bp, Homo sapiens
  siRNA target sequence for TMEM2 (NM_013390.1,4082-4100).
ccagctcatctttatgaca

SEQ ID NO: 327973 - DNA, 19 bp, Homo sapiens
  siRNA target sequence for TMEM2 (NM_013390.1,4083-4101).
cagctcatctttatgacaa

SEQ ID NO: 327974 - DNA, 19 bp, Homo sapiens
  siRNA target sequence for TMEM2 (NM_013390.1,4097-4115).
gacaaagggagtaccatat

SEQ ID NO: 327975 - DNA, 19 bp, Homo sapiens
  siRNA target sequence for TMEM2 (NM_013390.1,4187-4205).
ggggtgcttgaacaattca

SEQ ID NO: 327976 - DNA, 19 bp, Homo sapiens
  siRNA target sequence for TMEM2 (NM_013390.1,4188-4206).
gggtgcttgaacaattcat

SEQ ID NO: 327977 - DNA, 19 bp, Homo sapiens
  siRNA target sequence for TMEM2 (NM_013390.1,4189-4207).
ggtgcttgaacaattcata

SEQ ID NO: 327978 - DNA, 19 bp, Homo sapiens
  siRNA target sequence for TMEM2 (NM_013390.1,4193-4211).
cttgaacaattcatacctt

SEQ ID NO: 327979 - DNA, 19 bp, Homo sapiens
  siRNA target sequence for TMEM2 (NM_013390.1,4214-4232).
cagctggacgaatatggtt

SEQ ID NO: 327980 - DNA, 19 bp, Homo sapiens
  siRNA target sequence for TMEM7 (NM_031440.1,262-280).
cccaagttctggtcctttt

SEQ ID NO: 327981 - DNA, 19 bp, Homo sapiens
  siRNA target sequence for TMEM7 (NM_031440.1,330-348).
gtgtttacccagagatgta

SEQ ID NO: 327982 - DNA, 19 bp, Homo sapiens
  siRNA target sequence for TMEM7 (NM_031440.1,353-371).
gtgcccccaacctctgttt

SEQ ID NO: 327983 - DNA, 19 bp, Homo sapiens
  siRNA target sequence for TMEM7 (NM_031440.1,355-373).
gcccccaacctctgtttga

SEQ ID NO: 327984 - DNA, 19 bp, Homo sapiens
  siRNA target sequence for TMEM7 (NM_031440.1,501-519).
cttgaagggccacacaata

SEQ ID NO: 327985 - DNA, 19 bp, Homo sapiens
  siRNA target sequence for TMEM7 (NM_031440.1,558-576).
gggcccatacaggttacaa

SEQ ID NO: 327986 - DNA, 19 bp, Homo sapiens
  siRNA target sequence for TMEM7 (NM_031440.1,601-619).
gagtacactccatttacaa

SEQ ID NO: 327987 - DNA, 19 bp, Homo sapiens
  siRNA target sequence for TMEM7 (NM_031440.1,647-665).
ctcaggagagaatgtctat

SEQ ID NO: 327988 - DNA, 19 bp, Homo sapiens
  siRNA target sequence for TMEM7 (NM_031440.1,667-685).
cctacgcatgccaaaacca

SEQ ID NO: 327989 - DNA, 19 bp, Homo sapiens
  siRNA target sequence for TMEM7 (NM_031440.1,683-701).
ccacatctgtaggaactta

SEQ ID NO: 327990 - DNA, 19 bp, Homo sapiens
  siRNA target sequence for TMEM7 (NM_031440.1,737-755).
cgtggtgattgttgtaaaa

SEQ ID NO: 327991 - DNA, 19 bp, Homo sapiens
  siRNA target sequence for TMEM7 (NM_031440.1,747-765).
gttgtaaaaactgctatat

SEQ ID NO: 327992 - DNA, 19 bp, Homo sapiens
  siRNA target sequence for TNMD (NM_022144.1,347-365).
ggccggaggtacccaaaaa

SEQ ID NO: 327993 - DNA, 19 bp, Homo sapiens
  siRNA target sequence for TNMD (NM_022144.1,348-366).
gccggaggtacccaaaaaa

SEQ ID NO: 327994 - DNA, 19 bp, Homo sapiens
  siRNA target sequence for TNMD (NM_022144.1,508-526).
ggatacactggcatctact

SEQ ID NO: 327995 - DNA, 19 bp, Homo sapiens
  siRNA target sequence for TNMD (NM_022144.1,522-540).
ctacttcgtgggtcttcaa

SEQ ID NO: 327996 - DNA, 19 bp, Homo sapiens
  siRNA target sequence for TNMD (NM_022144.1,528-546).
cgtgggtcttcaaaaatgt

SEQ ID NO: 327997 - DNA, 19 bp, Homo sapiens
  siRNA target sequence for TNMD (NM_022144.1,616-634).
gaaattaccacaactttct

SEQ ID NO: 327998 - DNA, 19 bp, Homo sapiens
  siRNA target sequence for TNMD (NM_022144.1,623-641).
ccacaactttctttgaaca

SEQ ID NO: 327999 - DNA, 19 bp, Homo sapiens
  siRNA target sequence for TNMD (NM_022144.1,702-720).
caaaattctggagatttgt

SEQ ID NO: 328000 - DNA, 19 bp, Homo sapiens
  siRNA target sequence for TNMD (NM_022144.1,721-739).
gataacgtgaccatgtatt

SEQ ID NO: 328001 - DNA, 19 bp, Homo sapiens
  siRNA target sequence for TNMD (NM_022144.1,729-747).
gaccatgtattggatcaat

SEQ ID NO: 328002 - DNA, 19 bp, Homo sapiens
  siRNA target sequence for TNMD (NM_022144.1,740-758).
ggatcaatcccactctaat

SEQ ID NO: 328003 - DNA, 19 bp, Homo sapiens
  siRNA target sequence for TNMD (NM_022144.1,741-759).
gatcaatcccactctaata

SEQ ID NO: 328004 - DNA, 19 bp, Homo sapiens
  siRNA target sequence for TNMD (NM_022144.1,744-762).
caatcccactctaatatca

SEQ ID NO: 328005 - DNA, 19 bp, Homo sapiens
  siRNA target sequence for TNMD (NM_022144.1,748-766).
cccactctaatatcagttt

SEQ ID NO: 328006 - DNA, 19 bp, Homo sapiens
  siRNA target sequence for TNMD (NM_022144.1,752-770).
ctctaatatcagtttctga

SEQ ID NO: 328007 - DNA, 19 bp, Homo sapiens
  siRNA target sequence for TNMD (NM_022144.1,910-928).
gaacttccaataaatgact

SEQ ID NO: 328008 - DNA, 19 bp, Homo sapiens
  siRNA target sequence for TNMD (NM_022144.1,913-931).
cttccaataaatgactata

SEQ ID NO: 328009 - DNA, 19 bp, Homo sapiens
  siRNA target sequence for TNMD (NM_022144.1,960-978).
gctggatgagagaggttat

SEQ ID NO: 328010 - DNA, 19 bp, Homo sapiens
  siRNA target sequence for TNMD (NM_022144.1,967-985).
gagagaggttattgttgta

SEQ ID NO: 328011 - DNA, 19 bp, Homo sapiens
  siRNA target sequence for TNMD (NM_022144.1,1019-1037).
gcgtctgtgaacctttact

SEQ ID NO: 328012 - DNA, 19 bp, Homo sapiens
  siRNA target sequence for TNMD (NM_022144.1,1020-1038).
cgtctgtgaacctttacta

SEQ ID NO: 328013 - DNA, 19 bp, Homo sapiens
  siRNA target sequence for TNMD (NM_022144.1,1039-1057).
ggctactacccatatccat

SEQ ID NO: 328014 - DNA, 19 bp, Homo sapiens
  siRNA target sequence for TNMD (NM_022144.1,1040-1058).
gctactacccatatccata

SEQ ID NO: 328015 - DNA, 19 bp, Homo sapiens
  siRNA target sequence for UPK1A (NM_007000.2,61-79).
gttgtgggcaatatcatta

SEQ ID NO: 328016 - DNA, 19 bp, Homo sapiens
  siRNA target sequence for UPK1A (NM_007000.2,128-146).
ccgaccagtaccgtgtata

SEQ ID NO: 328017 - DNA, 19 bp, Homo sapiens
  siRNA target sequence for UPK1A (NM_007000.2,222-240).
cttcatggtagccagtttt

SEQ ID NO: 328018 - DNA, 19 bp, Homo sapiens
  siRNA target sequence for UPK1A (NM_007000.2,447-465).
ctgggaccgcgtcatgatt

SEQ ID NO: 328019 - DNA, 19 bp, Homo sapiens
  siRNA target sequence for UPK1A (NM_007000.2,449-467).
gggaccgcgtcatgattga

SEQ ID NO: 328020 - DNA, 19 bp, Homo sapiens
  siRNA target sequence for UPK1A (NM_007000.2,572-590).
gtcgccggacgggaaactt

SEQ ID NO: 328021 - DNA, 19 bp, Homo sapiens
  siRNA target sequence for UPK1A (NM_007000.2,574-592).
cgccggacgggaaacttca

SEQ ID NO: 328022 - DNA, 19 bp, Homo sapiens
  siRNA target sequence for UPK1A (NM_007000.2,741-759).
catgctgatagccatgtat

SEQ ID NO: 328023 - DNA, 19 bp, Homo sapiens
  siRNA target sequence for UPK1A (NM_007000.2,745-763).
ctgatagccatgtatttct

SEQ ID NO: 328024 - DNA, 19 bp, Homo sapiens
  siRNA target sequence for UPK3A (NM_006953.1,231-249).
gtcgactcagccatttcca

SEQ ID NO: 328025 - DNA, 19 bp, Homo sapiens
  siRNA target sequence for UPK3A (NM_006953.1,292-310).
caacgttcctacaaacaga

SEQ ID NO: 328026 - DNA, 19 bp, Homo sapiens
  siRNA target sequence for UPK3A (NM_006953.1,317-335).
gaggacaggtccctacaaa

SEQ ID NO: 328027 - DNA, 19 bp, Homo sapiens
  siRNA target sequence for UPK3A (NM_006953.1,511-529).
cggagtacaggttcaagta

SEQ ID NO: 328028 - DNA, 19 bp, Homo sapiens
  siRNA target sequence for UPK3A (NM_006953.1,651-669).
ggcatgatcgtcatcactt

SEQ ID NO: 328029 - DNA, 19 bp, Homo sapiens
  siRNA target sequence for UPK3A (NM_006953.1,858-876).
gacagggctgaggtgtatt

SEQ ID NO: 328030 - DNA, 19 bp, Homo sapiens
  siRNA target sequence for VANGL1 (NM_138959.1,15-33).
ggataccgaatccacttat

SEQ ID NO: 328031 - DNA, 19 bp, Homo sapiens
  siRNA target sequence for VANGL1 (NM_138959.1,16-34).
gataccgaatccacttatt

SEQ ID NO: 328032 - DNA, 19 bp, Homo sapiens
  siRNA target sequence for VANGL1 (NM_138959.1,105-123).
caagtcaccccggaataaa

SEQ ID NO: 328033 - DNA, 19 bp, Homo sapiens
  siRNA target sequence for VANGL1 (NM_138959.1,174-192).
gcccctgttgggaaatgat

SEQ ID NO: 328034 - DNA, 19 bp, Homo sapiens
  siRNA target sequence for VANGL1 (NM_138959.1,180-198).
gttgggaaatgattctact

SEQ ID NO: 328035 - DNA, 19 bp, Homo sapiens
  siRNA target sequence for VANGL1 (NM_138959.1,317-335).
gcgtggggctggattgcaa

SEQ ID NO: 328036 - DNA, 19 bp, Homo sapiens
  siRNA target sequence for VANGL1 (NM_138959.1,318-336).
cgtggggctggattgcaaa

SEQ ID NO: 328037 - DNA, 19 bp, Homo sapiens
  siRNA target sequence for VANGL1 (NM_138959.1,348-366).
cctcaccgtcgcctctttt

SEQ ID NO: 328038 - DNA, 19 bp, Homo sapiens
  siRNA target sequence for VANGL1 (NM_138959.1,360-378).
ctcttttcttggacttcta

SEQ ID NO: 328039 - DNA, 19 bp, Homo sapiens
  siRNA target sequence for VANGL1 (NM_138959.1,391-409).
cctattgccttcatccttt

SEQ ID NO: 328040 - DNA, 19 bp, Homo sapiens
  siRNA target sequence for VANGL1 (NM_138959.1,392-410).
ctattgccttcatcctttt

SEQ ID NO: 328041 - DNA, 19 bp, Homo sapiens
  siRNA target sequence for VANGL1 (NM_138959.1,509-527).
ggacctgggcacttttttt

SEQ ID NO: 328042 - DNA, 19 bp, Homo sapiens
  siRNA target sequence for VANGL1 (NM_138959.1,549-567).
gccacgggtgtttgtgttt

SEQ ID NO: 328043 - DNA, 19 bp, Homo sapiens
  siRNA target sequence for VANGL1 (NM_138959.1,562-580).
gtgtttcgtgcccttttgt

SEQ ID NO: 328044 - DNA, 19 bp, Homo sapiens
  siRNA target sequence for VANGL1 (NM_138959.1,644-662).
ctcgggaccggaattacca

SEQ ID NO: 328045 - DNA, 19 bp, Homo sapiens
  siRNA target sequence for VANGL1 (NM_138959.1,663-681).
gggcattgtgcaatatgca

SEQ ID NO: 328046 - DNA, 19 bp, Homo sapiens
  siRNA target sequence for VANGL1 (NM_138959.1,790-808).
ggcgagtcccgcttctaca

SEQ ID NO: 328047 - DNA, 19 bp, Homo sapiens
  siRNA target sequence for VANGL1 (NM_138959.1,939-957).
gaaagtctacaatgtagat

SEQ ID NO: 328048 - DNA, 19 bp, Homo sapiens
  siRNA target sequence for VANGL1 (NM_138959.1,952-970).
gtagatggccccagtaaca

SEQ ID NO: 328049 - DNA, 19 bp, Homo sapiens
  siRNA target sequence for VANGL1 (NM_138959.1,1025-1043).
caagccacaacgagttgta

SEQ ID NO: 328050 - DNA, 19 bp, Homo sapiens
  siRNA target sequence for VANGL1 (NM_138959.1,1028-1046).
gccacaacgagttgtatta

SEQ ID NO: 328051 - DNA, 19 bp, Homo sapiens
  siRNA target sequence for VANGL1 (NM_138959.1,1029-1047).
ccacaacgagttgtattat

SEQ ID NO: 328052 - DNA, 19 bp, Homo sapiens
  siRNA target sequence for VANGL1 (NM_138959.1,1032-1050).
caacgagttgtattatgaa

SEQ ID NO: 328053 - DNA, 19 bp, Homo sapiens
  siRNA target sequence for VANGL1 (NM_138959.1,1060-1078).
catgaacggcgagtaaaga

SEQ ID NO: 328054 - DNA, 19 bp, Homo sapiens
  siRNA target sequence for VANGL1 (NM_138959.1,1217-1235).
ccagggctctccagaagta

SEQ ID NO: 328055 - DNA, 19 bp, Homo sapiens
  siRNA target sequence for VANGL1 (NM_138959.1,1357-1375).
cccaccctgcaatatgaca

SEQ ID NO: 328056 - DNA, 19 bp, Homo sapiens
  siRNA target sequence for VANGL1 (NM_138959.1,1358-1376).
ccaccctgcaatatgacaa

SEQ ID NO: 328057 - DNA, 19 bp, Homo sapiens
  siRNA target sequence for VANGL1 (NM_138959.1,1412-1430).
gtgatgaggctgtgactaa

SEQ ID NO: 328058 - DNA, 19 bp, Homo sapiens
  siRNA target sequence for VANGL1 (NM_138959.1,1433-1451).
gattacgggatggaattgt

SEQ ID NO: 328059 - DNA, 19 bp, Homo sapiens
  siRNA target sequence for VANGL1 (NM_138959.1,1445-1463).
gaattgtgttcgtccttaa

SEQ ID NO: 328060 - DNA, 19 bp, Homo sapiens
  siRNA target sequence for VANGL1 (NM_138959.1,1473-1491).
cttcagcctcgtagtcaat

SEQ ID NO: 328061 - DNA, 19 bp, Homo sapiens
  siRNA target sequence for VANGL1 (NM_138959.1,1478-1496).
gcctcgtagtcaatgtgaa

SEQ ID NO: 328062 - DNA, 19 bp, Homo sapiens
  siRNA target sequence for VANGL1 (NM_138959.1,1497-1515).
gaaaattccattcatcata

SEQ ID NO: 328063 - DNA, 19 bp, Homo sapiens
  siRNA target sequence for VANGL1 (NM_138959.1,1527-1545).
gttcatagaccccaaatct

SEQ ID NO: 328064 - DNA, 19 bp, Homo sapiens
  siRNA target sequence for VANGL1 (NM_138959.1,1534-1552).
gaccccaaatctcacaaat

SEQ ID NO: 328065 - DNA, 19 bp, Homo sapiens
  siRNA target sequence for ZDHHC1 (NM_013304.1,704-722).
gccagcacgcacatgtcat

SEQ ID NO: 328066 - DNA, 19 bp, Homo sapiens
  siRNA target sequence for ZDHHC1 (NM_013304.1,727-745).
gacctgcactgcaacttgt

SEQ ID NO: 328067 - DNA, 19 bp, Homo sapiens
  siRNA target sequence for ZDHHC1 (NM_013304.1,851-869).
ggaactaccggctctttct

SEQ ID NO: 328068 - DNA, 19 bp, Homo sapiens
  siRNA target sequence for ZDHHC1 (NM_013304.1,852-870).
gaactaccggctctttcta

SEQ ID NO: 328069 - DNA, 19 bp, Homo sapiens
  siRNA target sequence for ZDHHC1 (NM_013304.1,875-893).
gtgttgcatccgctttact

SEQ ID NO: 328070 - DNA, 19 bp, Homo sapiens
  siRNA target sequence for ZDHHC1 (NM_013304.1,968-986).
ccaaccgacactttgaagt

SEQ ID NO: 328071 - DNA, 19 bp, Homo sapiens
  siRNA target sequence for ZDHHC1 (NM_013304.1,1405-1423).
caggtggagtgggatagaa

SEQ ID NO: 328072 - DNA, 19 bp, Homo sapiens
  siRNA target sequence for ZDHHC1 (NM_013304.1,1441-1459).
cgctcgcctctgcttcttt

SEQ ID NO: 328073 - DNA, 19 bp, Homo sapiens
  siRNA target sequence for ZDHHC1 (NM_013304.1,1507-1525).
ggaagaggcgcgtgtataa

SEQ ID NO: 328074 - DNA, 19 bp, Homo sapiens
  siRNA target sequence for ZDHHC1 (NM_013304.1,1508-1526).
gaagaggcgcgtgtataaa

SEQ ID NO: 328075 - DNA, 19 bp, Homo sapiens
  siRNA target sequence for ZDHHC11 (NM_024786.1,427-445).
gccatactcaataatgaaa

SEQ ID NO: 328076 - DNA, 19 bp, Homo sapiens
  siRNA target sequence for ZDHHC11 (NM_024786.1,677-695).
ccaatgtcagactcatgaa

SEQ ID NO: 328077 - DNA, 19 bp, Homo sapiens
  siRNA target sequence for ZDHHC11 (NM_024786.1,684-702).
cagactcatgaagaactat

SEQ ID NO: 328078 - DNA, 19 bp, Homo sapiens
  siRNA target sequence for ZDHHC11 (NM_024786.1,715-733).
cccctcttcgacagatcaa

SEQ ID NO: 328079 - DNA, 19 bp, Homo sapiens
  siRNA target sequence for ZDHHC11 (NM_024786.1,720-738).
cttcgacagatcaaaacat

SEQ ID NO: 328080 - DNA, 19 bp, Homo sapiens
  siRNA target sequence for ZDHHC11 (NM_024786.1,777-795).
ggtcaccgtgaacaagaaa

SEQ ID NO: 328081 - DNA, 19 bp, Homo sapiens
  siRNA target sequence for ZDHHC11 (NM_024786.1,778-796).
gtcaccgtgaacaagaaaa

SEQ ID NO: 328082 - DNA, 19 bp, Homo sapiens
  siRNA target sequence for ZDHHC11 (NM_024786.1,807-825).
catttcctgcaataagtgt

SEQ ID NO: 328083 - DNA, 19 bp, Homo sapiens
  siRNA target sequence for ZDHHC11 (NM_024786.1,866-884).
gcgtgggaagccggaatta

SEQ ID NO: 328084 - DNA, 19 bp, Homo sapiens
  siRNA target sequence for ZDHHC11 (NM_024786.1,867-885).
cgtgggaagccggaattat

SEQ ID NO: 328085 - DNA, 19 bp, Homo sapiens
  siRNA target sequence for ZDHHC11 (NM_024786.1,868-886).
gtgggaagccggaattatt

SEQ ID NO: 328086 - DNA, 19 bp, Homo sapiens
  siRNA target sequence for ZDHHC11 (NM_024786.1,871-889).
ggaagccggaattattggt

SEQ ID NO: 328087 - DNA, 19 bp, Homo sapiens
  siRNA target sequence for ZDHHC11 (NM_024786.1,877-895).
cggaattattggttcttct

SEQ ID NO: 328088 - DNA, 19 bp, Homo sapiens
  siRNA target sequence for ZDHHC11 (NM_024786.1,993-1011).
cacggaccccaggtatgaa

SEQ ID NO: 328089 - DNA, 19 bp, Homo sapiens
  siRNA target sequence for ZDHHC11 (NM_024786.1,1073-1091).
ccctgatagtcgtgatcat

SEQ ID NO: 328090 - DNA, 19 bp, Homo sapiens
  siRNA target sequence for ZDHHC12 (NM_032799.3,299-317).
cttcggcgctgcagatact

SEQ ID NO: 328091 - DNA, 19 bp, Homo sapiens
  siRNA target sequence for ZDHHC12 (NM_032799.3,421-439).
gcgcaaccacccactcttt

SEQ ID NO: 328092 - DNA, 19 bp, Homo sapiens
  siRNA target sequence for ZDHHC2 (NM_016353.2,366-384).
gcctgatggcctatcatct

SEQ ID NO: 328093 - DNA, 19 bp, Homo sapiens
  siRNA target sequence for ZDHHC2 (NM_016353.2,367-385).
cctgatggcctatcatcta

SEQ ID NO: 328094 - DNA, 19 bp, Homo sapiens
  siRNA target sequence for ZDHHC2 (NM_016353.2,403-421).
ctggtcatactggaaaact

SEQ ID NO: 328095 - DNA, 19 bp, Homo sapiens
  siRNA target sequence for ZDHHC2 (NM_016353.2,509-527).
gcccatcaggaagttctta

SEQ ID NO: 328096 - DNA, 19 bp, Homo sapiens
  siRNA target sequence for ZDHHC2 (NM_016353.2,631-649).
ctccgtctgtgataaatgt

SEQ ID NO: 328097 - DNA, 19 bp, Homo sapiens
  siRNA target sequence for ZDHHC2 (NM_016353.2,633-651).
ccgtctgtgataaatgtat

SEQ ID NO: 328098 - DNA, 19 bp, Homo sapiens
  siRNA target sequence for ZDHHC2 (NM_016353.2,634-652).
cgtctgtgataaatgtatt

SEQ ID NO: 328099 - DNA, 19 bp, Homo sapiens
  siRNA target sequence for ZDHHC2 (NM_016353.2,761-779).
gcggcaacagatttacagt

SEQ ID NO: 328100 - DNA, 19 bp, Homo sapiens
  siRNA target sequence for ZDHHC2 (NM_016353.2,762-780).
cggcaacagatttacagta

SEQ ID NO: 328101 - DNA, 19 bp, Homo sapiens
  siRNA target sequence for ZDHHC2 (NM_016353.2,763-781).
ggcaacagatttacagtat

SEQ ID NO: 328102 - DNA, 19 bp, Homo sapiens
  siRNA target sequence for ZDHHC2 (NM_016353.2,764-782).
gcaacagatttacagtatt

SEQ ID NO: 328103 - DNA, 19 bp, Homo sapiens
  siRNA target sequence for ZDHHC2 (NM_016353.2,765-783).
caacagatttacagtattt

SEQ ID NO: 328104 - DNA, 19 bp, Homo sapiens
  siRNA target sequence for ZDHHC2 (NM_016353.2,816-834).
ctcaagccaagttccatat

SEQ ID NO: 328105 - DNA, 19 bp, Homo sapiens
  siRNA target sequence for ZDHHC2 (NM_016353.2,821-839).
gccaagttccatattatgt

SEQ ID NO: 328106 - DNA, 19 bp, Homo sapiens
  siRNA target sequence for ZDHHC2 (NM_016353.2,822-840).
ccaagttccatattatgtt

SEQ ID NO: 328107 - DNA, 19 bp, Homo sapiens
  siRNA target sequence for ZDHHC2 (NM_016353.2,823-841).
caagttccatattatgttt

SEQ ID NO: 328108 - DNA, 19 bp, Homo sapiens
  siRNA target sequence for ZDHHC2 (NM_016353.2,826-844).
gttccatattatgttttta

SEQ ID NO: 328109 - DNA, 19 bp, Homo sapiens
  siRNA target sequence for ZDHHC2 (NM_016353.2,903-921).
ggctagtcagcaaaaataa

SEQ ID NO: 328110 - DNA, 19 bp, Homo sapiens
  siRNA target sequence for ZDHHC2 (NM_016353.2,936-954).
cattcagaagtccagtatt

SEQ ID NO: 328111 - DNA, 19 bp, Homo sapiens
  siRNA target sequence for ZDHHC2 (NM_016353.2,956-974).
cgacatggaacagataaga

SEQ ID NO: 328112 - DNA, 19 bp, Homo sapiens
  siRNA target sequence for ZDHHC2 (NM_016353.2,963-981).
gaacagataagaatggatt

SEQ ID NO: 328113 - DNA, 19 bp, Homo sapiens
  siRNA target sequence for ZDHHC2 (NM_016353.2,984-1002).
gcttgggtttcagtaaaaa

SEQ ID NO: 328114 - DNA, 19 bp, Homo sapiens
  siRNA target sequence for ZDHHC2 (NM_016353.2,1003-1021).
catgcgacaagtttttggt

SEQ ID NO: 328115 - DNA, 19 bp, Homo sapiens
  siRNA target sequence for ZDHHC2 (NM_016353.2,1083-1101).
caacttgccttgttaacca

SEQ ID NO: 328116 - DNA, 19 bp, Homo sapiens
  siRNA target sequence for ZDHHC2 (NM_016353.2,1132-1150).
gctgaattccacagctaaa

SEQ ID NO: 328117 - DNA, 19 bp, Homo sapiens
  siRNA target sequence for ZDHHC2 (NM_016353.2,1143-1161).
cagctaaaaatctcgaaaa

SEQ ID NO: 328118 - DNA, 19 bp, Homo sapiens
  siRNA target sequence for ZDHHC2 (NM_016353.2,1198-1216).
gagccaccttcttactgat

SEQ ID NO: 328119 - DNA, 19 bp, Homo sapiens
  siRNA target sequence for ZDHHC2 (NM_016353.2,1272-1290).
gcaatcctgcattaaccat

SEQ ID NO: 328120 - DNA, 19 bp, Homo sapiens
  siRNA target sequence for ZDHHC4 (NM_018106.2,264-282).
ctgatgggtcttgttctta

SEQ ID NO: 328121 - DNA, 19 bp, Homo sapiens
  siRNA target sequence for ZDHHC4 (NM_018106.2,292-310).
gctcgaaaacccatagctt

SEQ ID NO: 328122 - DNA, 19 bp, Homo sapiens
  siRNA target sequence for ZDHHC4 (NM_018106.2,330-348).
ggagcacagatattttcct

SEQ ID NO: 328123 - DNA, 19 bp, Homo sapiens
  siRNA target sequence for ZDHHC4 (NM_018106.2,389-407).
gcttcattaccttttccat

SEQ ID NO: 328124 - DNA, 19 bp, Homo sapiens
  siRNA target sequence for ZDHHC4 (NM_018106.2,465-483).
gagtacacctgggaagtat

SEQ ID NO: 328125 - DNA, 19 bp, Homo sapiens
  siRNA target sequence for ZDHHC4 (NM_018106.2,506-524).
gttgtccttgcattacctt

SEQ ID NO: 328126 - DNA, 19 bp, Homo sapiens
  siRNA target sequence for ZDHHC4 (NM_018106.2,511-529).
ccttgcattaccttcttct

SEQ ID NO: 328127 - DNA, 19 bp, Homo sapiens
  siRNA target sequence for ZDHHC4 (NM_018106.2,543-561).
ctaggtgtaaacctgtttt

SEQ ID NO: 328128 - DNA, 19 bp, Homo sapiens
  siRNA target sequence for ZDHHC4 (NM_018106.2,580-598).
gaaccaatcctggcattat

SEQ ID NO: 328129 - DNA, 19 bp, Homo sapiens
  siRNA target sequence for ZDHHC4 (NM_018106.2,584-602).
caatcctggcattataaca

SEQ ID NO: 328130 - DNA, 19 bp, Homo sapiens
  siRNA target sequence for ZDHHC4 (NM_018106.2,591-609).
ggcattataacaaaagcaa

SEQ ID NO: 328131 - DNA, 19 bp, Homo sapiens
  siRNA target sequence for ZDHHC4 (NM_018106.2,665-683).
cgtgaggtgctctacttgt

SEQ ID NO: 328132 - DNA, 19 bp, Homo sapiens
  siRNA target sequence for ZDHHC4 (NM_018106.2,837-855).
gccaccgtcgccattgtga

SEQ ID NO: 328133 - DNA, 19 bp, Homo sapiens
  siRNA target sequence for ZDHHC4 (NM_018106.2,941-959).
ggacacggtctttcttatt

SEQ ID NO: 328134 - DNA, 19 bp, Homo sapiens
  siRNA target sequence for ZDHHC4 (NM_018106.2,946-964).
cggtctttcttattcagta

SEQ ID NO: 328135 - DNA, 19 bp, Homo sapiens
  siRNA target sequence for ZDHHC4 (NM_018106.2,1157-1175).
ccaagtccaccggaacatt

SEQ ID NO: 328136 - DNA, 19 bp, Homo sapiens
  siRNA target sequence for ZDHHC4 (NM_018106.2,1161-1179).
gtccaccggaacattcact

SEQ ID NO: 328137 - DNA, 19 bp, Homo sapiens
  siRNA target sequence for ZDHHC5 (NM_015457.1,262-280).
ctcccctttacaaaacagt

SEQ ID NO: 328138 - DNA, 19 bp, Homo sapiens
  siRNA target sequence for ZDHHC5 (NM_015457.1,293-311).
catccaggtgcgcatgaaa

SEQ ID NO: 328139 - DNA, 19 bp, Homo sapiens
  siRNA target sequence for ZDHHC5 (NM_015457.1,404-422).
ctgggtgaataactgtatt

SEQ ID NO: 328140 - DNA, 19 bp, Homo sapiens
  siRNA target sequence for ZDHHC5 (NM_015457.1,407-425).
ggtgaataactgtattggt

SEQ ID NO: 328141 - DNA, 19 bp, Homo sapiens
  siRNA target sequence for ZDHHC5 (NM_015457.1,426-444).
cgccggaactaccgttatt

SEQ ID NO: 328142 - DNA, 19 bp, Homo sapiens
  siRNA target sequence for ZDHHC5 (NM_015457.1,427-445).
gccggaactaccgttattt

SEQ ID NO: 328143 - DNA, 19 bp, Homo sapiens
  siRNA target sequence for ZDHHC5 (NM_015457.1,428-446).
ccggaactaccgttatttt

SEQ ID NO: 328144 - DNA, 19 bp, Homo sapiens
  siRNA target sequence for ZDHHC5 (NM_015457.1,429-447).
cggaactaccgttattttt

SEQ ID NO: 328145 - DNA, 19 bp, Homo sapiens
  siRNA target sequence for ZDHHC5 (NM_015457.1,430-448).
ggaactaccgttatttttt

SEQ ID NO: 328146 - DNA, 19 bp, Homo sapiens
  siRNA target sequence for ZDHHC5 (NM_015457.1,493-511).
gctttggcctcctttatgt

SEQ ID NO: 328147 - DNA, 19 bp, Homo sapiens
  siRNA target sequence for ZDHHC5 (NM_015457.1,552-570).
gtcacaatggcagtaatgt

SEQ ID NO: 328148 - DNA, 19 bp, Homo sapiens
  siRNA target sequence for ZDHHC5 (NM_015457.1,554-572).
cacaatggcagtaatgtgt

SEQ ID NO: 328149 - DNA, 19 bp, Homo sapiens
  siRNA target sequence for ZDHHC5 (NM_015457.1,601-619).
ctggcctcacgggatttca

SEQ ID NO: 328150 - DNA, 19 bp, Homo sapiens
  siRNA target sequence for ZDHHC5 (NM_015457.1,638-656).
gggacgcacaaccaatgaa

SEQ ID NO: 328151 - DNA, 19 bp, Homo sapiens
  siRNA target sequence for ZDHHC5 (NM_015457.1,654-672).
gaacaggttacgggtaaat

SEQ ID NO: 328152 - DNA, 19 bp, Homo sapiens
  siRNA target sequence for ZDHHC5 (NM_015457.1,800-818).
cttccttcgaccagaagtt

SEQ ID NO: 328153 - DNA, 19 bp, Homo sapiens
  siRNA target sequence for ZDHHC5 (NM_015457.1,996-1014).
gctactaatgaggatagta

SEQ ID NO: 328154 - DNA, 19 bp, Homo sapiens
  siRNA target sequence for ZDHHC5 (NM_015457.1,1227-1245).
cctacctttggcaaaagtt

SEQ ID NO: 328155 - DNA, 19 bp, Homo sapiens
  siRNA target sequence for ZDHHC5 (NM_015457.1,1314-1332).
gagctgggccagttgcaat

SEQ ID NO: 328156 - DNA, 19 bp, Homo sapiens
  siRNA target sequence for ZDHHC5 (NM_015457.1,1319-1337).
gggccagttgcaatccatt

SEQ ID NO: 328157 - DNA, 19 bp, Homo sapiens
  siRNA target sequence for ZDHHC5 (NM_015457.1,1323-1341).
cagttgcaatccattcgtt

SEQ ID NO: 328158 - DNA, 19 bp, Homo sapiens
  siRNA target sequence for ZDHHC5 (NM_015457.1,1733-1751).
ccatgcccctcgtactagt

SEQ ID NO: 328159 - DNA, 19 bp, Homo sapiens
  siRNA target sequence for ZDHHC5 (NM_015457.1,1734-1752).
catgcccctcgtactagtt

SEQ ID NO: 328160 - DNA, 19 bp, Homo sapiens
  siRNA target sequence for ZDHHC5 (NM_015457.1,1890-1908).
ctgggccgatcgatgtctt

SEQ ID NO: 328161 - DNA, 19 bp, Homo sapiens
  siRNA target sequence for ZDHHC5 (NM_015457.1,1893-1911).
ggccgatcgatgtcttaca

SEQ ID NO: 328162 - DNA, 19 bp, Homo sapiens
  siRNA target sequence for ZDHHC5 (NM_015457.1,2121-2139).
ggtaccacctatgagattt

SEQ ID NO: 328163 - DNA, 19 bp, Homo sapiens
  siRNA target sequence for ZDHHC6 (NM_022494.1,436-454).
ctgttcggttatcaagttt

SEQ ID NO: 328164 - DNA, 19 bp, Homo sapiens
  siRNA target sequence for ZDHHC6 (NM_022494.1,438-456).
gttcggttatcaagtttga

SEQ ID NO: 328165 - DNA, 19 bp, Homo sapiens
  siRNA target sequence for ZDHHC6 (NM_022494.1,441-459).
cggttatcaagtttgaaaa

SEQ ID NO: 328166 - DNA, 19 bp, Homo sapiens
  siRNA target sequence for ZDHHC6 (NM_022494.1,442-460).
ggttatcaagtttgaaaat

SEQ ID NO: 328167 - DNA, 19 bp, Homo sapiens
  siRNA target sequence for ZDHHC6 (NM_022494.1,448-466).
caagtttgaaaatctacaa

SEQ ID NO: 328168 - DNA, 19 bp, Homo sapiens
  siRNA target sequence for ZDHHC6 (NM_022494.1,499-517).
catagcccttggtgttata

SEQ ID NO: 328169 - DNA, 19 bp, Homo sapiens
  siRNA target sequence for ZDHHC6 (NM_022494.1,509-527).
ggtgttatagcaatatgtt

SEQ ID NO: 328170 - DNA, 19 bp, Homo sapiens
  siRNA target sequence for ZDHHC6 (NM_022494.1,512-530).
gttatagcaatatgttcta

SEQ ID NO: 328171 - DNA, 19 bp, Homo sapiens
  siRNA target sequence for ZDHHC6 (NM_022494.1,528-546).
ctaccatggccatgattga

SEQ ID NO: 328172 - DNA, 19 bp, Homo sapiens
  siRNA target sequence for ZDHHC6 (NM_022494.1,545-563).
gactctgtgttgtggtatt

SEQ ID NO: 328173 - DNA, 19 bp, Homo sapiens
  siRNA target sequence for ZDHHC6 (NM_022494.1,556-574).
gtggtattggcccttacat

SEQ ID NO: 328174 - DNA, 19 bp, Homo sapiens
  siRNA target sequence for ZDHHC6 (NM_022494.1,559-577).
gtattggcccttacataca

SEQ ID NO: 328175 - DNA, 19 bp, Homo sapiens
  siRNA target sequence for ZDHHC6 (NM_022494.1,588-606).
gtgtgaatttcatcatgtt

SEQ ID NO: 328176 - DNA, 19 bp, Homo sapiens
  siRNA target sequence for ZDHHC6 (NM_022494.1,590-608).
gtgaatttcatcatgttga

SEQ ID NO: 328177 - DNA, 19 bp, Homo sapiens
  siRNA target sequence for ZDHHC6 (NM_022494.1,615-633).
ggactgtcatgattcttta

SEQ ID NO: 328178 - DNA, 19 bp, Homo sapiens
  siRNA target sequence for ZDHHC6 (NM_022494.1,616-634).
gactgtcatgattctttat

SEQ ID NO: 328179 - DNA, 19 bp, Homo sapiens
  siRNA target sequence for ZDHHC6 (NM_022494.1,680-698).
gggtggaaaccggaaattt

SEQ ID NO: 328180 - DNA, 19 bp, Homo sapiens
  siRNA target sequence for ZDHHC6 (NM_022494.1,682-700).
gtggaaaccggaaatttct

SEQ ID NO: 328181 - DNA, 19 bp, Homo sapiens
  siRNA target sequence for ZDHHC6 (NM_022494.1,716-734).
ctccagtattgtaaagtct

SEQ ID NO: 328182 - DNA, 19 bp, Homo sapiens
  siRNA target sequence for ZDHHC6 (NM_022494.1,726-744).
gtaaagtctgccaagcata

SEQ ID NO: 328183 - DNA, 19 bp, Homo sapiens
  siRNA target sequence for ZDHHC6 (NM_022494.1,745-763).
caaggcaccacgttcacat

SEQ ID NO: 328184 - DNA, 19 bp, Homo sapiens
  siRNA target sequence for ZDHHC6 (NM_022494.1,828-846).
gttgtggttaccaaaatca

SEQ ID NO: 328185 - DNA, 19 bp, Homo sapiens
  siRNA target sequence for ZDHHC6 (NM_022494.1,954-972).
ggtggaacacagtgaagat

SEQ ID NO: 328186 - DNA, 19 bp, Homo sapiens
  siRNA target sequence for ZDHHC6 (NM_022494.1,1019-1037).
ggattagctgcatttgcta

SEQ ID NO: 328187 - DNA, 19 bp, Homo sapiens
  siRNA target sequence for ZDHHC6 (NM_022494.1,1045-1063).
gtttgccttgggattagct

SEQ ID NO: 328188 - DNA, 19 bp, Homo sapiens
  siRNA target sequence for ZDHHC6 (NM_022494.1,1051-1069).
cttgggattagctttagga

SEQ ID NO: 328189 - DNA, 19 bp, Homo sapiens
  siRNA target sequence for ZDHHC6 (NM_022494.1,1156-1174).
gaaggctaaagatcgaatt

SEQ ID NO: 328190 - DNA, 19 bp, Homo sapiens
  siRNA target sequence for ZDHHC6 (NM_022494.1,1299-1317).
gagaaggctgtcaccaata

SEQ ID NO: 328191 - DNA, 19 bp, Homo sapiens
  siRNA target sequence for ZDHHC6 (NM_022494.1,1301-1319).
gaaggctgtcaccaataca

SEQ ID NO: 328192 - DNA, 19 bp, Homo sapiens
  siRNA target sequence for ZDHHC6 (NM_022494.1,1310-1328).
caccaatacagcttaacaa

SEQ ID NO: 328193 - DNA, 19 bp, Homo sapiens
  siRNA target sequence for ZDHHC6 (NM_022494.1,1312-1330).
ccaatacagcttaacaata

SEQ ID NO: 328194 - DNA, 19 bp, Homo sapiens
  siRNA target sequence for ZDHHC6 (NM_022494.1,1320-1338).
gcttaacaatagaacagtt

SEQ ID NO: 328195 - DNA, 19 bp, Homo sapiens
  siRNA target sequence for ZDHHC6 (NM_022494.1,1368-1386).
gtgttcgctataaagtaat

SEQ ID NO: 328196 - DNA, 19 bp, Homo sapiens
  siRNA target sequence for ZDHHC6 (NM_022494.1,1410-1428).
gccctctgaataaaggaat

SEQ ID NO: 328197 - DNA, 19 bp, Homo sapiens
  siRNA target sequence for ZDHHC6 (NM_022494.1,1455-1473).
ccgaagagcctcgaataca

SEQ ID NO: 328198 - DNA, 19 bp, Homo sapiens
  siRNA target sequence for ZDHHC6 (NM_022494.1,1464-1482).
ctcgaatacagctgcaaaa

SEQ ID NO: 328199 - DNA, 19 bp, Homo sapiens
  siRNA target sequence for ZDHHC6 (NM_022494.1,1499-1517).
gccacaagaggtttacgat

SEQ ID NO: 328200 - DNA, 19 bp, Homo sapiens
  siRNA target sequence for ZDHHC6 (NM_022494.1,1500-1518).
ccacaagaggtttacgata

SEQ ID NO: 328201 - DNA, 19 bp, Homo sapiens
  siRNA target sequence for ZDHHC6 (NM_022494.1,1508-1526).
ggtttacgatactggttat

SEQ ID NO: 328202 - DNA, 19 bp, Homo sapiens
  siRNA target sequence for ZDHHC6 (NM_022494.1,1509-1527).
gtttacgatactggttata

SEQ ID NO: 328203 - DNA, 19 bp, Homo sapiens
  siRNA target sequence for ZDHHC6 (NM_022494.1,1519-1537).
ctggttatatggagacaaa

SEQ ID NO: 328204 - DNA, 19 bp, Homo sapiens
  siRNA target sequence for ZDHHC6 (NM_022494.1,1559-1577).
gaaggtgtttcaagaataa

SEQ ID NO: 328205 - DNA, 19 bp, Homo sapiens
  siRNA target sequence for ZDHHC6 (NM_022494.1,1578-1596).
ggggttggttccctagaaa

SEQ ID NO: 328206 - DNA, 19 bp, Homo sapiens
  siRNA target sequence for ZDHHC6 (NM_022494.1,1579-1597).
gggttggttccctagaaaa

SEQ ID NO: 328207 - DNA, 19 bp, Homo sapiens
  siRNA target sequence for ZDHHC6 (NM_022494.1,1580-1598).
ggttggttccctagaaaat

SEQ ID NO: 328208 - DNA, 19 bp, Homo sapiens
  siRNA target sequence for ZDHHC6 (NM_022494.1,1584-1602).
ggttccctagaaaatgtgt

SEQ ID NO: 328209 - DNA, 19 bp, Homo sapiens
  siRNA target sequence for ZDHHC7 (NM_017740.1,535-553).
cagacttcgtggtgacttt

SEQ ID NO: 328210 - DNA, 19 bp, Homo sapiens
  siRNA target sequence for ZDHHC7 (NM_017740.1,594-612).
gtcaacggggtcatcttta

SEQ ID NO: 328211 - DNA, 19 bp, Homo sapiens
  siRNA target sequence for ZDHHC7 (NM_017740.1,684-702).
ggaaacgctacgaaagaat

SEQ ID NO: 328212 - DNA, 19 bp, Homo sapiens
  siRNA target sequence for ZDHHC7 (NM_017740.1,685-703).
gaaacgctacgaaagaata

SEQ ID NO: 328213 - DNA, 19 bp, Homo sapiens
  siRNA target sequence for ZDHHC7 (NM_017740.1,830-848).
ctgcccgtgggtgaacaat

SEQ ID NO: 328214 - DNA, 19 bp, Homo sapiens
  siRNA target sequence for ZDHHC7 (NM_017740.1,912-930).
gtccatgctctgatccttt

SEQ ID NO: 328215 - DNA, 19 bp, Homo sapiens
  siRNA target sequence for ZDHHC7 (NM_017740.1,957-975).
cgagggcagtggactgaat

SEQ ID NO: 328216 - DNA, 19 bp, Homo sapiens
  siRNA target sequence for ZDHHC7 (NM_017740.1,988-1006).
cacctccgataactgtaat

SEQ ID NO: 328217 - DNA, 19 bp, Homo sapiens
  siRNA target sequence for ZDHHC7 (NM_017740.1,991-1009).
ctccgataactgtaatcct

SEQ ID NO: 328218 - DNA, 19 bp, Homo sapiens
  siRNA target sequence for ZDHHC7 (NM_017740.1,1031-1049).
gggtcttctgtttttcact

SEQ ID NO: 328219 - DNA, 19 bp, Homo sapiens
  siRNA target sequence for ZDHHC7 (NM_017740.1,1102-1120).
cggagatcgagcgattgaa

SEQ ID NO: 328220 - DNA, 19 bp, Homo sapiens
  siRNA target sequence for ZDHHC7 (NM_017740.1,1106-1124).
gatcgagcgattgaaaagt

SEQ ID NO: 328221 - DNA, 19 bp, Homo sapiens
  siRNA target sequence for ZDHHC7 (NM_017740.1,1238-1256).
gcccacgagacccagaaaa

SEQ ID NO: 328222 - DNA, 19 bp, Homo sapiens
  siRNA target sequence for ZDHHC8 (NM_013373.1,132-150).
ctcaaacccgccaagtaca

SEQ ID NO: 328223 - DNA, 19 bp, Homo sapiens
  siRNA target sequence for ZDHHC8 (NM_013373.1,366-384).
cgggctccgctgtacaaga

SEQ ID NO: 328224 - DNA, 19 bp, Homo sapiens
  siRNA target sequence for ZDHHC8 (NM_013373.1,367-385).
gggctccgctgtacaagaa

SEQ ID NO: 328225 - DNA, 19 bp, Homo sapiens
  siRNA target sequence for ZDHHC8 (NM_013373.1,424-442).
gtgccacgtgccacttcta

SEQ ID NO: 328226 - DNA, 19 bp, Homo sapiens
  siRNA target sequence for ZDHHC8 (NM_013373.1,526-544).
gcatcgggcgtcgaaacta

SEQ ID NO: 328227 - DNA, 19 bp, Homo sapiens
  siRNA target sequence for ZDHHC8 (NM_013373.1,527-545).
catcgggcgtcgaaactat

SEQ ID NO: 328228 - DNA, 19 bp, Homo sapiens
  siRNA target sequence for ZDHHC8 (NM_013373.1,538-556).
gaaactatcgctacttctt

SEQ ID NO: 328229 - DNA, 19 bp, Homo sapiens
  siRNA target sequence for ZDHHC8 (NM_013373.1,885-903).
ccgctcgcggtgagtttga

SEQ ID NO: 328230 - DNA, 19 bp, Homo sapiens
  siRNA target sequence for ZDHHC8 (NM_013373.1,1161-1179).
cctgccatgtacaagttta

SEQ ID NO: 328231 - DNA, 19 bp, Homo sapiens
  siRNA target sequence for ZDHHC8 (NM_013373.1,2341-2359).
cacggcacacgctggttaa

SEQ ID NO: 328232 - DNA, 19 bp, Homo sapiens
  siRNA target sequence for ZDHHC8 (NM_013373.1,2343-2361).
cggcacacgctggttaaga

SEQ ID NO: 328233 - DNA, 19 bp, Homo sapiens
  siRNA target sequence for ZDHHC8 (NM_013373.1,2344-2362).
ggcacacgctggttaagaa

SEQ ID NO: 328234 - DNA, 19 bp, Homo sapiens
  siRNA target sequence for ZDHHC9 (NM_016032.1,314-332).
gagcaggaattccaatcat

SEQ ID NO: 328235 - DNA, 19 bp, Homo sapiens
  siRNA target sequence for ZDHHC9 (NM_016032.1,385-403).
ggcaggaacaccttttgct

SEQ ID NO: 328236 - DNA, 19 bp, Homo sapiens
  siRNA target sequence for ZDHHC9 (NM_016032.1,594-612).
cagtgaccctggagtgatt

SEQ ID NO: 328237 - DNA, 19 bp, Homo sapiens
  siRNA target sequence for ZDHHC9 (NM_016032.1,626-644).
cagatgaagcagctttcat

SEQ ID NO: 328238 - DNA, 19 bp, Homo sapiens
  siRNA target sequence for ZDHHC9 (NM_016032.1,651-669).
ggagatagaagctaccaat

SEQ ID NO: 328239 - DNA, 19 bp, Homo sapiens
  siRNA target sequence for ZDHHC9 (NM_016032.1,692-710).
gaccaccgcctcgtatcaa

SEQ ID NO: 328240 - DNA, 19 bp, Homo sapiens
  siRNA target sequence for ZDHHC9 (NM_016032.1,695-713).
caccgcctcgtatcaagaa

SEQ ID NO: 328241 - DNA, 19 bp, Homo sapiens
  siRNA target sequence for ZDHHC9 (NM_016032.1,697-715).
ccgcctcgtatcaagaatt

SEQ ID NO: 328242 - DNA, 19 bp, Homo sapiens
  siRNA target sequence for ZDHHC9 (NM_016032.1,698-716).
cgcctcgtatcaagaattt

SEQ ID NO: 328243 - DNA, 19 bp, Homo sapiens
  siRNA target sequence for ZDHHC9 (NM_016032.1,940-958).
gtctatgtggccctcaaat

SEQ ID NO: 328244 - DNA, 19 bp, Homo sapiens
  siRNA target sequence for ZDHHC9 (NM_016032.1,1148-1166).
cctacagccatggcaatat

SEQ ID NO: 328245 - DNA, 19 bp, Homo sapiens
  siRNA target sequence for ZDHHC9 (NM_016032.1,1154-1172).
gccatggcaatattgtgaa

SEQ ID NO: 328246 - DNA, 19 bp, Homo sapiens
  siRNA target sequence for ZDHHC9 (NM_016032.1,1159-1177).
ggcaatattgtgaagaact

SEQ ID NO: 328247 - DNA, 19 bp, Homo sapiens
  siRNA target sequence for ZDHHC9 (NM_016032.1,1216-1234).
ctggatcgaaggggtattt

SEQ ID NO: 328248 - DNA, 19 bp, Homo sapiens
  siRNA target sequence for SNAP91 (NM_014841.1,324-342).
caaagccactactcatgaa

SEQ ID NO: 328249 - DNA, 19 bp, Homo sapiens
  siRNA target sequence for SNAP91 (NM_014841.1,389-407).
ccaacgagaccaatgttaa

SEQ ID NO: 328250 - DNA, 19 bp, Homo sapiens
  siRNA target sequence for SNAP91 (NM_014841.1,390-408).
caacgagaccaatgttaat

SEQ ID NO: 328251 - DNA, 19 bp, Homo sapiens
  siRNA target sequence for SNAP91 (NM_014841.1,474-492).
ggctttagtgacaacacat

SEQ ID NO: 328252 - DNA, 19 bp, Homo sapiens
  siRNA target sequence for SNAP91 (NM_014841.1,534-552).
ggcttctagaaatacacta

SEQ ID NO: 328253 - DNA, 19 bp, Homo sapiens
  siRNA target sequence for SNAP91 (NM_014841.1,589-607).
catggttatgatatgtcta

SEQ ID NO: 328254 - DNA, 19 bp, Homo sapiens
  siRNA target sequence for SNAP91 (NM_014841.1,598-616).
gatatgtctaccttcataa

SEQ ID NO: 328255 - DNA, 19 bp, Homo sapiens
  siRNA target sequence for SNAP91 (NM_014841.1,609-627).
cttcataaggcgctatagt

SEQ ID NO: 328256 - DNA, 19 bp, Homo sapiens
  siRNA target sequence for SNAP91 (NM_014841.1,612-630).
cataaggcgctatagtaga

SEQ ID NO: 328257 - DNA, 19 bp, Homo sapiens
  siRNA target sequence for SNAP91 (NM_014841.1,793-811).
catccaaatgaactaacaa

SEQ ID NO: 328258 - DNA, 19 bp, Homo sapiens
  siRNA target sequence for SNAP91 (NM_014841.1,872-890).
gctacaatgatggtgttat

SEQ ID NO: 328259 - DNA, 19 bp, Homo sapiens
  siRNA target sequence for SNAP91 (NM_014841.1,873-891).
ctacaatgatggtgttatt

SEQ ID NO: 328260 - DNA, 19 bp, Homo sapiens
  siRNA target sequence for SNAP91 (NM_014841.1,943-961).
ctagaaatttacaaacgat

SEQ ID NO: 328261 - DNA, 19 bp, Homo sapiens
  siRNA target sequence for SNAP91 (NM_014841.1,958-976).
cgatttctaactagaatga

SEQ ID NO: 328262 - DNA, 19 bp, Homo sapiens
  siRNA target sequence for SNAP91 (NM_014841.1,979-997).
cgagtgtctgaatttctca

SEQ ID NO: 328263 - DNA, 19 bp, Homo sapiens
  siRNA target sequence for SNAP91 (NM_014841.1,1132-1150).
ggtgctccctctccattaa

SEQ ID NO: 328264 - DNA, 19 bp, Homo sapiens
  siRNA target sequence for SNAP91 (NM_014841.1,1136-1154).
ctccctctccattaagtaa

SEQ ID NO: 328265 - DNA, 19 bp, Homo sapiens
  siRNA target sequence for SNAP91 (NM_014841.1,1138-1156).
ccctctccattaagtaagt

SEQ ID NO: 328266 - DNA, 19 bp, Homo sapiens
  siRNA target sequence for SNAP91 (NM_014841.1,1140-1158).
ctctccattaagtaagtct

SEQ ID NO: 328267 - DNA, 19 bp, Homo sapiens
  siRNA target sequence for SNAP91 (NM_014841.1,1174-1192).
gttacgtctcctaattcta

SEQ ID NO: 328268 - DNA, 19 bp, Homo sapiens
  siRNA target sequence for SNAP91 (NM_014841.1,1193-1211).
caccagctaaaactattga

SEQ ID NO: 328269 - DNA, 19 bp, Homo sapiens
  siRNA target sequence for SNAP91 (NM_014841.1,1195-1213).
ccagctaaaactattgaca

SEQ ID NO: 328270 - DNA, 19 bp, Homo sapiens
  siRNA target sequence for SNAP91 (NM_014841.1,1217-1235).
ccccaccggttgatttatt

SEQ ID NO: 328271 - DNA, 19 bp, Homo sapiens
  siRNA target sequence for SNAP91 (NM_014841.1,1255-1273).
gtcccagtcagcacttcta

SEQ ID NO: 328272 - DNA, 19 bp, Homo sapiens
  siRNA target sequence for SNAP91 (NM_014841.1,1266-1284).
cacttctaaaccatctagt

SEQ ID NO: 328273 - DNA, 19 bp, Homo sapiens
  siRNA target sequence for SNAP91 (NM_014841.1,1294-1312).
gacctccagccagactttt

SEQ ID NO: 328274 - DNA, 19 bp, Homo sapiens
  siRNA target sequence for SNAP91 (NM_014841.1,1440-1458).
gatttcagatccatttgca

SEQ ID NO: 328275 - DNA, 19 bp, Homo sapiens
  siRNA target sequence for SNAP91 (NM_014841.1,1518-1536).
cactactacaactgttact

SEQ ID NO: 328276 - DNA, 19 bp, Homo sapiens
  siRNA target sequence for SNAP91 (NM_014841.1,1717-1735).
gagctggacctctttgcaa

SEQ ID NO: 328277 - DNA, 19 bp, Homo sapiens
  siRNA target sequence for SNAP91 (NM_014841.1,1912-1930).
gctcctcctgctctagata

SEQ ID NO: 328278 - DNA, 19 bp, Homo sapiens
  siRNA target sequence for SNAP91 (NM_014841.1,1913-1931).
ctcctcctgctctagatat

SEQ ID NO: 328279 - DNA, 19 bp, Homo sapiens
  siRNA target sequence for SNAP91 (NM_014841.1,1916-1934).
ctcctgctctagatatctt

SEQ ID NO: 328280 - DNA, 19 bp, Homo sapiens
  siRNA target sequence for SNAP91 (NM_014841.1,1993-2011).
cctagcatagacctgttta

SEQ ID NO: 328281 - DNA, 19 bp, Homo sapiens
  siRNA target sequence for SNAP91 (NM_014841.1,1998-2016).
catagacctgtttagtaca

SEQ ID NO: 328282 - DNA, 19 bp, Homo sapiens
  siRNA target sequence for SNAP91 (NM_014841.1,2070-2088).
cactgctgacctcttatct

SEQ ID NO: 328283 - DNA, 19 bp, Homo sapiens
  siRNA target sequence for SNAP91 (NM_014841.1,2072-2090).
ctgctgacctcttatctgt

SEQ ID NO: 328284 - DNA, 19 bp, Homo sapiens
  siRNA target sequence for SNAP91 (NM_014841.1,2142-2160).
ggattcttcaggtgtcata

SEQ ID NO: 328285 - DNA, 19 bp, Homo sapiens
  siRNA target sequence for SNAP91 (NM_014841.1,2150-2168).
caggtgtcatagacctttt

SEQ ID NO: 328286 - DNA, 19 bp, Homo sapiens
  siRNA target sequence for SNAP91 (NM_014841.1,2316-2334).
cctgctacagcccaatttt

SEQ ID NO: 328287 - DNA, 19 bp, Homo sapiens
  siRNA target sequence for SNAP91 (NM_014841.1,2401-2419).
ggtctaggtgatcttttga

SEQ ID NO: 328288 - DNA, 19 bp, Homo sapiens
  siRNA target sequence for SNAP91 (NM_014841.1,2402-2420).
gtctaggtgatcttttgat

SEQ ID NO: 328289 - DNA, 19 bp, Homo sapiens
  siRNA target sequence for SNAP91 (NM_014841.1,2529-2547).
cagcttagtaggcaatctt

SEQ ID NO: 328290 - DNA, 19 bp, Homo sapiens
  siRNA target sequence for SNAP91 (NM_014841.1,2536-2554).
gtaggcaatcttggaattt

SEQ ID NO: 328291 - DNA, 19 bp, Homo sapiens
  siRNA target sequence for SNAP91 (NM_014841.1,2929-2947).
gacccattagcggatctta

SEQ ID NO: 328292 - DNA, 19 bp, Homo sapiens
  siRNA target sequence for SNAP91 (NM_014841.1,2932-2950).
ccattagcggatcttaaca

SEQ ID NO: 328293 - DNA, 19 bp, Homo sapiens
  siRNA target sequence for SNAP91 (NM_014841.1,2933-2951).
cattagcggatcttaacat

SEQ ID NO: 328294 - DNA, 19 bp, Homo sapiens
  siRNA target sequence for SNAP91 (NM_014841.1,2941-2959).
gatcttaacatcaaggatt

SEQ ID NO: 328295 - DNA, 19 bp, Homo sapiens
  siRNA target sequence for MAGEA1 (NM_004988.3,446-464).
gggccaagcacctcttgta

SEQ ID NO: 328296 - DNA, 19 bp, Homo sapiens
  siRNA target sequence for MAGEA1 (NM_004988.3,447-465).
ggccaagcacctcttgtat

SEQ ID NO: 328297 - DNA, 19 bp, Homo sapiens
  siRNA target sequence for MAGEA1 (NM_004988.3,474-492).
ccttgttccgagcagtaat

SEQ ID NO: 328298 - DNA, 19 bp, Homo sapiens
  siRNA target sequence for MAGEA1 (NM_004988.3,482-500).
cgagcagtaatcactaaga

SEQ ID NO: 328299 - DNA, 19 bp, Homo sapiens
  siRNA target sequence for MAGEA1 (NM_004988.3,1047-1065).
gtgcaagagttcgcttttt

SEQ ID NO: 328300 - DNA, 19 bp, Homo sapiens
  siRNA target sequence for SSFA2 (NM_006751.3,383-401).
gcctcactggatgaacaaa

SEQ ID NO: 328301 - DNA, 19 bp, Homo sapiens
  siRNA target sequence for SSFA2 (NM_006751.3,476-494).
gccaaccacctccatgaaa

SEQ ID NO: 328302 - DNA, 19 bp, Homo sapiens
  siRNA target sequence for SSFA2 (NM_006751.3,540-558).
gaagattacagtttcatca

SEQ ID NO: 328303 - DNA, 19 bp, Homo sapiens
  siRNA target sequence for SSFA2 (NM_006751.3,557-575).
cagaaagggagaagtatga

SEQ ID NO: 328304 - DNA, 19 bp, Homo sapiens
  siRNA target sequence for SSFA2 (NM_006751.3,559-577).
gaaagggagaagtatgaat

SEQ ID NO: 328305 - DNA, 19 bp, Homo sapiens
  siRNA target sequence for SSFA2 (NM_006751.3,602-620).
gggacagtttcaagtgttt

SEQ ID NO: 328306 - DNA, 19 bp, Homo sapiens
  siRNA target sequence for SSFA2 (NM_006751.3,681-699).
gacgtgatgaaccagatat

SEQ ID NO: 328307 - DNA, 19 bp, Homo sapiens
  siRNA target sequence for SSFA2 (NM_006751.3,693-711).
cagatattgcttctaaaat

SEQ ID NO: 328308 - DNA, 19 bp, Homo sapiens
  siRNA target sequence for SSFA2 (NM_006751.3,743-761).
gccaaagggatagatatta

SEQ ID NO: 328309 - DNA, 19 bp, Homo sapiens
  siRNA target sequence for SSFA2 (NM_006751.3,744-762).
ccaaagggatagatattaa

SEQ ID NO: 328310 - DNA, 19 bp, Homo sapiens
  siRNA target sequence for SSFA2 (NM_006751.3,784-802).
gcaacggatggaagtagaa

SEQ ID NO: 328311 - DNA, 19 bp, Homo sapiens
  siRNA target sequence for SSFA2 (NM_006751.3,785-803).
caacggatggaagtagaaa

SEQ ID NO: 328312 - DNA, 19 bp, Homo sapiens
  siRNA target sequence for SSFA2 (NM_006751.3,822-840).
caagccgttttcgtcaaat

SEQ ID NO: 328313 - DNA, 19 bp, Homo sapiens
  siRNA target sequence for SSFA2 (NM_006751.3,825-843).
gccgttttcgtcaaattga

SEQ ID NO: 328314 - DNA, 19 bp, Homo sapiens
  siRNA target sequence for SSFA2 (NM_006751.3,826-844).
ccgttttcgtcaaattgaa

SEQ ID NO: 328315 - DNA, 19 bp, Homo sapiens
  siRNA target sequence for SSFA2 (NM_006751.3,836-854).
caaattgaagtgcttacta

SEQ ID NO: 328316 - DNA, 19 bp, Homo sapiens
  siRNA target sequence for SSFA2 (NM_006751.3,857-875).
gtggccaatgcgttttctt

SEQ ID NO: 328317 - DNA, 19 bp, Homo sapiens
  siRNA target sequence for SSFA2 (NM_006751.3,897-915).
ggacgcccctgcagagaat

SEQ ID NO: 328318 - DNA, 19 bp, Homo sapiens
  siRNA target sequence for SSFA2 (NM_006751.3,898-916).
gacgcccctgcagagaatt

SEQ ID NO: 328319 - DNA, 19 bp, Homo sapiens
  siRNA target sequence for SSFA2 (NM_006751.3,908-926).
cagagaattggaagtatgt

SEQ ID NO: 328320 - DNA, 19 bp, Homo sapiens
  siRNA target sequence for SSFA2 (NM_006751.3,963-981).
cacctttaactcgaagtaa

SEQ ID NO: 328321 - DNA, 19 bp, Homo sapiens
  siRNA target sequence for SSFA2 (NM_006751.3,965-983).
cctttaactcgaagtaaca

SEQ ID NO: 328322 - DNA, 19 bp, Homo sapiens
  siRNA target sequence for SSFA2 (NM_006751.3,984-1002).
ctgcaaatcgtttaatgaa

SEQ ID NO: 328323 - DNA, 19 bp, Homo sapiens
  siRNA target sequence for SSFA2 (NM_006751.3,1173-1191).
ctatgttggctacagttaa

SEQ ID NO: 328324 - DNA, 19 bp, Homo sapiens
  siRNA target sequence for SSFA2 (NM_006751.3,1224-1242).
cggagaatgctgatagtga

SEQ ID NO: 328325 - DNA, 19 bp, Homo sapiens
  siRNA target sequence for SSFA2 (NM_006751.3,1232-1250).
gctgatagtgatagaattt

SEQ ID NO: 328326 - DNA, 19 bp, Homo sapiens
  siRNA target sequence for SSFA2 (NM_006751.3,1330-1348).
gggtgaggaatctggtatt

SEQ ID NO: 328327 - DNA, 19 bp, Homo sapiens
  siRNA target sequence for SSFA2 (NM_006751.3,1332-1350).
gtgaggaatctggtattgt

SEQ ID NO: 328328 - DNA, 19 bp, Homo sapiens
  siRNA target sequence for SSFA2 (NM_006751.3,1336-1354).
ggaatctggtattgtagaa

SEQ ID NO: 328329 - DNA, 19 bp, Homo sapiens
  siRNA target sequence for SSFA2 (NM_006751.3,1341-1359).
ctggtattgtagaatccaa

SEQ ID NO: 328330 - DNA, 19 bp, Homo sapiens
  siRNA target sequence for SSFA2 (NM_006751.3,1343-1361).
ggtattgtagaatccaaat

SEQ ID NO: 328331 - DNA, 19 bp, Homo sapiens
  siRNA target sequence for SSFA2 (NM_006751.3,1356-1374).
ccaaattagatagtgattt

SEQ ID NO: 328332 - DNA, 19 bp, Homo sapiens
  siRNA target sequence for SSFA2 (NM_006751.3,1364-1382).
gatagtgatttcaacatat

SEQ ID NO: 328333 - DNA, 19 bp, Homo sapiens
  siRNA target sequence for SSFA2 (NM_006751.3,1463-1481).
ctgacaataccatccataa

SEQ ID NO: 328334 - DNA, 19 bp, Homo sapiens
  siRNA target sequence for SSFA2 (NM_006751.3,1465-1483).
gacaataccatccataaga

SEQ ID NO: 328335 - DNA, 19 bp, Homo sapiens
  siRNA target sequence for SSFA2 (NM_006751.3,1504-1522).
ggactccttcgaaatggaa

SEQ ID NO: 328336 - DNA, 19 bp, Homo sapiens
  siRNA target sequence for SSFA2 (NM_006751.3,1590-1608).
cgaaaagagatcatctgtt

SEQ ID NO: 328337 - DNA, 19 bp, Homo sapiens
  siRNA target sequence for SSFA2 (NM_006751.3,1663-1681).
ctgcctatcccttaatcat

SEQ ID NO: 328338 - DNA, 19 bp, Homo sapiens
  siRNA target sequence for SSFA2 (NM_006751.3,1665-1683).
gcctatcccttaatcatct

SEQ ID NO: 328339 - DNA, 19 bp, Homo sapiens
  siRNA target sequence for SSFA2 (NM_006751.3,1712-1730).
gggagtagtgctgatagtt

SEQ ID NO: 328340 - DNA, 19 bp, Homo sapiens
  siRNA target sequence for SSFA2 (NM_006751.3,1714-1732).
gagtagtgctgatagttgt

SEQ ID NO: 328341 - DNA, 19 bp, Homo sapiens
  siRNA target sequence for SSFA2 (NM_006751.3,2417-2435).
ccttccttcacctataagt
